United States Patent Application Publication US 2014/0004565 A1 - sequence listing, part 72

SEQ ID NO: 1752547 - RNA, 19 nt, Artificial Sequence
  Description of Artificial Sequence: Synthetic oligonucleotide
ugaugacagaaggaccgua

SEQ ID NO: 1752548 - RNA, 19 nt, Artificial Sequence
  Description of Artificial Sequence: Synthetic oligonucleotide
guuggaggcaaaucuuccu

SEQ ID NO: 1752549 - RNA, 19 nt, Artificial Sequence
  Description of Artificial Sequence: Synthetic oligonucleotide
uggcagaaccucucuggau

SEQ ID NO: 1752550 - RNA, 19 nt, Artificial Sequence
  Description of Artificial Sequence: Synthetic oligonucleotide
agcugcacuuguaugguau

SEQ ID NO: 1752551 - RNA, 19 nt, Artificial Sequence
  Description of Artificial Sequence: Synthetic oligonucleotide
cuucccucuuggacugggc

SEQ ID NO: 1752552 - RNA, 19 nt, Artificial Sequence
  Description of Artificial Sequence: Synthetic oligonucleotide
acggugagagcuucccaau

SEQ ID NO: 1752553 - RNA, 19 nt, Artificial Sequence
  Description of Artificial Sequence: Synthetic oligonucleotide
aaggaacucccaggagaca

SEQ ID NO: 1752554 - RNA, 19 nt, Artificial Sequence
  Description of Artificial Sequence: Synthetic oligonucleotide
gguaagggcacggcauggg

SEQ ID NO: 1752555 - RNA, 19 nt, Artificial Sequence
  Description of Artificial Sequence: Synthetic oligonucleotide
gaugaccaauuaaccacaa

SEQ ID NO: 1752556 - RNA, 19 nt, Artificial Sequence
  Description of Artificial Sequence: Synthetic oligonucleotide
ccggacuggaagaagugac

SEQ ID NO: 1752557 - RNA, 19 nt, Artificial Sequence
  Description of Artificial Sequence: Synthetic oligonucleotide
gauuggcuucccucuugga

SEQ ID NO: 1752558 - RNA, 19 nt, Artificial Sequence
  Description of Artificial Sequence: Synthetic oligonucleotide
cacaaucagaacaggaauu

SEQ ID NO: 1752559 - RNA, 19 nt, Artificial Sequence
  Description of Artificial Sequence: Synthetic oligonucleotide
cagguacacagacaaggaa

SEQ ID NO: 1752560 - RNA, 19 nt, Artificial Sequence
  Description of Artificial Sequence: Synthetic oligonucleotide
ccaaggaaauaacaucuga

SEQ ID NO: 1752561 - RNA, 19 nt, Artificial Sequence
  Description of Artificial Sequence: Synthetic oligonucleotide
gagggaccugaaggcaggg

SEQ ID NO: 1752562 - RNA, 19 nt, Artificial Sequence
  Description of Artificial Sequence: Synthetic oligonucleotide
uggacggcugggccucuug

SEQ ID NO: 1752563 - RNA, 19 nt, Artificial Sequence
  Description of Artificial Sequence: Synthetic oligonucleotide
gguggccgaggugacaggg

SEQ ID NO: 1752564 - RNA, 19 nt, Artificial Sequence
  Description of Artificial Sequence: Synthetic oligonucleotide
gcugacuccauugcagggc

SEQ ID NO: 1752565 - RNA, 19 nt, Artificial Sequence
  Description of Artificial Sequence: Synthetic oligonucleotide
aagggucccugcgguuaac

SEQ ID NO: 1752566 - RNA, 19 nt, Artificial Sequence
  Description of Artificial Sequence: Synthetic oligonucleotide
agacuucguagaagggcag

SEQ ID NO: 1752567 - RNA, 19 nt, Artificial Sequence
  Description of Artificial Sequence: Synthetic oligonucleotide
cucugauuggcuucccucu

SEQ ID NO: 1752568 - RNA, 19 nt, Artificial Sequence
  Description of Artificial Sequence: Synthetic oligonucleotide
augcgaggguggugggccg

SEQ ID NO: 1752569 - RNA, 19 nt, Artificial Sequence
  Description of Artificial Sequence: Synthetic oligonucleotide
agaagggucccugcgguua

SEQ ID NO: 1752570 - RNA, 19 nt, Artificial Sequence
  Description of Artificial Sequence: Synthetic oligonucleotide
gaccgccggccacucagag

SEQ ID NO: 1752571 - RNA, 19 nt, Artificial Sequence
  Description of Artificial Sequence: Synthetic oligonucleotide
guagaagggcagcgguuuc

SEQ ID NO: 1752572 - RNA, 19 nt, Artificial Sequence
  Description of Artificial Sequence: Synthetic oligonucleotide
acggucagaagggucccug

SEQ ID NO: 1752573 - RNA, 19 nt, Artificial Sequence
  Description of Artificial Sequence: Synthetic oligonucleotide
agacagaaccuuagcugca

SEQ ID NO: 1752574 - RNA, 19 nt, Artificial Sequence
  Description of Artificial Sequence: Synthetic oligonucleotide
ggaguggagcuacggugag

SEQ ID NO: 1752575 - RNA, 19 nt, Artificial Sequence
  Description of Artificial Sequence: Synthetic oligonucleotide
ccaugcccaucccucaagg

SEQ ID NO: 1752576 - RNA, 19 nt, Artificial Sequence
  Description of Artificial Sequence: Synthetic oligonucleotide
aaccuuagcugcacuugua

SEQ ID NO: 1752577 - RNA, 19 nt, Artificial Sequence
  Description of Artificial Sequence: Synthetic oligonucleotide
cugcgguuaacugccucac

SEQ ID NO: 1752578 - RNA, 19 nt, Artificial Sequence
  Description of Artificial Sequence: Synthetic oligonucleotide
gaaggaccguagugcugac

SEQ ID NO: 1752579 - RNA, 19 nt, Artificial Sequence
  Description of Artificial Sequence: Synthetic oligonucleotide
gaagggucccugcgguuaa

SEQ ID NO: 1752580 - RNA, 19 nt, Artificial Sequence
  Description of Artificial Sequence: Synthetic oligonucleotide
ugaccgccggccacucaga

SEQ ID NO: 1752581 - RNA, 19 nt, Artificial Sequence
  Description of Artificial Sequence: Synthetic oligonucleotide
caugcccaucccucaagga

SEQ ID NO: 1752582 - RNA, 19 nt, Artificial Sequence
  Description of Artificial Sequence: Synthetic oligonucleotide
caccgaagauggcugguga

SEQ ID NO: 1752583 - RNA, 19 nt, Artificial Sequence
  Description of Artificial Sequence: Synthetic oligonucleotide
gguuccccggacuggaaga

SEQ ID NO: 1752584 - RNA, 19 nt, Artificial Sequence
  Description of Artificial Sequence: Synthetic oligonucleotide
uggggaacuguggcugaga

SEQ ID NO: 1752585 - RNA, 19 nt, Artificial Sequence
  Description of Artificial Sequence: Synthetic oligonucleotide
gcgucaucuagugaaguga

SEQ ID NO: 1752586 - RNA, 19 nt, Artificial Sequence
  Description of Artificial Sequence: Synthetic oligonucleotide
gcagcaccgaagauggcug

SEQ ID NO: 1752587 - RNA, 19 nt, Artificial Sequence
  Description of Artificial Sequence: Synthetic oligonucleotide
ggguuccccggacuggaag

SEQ ID NO: 1752588 - RNA, 19 nt, Artificial Sequence
  Description of Artificial Sequence: Synthetic oligonucleotide
ccugcgucaucuagugaag

SEQ ID NO: 1752589 - RNA, 19 nt, Artificial Sequence
  Description of Artificial Sequence: Synthetic oligonucleotide
ugcuggggagugagggcaa

SEQ ID NO: 1752590 - RNA, 19 nt, Artificial Sequence
  Description of Artificial Sequence: Synthetic oligonucleotide
agggcacggcaugggacgg

SEQ ID NO: 1752591 - RNA, 19 nt, Artificial Sequence
  Description of Artificial Sequence: Synthetic oligonucleotide
cggacuaccaggauccauc

SEQ ID NO: 1752592 - RNA, 19 nt, Artificial Sequence
  Description of Artificial Sequence: Synthetic oligonucleotide
ccgaagauggcuggugacc

SEQ ID NO: 1752593 - RNA, 19 nt, Artificial Sequence
  Description of Artificial Sequence: Synthetic oligonucleotide
uagcugcacuuguauggua

SEQ ID NO: 1752594 - RNA, 19 nt, Artificial Sequence
  Description of Artificial Sequence: Synthetic oligonucleotide
ggcuccgcagcaccgaaga

SEQ ID NO: 1752595 - RNA, 19 nt, Artificial Sequence
  Description of Artificial Sequence: Synthetic oligonucleotide
agccgagccagggauguaa

SEQ ID NO: 1752596 - RNA, 19 nt, Artificial Sequence
  Description of Artificial Sequence: Synthetic oligonucleotide
ggaccguagugcugacucc

SEQ ID NO: 1752597 - RNA, 19 nt, Artificial Sequence
  Description of Artificial Sequence: Synthetic oligonucleotide
ucggacuaccaggauccau

SEQ ID NO: 1752598 - RNA, 19 nt, Artificial Sequence
  Description of Artificial Sequence: Synthetic oligonucleotide
ucugaccgccggccacuca

SEQ ID NO: 1752599 - RNA, 19 nt, Artificial Sequence
  Description of Artificial Sequence: Synthetic oligonucleotide
ugacuccauugcagggcuc

SEQ ID NO: 1752600 - RNA, 19 nt, Artificial Sequence
  Description of Artificial Sequence: Synthetic oligonucleotide
ucccaaugugggagccagu

SEQ ID NO: 1752601 - RNA, 19 nt, Artificial Sequence
  Description of Artificial Sequence: Synthetic oligonucleotide
agggguuccccggacugga

SEQ ID NO: 1752602 - RNA, 19 nt, Artificial Sequence
  Description of Artificial Sequence: Synthetic oligonucleotide
cugcugacacggccaggag

SEQ ID NO: 1752603 - RNA, 19 nt, Artificial Sequence
  Description of Artificial Sequence: Synthetic oligonucleotide
uggugggccggaugagcuc

SEQ ID NO: 1752604 - RNA, 19 nt, Artificial Sequence
  Description of Artificial Sequence: Synthetic oligonucleotide
cuacggugagagcuuccca

SEQ ID NO: 1752605 - RNA, 19 nt, Artificial Sequence
  Description of Artificial Sequence: Synthetic oligonucleotide
gggaccugaaggcaggggu

SEQ ID NO: 1752606 - RNA, 19 nt, Artificial Sequence
  Description of Artificial Sequence: Synthetic oligonucleotide
gcagcgguuucauggugac

SEQ ID NO: 1752607 - RNA, 19 nt, Artificial Sequence
  Description of Artificial Sequence: Synthetic oligonucleotide
gugcgcuuccucaaaccuc

SEQ ID NO: 1752608 - RNA, 19 nt, Artificial Sequence
  Description of Artificial Sequence: Synthetic oligonucleotide
cugacuccauugcagggcu

SEQ ID NO: 1752609 - RNA, 19 nt, Artificial Sequence
  Description of Artificial Sequence: Synthetic oligonucleotide
gggucccugcgguuaacug

SEQ ID NO: 1752610 - RNA, 19 nt, Artificial Sequence
  Description of Artificial Sequence: Synthetic oligonucleotide
accgccggccacucagaga

SEQ ID NO: 1752611 - RNA, 19 nt, Artificial Sequence
  Description of Artificial Sequence: Synthetic oligonucleotide
cugagagccgagccaggga

SEQ ID NO: 1752612 - RNA, 19 nt, Artificial Sequence
  Description of Artificial Sequence: Synthetic oligonucleotide
ggcgcuggaguggagcuac

SEQ ID NO: 1752613 - RNA, 19 nt, Artificial Sequence
  Description of Artificial Sequence: Synthetic oligonucleotide
gagcuacggugagagcuuc

SEQ ID NO: 1752614 - RNA, 19 nt, Artificial Sequence
  Description of Artificial Sequence: Synthetic oligonucleotide
agcuagucucacagagaca

SEQ ID NO: 1752615 - RNA, 19 nt, Artificial Sequence
  Description of Artificial Sequence: Synthetic oligonucleotide
aucugaccgccggccacuc

SEQ ID NO: 1752616 - RNA, 19 nt, Artificial Sequence
  Description of Artificial Sequence: Synthetic oligonucleotide
ggcaaagguaaagugcgcu

SEQ ID NO: 1752617 - RNA, 19 nt, Artificial Sequence
  Description of Artificial Sequence: Synthetic oligonucleotide
gagauucauagggagccuu

SEQ ID NO: 1752618 - RNA, 19 nt, Artificial Sequence
  Description of Artificial Sequence: Synthetic oligonucleotide
ccugcgguuaacugccuca

SEQ ID NO: 1752619 - RNA, 19 nt, Artificial Sequence
  Description of Artificial Sequence: Synthetic oligonucleotide
cagaaccucucuggaugug

SEQ ID NO: 1752620 - RNA, 19 nt, Artificial Sequence
  Description of Artificial Sequence: Synthetic oligonucleotide
cgguuaacugccucaccag

SEQ ID NO: 1752621 - RNA, 19 nt, Artificial Sequence
  Description of Artificial Sequence: Synthetic oligonucleotide
gggagugagggcaaaggua

SEQ ID NO: 1752622 - RNA, 19 nt, Artificial Sequence
  Description of Artificial Sequence: Synthetic oligonucleotide
ggcaugggacggucagaag

SEQ ID NO: 1752623 - RNA, 19 nt, Artificial Sequence
  Description of Artificial Sequence: Synthetic oligonucleotide
ccaugaaauaaaccaucaa

SEQ ID NO: 1752624 - RNA, 19 nt, Artificial Sequence
  Description of Artificial Sequence: Synthetic oligonucleotide
cagaugucaggacaccuuu

SEQ ID NO: 1752625 - RNA, 19 nt, Artificial Sequence
  Description of Artificial Sequence: Synthetic oligonucleotide
guggccgaggugacagggc

SEQ ID NO: 1752626 - RNA, 19 nt, Artificial Sequence
  Description of Artificial Sequence: Synthetic oligonucleotide
caaugguguuggggaacug

SEQ ID NO: 1752627 - RNA, 19 nt, Artificial Sequence
  Description of Artificial Sequence: Synthetic oligonucleotide
cucaaaccucuggcuggag

SEQ ID NO: 1752628 - RNA, 19 nt, Artificial Sequence
  Description of Artificial Sequence: Synthetic oligonucleotide
cugacacggccaggagggg

SEQ ID NO: 1752629 - RNA, 19 nt, Artificial Sequence
  Description of Artificial Sequence: Synthetic oligonucleotide
gaguggagcuacggugaga

SEQ ID NO: 1752630 - RNA, 19 nt, Artificial Sequence
  Description of Artificial Sequence: Synthetic oligonucleotide
agggcuccgcagcaccgaa

SEQ ID NO: 1752631 - RNA, 19 nt, Artificial Sequence
  Description of Artificial Sequence: Synthetic oligonucleotide
ggcgaaaccucagaugccu

SEQ ID NO: 1752632 - RNA, 19 nt, Artificial Sequence
  Description of Artificial Sequence: Synthetic oligonucleotide
gcuucccaaugugggagcc

SEQ ID NO: 1752633 - RNA, 19 nt, Artificial Sequence
  Description of Artificial Sequence: Synthetic oligonucleotide
ggggagugagggcaaaggu

SEQ ID NO: 1752634 - RNA, 19 nt, Artificial Sequence
  Description of Artificial Sequence: Synthetic oligonucleotide
ggcagcgguuucaugguga

SEQ ID NO: 1752635 - RNA, 19 nt, Artificial Sequence
  Description of Artificial Sequence: Synthetic oligonucleotide
ugcaggccauccagcccau

SEQ ID NO: 1752636 - RNA, 19 nt, Artificial Sequence
  Description of Artificial Sequence: Synthetic oligonucleotide
ggggcagaguuucccauua

SEQ ID NO: 1752637 - RNA, 19 nt, Artificial Sequence
  Description of Artificial Sequence: Synthetic oligonucleotide
ggacuaccaggauccaucu

SEQ ID NO: 1752638 - RNA, 19 nt, Artificial Sequence
  Description of Artificial Sequence: Synthetic oligonucleotide
ucccugcgguuaacugccu

SEQ ID NO: 1752639 - RNA, 19 nt, Artificial Sequence
  Description of Artificial Sequence: Synthetic oligonucleotide
ccaaggguguccugcguca

SEQ ID NO: 1752640 - RNA, 19 nt, Artificial Sequence
  Description of Artificial Sequence: Synthetic oligonucleotide
gggcaaagguaaagugcgc

SEQ ID NO: 1752641 - RNA, 19 nt, Artificial Sequence
  Description of Artificial Sequence: Synthetic oligonucleotide
aacucccaggagacacaau

SEQ ID NO: 1752642 - RNA, 19 nt, Artificial Sequence
  Description of Artificial Sequence: Synthetic oligonucleotide
ggacggucagaaggguccc

SEQ ID NO: 1752643 - RNA, 19 nt, Artificial Sequence
  Description of Artificial Sequence: Synthetic oligonucleotide
guguccugcgucaucuagu

SEQ ID NO: 1752644 - RNA, 19 nt, Artificial Sequence
  Description of Artificial Sequence: Synthetic oligonucleotide
gcagcuagucucacagaga

SEQ ID NO: 1752645 - RNA, 19 nt, Artificial Sequence
  Description of Artificial Sequence: Synthetic oligonucleotide
guccugcgucaucuaguga

SEQ ID NO: 1752646 - RNA, 19 nt, Artificial Sequence
  Description of Artificial Sequence: Synthetic oligonucleotide
gcagaaccucucuggaugu

SEQ ID NO: 1752647 - RNA, 19 nt, Artificial Sequence
  Description of Artificial Sequence: Synthetic oligonucleotide
ccguccaaacucagaugac

SEQ ID NO: 1752648 - RNA, 19 nt, Artificial Sequence
  Description of Artificial Sequence: Synthetic oligonucleotide
gggaagggguuccccggac

SEQ ID NO: 1752649 - RNA, 19 nt, Artificial Sequence
  Description of Artificial Sequence: Synthetic oligonucleotide
gcaaagguaaagugcgcuu

SEQ ID NO: 1752650 - RNA, 19 nt, Artificial Sequence
  Description of Artificial Sequence: Synthetic oligonucleotide
gaccaaggguguccugcgu

SEQ ID NO: 1752651 - RNA, 19 nt, Artificial Sequence
  Description of Artificial Sequence: Synthetic oligonucleotide
aucccucaaggaacuccca

SEQ ID NO: 1752652 - RNA, 19 nt, Artificial Sequence
  Description of Artificial Sequence: Synthetic oligonucleotide
gggcagcgguuucauggug

SEQ ID NO: 1752653 - RNA, 19 nt, Artificial Sequence
  Description of Artificial Sequence: Synthetic oligonucleotide
aucggacuaccaggaucca

SEQ ID NO: 1752654 - RNA, 19 nt, Artificial Sequence
  Description of Artificial Sequence: Synthetic oligonucleotide
gggcgaaaccucagaugcc

SEQ ID NO: 1752655 - RNA, 19 nt, Artificial Sequence
  Description of Artificial Sequence: Synthetic oligonucleotide
cuccaugcccaucccucaa

SEQ ID NO: 1752656 - RNA, 19 nt, Artificial Sequence
  Description of Artificial Sequence: Synthetic oligonucleotide
caauaacuucaacucucuu

SEQ ID NO: 1752657 - RNA, 19 nt, Artificial Sequence
  Description of Artificial Sequence: Synthetic oligonucleotide
gcugcacuuguaugguaua

SEQ ID NO: 1752658 - RNA, 19 nt, Artificial Sequence
  Description of Artificial Sequence: Synthetic oligonucleotide
gugacagggcagugcuucu

SEQ ID NO: 1752659 - RNA, 19 nt, Artificial Sequence
  Description of Artificial Sequence: Synthetic oligonucleotide
ccccggacuggaagaagug

SEQ ID NO: 1752660 - RNA, 19 nt, Artificial Sequence
  Description of Artificial Sequence: Synthetic oligonucleotide
ccgagccagggauguaaug

SEQ ID NO: 1752661 - RNA, 19 nt, Artificial Sequence
  Description of Artificial Sequence: Synthetic oligonucleotide
ggcuggaaugguggccgag

SEQ ID NO: 1752662 - RNA, 19 nt, Artificial Sequence
  Description of Artificial Sequence: Synthetic oligonucleotide
accguagugcugacuccau

SEQ ID NO: 1752663 - RNA, 19 nt, Artificial Sequence
  Description of Artificial Sequence: Synthetic oligonucleotide
ggaagggguuccccggacu

SEQ ID NO: 1752664 - RNA, 19 nt, Artificial Sequence
  Description of Artificial Sequence: Synthetic oligonucleotide
cggugagagcuucccaaug

SEQ ID NO: 1752665 - RNA, 19 nt, Artificial Sequence
  Description of Artificial Sequence: Synthetic oligonucleotide
gcgguuucauggugacauc

SEQ ID NO: 1752666 - RNA, 19 nt, Artificial Sequence
  Description of Artificial Sequence: Synthetic oligonucleotide
auuggacggcugggccucu

SEQ ID NO: 1752667 - RNA, 19 nt, Artificial Sequence
  Description of Artificial Sequence: Synthetic oligonucleotide
gggcagcuagucucacaga

SEQ ID NO: 1752668 - RNA, 19 nt, Artificial Sequence
  Description of Artificial Sequence: Synthetic oligonucleotide
ccccauagacuucguagaa

SEQ ID NO: 1752669 - RNA, 19 nt, Artificial Sequence
  Description of Artificial Sequence: Synthetic oligonucleotide
ccaaacucagaugaccaau

SEQ ID NO: 1752670 - RNA, 19 nt, Artificial Sequence
  Description of Artificial Sequence: Synthetic oligonucleotide
ggcacggcaugggacgguc

SEQ ID NO: 1752671 - RNA, 19 nt, Artificial Sequence
  Description of Artificial Sequence: Synthetic oligonucleotide
cugcgucaucuagugaagu

SEQ ID NO: 1752672 - RNA, 19 nt, Artificial Sequence
  Description of Artificial Sequence: Synthetic oligonucleotide
cgguuucauggugacauca

SEQ ID NO: 1752673 - RNA, 19 nt, Artificial Sequence
  Description of Artificial Sequence: Synthetic oligonucleotide
caucugaccgccggccacu

SEQ ID NO: 1752674 - RNA, 19 nt, Artificial Sequence
  Description of Artificial Sequence: Synthetic oligonucleotide
gcgaaaccucagaugccuc

SEQ ID NO: 1752675 - RNA, 19 nt, Artificial Sequence
  Description of Artificial Sequence: Synthetic oligonucleotide
gggcagaguuucccauuaa

SEQ ID NO: 1752676 - RNA, 19 nt, Artificial Sequence
  Description of Artificial Sequence: Synthetic oligonucleotide
gacggucagaagggucccu

SEQ ID NO: 1752677 - RNA, 19 nt, Artificial Sequence
  Description of Artificial Sequence: Synthetic oligonucleotide
cccggacuggaagaaguga

SEQ ID NO: 1752678 - RNA, 19 nt, Artificial Sequence
  Description of Artificial Sequence: Synthetic oligonucleotide
cagcgguuucauggugaca

SEQ ID NO: 1752679 - RNA, 19 nt, Artificial Sequence
  Description of Artificial Sequence: Synthetic oligonucleotide
gggcuccgcagcaccgaag

SEQ ID NO: 1752680 - RNA, 19 nt, Artificial Sequence
  Description of Artificial Sequence: Synthetic oligonucleotide
cccugcgguuaacugccuc

SEQ ID NO: 1752681 - RNA, 19 nt, Artificial Sequence
  Description of Artificial Sequence: Synthetic oligonucleotide
cgucaucuagugaagugau

SEQ ID NO: 1752682 - RNA, 19 nt, Artificial Sequence
  Description of Artificial Sequence: Synthetic oligonucleotide
cugccucaccagguacaca

SEQ ID NO: 1752683 - RNA, 19 nt, Artificial Sequence
  Description of Artificial Sequence: Synthetic oligonucleotide
ggagcuacggugagagcuu

SEQ ID NO: 1752684 - RNA, 19 nt, Artificial Sequence
  Description of Artificial Sequence: Synthetic oligonucleotide
gccucaccagguacacaga

SEQ ID NO: 1752685 - RNA, 19 nt, Artificial Sequence
  Description of Artificial Sequence: Synthetic oligonucleotide
gcgcuggaguggagcuacg

SEQ ID NO: 1752686 - RNA, 19 nt, Artificial Sequence
  Description of Artificial Sequence: Synthetic oligonucleotide
caaggguguccugcgucau

SEQ ID NO: 1752687 - RNA, 19 nt, Artificial Sequence
  Description of Artificial Sequence: Synthetic oligonucleotide
cgcagcaccgaagauggcu

SEQ ID NO: 1752688 - RNA, 19 nt, Artificial Sequence
  Description of Artificial Sequence: Synthetic oligonucleotide
gagccgagccagggaugua

SEQ ID NO: 1752689 - RNA, 19 nt, Artificial Sequence
  Description of Artificial Sequence: Synthetic oligonucleotide
ccggccacucagagaggga

SEQ ID NO: 1752690 - RNA, 19 nt, Artificial Sequence
  Description of Artificial Sequence: Synthetic oligonucleotide
gcacggcaugggacgguca

SEQ ID NO: 1752691 - RNA, 19 nt, Artificial Sequence
  Description of Artificial Sequence: Synthetic oligonucleotide
gcgcuuccucaaaccucug

SEQ ID NO: 1752692 - RNA, 19 nt, Artificial Sequence
  Description of Artificial Sequence: Synthetic oligonucleotide
gggcuauacugcaggccau

SEQ ID NO: 1752693 - RNA, 19 nt, Artificial Sequence
  Description of Artificial Sequence: Synthetic oligonucleotide
gcuccgcagcaccgaagau

SEQ ID NO: 1752694 - RNA, 19 nt, Artificial Sequence
  Description of Artificial Sequence: Synthetic oligonucleotide
gggguuccccggacuggaa

SEQ ID NO: 1752695 - RNA, 19 nt, Artificial Sequence
  Description of Artificial Sequence: Synthetic oligonucleotide
gggcgcuggaguggagcua

SEQ ID NO: 1752696 - RNA, 19 nt, Artificial Sequence
  Description of Artificial Sequence: Synthetic oligonucleotide
gccgagccagggauguaau

SEQ ID NO: 1752697 - RNA, 19 nt, Artificial Sequence
  Description of Artificial Sequence: Synthetic oligonucleotide
ccguagugcugacuccauu

SEQ ID NO: 1752698 - RNA, 19 nt, Artificial Sequence
  Description of Artificial Sequence: Synthetic oligonucleotide
gggcacggcaugggacggu

SEQ ID NO: 1752699 - RNA, 19 nt, Artificial Sequence
  Description of Artificial Sequence: Synthetic oligonucleotide
aacauuugcuccuugaagg

SEQ ID NO: 1752700 - RNA, 19 nt, Artificial Sequence
  Description of Artificial Sequence: Synthetic oligonucleotide
aaagcagcagaacagcugg

SEQ ID NO: 1752701 - RNA, 19 nt, Artificial Sequence
  Description of Artificial Sequence: Synthetic oligonucleotide
aagaauugacaccaauccc

SEQ ID NO: 1752702 - RNA, 19 nt, Artificial Sequence
  Description of Artificial Sequence: Synthetic oligonucleotide
gaagaauugacaccaaucc

SEQ ID NO: 1752703 - RNA, 19 nt, Artificial Sequence
  Description of Artificial Sequence: Synthetic oligonucleotide
acuagugaacauuugcucc

SEQ ID NO: 1752704 - RNA, 19 nt, Artificial Sequence
  Description of Artificial Sequence: Synthetic oligonucleotide
aauauuuccggguuggaga

SEQ ID NO: 1752705 - RNA, 19 nt, Artificial Sequence
  Description of Artificial Sequence: Synthetic oligonucleotide
acaucgaauauguacauuc

SEQ ID NO: 1752706 - RNA, 19 nt, Artificial Sequence
  Description of Artificial Sequence: Synthetic oligonucleotide
cauucauuucccuagagag

SEQ ID NO: 1752707 - RNA, 19 nt, Artificial Sequence
  Description of Artificial Sequence: Synthetic oligonucleotide
ugugacacucaauaaauag

SEQ ID NO: 1752708 - RNA, 19 nt, Artificial Sequence
  Description of Artificial Sequence: Synthetic oligonucleotide
uggaaugccauucauuucc

SEQ ID NO: 1752709 - RNA, 19 nt, Artificial Sequence
  Description of Artificial Sequence: Synthetic oligonucleotide
cuggaaaugaguuucgagg

SEQ ID NO: 1752710 - RNA, 19 nt, Artificial Sequence
  Description of Artificial Sequence: Synthetic oligonucleotide
aaguuaucgaugccgaauc

SEQ ID NO: 1752711 - RNA, 19 nt, Artificial Sequence
  Description of Artificial Sequence: Synthetic oligonucleotide
aguaagucauucuacuugg

SEQ ID NO: 1752712 - RNA, 19 nt, Artificial Sequence
  Description of Artificial Sequence: Synthetic oligonucleotide
aucgauuggaguuaaaugu

SEQ ID NO: 1752713 - RNA, 19 nt, Artificial Sequence
  Description of Artificial Sequence: Synthetic oligonucleotide
gaaauagacguguagacuc

SEQ ID NO: 1752714 - RNA, 19 nt, Artificial Sequence
  Description of Artificial Sequence: Synthetic oligonucleotide
ucugaaagcagcagaacag

SEQ ID NO: 1752715 - RNA, 19 nt, Artificial Sequence
  Description of Artificial Sequence: Synthetic oligonucleotide
agguuggagaaauauuucc

SEQ ID NO: 1752716 - RNA, 19 nt, Artificial Sequence
  Description of Artificial Sequence: Synthetic oligonucleotide
aggacuagugaacauuugc

SEQ ID NO: 1752717 - RNA, 19 nt, Artificial Sequence
  Description of Artificial Sequence: Synthetic oligonucleotide
uaaagugguccacagaaug

SEQ ID NO: 1752718 - RNA, 19 nt, Artificial Sequence
  Description of Artificial Sequence: Synthetic oligonucleotide
ugccauauuagcuuaaaga

SEQ ID NO: 1752719 - RNA, 19 nt, Artificial Sequence
  Description of Artificial Sequence: Synthetic oligonucleotide
acacucaauaaauagcuag

SEQ ID NO: 1752720 - RNA, 19 nt, Artificial Sequence
  Description of Artificial Sequence: Synthetic oligonucleotide
aaggugguguucuaaggcg

SEQ ID NO: 1752721 - RNA, 19 nt, Artificial Sequence
  Description of Artificial Sequence: Synthetic oligonucleotide
uagacguguagacucaagg

SEQ ID NO: 1752722 - RNA, 19 nt, Artificial Sequence
  Description of Artificial Sequence: Synthetic oligonucleotide
aucaucuuaucucagucuc

SEQ ID NO: 1752723 - RNA, 19 nt, Artificial Sequence
  Description of Artificial Sequence: Synthetic oligonucleotide
auucccacaauagaaauuc

SEQ ID NO: 1752724 - RNA, 19 nt, Artificial Sequence
  Description of Artificial Sequence: Synthetic oligonucleotide
agucauucuacuuggaaug

SEQ ID NO: 1752725 - RNA, 19 nt, Artificial Sequence
  Description of Artificial Sequence: Synthetic oligonucleotide
ucuccuguuuccuuuaucc

SEQ ID NO: 1752726 - RNA, 19 nt, Artificial Sequence
  Description of Artificial Sequence: Synthetic oligonucleotide
cucagucucgacuacaggg

SEQ ID NO: 1752727 - RNA, 19 nt, Artificial Sequence
  Description of Artificial Sequence: Synthetic oligonucleotide
guuggagaaauauuuccgg

SEQ ID NO: 1752728 - RNA, 19 nt, Artificial Sequence
  Description of Artificial Sequence: Synthetic oligonucleotide
uaaauagcuaguuacugaa

SEQ ID NO: 1752729 - RNA, 19 nt, Artificial Sequence
  Description of Artificial Sequence: Synthetic oligonucleotide
uuaaugucgaucuggaaau

SEQ ID NO: 1752730 - RNA, 19 nt, Artificial Sequence
  Description of Artificial Sequence: Synthetic oligonucleotide
gaguaagucauucuacuug

SEQ ID NO: 1752731 - RNA, 19 nt, Artificial Sequence
  Description of Artificial Sequence: Synthetic oligonucleotide
ugucauuucccuccaaacc

SEQ ID NO: 1752732 - RNA, 19 nt, Artificial Sequence
  Description of Artificial Sequence: Synthetic oligonucleotide
uuaucgaugccgaaucugc

SEQ ID NO: 1752733 - RNA, 19 nt, Artificial Sequence
  Description of Artificial Sequence: Synthetic oligonucleotide
auccugauuaaucauagga

SEQ ID NO: 1752734 - RNA, 19 nt, Artificial Sequence
  Description of Artificial Sequence: Synthetic oligonucleotide
ugaguuucgagguuggaga

SEQ ID NO: 1752735 - RNA, 19 nt, Artificial Sequence
  Description of Artificial Sequence: Synthetic oligonucleotide
augauguccaaucuccuuc

SEQ ID NO: 1752736 - RNA, 19 nt, Artificial Sequence
  Description of Artificial Sequence: Synthetic oligonucleotide
uuggagaaauauuuccggg

SEQ ID NO: 1752737 - RNA, 19 nt, Artificial Sequence
  Description of Artificial Sequence: Synthetic oligonucleotide
auagcuaguuacugaaagg

SEQ ID NO: 1752738 - RNA, 19 nt, Artificial Sequence
  Description of Artificial Sequence: Synthetic oligonucleotide
aagucauucuacuuggaau

SEQ ID NO: 1752739 - RNA, 19 nt, Artificial Sequence
  Description of Artificial Sequence: Synthetic oligonucleotide
ucuuaucucagucucgacu

SEQ ID NO: 1752740 - RNA, 19 nt, Artificial Sequence
  Description of Artificial Sequence: Synthetic oligonucleotide
ucccauaaggcuauggcug

SEQ ID NO: 1752741 - RNA, 19 nt, Artificial Sequence
  Description of Artificial Sequence: Synthetic oligonucleotide
auauuuccggguuggagac

SEQ ID NO: 1752742 - RNA, 19 nt, Artificial Sequence
  Description of Artificial Sequence: Synthetic oligonucleotide
uaaucauaggaagaugucc

SEQ ID NO: 1752743 - RNA, 19 nt, Artificial Sequence
  Description of Artificial Sequence: Synthetic oligonucleotide
aguuccuaaauucauccug

SEQ ID NO: 1752744 - RNA, 19 nt, Artificial Sequence
  Description of Artificial Sequence: Synthetic oligonucleotide
auacaagucuccuguuucc

SEQ ID NO: 1752745 - RNA, 19 nt, Artificial Sequence
  Description of Artificial Sequence: Synthetic oligonucleotide
uuagcuuaaagaagagugu

SEQ ID NO: 1752746 - RNA, 19 nt, Artificial Sequence
  Description of Artificial Sequence: Synthetic oligonucleotide
uuucccauaaggcuauggc

SEQ ID NO: 1752747 - RNA, 19 nt, Artificial Sequence
  Description of Artificial Sequence: Synthetic oligonucleotide
ugugugacacucaauaaau

SEQ ID NO: 1752748 - RNA, 19 nt, Artificial Sequence
  Description of Artificial Sequence: Synthetic oligonucleotide
cacaucgucauccuguagg

SEQ ID NO: 1752749 - RNA, 19 nt, Artificial Sequence
  Description of Artificial Sequence: Synthetic oligonucleotide
agacguguagacucaaggg

SEQ ID NO: 1752750 - RNA, 19 nt, Artificial Sequence
  Description of Artificial Sequence: Synthetic oligonucleotide
ucgacuacagggauguacc

SEQ ID NO: 1752751 - RNA, 19 nt, Artificial Sequence
  Description of Artificial Sequence: Synthetic oligonucleotide
aagaacagacgauccggcg

SEQ ID NO: 1752752 - RNA, 19 nt, Artificial Sequence
  Description of Artificial Sequence: Synthetic oligonucleotide
uucauuucccuagagagac

SEQ ID NO: 1752753 - RNA, 19 nt, Artificial Sequence
  Description of Artificial Sequence: Synthetic oligonucleotide
caugacaaagaacagacga

SEQ ID NO: 1752754 - RNA, 19 nt, Artificial Sequence
  Description of Artificial Sequence: Synthetic oligonucleotide
aaaccugaaauagacgugu

SEQ ID NO: 1752755 - RNA, 19 nt, Artificial Sequence
  Description of Artificial Sequence: Synthetic oligonucleotide
agaaauauuuccggguugg

SEQ ID NO: 1752756 - RNA, 19 nt, Artificial Sequence
  Description of Artificial Sequence: Synthetic oligonucleotide
uggaaaugaguuucgaggu

SEQ ID NO: 1752757 - RNA, 19 nt, Artificial Sequence
  Description of Artificial Sequence: Synthetic oligonucleotide
ucgaugccgaaucugcugg

SEQ ID NO: 1752758 - RNA, 19 nt, Artificial Sequence
  Description of Artificial Sequence: Synthetic oligonucleotide
gaaggugguguucuaaggc

SEQ ID NO: 1752759 - RNA, 19 nt, Artificial Sequence
  Description of Artificial Sequence: Synthetic oligonucleotide
uccugauuaaucauaggaa

SEQ ID NO: 1752760 - RNA, 19 nt, Artificial Sequence
  Description of Artificial Sequence: Synthetic oligonucleotide
ucgauuggaguuaaaugug

SEQ ID NO: 1752761 - RNA, 19 nt, Artificial Sequence
  Description of Artificial Sequence: Synthetic oligonucleotide
aguuaaauguggaacauca

SEQ ID NO: 1752762 - RNA, 19 nt, Artificial Sequence
  Description of Artificial Sequence: Synthetic oligonucleotide
uuuccuuuauccuggcgag

SEQ ID NO: 1752763 - RNA, 19 nt, Artificial Sequence
  Description of Artificial Sequence: Synthetic oligonucleotide
ucagaguaagucauucuac

SEQ ID NO: 1752764 - RNA, 19 nt, Artificial Sequence
  Description of Artificial Sequence: Synthetic oligonucleotide
auugacaccaaucccauuu

SEQ ID NO: 1752765 - RNA, 19 nt, Artificial Sequence
  Description of Artificial Sequence: Synthetic oligonucleotide
uucagaguaagucauucua

SEQ ID NO: 1752766 - RNA, 19 nt, Artificial Sequence
  Description of Artificial Sequence: Synthetic oligonucleotide
ucagacugccauauuagcu

SEQ ID NO: 1752767 - RNA, 19 nt, Artificial Sequence
  Description of Artificial Sequence: Synthetic oligonucleotide
uacugaaaggaagagugag

SEQ ID NO: 1752768 - RNA, 19 nt, Artificial Sequence
  Description of Artificial Sequence: Synthetic oligonucleotide
uuuaggaccuacuguauuc

SEQ ID NO: 1752769 - RNA, 19 nt, Artificial Sequence
  Description of Artificial Sequence: Synthetic oligonucleotide
cugaaauagacguguagac

SEQ ID NO: 1752770 - RNA, 19 nt, Artificial Sequence
  Description of Artificial Sequence: Synthetic oligonucleotide
ucaucuuaucucagucucg

SEQ ID NO: 1752771 - RNA, 19 nt, Artificial Sequence
  Description of Artificial Sequence: Synthetic oligonucleotide
cuuaaugucgaucuggaaa

SEQ ID NO: 1752772 - RNA, 19 nt, Artificial Sequence
  Description of Artificial Sequence: Synthetic oligonucleotide
cuggguuuuagguugggag

SEQ ID NO: 1752773 - RNA, 19 nt, Artificial Sequence
  Description of Artificial Sequence: Synthetic oligonucleotide
uuaaucauaggaagauguc

SEQ ID NO: 1752774 - RNA, 19 nt, Artificial Sequence
  Description of Artificial Sequence: Synthetic oligonucleotide
agaauugacaccaauccca

SEQ ID NO: 1752775 - RNA, 19 nt, Artificial Sequence
  Description of Artificial Sequence: Synthetic oligonucleotide
cuccaaaccugaaauagac

SEQ ID NO: 1752776 - RNA, 19 nt, Artificial Sequence
  Description of Artificial Sequence: Synthetic oligonucleotide
caucgauuggaguuaaaug

SEQ ID NO: 1752777 - RNA, 19 nt, Artificial Sequence
  Description of Artificial Sequence: Synthetic oligonucleotide
uagcuaguuacugaaagga

SEQ ID NO: 1752778 - RNA, 19 nt, Artificial Sequence
  Description of Artificial Sequence: Synthetic oligonucleotide
aaggcggaugcucuaagga

SEQ ID NO: 1752779 - RNA, 19 nt, Artificial Sequence
  Description of Artificial Sequence: Synthetic oligonucleotide
uguaucaucuuaucucagu

SEQ ID NO: 1752780 - RNA, 19 nt, Artificial Sequence
  Description of Artificial Sequence: Synthetic oligonucleotide
cugacaucgaauauguaca

SEQ ID NO: 1752781 - RNA, 19 nt, Artificial Sequence
  Description of Artificial Sequence: Synthetic oligonucleotide
ucgaauauguacauucauu

SEQ ID NO: 1752782 - RNA, 19 nt, Artificial Sequence
  Description of Artificial Sequence: Synthetic oligonucleotide
gaagcuccacccuucgagg

SEQ ID NO: 1752783 - RNA, 19 nt, Artificial Sequence
  Description of Artificial Sequence: Synthetic oligonucleotide
uggagaaauauuuccgggu

SEQ ID NO: 1752784 - RNA, 19 nt, Artificial Sequence
  Description of Artificial Sequence: Synthetic oligonucleotide
uaucaucuuaucucagucu

SEQ ID NO: 1752785 - RNA, 19 nt, Artificial Sequence
  Description of Artificial Sequence: Synthetic oligonucleotide
gcuugaaggacacccaucg

SEQ ID NO: 1752786 - RNA, 19 nt, Artificial Sequence
  Description of Artificial Sequence: Synthetic oligonucleotide
ugaaauagacguguagacu

SEQ ID NO: 1752787 - RNA, 19 nt, Artificial Sequence
  Description of Artificial Sequence: Synthetic oligonucleotide
ugaacauuugcuccuugaa

SEQ ID NO: 1752788 - RNA, 19 nt, Artificial Sequence
  Description of Artificial Sequence: Synthetic oligonucleotide
cuaguuacugaaaggaaga

SEQ ID NO: 1752789 - RNA, 19 nt, Artificial Sequence
  Description of Artificial Sequence: Synthetic oligonucleotide
gucaccuccguucacaaac

SEQ ID NO: 1752790 - RNA, 19 nt, Artificial Sequence
  Description of Artificial Sequence: Synthetic oligonucleotide
cucaacacuggguuuuagg

SEQ ID NO: 1752791 - RNA, 19 nt, Artificial Sequence
  Description of Artificial Sequence: Synthetic oligonucleotide
gacuagugaacauuugcuc

SEQ ID NO: 1752792 - RNA, 19 nt, Artificial Sequence
  Description of Artificial Sequence: Synthetic oligonucleotide
ucgaaguuaucgaugccga

SEQ ID NO: 1752793 - RNA, 19 nt, Artificial Sequence
  Description of Artificial Sequence: Synthetic oligonucleotide
uucccauaaggcuauggcu

SEQ ID NO: 1752794 - RNA, 19 nt, Artificial Sequence
  Description of Artificial Sequence: Synthetic oligonucleotide
uucagacugccauauuagc

SEQ ID NO: 1752795 - RNA, 19 nt, Artificial Sequence
  Description of Artificial Sequence: Synthetic oligonucleotide
cauacaagucuccuguuuc

SEQ ID NO: 1752796 - RNA, 19 nt, Artificial Sequence
  Description of Artificial Sequence: Synthetic oligonucleotide
ugacaaagaacagacgauc

SEQ ID NO: 1752797 - RNA, 19 nt, Artificial Sequence
  Description of Artificial Sequence: Synthetic oligonucleotide
uaaggcggaugcucuaagg

SEQ ID NO: 1752798 - RNA, 19 nt, Artificial Sequence
  Description of Artificial Sequence: Synthetic oligonucleotide
ucuagauuuguaucuugaa

SEQ ID NO: 1752799 - RNA, 19 nt, Artificial Sequence
  Description of Artificial Sequence: Synthetic oligonucleotide
ucauuucccuccaaaccug

SEQ ID NO: 1752800 - RNA, 19 nt, Artificial Sequence
  Description of Artificial Sequence: Synthetic oligonucleotide
aaguuccuaaauucauccu

SEQ ID NO: 1752801 - RNA, 19 nt, Artificial Sequence
  Description of Artificial Sequence: Synthetic oligonucleotide
cauggcaccuucuugugug

SEQ ID NO: 1752802 - RNA, 19 nt, Artificial Sequence
  Description of Artificial Sequence: Synthetic oligonucleotide
agaacagacgauccggcgu

SEQ ID NO: 1752803 - RNA, 19 nt, Artificial Sequence
  Description of Artificial Sequence: Synthetic oligonucleotide
aaugucgaucuggaaauga

SEQ ID NO: 1752804 - RNA, 19 nt, Artificial Sequence
  Description of Artificial Sequence: Synthetic oligonucleotide
ccugacaucgaauauguac

SEQ ID NO: 1752805 - RNA, 19 nt, Artificial Sequence
  Description of Artificial Sequence: Synthetic oligonucleotide
agaugucccucaucgauug

SEQ ID NO: 1752806 - RNA, 19 nt, Artificial Sequence
  Description of Artificial Sequence: Synthetic oligonucleotide
ugucgaucuggaaaugagu

SEQ ID NO: 1752807 - RNA, 19 nt, Artificial Sequence
  Description of Artificial Sequence: Synthetic oligonucleotide
uguuuccuuuauccuggcg

SEQ ID NO: 1752808 - RNA, 19 nt, Artificial Sequence
  Description of Artificial Sequence: Synthetic oligonucleotide
ccuaaauucauccugauua

SEQ ID NO: 1752809 - RNA, 19 nt, Artificial Sequence
  Description of Artificial Sequence: Synthetic oligonucleotide
uccuucucaacacuggguu

SEQ ID NO: 1752810 - RNA, 19 nt, Artificial Sequence
  Description of Artificial Sequence: Synthetic oligonucleotide
auuuguaucuugaaguaaa

SEQ ID NO: 1752811 - RNA, 19 nt, Artificial Sequence
  Description of Artificial Sequence: Synthetic oligonucleotide
gagagaguggcucucuuga

SEQ ID NO: 1752812 - RNA, 19 nt, Artificial Sequence
  Description of Artificial Sequence: Synthetic oligonucleotide
gguuggagaaauauuuccg

SEQ ID NO: 1752813 - RNA, 19 nt, Artificial Sequence
  Description of Artificial Sequence: Synthetic oligonucleotide
gucugaaagcagcagaaca

SEQ ID NO: 1752814 - RNA, 19 nt, Artificial Sequence
  Description of Artificial Sequence: Synthetic oligonucleotide
accugaaauagacguguag

SEQ ID NO: 1752815 - RNA, 19 nt, Artificial Sequence
  Description of Artificial Sequence: Synthetic oligonucleotide
uccguucacaaacuccaug

SEQ ID NO: 1752816 - RNA, 19 nt, Artificial Sequence
  Description of Artificial Sequence: Synthetic oligonucleotide
uguucuaaggcggaugcuc

SEQ ID NO: 1752817 - RNA, 19 nt, Artificial Sequence
  Description of Artificial Sequence: Synthetic oligonucleotide
agagagacauuuaaauucu

SEQ ID NO: 1752818 - RNA, 19 nt, Artificial Sequence
  Description of Artificial Sequence: Synthetic oligonucleotide
caaaccugaaauagacgug

SEQ ID NO: 1752819 - RNA, 19 nt, Artificial Sequence
  Description of Artificial Sequence: Synthetic oligonucleotide
ugucccucaucgauuggag

SEQ ID NO: 1752820 - RNA, 19 nt, Artificial Sequence
  Description of Artificial Sequence: Synthetic oligonucleotide
aaagugguccacagaaugu

SEQ ID NO: 1752821 - RNA, 19 nt, Artificial Sequence
  Description of Artificial Sequence: Synthetic oligonucleotide
cacagaaugucuagauuug

SEQ ID NO: 1752822 - RNA, 19 nt, Artificial Sequence
  Description of Artificial Sequence: Synthetic oligonucleotide
ucaucgauuggaguuaaau

SEQ ID NO: 1752823 - RNA, 19 nt, Artificial Sequence
  Description of Artificial Sequence: Synthetic oligonucleotide
gauguaccauggcuccucg

SEQ ID NO: 1752824 - RNA, 19 nt, Artificial Sequence
  Description of Artificial Sequence: Synthetic oligonucleotide
ucccuagagagacauuuaa

SEQ ID NO: 1752825 - RNA, 19 nt, Artificial Sequence
  Description of Artificial Sequence: Synthetic oligonucleotide
cuacagggauguaccaugg

SEQ ID NO: 1752826 - RNA, 19 nt, Artificial Sequence
  Description of Artificial Sequence: Synthetic oligonucleotide
ugacaccaaucccauuucc

SEQ ID NO: 1752827 - RNA, 19 nt, Artificial Sequence
  Description of Artificial Sequence: Synthetic oligonucleotide
gugaaggugguguucuaag

SEQ ID NO: 1752828 - RNA, 19 nt, Artificial Sequence
  Description of Artificial Sequence: Synthetic oligonucleotide
ccauauuagcuuaaagaag

SEQ ID NO: 1752829 - RNA, 19 nt, Artificial Sequence
  Description of Artificial Sequence: Synthetic oligonucleotide
aguuugggccacauuggcc

SEQ ID NO: 1752830 - RNA, 19 nt, Artificial Sequence
  Description of Artificial Sequence: Synthetic oligonucleotide
uccggcgucugaaagcagc

SEQ ID NO: 1752831 - RNA, 19 nt, Artificial Sequence
  Description of Artificial Sequence: Synthetic oligonucleotide
ucuucacuagcaugcaguc

SEQ ID NO: 1752832 - RNA, 19 nt, Artificial Sequence
  Description of Artificial Sequence: Synthetic oligonucleotide
uccuuuauccuggcgagca

SEQ ID NO: 1752833 - RNA, 19 nt, Artificial Sequence
  Description of Artificial Sequence: Synthetic oligonucleotide
gcuaguuacugaaaggaag

SEQ ID NO: 1752834 - RNA, 19 nt, Artificial Sequence
  Description of Artificial Sequence: Synthetic oligonucleotide
ugagagaguggcucucuug

SEQ ID NO: 1752835 - RNA, 19 nt, Artificial Sequence
  Description of Artificial Sequence: Synthetic oligonucleotide
cuuaucucagucucgacua

SEQ ID NO: 1752836 - RNA, 19 nt, Artificial Sequence
  Description of Artificial Sequence: Synthetic oligonucleotide
aggaauucccacaauagaa

SEQ ID NO: 1752837 - RNA, 19 nt, Artificial Sequence
  Description of Artificial Sequence: Synthetic oligonucleotide
ggaccuacuguauucuucc

SEQ ID NO: 1752838 - RNA, 19 nt, Artificial Sequence
  Description of Artificial Sequence: Synthetic oligonucleotide
aaauagacguguagacuca

SEQ ID NO: 1752839 - RNA, 19 nt, Artificial Sequence
  Description of Artificial Sequence: Synthetic oligonucleotide
uuuuagguugggagcuuga

SEQ ID NO: 1752840 - RNA, 19 nt, Artificial Sequence
  Description of Artificial Sequence: Synthetic oligonucleotide
uccucgggacuugagagag

SEQ ID NO: 1752841 - RNA, 19 nt, Artificial Sequence
  Description of Artificial Sequence: Synthetic oligonucleotide
cuugaagcuccacccuucg

SEQ ID NO: 1752842 - RNA, 19 nt, Artificial Sequence
  Description of Artificial Sequence: Synthetic oligonucleotide
aguuacugaaaggaagagu

SEQ ID NO: 1752843 - RNA, 19 nt, Artificial Sequence
  Description of Artificial Sequence: Synthetic oligonucleotide
uucgagguuggagaaauau

SEQ ID NO: 1752844 - RNA, 19 nt, Artificial Sequence
  Description of Artificial Sequence: Synthetic oligonucleotide
gaacagacgauccggcguc

SEQ ID NO: 1752845 - RNA, 19 nt, Artificial Sequence
  Description of Artificial Sequence: Synthetic oligonucleotide
gguguucuaaggcggaugc

SEQ ID NO: 1752846 - RNA, 19 nt, Artificial Sequence
  Description of Artificial Sequence: Synthetic oligonucleotide
cagggauguaccauggcuc

SEQ ID NO: 1752847 - RNA, 19 nt, Artificial Sequence
  Description of Artificial Sequence: Synthetic oligonucleotide
cauucuacuuggaaugcca

SEQ ID NO: 1752848 - RNA, 19 nt, Artificial Sequence
  Description of Artificial Sequence: Synthetic oligonucleotide
ucauucuacuuggaaugcc

SEQ ID NO: 1752849 - RNA, 19 nt, Artificial Sequence
  Description of Artificial Sequence: Synthetic oligonucleotide
ugguugcgggcuaaggaca

SEQ ID NO: 1752850 - RNA, 19 nt, Artificial Sequence
  Description of Artificial Sequence: Synthetic oligonucleotide
gacguguagacucaagggu

SEQ ID NO: 1752851 - RNA, 19 nt, Artificial Sequence
  Description of Artificial Sequence: Synthetic oligonucleotide
accuccguucacaaacucc

SEQ ID NO: 1752852 - RNA, 19 nt, Artificial Sequence
  Description of Artificial Sequence: Synthetic oligonucleotide
cauaggaagaugucccuca

SEQ ID NO: 1752853 - RNA, 19 nt, Artificial Sequence
  Description of Artificial Sequence: Synthetic oligonucleotide
ucccucaucgauuggaguu

SEQ ID NO: 1752854 - RNA, 19 nt, Artificial Sequence
  Description of Artificial Sequence: Synthetic oligonucleotide
cuaaggaauucccacaaua

SEQ ID NO: 1752855 - RNA, 19 nt, Artificial Sequence
  Description of Artificial Sequence: Synthetic oligonucleotide
gugguugcgggcuaaggac

SEQ ID NO: 1752856 - RNA, 19 nt, Artificial Sequence
  Description of Artificial Sequence: Synthetic oligonucleotide
gucauuucccuccaaaccu

SEQ ID NO: 1752857 - RNA, 19 nt, Artificial Sequence
  Description of Artificial Sequence: Synthetic oligonucleotide
aucuuaucucagucucgac

SEQ ID NO: 1752858 - RNA, 19 nt, Artificial Sequence
  Description of Artificial Sequence: Synthetic oligonucleotide
agaguaagucauucuacuu

SEQ ID NO: 1752859 - RNA, 19 nt, Artificial Sequence
  Description of Artificial Sequence: Synthetic oligonucleotide
uuaggaccuacuguauucu

SEQ ID NO: 1752860 - RNA, 19 nt, Artificial Sequence
  Description of Artificial Sequence: Synthetic oligonucleotide
uaucgaugccgaaucugcu

SEQ ID NO: 1752861 - RNA, 19 nt, Artificial Sequence
  Description of Artificial Sequence: Synthetic oligonucleotide
guuaucgaugccgaaucug

SEQ ID NO: 1752862 - RNA, 19 nt, Artificial Sequence
  Description of Artificial Sequence: Synthetic oligonucleotide
uucccacaauagaaauucc

SEQ ID NO: 1752863 - RNA, 19 nt, Artificial Sequence
  Description of Artificial Sequence: Synthetic oligonucleotide
uugacaccaaucccauuuc

SEQ ID NO: 1752864 - RNA, 19 nt, Artificial Sequence
  Description of Artificial Sequence: Synthetic oligonucleotide
gaagaugucccucaucgau

SEQ ID NO: 1752865 - RNA, 19 nt, Artificial Sequence
  Description of Artificial Sequence: Synthetic oligonucleotide
uggccugacaucgaauaug

SEQ ID NO: 1752866 - RNA, 19 nt, Artificial Sequence
  Description of Artificial Sequence: Synthetic oligonucleotide
gcauucaccccacaguuug

SEQ ID NO: 1752867 - RNA, 19 nt, Artificial Sequence
  Description of Artificial Sequence: Synthetic oligonucleotide
ucuucccacgaucucuccu

SEQ ID NO: 1752868 - RNA, 19 nt, Artificial Sequence
  Description of Artificial Sequence: Synthetic oligonucleotide
accgcauucaccccacagu

SEQ ID NO: 1752869 - RNA, 19 nt, Artificial Sequence
  Description of Artificial Sequence: Synthetic oligonucleotide
uuaucucagucucgacuac

SEQ ID NO: 1752870 - RNA, 19 nt, Artificial Sequence
  Description of Artificial Sequence: Synthetic oligonucleotide
agugcacauccuuguauca

SEQ ID NO: 1752871 - RNA, 19 nt, Artificial Sequence
  Description of Artificial Sequence: Synthetic oligonucleotide
ugacaucgaauauguacau

SEQ ID NO: 1752872 - RNA, 19 nt, Artificial Sequence
  Description of Artificial Sequence: Synthetic oligonucleotide
cuuggaaugccauucauuu

SEQ ID NO: 1752873 - RNA, 19 nt, Artificial Sequence
  Description of Artificial Sequence: Synthetic oligonucleotide
acagugcacauccuuguau

SEQ ID NO: 1752874 - RNA, 19 nt, Artificial Sequence
  Description of Artificial Sequence: Synthetic oligonucleotide
cagugcacauccuuguauc

SEQ ID NO: 1752875 - RNA, 19 nt, Artificial Sequence
  Description of Artificial Sequence: Synthetic oligonucleotide
guuugggccacauuggccu

SEQ ID NO: 1752876 - RNA, 19 nt, Artificial Sequence
  Description of Artificial Sequence: Synthetic oligonucleotide
aguuaucgaugccgaaucu

SEQ ID NO: 1752877 - RNA, 19 nt, Artificial Sequence
  Description of Artificial Sequence: Synthetic oligonucleotide
uccuaaauucauccugauu

SEQ ID NO: 1752878 - RNA, 19 nt, Artificial Sequence
  Description of Artificial Sequence: Synthetic oligonucleotide
acgauccggcgucugaaag

SEQ ID NO: 1752879 - RNA, 19 nt, Artificial Sequence
  Description of Artificial Sequence: Synthetic oligonucleotide
ucacagcauacaagucucc

SEQ ID NO: 1752880 - RNA, 19 nt, Artificial Sequence
  Description of Artificial Sequence: Synthetic oligonucleotide
agcagaacagcugggugag

SEQ ID NO: 1752881 - RNA, 19 nt, Artificial Sequence
  Description of Artificial Sequence: Synthetic oligonucleotide
cucgacuacagggauguac

SEQ ID NO: 1752882 - RNA, 19 nt, Artificial Sequence
  Description of Artificial Sequence: Synthetic oligonucleotide
guuccuaaauucauccuga

SEQ ID NO: 1752883 - RNA, 19 nt, Artificial Sequence
  Description of Artificial Sequence: Synthetic oligonucleotide
ucgagguuggagaaauauu

SEQ ID NO: 1752884 - RNA, 19 nt, Artificial Sequence
  Description of Artificial Sequence: Synthetic oligonucleotide
aggaccuacuguauucuuc

SEQ ID NO: 1752885 - RNA, 19 nt, Artificial Sequence
  Description of Artificial Sequence: Synthetic oligonucleotide
cugccauauuagcuuaaag

SEQ ID NO: 1752886 - RNA, 19 nt, Artificial Sequence
  Description of Artificial Sequence: Synthetic oligonucleotide
caguuugggccacauuggc

SEQ ID NO: 1752887 - RNA, 19 nt, Artificial Sequence
  Description of Artificial Sequence: Synthetic oligonucleotide
ggaagaauugacaccaauc

SEQ ID NO: 1752888 - RNA, 19 nt, Artificial Sequence
  Description of Artificial Sequence: Synthetic oligonucleotide
cacccuucgaggacuagug

SEQ ID NO: 1752889 - RNA, 19 nt, Artificial Sequence
  Description of Artificial Sequence: Synthetic oligonucleotide
caucgaauauguacauuca

SEQ ID NO: 1752890 - RNA, 19 nt, Artificial Sequence
  Description of Artificial Sequence: Synthetic oligonucleotide
augccgaaucugcuggaag

SEQ ID NO: 1752891 - RNA, 19 nt, Artificial Sequence
  Description of Artificial Sequence: Synthetic oligonucleotide
auucauuucccuagagaga

SEQ ID NO: 1752892 - RNA, 19 nt, Artificial Sequence
  Description of Artificial Sequence: Synthetic oligonucleotide
aacccuccuuucccugccg

SEQ ID NO: 1752893 - RNA, 19 nt, Artificial Sequence
  Description of Artificial Sequence: Synthetic oligonucleotide
gagguuggagaaauauuuc

SEQ ID NO: 1752894 - RNA, 19 nt, Artificial Sequence
  Description of Artificial Sequence: Synthetic oligonucleotide
gauccggcgucugaaagca

SEQ ID NO: 1752895 - RNA, 19 nt, Artificial Sequence
  Description of Artificial Sequence: Synthetic oligonucleotide
ucaccuccguucacaaacu

SEQ ID NO: 1752896 - RNA, 19 nt, Artificial Sequence
  Description of Artificial Sequence: Synthetic oligonucleotide
cucgggacuugagagagug

SEQ ID NO: 1752897 - RNA, 19 nt, Artificial Sequence
  Description of Artificial Sequence: Synthetic oligonucleotide
aauagacguguagacucaa

SEQ ID NO: 1752898 - RNA, 19 nt, Artificial Sequence
  Description of Artificial Sequence: Synthetic oligonucleotide
uuuagguugggagcuugaa

SEQ ID NO: 1752899 - RNA, 19 nt, Artificial Sequence
  Description of Artificial Sequence: Synthetic oligonucleotide
ugcccauggcaccuucuug

SEQ ID NO: 1752900 - RNA, 19 nt, Artificial Sequence
  Description of Artificial Sequence: Synthetic oligonucleotide
uaccauggcuccucgggac

SEQ ID NO: 1752901 - RNA, 19 nt, Artificial Sequence
  Description of Artificial Sequence: Synthetic oligonucleotide
uaucucagucucgacuaca

SEQ ID NO: 1752902 - RNA, 19 nt, Artificial Sequence
  Description of Artificial Sequence: Synthetic oligonucleotide
gaugucccucaucgauugg

SEQ ID NO: 1752903 - RNA, 19 nt, Artificial Sequence
  Description of Artificial Sequence: Synthetic oligonucleotide
gucauucuacuuggaaugc

SEQ ID NO: 1752904 - RNA, 19 nt, Artificial Sequence
  Description of Artificial Sequence: Synthetic oligonucleotide
acagaaugucuagauuugu

SEQ ID NO: 1752905 - RNA, 19 nt, Artificial Sequence
  Description of Artificial Sequence: Synthetic oligonucleotide
cuugugugacacucaauaa

SEQ ID NO: 1752906 - RNA, 19 nt, Artificial Sequence
  Description of Artificial Sequence: Synthetic oligonucleotide
cuaaggcggaugcucuaag

SEQ ID NO: 1752907 - RNA, 19 nt, Artificial Sequence
  Description of Artificial Sequence: Synthetic oligonucleotide
ucgggacuugagagagugg

SEQ ID NO: 1752908 - RNA, 19 nt, Artificial Sequence
  Description of Artificial Sequence: Synthetic oligonucleotide
ugguguucuaaggcggaug

SEQ ID NO: 1752909 - RNA, 19 nt, Artificial Sequence
  Description of Artificial Sequence: Synthetic oligonucleotide
cuuuauccuggcgagcauc

SEQ ID NO: 1752910 - RNA, 19 nt, Artificial Sequence
  Description of Artificial Sequence: Synthetic oligonucleotide
aggcggaugcucuaaggaa

SEQ ID NO: 1752911 - RNA, 19 nt, Artificial Sequence
  Description of Artificial Sequence: Synthetic oligonucleotide
ucuaaggcggaugcucuaa

SEQ ID NO: 1752912 - RNA, 19 nt, Artificial Sequence
  Description of Artificial Sequence: Synthetic oligonucleotide
guuuuagguugggagcuug

SEQ ID NO: 1752913 - RNA, 19 nt, Artificial Sequence
  Description of Artificial Sequence: Synthetic oligonucleotide
caacacccggaugaacucg

SEQ ID NO: 1752914 - RNA, 19 nt, Artificial Sequence
  Description of Artificial Sequence: Synthetic oligonucleotide
aagaugucccucaucgauu

SEQ ID NO: 1752915 - RNA, 19 nt, Artificial Sequence
  Description of Artificial Sequence: Synthetic oligonucleotide
gaguuucgagguuggagaa

SEQ ID NO: 1752916 - RNA, 19 nt, Artificial Sequence
  Description of Artificial Sequence: Synthetic oligonucleotide
uuccuaaauucauccugau

SEQ ID NO: 1752917 - RNA, 19 nt, Artificial Sequence
  Description of Artificial Sequence: Synthetic oligonucleotide
uugaagcuccacccuucga

SEQ ID NO: 1752918 - RNA, 19 nt, Artificial Sequence
  Description of Artificial Sequence: Synthetic oligonucleotide
gaacagugcacauccuugu

SEQ ID NO: 1752919 - RNA, 19 nt, Artificial Sequence
  Description of Artificial Sequence: Synthetic oligonucleotide
cgauuggaguuaaaugugg

SEQ ID NO: 1752920 - RNA, 19 nt, Artificial Sequence
  Description of Artificial Sequence: Synthetic oligonucleotide
ucgaggacuagugaacauu

SEQ ID NO: 1752921 - RNA, 19 nt, Artificial Sequence
  Description of Artificial Sequence: Synthetic oligonucleotide
caucuuaucucagucucga

SEQ ID NO: 1752922 - RNA, 19 nt, Artificial Sequence
  Description of Artificial Sequence: Synthetic oligonucleotide
aagucuccuguuuccuuua

SEQ ID NO: 1752923 - RNA, 19 nt, Artificial Sequence
  Description of Artificial Sequence: Synthetic oligonucleotide
cgggcuaaggacaggaucc

SEQ ID NO: 1752924 - RNA, 19 nt, Artificial Sequence
  Description of Artificial Sequence: Synthetic oligonucleotide
uucccuagagagacauuua

SEQ ID NO: 1752925 - RNA, 19 nt, Artificial Sequence
  Description of Artificial Sequence: Synthetic oligonucleotide
gaaguuaucgaugccgaau

SEQ ID NO: 1752926 - RNA, 19 nt, Artificial Sequence
  Description of Artificial Sequence: Synthetic oligonucleotide
auaaggcuauggcugcaau

SEQ ID NO: 1752927 - RNA, 19 nt, Artificial Sequence
  Description of Artificial Sequence: Synthetic oligonucleotide
agcuugaaggacacccauc

SEQ ID NO: 1752928 - RNA, 19 nt, Artificial Sequence
  Description of Artificial Sequence: Synthetic oligonucleotide
aacacccggaugaacucga

SEQ ID NO: 1752929 - RNA, 19 nt, Artificial Sequence
  Description of Artificial Sequence: Synthetic oligonucleotide
auccuggcgagcaucaccu

SEQ ID NO: 1752930 - RNA, 19 nt, Artificial Sequence
  Description of Artificial Sequence: Synthetic oligonucleotide
auguaccauggcuccucgg

SEQ ID NO: 1752931 - RNA, 19 nt, Artificial Sequence
  Description of Artificial Sequence: Synthetic oligonucleotide
cagaguaagucauucuacu

SEQ ID NO: 1752932 - RNA, 19 nt, Artificial Sequence
  Description of Artificial Sequence: Synthetic oligonucleotide
uucgaggacuagugaacau

SEQ ID NO: 1752933 - RNA, 19 nt, Artificial Sequence
  Description of Artificial Sequence: Synthetic oligonucleotide
gaggacuagugaacauuug

SEQ ID NO: 1752934 - RNA, 19 nt, Artificial Sequence
  Description of Artificial Sequence: Synthetic oligonucleotide
auagacguguagacucaag

SEQ ID NO: 1752935 - RNA, 19 nt, Artificial Sequence
  Description of Artificial Sequence: Synthetic oligonucleotide
guauucuucccacgaucuc

SEQ ID NO: 1752936 - RNA, 19 nt, Artificial Sequence
  Description of Artificial Sequence: Synthetic oligonucleotide
gaaauauuuccggguugga

SEQ ID NO: 1752937 - RNA, 19 nt, Artificial Sequence
  Description of Artificial Sequence: Synthetic oligonucleotide
ggugguugcgggcuaagga

SEQ ID NO: 1752938 - RNA, 19 nt, Artificial Sequence
  Description of Artificial Sequence: Synthetic oligonucleotide
cagaaugucuagauuugua

SEQ ID NO: 1752939 - RNA, 19 nt, Artificial Sequence
  Description of Artificial Sequence: Synthetic oligonucleotide
caccgcauucaccccacag

SEQ ID NO: 1752940 - RNA, 19 nt, Artificial Sequence
  Description of Artificial Sequence: Synthetic oligonucleotide
acaagucuccuguuuccuu

SEQ ID NO: 1752941 - RNA, 19 nt, Artificial Sequence
  Description of Artificial Sequence: Synthetic oligonucleotide
uccaccgcauucaccccac

SEQ ID NO: 1752942 - RNA, 19 nt, Artificial Sequence
  Description of Artificial Sequence: Synthetic oligonucleotide
ggaauucccacaauagaaa

SEQ ID NO: 1752943 - RNA, 19 nt, Artificial Sequence
  Description of Artificial Sequence: Synthetic oligonucleotide
ccugaaauagacguguaga

SEQ ID NO: 1752944 - RNA, 19 nt, Artificial Sequence
  Description of Artificial Sequence: Synthetic oligonucleotide
cuucgaggacuagugaaca

SEQ ID NO: 1752945 - RNA, 19 nt, Artificial Sequence
  Description of Artificial Sequence: Synthetic oligonucleotide
acguguagacucaaggguu

SEQ ID NO: 1752946 - RNA, 19 nt, Artificial Sequence
  Description of Artificial Sequence: Synthetic oligonucleotide
gauguccaaucuccuucuc

SEQ ID NO: 1752947 - RNA, 19 nt, Artificial Sequence
  Description of Artificial Sequence: Synthetic oligonucleotide
guaccauggcuccucggga

SEQ ID NO: 1752948 - RNA, 19 nt, Artificial Sequence
  Description of Artificial Sequence: Synthetic oligonucleotide
uuccuuuauccuggcgagc

SEQ ID NO: 1752949 - RNA, 19 nt, Artificial Sequence
  Description of Artificial Sequence: Synthetic oligonucleotide
agcuaguuacugaaaggaa

SEQ ID NO: 1752950 - RNA, 19 nt, Artificial Sequence
  Description of Artificial Sequence: Synthetic oligonucleotide
uauuuccggguuggagacc

SEQ ID NO: 1752951 - RNA, 19 nt, Artificial Sequence
  Description of Artificial Sequence: Synthetic oligonucleotide
ucccuccaaaccugaaaua

SEQ ID NO: 1752952 - RNA, 19 nt, Artificial Sequence
  Description of Artificial Sequence: Synthetic oligonucleotide
uucuaaggcggaugcucua

SEQ ID NO: 1752953 - RNA, 19 nt, Artificial Sequence
  Description of Artificial Sequence: Synthetic oligonucleotide
ccguucacaaacuccauga

SEQ ID NO: 1752954 - RNA, 19 nt, Artificial Sequence
  Description of Artificial Sequence: Synthetic oligonucleotide
guccaaucuccuucucaac

SEQ ID NO: 1752955 - RNA, 19 nt, Artificial Sequence
  Description of Artificial Sequence: Synthetic oligonucleotide
auucuacuuggaaugccau

SEQ ID NO: 1752956 - RNA, 19 nt, Artificial Sequence
  Description of Artificial Sequence: Synthetic oligonucleotide
augucuagauuuguaucuu

SEQ ID NO: 1752957 - RNA, 19 nt, Artificial Sequence
  Description of Artificial Sequence: Synthetic oligonucleotide
acccaucgucuguuucuuc

SEQ ID NO: 1752958 - RNA, 19 nt, Artificial Sequence
  Description of Artificial Sequence: Synthetic oligonucleotide
ugccgucuuaaugucgauc

SEQ ID NO: 1752959 - RNA, 19 nt, Artificial Sequence
  Description of Artificial Sequence: Synthetic oligonucleotide
ggaacccuccuuucccugc

SEQ ID NO: 1752960 - RNA, 19 nt, Artificial Sequence
  Description of Artificial Sequence: Synthetic oligonucleotide
gccgucuuaaugucgaucu

SEQ ID NO: 1752961 - RNA, 19 nt, Artificial Sequence
  Description of Artificial Sequence: Synthetic oligonucleotide
acuggguuuuagguuggga

SEQ ID NO: 1752962 - RNA, 19 nt, Artificial Sequence
  Description of Artificial Sequence: Synthetic oligonucleotide
acccuucgaggacuaguga

SEQ ID NO: 1752963 - RNA, 19 nt, Artificial Sequence
  Description of Artificial Sequence: Synthetic oligonucleotide
ucacuagcaugcagucuuu

SEQ ID NO: 1752964 - RNA, 19 nt, Artificial Sequence
  Description of Artificial Sequence: Synthetic oligonucleotide
gaauugacaccaaucccau

SEQ ID NO: 1752965 - RNA, 19 nt, Artificial Sequence
  Description of Artificial Sequence: Synthetic oligonucleotide
acugccauauuagcuuaaa

SEQ ID NO: 1752966 - RNA, 19 nt, Artificial Sequence
  Description of Artificial Sequence: Synthetic oligonucleotide
uaggaccuacuguauucuu

SEQ ID NO: 1752967 - RNA, 19 nt, Artificial Sequence
  Description of Artificial Sequence: Synthetic oligonucleotide
gacucaagacauugacagu

SEQ ID NO: 1752968 - RNA, 19 nt, Artificial Sequence
  Description of Artificial Sequence: Synthetic oligonucleotide
gucucgacuacagggaugu

SEQ ID NO: 1752969 - RNA, 19 nt, Artificial Sequence
  Description of Artificial Sequence: Synthetic oligonucleotide
uccggguuggagacccauc

SEQ ID NO: 1752970 - RNA, 19 nt, Artificial Sequence
  Description of Artificial Sequence: Synthetic oligonucleotide
agucucgacuacagggaug

SEQ ID NO: 1752971 - RNA, 19 nt, Artificial Sequence
  Description of Artificial Sequence: Synthetic oligonucleotide
augcucuaaggaauuccca

SEQ ID NO: 1752972 - RNA, 19 nt, Artificial Sequence
  Description of Artificial Sequence: Synthetic oligonucleotide
aacagacgauccggcgucu

SEQ ID NO: 1752973 - RNA, 19 nt, Artificial Sequence
  Description of Artificial Sequence: Synthetic oligonucleotide
gucgaucuggaaaugaguu

SEQ ID NO: 1752974 - RNA, 19 nt, Artificial Sequence
  Description of Artificial Sequence: Synthetic oligonucleotide
ggaaugccauucauuuccc

SEQ ID NO: 1752975 - RNA, 19 nt, Artificial Sequence
  Description of Artificial Sequence: Synthetic oligonucleotide
gucuccuguuuccuuuauc

SEQ ID NO: 1752976 - RNA, 19 nt, Artificial Sequence
  Description of Artificial Sequence: Synthetic oligonucleotide
aaccugaaauagacgugua

SEQ ID NO: 1752977 - RNA, 19 nt, Artificial Sequence
  Description of Artificial Sequence: Synthetic oligonucleotide
ccacgaucucuccuuuugg

SEQ ID NO: 1752978 - RNA, 19 nt, Artificial Sequence
  Description of Artificial Sequence: Synthetic oligonucleotide
gguuggagacccaucccug

SEQ ID NO: 1752979 - RNA, 19 nt, Artificial Sequence
  Description of Artificial Sequence: Synthetic oligonucleotide
ccauucauuucccuagaga

SEQ ID NO: 1752980 - RNA, 19 nt, Artificial Sequence
  Description of Artificial Sequence: Synthetic oligonucleotide
ggacuagugaacauuugcu

SEQ ID NO: 1752981 - RNA, 19 nt, Artificial Sequence
  Description of Artificial Sequence: Synthetic oligonucleotide
gaugccgaaucugcuggaa

SEQ ID NO: 1752982 - RNA, 19 nt, Artificial Sequence
  Description of Artificial Sequence: Synthetic oligonucleotide
gacgauccggcgucugaaa

SEQ ID NO: 1752983 - RNA, 19 nt, Artificial Sequence
  Description of Artificial Sequence: Synthetic oligonucleotide
agacgauccggcgucugaa

SEQ ID NO: 1752984 - RNA, 19 nt, Artificial Sequence
  Description of Artificial Sequence: Synthetic oligonucleotide
guugcgggcuaaggacagg

SEQ ID NO: 1752985 - RNA, 19 nt, Artificial Sequence
  Description of Artificial Sequence: Synthetic oligonucleotide
gguugcgggcuaaggacag

SEQ ID NO: 1752986 - RNA, 19 nt, Artificial Sequence
  Description of Artificial Sequence: Synthetic oligonucleotide
ccacagaaugucuagauuu

SEQ ID NO: 1752987 - RNA, 19 nt, Artificial Sequence
  Description of Artificial Sequence: Synthetic oligonucleotide
cacgaucucuccuuuuggu

SEQ ID NO: 1752988 - RNA, 19 nt, Artificial Sequence
  Description of Artificial Sequence: Synthetic oligonucleotide
gcgggcuaaggacaggauc

SEQ ID NO: 1752989 - RNA, 19 nt, Artificial Sequence
  Description of Artificial Sequence: Synthetic oligonucleotide
guucuaaggcggaugcucu

SEQ ID NO: 1752990 - RNA, 19 nt, Artificial Sequence
  Description of Artificial Sequence: Synthetic oligonucleotide
cuccucgggacuugagaga

SEQ ID NO: 1752991 - RNA, 19 nt, Artificial Sequence
  Description of Artificial Sequence: Synthetic oligonucleotide
uggcucucuugaagcucca

SEQ ID NO: 1752992 - RNA, 19 nt, Artificial Sequence
  Description of Artificial Sequence: Synthetic oligonucleotide
cuguuuggcucauaauuuu

SEQ ID NO: 1752993 - RNA, 19 nt, Artificial Sequence
  Description of Artificial Sequence: Synthetic oligonucleotide
uuuccggguuggagaccca

SEQ ID NO: 1752994 - RNA, 19 nt, Artificial Sequence
  Description of Artificial Sequence: Synthetic oligonucleotide
ccuucacagcauacaaguc

SEQ ID NO: 1752995 - RNA, 19 nt, Artificial Sequence
  Description of Artificial Sequence: Synthetic oligonucleotide
caccuccguucacaaacuc

SEQ ID NO: 1752996 - RNA, 19 nt, Artificial Sequence
  Description of Artificial Sequence: Synthetic oligonucleotide
ggauguaccauggcuccuc

SEQ ID NO: 1752997 - RNA, 19 nt, Artificial Sequence
  Description of Artificial Sequence: Synthetic oligonucleotide
gacuacagggauguaccau

SEQ ID NO: 1752998 - RNA, 19 nt, Artificial Sequence
  Description of Artificial Sequence: Synthetic oligonucleotide
uggcugcaauucuggugac

SEQ ID NO: 1752999 - RNA, 19 nt, Artificial Sequence
  Description of Artificial Sequence: Synthetic oligonucleotide
ccaacacccggaugaacuc

SEQ ID NO: 1753000 - RNA, 19 nt, Artificial Sequence
  Description of Artificial Sequence: Synthetic oligonucleotide
ccuccaaaccugaaauaga

SEQ ID NO: 1753001 - RNA, 19 nt, Artificial Sequence
  Description of Artificial Sequence: Synthetic oligonucleotide
caagucuccuguuuccuuu

SEQ ID NO: 1753002 - RNA, 19 nt, Artificial Sequence
  Description of Artificial Sequence: Synthetic oligonucleotide
cacuggguuuuagguuggg

SEQ ID NO: 1753003 - RNA, 19 nt, Artificial Sequence
  Description of Artificial Sequence: Synthetic oligonucleotide
caugauguccaaucuccuu

SEQ ID NO: 1753004 - RNA, 19 nt, Artificial Sequence
  Description of Artificial Sequence: Synthetic oligonucleotide
ggcuccucgggacuugaga

SEQ ID NO: 1753005 - RNA, 19 nt, Artificial Sequence
  Description of Artificial Sequence: Synthetic oligonucleotide
cgauccggcgucugaaagc

SEQ ID NO: 1753006 - RNA, 19 nt, Artificial Sequence
  Description of Artificial Sequence: Synthetic oligonucleotide
ggguuggagacccaucccu

SEQ ID NO: 1753007 - RNA, 19 nt, Artificial Sequence
  Description of Artificial Sequence: Synthetic oligonucleotide
gcuaaggacaggauccucu

SEQ ID NO: 1753008 - RNA, 19 nt, Artificial Sequence
  Description of Artificial Sequence: Synthetic oligonucleotide
cagacgauccggcgucuga

SEQ ID NO: 1753009 - RNA, 19 nt, Artificial Sequence
  Description of Artificial Sequence: Synthetic oligonucleotide
cuucccacgaucucuccuu

SEQ ID NO: 1753010 - RNA, 19 nt, Artificial Sequence
  Description of Artificial Sequence: Synthetic oligonucleotide
gguccacagaaugucuaga

SEQ ID NO: 1753011 - RNA, 19 nt, Artificial Sequence
  Description of Artificial Sequence: Synthetic oligonucleotide
ccuggcgagcaucaccuuc

SEQ ID NO: 1753012 - RNA, 19 nt, Artificial Sequence
  Description of Artificial Sequence: Synthetic oligonucleotide
guaaagugguccacagaau

SEQ ID NO: 1753013 - RNA, 19 nt, Artificial Sequence
  Description of Artificial Sequence: Synthetic oligonucleotide
uccccaacacccggaugaa

SEQ ID NO: 1753014 - RNA, 19 nt, Artificial Sequence
  Description of Artificial Sequence: Synthetic oligonucleotide
cccuucgaggacuagugaa

SEQ ID NO: 1753015 - RNA, 19 nt, Artificial Sequence
  Description of Artificial Sequence: Synthetic oligonucleotide
gacugccauauuagcuuaa

SEQ ID NO: 1753016 - RNA, 19 nt, Artificial Sequence
  Description of Artificial Sequence: Synthetic oligonucleotide
cauggcuccucgggacuug

SEQ ID NO: 1753017 - RNA, 19 nt, Artificial Sequence
  Description of Artificial Sequence: Synthetic oligonucleotide
ggugguguucuaaggcgga

SEQ ID NO: 1753018 - RNA, 19 nt, Artificial Sequence
  Description of Artificial Sequence: Synthetic oligonucleotide
accccacaguuugggccac

SEQ ID NO: 1753019 - RNA, 19 nt, Artificial Sequence
  Description of Artificial Sequence: Synthetic oligonucleotide
cccuagagagacauuuaaa

SEQ ID NO: 1753020 - RNA, 19 nt, Artificial Sequence
  Description of Artificial Sequence: Synthetic oligonucleotide
gcgucugaaagcagcagaa

SEQ ID NO: 1753021 - RNA, 19 nt, Artificial Sequence
  Description of Artificial Sequence: Synthetic oligonucleotide
ccuguuuggcucauaauuu

SEQ ID NO: 1753022 - RNA, 19 nt, Artificial Sequence
  Description of Artificial Sequence: Synthetic oligonucleotide
ggaaaugaguuucgagguu

SEQ ID NO: 1753023 - RNA, 19 nt, Artificial Sequence
  Description of Artificial Sequence: Synthetic oligonucleotide
ggccugacaucgaauaugu

SEQ ID NO: 1753024 - RNA, 19 nt, Artificial Sequence
  Description of Artificial Sequence: Synthetic oligonucleotide
gucccucaucgauuggagu

SEQ ID NO: 1753025 - RNA, 19 nt, Artificial Sequence
  Description of Artificial Sequence: Synthetic oligonucleotide
ggaugaacucgaaguuauc

SEQ ID NO: 1753026 - RNA, 19 nt, Artificial Sequence
  Description of Artificial Sequence: Synthetic oligonucleotide
cuucacuagcaugcagucu

SEQ ID NO: 1753027 - RNA, 19 nt, Artificial Sequence
  Description of Artificial Sequence: Synthetic oligonucleotide
cauuggccugacaucgaau

SEQ ID NO: 1753028 - RNA, 19 nt, Artificial Sequence
  Description of Artificial Sequence: Synthetic oligonucleotide
ccgucuuaaugucgaucug

SEQ ID NO: 1753029 - RNA, 19 nt, Artificial Sequence
  Description of Artificial Sequence: Synthetic oligonucleotide
gagagacauuuaaauucuu

SEQ ID NO: 1753030 - RNA, 19 nt, Artificial Sequence
  Description of Artificial Sequence: Synthetic oligonucleotide
cucaucgauuggaguuaaa

SEQ ID NO: 1753031 - RNA, 19 nt, Artificial Sequence
  Description of Artificial Sequence: Synthetic oligonucleotide
uccuggcgagcaucaccuu

SEQ ID NO: 1753032 - RNA, 19 nt, Artificial Sequence
  Description of Artificial Sequence: Synthetic oligonucleotide
cagucucgacuacagggau

SEQ ID NO: 1753033 - RNA, 19 nt, Artificial Sequence
  Description of Artificial Sequence: Synthetic oligonucleotide
ccacaucgucauccuguag

SEQ ID NO: 1753034 - RNA, 19 nt, Artificial Sequence
  Description of Artificial Sequence: Synthetic oligonucleotide
gccgaaucugcuggaagaa

SEQ ID NO: 1753035 - RNA, 19 nt, Artificial Sequence
  Description of Artificial Sequence: Synthetic oligonucleotide
cggguuggagacccauccc

SEQ ID NO: 1753036 - RNA, 19 nt, Artificial Sequence
  Description of Artificial Sequence: Synthetic oligonucleotide
ccggcgucugaaagcagca

SEQ ID NO: 1753037 - RNA, 19 nt, Artificial Sequence
  Description of Artificial Sequence: Synthetic oligonucleotide
guguucuaaggcggaugcu

SEQ ID NO: 1753038 - RNA, 19 nt, Artificial Sequence
  Description of Artificial Sequence: Synthetic oligonucleotide
ucucgacuacagggaugua

SEQ ID NO: 1753039 - RNA, 19 nt, Artificial Sequence
  Description of Artificial Sequence: Synthetic oligonucleotide
aggggugguugcgggcuaa

SEQ ID NO: 1753040 - RNA, 19 nt, Artificial Sequence
  Description of Artificial Sequence: Synthetic oligonucleotide
cggaugaacucgaaguuau

SEQ ID NO: 1753041 - RNA, 19 nt, Artificial Sequence
  Description of Artificial Sequence: Synthetic oligonucleotide
ggcucucuugaagcuccac

SEQ ID NO: 1753042 - RNA, 19 nt, Artificial Sequence
  Description of Artificial Sequence: Synthetic oligonucleotide
cuccguucacaaacuccau

SEQ ID NO: 1753043 - RNA, 19 nt, Artificial Sequence
  Description of Artificial Sequence: Synthetic oligonucleotide
ggggugguugcgggcuaag

SEQ ID NO: 1753044 - RNA, 19 nt, Artificial Sequence
  Description of Artificial Sequence: Synthetic oligonucleotide
ccggaugaacucgaaguua

SEQ ID NO: 1753045 - RNA, 19 nt, Artificial Sequence
  Description of Artificial Sequence: Synthetic oligonucleotide
cgaggacuagugaacauuu

SEQ ID NO: 1753046 - RNA, 19 nt, Artificial Sequence
  Description of Artificial Sequence: Synthetic oligonucleotide
gugguguucuaaggcggau

SEQ ID NO: 1753047 - RNA, 19 nt, Artificial Sequence
  Description of Artificial Sequence: Synthetic oligonucleotide
ccgcauucaccccacaguu

SEQ ID NO: 1753048 - RNA, 19 nt, Artificial Sequence
  Description of Artificial Sequence: Synthetic oligonucleotide
cccucaucgauuggaguua

SEQ ID NO: 1753049 - RNA, 19 nt, Artificial Sequence
  Description of Artificial Sequence: Synthetic oligonucleotide
gggcuaaggacaggauccu

SEQ ID NO: 1753050 - RNA, 19 nt, Artificial Sequence
  Description of Artificial Sequence: Synthetic oligonucleotide
ccucaucgauuggaguuaa

SEQ ID NO: 1753051 - RNA, 19 nt, Artificial Sequence
  Description of Artificial Sequence: Synthetic oligonucleotide
cccggaugaacucgaaguu

SEQ ID NO: 1753052 - RNA, 19 nt, Artificial Sequence
  Description of Artificial Sequence: Synthetic oligonucleotide
gguuuuagguugggagcuu

SEQ ID NO: 1753053 - RNA, 19 nt, Artificial Sequence
  Description of Artificial Sequence: Synthetic oligonucleotide
cugccgucuuaaugucgau

SEQ ID NO: 1753054 - RNA, 19 nt, Artificial Sequence
  Description of Artificial Sequence: Synthetic oligonucleotide
ccauggcaccuucuugugu

SEQ ID NO: 1753055 - RNA, 19 nt, Artificial Sequence
  Description of Artificial Sequence: Synthetic oligonucleotide
cacuagcaugcagucuuuu

SEQ ID NO: 1753056 - RNA, 19 nt, Artificial Sequence
  Description of Artificial Sequence: Synthetic oligonucleotide
cgaugccgaaucugcugga

SEQ ID NO: 1753057 - RNA, 19 nt, Artificial Sequence
  Description of Artificial Sequence: Synthetic oligonucleotide
gccugacaucgaauaugua

SEQ ID NO: 1753058 - RNA, 19 nt, Artificial Sequence
  Description of Artificial Sequence: Synthetic oligonucleotide
ccuuuauccuggcgagcau

SEQ ID NO: 1753059 - RNA, 19 nt, Artificial Sequence
  Description of Artificial Sequence: Synthetic oligonucleotide
ccgaaucugcuggaagaau

SEQ ID NO: 1753060 - RNA, 19 nt, Artificial Sequence
  Description of Artificial Sequence: Synthetic oligonucleotide
cgcauucaccccacaguuu

SEQ ID NO: 1753061 - RNA, 19 nt, Artificial Sequence
  Description of Artificial Sequence: Synthetic oligonucleotide
aaggcagucauccagaagc

SEQ ID NO: 1753062 - RNA, 19 nt, Artificial Sequence
  Description of Artificial Sequence: Synthetic oligonucleotide
uaaagaaccauuaucuagg

SEQ ID NO: 1753063 - RNA, 19 nt, Artificial Sequence
  Description of Artificial Sequence: Synthetic oligonucleotide
aaagaaaguaauuuaacuu

SEQ ID NO: 1753064 - RNA, 19 nt, Artificial Sequence
  Description of Artificial Sequence: Synthetic oligonucleotide
auguugguaaaauaugggc

SEQ ID NO: 1753065 - RNA, 19 nt, Artificial Sequence
  Description of Artificial Sequence: Synthetic oligonucleotide
aacaacaggguccaagcac

SEQ ID NO: 1753066 - RNA, 19 nt, Artificial Sequence
  Description of Artificial Sequence: Synthetic oligonucleotide
agagagacuauucaaacag

SEQ ID NO: 1753067 - RNA, 19 nt, Artificial Sequence
  Description of Artificial Sequence: Synthetic oligonucleotide
uuuaucugacuuaaucugg

SEQ ID NO: 1753068 - RNA, 19 nt, Artificial Sequence
  Description of Artificial Sequence: Synthetic oligonucleotide
uuuuaucugacuuaaucug

SEQ ID NO: 1753069 - RNA, 19 nt, Artificial Sequence
  Description of Artificial Sequence: Synthetic oligonucleotide
aagaaaguaauuuaacuuu

SEQ ID NO: 1753070 - RNA, 19 nt, Artificial Sequence
  Description of Artificial Sequence: Synthetic oligonucleotide
gagauugaugcccagaugc

SEQ ID NO: 1753071 - RNA, 19 nt, Artificial Sequence
  Description of Artificial Sequence: Synthetic oligonucleotide
aaagggacaccacucgacc

SEQ ID NO: 1753072 - RNA, 19 nt, Artificial Sequence
  Description of Artificial Sequence: Synthetic oligonucleotide
auagcuaacagacugaaaa

SEQ ID NO: 1753073 - RNA, 19 nt, Artificial Sequence
  Description of Artificial Sequence: Synthetic oligonucleotide
uaaauguugguaaaauaug

SEQ ID NO: 1753074 - RNA, 19 nt, Artificial Sequence
  Description of Artificial Sequence: Synthetic oligonucleotide
aauaugggcacaauauuac

SEQ ID NO: 1753075 - RNA, 19 nt, Artificial Sequence
  Description of Artificial Sequence: Synthetic oligonucleotide
uguugguaaaauaugggca

SEQ ID NO: 1753076 - RNA, 19 nt, Artificial Sequence
  Description of Artificial Sequence: Synthetic oligonucleotide
aucugacuuaaucuggucc

SEQ ID NO: 1753077 - RNA, 19 nt, Artificial Sequence
  Description of Artificial Sequence: Synthetic oligonucleotide
agaaccauuaucuaggcaa

SEQ ID NO: 1753078 - RNA, 19 nt, Artificial Sequence
  Description of Artificial Sequence: Synthetic oligonucleotide
aaacaaguagcauuuuacu

SEQ ID NO: 1753079 - RNA, 19 nt, Artificial Sequence
  Description of Artificial Sequence: Synthetic oligonucleotide
uguuggaaggcccugucgg

SEQ ID NO: 1753080 - RNA, 19 nt, Artificial Sequence
  Description of Artificial Sequence: Synthetic oligonucleotide
aauguugguaaaauauggg

SEQ ID NO: 1753081 - RNA, 19 nt, Artificial Sequence
  Description of Artificial Sequence: Synthetic oligonucleotide
uugacgaucagcuuguuuc

SEQ ID NO: 1753082 - RNA, 19 nt, Artificial Sequence
  Description of Artificial Sequence: Synthetic oligonucleotide
cuuaggguacccaucaagg

SEQ ID NO: 1753083 - RNA, 19 nt, Artificial Sequence
  Description of Artificial Sequence: Synthetic oligonucleotide
aguagcauuuuacuaaaug

SEQ ID NO: 1753084 - RNA, 19 nt, Artificial Sequence
  Description of Artificial Sequence: Synthetic oligonucleotide
uuaagcuuagaaagggucu

SEQ ID NO: 1753085 - RNA, 19 nt, Artificial Sequence
  Description of Artificial Sequence: Synthetic oligonucleotide
acuaauacagaacagcgua

SEQ ID NO: 1753086 - RNA, 19 nt, Artificial Sequence
  Description of Artificial Sequence: Synthetic oligonucleotide
acaaguagcauuuuacuaa

SEQ ID NO: 1753087 - RNA, 19 nt, Artificial Sequence
  Description of Artificial Sequence: Synthetic oligonucleotide
ugaucgaacuucauauucc

SEQ ID NO: 1753088 - RNA, 19 nt, Artificial Sequence
  Description of Artificial Sequence: Synthetic oligonucleotide
ugaccccuaaucauggagg

SEQ ID NO: 1753089 - RNA, 19 nt, Artificial Sequence
  Description of Artificial Sequence: Synthetic oligonucleotide
aaugauguaguuccuccgu

SEQ ID NO: 1753090 - RNA, 19 nt, Artificial Sequence
  Description of Artificial Sequence: Synthetic oligonucleotide
aaaauaugggcacaauauu

SEQ ID NO: 1753091 - RNA, 19 nt, Artificial Sequence
  Description of Artificial Sequence: Synthetic oligonucleotide
aaguaauuuaacuuuccua

SEQ ID NO: 1753092 - RNA, 19 nt, Artificial Sequence
  Description of Artificial Sequence: Synthetic oligonucleotide
uacaucaggucacauauaa

SEQ ID NO: 1753093 - RNA, 19 nt, Artificial Sequence
  Description of Artificial Sequence: Synthetic oligonucleotide
aacaaguagcauuuuacua

SEQ ID NO: 1753094 - RNA, 19 nt, Artificial Sequence
  Description of Artificial Sequence: Synthetic oligonucleotide
acuuaaucugguccuaauc

SEQ ID NO: 1753095 - RNA, 19 nt, Artificial Sequence
  Description of Artificial Sequence: Synthetic oligonucleotide
uaccauuucuuuaaagaac

SEQ ID NO: 1753096 - RNA, 19 nt, Artificial Sequence
  Description of Artificial Sequence: Synthetic oligonucleotide
guugguaaaauaugggcac

SEQ ID NO: 1753097 - RNA, 19 nt, Artificial Sequence
  Description of Artificial Sequence: Synthetic oligonucleotide
uccauuucaguucacuuuc

SEQ ID NO: 1753098 - RNA, 19 nt, Artificial Sequence
  Description of Artificial Sequence: Synthetic oligonucleotide
ucugacuuaaucugguccu

SEQ ID NO: 1753099 - RNA, 19 nt, Artificial Sequence
  Description of Artificial Sequence: Synthetic oligonucleotide
uggaaagggacaccacucg

SEQ ID NO: 1753100 - RNA, 19 nt, Artificial Sequence
  Description of Artificial Sequence: Synthetic oligonucleotide
agaaaguaauuuaacuuuc

SEQ ID NO: 1753101 - RNA, 19 nt, Artificial Sequence
  Description of Artificial Sequence: Synthetic oligonucleotide
uccgucacgugacagguag

SEQ ID NO: 1753102 - RNA, 19 nt, Artificial Sequence
  Description of Artificial Sequence: Synthetic oligonucleotide
auacgauuggaguggaaag

SEQ ID NO: 1753103 - RNA, 19 nt, Artificial Sequence
  Description of Artificial Sequence: Synthetic oligonucleotide
uucagauacaucaggucac

SEQ ID NO: 1753104 - RNA, 19 nt, Artificial Sequence
  Description of Artificial Sequence: Synthetic oligonucleotide
uuggugacguaccuuagca

SEQ ID NO: 1753105 - RNA, 19 nt, Artificial Sequence
  Description of Artificial Sequence: Synthetic oligonucleotide
aucuaggcaacauuugucu

SEQ ID NO: 1753106 - RNA, 19 nt, Artificial Sequence
  Description of Artificial Sequence: Synthetic oligonucleotide
uaugggcacaauauuacuc

SEQ ID NO: 1753107 - RNA, 19 nt, Artificial Sequence
  Description of Artificial Sequence: Synthetic oligonucleotide
aagaacacugcauaccguu

SEQ ID NO: 1753108 - RNA, 19 nt, Artificial Sequence
  Description of Artificial Sequence: Synthetic oligonucleotide
ucugucggauucuggaagg

SEQ ID NO: 1753109 - RNA, 19 nt, Artificial Sequence
  Description of Artificial Sequence: Synthetic oligonucleotide
acgacgaggcagcagacac

SEQ ID NO: 1753110 - RNA, 19 nt, Artificial Sequence
  Description of Artificial Sequence: Synthetic oligonucleotide
aagggacaccacucgaccg

SEQ ID NO: 1753111 - RNA, 19 nt, Artificial Sequence
  Description of Artificial Sequence: Synthetic oligonucleotide
uuaucugacuuaaucuggu

SEQ ID NO: 1753112 - RNA, 19 nt, Artificial Sequence
  Description of Artificial Sequence: Synthetic oligonucleotide
gauuccgucacgugacagg

SEQ ID NO: 1753113 - RNA, 19 nt, Artificial Sequence
  Description of Artificial Sequence: Synthetic oligonucleotide
uuccuucgaaagaagaacu

SEQ ID NO: 1753114 - RNA, 19 nt, Artificial Sequence
  Description of Artificial Sequence: Synthetic oligonucleotide
gcguguuaagcuuagaaag

SEQ ID NO: 1753115 - RNA, 19 nt, Artificial Sequence
  Description of Artificial Sequence: Synthetic oligonucleotide
uugccuuugcucaagcaca

SEQ ID NO: 1753116 - RNA, 19 nt, Artificial Sequence
  Description of Artificial Sequence: Synthetic oligonucleotide
uacgauuggaguggaaagg

SEQ ID NO: 1753117 - RNA, 19 nt, Artificial Sequence
  Description of Artificial Sequence: Synthetic oligonucleotide
ucuagguuggugacguacc

SEQ ID NO: 1753118 - RNA, 19 nt, Artificial Sequence
  Description of Artificial Sequence: Synthetic oligonucleotide
auaacccaaacuuguacca

SEQ ID NO: 1753119 - RNA, 19 nt, Artificial Sequence
  Description of Artificial Sequence: Synthetic oligonucleotide
ugacgaucagcuuguuucg

SEQ ID NO: 1753120 - RNA, 19 nt, Artificial Sequence
  Description of Artificial Sequence: Synthetic oligonucleotide
caucaggucacauauaaaa

SEQ ID NO: 1753121 - RNA, 19 nt, Artificial Sequence
  Description of Artificial Sequence: Synthetic oligonucleotide
ugcgaaugaaggacugagg

SEQ ID NO: 1753122 - RNA, 19 nt, Artificial Sequence
  Description of Artificial Sequence: Synthetic oligonucleotide
aggcagcagacacuaauac

SEQ ID NO: 1753123 - RNA, 19 nt, Artificial Sequence
  Description of Artificial Sequence: Synthetic oligonucleotide
uccuaauccauuucaguuc

SEQ ID NO: 1753124 - RNA, 19 nt, Artificial Sequence
  Description of Artificial Sequence: Synthetic oligonucleotide
agugucgccgcauccgccc

SEQ ID NO: 1753125 - RNA, 19 nt, Artificial Sequence
  Description of Artificial Sequence: Synthetic oligonucleotide
auaccguugccuuugcuca

SEQ ID NO: 1753126 - RNA, 19 nt, Artificial Sequence
  Description of Artificial Sequence: Synthetic oligonucleotide
uguuaagcuuagaaagggu

SEQ ID NO: 1753127 - RNA, 19 nt, Artificial Sequence
  Description of Artificial Sequence: Synthetic oligonucleotide
uauugcaguggguuuggcc

SEQ ID NO: 1753128 - RNA, 19 nt, Artificial Sequence
  Description of Artificial Sequence: Synthetic oligonucleotide
ugcggauuccgucacguga

SEQ ID NO: 1753129 - RNA, 19 nt, Artificial Sequence
  Description of Artificial Sequence: Synthetic oligonucleotide
gcagcagacacuaauacag

SEQ ID NO: 1753130 - RNA, 19 nt, Artificial Sequence
  Description of Artificial Sequence: Synthetic oligonucleotide
aaauagcuaacagacugaa

SEQ ID NO: 1753131 - RNA, 19 nt, Artificial Sequence
  Description of Artificial Sequence: Synthetic oligonucleotide
ugucugaguuccuucaccu

SEQ ID NO: 1753132 - RNA, 19 nt, Artificial Sequence
  Description of Artificial Sequence: Synthetic oligonucleotide
acuaaauguugguaaaaua

SEQ ID NO: 1753133 - RNA, 19 nt, Artificial Sequence
  Description of Artificial Sequence: Synthetic oligonucleotide
cuucgaaagaagaacuuga

SEQ ID NO: 1753134 - RNA, 19 nt, Artificial Sequence
  Description of Artificial Sequence: Synthetic oligonucleotide
acagguaguauugcagugg

SEQ ID NO: 1753135 - RNA, 19 nt, Artificial Sequence
  Description of Artificial Sequence: Synthetic oligonucleotide
cauaccguugccuuugcuc

SEQ ID NO: 1753136 - RNA, 19 nt, Artificial Sequence
  Description of Artificial Sequence: Synthetic oligonucleotide
uucaggaucgcguguuaag

SEQ ID NO: 1753137 - RNA, 19 nt, Artificial Sequence
  Description of Artificial Sequence: Synthetic oligonucleotide
guagaggucauaugacagc

SEQ ID NO: 1753138 - RNA, 19 nt, Artificial Sequence
  Description of Artificial Sequence: Synthetic oligonucleotide
aauuugcagccagucuucg

SEQ ID NO: 1753139 - RNA, 19 nt, Artificial Sequence
  Description of Artificial Sequence: Synthetic oligonucleotide
uccagauguuggaaggccc

SEQ ID NO: 1753140 - RNA, 19 nt, Artificial Sequence
  Description of Artificial Sequence: Synthetic oligonucleotide
caugcggagauugaugccc

SEQ ID NO: 1753141 - RNA, 19 nt, Artificial Sequence
  Description of Artificial Sequence: Synthetic oligonucleotide
gacagguaguauugcagug

SEQ ID NO: 1753142 - RNA, 19 nt, Artificial Sequence
  Description of Artificial Sequence: Synthetic oligonucleotide
guuaagcuuagaaaggguc

SEQ ID NO: 1753143 - RNA, 19 nt, Artificial Sequence
  Description of Artificial Sequence: Synthetic oligonucleotide
uccgccauacgauuggagu

SEQ ID NO: 1753144 - RNA, 19 nt, Artificial Sequence
  Description of Artificial Sequence: Synthetic oligonucleotide
guaaaauaugggcacaaua

SEQ ID NO: 1753145 - RNA, 19 nt, Artificial Sequence
  Description of Artificial Sequence: Synthetic oligonucleotide
aagaaccauuaucuaggca

SEQ ID NO: 1753146 - RNA, 19 nt, Artificial Sequence
  Description of Artificial Sequence: Synthetic oligonucleotide
agauugaugcccagaugcc

SEQ ID NO: 1753147 - RNA, 19 nt, Artificial Sequence
  Description of Artificial Sequence: Synthetic oligonucleotide
gcgaaugaaggacugaggc

SEQ ID NO: 1753148 - RNA, 19 nt, Artificial Sequence
  Description of Artificial Sequence: Synthetic oligonucleotide
ucaggaucgcguguuaagc

SEQ ID NO: 1753149 - RNA, 19 nt, Artificial Sequence
  Description of Artificial Sequence: Synthetic oligonucleotide
agggacaccacucgaccgg

SEQ ID NO: 1753150 - RNA, 19 nt, Artificial Sequence
  Description of Artificial Sequence: Synthetic oligonucleotide
agcuaacagacugaaaaca

SEQ ID NO: 1753151 - RNA, 19 nt, Artificial Sequence
  Description of Artificial Sequence: Synthetic oligonucleotide
cuuugcucaagcacaggug

SEQ ID NO: 1753152 - RNA, 19 nt, Artificial Sequence
  Description of Artificial Sequence: Synthetic oligonucleotide
agagacuauucaaacagca

SEQ ID NO: 1753153 - RNA, 19 nt, Artificial Sequence
  Description of Artificial Sequence: Synthetic oligonucleotide
accacgacgaggcagcaga

SEQ ID NO: 1753154 - RNA, 19 nt, Artificial Sequence
  Description of Artificial Sequence: Synthetic oligonucleotide
uaaucugguccuaauccau

SEQ ID NO: 1753155 - RNA, 19 nt, Artificial Sequence
  Description of Artificial Sequence: Synthetic oligonucleotide
auaugggcacaauauuacu

SEQ ID NO: 1753156 - RNA, 19 nt, Artificial Sequence
  Description of Artificial Sequence: Synthetic oligonucleotide
uaguauugcaguggguuug

SEQ ID NO: 1753157 - RNA, 19 nt, Artificial Sequence
  Description of Artificial Sequence: Synthetic oligonucleotide
agguuagccugacuggaag

SEQ ID NO: 1753158 - RNA, 19 nt, Artificial Sequence
  Description of Artificial Sequence: Synthetic oligonucleotide
guuccuucgaaagaagaac

SEQ ID NO: 1753159 - RNA, 19 nt, Artificial Sequence
  Description of Artificial Sequence: Synthetic oligonucleotide
gucauaugacagcagcagc

SEQ ID NO: 1753160 - RNA, 19 nt, Artificial Sequence
  Description of Artificial Sequence: Synthetic oligonucleotide
ucggccugagcguucacag

SEQ ID NO: 1753161 - RNA, 19 nt, Artificial Sequence
  Description of Artificial Sequence: Synthetic oligonucleotide
ucgcguguuaagcuuagaa

SEQ ID NO: 1753162 - RNA, 19 nt, Artificial Sequence
  Description of Artificial Sequence: Synthetic oligonucleotide
uauuacucuuucagauaca

SEQ ID NO: 1753163 - RNA, 19 nt, Artificial Sequence
  Description of Artificial Sequence: Synthetic oligonucleotide
acuguaaaagcagugugau

SEQ ID NO: 1753164 - RNA, 19 nt, Artificial Sequence
  Description of Artificial Sequence: Synthetic oligonucleotide
cacgugacagguaguauug

SEQ ID NO: 1753165 - RNA, 19 nt, Artificial Sequence
  Description of Artificial Sequence: Synthetic oligonucleotide
ugcauccugaccccuaauc

SEQ ID NO: 1753166 - RNA, 19 nt, Artificial Sequence
  Description of Artificial Sequence: Synthetic oligonucleotide
gaaggcuguggucugaaaa

SEQ ID NO: 1753167 - RNA, 19 nt, Artificial Sequence
  Description of Artificial Sequence: Synthetic oligonucleotide
auuaucuaggcaacauuug

SEQ ID NO: 1753168 - RNA, 19 nt, Artificial Sequence
  Description of Artificial Sequence: Synthetic oligonucleotide
uucugcgaaugaaggacug

SEQ ID NO: 1753169 - RNA, 19 nt, Artificial Sequence
  Description of Artificial Sequence: Synthetic oligonucleotide
cuugaauuugcagccaguc

SEQ ID NO: 1753170 - RNA, 19 nt, Artificial Sequence
  Description of Artificial Sequence: Synthetic oligonucleotide
ucacgugacagguaguauu

SEQ ID NO: 1753171 - RNA, 19 nt, Artificial Sequence
  Description of Artificial Sequence: Synthetic oligonucleotide
agguagugucgccgcaucc

SEQ ID NO: 1753172 - RNA, 19 nt, Artificial Sequence
  Description of Artificial Sequence: Synthetic oligonucleotide
ugcgggugguuccggaagg

SEQ ID NO: 1753173 - RNA, 19 nt, Artificial Sequence
  Description of Artificial Sequence: Synthetic oligonucleotide
auugaugcccagaugccag

SEQ ID NO: 1753174 - RNA, 19 nt, Artificial Sequence
  Description of Artificial Sequence: Synthetic oligonucleotide
ugauguaguuccuccguuc

SEQ ID NO: 1753175 - RNA, 19 nt, Artificial Sequence
  Description of Artificial Sequence: Synthetic oligonucleotide
uaccuuagcaucucugcau

SEQ ID NO: 1753176 - RNA, 19 nt, Artificial Sequence
  Description of Artificial Sequence: Synthetic oligonucleotide
cugaccccuaaucauggag

SEQ ID NO: 1753177 - RNA, 19 nt, Artificial Sequence
  Description of Artificial Sequence: Synthetic oligonucleotide
agauacaucaggucacaua

SEQ ID NO: 1753178 - RNA, 19 nt, Artificial Sequence
  Description of Artificial Sequence: Synthetic oligonucleotide
agcuguauuuucaaaggca

SEQ ID NO: 1753179 - RNA, 19 nt, Artificial Sequence
  Description of Artificial Sequence: Synthetic oligonucleotide
aguauugcaguggguuugg

SEQ ID NO: 1753180 - RNA, 19 nt, Artificial Sequence
  Description of Artificial Sequence: Synthetic oligonucleotide
agcguagaggucauaugac

SEQ ID NO: 1753181 - RNA, 19 nt, Artificial Sequence
  Description of Artificial Sequence: Synthetic oligonucleotide
gagagacuauucaaacagc

SEQ ID NO: 1753182 - RNA, 19 nt, Artificial Sequence
  Description of Artificial Sequence: Synthetic oligonucleotide
gguggcagcaaauagcuaa

SEQ ID NO: 1753183 - RNA, 19 nt, Artificial Sequence
  Description of Artificial Sequence: Synthetic oligonucleotide
uuccagauguuggaaggcc

SEQ ID NO: 1753184 - RNA, 19 nt, Artificial Sequence
  Description of Artificial Sequence: Synthetic oligonucleotide
uguccccuccgccauacga

SEQ ID NO: 1753185 - RNA, 19 nt, Artificial Sequence
  Description of Artificial Sequence: Synthetic oligonucleotide
uguuucggaaguagggguu

SEQ ID NO: 1753186 - RNA, 19 nt, Artificial Sequence
  Description of Artificial Sequence: Synthetic oligonucleotide
acuauucaaacagcagaug

SEQ ID NO: 1753187 - RNA, 19 nt, Artificial Sequence
  Description of Artificial Sequence: Synthetic oligonucleotide
ggugacguaccuuagcauc

SEQ ID NO: 1753188 - RNA, 19 nt, Artificial Sequence
  Description of Artificial Sequence: Synthetic oligonucleotide
ucggauucuggaaggcugu

SEQ ID NO: 1753189 - RNA, 19 nt, Artificial Sequence
  Description of Artificial Sequence: Synthetic oligonucleotide
aguucacuuuccugcuuag

SEQ ID NO: 1753190 - RNA, 19 nt, Artificial Sequence
  Description of Artificial Sequence: Synthetic oligonucleotide
gcuuguuucggaaguaggg

SEQ ID NO: 1753191 - RNA, 19 nt, Artificial Sequence
  Description of Artificial Sequence: Synthetic oligonucleotide
cagcguagaggucauauga

SEQ ID NO: 1753192 - RNA, 19 nt, Artificial Sequence
  Description of Artificial Sequence: Synthetic oligonucleotide
ucagauacaucaggucaca

SEQ ID NO: 1753193 - RNA, 19 nt, Artificial Sequence
  Description of Artificial Sequence: Synthetic oligonucleotide
cugcgaaugaaggacugag

SEQ ID NO: 1753194 - RNA, 19 nt, Artificial Sequence
  Description of Artificial Sequence: Synthetic oligonucleotide
uucaaaggcagagguuagc

SEQ ID NO: 1753195 - RNA, 19 nt, Artificial Sequence
  Description of Artificial Sequence: Synthetic oligonucleotide
acuuuccuaguaaauagaa

SEQ ID NO: 1753196 - RNA, 19 nt, Artificial Sequence
  Description of Artificial Sequence: Synthetic oligonucleotide
gaucgaacuucauauuccu

SEQ ID NO: 1753197 - RNA, 19 nt, Artificial Sequence
  Description of Artificial Sequence: Synthetic oligonucleotide
ucgaccggaugaucgaacu

SEQ ID NO: 1753198 - RNA, 19 nt, Artificial Sequence
  Description of Artificial Sequence: Synthetic oligonucleotide
gaccggaugaucgaacuuc

SEQ ID NO: 1753199 - RNA, 19 nt, Artificial Sequence
  Description of Artificial Sequence: Synthetic oligonucleotide
agggcaagagagacuauuc

SEQ ID NO: 1753200 - RNA, 19 nt, Artificial Sequence
  Description of Artificial Sequence: Synthetic oligonucleotide
agguuggugacguaccuua

SEQ ID NO: 1753201 - RNA, 19 nt, Artificial Sequence
  Description of Artificial Sequence: Synthetic oligonucleotide
cuaaucauggaggacagcu

SEQ ID NO: 1753202 - RNA, 19 nt, Artificial Sequence
  Description of Artificial Sequence: Synthetic oligonucleotide
uaucugacuuaaucugguc

SEQ ID NO: 1753203 - RNA, 19 nt, Artificial Sequence
  Description of Artificial Sequence: Synthetic oligonucleotide
gauugaugcccagaugcca

SEQ ID NO: 1753204 - RNA, 19 nt, Artificial Sequence
  Description of Artificial Sequence: Synthetic oligonucleotide
caaguagcauuuuacuaaa

SEQ ID NO: 1753205 - RNA, 19 nt, Artificial Sequence
  Description of Artificial Sequence: Synthetic oligonucleotide
cauuaucuaggcaacauuu

SEQ ID NO: 1753206 - RNA, 19 nt, Artificial Sequence
  Description of Artificial Sequence: Synthetic oligonucleotide
uccuucgaaagaagaacuu

SEQ ID NO: 1753207 - RNA, 19 nt, Artificial Sequence
  Description of Artificial Sequence: Synthetic oligonucleotide
gaauuugcagccagucuuc

SEQ ID NO: 1753208 - RNA, 19 nt, Artificial Sequence
  Description of Artificial Sequence: Synthetic oligonucleotide
ggaugaucgaacuucauau

SEQ ID NO: 1753209 - RNA, 19 nt, Artificial Sequence
  Description of Artificial Sequence: Synthetic oligonucleotide
gauguuggaaggcccuguc

SEQ ID NO: 1753210 - RNA, 19 nt, Artificial Sequence
  Description of Artificial Sequence: Synthetic oligonucleotide
ugguaaaauaugggcacaa

SEQ ID NO: 1753211 - RNA, 19 nt, Artificial Sequence
  Description of Artificial Sequence: Synthetic oligonucleotide
auucugucggauucuggaa

SEQ ID NO: 1753212 - RNA, 19 nt, Artificial Sequence
  Description of Artificial Sequence: Synthetic oligonucleotide
cucuagguuggugacguac

SEQ ID NO: 1753213 - RNA, 19 nt, Artificial Sequence
  Description of Artificial Sequence: Synthetic oligonucleotide
gacgaucagcuuguuucgg

SEQ ID NO: 1753214 - RNA, 19 nt, Artificial Sequence
  Description of Artificial Sequence: Synthetic oligonucleotide
aaguagggguuccuucgaa

SEQ ID NO: 1753215 - RNA, 19 nt, Artificial Sequence
  Description of Artificial Sequence: Synthetic oligonucleotide
gucggauucuggaaggcug

SEQ ID NO: 1753216 - RNA, 19 nt, Artificial Sequence
  Description of Artificial Sequence: Synthetic oligonucleotide
cauacgauuggaguggaaa

SEQ ID NO: 1753217 - RNA, 19 nt, Artificial Sequence
  Description of Artificial Sequence: Synthetic oligonucleotide
ucuaggcaacauuugucuu

SEQ ID NO: 1753218 - RNA, 19 nt, Artificial Sequence
  Description of Artificial Sequence: Synthetic oligonucleotide
guagugucgccgcauccgc

SEQ ID NO: 1753219 - RNA, 19 nt, Artificial Sequence
  Description of Artificial Sequence: Synthetic oligonucleotide
cugagcguucacagugucc

SEQ ID NO: 1753220 - RNA, 19 nt, Artificial Sequence
  Description of Artificial Sequence: Synthetic oligonucleotide
acgaucagcuuguuucgga

SEQ ID NO: 1753221 - RNA, 19 nt, Artificial Sequence
  Description of Artificial Sequence: Synthetic oligonucleotide
aagcuuagaaagggucuga

SEQ ID NO: 1753222 - RNA, 19 nt, Artificial Sequence
  Description of Artificial Sequence: Synthetic oligonucleotide
gaaguagggguuccuucga

SEQ ID NO: 1753223 - RNA, 19 nt, Artificial Sequence
  Description of Artificial Sequence: Synthetic oligonucleotide
acgugacagguaguauugc

SEQ ID NO: 1753224 - RNA, 19 nt, Artificial Sequence
  Description of Artificial Sequence: Synthetic oligonucleotide
cugguccuaauccauuuca

SEQ ID NO: 1753225 - RNA, 19 nt, Artificial Sequence
  Description of Artificial Sequence: Synthetic oligonucleotide
aauagcuaacagacugaaa

SEQ ID NO: 1753226 - RNA, 19 nt, Artificial Sequence
  Description of Artificial Sequence: Synthetic oligonucleotide
gguagugucgccgcauccg

SEQ ID NO: 1753227 - RNA, 19 nt, Artificial Sequence
  Description of Artificial Sequence: Synthetic oligonucleotide
acugggcgacgucuggguc

SEQ ID NO: 1753228 - RNA, 19 nt, Artificial Sequence
  Description of Artificial Sequence: Synthetic oligonucleotide
uccugcuuaggguacccau

SEQ ID NO: 1753229 - RNA, 19 nt, Artificial Sequence
  Description of Artificial Sequence: Synthetic oligonucleotide
accauuaucuaggcaacau

SEQ ID NO: 1753230 - RNA, 19 nt, Artificial Sequence
  Description of Artificial Sequence: Synthetic oligonucleotide
cuguaaaagcagugugauc

SEQ ID NO: 1753231 - RNA, 19 nt, Artificial Sequence
  Description of Artificial Sequence: Synthetic oligonucleotide
ucugcgaaugaaggacuga

SEQ ID NO: 1753232 - RNA, 19 nt, Artificial Sequence
  Description of Artificial Sequence: Synthetic oligonucleotide
gguuagccugacuggaagc

SEQ ID NO: 1753233 - RNA, 19 nt, Artificial Sequence
  Description of Artificial Sequence: Synthetic oligonucleotide
uuucggaaguagggguucc

SEQ ID NO: 1753234 - RNA, 19 nt, Artificial Sequence
  Description of Artificial Sequence: Synthetic oligonucleotide
aggaucgcguguuaagcuu

SEQ ID NO: 1753235 - RNA, 19 nt, Artificial Sequence
  Description of Artificial Sequence: Synthetic oligonucleotide
cagucuucgggugucugag

SEQ ID NO: 1753236 - RNA, 19 nt, Artificial Sequence
  Description of Artificial Sequence: Synthetic oligonucleotide
agaacacugcauaccguug

SEQ ID NO: 1753237 - RNA, 19 nt, Artificial Sequence
  Description of Artificial Sequence: Synthetic oligonucleotide
ugucggauucuggaaggcu

SEQ ID NO: 1753238 - RNA, 19 nt, Artificial Sequence
  Description of Artificial Sequence: Synthetic oligonucleotide
ccacucgaccggaugaucg

SEQ ID NO: 1753239 - RNA, 19 nt, Artificial Sequence
  Description of Artificial Sequence: Synthetic oligonucleotide
guccuaauccauuucaguu

SEQ ID NO: 1753240 - RNA, 19 nt, Artificial Sequence
  Description of Artificial Sequence: Synthetic oligonucleotide
ggcaagagagacuauucaa

SEQ ID NO: 1753241 - RNA, 19 nt, Artificial Sequence
  Description of Artificial Sequence: Synthetic oligonucleotide
guggaaagggacaccacuc

SEQ ID NO: 1753242 - RNA, 19 nt, Artificial Sequence
  Description of Artificial Sequence: Synthetic oligonucleotide
ucuucgggugucugaguuc

SEQ ID NO: 1753243 - RNA, 19 nt, Artificial Sequence
  Description of Artificial Sequence: Synthetic oligonucleotide
uagugucgccgcauccgcc

SEQ ID NO: 1753244 - RNA, 19 nt, Artificial Sequence
  Description of Artificial Sequence: Synthetic oligonucleotide
uggugacguaccuuagcau

SEQ ID NO: 1753245 - RNA, 19 nt, Artificial Sequence
  Description of Artificial Sequence: Synthetic oligonucleotide
gaucgcguguuaagcuuag

SEQ ID NO: 1753246 - RNA, 19 nt, Artificial Sequence
  Description of Artificial Sequence: Synthetic oligonucleotide
ugcauaccguugccuuugc

SEQ ID NO: 1753247 - RNA, 19 nt, Artificial Sequence
  Description of Artificial Sequence: Synthetic oligonucleotide
gguuucugcgaaugaagga

SEQ ID NO: 1753248 - RNA, 19 nt, Artificial Sequence
  Description of Artificial Sequence: Synthetic oligonucleotide
aucaagguggcagcaaaua

SEQ ID NO: 1753249 - RNA, 19 nt, Artificial Sequence
  Description of Artificial Sequence: Synthetic oligonucleotide
cuuuccugcuuaggguacc

SEQ ID NO: 1753250 - RNA, 19 nt, Artificial Sequence
  Description of Artificial Sequence: Synthetic oligonucleotide
cucgaccggaugaucgaac

SEQ ID NO: 1753251 - RNA, 19 nt, Artificial Sequence
  Description of Artificial Sequence: Synthetic oligonucleotide
cuaauccauuucaguucac

SEQ ID NO: 1753252 - RNA, 19 nt, Artificial Sequence
  Description of Artificial Sequence: Synthetic oligonucleotide
gcuuagaaagggucugaac

SEQ ID NO: 1753253 - RNA, 19 nt, Artificial Sequence
  Description of Artificial Sequence: Synthetic oligonucleotide
cugcgggugguuccggaag

SEQ ID NO: 1753254 - RNA, 19 nt, Artificial Sequence
  Description of Artificial Sequence: Synthetic oligonucleotide
ccuucgaaagaagaacuug

SEQ ID NO: 1753255 - RNA, 19 nt, Artificial Sequence
  Description of Artificial Sequence: Synthetic oligonucleotide
cacuaauacagaacagcgu

SEQ ID NO: 1753256 - RNA, 19 nt, Artificial Sequence
  Description of Artificial Sequence: Synthetic oligonucleotide
uggcagcaaauagcuaaca

SEQ ID NO: 1753257 - RNA, 19 nt, Artificial Sequence
  Description of Artificial Sequence: Synthetic oligonucleotide
guuucggaaguagggguuc

SEQ ID NO: 1753258 - RNA, 19 nt, Artificial Sequence
  Description of Artificial Sequence: Synthetic oligonucleotide
cuccgccauacgauuggag

SEQ ID NO: 1753259 - RNA, 19 nt, Artificial Sequence
  Description of Artificial Sequence: Synthetic oligonucleotide
caacaggguccaagcacug

SEQ ID NO: 1753260 - RNA, 19 nt, Artificial Sequence
  Description of Artificial Sequence: Synthetic oligonucleotide
caggugagaagaggccugc

SEQ ID NO: 1753261 - RNA, 19 nt, Artificial Sequence
  Description of Artificial Sequence: Synthetic oligonucleotide
ggaaagggacaccacucga

SEQ ID NO: 1753262 - RNA, 19 nt, Artificial Sequence
  Description of Artificial Sequence: Synthetic oligonucleotide
uccuccguuccagguagug

SEQ ID NO: 1753263 - RNA, 19 nt, Artificial Sequence
  Description of Artificial Sequence: Synthetic oligonucleotide
accacucgaccggaugauc

SEQ ID NO: 1753264 - RNA, 19 nt, Artificial Sequence
  Description of Artificial Sequence: Synthetic oligonucleotide
cagcagacacuaauacaga

SEQ ID NO: 1753265 - RNA, 19 nt, Artificial Sequence
  Description of Artificial Sequence: Synthetic oligonucleotide
acguaccuuagcaucucug

SEQ ID NO: 1753266 - RNA, 19 nt, Artificial Sequence
  Description of Artificial Sequence: Synthetic oligonucleotide
ccugggaaucuccacuggc

SEQ ID NO: 1753267 - RNA, 19 nt, Artificial Sequence
  Description of Artificial Sequence: Synthetic oligonucleotide
acagaacagcguagagguc

SEQ ID NO: 1753268 - RNA, 19 nt, Artificial Sequence
  Description of Artificial Sequence: Synthetic oligonucleotide
cccuaaucauggaggacag

SEQ ID NO: 1753269 - RNA, 19 nt, Artificial Sequence
  Description of Artificial Sequence: Synthetic oligonucleotide
cugucggauucuggaaggc

SEQ ID NO: 1753270 - RNA, 19 nt, Artificial Sequence
  Description of Artificial Sequence: Synthetic oligonucleotide
ugacguaccuuagcaucuc

SEQ ID NO: 1753271 - RNA, 19 nt, Artificial Sequence
  Description of Artificial Sequence: Synthetic oligonucleotide
ccgccauacgauuggagug

SEQ ID NO: 1753272 - RNA, 19 nt, Artificial Sequence
  Description of Artificial Sequence: Synthetic oligonucleotide
agucuucgggugucugagu

SEQ ID NO: 1753273 - RNA, 19 nt, Artificial Sequence
  Description of Artificial Sequence: Synthetic oligonucleotide
gguaguauugcaguggguu

SEQ ID NO: 1753274 - RNA, 19 nt, Artificial Sequence
  Description of Artificial Sequence: Synthetic oligonucleotide
accggaugaucgaacuuca

SEQ ID NO: 1753275 - RNA, 19 nt, Artificial Sequence
  Description of Artificial Sequence: Synthetic oligonucleotide
gguuccuucgaaagaagaa

SEQ ID NO: 1753276 - RNA, 19 nt, Artificial Sequence
  Description of Artificial Sequence: Synthetic oligonucleotide
ugggcgacgucugggucug

SEQ ID NO: 1753277 - RNA, 19 nt, Artificial Sequence
  Description of Artificial Sequence: Synthetic oligonucleotide
gucugcggauuccgucacg

SEQ ID NO: 1753278 - RNA, 19 nt, Artificial Sequence
  Description of Artificial Sequence: Synthetic oligonucleotide
guaguauugcaguggguuu

SEQ ID NO: 1753279 - RNA, 19 nt, Artificial Sequence
  Description of Artificial Sequence: Synthetic oligonucleotide
cauguccccuccgccauac

SEQ ID NO: 1753280 - RNA, 19 nt, Artificial Sequence
  Description of Artificial Sequence: Synthetic oligonucleotide
cugggaaucuccacuggcu

SEQ ID NO: 1753281 - RNA, 19 nt, Artificial Sequence
  Description of Artificial Sequence: Synthetic oligonucleotide
cagguagugucgccgcauc

SEQ ID NO: 1753282 - RNA, 19 nt, Artificial Sequence
  Description of Artificial Sequence: Synthetic oligonucleotide
ccuuagcaucucugcaucc

SEQ ID NO: 1753283 - RNA, 19 nt, Artificial Sequence
  Description of Artificial Sequence: Synthetic oligonucleotide
gguccuaauccauuucagu

SEQ ID NO: 1753284 - RNA, 19 nt, Artificial Sequence
  Description of Artificial Sequence: Synthetic oligonucleotide
ggauuccgucacgugacag

SEQ ID NO: 1753285 - RNA, 19 nt, Artificial Sequence
  Description of Artificial Sequence: Synthetic oligonucleotide
cacucgaccggaugaucga

SEQ ID NO: 1753286 - RNA, 19 nt, Artificial Sequence
  Description of Artificial Sequence: Synthetic oligonucleotide
uccccuccgccauacgauu

SEQ ID NO: 1753287 - RNA, 19 nt, Artificial Sequence
  Description of Artificial Sequence: Synthetic oligonucleotide
agaacagcguagaggucau

SEQ ID NO: 1753288 - RNA, 19 nt, Artificial Sequence
  Description of Artificial Sequence: Synthetic oligonucleotide
gcucauguccccuccgcca

SEQ ID NO: 1753289 - RNA, 19 nt, Artificial Sequence
  Description of Artificial Sequence: Synthetic oligonucleotide
gugacguaccuuagcaucu

SEQ ID NO: 1753290 - RNA, 19 nt, Artificial Sequence
  Description of Artificial Sequence: Synthetic oligonucleotide
ccccuaaucauggaggaca

SEQ ID NO: 1753291 - RNA, 19 nt, Artificial Sequence
  Description of Artificial Sequence: Synthetic oligonucleotide
caggaucgcguguuaagcu

SEQ ID NO: 1753292 - RNA, 19 nt, Artificial Sequence
  Description of Artificial Sequence: Synthetic oligonucleotide
guauugcaguggguuuggc

SEQ ID NO: 1753293 - RNA, 19 nt, Artificial Sequence
  Description of Artificial Sequence: Synthetic oligonucleotide
caggguccaagcacuguaa

SEQ ID NO: 1753294 - RNA, 19 nt, Artificial Sequence
  Description of Artificial Sequence: Synthetic oligonucleotide
auguccccuccgccauacg

SEQ ID NO: 1753295 - RNA, 19 nt, Artificial Sequence
  Description of Artificial Sequence: Synthetic oligonucleotide
caguggguuuggccacagg

SEQ ID NO: 1753296 - RNA, 19 nt, Artificial Sequence
  Description of Artificial Sequence: Synthetic oligonucleotide
caagaacacugcauaccgu

SEQ ID NO: 1753297 - RNA, 19 nt, Artificial Sequence
  Description of Artificial Sequence: Synthetic oligonucleotide
cuagguuggugacguaccu

SEQ ID NO: 1753298 - RNA, 19 nt, Artificial Sequence
  Description of Artificial Sequence: Synthetic oligonucleotide
uucgggugucugaguuccu

SEQ ID NO: 1753299 - RNA, 19 nt, Artificial Sequence
  Description of Artificial Sequence: Synthetic oligonucleotide
ucgggugucugaguuccuu

SEQ ID NO: 1753300 - RNA, 19 nt, Artificial Sequence
  Description of Artificial Sequence: Synthetic oligonucleotide
uuccgucacgugacaggua

SEQ ID NO: 1753301 - RNA, 19 nt, Artificial Sequence
  Description of Artificial Sequence: Synthetic oligonucleotide
gacguaccuuagcaucucu

SEQ ID NO: 1753302 - RNA, 19 nt, Artificial Sequence
  Description of Artificial Sequence: Synthetic oligonucleotide
gcgacgucugggucugcgg

SEQ ID NO: 1753303 - RNA, 19 nt, Artificial Sequence
  Description of Artificial Sequence: Synthetic oligonucleotide
gucuucgggugucugaguu

SEQ ID NO: 1753304 - RNA, 19 nt, Artificial Sequence
  Description of Artificial Sequence: Synthetic oligonucleotide
gcggauuccgucacgugac

SEQ ID NO: 1753305 - RNA, 19 nt, Artificial Sequence
  Description of Artificial Sequence: Synthetic oligonucleotide
cgccauacgauuggagugg

SEQ ID NO: 1753306 - RNA, 19 nt, Artificial Sequence
  Description of Artificial Sequence: Synthetic oligonucleotide
acucgaccggaugaucgaa

SEQ ID NO: 1753307 - RNA, 19 nt, Artificial Sequence
  Description of Artificial Sequence: Synthetic oligonucleotide
cccuccgccauacgauugg

SEQ ID NO: 1753308 - RNA, 19 nt, Artificial Sequence
  Description of Artificial Sequence: Synthetic oligonucleotide
agcugcgggugguuccgga

SEQ ID NO: 1753309 - RNA, 19 nt, Artificial Sequence
  Description of Artificial Sequence: Synthetic oligonucleotide
cacaggugagaagaggccu

SEQ ID NO: 1753310 - RNA, 19 nt, Artificial Sequence
  Description of Artificial Sequence: Synthetic oligonucleotide
ugucgccgcauccgcccaa

SEQ ID NO: 1753311 - RNA, 19 nt, Artificial Sequence
  Description of Artificial Sequence: Synthetic oligonucleotide
uuccuccguuccagguagu

SEQ ID NO: 1753312 - RNA, 19 nt, Artificial Sequence
  Description of Artificial Sequence: Synthetic oligonucleotide
ggcgacgucugggucugcg

SEQ ID NO: 1753313 - RNA, 19 nt, Artificial Sequence
  Description of Artificial Sequence: Synthetic oligonucleotide
auacaucaggucacauaua

SEQ ID NO: 1753314 - RNA, 19 nt, Artificial Sequence
  Description of Artificial Sequence: Synthetic oligonucleotide
agguaguauugcagugggu

SEQ ID NO: 1753315 - RNA, 19 nt, Artificial Sequence
  Description of Artificial Sequence: Synthetic oligonucleotide
cauaugacagcagcagcau

SEQ ID NO: 1753316 - RNA, 19 nt, Artificial Sequence
  Description of Artificial Sequence: Synthetic oligonucleotide
ggucugcggauuccgucac

SEQ ID NO: 1753317 - RNA, 19 nt, Artificial Sequence
  Description of Artificial Sequence: Synthetic oligonucleotide
cgcguguuaagcuuagaaa

SEQ ID NO: 1753318 - RNA, 19 nt, Artificial Sequence
  Description of Artificial Sequence: Synthetic oligonucleotide
cgugacagguaguauugca

SEQ ID NO: 1753319 - RNA, 19 nt, Artificial Sequence
  Description of Artificial Sequence: Synthetic oligonucleotide
gacgucugggucugcggau

SEQ ID NO: 1753320 - RNA, 19 nt, Artificial Sequence
  Description of Artificial Sequence: Synthetic oligonucleotide
ggcucucuuacugggcgac

SEQ ID NO: 1753321 - RNA, 19 nt, Artificial Sequence
  Description of Artificial Sequence: Synthetic oligonucleotide
cugggcgacgucugggucu

SEQ ID NO: 1753322 - RNA, 19 nt, Artificial Sequence
  Description of Artificial Sequence: Synthetic oligonucleotide
gugguuccggaaggcaguc

SEQ ID NO: 1753323 - RNA, 19 nt, Artificial Sequence
  Description of Artificial Sequence: Synthetic oligonucleotide
gccgcauccgcccaaacuu

SEQ ID NO: 1753324 - RNA, 19 nt, Artificial Sequence
  Description of Artificial Sequence: Synthetic oligonucleotide
ccaucaagguggcagcaaa

SEQ ID NO: 1753325 - RNA, 19 nt, Artificial Sequence
  Description of Artificial Sequence: Synthetic oligonucleotide
cugacuuaaucugguccua

SEQ ID NO: 1753326 - RNA, 19 nt, Artificial Sequence
  Description of Artificial Sequence: Synthetic oligonucleotide
aucgcguguuaagcuuaga

SEQ ID NO: 1753327 - RNA, 19 nt, Artificial Sequence
  Description of Artificial Sequence: Synthetic oligonucleotide
cacgacgaggcagcagaca

SEQ ID NO: 1753328 - RNA, 19 nt, Artificial Sequence
  Description of Artificial Sequence: Synthetic oligonucleotide
cuugacgaucagcuuguuu

SEQ ID NO: 1753329 - RNA, 19 nt, Artificial Sequence
  Description of Artificial Sequence: Synthetic oligonucleotide
ugucggccugagcguucac

SEQ ID NO: 1753330 - RNA, 19 nt, Artificial Sequence
  Description of Artificial Sequence: Synthetic oligonucleotide
ccugagcguucacaguguc

SEQ ID NO: 1753331 - RNA, 19 nt, Artificial Sequence
  Description of Artificial Sequence: Synthetic oligonucleotide
ccuaaucauggaggacagc

SEQ ID NO: 1753332 - RNA, 19 nt, Artificial Sequence
  Description of Artificial Sequence: Synthetic oligonucleotide
gguucaugcggagauugau

SEQ ID NO: 1753333 - RNA, 19 nt, Artificial Sequence
  Description of Artificial Sequence: Synthetic oligonucleotide
ggaucgcguguuaagcuua

SEQ ID NO: 1753334 - RNA, 19 nt, Artificial Sequence
  Description of Artificial Sequence: Synthetic oligonucleotide
cucauguccccuccgccau

SEQ ID NO: 1753335 - RNA, 19 nt, Artificial Sequence
  Description of Artificial Sequence: Synthetic oligonucleotide
aggcaacauuugucuucau

SEQ ID NO: 1753336 - RNA, 19 nt, Artificial Sequence
  Description of Artificial Sequence: Synthetic oligonucleotide
gugucgccgcauccgccca

SEQ ID NO: 1753337 - RNA, 19 nt, Artificial Sequence
  Description of Artificial Sequence: Synthetic oligonucleotide
cugucggccugagcguuca

SEQ ID NO: 1753338 - RNA, 19 nt, Artificial Sequence
  Description of Artificial Sequence: Synthetic oligonucleotide
ccgcauccgcccaaacuuc

SEQ ID NO: 1753339 - RNA, 19 nt, Artificial Sequence
  Description of Artificial Sequence: Synthetic oligonucleotide
ccguugccuuugcucaagc

SEQ ID NO: 1753340 - RNA, 19 nt, Artificial Sequence
  Description of Artificial Sequence: Synthetic oligonucleotide
cgauuggaguggaaaggga

SEQ ID NO: 1753341 - RNA, 19 nt, Artificial Sequence
  Description of Artificial Sequence: Synthetic oligonucleotide
cggaugaucgaacuucaua

SEQ ID NO: 1753342 - RNA, 19 nt, Artificial Sequence
  Description of Artificial Sequence: Synthetic oligonucleotide
ccacgacgaggcagcagac

SEQ ID NO: 1753343 - RNA, 19 nt, Artificial Sequence
  Description of Artificial Sequence: Synthetic oligonucleotide
gcggagauugaugcccaga

SEQ ID NO: 1753344 - RNA, 19 nt, Artificial Sequence
  Description of Artificial Sequence: Synthetic oligonucleotide
cgaucagcuuguuucggaa

SEQ ID NO: 1753345 - RNA, 19 nt, Artificial Sequence
  Description of Artificial Sequence: Synthetic oligonucleotide
ccccuccgccauacgauug

SEQ ID NO: 1753346 - RNA, 19 nt, Artificial Sequence
  Description of Artificial Sequence: Synthetic oligonucleotide
gucacgugacagguaguau

SEQ ID NO: 1753347 - RNA, 19 nt, Artificial Sequence
  Description of Artificial Sequence: Synthetic oligonucleotide
ccguuccagguagugucgc

SEQ ID NO: 1753348 - RNA, 19 nt, Artificial Sequence
  Description of Artificial Sequence: Synthetic oligonucleotide
gguucugguuucugcgaau

SEQ ID NO: 1753349 - RNA, 19 nt, Artificial Sequence
  Description of Artificial Sequence: Synthetic oligonucleotide
gggacaccacucgaccgga

SEQ ID NO: 1753350 - RNA, 19 nt, Artificial Sequence
  Description of Artificial Sequence: Synthetic oligonucleotide
gccauacgauuggagugga

SEQ ID NO: 1753351 - RNA, 19 nt, Artificial Sequence
  Description of Artificial Sequence: Synthetic oligonucleotide
ggacagcugcgggugguuc

SEQ ID NO: 1753352 - RNA, 19 nt, Artificial Sequence
  Description of Artificial Sequence: Synthetic oligonucleotide
cgacgucugggucugcgga

SEQ ID NO: 1753353 - RNA, 19 nt, Artificial Sequence
  Description of Artificial Sequence: Synthetic oligonucleotide
cagauacaucaggucacau

SEQ ID NO: 1753354 - RNA, 19 nt, Artificial Sequence
  Description of Artificial Sequence: Synthetic oligonucleotide
gguacccaucaagguggca

SEQ ID NO: 1753355 - RNA, 19 nt, Artificial Sequence
  Description of Artificial Sequence: Synthetic oligonucleotide
gggcacaauauuacucuuu

SEQ ID NO: 1753356 - RNA, 19 nt, Artificial Sequence
  Description of Artificial Sequence: Synthetic oligonucleotide
gucgccgcauccgcccaaa

SEQ ID NO: 1753357 - RNA, 19 nt, Artificial Sequence
  Description of Artificial Sequence: Synthetic oligonucleotide
acgaggcagcagacacuaa

SEQ ID NO: 1753358 - RNA, 19 nt, Artificial Sequence
  Description of Artificial Sequence: Synthetic oligonucleotide
gcauaccguugccuuugcu

SEQ ID NO: 1753359 - RNA, 19 nt, Artificial Sequence
  Description of Artificial Sequence: Synthetic oligonucleotide
cgcccaaacuucuguucca

SEQ ID NO: 1753360 - RNA, 19 nt, Artificial Sequence
  Description of Artificial Sequence: Synthetic oligonucleotide
ggcagagguuagccugacu

SEQ ID NO: 1753361 - RNA, 19 nt, Artificial Sequence
  Description of Artificial Sequence: Synthetic oligonucleotide
cgucacgugacagguagua

SEQ ID NO: 1753362 - RNA, 19 nt, Artificial Sequence
  Description of Artificial Sequence: Synthetic oligonucleotide
ccauacgauuggaguggaa

SEQ ID NO: 1753363 - RNA, 19 nt, Artificial Sequence
  Description of Artificial Sequence: Synthetic oligonucleotide
caccacucgaccggaugau

SEQ ID NO: 1753364 - RNA, 19 nt, Artificial Sequence
  Description of Artificial Sequence: Synthetic oligonucleotide
gccugagcguucacagugu

SEQ ID NO: 1753365 - RNA, 19 nt, Artificial Sequence
  Description of Artificial Sequence: Synthetic oligonucleotide
gcccugucggccugagcgu

SEQ ID NO: 1753366 - RNA, 19 nt, Artificial Sequence
  Description of Artificial Sequence: Synthetic oligonucleotide
ccuccgccauacgauugga

SEQ ID NO: 1753367 - RNA, 19 nt, Artificial Sequence
  Description of Artificial Sequence: Synthetic oligonucleotide
cggauuccgucacgugaca

SEQ ID NO: 1753368 - RNA, 19 nt, Artificial Sequence
  Description of Artificial Sequence: Synthetic oligonucleotide
ccuccguuccagguagugu

SEQ ID NO: 1753369 - RNA, 19 nt, Artificial Sequence
  Description of Artificial Sequence: Synthetic oligonucleotide
cgggugguuccggaaggca

SEQ ID NO: 1753370 - RNA, 19 nt, Artificial Sequence
  Description of Artificial Sequence: Synthetic oligonucleotide
cgacgaggcagcagacacu

SEQ ID NO: 1753371 - RNA, 19 nt, Artificial Sequence
  Description of Artificial Sequence: Synthetic oligonucleotide
ccagguagugucgccgcau

SEQ ID NO: 1753372 - RNA, 19 nt, Artificial Sequence
  Description of Artificial Sequence: Synthetic oligonucleotide
ccggaugaucgaacuucau

SEQ ID NO: 1753373 - RNA, 19 nt, Artificial Sequence
  Description of Artificial Sequence: Synthetic oligonucleotide
ccgucacgugacagguagu

SEQ ID NO: 1753374 - RNA, 19 nt, Artificial Sequence
  Description of Artificial Sequence: Synthetic oligonucleotide
gggcgacgucugggucugc

SEQ ID NO: 1753375 - RNA, 19 nt, Artificial Sequence
  Description of Artificial Sequence: Synthetic oligonucleotide
cgaccggaugaucgaacuu

SEQ ID NO: 1753376 - RNA, 19 nt, Artificial Sequence
  Description of Artificial Sequence: Synthetic oligonucleotide
ccuucaccucuagguuggu

SEQ ID NO: 1753377 - RNA, 19 nt, Artificial Sequence
  Description of Artificial Sequence: Synthetic oligonucleotide
uuuauuauagccaaagagc

SEQ ID NO: 1753378 - RNA, 19 nt, Artificial Sequence
  Description of Artificial Sequence: Synthetic oligonucleotide
uuuugauaaaccaaaaucu

SEQ ID NO: 1753379 - RNA, 19 nt, Artificial Sequence
  Description of Artificial Sequence: Synthetic oligonucleotide
accaagagcaauuucaugc

SEQ ID NO: 1753380 - RNA, 19 nt, Artificial Sequence
  Description of Artificial Sequence: Synthetic oligonucleotide
uguacuauaacuuuggcaa

SEQ ID NO: 1753381 - RNA, 19 nt, Artificial Sequence
  Description of Artificial Sequence: Synthetic oligonucleotide
aacaugaaauucauuaucc

SEQ ID NO: 1753382 - RNA, 19 nt, Artificial Sequence
  Description of Artificial Sequence: Synthetic oligonucleotide
uauaucaugcuucacacug

SEQ ID NO: 1753383 - RNA, 19 nt, Artificial Sequence
  Description of Artificial Sequence: Synthetic oligonucleotide
uuauuauagccaaagagca

SEQ ID NO: 1753384 - RNA, 19 nt, Artificial Sequence
  Description of Artificial Sequence: Synthetic oligonucleotide
agacauacuuaucucaucc

SEQ ID NO: 1753385 - RNA, 19 nt, Artificial Sequence
  Description of Artificial Sequence: Synthetic oligonucleotide
agugaauaguacuggaugc

SEQ ID NO: 1753386 - RNA, 19 nt, Artificial Sequence
  Description of Artificial Sequence: Synthetic oligonucleotide
uguuucgugauugagagag

SEQ ID NO: 1753387 - RNA, 19 nt, Artificial Sequence
  Description of Artificial Sequence: Synthetic oligonucleotide
ugauaaaccaaaaucugca

SEQ ID NO: 1753388 - RNA, 19 nt, Artificial Sequence
  Description of Artificial Sequence: Synthetic oligonucleotide
uucauuauccaacaagaug

SEQ ID NO: 1753389 - RNA, 19 nt, Artificial Sequence
  Description of Artificial Sequence: Synthetic oligonucleotide
aagugaauaguacuggaug

SEQ ID NO: 1753390 - RNA, 19 nt, Artificial Sequence
  Description of Artificial Sequence: Synthetic oligonucleotide
aagaugguguucuggaaac

SEQ ID NO: 1753391 - RNA, 19 nt, Artificial Sequence
  Description of Artificial Sequence: Synthetic oligonucleotide
aaaucuuugucuugaggag

SEQ ID NO: 1753392 - RNA, 19 nt, Artificial Sequence
  Description of Artificial Sequence: Synthetic oligonucleotide
aauucauuauccaacaaga

SEQ ID NO: 1753393 - RNA, 19 nt, Artificial Sequence
  Description of Artificial Sequence: Synthetic oligonucleotide
cuuuucgaaacgaagagug

SEQ ID NO: 1753394 - RNA, 19 nt, Artificial Sequence
  Description of Artificial Sequence: Synthetic oligonucleotide
cuuaacaugaaauucauua

SEQ ID NO: 1753395 - RNA, 19 nt, Artificial Sequence
  Description of Artificial Sequence: Synthetic oligonucleotide
ugagagagugacaucaugc

SEQ ID NO: 1753396 - RNA, 19 nt, Artificial Sequence
  Description of Artificial Sequence: Synthetic oligonucleotide
uguaaacugacuuuccucu

SEQ ID NO: 1753397 - RNA, 19 nt, Artificial Sequence
  Description of Artificial Sequence: Synthetic oligonucleotide
uagaggaggguucauauug

SEQ ID NO: 1753398 - RNA, 19 nt, Artificial Sequence
  Description of Artificial Sequence: Synthetic oligonucleotide
uucuguacuauaacuuugg

SEQ ID NO: 1753399 - RNA, 19 nt, Artificial Sequence
  Description of Artificial Sequence: Synthetic oligonucleotide
aaucuuaacaugaaauuca

SEQ ID NO: 1753400 - RNA, 19 nt, Artificial Sequence
  Description of Artificial Sequence: Synthetic oligonucleotide
ucuaguaacugucugacuu

SEQ ID NO: 1753401 - RNA, 19 nt, Artificial Sequence
  Description of Artificial Sequence: Synthetic oligonucleotide
uauguucauugauaaaucc

SEQ ID NO: 1753402 - RNA, 19 nt, Artificial Sequence
  Description of Artificial Sequence: Synthetic oligonucleotide
ugcauagcuguauauauca

SEQ ID NO: 1753403 - RNA, 19 nt, Artificial Sequence
  Description of Artificial Sequence: Synthetic oligonucleotide
ugcaaucuuaacaugaaau

SEQ ID NO: 1753404 - RNA, 19 nt, Artificial Sequence
  Description of Artificial Sequence: Synthetic oligonucleotide
gaaaagacucacuuauaag

SEQ ID NO: 1753405 - RNA, 19 nt, Artificial Sequence
  Description of Artificial Sequence: Synthetic oligonucleotide
ucgaugaagagccaucuug

SEQ ID NO: 1753406 - RNA, 19 nt, Artificial Sequence
  Description of Artificial Sequence: Synthetic oligonucleotide
agugaugcagcuucgauga

SEQ ID NO: 1753407 - RNA, 19 nt, Artificial Sequence
  Description of Artificial Sequence: Synthetic oligonucleotide
aagcaacuaauacucaugu

SEQ ID NO: 1753408 - RNA, 19 nt, Artificial Sequence
  Description of Artificial Sequence: Synthetic oligonucleotide
uauugugcagguaauuuac

SEQ ID NO: 1753409 - RNA, 19 nt, Artificial Sequence
  Description of Artificial Sequence: Synthetic oligonucleotide
gagagagugacaucaugcg

SEQ ID NO: 1753410 - RNA, 19 nt, Artificial Sequence
  Description of Artificial Sequence: Synthetic oligonucleotide
agguaauuuacaccaagag

SEQ ID NO: 1753411 - RNA, 19 nt, Artificial Sequence
  Description of Artificial Sequence: Synthetic oligonucleotide
agagagugacaucaugcgc

SEQ ID NO: 1753412 - RNA, 19 nt, Artificial Sequence
  Description of Artificial Sequence: Synthetic oligonucleotide
auauagaugaucguuccuc

SEQ ID NO: 1753413 - RNA, 19 nt, Artificial Sequence
  Description of Artificial Sequence: Synthetic oligonucleotide
uuuucgaaacgaagagugg

SEQ ID NO: 1753414 - RNA, 19 nt, Artificial Sequence
  Description of Artificial Sequence: Synthetic oligonucleotide
aagaguggauuuauuauag

SEQ ID NO: 1753415 - RNA, 19 nt, Artificial Sequence
  Description of Artificial Sequence: Synthetic oligonucleotide
uucggaaacggcaccaucc

SEQ ID NO: 1753416 - RNA, 19 nt, Artificial Sequence
  Description of Artificial Sequence: Synthetic oligonucleotide
ucaugcuucacacuggcuc

SEQ ID NO: 1753417 - RNA, 19 nt, Artificial Sequence
  Description of Artificial Sequence: Synthetic oligonucleotide
uuuguaaacugacuuuccu

SEQ ID NO: 1753418 - RNA, 19 nt, Artificial Sequence
  Description of Artificial Sequence: Synthetic oligonucleotide
agaaaagacucacuuauaa

SEQ ID NO: 1753419 - RNA, 19 nt, Artificial Sequence
  Description of Artificial Sequence: Synthetic oligonucleotide
ugugcagguaauuuacacc

SEQ ID NO: 1753420 - RNA, 19 nt, Artificial Sequence
  Description of Artificial Sequence: Synthetic oligonucleotide
gguaauuuacaccaagagc

SEQ ID NO: 1753421 - RNA, 19 nt, Artificial Sequence
  Description of Artificial Sequence: Synthetic oligonucleotide
gauugagagagugacauca

SEQ ID NO: 1753422 - RNA, 19 nt, Artificial Sequence
  Description of Artificial Sequence: Synthetic oligonucleotide
ugaucguuccuccuucggg

SEQ ID NO: 1753423 - RNA, 19 nt, Artificial Sequence
  Description of Artificial Sequence: Synthetic oligonucleotide
ugcggaaucucaauggcca

SEQ ID NO: 1753424 - RNA, 19 nt, Artificial Sequence
  Description of Artificial Sequence: Synthetic oligonucleotide
ugcuuguuaucuuucaacu

SEQ ID NO: 1753425 - RNA, 19 nt, Artificial Sequence
  Description of Artificial Sequence: Synthetic oligonucleotide
uaaccauuuguaaacugac

SEQ ID NO: 1753426 - RNA, 19 nt, Artificial Sequence
  Description of Artificial Sequence: Synthetic oligonucleotide
uaucacauaagugaauagu

SEQ ID NO: 1753427 - RNA, 19 nt, Artificial Sequence
  Description of Artificial Sequence: Synthetic oligonucleotide
cauaagugaauaguacugg

SEQ ID NO: 1753428 - RNA, 19 nt, Artificial Sequence
  Description of Artificial Sequence: Synthetic oligonucleotide
uuaucacauaagugaauag

SEQ ID NO: 1753429 - RNA, 19 nt, Artificial Sequence
  Description of Artificial Sequence: Synthetic oligonucleotide
gagagugacaucaugcgcc

SEQ ID NO: 1753430 - RNA, 19 nt, Artificial Sequence
  Description of Artificial Sequence: Synthetic oligonucleotide
gacaucaugcgccauuuug

SEQ ID NO: 1753431 - RNA, 19 nt, Artificial Sequence
  Description of Artificial Sequence: Synthetic oligonucleotide
ucucagaaaagacucacuu

SEQ ID NO: 1753432 - RNA, 19 nt, Artificial Sequence
  Description of Artificial Sequence: Synthetic oligonucleotide
aaacugacuuuccucucag

SEQ ID NO: 1753433 - RNA, 19 nt, Artificial Sequence
  Description of Artificial Sequence: Synthetic oligonucleotide
acugucugacuuuugaggu

SEQ ID NO: 1753434 - RNA, 19 nt, Artificial Sequence
  Description of Artificial Sequence: Synthetic oligonucleotide
uaaacugacuuuccucuca

SEQ ID NO: 1753435 - RNA, 19 nt, Artificial Sequence
  Description of Artificial Sequence: Synthetic oligonucleotide
ugcgccauuuugauaaacc

SEQ ID NO: 1753436 - RNA, 19 nt, Artificial Sequence
  Description of Artificial Sequence: Synthetic oligonucleotide
auacuuaucucauccaaaa

SEQ ID NO: 1753437 - RNA, 19 nt, Artificial Sequence
  Description of Artificial Sequence: Synthetic oligonucleotide
uaucaugcuucacacuggc

SEQ ID NO: 1753438 - RNA, 19 nt, Artificial Sequence
  Description of Artificial Sequence: Synthetic oligonucleotide
uuucgaaacgaagagugga

SEQ ID NO: 1753439 - RNA, 19 nt, Artificial Sequence
  Description of Artificial Sequence: Synthetic oligonucleotide
accauuuguaaacugacuu

SEQ ID NO: 1753440 - RNA, 19 nt, Artificial Sequence
  Description of Artificial Sequence: Synthetic oligonucleotide
uuccacaugauauugcaua

SEQ ID NO: 1753441 - RNA, 19 nt, Artificial Sequence
  Description of Artificial Sequence: Synthetic oligonucleotide
ucaauggccacgcaagauc

SEQ ID NO: 1753442 - RNA, 19 nt, Artificial Sequence
  Description of Artificial Sequence: Synthetic oligonucleotide
guuaaggcaggcuucaguc

SEQ ID NO: 1753443 - RNA, 19 nt, Artificial Sequence
  Description of Artificial Sequence: Synthetic oligonucleotide
gguggcauauagaugaucg

SEQ ID NO: 1753444 - RNA, 19 nt, Artificial Sequence
  Description of Artificial Sequence: Synthetic oligonucleotide
auaagugaauaguacugga

SEQ ID NO: 1753445 - RNA, 19 nt, Artificial Sequence
  Description of Artificial Sequence: Synthetic oligonucleotide
uauuauagccaaagagcac

SEQ ID NO: 1753446 - RNA, 19 nt, Artificial Sequence
  Description of Artificial Sequence: Synthetic oligonucleotide
aaccgguauuucuggauag

SEQ ID NO: 1753447 - RNA, 19 nt, Artificial Sequence
  Description of Artificial Sequence: Synthetic oligonucleotide
ucuugauaacacuuccaca

SEQ ID NO: 1753448 - RNA, 19 nt, Artificial Sequence
  Description of Artificial Sequence: Synthetic oligonucleotide
agguaacagacauauaaau

SEQ ID NO: 1753449 - RNA, 19 nt, Artificial Sequence
  Description of Artificial Sequence: Synthetic oligonucleotide
agagcaauuucaugcagga

SEQ ID NO: 1753450 - RNA, 19 nt, Artificial Sequence
  Description of Artificial Sequence: Synthetic oligonucleotide
uaagugaauaguacuggau

SEQ ID NO: 1753451 - RNA, 19 nt, Artificial Sequence
  Description of Artificial Sequence: Synthetic oligonucleotide
gaacuuuucgaaacgaaga

SEQ ID NO: 1753452 - RNA, 19 nt, Artificial Sequence
  Description of Artificial Sequence: Synthetic oligonucleotide
uucauugauaaauccacuu

SEQ ID NO: 1753453 - RNA, 19 nt, Artificial Sequence
  Description of Artificial Sequence: Synthetic oligonucleotide
acauaagugaauaguacug

SEQ ID NO: 1753454 - RNA, 19 nt, Artificial Sequence
  Description of Artificial Sequence: Synthetic oligonucleotide
uugauggaaauuugaagau

SEQ ID NO: 1753455 - RNA, 19 nt, Artificial Sequence
  Description of Artificial Sequence: Synthetic oligonucleotide
ucuguacuauaacuuuggc

SEQ ID NO: 1753456 - RNA, 19 nt, Artificial Sequence
  Description of Artificial Sequence: Synthetic oligonucleotide
acagacauauaaauaacca

SEQ ID NO: 1753457 - RNA, 19 nt, Artificial Sequence
  Description of Artificial Sequence: Synthetic oligonucleotide
uuucgugauugagagagug

SEQ ID NO: 1753458 - RNA, 19 nt, Artificial Sequence
  Description of Artificial Sequence: Synthetic oligonucleotide
ugucugacuuuugaggucc

SEQ ID NO: 1753459 - RNA, 19 nt, Artificial Sequence
  Description of Artificial Sequence: Synthetic oligonucleotide
aacggcaccaucccagcug

SEQ ID NO: 1753460 - RNA, 19 nt, Artificial Sequence
  Description of Artificial Sequence: Synthetic oligonucleotide
ggauuuauuauagccaaag

SEQ ID NO: 1753461 - RNA, 19 nt, Artificial Sequence
  Description of Artificial Sequence: Synthetic oligonucleotide
aguggauuuauuauagcca

SEQ ID NO: 1753462 - RNA, 19 nt, Artificial Sequence
  Description of Artificial Sequence: Synthetic oligonucleotide
aaggcugaagucccauuug

SEQ ID NO: 1753463 - RNA, 19 nt, Artificial Sequence
  Description of Artificial Sequence: Synthetic oligonucleotide
aguggugucuaguaacugu

SEQ ID NO: 1753464 - RNA, 19 nt, Artificial Sequence
  Description of Artificial Sequence: Synthetic oligonucleotide
ugauggaaauuugaagaug

SEQ ID NO: 1753465 - RNA, 19 nt, Artificial Sequence
  Description of Artificial Sequence: Synthetic oligonucleotide
auaaccauuuguaaacuga

SEQ ID NO: 1753466 - RNA, 19 nt, Artificial Sequence
  Description of Artificial Sequence: Synthetic oligonucleotide
aguagaggaggguucauau

SEQ ID NO: 1753467 - RNA, 19 nt, Artificial Sequence
  Description of Artificial Sequence: Synthetic oligonucleotide
agguucauaguucucgggu

SEQ ID NO: 1753468 - RNA, 19 nt, Artificial Sequence
  Description of Artificial Sequence: Synthetic oligonucleotide
ugucuaguaacugucugac

SEQ ID NO: 1753469 - RNA, 19 nt, Artificial Sequence
  Description of Artificial Sequence: Synthetic oligonucleotide
ucaguggugucuaguaacu

SEQ ID NO: 1753470 - RNA, 19 nt, Artificial Sequence
  Description of Artificial Sequence: Synthetic oligonucleotide
uuugcuuguuaucuuucaa

SEQ ID NO: 1753471 - RNA, 19 nt, Artificial Sequence
  Description of Artificial Sequence: Synthetic oligonucleotide
uucuggaaaccacaggcau

SEQ ID NO: 1753472 - RNA, 19 nt, Artificial Sequence
  Description of Artificial Sequence: Synthetic oligonucleotide
ucgugauugagagagugac

SEQ ID NO: 1753473 - RNA, 19 nt, Artificial Sequence
  Description of Artificial Sequence: Synthetic oligonucleotide
ugcacucugaauucuuugu

SEQ ID NO: 1753474 - RNA, 19 nt, Artificial Sequence
  Description of Artificial Sequence: Synthetic oligonucleotide
acauacuuaucucauccaa

SEQ ID NO: 1753475 - RNA, 19 nt, Artificial Sequence
  Description of Artificial Sequence: Synthetic oligonucleotide
gaugaucguuccuccuucg

SEQ ID NO: 1753476 - RNA, 19 nt, Artificial Sequence
  Description of Artificial Sequence: Synthetic oligonucleotide
ggaugcggaaucucaaugg

SEQ ID NO: 1753477 - RNA, 19 nt, Artificial Sequence
  Description of Artificial Sequence: Synthetic oligonucleotide
aagggcauccagcgauugg

SEQ ID NO: 1753478 - RNA, 19 nt, Artificial Sequence
  Description of Artificial Sequence: Synthetic oligonucleotide
agucaugaugaaguagagg

SEQ ID NO: 1753479 - RNA, 19 nt, Artificial Sequence
  Description of Artificial Sequence: Synthetic oligonucleotide
uguggaggauggcuuguag

SEQ ID NO: 1753480 - RNA, 19 nt, Artificial Sequence
  Description of Artificial Sequence: Synthetic oligonucleotide
agcuguauauaucaugcuu

SEQ ID NO: 1753481 - RNA, 19 nt, Artificial Sequence
  Description of Artificial Sequence: Synthetic oligonucleotide
guggauuuauuauagccaa

SEQ ID NO: 1753482 - RNA, 19 nt, Artificial Sequence
  Description of Artificial Sequence: Synthetic oligonucleotide
auugguuaaggcaggcuuc

SEQ ID NO: 1753483 - RNA, 19 nt, Artificial Sequence
  Description of Artificial Sequence: Synthetic oligonucleotide
ugguguucuggaaaccaca

SEQ ID NO: 1753484 - RNA, 19 nt, Artificial Sequence
  Description of Artificial Sequence: Synthetic oligonucleotide
uucauauugugcagguaau

SEQ ID NO: 1753485 - RNA, 19 nt, Artificial Sequence
  Description of Artificial Sequence: Synthetic oligonucleotide
aggcauuuccggguaaggc

SEQ ID NO: 1753486 - RNA, 19 nt, Artificial Sequence
  Description of Artificial Sequence: Synthetic oligonucleotide
uucgaaacgaagaguggau

SEQ ID NO: 1753487 - RNA, 19 nt, Artificial Sequence
  Description of Artificial Sequence: Synthetic oligonucleotide
ucggaaacggcaccauccc

SEQ ID NO: 1753488 - RNA, 19 nt, Artificial Sequence
  Description of Artificial Sequence: Synthetic oligonucleotide
acgaagaguggauuuauua

SEQ ID NO: 1753489 - RNA, 19 nt, Artificial Sequence
  Description of Artificial Sequence: Synthetic oligonucleotide
uauugcauagcuguauaua

SEQ ID NO: 1753490 - RNA, 19 nt, Artificial Sequence
  Description of Artificial Sequence: Synthetic oligonucleotide
aucucaauggccacgcaag

SEQ ID NO: 1753491 - RNA, 19 nt, Artificial Sequence
  Description of Artificial Sequence: Synthetic oligonucleotide
auuuugauggaaauuugaa

SEQ ID NO: 1753492 - RNA, 19 nt, Artificial Sequence
  Description of Artificial Sequence: Synthetic oligonucleotide
uucgugauugagagaguga

SEQ ID NO: 1753493 - RNA, 19 nt, Artificial Sequence
  Description of Artificial Sequence: Synthetic oligonucleotide
cagugaugcagcuucgaug

SEQ ID NO: 1753494 - RNA, 19 nt, Artificial Sequence
  Description of Artificial Sequence: Synthetic oligonucleotide
uuugcuguuucgugauuga

SEQ ID NO: 1753495 - RNA, 19 nt, Artificial Sequence
  Description of Artificial Sequence: Synthetic oligonucleotide
acuauacaugaucugcaaa

SEQ ID NO: 1753496 - RNA, 19 nt, Artificial Sequence
  Description of Artificial Sequence: Synthetic oligonucleotide
auucggaaacggcaccauc

SEQ ID NO: 1753497 - RNA, 19 nt, Artificial Sequence
  Description of Artificial Sequence: Synthetic oligonucleotide
gaggguucauauugugcag

SEQ ID NO: 1753498 - RNA, 19 nt, Artificial Sequence
  Description of Artificial Sequence: Synthetic oligonucleotide
auauaucaugcuucacacu

SEQ ID NO: 1753499 - RNA, 19 nt, Artificial Sequence
  Description of Artificial Sequence: Synthetic oligonucleotide
gaugcagcuucgaugaaga

SEQ ID NO: 1753500 - RNA, 19 nt, Artificial Sequence
  Description of Artificial Sequence: Synthetic oligonucleotide
agauuugcuguuucgugau

SEQ ID NO: 1753501 - RNA, 19 nt, Artificial Sequence
  Description of Artificial Sequence: Synthetic oligonucleotide
uccagcgauugguuaaggc

SEQ ID NO: 1753502 - RNA, 19 nt, Artificial Sequence
  Description of Artificial Sequence: Synthetic oligonucleotide
augaucguuccuccuucgg

SEQ ID NO: 1753503 - RNA, 19 nt, Artificial Sequence
  Description of Artificial Sequence: Synthetic oligonucleotide
gaaacggcaccaucccagc

SEQ ID NO: 1753504 - RNA, 19 nt, Artificial Sequence
  Description of Artificial Sequence: Synthetic oligonucleotide
ugcaaaggauuggugaccu

SEQ ID NO: 1753505 - RNA, 19 nt, Artificial Sequence
  Description of Artificial Sequence: Synthetic oligonucleotide
gcuaaugaguucauagucc

SEQ ID NO: 1753506 - RNA, 19 nt, Artificial Sequence
  Description of Artificial Sequence: Synthetic oligonucleotide
uauuucuggauagcagaga

SEQ ID NO: 1753507 - RNA, 19 nt, Artificial Sequence
  Description of Artificial Sequence: Synthetic oligonucleotide
cuguauauaucaugcuuca

SEQ ID NO: 1753508 - RNA, 19 nt, Artificial Sequence
  Description of Artificial Sequence: Synthetic oligonucleotide
ggagaaccgguauuucugg

SEQ ID NO: 1753509 - RNA, 19 nt, Artificial Sequence
  Description of Artificial Sequence: Synthetic oligonucleotide
guugcaggcgcucugaacu

SEQ ID NO: 1753510 - RNA, 19 nt, Artificial Sequence
  Description of Artificial Sequence: Synthetic oligonucleotide
auauugcauagcuguauau

SEQ ID NO: 1753511 - RNA, 19 nt, Artificial Sequence
  Description of Artificial Sequence: Synthetic oligonucleotide
aaacgaagaguggauuuau

SEQ ID NO: 1753512 - RNA, 19 nt, Artificial Sequence
  Description of Artificial Sequence: Synthetic oligonucleotide
auaucaugcuucacacugg

SEQ ID NO: 1753513 - RNA, 19 nt, Artificial Sequence
  Description of Artificial Sequence: Synthetic oligonucleotide
guucucggguggcauauag

SEQ ID NO: 1753514 - RNA, 19 nt, Artificial Sequence
  Description of Artificial Sequence: Synthetic oligonucleotide
augcacucugaauucuuug

SEQ ID NO: 1753515 - RNA, 19 nt, Artificial Sequence
  Description of Artificial Sequence: Synthetic oligonucleotide
cuuaucacauaagugaaua

SEQ ID NO: 1753516 - RNA, 19 nt, Artificial Sequence
  Description of Artificial Sequence: Synthetic oligonucleotide
guauguucauugauaaauc

SEQ ID NO: 1753517 - RNA, 19 nt, Artificial Sequence
  Description of Artificial Sequence: Synthetic oligonucleotide
auagaugaucguuccuccu

SEQ ID NO: 1753518 - RNA, 19 nt, Artificial Sequence
  Description of Artificial Sequence: Synthetic oligonucleotide
aaccauuuguaaacugacu

SEQ ID NO: 1753519 - RNA, 19 nt, Artificial Sequence
  Description of Artificial Sequence: Synthetic oligonucleotide
caugaucaagucccgggac

SEQ ID NO: 1753520 - RNA, 19 nt, Artificial Sequence
  Description of Artificial Sequence: Synthetic oligonucleotide
agaaccgguauuucuggau

SEQ ID NO: 1753521 - RNA, 19 nt, Artificial Sequence
  Description of Artificial Sequence: Synthetic oligonucleotide
gauugguuaaggcaggcuu

SEQ ID NO: 1753522 - RNA, 19 nt, Artificial Sequence
  Description of Artificial Sequence: Synthetic oligonucleotide
ugauucggaaacggcacca

SEQ ID NO: 1753523 - RNA, 19 nt, Artificial Sequence
  Description of Artificial Sequence: Synthetic oligonucleotide
cuggaugcacucugaauuc

SEQ ID NO: 1753524 - RNA, 19 nt, Artificial Sequence
  Description of Artificial Sequence: Synthetic oligonucleotide
gguucauaguucucgggug

SEQ ID NO: 1753525 - RNA, 19 nt, Artificial Sequence
  Description of Artificial Sequence: Synthetic oligonucleotide
cuaaugaguucauaguccu

SEQ ID NO: 1753526 - RNA, 19 nt, Artificial Sequence
  Description of Artificial Sequence: Synthetic oligonucleotide
agagugacaucaugcgcca

SEQ ID NO: 1753527 - RNA, 19 nt, Artificial Sequence
  Description of Artificial Sequence: Synthetic oligonucleotide
uuacaccaagagcaauuuc

SEQ ID NO: 1753528 - RNA, 19 nt, Artificial Sequence
  Description of Artificial Sequence: Synthetic oligonucleotide
uugguuaaggcaggcuuca

SEQ ID NO: 1753529 - RNA, 19 nt, Artificial Sequence
  Description of Artificial Sequence: Synthetic oligonucleotide
uggcauauagaugaucguu

SEQ ID NO: 1753530 - RNA, 19 nt, Artificial Sequence
  Description of Artificial Sequence: Synthetic oligonucleotide
gaucaggauauucaguuuu

SEQ ID NO: 1753531 - RNA, 19 nt, Artificial Sequence
  Description of Artificial Sequence: Synthetic oligonucleotide
cauacuuaucucauccaaa

SEQ ID NO: 1753532 - RNA, 19 nt, Artificial Sequence
  Description of Artificial Sequence: Synthetic oligonucleotide
uggauuuauuauagccaaa

SEQ ID NO: 1753533 - RNA, 19 nt, Artificial Sequence
  Description of Artificial Sequence: Synthetic oligonucleotide
uggugucuaguaacugucu

SEQ ID NO: 1753534 - RNA, 19 nt, Artificial Sequence
  Description of Artificial Sequence: Synthetic oligonucleotide
aggcgcucugaacuuuucg

SEQ ID NO: 1753535 - RNA, 19 nt, Artificial Sequence
  Description of Artificial Sequence: Synthetic oligonucleotide
accgguauuucuggauagc

SEQ ID NO: 1753536 - RNA, 19 nt, Artificial Sequence
  Description of Artificial Sequence: Synthetic oligonucleotide
ccagguaacagacauauaa

SEQ ID NO: 1753537 - RNA, 19 nt, Artificial Sequence
  Description of Artificial Sequence: Synthetic oligonucleotide
acaucaugcgccauuuuga

SEQ ID NO: 1753538 - RNA, 19 nt, Artificial Sequence
  Description of Artificial Sequence: Synthetic oligonucleotide
uaaugaguucauaguccuc

SEQ ID NO: 1753539 - RNA, 19 nt, Artificial Sequence
  Description of Artificial Sequence: Synthetic oligonucleotide
caauggccacgcaagauca

SEQ ID NO: 1753540 - RNA, 19 nt, Artificial Sequence
  Description of Artificial Sequence: Synthetic oligonucleotide
acagggugggucugugauc

SEQ ID NO: 1753541 - RNA, 19 nt, Artificial Sequence
  Description of Artificial Sequence: Synthetic oligonucleotide
auuuacaccaagagcaauu

SEQ ID NO: 1753542 - RNA, 19 nt, Artificial Sequence
  Description of Artificial Sequence: Synthetic oligonucleotide
uagcuguauauaucaugcu

SEQ ID NO: 1753543 - RNA, 19 nt, Artificial Sequence
  Description of Artificial Sequence: Synthetic oligonucleotide
gcuguauauaucaugcuuc

SEQ ID NO: 1753544 - RNA, 19 nt, Artificial Sequence
  Description of Artificial Sequence: Synthetic oligonucleotide
gguauguucauugauaaau

SEQ ID NO: 1753545 - RNA, 19 nt, Artificial Sequence
  Description of Artificial Sequence: Synthetic oligonucleotide
auggccacgcaagaucagg

SEQ ID NO: 1753546 - RNA, 19 nt, Artificial Sequence
  Description of Artificial Sequence: Synthetic oligonucleotide
uggccacgcaagaucagga

SEQ ID NO: 1753547 - RNA, 19 nt, Artificial Sequence
  Description of Artificial Sequence: Synthetic oligonucleotide
cacugcugggcuauuccag

SEQ ID NO: 1753548 - RNA, 19 nt, Artificial Sequence
  Description of Artificial Sequence: Synthetic oligonucleotide
aaacggcaccaucccagcu

SEQ ID NO: 1753549 - RNA, 19 nt, Artificial Sequence
  Description of Artificial Sequence: Synthetic oligonucleotide
cacuuauaagcuuuuauuu

SEQ ID NO: 1753550 - RNA, 19 nt, Artificial Sequence
  Description of Artificial Sequence: Synthetic oligonucleotide
gaaccgguauuucuggaua

SEQ ID NO: 1753551 - RNA, 19 nt, Artificial Sequence
  Description of Artificial Sequence: Synthetic oligonucleotide
aacugacuuuccucucaga

SEQ ID NO: 1753552 - RNA, 19 nt, Artificial Sequence
  Description of Artificial Sequence: Synthetic oligonucleotide
gcaacuaauacucauguuu

SEQ ID NO: 1753553 - RNA, 19 nt, Artificial Sequence
  Description of Artificial Sequence: Synthetic oligonucleotide
gugugauucggaaacggca

SEQ ID NO: 1753554 - RNA, 19 nt, Artificial Sequence
  Description of Artificial Sequence: Synthetic oligonucleotide
gagguuccaggagaaccgg

SEQ ID NO: 1753555 - RNA, 19 nt, Artificial Sequence
  Description of Artificial Sequence: Synthetic oligonucleotide
uugcuguuucgugauugag

SEQ ID NO: 1753556 - RNA, 19 nt, Artificial Sequence
  Description of Artificial Sequence: Synthetic oligonucleotide
acgcaagaucaggauauuc

SEQ ID NO: 1753557 - RNA, 19 nt, Artificial Sequence
  Description of Artificial Sequence: Synthetic oligonucleotide
ugagguccuuguugguuug

SEQ ID NO: 1753558 - RNA, 19 nt, Artificial Sequence
  Description of Artificial Sequence: Synthetic oligonucleotide
gaaacgaagaguggauuua

SEQ ID NO: 1753559 - RNA, 19 nt, Artificial Sequence
  Description of Artificial Sequence: Synthetic oligonucleotide
auucauuauccaacaagau

SEQ ID NO: 1753560 - RNA, 19 nt, Artificial Sequence
  Description of Artificial Sequence: Synthetic oligonucleotide
caccaagagcaauuucaug

SEQ ID NO: 1753561 - RNA, 19 nt, Artificial Sequence
  Description of Artificial Sequence: Synthetic oligonucleotide
ucauauugugcagguaauu

SEQ ID NO: 1753562 - RNA, 19 nt, Artificial Sequence
  Description of Artificial Sequence: Synthetic oligonucleotide
uauccagguaacagacaua

SEQ ID NO: 1753563 - RNA, 19 nt, Artificial Sequence
  Description of Artificial Sequence: Synthetic oligonucleotide
aagucccgggacagaaggg

SEQ ID NO: 1753564 - RNA, 19 nt, Artificial Sequence
  Description of Artificial Sequence: Synthetic oligonucleotide
gugaauaguacuggaugca

SEQ ID NO: 1753565 - RNA, 19 nt, Artificial Sequence
  Description of Artificial Sequence: Synthetic oligonucleotide
cucagaaaagacucacuua

SEQ ID NO: 1753566 - RNA, 19 nt, Artificial Sequence
  Description of Artificial Sequence: Synthetic oligonucleotide
gaugaaguagaggaggguu

SEQ ID NO: 1753567 - RNA, 19 nt, Artificial Sequence
  Description of Artificial Sequence: Synthetic oligonucleotide
cagacauauaaauaaccau

SEQ ID NO: 1753568 - RNA, 19 nt, Artificial Sequence
  Description of Artificial Sequence: Synthetic oligonucleotide
agcgauugguuaaggcagg

SEQ ID NO: 1753569 - RNA, 19 nt, Artificial Sequence
  Description of Artificial Sequence: Synthetic oligonucleotide
ugagguccuccagauaaaa

SEQ ID NO: 1753570 - RNA, 19 nt, Artificial Sequence
  Description of Artificial Sequence: Synthetic oligonucleotide
aaguagaggaggguucaua

SEQ ID NO: 1753571 - RNA, 19 nt, Artificial Sequence
  Description of Artificial Sequence: Synthetic oligonucleotide
cugucugacuuuugagguc

SEQ ID NO: 1753572 - RNA, 19 nt, Artificial Sequence
  Description of Artificial Sequence: Synthetic oligonucleotide
cugaacuuuucgaaacgaa

SEQ ID NO: 1753573 - RNA, 19 nt, Artificial Sequence
  Description of Artificial Sequence: Synthetic oligonucleotide
uugagguccuccagauaaa

SEQ ID NO: 1753574 - RNA, 19 nt, Artificial Sequence
  Description of Artificial Sequence: Synthetic oligonucleotide
ucauaguucucggguggca

SEQ ID NO: 1753575 - RNA, 19 nt, Artificial Sequence
  Description of Artificial Sequence: Synthetic oligonucleotide
caacuaauacucauguuuu

SEQ ID NO: 1753576 - RNA, 19 nt, Artificial Sequence
  Description of Artificial Sequence: Synthetic oligonucleotide
acggcaccaucccagcugu

SEQ ID NO: 1753577 - RNA, 19 nt, Artificial Sequence
  Description of Artificial Sequence: Synthetic oligonucleotide
uggaugcacucugaauucu

SEQ ID NO: 1753578 - RNA, 19 nt, Artificial Sequence
  Description of Artificial Sequence: Synthetic oligonucleotide
agacucacuuauaagcuuu

SEQ ID NO: 1753579 - RNA, 19 nt, Artificial Sequence
  Description of Artificial Sequence: Synthetic oligonucleotide
aaaggauuggugaccucuu

SEQ ID NO: 1753580 - RNA, 19 nt, Artificial Sequence
  Description of Artificial Sequence: Synthetic oligonucleotide
gagaaccgguauuucugga

SEQ ID NO: 1753581 - RNA, 19 nt, Artificial Sequence
  Description of Artificial Sequence: Synthetic oligonucleotide
aucaagucccgggacagaa

SEQ ID NO: 1753582 - RNA, 19 nt, Artificial Sequence
  Description of Artificial Sequence: Synthetic oligonucleotide
ucgaaacgaagaguggauu

SEQ ID NO: 1753583 - RNA, 19 nt, Artificial Sequence
  Description of Artificial Sequence: Synthetic oligonucleotide
augcgccauuuugauaaac

SEQ ID NO: 1753584 - RNA, 19 nt, Artificial Sequence
  Description of Artificial Sequence: Synthetic oligonucleotide
gggacagaagggcauccag

SEQ ID NO: 1753585 - RNA, 19 nt, Artificial Sequence
  Description of Artificial Sequence: Synthetic oligonucleotide
acuauaacuuuggcaaauu

SEQ ID NO: 1753586 - RNA, 19 nt, Artificial Sequence
  Description of Artificial Sequence: Synthetic oligonucleotide
ccagguucauaguucucgg

SEQ ID NO: 1753587 - RNA, 19 nt, Artificial Sequence
  Description of Artificial Sequence: Synthetic oligonucleotide
cauccagcgauugguuaag

SEQ ID NO: 1753588 - RNA, 19 nt, Artificial Sequence
  Description of Artificial Sequence: Synthetic oligonucleotide
ccagcgauugguuaaggca

SEQ ID NO: 1753589 - RNA, 19 nt, Artificial Sequence
  Description of Artificial Sequence: Synthetic oligonucleotide
cacuauacaugaucugcaa

SEQ ID NO: 1753590 - RNA, 19 nt, Artificial Sequence
  Description of Artificial Sequence: Synthetic oligonucleotide
uaguaacugucugacuuuu

SEQ ID NO: 1753591 - RNA, 19 nt, Artificial Sequence
  Description of Artificial Sequence: Synthetic oligonucleotide
gaagggcauccagcgauug

SEQ ID NO: 1753592 - RNA, 19 nt, Artificial Sequence
  Description of Artificial Sequence: Synthetic oligonucleotide
ccggguaaggcugaagucc

SEQ ID NO: 1753593 - RNA, 19 nt, Artificial Sequence
  Description of Artificial Sequence: Synthetic oligonucleotide
uuuccggguaaggcugaag

SEQ ID NO: 1753594 - RNA, 19 nt, Artificial Sequence
  Description of Artificial Sequence: Synthetic oligonucleotide
auaguucucggguggcaua

SEQ ID NO: 1753595 - RNA, 19 nt, Artificial Sequence
  Description of Artificial Sequence: Synthetic oligonucleotide
agaggaggguucauauugu

SEQ ID NO: 1753596 - RNA, 19 nt, Artificial Sequence
  Description of Artificial Sequence: Synthetic oligonucleotide
gggcagauuugcuguuucg

SEQ ID NO: 1753597 - RNA, 19 nt, Artificial Sequence
  Description of Artificial Sequence: Synthetic oligonucleotide
uaguucucggguggcauau

SEQ ID NO: 1753598 - RNA, 19 nt, Artificial Sequence
  Description of Artificial Sequence: Synthetic oligonucleotide
cagggugggucugugauca

SEQ ID NO: 1753599 - RNA, 19 nt, Artificial Sequence
  Description of Artificial Sequence: Synthetic oligonucleotide
cucacuuauaagcuuuuau

SEQ ID NO: 1753600 - RNA, 19 nt, Artificial Sequence
  Description of Artificial Sequence: Synthetic oligonucleotide
cugagucuuuaagucauga

SEQ ID NO: 1753601 - RNA, 19 nt, Artificial Sequence
  Description of Artificial Sequence: Synthetic oligonucleotide
ggcgcucugaacuuuucga

SEQ ID NO: 1753602 - RNA, 19 nt, Artificial Sequence
  Description of Artificial Sequence: Synthetic oligonucleotide
gcaaucuuaacaugaaauu

SEQ ID NO: 1753603 - RNA, 19 nt, Artificial Sequence
  Description of Artificial Sequence: Synthetic oligonucleotide
aacgaagaguggauuuauu

SEQ ID NO: 1753604 - RNA, 19 nt, Artificial Sequence
  Description of Artificial Sequence: Synthetic oligonucleotide
gcgccauuuugauaaacca

SEQ ID NO: 1753605 - RNA, 19 nt, Artificial Sequence
  Description of Artificial Sequence: Synthetic oligonucleotide
auacugcaaaugccaugga

SEQ ID NO: 1753606 - RNA, 19 nt, Artificial Sequence
  Description of Artificial Sequence: Synthetic oligonucleotide
aguaacugucugacuuuug

SEQ ID NO: 1753607 - RNA, 19 nt, Artificial Sequence
  Description of Artificial Sequence: Synthetic oligonucleotide
aucaugcgccauuuugaua

SEQ ID NO: 1753608 - RNA, 19 nt, Artificial Sequence
  Description of Artificial Sequence: Synthetic oligonucleotide
ugcugggcuauuccagguu

SEQ ID NO: 1753609 - RNA, 19 nt, Artificial Sequence
  Description of Artificial Sequence: Synthetic oligonucleotide
augcaggaugcggaaucuc

SEQ ID NO: 1753610 - RNA, 19 nt, Artificial Sequence
  Description of Artificial Sequence: Synthetic oligonucleotide
aagucccauuugcuuguua

SEQ ID NO: 1753611 - RNA, 19 nt, Artificial Sequence
  Description of Artificial Sequence: Synthetic oligonucleotide
ggcauuuccggguaaggcu

SEQ ID NO: 1753612 - RNA, 19 nt, Artificial Sequence
  Description of Artificial Sequence: Synthetic oligonucleotide
cgcaagaucaggauauuca

SEQ ID NO: 1753613 - RNA, 19 nt, Artificial Sequence
  Description of Artificial Sequence: Synthetic oligonucleotide
auccagcgauugguuaagg

SEQ ID NO: 1753614 - RNA, 19 nt, Artificial Sequence
  Description of Artificial Sequence: Synthetic oligonucleotide
cagaaaagacucacuuaua

SEQ ID NO: 1753615 - RNA, 19 nt, Artificial Sequence
  Description of Artificial Sequence: Synthetic oligonucleotide
cagaagggcauccagcgau

SEQ ID NO: 1753616 - RNA, 19 nt, Artificial Sequence
  Description of Artificial Sequence: Synthetic oligonucleotide
cauauagaugaucguuccu

SEQ ID NO: 1753617 - RNA, 19 nt, Artificial Sequence
  Description of Artificial Sequence: Synthetic oligonucleotide
caggagaaccgguauuucu

SEQ ID NO: 1753618 - RNA, 19 nt, Artificial Sequence
  Description of Artificial Sequence: Synthetic oligonucleotide
ugacaucaugcgccauuuu

SEQ ID NO: 1753619 - RNA, 19 nt, Artificial Sequence
  Description of Artificial Sequence: Synthetic oligonucleotide
caguggugucuaguaacug

SEQ ID NO: 1753620 - RNA, 19 nt, Artificial Sequence
  Description of Artificial Sequence: Synthetic oligonucleotide
gucugugaucacagagggc

SEQ ID NO: 1753621 - RNA, 19 nt, Artificial Sequence
  Description of Artificial Sequence: Synthetic oligonucleotide
gguugcaggcgcucugaac

SEQ ID NO: 1753622 - RNA, 19 nt, Artificial Sequence
  Description of Artificial Sequence: Synthetic oligonucleotide
cuaguaacugucugacuuu

SEQ ID NO: 1753623 - RNA, 19 nt, Artificial Sequence
  Description of Artificial Sequence: Synthetic oligonucleotide
cuucgaugaagagccaucu

SEQ ID NO: 1753624 - RNA, 19 nt, Artificial Sequence
  Description of Artificial Sequence: Synthetic oligonucleotide
cucucagaaaagacucacu

SEQ ID NO: 1753625 - RNA, 19 nt, Artificial Sequence
  Description of Artificial Sequence: Synthetic oligonucleotide
cuguccugugugauucgga

SEQ ID NO: 1753626 - RNA, 19 nt, Artificial Sequence
  Description of Artificial Sequence: Synthetic oligonucleotide
cggguaaggcugaaguccc

SEQ ID NO: 1753627 - RNA, 19 nt, Artificial Sequence
  Description of Artificial Sequence: Synthetic oligonucleotide
caucaugcgccauuuugau

SEQ ID NO: 1753628 - RNA, 19 nt, Artificial Sequence
  Description of Artificial Sequence: Synthetic oligonucleotide
acucacuuauaagcuuuua

SEQ ID NO: 1753629 - RNA, 19 nt, Artificial Sequence
  Description of Artificial Sequence: Synthetic oligonucleotide
aggauggcuuguagguaug

SEQ ID NO: 1753630 - RNA, 19 nt, Artificial Sequence
  Description of Artificial Sequence: Synthetic oligonucleotide
gaucaagucccgggacaga

SEQ ID NO: 1753631 - RNA, 19 nt, Artificial Sequence
  Description of Artificial Sequence: Synthetic oligonucleotide
cuguuucgugauugagaga

SEQ ID NO: 1753632 - RNA, 19 nt, Artificial Sequence
  Description of Artificial Sequence: Synthetic oligonucleotide
gguuuggugcuaaugaguu

SEQ ID NO: 1753633 - RNA, 19 nt, Artificial Sequence
  Description of Artificial Sequence: Synthetic oligonucleotide
cacagggugggucugugau

SEQ ID NO: 1753634 - RNA, 19 nt, Artificial Sequence
  Description of Artificial Sequence: Synthetic oligonucleotide
cuucacacuggcucuggau

SEQ ID NO: 1753635 - RNA, 19 nt, Artificial Sequence
  Description of Artificial Sequence: Synthetic oligonucleotide
guagaggaggguucauauu

SEQ ID NO: 1753636 - RNA, 19 nt, Artificial Sequence
  Description of Artificial Sequence: Synthetic oligonucleotide
gcgcucugaacuuuucgaa

SEQ ID NO: 1753637 - RNA, 19 nt, Artificial Sequence
  Description of Artificial Sequence: Synthetic oligonucleotide
cuggagguuccaggagaac

SEQ ID NO: 1753638 - RNA, 19 nt, Artificial Sequence
  Description of Artificial Sequence: Synthetic oligonucleotide
gccacgcaagaucaggaua

SEQ ID NO: 1753639 - RNA, 19 nt, Artificial Sequence
  Description of Artificial Sequence: Synthetic oligonucleotide
agguuccaggagaaccggu

SEQ ID NO: 1753640 - RNA, 19 nt, Artificial Sequence
  Description of Artificial Sequence: Synthetic oligonucleotide
ugcaggcgcucugaacuuu

SEQ ID NO: 1753641 - RNA, 19 nt, Artificial Sequence
  Description of Artificial Sequence: Synthetic oligonucleotide
agaagggcauccagcgauu

SEQ ID NO: 1753642 - RNA, 19 nt, Artificial Sequence
  Description of Artificial Sequence: Synthetic oligonucleotide
ggcauccagcgauugguua

SEQ ID NO: 1753643 - RNA, 19 nt, Artificial Sequence
  Description of Artificial Sequence: Synthetic oligonucleotide
gauucggaaacggcaccau

SEQ ID NO: 1753644 - RNA, 19 nt, Artificial Sequence
  Description of Artificial Sequence: Synthetic oligonucleotide
ggcagauuugcuguuucgu

SEQ ID NO: 1753645 - RNA, 19 nt, Artificial Sequence
  Description of Artificial Sequence: Synthetic oligonucleotide
gcgauugguuaaggcaggc

SEQ ID NO: 1753646 - RNA, 19 nt, Artificial Sequence
  Description of Artificial Sequence: Synthetic oligonucleotide
ccacgcaagaucaggauau

SEQ ID NO: 1753647 - RNA, 19 nt, Artificial Sequence
  Description of Artificial Sequence: Synthetic oligonucleotide
guaaggcugaagucccauu

SEQ ID NO: 1753648 - RNA, 19 nt, Artificial Sequence
  Description of Artificial Sequence: Synthetic oligonucleotide
gggaagcaacuaauacuca

SEQ ID NO: 1753649 - RNA, 19 nt, Artificial Sequence
  Description of Artificial Sequence: Synthetic oligonucleotide
cgaagaguggauuuauuau

SEQ ID NO: 1753650 - RNA, 19 nt, Artificial Sequence
  Description of Artificial Sequence: Synthetic oligonucleotide
cauaguucucggguggcau

SEQ ID NO: 1753651 - RNA, 19 nt, Artificial Sequence
  Description of Artificial Sequence: Synthetic oligonucleotide
ccaacaagauguucugagu

SEQ ID NO: 1753652 - RNA, 19 nt, Artificial Sequence
  Description of Artificial Sequence: Synthetic oligonucleotide
cagguugcaggcgcucuga

SEQ ID NO: 1753653 - RNA, 19 nt, Artificial Sequence
  Description of Artificial Sequence: Synthetic oligonucleotide
ccauuuguaaacugacuuu

SEQ ID NO: 1753654 - RNA, 19 nt, Artificial Sequence
  Description of Artificial Sequence: Synthetic oligonucleotide
ccgguauuucuggauagca

SEQ ID NO: 1753655 - RNA, 19 nt, Artificial Sequence
  Description of Artificial Sequence: Synthetic oligonucleotide
cgugauugagagagugaca

SEQ ID NO: 1753656 - RNA, 19 nt, Artificial Sequence
  Description of Artificial Sequence: Synthetic oligonucleotide
gaaguagaggaggguucau

SEQ ID NO: 1753657 - RNA, 19 nt, Artificial Sequence
  Description of Artificial Sequence: Synthetic oligonucleotide
gcaaaggauuggugaccuc

SEQ ID NO: 1753658 - RNA, 19 nt, Artificial Sequence
  Description of Artificial Sequence: Synthetic oligonucleotide
ggauagcagagaggagcca

SEQ ID NO: 1753659 - RNA, 19 nt, Artificial Sequence
  Description of Artificial Sequence: Synthetic oligonucleotide
cacaggcauuuccggguaa

SEQ ID NO: 1753660 - RNA, 19 nt, Artificial Sequence
  Description of Artificial Sequence: Synthetic oligonucleotide
guuucgugauugagagagu

SEQ ID NO: 1753661 - RNA, 19 nt, Artificial Sequence
  Description of Artificial Sequence: Synthetic oligonucleotide
ccaggagaaccgguauuuc

SEQ ID NO: 1753662 - RNA, 19 nt, Artificial Sequence
  Description of Artificial Sequence: Synthetic oligonucleotide
cgcucugaacuuuucgaaa

SEQ ID NO: 1753663 - RNA, 19 nt, Artificial Sequence
  Description of Artificial Sequence: Synthetic oligonucleotide
aguucucggguggcauaua

SEQ ID NO: 1753664 - RNA, 19 nt, Artificial Sequence
  Description of Artificial Sequence: Synthetic oligonucleotide
ccgggacagaagggcaucc

SEQ ID NO: 1753665 - RNA, 19 nt, Artificial Sequence
  Description of Artificial Sequence: Synthetic oligonucleotide
gauuucuguccagguucau

SEQ ID NO: 1753666 - RNA, 19 nt, Artificial Sequence
  Description of Artificial Sequence: Synthetic oligonucleotide
cgaaacgaagaguggauuu

SEQ ID NO: 1753667 - RNA, 19 nt, Artificial Sequence
  Description of Artificial Sequence: Synthetic oligonucleotide
ggauggcuuguagguaugu

SEQ ID NO: 1753668 - RNA, 19 nt, Artificial Sequence
  Description of Artificial Sequence: Synthetic oligonucleotide
ggcucacaauguccucucu

SEQ ID NO: 1753669 - RNA, 19 nt, Artificial Sequence
  Description of Artificial Sequence: Synthetic oligonucleotide
gucugacuuuugagguccu

SEQ ID NO: 1753670 - RNA, 19 nt, Artificial Sequence
  Description of Artificial Sequence: Synthetic oligonucleotide
gagugacaucaugcgccau

SEQ ID NO: 1753671 - RNA, 19 nt, Artificial Sequence
  Description of Artificial Sequence: Synthetic oligonucleotide
cacgcaagaucaggauauu

SEQ ID NO: 1753672 - RNA, 19 nt, Artificial Sequence
  Description of Artificial Sequence: Synthetic oligonucleotide
gauccacugcugggcuauu

SEQ ID NO: 1753673 - RNA, 19 nt, Artificial Sequence
  Description of Artificial Sequence: Synthetic oligonucleotide
gcaggcgcucugaacuuuu

SEQ ID NO: 1753674 - RNA, 19 nt, Artificial Sequence
  Description of Artificial Sequence: Synthetic oligonucleotide
uguaauaacaaccacaugu

SEQ ID NO: 1753675 - RNA, 19 nt, Artificial Sequence
  Description of Artificial Sequence: Synthetic oligonucleotide
aauugagucccucaguucg

SEQ ID NO: 1753676 - RNA, 19 nt, Artificial Sequence
  Description of Artificial Sequence: Synthetic oligonucleotide
ucucaguuuaucaaggccg

SEQ ID NO: 1753677 - RNA, 19 nt, Artificial Sequence
  Description of Artificial Sequence: Synthetic oligonucleotide
uaauggagcauucugaagc

SEQ ID NO: 1753678 - RNA, 19 nt, Artificial Sequence
  Description of Artificial Sequence: Synthetic oligonucleotide
uuuacugaugugcucaggg

SEQ ID NO: 1753679 - RNA, 19 nt, Artificial Sequence
  Description of Artificial Sequence: Synthetic oligonucleotide
aacauggaucuucuggugc

SEQ ID NO: 1753680 - RNA, 19 nt, Artificial Sequence
  Description of Artificial Sequence: Synthetic oligonucleotide
uuacuaauuaaaagguucc

SEQ ID NO: 1753681 - RNA, 19 nt, Artificial Sequence
  Description of Artificial Sequence: Synthetic oligonucleotide
uuaaaugugaaaucuucca

SEQ ID NO: 1753682 - RNA, 19 nt, Artificial Sequence
  Description of Artificial Sequence: Synthetic oligonucleotide
ucuguaauaacaaccacau

SEQ ID NO: 1753683 - RNA, 19 nt, Artificial Sequence
  Description of Artificial Sequence: Synthetic oligonucleotide
aacauaaggauaagcaagg

SEQ ID NO: 1753684 - RNA, 19 nt, Artificial Sequence
  Description of Artificial Sequence: Synthetic oligonucleotide
gaauucuccaccaaucugg

SEQ ID NO: 1753685 - RNA, 19 nt, Artificial Sequence
  Description of Artificial Sequence: Synthetic oligonucleotide
cauaaagucacuaggucag

SEQ ID NO: 1753686 - RNA, 19 nt, Artificial Sequence
  Description of Artificial Sequence: Synthetic oligonucleotide
uguacaagccuuaugucug

SEQ ID NO: 1753687 - RNA, 19 nt, Artificial Sequence
  Description of Artificial Sequence: Synthetic oligonucleotide
aucucaguuuaucaaggcc

SEQ ID NO: 1753688 - RNA, 19 nt, Artificial Sequence
  Description of Artificial Sequence: Synthetic oligonucleotide
aauaccaacauugucuggu

SEQ ID NO: 1753689 - RNA, 19 nt, Artificial Sequence
  Description of Artificial Sequence: Synthetic oligonucleotide
aucaaggccgcacacgacc

SEQ ID NO: 1753690 - RNA, 19 nt, Artificial Sequence
  Description of Artificial Sequence: Synthetic oligonucleotide
auuuguauaggucuuuacu

SEQ ID NO: 1753691 - RNA, 19 nt, Artificial Sequence
  Description of Artificial Sequence: Synthetic oligonucleotide
aguucggugagcuucugac

SEQ ID NO: 1753692 - RNA, 19 nt, Artificial Sequence
  Description of Artificial Sequence: Synthetic oligonucleotide
aaacguuucuugucuacag

SEQ ID NO: 1753693 - RNA, 19 nt, Artificial Sequence
  Description of Artificial Sequence: Synthetic oligonucleotide
uggaucaacauaaggauaa

SEQ ID NO: 1753694 - RNA, 19 nt, Artificial Sequence
  Description of Artificial Sequence: Synthetic oligonucleotide
ucuagcuguauacauuuug

SEQ ID NO: 1753695 - RNA, 19 nt, Artificial Sequence
  Description of Artificial Sequence: Synthetic oligonucleotide
uuaaaagguuccuggauca

SEQ ID NO: 1753696 - RNA, 19 nt, Artificial Sequence
  Description of Artificial Sequence: Synthetic oligonucleotide
uccauuucauagacaaacg

SEQ ID NO: 1753697 - RNA, 19 nt, Artificial Sequence
  Description of Artificial Sequence: Synthetic oligonucleotide
ucagcgacaaaucccgggg

SEQ ID NO: 1753698 - RNA, 19 nt, Artificial Sequence
  Description of Artificial Sequence: Synthetic oligonucleotide
aggauaagcaaggaauucc

SEQ ID NO: 1753699 - RNA, 19 nt, Artificial Sequence
  Description of Artificial Sequence: Synthetic oligonucleotide
uucugaagcaaacaucaca

SEQ ID NO: 1753700 - RNA, 19 nt, Artificial Sequence
  Description of Artificial Sequence: Synthetic oligonucleotide
uguuugguuacuaauuaaa

SEQ ID NO: 1753701 - RNA, 19 nt, Artificial Sequence
  Description of Artificial Sequence: Synthetic oligonucleotide
aaaggugucguuguuuguc

SEQ ID NO: 1753702 - RNA, 19 nt, Artificial Sequence
  Description of Artificial Sequence: Synthetic oligonucleotide
auauccucgaucaugggac

SEQ ID NO: 1753703 - RNA, 19 nt, Artificial Sequence
  Description of Artificial Sequence: Synthetic oligonucleotide
uuaucaaggccgcacacga

SEQ ID NO: 1753704 - RNA, 19 nt, Artificial Sequence
  Description of Artificial Sequence: Synthetic oligonucleotide
aucauaauggagcauucug

SEQ ID NO: 1753705 - RNA, 19 nt, Artificial Sequence
  Description of Artificial Sequence: Synthetic oligonucleotide
aaaucccggggcccgagcc

SEQ ID NO: 1753706 - RNA, 19 nt, Artificial Sequence
  Description of Artificial Sequence: Synthetic oligonucleotide
caaacagucaucaugaugu

SEQ ID NO: 1753707 - RNA, 19 nt, Artificial Sequence
  Description of Artificial Sequence: Synthetic oligonucleotide
uuccuaacacauaaaguca

SEQ ID NO: 1753708 - RNA, 19 nt, Artificial Sequence
  Description of Artificial Sequence: Synthetic oligonucleotide
ugagauuccauuucauaga

SEQ ID NO: 1753709 - RNA, 19 nt, Artificial Sequence
  Description of Artificial Sequence: Synthetic oligonucleotide
ugucauuguaaaagguucc

SEQ ID NO: 1753710 - RNA, 19 nt, Artificial Sequence
  Description of Artificial Sequence: Synthetic oligonucleotide
uuugucauuguaaaagguu

SEQ ID NO: 1753711 - RNA, 19 nt, Artificial Sequence
  Description of Artificial Sequence: Synthetic oligonucleotide
uuugucacccaucuagcug

SEQ ID NO: 1753712 - RNA, 19 nt, Artificial Sequence
  Description of Artificial Sequence: Synthetic oligonucleotide
ucccgauaguccaagagcc

SEQ ID NO: 1753713 - RNA, 19 nt, Artificial Sequence
  Description of Artificial Sequence: Synthetic oligonucleotide
aaagccgauuuguauaggu

SEQ ID NO: 1753714 - RNA, 19 nt, Artificial Sequence
  Description of Artificial Sequence: Synthetic oligonucleotide
ugugaaaucuuccauucua

SEQ ID NO: 1753715 - RNA, 19 nt, Artificial Sequence
  Description of Artificial Sequence: Synthetic oligonucleotide
guuacuaauuaaaagguuc

SEQ ID NO: 1753716 - RNA, 19 nt, Artificial Sequence
  Description of Artificial Sequence: Synthetic oligonucleotide
aucgugauguuuucuuccc

SEQ ID NO: 1753717 - RNA, 19 nt, Artificial Sequence
  Description of Artificial Sequence: Synthetic oligonucleotide
uaauuaaaagguuccugga

SEQ ID NO: 1753718 - RNA, 19 nt, Artificial Sequence
  Description of Artificial Sequence: Synthetic oligonucleotide
ugauaagaaggggauaaag

SEQ ID NO: 1753719 - RNA, 19 nt, Artificial Sequence
  Description of Artificial Sequence: Synthetic oligonucleotide
aaagucacuaggucagugu

SEQ ID NO: 1753720 - RNA, 19 nt, Artificial Sequence
  Description of Artificial Sequence: Synthetic oligonucleotide
aaagguucccucaaaauaa

SEQ ID NO: 1753721 - RNA, 19 nt, Artificial Sequence
  Description of Artificial Sequence: Synthetic oligonucleotide
uuuaucaaggccgcacacg

SEQ ID NO: 1753722 - RNA, 19 nt, Artificial Sequence
  Description of Artificial Sequence: Synthetic oligonucleotide
auguacaagccuuaugucu

SEQ ID NO: 1753723 - RNA, 19 nt, Artificial Sequence
  Description of Artificial Sequence: Synthetic oligonucleotide
uaucgugauguuuucuucc

SEQ ID NO: 1753724 - RNA, 19 nt, Artificial Sequence
  Description of Artificial Sequence: Synthetic oligonucleotide
aaucuuccauucuagcagu

SEQ ID NO: 1753725 - RNA, 19 nt, Artificial Sequence
  Description of Artificial Sequence: Synthetic oligonucleotide
aagagccccuuccuaacac

SEQ ID NO: 1753726 - RNA, 19 nt, Artificial Sequence
  Description of Artificial Sequence: Synthetic oligonucleotide
cacucuauaauaguucugc

SEQ ID NO: 1753727 - RNA, 19 nt, Artificial Sequence
  Description of Artificial Sequence: Synthetic oligonucleotide
uguguuugguuacuaauua

SEQ ID NO: 1753728 - RNA, 19 nt, Artificial Sequence
  Description of Artificial Sequence: Synthetic oligonucleotide
uccuaacacauaaagucac

SEQ ID NO: 1753729 - RNA, 19 nt, Artificial Sequence
  Description of Artificial Sequence: Synthetic oligonucleotide
ugaaaucuuccauucuagc

SEQ ID NO: 1753730 - RNA, 19 nt, Artificial Sequence
  Description of Artificial Sequence: Synthetic oligonucleotide
acaaacguuucuugucuac

SEQ ID NO: 1753731 - RNA, 19 nt, Artificial Sequence
  Description of Artificial Sequence: Synthetic oligonucleotide
auaggauaagcuccccuuc

SEQ ID NO: 1753732 - RNA, 19 nt, Artificial Sequence
  Description of Artificial Sequence: Synthetic oligonucleotide
aacauugucugguaugguu

SEQ ID NO: 1753733 - RNA, 19 nt, Artificial Sequence
  Description of Artificial Sequence: Synthetic oligonucleotide
ucugguaugguuuguguuc

SEQ ID NO: 1753734 - RNA, 19 nt, Artificial Sequence
  Description of Artificial Sequence: Synthetic oligonucleotide
caaaacauuuccuugucca

SEQ ID NO: 1753735 - RNA, 19 nt, Artificial Sequence
  Description of Artificial Sequence: Synthetic oligonucleotide
ugugcuuauuaaauauaac

SEQ ID NO: 1753736 - RNA, 19 nt, Artificial Sequence
  Description of Artificial Sequence: Synthetic oligonucleotide
acagauaggauaagcuccc

SEQ ID NO: 1753737 - RNA, 19 nt, Artificial Sequence
  Description of Artificial Sequence: Synthetic oligonucleotide
uucuugauaagaaggggau

SEQ ID NO: 1753738 - RNA, 19 nt, Artificial Sequence
  Description of Artificial Sequence: Synthetic oligonucleotide
uguuugucacccaucuagc

SEQ ID NO: 1753739 - RNA, 19 nt, Artificial Sequence
  Description of Artificial Sequence: Synthetic oligonucleotide
acuaauuaaaagguuccug

SEQ ID NO: 1753740 - RNA, 19 nt, Artificial Sequence
  Description of Artificial Sequence: Synthetic oligonucleotide
uugucacccaucuagcugu

SEQ ID NO: 1753741 - RNA, 19 nt, Artificial Sequence
  Description of Artificial Sequence: Synthetic oligonucleotide
agcgacaaaucccggggcc

SEQ ID NO: 1753742 - RNA, 19 nt, Artificial Sequence
  Description of Artificial Sequence: Synthetic oligonucleotide
agacaaacguuucuugucu

SEQ ID NO: 1753743 - RNA, 19 nt, Artificial Sequence
  Description of Artificial Sequence: Synthetic oligonucleotide
ugccuucggaaucauaaug

SEQ ID NO: 1753744 - RNA, 19 nt, Artificial Sequence
  Description of Artificial Sequence: Synthetic oligonucleotide
guuucuugucuacaggcgc

SEQ ID NO: 1753745 - RNA, 19 nt, Artificial Sequence
  Description of Artificial Sequence: Synthetic oligonucleotide
agccgauuuguauaggucu

SEQ ID NO: 1753746 - RNA, 19 nt, Artificial Sequence
  Description of Artificial Sequence: Synthetic oligonucleotide
cuuaagucucugcauuccg

SEQ ID NO: 1753747 - RNA, 19 nt, Artificial Sequence
  Description of Artificial Sequence: Synthetic oligonucleotide
agcauucugaagcaaacau

SEQ ID NO: 1753748 - RNA, 19 nt, Artificial Sequence
  Description of Artificial Sequence: Synthetic oligonucleotide
aagccguuguccgacgccc

SEQ ID NO: 1753749 - RNA, 19 nt, Artificial Sequence
  Description of Artificial Sequence: Synthetic oligonucleotide
ucggaaucauaauggagca

SEQ ID NO: 1753750 - RNA, 19 nt, Artificial Sequence
  Description of Artificial Sequence: Synthetic oligonucleotide
ucgaucaugggacucugac

SEQ ID NO: 1753751 - RNA, 19 nt, Artificial Sequence
  Description of Artificial Sequence: Synthetic oligonucleotide
uaugguuuguguucucugu

SEQ ID NO: 1753752 - RNA, 19 nt, Artificial Sequence
  Description of Artificial Sequence: Synthetic oligonucleotide
cuucggaaucauaauggag

SEQ ID NO: 1753753 - RNA, 19 nt, Artificial Sequence
  Description of Artificial Sequence: Synthetic oligonucleotide
cuucugacugcccaauacc

SEQ ID NO: 1753754 - RNA, 19 nt, Artificial Sequence
  Description of Artificial Sequence: Synthetic oligonucleotide
ugacaguauaaguaaggaa

SEQ ID NO: 1753755 - RNA, 19 nt, Artificial Sequence
  Description of Artificial Sequence: Synthetic oligonucleotide
auaguucugcuuaagucuc

SEQ ID NO: 1753756 - RNA, 19 nt, Artificial Sequence
  Description of Artificial Sequence: Synthetic oligonucleotide
uuguguuugguuacuaauu

SEQ ID NO: 1753757 - RNA, 19 nt, Artificial Sequence
  Description of Artificial Sequence: Synthetic oligonucleotide
gaucaacauaaggauaagc

SEQ ID NO: 1753758 - RNA, 19 nt, Artificial Sequence
  Description of Artificial Sequence: Synthetic oligonucleotide
cuucuugauaagaagggga

SEQ ID NO: 1753759 - RNA, 19 nt, Artificial Sequence
  Description of Artificial Sequence: Synthetic oligonucleotide
uguccauagccaaugcuuc

SEQ ID NO: 1753760 - RNA, 19 nt, Artificial Sequence
  Description of Artificial Sequence: Synthetic oligonucleotide
ucuaucgugauguuuucuu

SEQ ID NO: 1753761 - RNA, 19 nt, Artificial Sequence
  Description of Artificial Sequence: Synthetic oligonucleotide
aaggugucguuguuuguca

SEQ ID NO: 1753762 - RNA, 19 nt, Artificial Sequence
  Description of Artificial Sequence: Synthetic oligonucleotide
aguuuaucaaggccgcaca

SEQ ID NO: 1753763 - RNA, 19 nt, Artificial Sequence
  Description of Artificial Sequence: Synthetic oligonucleotide
uguauaggucuuuacugau

SEQ ID NO: 1753764 - RNA, 19 nt, Artificial Sequence
  Description of Artificial Sequence: Synthetic oligonucleotide
gauguacaagccuuauguc

SEQ ID NO: 1753765 - RNA, 19 nt, Artificial Sequence
  Description of Artificial Sequence: Synthetic oligonucleotide
aagucacuaggucaguguu

SEQ ID NO: 1753766 - RNA, 19 nt, Artificial Sequence
  Description of Artificial Sequence: Synthetic oligonucleotide
ucgugauguuuucuucccg

SEQ ID NO: 1753767 - RNA, 19 nt, Artificial Sequence
  Description of Artificial Sequence: Synthetic oligonucleotide
ugucuguaauaacaaccac

SEQ ID NO: 1753768 - RNA, 19 nt, Artificial Sequence
  Description of Artificial Sequence: Synthetic oligonucleotide
agucugaaauuuuccauau

SEQ ID NO: 1753769 - RNA, 19 nt, Artificial Sequence
  Description of Artificial Sequence: Synthetic oligonucleotide
cacauaaagucacuagguc

SEQ ID NO: 1753770 - RNA, 19 nt, Artificial Sequence
  Description of Artificial Sequence: Synthetic oligonucleotide
acucugaccacucuauaau

SEQ ID NO: 1753771 - RNA, 19 nt, Artificial Sequence
  Description of Artificial Sequence: Synthetic oligonucleotide
uaggauaagcuccccuucu

SEQ ID NO: 1753772 - RNA, 19 nt, Artificial Sequence
  Description of Artificial Sequence: Synthetic oligonucleotide
aagccgauuuguauagguc

SEQ ID NO: 1753773 - RNA, 19 nt, Artificial Sequence
  Description of Artificial Sequence: Synthetic oligonucleotide
ugaccacucuauaauaguu

SEQ ID NO: 1753774 - RNA, 19 nt, Artificial Sequence
  Description of Artificial Sequence: Synthetic oligonucleotide
augucuguaauaacaacca

SEQ ID NO: 1753775 - RNA, 19 nt, Artificial Sequence
  Description of Artificial Sequence: Synthetic oligonucleotide
ucgcucagcgacaaauccc

SEQ ID NO: 1753776 - RNA, 19 nt, Artificial Sequence
  Description of Artificial Sequence: Synthetic oligonucleotide
aaaagccgauuuguauagg

SEQ ID NO: 1753777 - RNA, 19 nt, Artificial Sequence
  Description of Artificial Sequence: Synthetic oligonucleotide
uaaggaaagccaaguuuaa

SEQ ID NO: 1753778 - RNA, 19 nt, Artificial Sequence
  Description of Artificial Sequence: Synthetic oligonucleotide
cucagcgacaaaucccggg

SEQ ID NO: 1753779 - RNA, 19 nt, Artificial Sequence
  Description of Artificial Sequence: Synthetic oligonucleotide
caucucaguuuaucaaggc

SEQ ID NO: 1753780 - RNA, 19 nt, Artificial Sequence
  Description of Artificial Sequence: Synthetic oligonucleotide
gugaaaucuuccauucuag

SEQ ID NO: 1753781 - RNA, 19 nt, Artificial Sequence
  Description of Artificial Sequence: Synthetic oligonucleotide
cugacugcccaauaccaac

SEQ ID NO: 1753782 - RNA, 19 nt, Artificial Sequence
  Description of Artificial Sequence: Synthetic oligonucleotide
cucgcucagcgacaaaucc

SEQ ID NO: 1753783 - RNA, 19 nt, Artificial Sequence
  Description of Artificial Sequence: Synthetic oligonucleotide
ucgcacuagggacuggaug

SEQ ID NO: 1753784 - RNA, 19 nt, Artificial Sequence
  Description of Artificial Sequence: Synthetic oligonucleotide
ucaaggccgcacacgaccc

SEQ ID NO: 1753785 - RNA, 19 nt, Artificial Sequence
  Description of Artificial Sequence: Synthetic oligonucleotide
agauaggauaagcuccccu

SEQ ID NO: 1753786 - RNA, 19 nt, Artificial Sequence
  Description of Artificial Sequence: Synthetic oligonucleotide
aagccuuaugucuguaaua

SEQ ID NO: 1753787 - RNA, 19 nt, Artificial Sequence
  Description of Artificial Sequence: Synthetic oligonucleotide
aagcucguacuccgggaag

SEQ ID NO: 1753788 - RNA, 19 nt, Artificial Sequence
  Description of Artificial Sequence: Synthetic oligonucleotide
ucauuguaaaagguucccu

SEQ ID NO: 1753789 - RNA, 19 nt, Artificial Sequence
  Description of Artificial Sequence: Synthetic oligonucleotide
acucuauaauaguucugcu

SEQ ID NO: 1753790 - RNA, 19 nt, Artificial Sequence
  Description of Artificial Sequence: Synthetic oligonucleotide
aauuuuccauauccucgau

SEQ ID NO: 1753791 - RNA, 19 nt, Artificial Sequence
  Description of Artificial Sequence: Synthetic oligonucleotide
gcuguauacauuuugcaaa

SEQ ID NO: 1753792 - RNA, 19 nt, Artificial Sequence
  Description of Artificial Sequence: Synthetic oligonucleotide
acgacccucagcucugccg

SEQ ID NO: 1753793 - RNA, 19 nt, Artificial Sequence
  Description of Artificial Sequence: Synthetic oligonucleotide
cuaucgugauguuuucuuc

SEQ ID NO: 1753794 - RNA, 19 nt, Artificial Sequence
  Description of Artificial Sequence: Synthetic oligonucleotide
uugucuacaggcgcggucu

SEQ ID NO: 1753795 - RNA, 19 nt, Artificial Sequence
  Description of Artificial Sequence: Synthetic oligonucleotide
ccuuaugucuguaauaaca

SEQ ID NO: 1753796 - RNA, 19 nt, Artificial Sequence
  Description of Artificial Sequence: Synthetic oligonucleotide
agccuuaugucuguaauaa

SEQ ID NO: 1753797 - RNA, 19 nt, Artificial Sequence
  Description of Artificial Sequence: Synthetic oligonucleotide
caguauaaguaaggaaagc

SEQ ID NO: 1753798 - RNA, 19 nt, Artificial Sequence
  Description of Artificial Sequence: Synthetic oligonucleotide
acaggcgcggucuaucgug

SEQ ID NO: 1753799 - RNA, 19 nt, Artificial Sequence
  Description of Artificial Sequence: Synthetic oligonucleotide
cacccaucuagcuguauac

SEQ ID NO: 1753800 - RNA, 19 nt, Artificial Sequence
  Description of Artificial Sequence: Synthetic oligonucleotide
cuagggacuggaugcugcg

SEQ ID NO: 1753801 - RNA, 19 nt, Artificial Sequence
  Description of Artificial Sequence: Synthetic oligonucleotide
cauaaggauaagcaaggaa

SEQ ID NO: 1753802 - RNA, 19 nt, Artificial Sequence
  Description of Artificial Sequence: Synthetic oligonucleotide
gacucugaccacucuauaa

SEQ ID NO: 1753803 - RNA, 19 nt, Artificial Sequence
  Description of Artificial Sequence: Synthetic oligonucleotide
ugcuuaagucucugcauuc

SEQ ID NO: 1753804 - RNA, 19 nt, Artificial Sequence
  Description of Artificial Sequence: Synthetic oligonucleotide
cuacaggcgcggucuaucg

SEQ ID NO: 1753805 - RNA, 19 nt, Artificial Sequence
  Description of Artificial Sequence: Synthetic oligonucleotide
uggugcaaaggugucguug

SEQ ID NO: 1753806 - RNA, 19 nt, Artificial Sequence
  Description of Artificial Sequence: Synthetic oligonucleotide
uccgacgccccuccguccg

SEQ ID NO: 1753807 - RNA, 19 nt, Artificial Sequence
  Description of Artificial Sequence: Synthetic oligonucleotide
guuuaucaaggccgcacac

SEQ ID NO: 1753808 - RNA, 19 nt, Artificial Sequence
  Description of Artificial Sequence: Synthetic oligonucleotide
ucaugauguacaagccuua

SEQ ID NO: 1753809 - RNA, 19 nt, Artificial Sequence
  Description of Artificial Sequence: Synthetic oligonucleotide
ggauaagcaaggaauuccc

SEQ ID NO: 1753810 - RNA, 19 nt, Artificial Sequence
  Description of Artificial Sequence: Synthetic oligonucleotide
gugucguuguuugucaccc

SEQ ID NO: 1753811 - RNA, 19 nt, Artificial Sequence
  Description of Artificial Sequence: Synthetic oligonucleotide
caauaccaacauugucugg

SEQ ID NO: 1753812 - RNA, 19 nt, Artificial Sequence
  Description of Artificial Sequence: Synthetic oligonucleotide
uacuccgggaagcugccgu

SEQ ID NO: 1753813 - RNA, 19 nt, Artificial Sequence
  Description of Artificial Sequence: Synthetic oligonucleotide
gugacaguauaaguaagga

SEQ ID NO: 1753814 - RNA, 19 nt, Artificial Sequence
  Description of Artificial Sequence: Synthetic oligonucleotide
gaccacucuauaauaguuc

SEQ ID NO: 1753815 - RNA, 19 nt, Artificial Sequence
  Description of Artificial Sequence: Synthetic oligonucleotide
gacugcagcccagaucccg

SEQ ID NO: 1753816 - RNA, 19 nt, Artificial Sequence
  Description of Artificial Sequence: Synthetic oligonucleotide
gauaggauaagcuccccuu

SEQ ID NO: 1753817 - RNA, 19 nt, Artificial Sequence
  Description of Artificial Sequence: Synthetic oligonucleotide
ugccguggcucgcacuagg

SEQ ID NO: 1753818 - RNA, 19 nt, Artificial Sequence
  Description of Artificial Sequence: Synthetic oligonucleotide
caguuuaucaaggccgcac

SEQ ID NO: 1753819 - RNA, 19 nt, Artificial Sequence
  Description of Artificial Sequence: Synthetic oligonucleotide
aguccaagagccccuuccu

SEQ ID NO: 1753820 - RNA, 19 nt, Artificial Sequence
  Description of Artificial Sequence: Synthetic oligonucleotide
ucccacguggaacgcgcgg

SEQ ID NO: 1753821 - RNA, 19 nt, Artificial Sequence
  Description of Artificial Sequence: Synthetic oligonucleotide
aaucuggaggucacugaca

SEQ ID NO: 1753822 - RNA, 19 nt, Artificial Sequence
  Description of Artificial Sequence: Synthetic oligonucleotide
ggauaagcuccccuucucc

SEQ ID NO: 1753823 - RNA, 19 nt, Artificial Sequence
  Description of Artificial Sequence: Synthetic oligonucleotide
agucacuaggucaguguuc

SEQ ID NO: 1753824 - RNA, 19 nt, Artificial Sequence
  Description of Artificial Sequence: Synthetic oligonucleotide
ugagcuucugacugcccaa

SEQ ID NO: 1753825 - RNA, 19 nt, Artificial Sequence
  Description of Artificial Sequence: Synthetic oligonucleotide
uucuucccgauaguccaag

SEQ ID NO: 1753826 - RNA, 19 nt, Artificial Sequence
  Description of Artificial Sequence: Synthetic oligonucleotide
cccuuccuaacacauaaag

SEQ ID NO: 1753827 - RNA, 19 nt, Artificial Sequence
  Description of Artificial Sequence: Synthetic oligonucleotide
gaagcucguacuccgggaa

SEQ ID NO: 1753828 - RNA, 19 nt, Artificial Sequence
  Description of Artificial Sequence: Synthetic oligonucleotide
guucucugugcuuauuaaa

SEQ ID NO: 1753829 - RNA, 19 nt, Artificial Sequence
  Description of Artificial Sequence: Synthetic oligonucleotide
agcuccggaagcucguacu

SEQ ID NO: 1753830 - RNA, 19 nt, Artificial Sequence
  Description of Artificial Sequence: Synthetic oligonucleotide
agauauucacagauaggau

SEQ ID NO: 1753831 - RNA, 19 nt, Artificial Sequence
  Description of Artificial Sequence: Synthetic oligonucleotide
ucggugagcuucugacugc

SEQ ID NO: 1753832 - RNA, 19 nt, Artificial Sequence
  Description of Artificial Sequence: Synthetic oligonucleotide
cuguaauaacaaccacaug

SEQ ID NO: 1753833 - RNA, 19 nt, Artificial Sequence
  Description of Artificial Sequence: Synthetic oligonucleotide
uguccgacgccccuccguc

SEQ ID NO: 1753834 - RNA, 19 nt, Artificial Sequence
  Description of Artificial Sequence: Synthetic oligonucleotide
uauccucgaucaugggacu

SEQ ID NO: 1753835 - RNA, 19 nt, Artificial Sequence
  Description of Artificial Sequence: Synthetic oligonucleotide
aguucugcuuaagucucug

SEQ ID NO: 1753836 - RNA, 19 nt, Artificial Sequence
  Description of Artificial Sequence: Synthetic oligonucleotide
ucguuguuugucacccauc

SEQ ID NO: 1753837 - RNA, 19 nt, Artificial Sequence
  Description of Artificial Sequence: Synthetic oligonucleotide
acauaaggauaagcaagga

SEQ ID NO: 1753838 - RNA, 19 nt, Artificial Sequence
  Description of Artificial Sequence: Synthetic oligonucleotide
acaagccuuaugucuguaa

SEQ ID NO: 1753839 - RNA, 19 nt, Artificial Sequence
  Description of Artificial Sequence: Synthetic oligonucleotide
agcaaacaucacaaaagaa

SEQ ID NO: 1753840 - RNA, 19 nt, Artificial Sequence
  Description of Artificial Sequence: Synthetic oligonucleotide
caagccguuguccgacgcc

SEQ ID NO: 1753841 - RNA, 19 nt, Artificial Sequence
  Description of Artificial Sequence: Synthetic oligonucleotide
ucuacaggcgcggucuauc

SEQ ID NO: 1753842 - RNA, 19 nt, Artificial Sequence
  Description of Artificial Sequence: Synthetic oligonucleotide
aagcugccguggcucgcac

SEQ ID NO: 1753843 - RNA, 19 nt, Artificial Sequence
  Description of Artificial Sequence: Synthetic oligonucleotide
uccucgaucaugggacucu

SEQ ID NO: 1753844 - RNA, 19 nt, Artificial Sequence
  Description of Artificial Sequence: Synthetic oligonucleotide
gagcauucugaagcaaaca

SEQ ID NO: 1753845 - RNA, 19 nt, Artificial Sequence
  Description of Artificial Sequence: Synthetic oligonucleotide
ucuucccgauaguccaaga

SEQ ID NO: 1753846 - RNA, 19 nt, Artificial Sequence
  Description of Artificial Sequence: Synthetic oligonucleotide
gaacgcgcgggugugcagc

SEQ ID NO: 1753847 - RNA, 19 nt, Artificial Sequence
  Description of Artificial Sequence: Synthetic oligonucleotide
cuggaucaacauaaggaua

SEQ ID NO: 1753848 - RNA, 19 nt, Artificial Sequence
  Description of Artificial Sequence: Synthetic oligonucleotide
ugcgcgacugccugcggcu

SEQ ID NO: 1753849 - RNA, 19 nt, Artificial Sequence
  Description of Artificial Sequence: Synthetic oligonucleotide
ucaguuuaucaaggccgca

SEQ ID NO: 1753850 - RNA, 19 nt, Artificial Sequence
  Description of Artificial Sequence: Synthetic oligonucleotide
uuguccgacgccccuccgu

SEQ ID NO: 1753851 - RNA, 19 nt, Artificial Sequence
  Description of Artificial Sequence: Synthetic oligonucleotide
cgcucagcgacaaaucccg

SEQ ID NO: 1753852 - RNA, 19 nt, Artificial Sequence
  Description of Artificial Sequence: Synthetic oligonucleotide
gacaaacguuucuugucua

SEQ ID NO: 1753853 - RNA, 19 nt, Artificial Sequence
  Description of Artificial Sequence: Synthetic oligonucleotide
caucuagcuguauacauuu

SEQ ID NO: 1753854 - RNA, 19 nt, Artificial Sequence
  Description of Artificial Sequence: Synthetic oligonucleotide
gguaucuuuugucauugua

SEQ ID NO: 1753855 - RNA, 19 nt, Artificial Sequence
  Description of Artificial Sequence: Synthetic oligonucleotide
uacaggcgcggucuaucgu

SEQ ID NO: 1753856 - RNA, 19 nt, Artificial Sequence
  Description of Artificial Sequence: Synthetic oligonucleotide
uccguccgccugcugcgcg

SEQ ID NO: 1753857 - RNA, 19 nt, Artificial Sequence
  Description of Artificial Sequence: Synthetic oligonucleotide
caaacguuucuugucuaca

SEQ ID NO: 1753858 - RNA, 19 nt, Artificial Sequence
  Description of Artificial Sequence: Synthetic oligonucleotide
acguggaacgcgcgggugu

SEQ ID NO: 1753859 - RNA, 19 nt, Artificial Sequence
  Description of Artificial Sequence: Synthetic oligonucleotide
uccaaacagucaucaugau

SEQ ID NO: 1753860 - RNA, 19 nt, Artificial Sequence
  Description of Artificial Sequence: Synthetic oligonucleotide
ucccucaguucggugagcu

SEQ ID NO: 1753861 - RNA, 19 nt, Artificial Sequence
  Description of Artificial Sequence: Synthetic oligonucleotide
cagcgacaaaucccggggc

SEQ ID NO: 1753862 - RNA, 19 nt, Artificial Sequence
  Description of Artificial Sequence: Synthetic oligonucleotide
aacgcgcgggugugcagcu

SEQ ID NO: 1753863 - RNA, 19 nt, Artificial Sequence
  Description of Artificial Sequence: Synthetic oligonucleotide
ugucguuguuugucaccca

SEQ ID NO: 1753864 - RNA, 19 nt, Artificial Sequence
  Description of Artificial Sequence: Synthetic oligonucleotide
cucuauaauaguucugcuu

SEQ ID NO: 1753865 - RNA, 19 nt, Artificial Sequence
  Description of Artificial Sequence: Synthetic oligonucleotide
cagaucccgggccacagca

SEQ ID NO: 1753866 - RNA, 19 nt, Artificial Sequence
  Description of Artificial Sequence: Synthetic oligonucleotide
agguuccuggaucaacaua

SEQ ID NO: 1753867 - RNA, 19 nt, Artificial Sequence
  Description of Artificial Sequence: Synthetic oligonucleotide
guuugucacccaucuagcu

SEQ ID NO: 1753868 - RNA, 19 nt, Artificial Sequence
  Description of Artificial Sequence: Synthetic oligonucleotide
auccucgaucaugggacuc

SEQ ID NO: 1753869 - RNA, 19 nt, Artificial Sequence
  Description of Artificial Sequence: Synthetic oligonucleotide
uucccaagugcaugagauu

SEQ ID NO: 1753870 - RNA, 19 nt, Artificial Sequence
  Description of Artificial Sequence: Synthetic oligonucleotide
gccaaugcuucuugauaag

SEQ ID NO: 1753871 - RNA, 19 nt, Artificial Sequence
  Description of Artificial Sequence: Synthetic oligonucleotide
uugagucccucaguucggu

SEQ ID NO: 1753872 - RNA, 19 nt, Artificial Sequence
  Description of Artificial Sequence: Synthetic oligonucleotide
ugcggguccgccgccaugu

SEQ ID NO: 1753873 - RNA, 19 nt, Artificial Sequence
  Description of Artificial Sequence: Synthetic oligonucleotide
cucugaccacucuauaaua

SEQ ID NO: 1753874 - RNA, 19 nt, Artificial Sequence
  Description of Artificial Sequence: Synthetic oligonucleotide
cuccggaagcucguacucc

SEQ ID NO: 1753875 - RNA, 19 nt, Artificial Sequence
  Description of Artificial Sequence: Synthetic oligonucleotide
ggaucaacauaaggauaag

SEQ ID NO: 1753876 - RNA, 19 nt, Artificial Sequence
  Description of Artificial Sequence: Synthetic oligonucleotide
acccaucuagcuguauaca

SEQ ID NO: 1753877 - RNA, 19 nt, Artificial Sequence
  Description of Artificial Sequence: Synthetic oligonucleotide
uggaacgcgcgggugugca

SEQ ID NO: 1753878 - RNA, 19 nt, Artificial Sequence
  Description of Artificial Sequence: Synthetic oligonucleotide
ccgauaguccaagagcccc

SEQ ID NO: 1753879 - RNA, 19 nt, Artificial Sequence
  Description of Artificial Sequence: Synthetic oligonucleotide
ggaugcugcggaccacccg

SEQ ID NO: 1753880 - RNA, 19 nt, Artificial Sequence
  Description of Artificial Sequence: Synthetic oligonucleotide
cugcgcgacugccugcggc

SEQ ID NO: 1753881 - RNA, 19 nt, Artificial Sequence
  Description of Artificial Sequence: Synthetic oligonucleotide
ucgcccugcggguccgccg

SEQ ID NO: 1753882 - RNA, 19 nt, Artificial Sequence
  Description of Artificial Sequence: Synthetic oligonucleotide
caaaucccggggcccgagc

SEQ ID NO: 1753883 - RNA, 19 nt, Artificial Sequence
  Description of Artificial Sequence: Synthetic oligonucleotide
cgaucaugggacucugacc

SEQ ID NO: 1753884 - RNA, 19 nt, Artificial Sequence
  Description of Artificial Sequence: Synthetic oligonucleotide
guuguccgacgccccuccg

SEQ ID NO: 1753885 - RNA, 19 nt, Artificial Sequence
  Description of Artificial Sequence: Synthetic oligonucleotide
ggucuuuacugaugugcuc

SEQ ID NO: 1753886 - RNA, 19 nt, Artificial Sequence
  Description of Artificial Sequence: Synthetic oligonucleotide
acaaaucccggggcccgag

SEQ ID NO: 1753887 - RNA, 19 nt, Artificial Sequence
  Description of Artificial Sequence: Synthetic oligonucleotide
cucccacguggaacgcgcg

SEQ ID NO: 1753888 - RNA, 19 nt, Artificial Sequence
  Description of Artificial Sequence: Synthetic oligonucleotide
cguggcucgcacuagggac

SEQ ID NO: 1753889 - RNA, 19 nt, Artificial Sequence
  Description of Artificial Sequence: Synthetic oligonucleotide
ggaagcucguacuccggga

SEQ ID NO: 1753890 - RNA, 19 nt, Artificial Sequence
  Description of Artificial Sequence: Synthetic oligonucleotide
cugccugcggcucgcucag

SEQ ID NO: 1753891 - RNA, 19 nt, Artificial Sequence
  Description of Artificial Sequence: Synthetic oligonucleotide
cuccgggaagcugccgugg

SEQ ID NO: 1753892 - RNA, 19 nt, Artificial Sequence
  Description of Artificial Sequence: Synthetic oligonucleotide
cgcaccgucgcccugcggg

SEQ ID NO: 1753893 - RNA, 19 nt, Artificial Sequence
  Description of Artificial Sequence: Synthetic oligonucleotide
ugucuacaggcgcggucua

SEQ ID NO: 1753894 - RNA, 19 nt, Artificial Sequence
  Description of Artificial Sequence: Synthetic oligonucleotide
ccuggaucaacauaaggau

SEQ ID NO: 1753895 - RNA, 19 nt, Artificial Sequence
  Description of Artificial Sequence: Synthetic oligonucleotide
cacuaggucaguguucucu

SEQ ID NO: 1753896 - RNA, 19 nt, Artificial Sequence
  Description of Artificial Sequence: Synthetic oligonucleotide
uggcucgcacuagggacug

SEQ ID NO: 1753897 - RNA, 19 nt, Artificial Sequence
  Description of Artificial Sequence: Synthetic oligonucleotide
ugguaugguuuguguucuc

SEQ ID NO: 1753898 - RNA, 19 nt, Artificial Sequence
  Description of Artificial Sequence: Synthetic oligonucleotide
ccuucggaaucauaaugga

SEQ ID NO: 1753899 - RNA, 19 nt, Artificial Sequence
  Description of Artificial Sequence: Synthetic oligonucleotide
uguguucucugugcuuauu

SEQ ID NO: 1753900 - RNA, 19 nt, Artificial Sequence
  Description of Artificial Sequence: Synthetic oligonucleotide
ccacucuauaauaguucug

SEQ ID NO: 1753901 - RNA, 19 nt, Artificial Sequence
  Description of Artificial Sequence: Synthetic oligonucleotide
agccguuguccgacgcccc

SEQ ID NO: 1753902 - RNA, 19 nt, Artificial Sequence
  Description of Artificial Sequence: Synthetic oligonucleotide
gucguuguuugucacccau

SEQ ID NO: 1753903 - RNA, 19 nt, Artificial Sequence
  Description of Artificial Sequence: Synthetic oligonucleotide
ggucuaucgugauguuuuc

SEQ ID NO: 1753904 - RNA, 19 nt, Artificial Sequence
  Description of Artificial Sequence: Synthetic oligonucleotide
gccuuaugucuguaauaac

SEQ ID NO: 1753905 - RNA, 19 nt, Artificial Sequence
  Description of Artificial Sequence: Synthetic oligonucleotide
guacaagccuuaugucugu

SEQ ID NO: 1753906 - RNA, 19 nt, Artificial Sequence
  Description of Artificial Sequence: Synthetic oligonucleotide
uacaagccuuaugucugua

SEQ ID NO: 1753907 - RNA, 19 nt, Artificial Sequence
  Description of Artificial Sequence: Synthetic oligonucleotide
cccgauaguccaagagccc

SEQ ID NO: 1753908 - RNA, 19 nt, Artificial Sequence
  Description of Artificial Sequence: Synthetic oligonucleotide
ucaguucggugagcuucug

SEQ ID NO: 1753909 - RNA, 19 nt, Artificial Sequence
  Description of Artificial Sequence: Synthetic oligonucleotide
cagcuccggaagcucguac

SEQ ID NO: 1753910 - RNA, 19 nt, Artificial Sequence
  Description of Artificial Sequence: Synthetic oligonucleotide
cacuagggacuggaugcug

SEQ ID NO: 1753911 - RNA, 19 nt, Artificial Sequence
  Description of Artificial Sequence: Synthetic oligonucleotide
cugcuuaagucucugcauu

SEQ ID NO: 1753912 - RNA, 19 nt, Artificial Sequence
  Description of Artificial Sequence: Synthetic oligonucleotide
ucacuaggucaguguucuc

SEQ ID NO: 1753913 - RNA, 19 nt, Artificial Sequence
  Description of Artificial Sequence: Synthetic oligonucleotide
ccuccguccgccugcugcg

SEQ ID NO: 1753914 - RNA, 19 nt, Artificial Sequence
  Description of Artificial Sequence: Synthetic oligonucleotide
cucaguucggugagcuucu

SEQ ID NO: 1753915 - RNA, 19 nt, Artificial Sequence
  Description of Artificial Sequence: Synthetic oligonucleotide
gcuccggaagcucguacuc

SEQ ID NO: 1753916 - RNA, 19 nt, Artificial Sequence
  Description of Artificial Sequence: Synthetic oligonucleotide
ggcgcggucuaucgugaug

SEQ ID NO: 1753917 - RNA, 19 nt, Artificial Sequence
  Description of Artificial Sequence: Synthetic oligonucleotide
gcgacaaaucccggggccc

SEQ ID NO: 1753918 - RNA, 19 nt, Artificial Sequence
  Description of Artificial Sequence: Synthetic oligonucleotide
caguucggugagcuucuga

SEQ ID NO: 1753919 - RNA, 19 nt, Artificial Sequence
  Description of Artificial Sequence: Synthetic oligonucleotide
ggaccacccgcaccgucgc

SEQ ID NO: 1753920 - RNA, 19 nt, Artificial Sequence
  Description of Artificial Sequence: Synthetic oligonucleotide
cugcugcgcgacugccugc

SEQ ID NO: 1753921 - RNA, 19 nt, Artificial Sequence
  Description of Artificial Sequence: Synthetic oligonucleotide
cggaccacccgcaccgucg

SEQ ID NO: 1753922 - RNA, 19 nt, Artificial Sequence
  Description of Artificial Sequence: Synthetic oligonucleotide
cccacguggaacgcgcggg

SEQ ID NO: 1753923 - RNA, 19 nt, Artificial Sequence
  Description of Artificial Sequence: Synthetic oligonucleotide
gacaaaucccggggcccga

SEQ ID NO: 1753924 - RNA, 19 nt, Artificial Sequence
  Description of Artificial Sequence: Synthetic oligonucleotide
caggcgcggucuaucguga

SEQ ID NO: 1753925 - RNA, 19 nt, Artificial Sequence
  Description of Artificial Sequence: Synthetic oligonucleotide
cggaagcucguacuccggg

SEQ ID NO: 1753926 - RNA, 19 nt, Artificial Sequence
  Description of Artificial Sequence: Synthetic oligonucleotide
agcugccguggcucgcacu

SEQ ID NO: 1753927 - RNA, 19 nt, Artificial Sequence
  Description of Artificial Sequence: Synthetic oligonucleotide
caaaggugucguuguuugu

SEQ ID NO: 1753928 - RNA, 19 nt, Artificial Sequence
  Description of Artificial Sequence: Synthetic oligonucleotide
cggguaucuuuugucauug

SEQ ID NO: 1753929 - RNA, 19 nt, Artificial Sequence
  Description of Artificial Sequence: Synthetic oligonucleotide
ggaacgcgcgggugugcag

SEQ ID NO: 1753930 - RNA, 19 nt, Artificial Sequence
  Description of Artificial Sequence: Synthetic oligonucleotide
gucuaucgugauguuuucu

SEQ ID NO: 1753931 - RNA, 19 nt, Artificial Sequence
  Description of Artificial Sequence: Synthetic oligonucleotide
caaaggcucccacguggaa

SEQ ID NO: 1753932 - RNA, 19 nt, Artificial Sequence
  Description of Artificial Sequence: Synthetic oligonucleotide
ccggaagcucguacuccgg

SEQ ID NO: 1753933 - RNA, 19 nt, Artificial Sequence
  Description of Artificial Sequence: Synthetic oligonucleotide
gccguggcucgcacuaggg

SEQ ID NO: 1753934 - RNA, 19 nt, Artificial Sequence
  Description of Artificial Sequence: Synthetic oligonucleotide
guggcucgcacuagggacu

SEQ ID NO: 1753935 - RNA, 19 nt, Artificial Sequence
  Description of Artificial Sequence: Synthetic oligonucleotide
acgccccuccguccgccug

SEQ ID NO: 1753936 - RNA, 19 nt, Artificial Sequence
  Description of Artificial Sequence: Synthetic oligonucleotide
gcucagcgacaaaucccgg

SEQ ID NO: 1753937 - RNA, 19 nt, Artificial Sequence
  Description of Artificial Sequence: Synthetic oligonucleotide
guggaacgcgcgggugugc

SEQ ID NO: 1753938 - RNA, 19 nt, Artificial Sequence
  Description of Artificial Sequence: Synthetic oligonucleotide
ggagugcugcugaauucuc

SEQ ID NO: 1753939 - RNA, 19 nt, Artificial Sequence
  Description of Artificial Sequence: Synthetic oligonucleotide
ggugagcuucugacugccc

SEQ ID NO: 1753940 - RNA, 19 nt, Artificial Sequence
  Description of Artificial Sequence: Synthetic oligonucleotide
cgacaaaucccggggcccg

SEQ ID NO: 1753941 - RNA, 19 nt, Artificial Sequence
  Description of Artificial Sequence: Synthetic oligonucleotide
cguuguccgacgccccucc

SEQ ID NO: 1753942 - RNA, 19 nt, Artificial Sequence
  Description of Artificial Sequence: Synthetic oligonucleotide
ggacucugaccacucuaua

SEQ ID NO: 1753943 - RNA, 19 nt, Artificial Sequence
  Description of Artificial Sequence: Synthetic oligonucleotide
cugccguggcucgcacuag

SEQ ID NO: 1753944 - RNA, 19 nt, Artificial Sequence
  Description of Artificial Sequence: Synthetic oligonucleotide
aggcgcggucuaucgugau

SEQ ID NO: 1753945 - RNA, 19 nt, Artificial Sequence
  Description of Artificial Sequence: Synthetic oligonucleotide
gccgcacacgacccucagc

SEQ ID NO: 1753946 - RNA, 19 nt, Artificial Sequence
  Description of Artificial Sequence: Synthetic oligonucleotide
cccaucuagcuguauacau

SEQ ID NO: 1753947 - RNA, 19 nt, Artificial Sequence
  Description of Artificial Sequence: Synthetic oligonucleotide
gcgccacagcuccccaaag

SEQ ID NO: 1753948 - RNA, 19 nt, Artificial Sequence
  Description of Artificial Sequence: Synthetic oligonucleotide
gagcuucugacugcccaau

SEQ ID NO: 1753949 - RNA, 19 nt, Artificial Sequence
  Description of Artificial Sequence: Synthetic oligonucleotide
cuccguccgccugcugcgc

SEQ ID NO: 1753950 - RNA, 19 nt, Artificial Sequence
  Description of Artificial Sequence: Synthetic oligonucleotide
gcgcggucuaucgugaugu

SEQ ID NO: 1753951 - RNA, 19 nt, Artificial Sequence
  Description of Artificial Sequence: Synthetic oligonucleotide
cugcggguccgccgccaug

SEQ ID NO: 1753952 - RNA, 19 nt, Artificial Sequence
  Description of Artificial Sequence: Synthetic oligonucleotide
ggcucgcucagcgacaaau

SEQ ID NO: 1753953 - RNA, 19 nt, Artificial Sequence
  Description of Artificial Sequence: Synthetic oligonucleotide
gcgggugugcagcuccgga

SEQ ID NO: 1753954 - RNA, 19 nt, Artificial Sequence
  Description of Artificial Sequence: Synthetic oligonucleotide
cgcgcgggugugcagcucc

SEQ ID NO: 1753955 - RNA, 19 nt, Artificial Sequence
  Description of Artificial Sequence: Synthetic oligonucleotide
ccaucuagcuguauacauu

SEQ ID NO: 1753956 - RNA, 19 nt, Artificial Sequence
  Description of Artificial Sequence: Synthetic oligonucleotide
gggacucugaccacucuau

SEQ ID NO: 1753957 - RNA, 19 nt, Artificial Sequence
  Description of Artificial Sequence: Synthetic oligonucleotide
caacauugucugguauggu

SEQ ID NO: 1753958 - RNA, 19 nt, Artificial Sequence
  Description of Artificial Sequence: Synthetic oligonucleotide
agccccuuccuaacacaua

SEQ ID NO: 1753959 - RNA, 19 nt, Artificial Sequence
  Description of Artificial Sequence: Synthetic oligonucleotide
acgcgcgggugugcagcuc

SEQ ID NO: 1753960 - RNA, 19 nt, Artificial Sequence
  Description of Artificial Sequence: Synthetic oligonucleotide
ccuccaagccguuguccga

SEQ ID NO: 1753961 - RNA, 19 nt, Artificial Sequence
  Description of Artificial Sequence: Synthetic oligonucleotide
cucgcacuagggacuggau

SEQ ID NO: 1753962 - RNA, 19 nt, Artificial Sequence
  Description of Artificial Sequence: Synthetic oligonucleotide
gcaugagauuccauuucau

SEQ ID NO: 1753963 - RNA, 19 nt, Artificial Sequence
  Description of Artificial Sequence: Synthetic oligonucleotide
gcgacugccugcggcucgc

SEQ ID NO: 1753964 - RNA, 19 nt, Artificial Sequence
  Description of Artificial Sequence: Synthetic oligonucleotide
cguggaacgcgcgggugug

SEQ ID NO: 1753965 - RNA, 19 nt, Artificial Sequence
  Description of Artificial Sequence: Synthetic oligonucleotide
gccgauuuguauaggucuu

SEQ ID NO: 1753966 - RNA, 19 nt, Artificial Sequence
  Description of Artificial Sequence: Synthetic oligonucleotide
ccguggcucgcacuaggga

SEQ ID NO: 1753967 - RNA, 19 nt, Artificial Sequence
  Description of Artificial Sequence: Synthetic oligonucleotide
ccgccugcugcgcgacugc

SEQ ID NO: 1753968 - RNA, 19 nt, Artificial Sequence
  Description of Artificial Sequence: Synthetic oligonucleotide
gcgcgggugugcagcuccg

SEQ ID NO: 1753969 - RNA, 19 nt, Artificial Sequence
  Description of Artificial Sequence: Synthetic oligonucleotide
gcacuagggacuggaugcu

SEQ ID NO: 1753970 - RNA, 19 nt, Artificial Sequence
  Description of Artificial Sequence: Synthetic oligonucleotide
gucuacaggcgcggucuau

SEQ ID NO: 1753971 - RNA, 19 nt, Artificial Sequence
  Description of Artificial Sequence: Synthetic oligonucleotide
caccaaucuggaggucacu

SEQ ID NO: 1753972 - RNA, 19 nt, Artificial Sequence
  Description of Artificial Sequence: Synthetic oligonucleotide
cgauaguccaagagccccu

SEQ ID NO: 1753973 - RNA, 19 nt, Artificial Sequence
  Description of Artificial Sequence: Synthetic oligonucleotide
ccggguaucuuuugucauu

SEQ ID NO: 1753974 - RNA, 19 nt, Artificial Sequence
  Description of Artificial Sequence: Synthetic oligonucleotide
cugccgcugccuccagacu

SEQ ID NO: 1753975 - RNA, 19 nt, Artificial Sequence
  Description of Artificial Sequence: Synthetic oligonucleotide
gcaccgucgcccugcgggu

SEQ ID NO: 1753976 - RNA, 19 nt, Artificial Sequence
  Description of Artificial Sequence: Synthetic oligonucleotide
cgagccggccgcgccacag

SEQ ID NO: 1753977 - RNA, 19 nt, Artificial Sequence
  Description of Artificial Sequence: Synthetic oligonucleotide
gcggcucgcucagcgacaa

SEQ ID NO: 1753978 - RNA, 19 nt, Artificial Sequence
  Description of Artificial Sequence: Synthetic oligonucleotide
gucacccaucuagcuguau

SEQ ID NO: 1753979 - RNA, 19 nt, Artificial Sequence
  Description of Artificial Sequence: Synthetic oligonucleotide
ccgacgccccuccguccgc

SEQ ID NO: 1753980 - RNA, 19 nt, Artificial Sequence
  Description of Artificial Sequence: Synthetic oligonucleotide
gcggucuaucgugauguuu

SEQ ID NO: 1753981 - RNA, 19 nt, Artificial Sequence
  Description of Artificial Sequence: Synthetic oligonucleotide
gcagcuccggaagcucgua

SEQ ID NO: 1753982 - RNA, 19 nt, Artificial Sequence
  Description of Artificial Sequence: Synthetic oligonucleotide
gcccagaucccgggccaca

SEQ ID NO: 1753983 - RNA, 19 nt, Artificial Sequence
  Description of Artificial Sequence: Synthetic oligonucleotide
cgcgggugugcagcuccgg

SEQ ID NO: 1753984 - RNA, 19 nt, Artificial Sequence
  Description of Artificial Sequence: Synthetic oligonucleotide
cccgagccggccgcgccac

SEQ ID NO: 1753985 - RNA, 19 nt, Artificial Sequence
  Description of Artificial Sequence: Synthetic oligonucleotide
ccgauuuguauaggucuuu

SEQ ID NO: 1753986 - RNA, 19 nt, Artificial Sequence
  Description of Artificial Sequence: Synthetic oligonucleotide
gcggguccgccgccauguc

SEQ ID NO: 1753987 - RNA, 19 nt, Artificial Sequence
  Description of Artificial Sequence: Synthetic oligonucleotide
cgacgccccuccguccgcc

SEQ ID NO: 1753988 - RNA, 19 nt, Artificial Sequence
  Description of Artificial Sequence: Synthetic oligonucleotide
cggguccgccgccauguca

SEQ ID NO: 1753989 - RNA, 19 nt, Artificial Sequence
  Description of Artificial Sequence: Synthetic oligonucleotide
cguccgccugcugcgcgac

SEQ ID NO: 1753990 - RNA, 19 nt, Artificial Sequence
  Description of Artificial Sequence: Synthetic oligonucleotide
ccgcugccuccagacugca

SEQ ID NO: 1753991 - RNA, 19 nt, Artificial Sequence
  Description of Artificial Sequence: Synthetic oligonucleotide
ccccuccguccgccugcug

SEQ ID NO: 1753992 - RNA, 19 nt, Artificial Sequence
  Description of Artificial Sequence: Synthetic oligonucleotide
ccgagccggccgcgccaca

SEQ ID NO: 1753993 - RNA, 19 nt, Artificial Sequence
  Description of Artificial Sequence: Synthetic oligonucleotide
cgcggucuaucgugauguu

SEQ ID NO: 1753994 - RNA, 19 nt, Artificial Sequence
  Description of Artificial Sequence: Synthetic oligonucleotide
cggcucgcucagcgacaaa

SEQ ID NO: 1753995 - RNA, 19 nt, Artificial Sequence
  Description of Artificial Sequence: Synthetic oligonucleotide
uguuacaugaaccagacag

SEQ ID NO: 1753996 - RNA, 19 nt, Artificial Sequence
  Description of Artificial Sequence: Synthetic oligonucleotide
aagacuuaauauuucaccc

SEQ ID NO: 1753997 - RNA, 19 nt, Artificial Sequence
  Description of Artificial Sequence: Synthetic oligonucleotide
uauaacugaaagaaggugg

SEQ ID NO: 1753998 - RNA, 19 nt, Artificial Sequence
  Description of Artificial Sequence: Synthetic oligonucleotide
uauagaauguuuaaucagg

SEQ ID NO: 1753999 - RNA, 19 nt, Artificial Sequence
  Description of Artificial Sequence: Synthetic oligonucleotide
ucaguuguaggaaagguag

SEQ ID NO: 1754000 - RNA, 19 nt, Artificial Sequence
  Description of Artificial Sequence: Synthetic oligonucleotide
aagacuauaacugaaagaa

SEQ ID NO: 1754001 - RNA, 19 nt, Artificial Sequence
  Description of Artificial Sequence: Synthetic oligonucleotide
uguaacuaagacuauaacu

SEQ ID NO: 1754002 - RNA, 19 nt, Artificial Sequence
  Description of Artificial Sequence: Synthetic oligonucleotide
gacuauaacugaaagaagg

SEQ ID NO: 1754003 - RNA, 19 nt, Artificial Sequence
  Description of Artificial Sequence: Synthetic oligonucleotide
aaaauucuuuaguucuccc

SEQ ID NO: 1754004 - RNA, 19 nt, Artificial Sequence
  Description of Artificial Sequence: Synthetic oligonucleotide
auugauagacacaagauuc

SEQ ID NO: 1754005 - RNA, 19 nt, Artificial Sequence
  Description of Artificial Sequence: Synthetic oligonucleotide
ucuaucuacagcacaaaag

SEQ ID NO: 1754006 - RNA, 19 nt, Artificial Sequence
  Description of Artificial Sequence: Synthetic oligonucleotide
cuuuuauugggcaauaaug

SEQ ID NO: 1754007 - RNA, 19 nt, Artificial Sequence
  Description of Artificial Sequence: Synthetic oligonucleotide
acgaauguaggauucauuc

SEQ ID NO: 1754008 - RNA, 19 nt, Artificial Sequence
  Description of Artificial Sequence: Synthetic oligonucleotide
uccaauacucuuuauaaug

SEQ ID NO: 1754009 - RNA, 19 nt, Artificial Sequence
  Description of Artificial Sequence: Synthetic oligonucleotide
ugcuauuauuauuacaugc

SEQ ID NO: 1754010 - RNA, 19 nt, Artificial Sequence
  Description of Artificial Sequence: Synthetic oligonucleotide
uaaaccuggaugcagcuag

SEQ ID NO: 1754011 - RNA, 19 nt, Artificial Sequence
  Description of Artificial Sequence: Synthetic oligonucleotide
uggaaaauucuuuaguucu

SEQ ID NO: 1754012 - RNA, 19 nt, Artificial Sequence
  Description of Artificial Sequence: Synthetic oligonucleotide
ugaaggaacauuauucugu

SEQ ID NO: 1754013 - RNA, 19 nt, Artificial Sequence
  Description of Artificial Sequence: Synthetic oligonucleotide
uuuauaaugauugcuauua

SEQ ID NO: 1754014 - RNA, 19 nt, Artificial Sequence
  Description of Artificial Sequence: Synthetic oligonucleotide
caagacuuaauauuucacc

SEQ ID NO: 1754015 - RNA, 19 nt, Artificial Sequence
  Description of Artificial Sequence: Synthetic oligonucleotide
gagugauaaaccuggaugc

SEQ ID NO: 1754016 - RNA, 19 nt, Artificial Sequence
  Description of Artificial Sequence: Synthetic oligonucleotide
agaacuuguaacuaagacu

SEQ ID NO: 1754017 - RNA, 19 nt, Artificial Sequence
  Description of Artificial Sequence: Synthetic oligonucleotide
aacucuuuagggccuacgg

SEQ ID NO: 1754018 - RNA, 19 nt, Artificial Sequence
  Description of Artificial Sequence: Synthetic oligonucleotide
uauugggcaauaaugguga

SEQ ID NO: 1754019 - RNA, 19 nt, Artificial Sequence
  Description of Artificial Sequence: Synthetic oligonucleotide
uguacgugggguauuauca

SEQ ID NO: 1754020 - RNA, 19 nt, Artificial Sequence
  Description of Artificial Sequence: Synthetic oligonucleotide
uuaagauauagaauguuua

SEQ ID NO: 1754021 - RNA, 19 nt, Artificial Sequence
  Description of Artificial Sequence: Synthetic oligonucleotide
aaugacuaguggaaaauuc

SEQ ID NO: 1754022 - RNA, 19 nt, Artificial Sequence
  Description of Artificial Sequence: Synthetic oligonucleotide
ggugcuuagaaccugaugc

SEQ ID NO: 1754023 - RNA, 19 nt, Artificial Sequence
  Description of Artificial Sequence: Synthetic oligonucleotide
uuuaccuuggacugcauga

SEQ ID NO: 1754024 - RNA, 19 nt, Artificial Sequence
  Description of Artificial Sequence: Synthetic oligonucleotide
aaacucuaugagcaucucg

SEQ ID NO: 1754025 - RNA, 19 nt, Artificial Sequence
  Description of Artificial Sequence: Synthetic oligonucleotide
aaaguaguuucauagcaau

SEQ ID NO: 1754026 - RNA, 19 nt, Artificial Sequence
  Description of Artificial Sequence: Synthetic oligonucleotide
uuuucauaguacucaaagc

SEQ ID NO: 1754027 - RNA, 19 nt, Artificial Sequence
  Description of Artificial Sequence: Synthetic oligonucleotide
acauggauuuauuuagaac

SEQ ID NO: 1754028 - RNA, 19 nt, Artificial Sequence
  Description of Artificial Sequence: Synthetic oligonucleotide
uuauuaagauauagaaugu

SEQ ID NO: 1754029 - RNA, 19 nt, Artificial Sequence
  Description of Artificial Sequence: Synthetic oligonucleotide
uuucucuagcccucgaacg

SEQ ID NO: 1754030 - RNA, 19 nt, Artificial Sequence
  Description of Artificial Sequence: Synthetic oligonucleotide
aaucugauucaagucuugc

SEQ ID NO: 1754031 - RNA, 19 nt, Artificial Sequence
  Description of Artificial Sequence: Synthetic oligonucleotide
uauuaucaguauuauuaag

SEQ ID NO: 1754032 - RNA, 19 nt, Artificial Sequence
  Description of Artificial Sequence: Synthetic oligonucleotide
aguaacaggcccuugugag

SEQ ID NO: 1754033 - RNA, 19 nt, Artificial Sequence
  Description of Artificial Sequence: Synthetic oligonucleotide
uagaacuuguaacuaagac

SEQ ID NO: 1754034 - RNA, 19 nt, Artificial Sequence
  Description of Artificial Sequence: Synthetic oligonucleotide
aaugauugcuauuauuauu

SEQ ID NO: 1754035 - RNA, 19 nt, Artificial Sequence
  Description of Artificial Sequence: Synthetic oligonucleotide
cuauuauuauuacaugcag

SEQ ID NO: 1754036 - RNA, 19 nt, Artificial Sequence
  Description of Artificial Sequence: Synthetic oligonucleotide
aaucaggaaaacucagucu

SEQ ID NO: 1754037 - RNA, 19 nt, Artificial Sequence
  Description of Artificial Sequence: Synthetic oligonucleotide
uuaucaguauuauuaagau

SEQ ID NO: 1754038 - RNA, 19 nt, Artificial Sequence
  Description of Artificial Sequence: Synthetic oligonucleotide
agauauaggaaaaucaaca

SEQ ID NO: 1754039 - RNA, 19 nt, Artificial Sequence
  Description of Artificial Sequence: Synthetic oligonucleotide
ucuaggagcaucaaucuau

SEQ ID NO: 1754040 - RNA, 19 nt, Artificial Sequence
  Description of Artificial Sequence: Synthetic oligonucleotide
caaaagauaugcuggguag

SEQ ID NO: 1754041 - RNA, 19 nt, Artificial Sequence
  Description of Artificial Sequence: Synthetic oligonucleotide
uaagacuauaacugaaaga

SEQ ID NO: 1754042 - RNA, 19 nt, Artificial Sequence
  Description of Artificial Sequence: Synthetic oligonucleotide
auuaucaguauuauuaaga

SEQ ID NO: 1754043 - RNA, 19 nt, Artificial Sequence
  Description of Artificial Sequence: Synthetic oligonucleotide
acucaaagcacuuggccgg

SEQ ID NO: 1754044 - RNA, 19 nt, Artificial Sequence
  Description of Artificial Sequence: Synthetic oligonucleotide
uaagauauagaauguuuaa

SEQ ID NO: 1754045 - RNA, 19 nt, Artificial Sequence
  Description of Artificial Sequence: Synthetic oligonucleotide
cuaagacuauaacugaaag

SEQ ID NO: 1754046 - RNA, 19 nt, Artificial Sequence
  Description of Artificial Sequence: Synthetic oligonucleotide
ucauaguacucaaagcacu

SEQ ID NO: 1754047 - RNA, 19 nt, Artificial Sequence
  Description of Artificial Sequence: Synthetic oligonucleotide
cauggauuuauuuagaacu

SEQ ID NO: 1754048 - RNA, 19 nt, Artificial Sequence
  Description of Artificial Sequence: Synthetic oligonucleotide
aaagauaugcuggguagag

SEQ ID NO: 1754049 - RNA, 19 nt, Artificial Sequence
  Description of Artificial Sequence: Synthetic oligonucleotide
ucuugguauagaaugacua

SEQ ID NO: 1754050 - RNA, 19 nt, Artificial Sequence
  Description of Artificial Sequence: Synthetic oligonucleotide
acucuuuagggccuacggc

SEQ ID NO: 1754051 - RNA, 19 nt, Artificial Sequence
  Description of Artificial Sequence: Synthetic oligonucleotide
cuugguauagaaugacuag

SEQ ID NO: 1754052 - RNA, 19 nt, Artificial Sequence
  Description of Artificial Sequence: Synthetic oligonucleotide
aaugcaagacuuaauauuu

SEQ ID NO: 1754053 - RNA, 19 nt, Artificial Sequence
  Description of Artificial Sequence: Synthetic oligonucleotide
aaagguagucgaugagccg

SEQ ID NO: 1754054 - RNA, 19 nt, Artificial Sequence
  Description of Artificial Sequence: Synthetic oligonucleotide
caucaaucuaucuacagca

SEQ ID NO: 1754055 - RNA, 19 nt, Artificial Sequence
  Description of Artificial Sequence: Synthetic oligonucleotide
ucaaucuaucuacagcaca

SEQ ID NO: 1754056 - RNA, 19 nt, Artificial Sequence
  Description of Artificial Sequence: Synthetic oligonucleotide
uuuaacuuggcgacuuucu

SEQ ID NO: 1754057 - RNA, 19 nt, Artificial Sequence
  Description of Artificial Sequence: Synthetic oligonucleotide
gacuuaauauuucacccac

SEQ ID NO: 1754058 - RNA, 19 nt, Artificial Sequence
  Description of Artificial Sequence: Synthetic oligonucleotide
ggaaaaucaacaucagugc

SEQ ID NO: 1754059 - RNA, 19 nt, Artificial Sequence
  Description of Artificial Sequence: Synthetic oligonucleotide
uaacuaagacuauaacuga

SEQ ID NO: 1754060 - RNA, 19 nt, Artificial Sequence
  Description of Artificial Sequence: Synthetic oligonucleotide
cucagaucuguaaagcccc

SEQ ID NO: 1754061 - RNA, 19 nt, Artificial Sequence
  Description of Artificial Sequence: Synthetic oligonucleotide
ugcaagacuuaauauuuca

SEQ ID NO: 1754062 - RNA, 19 nt, Artificial Sequence
  Description of Artificial Sequence: Synthetic oligonucleotide
aaaucaacaucagugcccu

SEQ ID NO: 1754063 - RNA, 19 nt, Artificial Sequence
  Description of Artificial Sequence: Synthetic oligonucleotide
uaguuucauagcaaugggc

SEQ ID NO: 1754064 - RNA, 19 nt, Artificial Sequence
  Description of Artificial Sequence: Synthetic oligonucleotide
accagacagaauccaauac

SEQ ID NO: 1754065 - RNA, 19 nt, Artificial Sequence
  Description of Artificial Sequence: Synthetic oligonucleotide
aucuacagcacaaaaguag

SEQ ID NO: 1754066 - RNA, 19 nt, Artificial Sequence
  Description of Artificial Sequence: Synthetic oligonucleotide
guaguuucauagcaauggg

SEQ ID NO: 1754067 - RNA, 19 nt, Artificial Sequence
  Description of Artificial Sequence: Synthetic oligonucleotide
aacuacucagaucuguaaa

SEQ ID NO: 1754068 - RNA, 19 nt, Artificial Sequence
  Description of Artificial Sequence: Synthetic oligonucleotide
auaugcuggguagagcugc

SEQ ID NO: 1754069 - RNA, 19 nt, Artificial Sequence
  Description of Artificial Sequence: Synthetic oligonucleotide
acguucuuuaccuuggacu

SEQ ID NO: 1754070 - RNA, 19 nt, Artificial Sequence
  Description of Artificial Sequence: Synthetic oligonucleotide
caagaucccagcagcaugg

SEQ ID NO: 1754071 - RNA, 19 nt, Artificial Sequence
  Description of Artificial Sequence: Synthetic oligonucleotide
aaggaacauuauucuguac

SEQ ID NO: 1754072 - RNA, 19 nt, Artificial Sequence
  Description of Artificial Sequence: Synthetic oligonucleotide
agggccuacggcuaggcac

SEQ ID NO: 1754073 - RNA, 19 nt, Artificial Sequence
  Description of Artificial Sequence: Synthetic oligonucleotide
aguuucauagcaaugggca

SEQ ID NO: 1754074 - RNA, 19 nt, Artificial Sequence
  Description of Artificial Sequence: Synthetic oligonucleotide
cuagaccuugcaaagugcc

SEQ ID NO: 1754075 - RNA, 19 nt, Artificial Sequence
  Description of Artificial Sequence: Synthetic oligonucleotide
aagauaugcuggguagagc

SEQ ID NO: 1754076 - RNA, 19 nt, Artificial Sequence
  Description of Artificial Sequence: Synthetic oligonucleotide
uuguaggaaagguagucga

SEQ ID NO: 1754077 - RNA, 19 nt, Artificial Sequence
  Description of Artificial Sequence: Synthetic oligonucleotide
auagccaggcaagucaccc

SEQ ID NO: 1754078 - RNA, 19 nt, Artificial Sequence
  Description of Artificial Sequence: Synthetic oligonucleotide
ucgacguucuuuaccuugg

SEQ ID NO: 1754079 - RNA, 19 nt, Artificial Sequence
  Description of Artificial Sequence: Synthetic oligonucleotide
aguuguaggaaagguaguc

SEQ ID NO: 1754080 - RNA, 19 nt, Artificial Sequence
  Description of Artificial Sequence: Synthetic oligonucleotide
ugggguauuaucaguauua

SEQ ID NO: 1754081 - RNA, 19 nt, Artificial Sequence
  Description of Artificial Sequence: Synthetic oligonucleotide
uauaaugauugcuauuauu

SEQ ID NO: 1754082 - RNA, 19 nt, Artificial Sequence
  Description of Artificial Sequence: Synthetic oligonucleotide
auagcaaugggcagaacuc

SEQ ID NO: 1754083 - RNA, 19 nt, Artificial Sequence
  Description of Artificial Sequence: Synthetic oligonucleotide
uagucgaugagccguggag

SEQ ID NO: 1754084 - RNA, 19 nt, Artificial Sequence
  Description of Artificial Sequence: Synthetic oligonucleotide
uacaugugugaauacuuga

SEQ ID NO: 1754085 - RNA, 19 nt, Artificial Sequence
  Description of Artificial Sequence: Synthetic oligonucleotide
uuguaacuaagacuauaac

SEQ ID NO: 1754086 - RNA, 19 nt, Artificial Sequence
  Description of Artificial Sequence: Synthetic oligonucleotide
auagacacaagauucuguu

SEQ ID NO: 1754087 - RNA, 19 nt, Artificial Sequence
  Description of Artificial Sequence: Synthetic oligonucleotide
agacuuaauauuucaccca

SEQ ID NO: 1754088 - RNA, 19 nt, Artificial Sequence
  Description of Artificial Sequence: Synthetic oligonucleotide
aaguaacaggcccuuguga

SEQ ID NO: 1754089 - RNA, 19 nt, Artificial Sequence
  Description of Artificial Sequence: Synthetic oligonucleotide
guuguaggaaagguagucg

SEQ ID NO: 1754090 - RNA, 19 nt, Artificial Sequence
  Description of Artificial Sequence: Synthetic oligonucleotide
agcaucaaucuaucuacag

SEQ ID NO: 1754091 - RNA, 19 nt, Artificial Sequence
  Description of Artificial Sequence: Synthetic oligonucleotide
aacucagucugaaugcaag

SEQ ID NO: 1754092 - RNA, 19 nt, Artificial Sequence
  Description of Artificial Sequence: Synthetic oligonucleotide
ggagcaucaaucuaucuac

SEQ ID NO: 1754093 - RNA, 19 nt, Artificial Sequence
  Description of Artificial Sequence: Synthetic oligonucleotide
agaaccugaugcucugugg

SEQ ID NO: 1754094 - RNA, 19 nt, Artificial Sequence
  Description of Artificial Sequence: Synthetic oligonucleotide
uaguucucccugcuguacg

SEQ ID NO: 1754095 - RNA, 19 nt, Artificial Sequence
  Description of Artificial Sequence: Synthetic oligonucleotide
uacggcuaggcacaacaag

SEQ ID NO: 1754096 - RNA, 19 nt, Artificial Sequence
  Description of Artificial Sequence: Synthetic oligonucleotide
aggcacaacaaggugauag

SEQ ID NO: 1754097 - RNA, 19 nt, Artificial Sequence
  Description of Artificial Sequence: Synthetic oligonucleotide
agcuagaccuugcaaagug

SEQ ID NO: 1754098 - RNA, 19 nt, Artificial Sequence
  Description of Artificial Sequence: Synthetic oligonucleotide
aguccgagggcuucuuccc

SEQ ID NO: 1754099 - RNA, 19 nt, Artificial Sequence
  Description of Artificial Sequence: Synthetic oligonucleotide
acuuuuauugggcaauaau

SEQ ID NO: 1754100 - RNA, 19 nt, Artificial Sequence
  Description of Artificial Sequence: Synthetic oligonucleotide
uaacuuggcgacuuucucu

SEQ ID NO: 1754101 - RNA, 19 nt, Artificial Sequence
  Description of Artificial Sequence: Synthetic oligonucleotide
uugguauagaaugacuagu

SEQ ID NO: 1754102 - RNA, 19 nt, Artificial Sequence
  Description of Artificial Sequence: Synthetic oligonucleotide
accuggaugcagcuagacc

SEQ ID NO: 1754103 - RNA, 19 nt, Artificial Sequence
  Description of Artificial Sequence: Synthetic oligonucleotide
uuucacccacgaauguagg

SEQ ID NO: 1754104 - RNA, 19 nt, Artificial Sequence
  Description of Artificial Sequence: Synthetic oligonucleotide
cuauaacugaaagaaggug

SEQ ID NO: 1754105 - RNA, 19 nt, Artificial Sequence
  Description of Artificial Sequence: Synthetic oligonucleotide
cuugcagcucaguuguagg

SEQ ID NO: 1754106 - RNA, 19 nt, Artificial Sequence
  Description of Artificial Sequence: Synthetic oligonucleotide
uuauaaugauugcuauuau

SEQ ID NO: 1754107 - RNA, 19 nt, Artificial Sequence
  Description of Artificial Sequence: Synthetic oligonucleotide
uggagggauguuuaacuug

SEQ ID NO: 1754108 - RNA, 19 nt, Artificial Sequence
  Description of Artificial Sequence: Synthetic oligonucleotide
aacuuggcgacuuucucua

SEQ ID NO: 1754109 - RNA, 19 nt, Artificial Sequence
  Description of Artificial Sequence: Synthetic oligonucleotide
uagaaugacuaguggaaaa

SEQ ID NO: 1754110 - RNA, 19 nt, Artificial Sequence
  Description of Artificial Sequence: Synthetic oligonucleotide
auuucacccacgaauguag

SEQ ID NO: 1754111 - RNA, 19 nt, Artificial Sequence
  Description of Artificial Sequence: Synthetic oligonucleotide
cuaucuacagcacaaaagu

SEQ ID NO: 1754112 - RNA, 19 nt, Artificial Sequence
  Description of Artificial Sequence: Synthetic oligonucleotide
guggaaaauucuuuaguuc

SEQ ID NO: 1754113 - RNA, 19 nt, Artificial Sequence
  Description of Artificial Sequence: Synthetic oligonucleotide
uguguguguguguaugugu

SEQ ID NO: 1754114 - RNA, 19 nt, Artificial Sequence
  Description of Artificial Sequence: Synthetic oligonucleotide
ugauagccaggcaagucac

SEQ ID NO: 1754115 - RNA, 19 nt, Artificial Sequence
  Description of Artificial Sequence: Synthetic oligonucleotide
uuggcgacuuucucuagcc

SEQ ID NO: 1754116 - RNA, 19 nt, Artificial Sequence
  Description of Artificial Sequence: Synthetic oligonucleotide
augauugcuauuauuauua

SEQ ID NO: 1754117 - RNA, 19 nt, Artificial Sequence
  Description of Artificial Sequence: Synthetic oligonucleotide
acggcuaggcacaacaagg

SEQ ID NO: 1754118 - RNA, 19 nt, Artificial Sequence
  Description of Artificial Sequence: Synthetic oligonucleotide
uguaaagccccugagugau

SEQ ID NO: 1754119 - RNA, 19 nt, Artificial Sequence
  Description of Artificial Sequence: Synthetic oligonucleotide
aggucgacguucuuuaccu

SEQ ID NO: 1754120 - RNA, 19 nt, Artificial Sequence
  Description of Artificial Sequence: Synthetic oligonucleotide
aauaauggugaaggaacau

SEQ ID NO: 1754121 - RNA, 19 nt, Artificial Sequence
  Description of Artificial Sequence: Synthetic oligonucleotide
uggauuuauuuagaacuug

SEQ ID NO: 1754122 - RNA, 19 nt, Artificial Sequence
  Description of Artificial Sequence: Synthetic oligonucleotide
agucccaaguauuucuugu

SEQ ID NO: 1754123 - RNA, 19 nt, Artificial Sequence
  Description of Artificial Sequence: Synthetic oligonucleotide
ugaacuacucagaucugua

SEQ ID NO: 1754124 - RNA, 19 nt, Artificial Sequence
  Description of Artificial Sequence: Synthetic oligonucleotide
ugccccagaagacugucug

SEQ ID NO: 1754125 - RNA, 19 nt, Artificial Sequence
  Description of Artificial Sequence: Synthetic oligonucleotide
acuauaacugaaagaaggu

SEQ ID NO: 1754126 - RNA, 19 nt, Artificial Sequence
  Description of Artificial Sequence: Synthetic oligonucleotide
ugacuaguggaaaauucuu

SEQ ID NO: 1754127 - RNA, 19 nt, Artificial Sequence
  Description of Artificial Sequence: Synthetic oligonucleotide
cauggcacccagauauagg

SEQ ID NO: 1754128 - RNA, 19 nt, Artificial Sequence
  Description of Artificial Sequence: Synthetic oligonucleotide
caaagugccgacugcugcc

SEQ ID NO: 1754129 - RNA, 19 nt, Artificial Sequence
  Description of Artificial Sequence: Synthetic oligonucleotide
gcaauaauggugaaggaac

SEQ ID NO: 1754130 - RNA, 19 nt, Artificial Sequence
  Description of Artificial Sequence: Synthetic oligonucleotide
ugauugcuauuauuauuac

SEQ ID NO: 1754131 - RNA, 19 nt, Artificial Sequence
  Description of Artificial Sequence: Synthetic oligonucleotide
cuacucagaucuguaaagc

SEQ ID NO: 1754132 - RNA, 19 nt, Artificial Sequence
  Description of Artificial Sequence: Synthetic oligonucleotide
uagaauguuuaaucaggaa

SEQ ID NO: 1754133 - RNA, 19 nt, Artificial Sequence
  Description of Artificial Sequence: Synthetic oligonucleotide
augagcaucucgaugaggu

SEQ ID NO: 1754134 - RNA, 19 nt, Artificial Sequence
  Description of Artificial Sequence: Synthetic oligonucleotide
cucuuuauaaugauugcua

SEQ ID NO: 1754135 - RNA, 19 nt, Artificial Sequence
  Description of Artificial Sequence: Synthetic oligonucleotide
gaggucgacguucuuuacc

SEQ ID NO: 1754136 - RNA, 19 nt, Artificial Sequence
  Description of Artificial Sequence: Synthetic oligonucleotide
gauagugggugcugggaac

SEQ ID NO: 1754137 - RNA, 19 nt, Artificial Sequence
  Description of Artificial Sequence: Synthetic oligonucleotide
auagaauguuuaaucagga

SEQ ID NO: 1754138 - RNA, 19 nt, Artificial Sequence
  Description of Artificial Sequence: Synthetic oligonucleotide
ucugaaugcaagacuuaau

SEQ ID NO: 1754139 - RNA, 19 nt, Artificial Sequence
  Description of Artificial Sequence: Synthetic oligonucleotide
ucagaaaagggugucggau

SEQ ID NO: 1754140 - RNA, 19 nt, Artificial Sequence
  Description of Artificial Sequence: Synthetic oligonucleotide
ucaggugcuuagaaccuga

SEQ ID NO: 1754141 - RNA, 19 nt, Artificial Sequence
  Description of Artificial Sequence: Synthetic oligonucleotide
agucgaugagccguggagg

SEQ ID NO: 1754142 - RNA, 19 nt, Artificial Sequence
  Description of Artificial Sequence: Synthetic oligonucleotide
aacuaagacuauaacugaa

SEQ ID NO: 1754143 - RNA, 19 nt, Artificial Sequence
  Description of Artificial Sequence: Synthetic oligonucleotide
uguaggaaagguagucgau

SEQ ID NO: 1754144 - RNA, 19 nt, Artificial Sequence
  Description of Artificial Sequence: Synthetic oligonucleotide
ucucccugcuguacguggg

SEQ ID NO: 1754145 - RNA, 19 nt, Artificial Sequence
  Description of Artificial Sequence: Synthetic oligonucleotide
gcaucaaucuaucuacagc

SEQ ID NO: 1754146 - RNA, 19 nt, Artificial Sequence
  Description of Artificial Sequence: Synthetic oligonucleotide
aucaaucuaucuacagcac

SEQ ID NO: 1754147 - RNA, 19 nt, Artificial Sequence
  Description of Artificial Sequence: Synthetic oligonucleotide
auauuucacccacgaaugu

SEQ ID NO: 1754148 - RNA, 19 nt, Artificial Sequence
  Description of Artificial Sequence: Synthetic oligonucleotide
uucuuuaccuuggacugca

SEQ ID NO: 1754149 - RNA, 19 nt, Artificial Sequence
  Description of Artificial Sequence: Synthetic oligonucleotide
cuugcaaagugccgacugc

SEQ ID NO: 1754150 - RNA, 19 nt, Artificial Sequence
  Description of Artificial Sequence: Synthetic oligonucleotide
gaaggaacauuauucugua

SEQ ID NO: 1754151 - RNA, 19 nt, Artificial Sequence
  Description of Artificial Sequence: Synthetic oligonucleotide
guaggaaagguagucgaug

SEQ ID NO: 1754152 - RNA, 19 nt, Artificial Sequence
  Description of Artificial Sequence: Synthetic oligonucleotide
uuauuauuacaugcagaaa

SEQ ID NO: 1754153 - RNA, 19 nt, Artificial Sequence
  Description of Artificial Sequence: Synthetic oligonucleotide
gucgacguucuuuaccuug

SEQ ID NO: 1754154 - RNA, 19 nt, Artificial Sequence
  Description of Artificial Sequence: Synthetic oligonucleotide
cuauaggaagggcugugug

SEQ ID NO: 1754155 - RNA, 19 nt, Artificial Sequence
  Description of Artificial Sequence: Synthetic oligonucleotide
aaccuggaugcagcuagac

SEQ ID NO: 1754156 - RNA, 19 nt, Artificial Sequence
  Description of Artificial Sequence: Synthetic oligonucleotide
uugugugugugugugugug

SEQ ID NO: 1754157 - RNA, 19 nt, Artificial Sequence
  Description of Artificial Sequence: Synthetic oligonucleotide
gugauaaaccuggaugcag

SEQ ID NO: 1754158 - RNA, 19 nt, Artificial Sequence
  Description of Artificial Sequence: Synthetic oligonucleotide
uucaagucuugcacuugug

SEQ ID NO: 1754159 - RNA, 19 nt, Artificial Sequence
  Description of Artificial Sequence: Synthetic oligonucleotide
caauaauggugaaggaaca

SEQ ID NO: 1754160 - RNA, 19 nt, Artificial Sequence
  Description of Artificial Sequence: Synthetic oligonucleotide
guacgugggguauuaucag

SEQ ID NO: 1754161 - RNA, 19 nt, Artificial Sequence
  Description of Artificial Sequence: Synthetic oligonucleotide
acuuaauauuucacccacg

SEQ ID NO: 1754162 - RNA, 19 nt, Artificial Sequence
  Description of Artificial Sequence: Synthetic oligonucleotide
cccugagugauaaaccugg

SEQ ID NO: 1754163 - RNA, 19 nt, Artificial Sequence
  Description of Artificial Sequence: Synthetic oligonucleotide
ucaguauuauuaagauaua

SEQ ID NO: 1754164 - RNA, 19 nt, Artificial Sequence
  Description of Artificial Sequence: Synthetic oligonucleotide
uguguguguguguguaugu

SEQ ID NO: 1754165 - RNA, 19 nt, Artificial Sequence
  Description of Artificial Sequence: Synthetic oligonucleotide
acuugugugugugugugug

SEQ ID NO: 1754166 - RNA, 19 nt, Artificial Sequence
  Description of Artificial Sequence: Synthetic oligonucleotide
auccaauacucuuuauaau

SEQ ID NO: 1754167 - RNA, 19 nt, Artificial Sequence
  Description of Artificial Sequence: Synthetic oligonucleotide
uugcagcucaguuguagga

SEQ ID NO: 1754168 - RNA, 19 nt, Artificial Sequence
  Description of Artificial Sequence: Synthetic oligonucleotide
agugcccugagucccaagu

SEQ ID NO: 1754169 - RNA, 19 nt, Artificial Sequence
  Description of Artificial Sequence: Synthetic oligonucleotide
cuuuaccuuggacugcaug

SEQ ID NO: 1754170 - RNA, 19 nt, Artificial Sequence
  Description of Artificial Sequence: Synthetic oligonucleotide
uucacccacgaauguagga

SEQ ID NO: 1754171 - RNA, 19 nt, Artificial Sequence
  Description of Artificial Sequence: Synthetic oligonucleotide
agacuauaacugaaagaag

SEQ ID NO: 1754172 - RNA, 19 nt, Artificial Sequence
  Description of Artificial Sequence: Synthetic oligonucleotide
cuaggagcaucaaucuauc

SEQ ID NO: 1754173 - RNA, 19 nt, Artificial Sequence
  Description of Artificial Sequence: Synthetic oligonucleotide
uugggcaauaauggugaag

SEQ ID NO: 1754174 - RNA, 19 nt, Artificial Sequence
  Description of Artificial Sequence: Synthetic oligonucleotide
gcuauuauuauuacaugca

SEQ ID NO: 1754175 - RNA, 19 nt, Artificial Sequence
  Description of Artificial Sequence: Synthetic oligonucleotide
uauuucacccacgaaugua

SEQ ID NO: 1754176 - RNA, 19 nt, Artificial Sequence
  Description of Artificial Sequence: Synthetic oligonucleotide
cauagcaaugggcagaacu

SEQ ID NO: 1754177 - RNA, 19 nt, Artificial Sequence
  Description of Artificial Sequence: Synthetic oligonucleotide
gaugcagcuagaccuugca

SEQ ID NO: 1754178 - RNA, 19 nt, Artificial Sequence
  Description of Artificial Sequence: Synthetic oligonucleotide
uguguguguguaugugugu

SEQ ID NO: 1754179 - RNA, 19 nt, Artificial Sequence
  Description of Artificial Sequence: Synthetic oligonucleotide
agccccugagugauaaacc

SEQ ID NO: 1754180 - RNA, 19 nt, Artificial Sequence
  Description of Artificial Sequence: Synthetic oligonucleotide
acucagucugaaugcaaga

SEQ ID NO: 1754181 - RNA, 19 nt, Artificial Sequence
  Description of Artificial Sequence: Synthetic oligonucleotide
acuaagacuauaacugaaa

SEQ ID NO: 1754182 - RNA, 19 nt, Artificial Sequence
  Description of Artificial Sequence: Synthetic oligonucleotide
auaguacucaaagcacuug

SEQ ID NO: 1754183 - RNA, 19 nt, Artificial Sequence
  Description of Artificial Sequence: Synthetic oligonucleotide
agcucaguuguaggaaagg

SEQ ID NO: 1754184 - RNA, 19 nt, Artificial Sequence
  Description of Artificial Sequence: Synthetic oligonucleotide
auaauggugaaggaacauu

SEQ ID NO: 1754185 - RNA, 19 nt, Artificial Sequence
  Description of Artificial Sequence: Synthetic oligonucleotide
gcagcuagaccuugcaaag

SEQ ID NO: 1754186 - RNA, 19 nt, Artificial Sequence
  Description of Artificial Sequence: Synthetic oligonucleotide
uacgugggguauuaucagu

SEQ ID NO: 1754187 - RNA, 19 nt, Artificial Sequence
  Description of Artificial Sequence: Synthetic oligonucleotide
gaacucuuuagggccuacg

SEQ ID NO: 1754188 - RNA, 19 nt, Artificial Sequence
  Description of Artificial Sequence: Synthetic oligonucleotide
ggucagaaaagggugucgg

SEQ ID NO: 1754189 - RNA, 19 nt, Artificial Sequence
  Description of Artificial Sequence: Synthetic oligonucleotide
agaccuugcaaagugccga

SEQ ID NO: 1754190 - RNA, 19 nt, Artificial Sequence
  Description of Artificial Sequence: Synthetic oligonucleotide
acugucuaggagcaucaau

SEQ ID NO: 1754191 - RNA, 19 nt, Artificial Sequence
  Description of Artificial Sequence: Synthetic oligonucleotide
uuacuauaggaagggcugu

SEQ ID NO: 1754192 - RNA, 19 nt, Artificial Sequence
  Description of Artificial Sequence: Synthetic oligonucleotide
agggugucggauccccugg

SEQ ID NO: 1754193 - RNA, 19 nt, Artificial Sequence
  Description of Artificial Sequence: Synthetic oligonucleotide
ugcccugagucccaaguau

SEQ ID NO: 1754194 - RNA, 19 nt, Artificial Sequence
  Description of Artificial Sequence: Synthetic oligonucleotide
uugcacuugugugugugug

SEQ ID NO: 1754195 - RNA, 19 nt, Artificial Sequence
  Description of Artificial Sequence: Synthetic oligonucleotide
guuacaugaaccagacaga

SEQ ID NO: 1754196 - RNA, 19 nt, Artificial Sequence
  Description of Artificial Sequence: Synthetic oligonucleotide
uacaugaaccagacagaau

SEQ ID NO: 1754197 - RNA, 19 nt, Artificial Sequence
  Description of Artificial Sequence: Synthetic oligonucleotide
cuguacgugggguauuauc

SEQ ID NO: 1754198 - RNA, 19 nt, Artificial Sequence
  Description of Artificial Sequence: Synthetic oligonucleotide
augcaagacuuaauauuuc

SEQ ID NO: 1754199 - RNA, 19 nt, Artificial Sequence
  Description of Artificial Sequence: Synthetic oligonucleotide
guguguguguguaugugug

SEQ ID NO: 1754200 - RNA, 19 nt, Artificial Sequence
  Description of Artificial Sequence: Synthetic oligonucleotide
caucagugcccugaguccc

SEQ ID NO: 1754201 - RNA, 19 nt, Artificial Sequence
  Description of Artificial Sequence: Synthetic oligonucleotide
uuuagggccuacggcuagg

SEQ ID NO: 1754202 - RNA, 19 nt, Artificial Sequence
  Description of Artificial Sequence: Synthetic oligonucleotide
caacaaggugauagccagg

SEQ ID NO: 1754203 - RNA, 19 nt, Artificial Sequence
  Description of Artificial Sequence: Synthetic oligonucleotide
cucgaugaggucgacguuc

SEQ ID NO: 1754204 - RNA, 19 nt, Artificial Sequence
  Description of Artificial Sequence: Synthetic oligonucleotide
cuuuaguucucccugcugu

SEQ ID NO: 1754205 - RNA, 19 nt, Artificial Sequence
  Description of Artificial Sequence: Synthetic oligonucleotide
gguaagaggugucuuuuca

SEQ ID NO: 1754206 - RNA, 19 nt, Artificial Sequence
  Description of Artificial Sequence: Synthetic oligonucleotide
uguguguguauguguguau

SEQ ID NO: 1754207 - RNA, 19 nt, Artificial Sequence
  Description of Artificial Sequence: Synthetic oligonucleotide
aggugcuuagaaccugaug

SEQ ID NO: 1754208 - RNA, 19 nt, Artificial Sequence
  Description of Artificial Sequence: Synthetic oligonucleotide
cacagggucaggugcuuag

SEQ ID NO: 1754209 - RNA, 19 nt, Artificial Sequence
  Description of Artificial Sequence: Synthetic oligonucleotide
cucuuuagggccuacggcu

SEQ ID NO: 1754210 - RNA, 19 nt, Artificial Sequence
  Description of Artificial Sequence: Synthetic oligonucleotide
ugcacuugugugugugugu

SEQ ID NO: 1754211 - RNA, 19 nt, Artificial Sequence
  Description of Artificial Sequence: Synthetic oligonucleotide
aggugucuuuucauaguac

SEQ ID NO: 1754212 - RNA, 19 nt, Artificial Sequence
  Description of Artificial Sequence: Synthetic oligonucleotide
caagucacccagccuuucc

SEQ ID NO: 1754213 - RNA, 19 nt, Artificial Sequence
  Description of Artificial Sequence: Synthetic oligonucleotide
aguucucccugcuguacgu

SEQ ID NO: 1754214 - RNA, 19 nt, Artificial Sequence
  Description of Artificial Sequence: Synthetic oligonucleotide
ugagaggguaagagguguc

SEQ ID NO: 1754215 - RNA, 19 nt, Artificial Sequence
  Description of Artificial Sequence: Synthetic oligonucleotide
ugcuuagaaccugaugcuc

SEQ ID NO: 1754216 - RNA, 19 nt, Artificial Sequence
  Description of Artificial Sequence: Synthetic oligonucleotide
ugugugugugugugugugu

SEQ ID NO: 1754217 - RNA, 19 nt, Artificial Sequence
  Description of Artificial Sequence: Synthetic oligonucleotide
guuuaacuuggcgacuuuc

SEQ ID NO: 1754218 - RNA, 19 nt, Artificial Sequence
  Description of Artificial Sequence: Synthetic oligonucleotide
uggcgacuuucucuagccc

SEQ ID NO: 1754219 - RNA, 19 nt, Artificial Sequence
  Description of Artificial Sequence: Synthetic oligonucleotide
gugucggauccccuggagc

SEQ ID NO: 1754220 - RNA, 19 nt, Artificial Sequence
  Description of Artificial Sequence: Synthetic oligonucleotide
gauagacacaagauucugu

SEQ ID NO: 1754221 - RNA, 19 nt, Artificial Sequence
  Description of Artificial Sequence: Synthetic oligonucleotide
guguguguguguguguaug

SEQ ID NO: 1754222 - RNA, 19 nt, Artificial Sequence
  Description of Artificial Sequence: Synthetic oligonucleotide
gugugugugugugugugug

SEQ ID NO: 1754223 - RNA, 19 nt, Artificial Sequence
  Description of Artificial Sequence: Synthetic oligonucleotide
aaacucagucugaaugcaa

SEQ ID NO: 1754224 - RNA, 19 nt, Artificial Sequence
  Description of Artificial Sequence: Synthetic oligonucleotide
caugaugaagggcggucuc

SEQ ID NO: 1754225 - RNA, 19 nt, Artificial Sequence
  Description of Artificial Sequence: Synthetic oligonucleotide
cagcacaaaaguaguuuca

SEQ ID NO: 1754226 - RNA, 19 nt, Artificial Sequence
  Description of Artificial Sequence: Synthetic oligonucleotide
acacaagauucuguuacau

SEQ ID NO: 1754227 - RNA, 19 nt, Artificial Sequence
  Description of Artificial Sequence: Synthetic oligonucleotide
agaauccaauacucuuuau

SEQ ID NO: 1754228 - RNA, 19 nt, Artificial Sequence
  Description of Artificial Sequence: Synthetic oligonucleotide
gaacauuauucuguaccaa

SEQ ID NO: 1754229 - RNA, 19 nt, Artificial Sequence
  Description of Artificial Sequence: Synthetic oligonucleotide
gaaaagggugucggauccc

SEQ ID NO: 1754230 - RNA, 19 nt, Artificial Sequence
  Description of Artificial Sequence: Synthetic oligonucleotide
acccacgaauguaggauuc

SEQ ID NO: 1754231 - RNA, 19 nt, Artificial Sequence
  Description of Artificial Sequence: Synthetic oligonucleotide
cuguaaagccccugaguga

SEQ ID NO: 1754232 - RNA, 19 nt, Artificial Sequence
  Description of Artificial Sequence: Synthetic oligonucleotide
caacugucuaggagcauca

SEQ ID NO: 1754233 - RNA, 19 nt, Artificial Sequence
  Description of Artificial Sequence: Synthetic oligonucleotide
gauagccaggcaagucacc

SEQ ID NO: 1754234 - RNA, 19 nt, Artificial Sequence
  Description of Artificial Sequence: Synthetic oligonucleotide
ugcuccacguguaguccga

SEQ ID NO: 1754235 - RNA, 19 nt, Artificial Sequence
  Description of Artificial Sequence: Synthetic oligonucleotide
uuagggccuacggcuaggc

SEQ ID NO: 1754236 - RNA, 19 nt, Artificial Sequence
  Description of Artificial Sequence: Synthetic oligonucleotide
uguguguguguguguguau

SEQ ID NO: 1754237 - RNA, 19 nt, Artificial Sequence
  Description of Artificial Sequence: Synthetic oligonucleotide
gcuaggcacaacaagguga

SEQ ID NO: 1754238 - RNA, 19 nt, Artificial Sequence
  Description of Artificial Sequence: Synthetic oligonucleotide
cucaaagcacuuggccggg

SEQ ID NO: 1754239 - RNA, 19 nt, Artificial Sequence
  Description of Artificial Sequence: Synthetic oligonucleotide
ugaggucgacguucuuuac

SEQ ID NO: 1754240 - RNA, 19 nt, Artificial Sequence
  Description of Artificial Sequence: Synthetic oligonucleotide
cuccaacugucuaggagca

SEQ ID NO: 1754241 - RNA, 19 nt, Artificial Sequence
  Description of Artificial Sequence: Synthetic oligonucleotide
ggcaauaauggugaaggaa

SEQ ID NO: 1754242 - RNA, 19 nt, Artificial Sequence
  Description of Artificial Sequence: Synthetic oligonucleotide
cagaauccaauacucuuua

SEQ ID NO: 1754243 - RNA, 19 nt, Artificial Sequence
  Description of Artificial Sequence: Synthetic oligonucleotide
gcaagacuuaauauuucac

SEQ ID NO: 1754244 - RNA, 19 nt, Artificial Sequence
  Description of Artificial Sequence: Synthetic oligonucleotide
guguguguguguguaugug

SEQ ID NO: 1754245 - RNA, 19 nt, Artificial Sequence
  Description of Artificial Sequence: Synthetic oligonucleotide
aacuuguaacuaagacuau

SEQ ID NO: 1754246 - RNA, 19 nt, Artificial Sequence
  Description of Artificial Sequence: Synthetic oligonucleotide
cucccugcuguacgugggg

SEQ ID NO: 1754247 - RNA, 19 nt, Artificial Sequence
  Description of Artificial Sequence: Synthetic oligonucleotide
uggaugcagcuagaccuug

SEQ ID NO: 1754248 - RNA, 19 nt, Artificial Sequence
  Description of Artificial Sequence: Synthetic oligonucleotide
ggcuaggcacaacaaggug

SEQ ID NO: 1754249 - RNA, 19 nt, Artificial Sequence
  Description of Artificial Sequence: Synthetic oligonucleotide
auugggcaauaauggugaa

SEQ ID NO: 1754250 - RNA, 19 nt, Artificial Sequence
  Description of Artificial Sequence: Synthetic oligonucleotide
cauggucaucccaggccac

SEQ ID NO: 1754251 - RNA, 19 nt, Artificial Sequence
  Description of Artificial Sequence: Synthetic oligonucleotide
aaagccccugagugauaaa

SEQ ID NO: 1754252 - RNA, 19 nt, Artificial Sequence
  Description of Artificial Sequence: Synthetic oligonucleotide
agcaucucgaugaggucga

SEQ ID NO: 1754253 - RNA, 19 nt, Artificial Sequence
  Description of Artificial Sequence: Synthetic oligonucleotide
aaaccuggaugcagcuaga

SEQ ID NO: 1754254 - RNA, 19 nt, Artificial Sequence
  Description of Artificial Sequence: Synthetic oligonucleotide
gucaggugcuuagaaccug

SEQ ID NO: 1754255 - RNA, 19 nt, Artificial Sequence
  Description of Artificial Sequence: Synthetic oligonucleotide
uagggccuacggcuaggca

SEQ ID NO: 1754256 - RNA, 19 nt, Artificial Sequence
  Description of Artificial Sequence: Synthetic oligonucleotide
ccugauagugggugcuggg

SEQ ID NO: 1754257 - RNA, 19 nt, Artificial Sequence
  Description of Artificial Sequence: Synthetic oligonucleotide
aaagggugucggauccccu

SEQ ID NO: 1754258 - RNA, 19 nt, Artificial Sequence
  Description of Artificial Sequence: Synthetic oligonucleotide
aagaucccagcagcauggu

SEQ ID NO: 1754259 - RNA, 19 nt, Artificial Sequence
  Description of Artificial Sequence: Synthetic oligonucleotide
ucgaacgccaguggccuuc

SEQ ID NO: 1754260 - RNA, 19 nt, Artificial Sequence
  Description of Artificial Sequence: Synthetic oligonucleotide
guagucgaugagccgugga

SEQ ID NO: 1754261 - RNA, 19 nt, Artificial Sequence
  Description of Artificial Sequence: Synthetic oligonucleotide
gcaccuccaacugucuagg

SEQ ID NO: 1754262 - RNA, 19 nt, Artificial Sequence
  Description of Artificial Sequence: Synthetic oligonucleotide
cauaguacucaaagcacuu

SEQ ID NO: 1754263 - RNA, 19 nt, Artificial Sequence
  Description of Artificial Sequence: Synthetic oligonucleotide
auaaaccuggaugcagcua

SEQ ID NO: 1754264 - RNA, 19 nt, Artificial Sequence
  Description of Artificial Sequence: Synthetic oligonucleotide
gaaugacuaguggaaaauu

SEQ ID NO: 1754265 - RNA, 19 nt, Artificial Sequence
  Description of Artificial Sequence: Synthetic oligonucleotide
gcuagaccuugcaaagugc

SEQ ID NO: 1754266 - RNA, 19 nt, Artificial Sequence
  Description of Artificial Sequence: Synthetic oligonucleotide
gcacuugugugugugugug

SEQ ID NO: 1754267 - RNA, 19 nt, Artificial Sequence
  Description of Artificial Sequence: Synthetic oligonucleotide
ucuuuaccuuggacugcau

SEQ ID NO: 1754268 - RNA, 19 nt, Artificial Sequence
  Description of Artificial Sequence: Synthetic oligonucleotide
cugauagugggugcuggga

SEQ ID NO: 1754269 - RNA, 19 nt, Artificial Sequence
  Description of Artificial Sequence: Synthetic oligonucleotide
ugcuguacgugggguauua

SEQ ID NO: 1754270 - RNA, 19 nt, Artificial Sequence
  Description of Artificial Sequence: Synthetic oligonucleotide
ccaaaagauaugcugggua

SEQ ID NO: 1754271 - RNA, 19 nt, Artificial Sequence
  Description of Artificial Sequence: Synthetic oligonucleotide
ccaacugucuaggagcauc

SEQ ID NO: 1754272 - RNA, 19 nt, Artificial Sequence
  Description of Artificial Sequence: Synthetic oligonucleotide
aggugauagccaggcaagu

SEQ ID NO: 1754273 - RNA, 19 nt, Artificial Sequence
  Description of Artificial Sequence: Synthetic oligonucleotide
gcugccugauagugggugc

SEQ ID NO: 1754274 - RNA, 19 nt, Artificial Sequence
  Description of Artificial Sequence: Synthetic oligonucleotide
guguguguguaugugugua

SEQ ID NO: 1754275 - RNA, 19 nt, Artificial Sequence
  Description of Artificial Sequence: Synthetic oligonucleotide
ggugauagccaggcaaguc

SEQ ID NO: 1754276 - RNA, 19 nt, Artificial Sequence
  Description of Artificial Sequence: Synthetic oligonucleotide
cccucgaacgccaguggcc

SEQ ID NO: 1754277 - RNA, 19 nt, Artificial Sequence
  Description of Artificial Sequence: Synthetic oligonucleotide
agguagucgaugagccgug

SEQ ID NO: 1754278 - RNA, 19 nt, Artificial Sequence
  Description of Artificial Sequence: Synthetic oligonucleotide
ggcgacuuucucuagcccu

SEQ ID NO: 1754279 - RNA, 19 nt, Artificial Sequence
  Description of Artificial Sequence: Synthetic oligonucleotide
ucccugcuguacguggggu

SEQ ID NO: 1754280 - RNA, 19 nt, Artificial Sequence
  Description of Artificial Sequence: Synthetic oligonucleotide
gguagucgaugagccgugg

SEQ ID NO: 1754281 - RNA, 19 nt, Artificial Sequence
  Description of Artificial Sequence: Synthetic oligonucleotide
cuguaccaaaagauaugcu

SEQ ID NO: 1754282 - RNA, 19 nt, Artificial Sequence
  Description of Artificial Sequence: Synthetic oligonucleotide
gugugugugugugugugua

SEQ ID NO: 1754283 - RNA, 19 nt, Artificial Sequence
  Description of Artificial Sequence: Synthetic oligonucleotide
ccccugagugauaaaccug

SEQ ID NO: 1754284 - RNA, 19 nt, Artificial Sequence
  Description of Artificial Sequence: Synthetic oligonucleotide
guggagggauguuuaacuu

SEQ ID NO: 1754285 - RNA, 19 nt, Artificial Sequence
  Description of Artificial Sequence: Synthetic oligonucleotide
gcugcuccacguguagucc

SEQ ID NO: 1754286 - RNA, 19 nt, Artificial Sequence
  Description of Artificial Sequence: Synthetic oligonucleotide
gggcaauaauggugaagga

SEQ ID NO: 1754287 - RNA, 19 nt, Artificial Sequence
  Description of Artificial Sequence: Synthetic oligonucleotide
ucauagcaaugggcagaac

SEQ ID NO: 1754288 - RNA, 19 nt, Artificial Sequence
  Description of Artificial Sequence: Synthetic oligonucleotide
caguuguaggaaagguagu

SEQ ID NO: 1754289 - RNA, 19 nt, Artificial Sequence
  Description of Artificial Sequence: Synthetic oligonucleotide
cacccagccuuuccagcuc

SEQ ID NO: 1754290 - RNA, 19 nt, Artificial Sequence
  Description of Artificial Sequence: Synthetic oligonucleotide
gcuuagaaccugaugcucu

SEQ ID NO: 1754291 - RNA, 19 nt, Artificial Sequence
  Description of Artificial Sequence: Synthetic oligonucleotide
cacuuggccggggcgcugc

SEQ ID NO: 1754292 - RNA, 19 nt, Artificial Sequence
  Description of Artificial Sequence: Synthetic oligonucleotide
cuugugugugugugugugu

SEQ ID NO: 1754293 - RNA, 19 nt, Artificial Sequence
  Description of Artificial Sequence: Synthetic oligonucleotide
gugggguauuaucaguauu

SEQ ID NO: 1754294 - RNA, 19 nt, Artificial Sequence
  Description of Artificial Sequence: Synthetic oligonucleotide
cuacagcacaaaaguaguu

SEQ ID NO: 1754295 - RNA, 19 nt, Artificial Sequence
  Description of Artificial Sequence: Synthetic oligonucleotide
gccccugagugauaaaccu

SEQ ID NO: 1754296 - RNA, 19 nt, Artificial Sequence
  Description of Artificial Sequence: Synthetic oligonucleotide
uccaacugucuaggagcau

SEQ ID NO: 1754297 - RNA, 19 nt, Artificial Sequence
  Description of Artificial Sequence: Synthetic oligonucleotide
ugucccgggcguagauguu

SEQ ID NO: 1754298 - RNA, 19 nt, Artificial Sequence
  Description of Artificial Sequence: Synthetic oligonucleotide
cacgaauguaggauucauu

SEQ ID NO: 1754299 - RNA, 19 nt, Artificial Sequence
  Description of Artificial Sequence: Synthetic oligonucleotide
gcgacuuucucuagcccuc

SEQ ID NO: 1754300 - RNA, 19 nt, Artificial Sequence
  Description of Artificial Sequence: Synthetic oligonucleotide
gggccuacggcuaggcaca

SEQ ID NO: 1754301 - RNA, 19 nt, Artificial Sequence
  Description of Artificial Sequence: Synthetic oligonucleotide
ugccgacugcugccccaga

SEQ ID NO: 1754302 - RNA, 19 nt, Artificial Sequence
  Description of Artificial Sequence: Synthetic oligonucleotide
guggcauggcacccagaua

SEQ ID NO: 1754303 - RNA, 19 nt, Artificial Sequence
  Description of Artificial Sequence: Synthetic oligonucleotide
cguggagggauguuuaacu

SEQ ID NO: 1754304 - RNA, 19 nt, Artificial Sequence
  Description of Artificial Sequence: Synthetic oligonucleotide
ggguauuaucaguauuauu

SEQ ID NO: 1754305 - RNA, 19 nt, Artificial Sequence
  Description of Artificial Sequence: Synthetic oligonucleotide
acuuggccggggcgcugcu

SEQ ID NO: 1754306 - RNA, 19 nt, Artificial Sequence
  Description of Artificial Sequence: Synthetic oligonucleotide
cacccacgaauguaggauu

SEQ ID NO: 1754307 - RNA, 19 nt, Artificial Sequence
  Description of Artificial Sequence: Synthetic oligonucleotide
ccguggagggauguuuaac

SEQ ID NO: 1754308 - RNA, 19 nt, Artificial Sequence
  Description of Artificial Sequence: Synthetic oligonucleotide
ggucaggugcuuagaaccu

SEQ ID NO: 1754309 - RNA, 19 nt, Artificial Sequence
  Description of Artificial Sequence: Synthetic oligonucleotide
cacuugugugugugugugu

SEQ ID NO: 1754310 - RNA, 19 nt, Artificial Sequence
  Description of Artificial Sequence: Synthetic oligonucleotide
gcaugaugaagggcggucu

SEQ ID NO: 1754311 - RNA, 19 nt, Artificial Sequence
  Description of Artificial Sequence: Synthetic oligonucleotide
ggcguagauguugccucca

SEQ ID NO: 1754312 - RNA, 19 nt, Artificial Sequence
  Description of Artificial Sequence: Synthetic oligonucleotide
gcuccacguguaguccgag

SEQ ID NO: 1754313 - RNA, 19 nt, Artificial Sequence
  Description of Artificial Sequence: Synthetic oligonucleotide
cugccugauagugggugcu

SEQ ID NO: 1754314 - RNA, 19 nt, Artificial Sequence
  Description of Artificial Sequence: Synthetic oligonucleotide
guaaagccccugagugaua

SEQ ID NO: 1754315 - RNA, 19 nt, Artificial Sequence
  Description of Artificial Sequence: Synthetic oligonucleotide
cagcuagaccuugcaaagu

SEQ ID NO: 1754316 - RNA, 19 nt, Artificial Sequence
  Description of Artificial Sequence: Synthetic oligonucleotide
augcuggguagagcugcuu

SEQ ID NO: 1754317 - RNA, 19 nt, Artificial Sequence
  Description of Artificial Sequence: Synthetic oligonucleotide
gcaagucacccagccuuuc

SEQ ID NO: 1754318 - RNA, 19 nt, Artificial Sequence
  Description of Artificial Sequence: Synthetic oligonucleotide
caggugcuuagaaccugau

SEQ ID NO: 1754319 - RNA, 19 nt, Artificial Sequence
  Description of Artificial Sequence: Synthetic oligonucleotide
gcugaaguaacaggcccuu

SEQ ID NO: 1754320 - RNA, 19 nt, Artificial Sequence
  Description of Artificial Sequence: Synthetic oligonucleotide
ccgguugucccgggcguag

SEQ ID NO: 1754321 - RNA, 19 nt, Artificial Sequence
  Description of Artificial Sequence: Synthetic oligonucleotide
gcaaugggcagaacucuuu

SEQ ID NO: 1754322 - RNA, 19 nt, Artificial Sequence
  Description of Artificial Sequence: Synthetic oligonucleotide
gaacgccaguggccuuccu

SEQ ID NO: 1754323 - RNA, 19 nt, Artificial Sequence
  Description of Artificial Sequence: Synthetic oligonucleotide
ccucgaacgccaguggccu

SEQ ID NO: 1754324 - RNA, 19 nt, Artificial Sequence
  Description of Artificial Sequence: Synthetic oligonucleotide
cccugagucccaaguauuu

SEQ ID NO: 1754325 - RNA, 19 nt, Artificial Sequence
  Description of Artificial Sequence: Synthetic oligonucleotide
cggcuaggcacaacaaggu

SEQ ID NO: 1754326 - RNA, 19 nt, Artificial Sequence
  Description of Artificial Sequence: Synthetic oligonucleotide
cgaacgccaguggccuucc

SEQ ID NO: 1754327 - RNA, 19 nt, Artificial Sequence
  Description of Artificial Sequence: Synthetic oligonucleotide
ggucgacguucuuuaccuu

SEQ ID NO: 1754328 - RNA, 19 nt, Artificial Sequence
  Description of Artificial Sequence: Synthetic oligonucleotide
cgacguucuuuaccuugga

SEQ ID NO: 1754329 - RNA, 19 nt, Artificial Sequence
  Description of Artificial Sequence: Synthetic oligonucleotide
ccugcuguacgugggguau

SEQ ID NO: 1754330 - RNA, 19 nt, Artificial Sequence
  Description of Artificial Sequence: Synthetic oligonucleotide
cgugggguauuaucaguau

SEQ ID NO: 1754331 - RNA, 19 nt, Artificial Sequence
  Description of Artificial Sequence: Synthetic oligonucleotide
ccacgaauguaggauucau

SEQ ID NO: 1754332 - RNA, 19 nt, Artificial Sequence
  Description of Artificial Sequence: Synthetic oligonucleotide
gccuacggcuaggcacaac

SEQ ID NO: 1754333 - RNA, 19 nt, Artificial Sequence
  Description of Artificial Sequence: Synthetic oligonucleotide
cucgaacgccaguggccuu

SEQ ID NO: 1754334 - RNA, 19 nt, Artificial Sequence
  Description of Artificial Sequence: Synthetic oligonucleotide
ccgggcguagauguugccu

SEQ ID NO: 1754335 - RNA, 19 nt, Artificial Sequence
  Description of Artificial Sequence: Synthetic oligonucleotide
gcuguacgugggguauuau

SEQ ID NO: 1754336 - RNA, 19 nt, Artificial Sequence
  Description of Artificial Sequence: Synthetic oligonucleotide
ccccgguugucccgggcgu

SEQ ID NO: 1754337 - RNA, 19 nt, Artificial Sequence
  Description of Artificial Sequence: Synthetic oligonucleotide
cccuugugagcugccugau

SEQ ID NO: 1754338 - RNA, 19 nt, Artificial Sequence
  Description of Artificial Sequence: Synthetic oligonucleotide
ccggggcgcugcugcucca

SEQ ID NO: 1754339 - RNA, 19 nt, Artificial Sequence
  Description of Artificial Sequence: Synthetic oligonucleotide
gauaaugugacacuggugc

SEQ ID NO: 1754340 - RNA, 19 nt, Artificial Sequence
  Description of Artificial Sequence: Synthetic oligonucleotide
aaaauguucaaaauaugcc

SEQ ID NO: 1754341 - RNA, 19 nt, Artificial Sequence
  Description of Artificial Sequence: Synthetic oligonucleotide
auaauuguaggucucagac

SEQ ID NO: 1754342 - RNA, 19 nt, Artificial Sequence
  Description of Artificial Sequence: Synthetic oligonucleotide
aauuguaggucucagacug

SEQ ID NO: 1754343 - RNA, 19 nt, Artificial Sequence
  Description of Artificial Sequence: Synthetic oligonucleotide
aaauguucaaaauaugccu

SEQ ID NO: 1754344 - RNA, 19 nt, Artificial Sequence
  Description of Artificial Sequence: Synthetic oligonucleotide
uuugagaugaccuugccca

SEQ ID NO: 1754345 - RNA, 19 nt, Artificial Sequence
  Description of Artificial Sequence: Synthetic oligonucleotide
uuuaucaccaugcauauau

SEQ ID NO: 1754346 - RNA, 19 nt, Artificial Sequence
  Description of Artificial Sequence: Synthetic oligonucleotide
cuaaaagauguccaaaucc

SEQ ID NO: 1754347 - RNA, 19 nt, Artificial Sequence
  Description of Artificial Sequence: Synthetic oligonucleotide
aaggguaccuuccauuccc

SEQ ID NO: 1754348 - RNA, 19 nt, Artificial Sequence
  Description of Artificial Sequence: Synthetic oligonucleotide
cauauauucaucuagaucu

SEQ ID NO: 1754349 - RNA, 19 nt, Artificial Sequence
  Description of Artificial Sequence: Synthetic oligonucleotide
aagaccaccauucugcuca

SEQ ID NO: 1754350 - RNA, 19 nt, Artificial Sequence
  Description of Artificial Sequence: Synthetic oligonucleotide
uuucuuagcaagcaaauaa

SEQ ID NO: 1754351 - RNA, 19 nt, Artificial Sequence
  Description of Artificial Sequence: Synthetic oligonucleotide
aaauaugccuaaaagaugu

SEQ ID NO: 1754352 - RNA, 19 nt, Artificial Sequence
  Description of Artificial Sequence: Synthetic oligonucleotide
uuagcaagcaaauaauugu

SEQ ID NO: 1754353 - RNA, 19 nt, Artificial Sequence
  Description of Artificial Sequence: Synthetic oligonucleotide
aagcaaauaauuguagguc

SEQ ID NO: 1754354 - RNA, 19 nt, Artificial Sequence
  Description of Artificial Sequence: Synthetic oligonucleotide
auucagugcauacagcaac

SEQ ID NO: 1754355 - RNA, 19 nt, Artificial Sequence
  Description of Artificial Sequence: Synthetic oligonucleotide
aauuauccucacuacucgg

SEQ ID NO: 1754356 - RNA, 19 nt, Artificial Sequence
  Description of Artificial Sequence: Synthetic oligonucleotide
auuugcaccggccugucgc

SEQ ID NO: 1754357 - RNA, 19 nt, Artificial Sequence
  Description of Artificial Sequence: Synthetic oligonucleotide
uuuugauuuucaauguaga

SEQ ID NO: 1754358 - RNA, 19 nt, Artificial Sequence
  Description of Artificial Sequence: Synthetic oligonucleotide
uuuaacaguccgauaaugu

SEQ ID NO: 1754359 - RNA, 19 nt, Artificial Sequence
  Description of Artificial Sequence: Synthetic oligonucleotide
auuagugucacuugcaaaa

SEQ ID NO: 1754360 - RNA, 19 nt, Artificial Sequence
  Description of Artificial Sequence: Synthetic oligonucleotide
uuaacaguccgauaaugug

SEQ ID NO: 1754361 - RNA, 19 nt, Artificial Sequence
  Description of Artificial Sequence: Synthetic oligonucleotide
caugcauauauucaucuag

SEQ ID NO: 1754362 - RNA, 19 nt, Artificial Sequence
  Description of Artificial Sequence: Synthetic oligonucleotide
uuuacaaaggucuauucuu

SEQ ID NO: 1754363 - RNA, 19 nt, Artificial Sequence
  Description of Artificial Sequence: Synthetic oligonucleotide
uuuuguggacucuugagac

SEQ ID NO: 1754364 - RNA, 19 nt, Artificial Sequence
  Description of Artificial Sequence: Synthetic oligonucleotide
uccguuuccaaagagagca

SEQ ID NO: 1754365 - RNA, 19 nt, Artificial Sequence
  Description of Artificial Sequence: Synthetic oligonucleotide
aauaauuguaggucucaga

SEQ ID NO: 1754366 - RNA, 19 nt, Artificial Sequence
  Description of Artificial Sequence: Synthetic oligonucleotide
ugcacaagcaacacugucc

SEQ ID NO: 1754367 - RNA, 19 nt, Artificial Sequence
  Description of Artificial Sequence: Synthetic oligonucleotide
guuaagacauuucugucgc

SEQ ID NO: 1754368 - RNA, 19 nt, Artificial Sequence
  Description of Artificial Sequence: Synthetic oligonucleotide
acuuucgccauuugcaccg

SEQ ID NO: 1754369 - RNA, 19 nt, Artificial Sequence
  Description of Artificial Sequence: Synthetic oligonucleotide
uaacaguccgauaauguga

SEQ ID NO: 1754370 - RNA, 19 nt, Artificial Sequence
  Description of Artificial Sequence: Synthetic oligonucleotide
auaugccuaaaagaugucc

SEQ ID NO: 1754371 - RNA, 19 nt, Artificial Sequence
  Description of Artificial Sequence: Synthetic oligonucleotide
uuugguuccuguaaccuga

SEQ ID NO: 1754372 - RNA, 19 nt, Artificial Sequence
  Description of Artificial Sequence: Synthetic oligonucleotide
cuuccguuuccaaagagag

SEQ ID NO: 1754373 - RNA, 19 nt, Artificial Sequence
  Description of Artificial Sequence: Synthetic oligonucleotide
ucgacuaccauucauuaua

SEQ ID NO: 1754374 - RNA, 19 nt, Artificial Sequence
  Description of Artificial Sequence: Synthetic oligonucleotide
uucgcuagguccuuccugg

SEQ ID NO: 1754375 - RNA, 19 nt, Artificial Sequence
  Description of Artificial Sequence: Synthetic oligonucleotide
gguuaagacauuucugucg

SEQ ID NO: 1754376 - RNA, 19 nt, Artificial Sequence
  Description of Artificial Sequence: Synthetic oligonucleotide
uuuccguuugagaugaccu

SEQ ID NO: 1754377 - RNA, 19 nt, Artificial Sequence
  Description of Artificial Sequence: Synthetic oligonucleotide
aggguuaagacauuucugu

SEQ ID NO: 1754378 - RNA, 19 nt, Artificial Sequence
  Description of Artificial Sequence: Synthetic oligonucleotide
caaauccugaggauggucc

SEQ ID NO: 1754379 - RNA, 19 nt, Artificial Sequence
  Description of Artificial Sequence: Synthetic oligonucleotide
caaauauuguucaccuucc

SEQ ID NO: 1754380 - RNA, 19 nt, Artificial Sequence
  Description of Artificial Sequence: Synthetic oligonucleotide
uuugucuaauucuuuugug

SEQ ID NO: 1754381 - RNA, 19 nt, Artificial Sequence
  Description of Artificial Sequence: Synthetic oligonucleotide
ucggugaucucauagcggc

SEQ ID NO: 1754382 - RNA, 19 nt, Artificial Sequence
  Description of Artificial Sequence: Synthetic oligonucleotide
uuaauagcuuguuucauuu

SEQ ID NO: 1754383 - RNA, 19 nt, Artificial Sequence
  Description of Artificial Sequence: Synthetic oligonucleotide
uccgagucggaaaagcugc

SEQ ID NO: 1754384 - RNA, 19 nt, Artificial Sequence
  Description of Artificial Sequence: Synthetic oligonucleotide
ucuauucuucaaaauguuc

SEQ ID NO: 1754385 - RNA, 19 nt, Artificial Sequence
  Description of Artificial Sequence: Synthetic oligonucleotide
ucuucuuccuuugaccccg

SEQ ID NO: 1754386 - RNA, 19 nt, Artificial Sequence
  Description of Artificial Sequence: Synthetic oligonucleotide
gaugccaaguucaauggcc

SEQ ID NO: 1754387 - RNA, 19 nt, Artificial Sequence
  Description of Artificial Sequence: Synthetic oligonucleotide
ucugucaaggguaccuucc

SEQ ID NO: 1754388 - RNA, 19 nt, Artificial Sequence
  Description of Artificial Sequence: Synthetic oligonucleotide
cucuugagagucaucuucg

SEQ ID NO: 1754389 - RNA, 19 nt, Artificial Sequence
  Description of Artificial Sequence: Synthetic oligonucleotide
aacagcuuuccuuucucca

SEQ ID NO: 1754390 - RNA, 19 nt, Artificial Sequence
  Description of Artificial Sequence: Synthetic oligonucleotide
uugcaaaaguuucucguga

SEQ ID NO: 1754391 - RNA, 19 nt, Artificial Sequence
  Description of Artificial Sequence: Synthetic oligonucleotide
uucucgugauguaucauca

SEQ ID NO: 1754392 - RNA, 19 nt, Artificial Sequence
  Description of Artificial Sequence: Synthetic oligonucleotide
uuuuaacaguccgauaaug

SEQ ID NO: 1754393 - RNA, 19 nt, Artificial Sequence
  Description of Artificial Sequence: Synthetic oligonucleotide
uccgauaaugugacacugg

SEQ ID NO: 1754394 - RNA, 19 nt, Artificial Sequence
  Description of Artificial Sequence: Synthetic oligonucleotide
uuccaucaaaaguucaaug

SEQ ID NO: 1754395 - RNA, 19 nt, Artificial Sequence
  Description of Artificial Sequence: Synthetic oligonucleotide
aggaugccaaguucaaugg

SEQ ID NO: 1754396 - RNA, 19 nt, Artificial Sequence
  Description of Artificial Sequence: Synthetic oligonucleotide
aaagauguccaaauccuga

SEQ ID NO: 1754397 - RNA, 19 nt, Artificial Sequence
  Description of Artificial Sequence: Synthetic oligonucleotide
cuucggugaucucauagcg

SEQ ID NO: 1754398 - RNA, 19 nt, Artificial Sequence
  Description of Artificial Sequence: Synthetic oligonucleotide
agccacuuucucuugagag

SEQ ID NO: 1754399 - RNA, 19 nt, Artificial Sequence
  Description of Artificial Sequence: Synthetic oligonucleotide
guagaaacggaaacuauug

SEQ ID NO: 1754400 - RNA, 19 nt, Artificial Sequence
  Description of Artificial Sequence: Synthetic oligonucleotide
uucagugcauacagcaacc

SEQ ID NO: 1754401 - RNA, 19 nt, Artificial Sequence
  Description of Artificial Sequence: Synthetic oligonucleotide
uuauccucacuacucgggc

SEQ ID NO: 1754402 - RNA, 19 nt, Artificial Sequence
  Description of Artificial Sequence: Synthetic oligonucleotide
ucccgcuuaaguuucuuag

SEQ ID NO: 1754403 - RNA, 19 nt, Artificial Sequence
  Description of Artificial Sequence: Synthetic oligonucleotide
cugaaagcaauuucaucag

SEQ ID NO: 1754404 - RNA, 19 nt, Artificial Sequence
  Description of Artificial Sequence: Synthetic oligonucleotide
aaacggaaaaggcucuggu

SEQ ID NO: 1754405 - RNA, 19 nt, Artificial Sequence
  Description of Artificial Sequence: Synthetic oligonucleotide
uucggugaucucauagcgg

SEQ ID NO: 1754406 - RNA, 19 nt, Artificial Sequence
  Description of Artificial Sequence: Synthetic oligonucleotide
gagucggaaaagcugcccg

SEQ ID NO: 1754407 - RNA, 19 nt, Artificial Sequence
  Description of Artificial Sequence: Synthetic oligonucleotide
aaacggaaacuauuguuuu

SEQ ID NO: 1754408 - RNA, 19 nt, Artificial Sequence
  Description of Artificial Sequence: Synthetic oligonucleotide
aucuucggugaucucauag

SEQ ID NO: 1754409 - RNA, 19 nt, Artificial Sequence
  Description of Artificial Sequence: Synthetic oligonucleotide
agaaacggaaacuauuguu

SEQ ID NO: 1754410 - RNA, 19 nt, Artificial Sequence
  Description of Artificial Sequence: Synthetic oligonucleotide
aauagcuguguucuucuuu

SEQ ID NO: 1754411 - RNA, 19 nt, Artificial Sequence
  Description of Artificial Sequence: Synthetic oligonucleotide
aaaagauguccaaauccug

SEQ ID NO: 1754412 - RNA, 19 nt, Artificial Sequence
  Description of Artificial Sequence: Synthetic oligonucleotide
uuucucgugauguaucauc

SEQ ID NO: 1754413 - RNA, 19 nt, Artificial Sequence
  Description of Artificial Sequence: Synthetic oligonucleotide
accaugcauauauucaucu

SEQ ID NO: 1754414 - RNA, 19 nt, Artificial Sequence
  Description of Artificial Sequence: Synthetic oligonucleotide
accccaaauauuguucacc

SEQ ID NO: 1754415 - RNA, 19 nt, Artificial Sequence
  Description of Artificial Sequence: Synthetic oligonucleotide
uguccaaauccugaggaug

SEQ ID NO: 1754416 - RNA, 19 nt, Artificial Sequence
  Description of Artificial Sequence: Synthetic oligonucleotide
uagaaacggaaacuauugu

SEQ ID NO: 1754417 - RNA, 19 nt, Artificial Sequence
  Description of Artificial Sequence: Synthetic oligonucleotide
ucuucgacuaccauucauu

SEQ ID NO: 1754418 - RNA, 19 nt, Artificial Sequence
  Description of Artificial Sequence: Synthetic oligonucleotide
ucaucaagagaggccaggg

SEQ ID NO: 1754419 - RNA, 19 nt, Artificial Sequence
  Description of Artificial Sequence: Synthetic oligonucleotide
aaauccugaggauggucca

SEQ ID NO: 1754420 - RNA, 19 nt, Artificial Sequence
  Description of Artificial Sequence: Synthetic oligonucleotide
agugcauacagcaaccuca

SEQ ID NO: 1754421 - RNA, 19 nt, Artificial Sequence
  Description of Artificial Sequence: Synthetic oligonucleotide
cacuacucgggcuaucagg

SEQ ID NO: 1754422 - RNA, 19 nt, Artificial Sequence
  Description of Artificial Sequence: Synthetic oligonucleotide
uaauuguaggucucagacu

SEQ ID NO: 1754423 - RNA, 19 nt, Artificial Sequence
  Description of Artificial Sequence: Synthetic oligonucleotide
aaaguuucucgugauguau

SEQ ID NO: 1754424 - RNA, 19 nt, Artificial Sequence
  Description of Artificial Sequence: Synthetic oligonucleotide
aaaaguuucucgugaugua

SEQ ID NO: 1754425 - RNA, 19 nt, Artificial Sequence
  Description of Artificial Sequence: Synthetic oligonucleotide
cuggccaaacggaaaaggc

SEQ ID NO: 1754426 - RNA, 19 nt, Artificial Sequence
  Description of Artificial Sequence: Synthetic oligonucleotide
auucagacuuuuaauagcu

SEQ ID NO: 1754427 - RNA, 19 nt, Artificial Sequence
  Description of Artificial Sequence: Synthetic oligonucleotide
ucaccaugcauauauucau

SEQ ID NO: 1754428 - RNA, 19 nt, Artificial Sequence
  Description of Artificial Sequence: Synthetic oligonucleotide
auuucugucgcuuccguuu

SEQ ID NO: 1754429 - RNA, 19 nt, Artificial Sequence
  Description of Artificial Sequence: Synthetic oligonucleotide
guaaccugaaagcaauuuc

SEQ ID NO: 1754430 - RNA, 19 nt, Artificial Sequence
  Description of Artificial Sequence: Synthetic oligonucleotide
guuugagaugaccuugccc

SEQ ID NO: 1754431 - RNA, 19 nt, Artificial Sequence
  Description of Artificial Sequence: Synthetic oligonucleotide
ucaugucggaauccgaguc

SEQ ID NO: 1754432 - RNA, 19 nt, Artificial Sequence
  Description of Artificial Sequence: Synthetic oligonucleotide
acggaaaaggcucugguuu

SEQ ID NO: 1754433 - RNA, 19 nt, Artificial Sequence
  Description of Artificial Sequence: Synthetic oligonucleotide
uacucgggcuaucaggucu

SEQ ID NO: 1754434 - RNA, 19 nt, Artificial Sequence
  Description of Artificial Sequence: Synthetic oligonucleotide
aaggucuauucuucaaaau

SEQ ID NO: 1754435 - RNA, 19 nt, Artificial Sequence
  Description of Artificial Sequence: Synthetic oligonucleotide
cagucugucuuugacaggc

SEQ ID NO: 1754436 - RNA, 19 nt, Artificial Sequence
  Description of Artificial Sequence: Synthetic oligonucleotide
ucaucugaauccacacucu

SEQ ID NO: 1754437 - RNA, 19 nt, Artificial Sequence
  Description of Artificial Sequence: Synthetic oligonucleotide
uuucgcuagguccuuccug

SEQ ID NO: 1754438 - RNA, 19 nt, Artificial Sequence
  Description of Artificial Sequence: Synthetic oligonucleotide
gguacgaccgucaugucgg

SEQ ID NO: 1754439 - RNA, 19 nt, Artificial Sequence
  Description of Artificial Sequence: Synthetic oligonucleotide
uugagagcuguuuucugac

SEQ ID NO: 1754440 - RNA, 19 nt, Artificial Sequence
  Description of Artificial Sequence: Synthetic oligonucleotide
uuuccaaagagagcagucu

SEQ ID NO: 1754441 - RNA, 19 nt, Artificial Sequence
  Description of Artificial Sequence: Synthetic oligonucleotide
aguuucucgugauguauca

SEQ ID NO: 1754442 - RNA, 19 nt, Artificial Sequence
  Description of Artificial Sequence: Synthetic oligonucleotide
aauaugccuaaaagauguc

SEQ ID NO: 1754443 - RNA, 19 nt, Artificial Sequence
  Description of Artificial Sequence: Synthetic oligonucleotide
ugcauauauucaucuagau

SEQ ID NO: 1754444 - RNA, 19 nt, Artificial Sequence
  Description of Artificial Sequence: Synthetic oligonucleotide
caugucggaauccgagucg

SEQ ID NO: 1754445 - RNA, 19 nt, Artificial Sequence
  Description of Artificial Sequence: Synthetic oligonucleotide
aauccugaggaugguccac

SEQ ID NO: 1754446 - RNA, 19 nt, Artificial Sequence
  Description of Artificial Sequence: Synthetic oligonucleotide
uagcacuuucgccauuugc

SEQ ID NO: 1754447 - RNA, 19 nt, Artificial Sequence
  Description of Artificial Sequence: Synthetic oligonucleotide
acaagcaacacugucccca

SEQ ID NO: 1754448 - RNA, 19 nt, Artificial Sequence
  Description of Artificial Sequence: Synthetic oligonucleotide
guaccuuccauucccagga

SEQ ID NO: 1754449 - RNA, 19 nt, Artificial Sequence
  Description of Artificial Sequence: Synthetic oligonucleotide
ucugucuuugacaggccgu

SEQ ID NO: 1754450 - RNA, 19 nt, Artificial Sequence
  Description of Artificial Sequence: Synthetic oligonucleotide
uccaaagagagcagucuuc

SEQ ID NO: 1754451 - RNA, 19 nt, Artificial Sequence
  Description of Artificial Sequence: Synthetic oligonucleotide
gaauccgagucggaaaagc

SEQ ID NO: 1754452 - RNA, 19 nt, Artificial Sequence
  Description of Artificial Sequence: Synthetic oligonucleotide
uccuguaaccugaaagcaa

SEQ ID NO: 1754453 - RNA, 19 nt, Artificial Sequence
  Description of Artificial Sequence: Synthetic oligonucleotide
uacagcaaccucaguagaa

SEQ ID NO: 1754454 - RNA, 19 nt, Artificial Sequence
  Description of Artificial Sequence: Synthetic oligonucleotide
cuuugguuccuguaaccug

SEQ ID NO: 1754455 - RNA, 19 nt, Artificial Sequence
  Description of Artificial Sequence: Synthetic oligonucleotide
aacggaaaaggcucugguu

SEQ ID NO: 1754456 - RNA, 19 nt, Artificial Sequence
  Description of Artificial Sequence: Synthetic oligonucleotide
cuuuuguggacucuugaga

SEQ ID NO: 1754457 - RNA, 19 nt, Artificial Sequence
  Description of Artificial Sequence: Synthetic oligonucleotide
ugagacucccgcuuaaguu

SEQ ID NO: 1754458 - RNA, 19 nt, Artificial Sequence
  Description of Artificial Sequence: Synthetic oligonucleotide
auaaugugacacuggugca

SEQ ID NO: 1754459 - RNA, 19 nt, Artificial Sequence
  Description of Artificial Sequence: Synthetic oligonucleotide
gucugucuuugacaggccg

SEQ ID NO: 1754460 - RNA, 19 nt, Artificial Sequence
  Description of Artificial Sequence: Synthetic oligonucleotide
uuugacaggccguuuccgu

SEQ ID NO: 1754461 - RNA, 19 nt, Artificial Sequence
  Description of Artificial Sequence: Synthetic oligonucleotide
uugagacucccgcuuaagu

SEQ ID NO: 1754462 - RNA, 19 nt, Artificial Sequence
  Description of Artificial Sequence: Synthetic oligonucleotide
uccguuugagaugaccuug

SEQ ID NO: 1754463 - RNA, 19 nt, Artificial Sequence
  Description of Artificial Sequence: Synthetic oligonucleotide
cauuucuacucuguugccc

SEQ ID NO: 1754464 - RNA, 19 nt, Artificial Sequence
  Description of Artificial Sequence: Synthetic oligonucleotide
uuuuaauagcuuguuucau

SEQ ID NO: 1754465 - RNA, 19 nt, Artificial Sequence
  Description of Artificial Sequence: Synthetic oligonucleotide
gcaaccucaguagaaacgg

SEQ ID NO: 1754466 - RNA, 19 nt, Artificial Sequence
  Description of Artificial Sequence: Synthetic oligonucleotide
agcaagcaaauaauuguag

SEQ ID NO: 1754467 - RNA, 19 nt, Artificial Sequence
  Description of Artificial Sequence: Synthetic oligonucleotide
uuuguggacucuugagacu

SEQ ID NO: 1754468 - RNA, 19 nt, Artificial Sequence
  Description of Artificial Sequence: Synthetic oligonucleotide
aggaaaaccccaccaggug

SEQ ID NO: 1754469 - RNA, 19 nt, Artificial Sequence
  Description of Artificial Sequence: Synthetic oligonucleotide
uucgccauuugcaccggcc

SEQ ID NO: 1754470 - RNA, 19 nt, Artificial Sequence
  Description of Artificial Sequence: Synthetic oligonucleotide
gaggguuaagacauuucug

SEQ ID NO: 1754471 - RNA, 19 nt, Artificial Sequence
  Description of Artificial Sequence: Synthetic oligonucleotide
auguucaaaauaugccuaa

SEQ ID NO: 1754472 - RNA, 19 nt, Artificial Sequence
  Description of Artificial Sequence: Synthetic oligonucleotide
cucgugauguaucaucauc

SEQ ID NO: 1754473 - RNA, 19 nt, Artificial Sequence
  Description of Artificial Sequence: Synthetic oligonucleotide
uagugucacuugcaaaagu

SEQ ID NO: 1754474 - RNA, 19 nt, Artificial Sequence
  Description of Artificial Sequence: Synthetic oligonucleotide
aaaauguccuuaauuuguu

SEQ ID NO: 1754475 - RNA, 19 nt, Artificial Sequence
  Description of Artificial Sequence: Synthetic oligonucleotide
ccagauucagugcauacag

SEQ ID NO: 1754476 - RNA, 19 nt, Artificial Sequence
  Description of Artificial Sequence: Synthetic oligonucleotide
aguccgauaaugugacacu

SEQ ID NO: 1754477 - RNA, 19 nt, Artificial Sequence
  Description of Artificial Sequence: Synthetic oligonucleotide
uuccucccuccauugagag

SEQ ID NO: 1754478 - RNA, 19 nt, Artificial Sequence
  Description of Artificial Sequence: Synthetic oligonucleotide
gaugaccuugcccauucuc

SEQ ID NO: 1754479 - RNA, 19 nt, Artificial Sequence
  Description of Artificial Sequence: Synthetic oligonucleotide
caguccgauaaugugacac

SEQ ID NO: 1754480 - RNA, 19 nt, Artificial Sequence
  Description of Artificial Sequence: Synthetic oligonucleotide
agcaauuucaucagccacu

SEQ ID NO: 1754481 - RNA, 19 nt, Artificial Sequence
  Description of Artificial Sequence: Synthetic oligonucleotide
agcaccccaaauauuguuc

SEQ ID NO: 1754482 - RNA, 19 nt, Artificial Sequence
  Description of Artificial Sequence: Synthetic oligonucleotide
ugcaaaaguuucucgugau

SEQ ID NO: 1754483 - RNA, 19 nt, Artificial Sequence
  Description of Artificial Sequence: Synthetic oligonucleotide
auuuuguuccuggagcaca

SEQ ID NO: 1754484 - RNA, 19 nt, Artificial Sequence
  Description of Artificial Sequence: Synthetic oligonucleotide
cugcccgucuuccaugucg

SEQ ID NO: 1754485 - RNA, 19 nt, Artificial Sequence
  Description of Artificial Sequence: Synthetic oligonucleotide
ucuacucuguugcccaguc

SEQ ID NO: 1754486 - RNA, 19 nt, Artificial Sequence
  Description of Artificial Sequence: Synthetic oligonucleotide
ugacacuggugcacaagca

SEQ ID NO: 1754487 - RNA, 19 nt, Artificial Sequence
  Description of Artificial Sequence: Synthetic oligonucleotide
uguaaccugaaagcaauuu

SEQ ID NO: 1754488 - RNA, 19 nt, Artificial Sequence
  Description of Artificial Sequence: Synthetic oligonucleotide
aggaugguccaccucgaug

SEQ ID NO: 1754489 - RNA, 19 nt, Artificial Sequence
  Description of Artificial Sequence: Synthetic oligonucleotide
aguagaaacggaaacuauu

SEQ ID NO: 1754490 - RNA, 19 nt, Artificial Sequence
  Description of Artificial Sequence: Synthetic oligonucleotide
gucccaauuauccucacua

SEQ ID NO: 1754491 - RNA, 19 nt, Artificial Sequence
  Description of Artificial Sequence: Synthetic oligonucleotide
ucccaauuauccucacuac

SEQ ID NO: 1754492 - RNA, 19 nt, Artificial Sequence
  Description of Artificial Sequence: Synthetic oligonucleotide
ucacuacucgggcuaucag

SEQ ID NO: 1754493 - RNA, 19 nt, Artificial Sequence
  Description of Artificial Sequence: Synthetic oligonucleotide
ggagauucaggaaaacccc

SEQ ID NO: 1754494 - RNA, 19 nt, Artificial Sequence
  Description of Artificial Sequence: Synthetic oligonucleotide
cacuuucgccauuugcacc

SEQ ID NO: 1754495 - RNA, 19 nt, Artificial Sequence
  Description of Artificial Sequence: Synthetic oligonucleotide
acuggugcacaagcaacac

SEQ ID NO: 1754496 - RNA, 19 nt, Artificial Sequence
  Description of Artificial Sequence: Synthetic oligonucleotide
gucgccagcuuccagcgcc

SEQ ID NO: 1754497 - RNA, 19 nt, Artificial Sequence
  Description of Artificial Sequence: Synthetic oligonucleotide
gcauauauucaucuagauc

SEQ ID NO: 1754498 - RNA, 19 nt, Artificial Sequence
  Description of Artificial Sequence: Synthetic oligonucleotide
uuucugucgcuuccguuuc

SEQ ID NO: 1754499 - RNA, 19 nt, Artificial Sequence
  Description of Artificial Sequence: Synthetic oligonucleotide
acuacucgggcuaucaggu

SEQ ID NO: 1754500 - RNA, 19 nt, Artificial Sequence
  Description of Artificial Sequence: Synthetic oligonucleotide
uaggucucagacugccugc

SEQ ID NO: 1754501 - RNA, 19 nt, Artificial Sequence
  Description of Artificial Sequence: Synthetic oligonucleotide
agcuugguuucgcuagguc

SEQ ID NO: 1754502 - RNA, 19 nt, Artificial Sequence
  Description of Artificial Sequence: Synthetic oligonucleotide
ugugacacuggugcacaag

SEQ ID NO: 1754503 - RNA, 19 nt, Artificial Sequence
  Description of Artificial Sequence: Synthetic oligonucleotide
gacacuggugcacaagcaa

SEQ ID NO: 1754504 - RNA, 19 nt, Artificial Sequence
  Description of Artificial Sequence: Synthetic oligonucleotide
caucaagagaggccagggc

SEQ ID NO: 1754505 - RNA, 19 nt, Artificial Sequence
  Description of Artificial Sequence: Synthetic oligonucleotide
caucaaaaguucaauggcu

SEQ ID NO: 1754506 - RNA, 19 nt, Artificial Sequence
  Description of Artificial Sequence: Synthetic oligonucleotide
agagucaucuucggugauc

SEQ ID NO: 1754507 - RNA, 19 nt, Artificial Sequence
  Description of Artificial Sequence: Synthetic oligonucleotide
uuucuacucuguugcccag

SEQ ID NO: 1754508 - RNA, 19 nt, Artificial Sequence
  Description of Artificial Sequence: Synthetic oligonucleotide
aaccucaguagaaacggaa

SEQ ID NO: 1754509 - RNA, 19 nt, Artificial Sequence
  Description of Artificial Sequence: Synthetic oligonucleotide
ucauagcggccuuuguagu

SEQ ID NO: 1754510 - RNA, 19 nt, Artificial Sequence
  Description of Artificial Sequence: Synthetic oligonucleotide
gaaacggaaacuauuguuu

SEQ ID NO: 1754511 - RNA, 19 nt, Artificial Sequence
  Description of Artificial Sequence: Synthetic oligonucleotide
guuuccguuugagaugacc

SEQ ID NO: 1754512 - RNA, 19 nt, Artificial Sequence
  Description of Artificial Sequence: Synthetic oligonucleotide
accgucaugucggaauccg

SEQ ID NO: 1754513 - RNA, 19 nt, Artificial Sequence
  Description of Artificial Sequence: Synthetic oligonucleotide
aauccacacucuccucacu

SEQ ID NO: 1754514 - RNA, 19 nt, Artificial Sequence
  Description of Artificial Sequence: Synthetic oligonucleotide
aaaaccccaccagguguuc

SEQ ID NO: 1754515 - RNA, 19 nt, Artificial Sequence
  Description of Artificial Sequence: Synthetic oligonucleotide
ggguacgaccgucaugucg

SEQ ID NO: 1754516 - RNA, 19 nt, Artificial Sequence
  Description of Artificial Sequence: Synthetic oligonucleotide
ucggaaaagcugcccgucu

SEQ ID NO: 1754517 - RNA, 19 nt, Artificial Sequence
  Description of Artificial Sequence: Synthetic oligonucleotide
uccccaccuagcacuuucg

SEQ ID NO: 1754518 - RNA, 19 nt, Artificial Sequence
  Description of Artificial Sequence: Synthetic oligonucleotide
ucggaauccgagucggaaa

SEQ ID NO: 1754519 - RNA, 19 nt, Artificial Sequence
  Description of Artificial Sequence: Synthetic oligonucleotide
ucgccauuugcaccggccu

SEQ ID NO: 1754520 - RNA, 19 nt, Artificial Sequence
  Description of Artificial Sequence: Synthetic oligonucleotide
aaccugaaagcaauuucau

SEQ ID NO: 1754521 - RNA, 19 nt, Artificial Sequence
  Description of Artificial Sequence: Synthetic oligonucleotide
ugcccgucuuccaugucgc

SEQ ID NO: 1754522 - RNA, 19 nt, Artificial Sequence
  Description of Artificial Sequence: Synthetic oligonucleotide
ugucgcuuccguuuccaaa

SEQ ID NO: 1754523 - RNA, 19 nt, Artificial Sequence
  Description of Artificial Sequence: Synthetic oligonucleotide
acgaccgucaugucggaau

SEQ ID NO: 1754524 - RNA, 19 nt, Artificial Sequence
  Description of Artificial Sequence: Synthetic oligonucleotide
uucgacuaccauucauuau

SEQ ID NO: 1754525 - RNA, 19 nt, Artificial Sequence
  Description of Artificial Sequence: Synthetic oligonucleotide
ugaggaugguccaccucga

SEQ ID NO: 1754526 - RNA, 19 nt, Artificial Sequence
  Description of Artificial Sequence: Synthetic oligonucleotide
agugucacuugcaaaaguu

SEQ ID NO: 1754527 - RNA, 19 nt, Artificial Sequence
  Description of Artificial Sequence: Synthetic oligonucleotide
augccuaaaagauguccaa

SEQ ID NO: 1754528 - RNA, 19 nt, Artificial Sequence
  Description of Artificial Sequence: Synthetic oligonucleotide
agucggaaaagcugcccgu

SEQ ID NO: 1754529 - RNA, 19 nt, Artificial Sequence
  Description of Artificial Sequence: Synthetic oligonucleotide
aucaaaaguucaauggcuu

SEQ ID NO: 1754530 - RNA, 19 nt, Artificial Sequence
  Description of Artificial Sequence: Synthetic oligonucleotide
gauuuuguuccuggagcac

SEQ ID NO: 1754531 - RNA, 19 nt, Artificial Sequence
  Description of Artificial Sequence: Synthetic oligonucleotide
aguucaauggccaccgcau

SEQ ID NO: 1754532 - RNA, 19 nt, Artificial Sequence
  Description of Artificial Sequence: Synthetic oligonucleotide
cuuugucuaauucuuuugu

SEQ ID NO: 1754533 - RNA, 19 nt, Artificial Sequence
  Description of Artificial Sequence: Synthetic oligonucleotide
cuccagauucagugcauac

SEQ ID NO: 1754534 - RNA, 19 nt, Artificial Sequence
  Description of Artificial Sequence: Synthetic oligonucleotide
ugcaccggccugucgcugg

SEQ ID NO: 1754535 - RNA, 19 nt, Artificial Sequence
  Description of Artificial Sequence: Synthetic oligonucleotide
caaauaauuguaggucuca

SEQ ID NO: 1754536 - RNA, 19 nt, Artificial Sequence
  Description of Artificial Sequence: Synthetic oligonucleotide
augaccuugcccauucucu

SEQ ID NO: 1754537 - RNA, 19 nt, Artificial Sequence
  Description of Artificial Sequence: Synthetic oligonucleotide
ggacucuugagacucccgc

SEQ ID NO: 1754538 - RNA, 19 nt, Artificial Sequence
  Description of Artificial Sequence: Synthetic oligonucleotide
cagacugccugcuucuguc

SEQ ID NO: 1754539 - RNA, 19 nt, Artificial Sequence
  Description of Artificial Sequence: Synthetic oligonucleotide
caucugaauccacacucuc

SEQ ID NO: 1754540 - RNA, 19 nt, Artificial Sequence
  Description of Artificial Sequence: Synthetic oligonucleotide
uguaggucucagacugccu

SEQ ID NO: 1754541 - RNA, 19 nt, Artificial Sequence
  Description of Artificial Sequence: Synthetic oligonucleotide
ugucaaggguaccuuccau

SEQ ID NO: 1754542 - RNA, 19 nt, Artificial Sequence
  Description of Artificial Sequence: Synthetic oligonucleotide
ccucauuagugucacuugc

SEQ ID NO: 1754543 - RNA, 19 nt, Artificial Sequence
  Description of Artificial Sequence: Synthetic oligonucleotide
caccaugcauauauucauc

SEQ ID NO: 1754544 - RNA, 19 nt, Artificial Sequence
  Description of Artificial Sequence: Synthetic oligonucleotide
gcauacagcaaccucagua

SEQ ID NO: 1754545 - RNA, 19 nt, Artificial Sequence
  Description of Artificial Sequence: Synthetic oligonucleotide
guccgauaaugugacacug

SEQ ID NO: 1754546 - RNA, 19 nt, Artificial Sequence
  Description of Artificial Sequence: Synthetic oligonucleotide
uuuuccccaauagcugugu

SEQ ID NO: 1754547 - RNA, 19 nt, Artificial Sequence
  Description of Artificial Sequence: Synthetic oligonucleotide
uuugcaccggccugucgcu

SEQ ID NO: 1754548 - RNA, 19 nt, Artificial Sequence
  Description of Artificial Sequence: Synthetic oligonucleotide
cuugguuucgcuagguccu

SEQ ID NO: 1754549 - RNA, 19 nt, Artificial Sequence
  Description of Artificial Sequence: Synthetic oligonucleotide
ccuaaaagauguccaaauc

SEQ ID NO: 1754550 - RNA, 19 nt, Artificial Sequence
  Description of Artificial Sequence: Synthetic oligonucleotide
ccaaguucaauggccaccg

SEQ ID NO: 1754551 - RNA, 19 nt, Artificial Sequence
  Description of Artificial Sequence: Synthetic oligonucleotide
ugcucuggccaaacggaaa

SEQ ID NO: 1754552 - RNA, 19 nt, Artificial Sequence
  Description of Artificial Sequence: Synthetic oligonucleotide
ucagugcauacagcaaccu

SEQ ID NO: 1754553 - RNA, 19 nt, Artificial Sequence
  Description of Artificial Sequence: Synthetic oligonucleotide
auccgagucggaaaagcug

SEQ ID NO: 1754554 - RNA, 19 nt, Artificial Sequence
  Description of Artificial Sequence: Synthetic oligonucleotide
agacucccgcuuaaguuuc

SEQ ID NO: 1754555 - RNA, 19 nt, Artificial Sequence
  Description of Artificial Sequence: Synthetic oligonucleotide
aguuuccaucaaaaguuca

SEQ ID NO: 1754556 - RNA, 19 nt, Artificial Sequence
  Description of Artificial Sequence: Synthetic oligonucleotide
uuccguuugagaugaccuu

SEQ ID NO: 1754557 - RNA, 19 nt, Artificial Sequence
  Description of Artificial Sequence: Synthetic oligonucleotide
gagacucccgcuuaaguuu

SEQ ID NO: 1754558 - RNA, 19 nt, Artificial Sequence
  Description of Artificial Sequence: Synthetic oligonucleotide
cuucgacuaccauucauua

SEQ ID NO: 1754559 - RNA, 19 nt, Artificial Sequence
  Description of Artificial Sequence: Synthetic oligonucleotide
agucugucuuugacaggcc

SEQ ID NO: 1754560 - RNA, 19 nt, Artificial Sequence
  Description of Artificial Sequence: Synthetic oligonucleotide
cuggguacgaccgucaugu

SEQ ID NO: 1754561 - RNA, 19 nt, Artificial Sequence
  Description of Artificial Sequence: Synthetic oligonucleotide
uuucgccauuugcaccggc

SEQ ID NO: 1754562 - RNA, 19 nt, Artificial Sequence
  Description of Artificial Sequence: Synthetic oligonucleotide
auccucacuacucgggcua

SEQ ID NO: 1754563 - RNA, 19 nt, Artificial Sequence
  Description of Artificial Sequence: Synthetic oligonucleotide
uucugucgcuuccguuucc

SEQ ID NO: 1754564 - RNA, 19 nt, Artificial Sequence
  Description of Artificial Sequence: Synthetic oligonucleotide
ucucgugauguaucaucau

SEQ ID NO: 1754565 - RNA, 19 nt, Artificial Sequence
  Description of Artificial Sequence: Synthetic oligonucleotide
cuuccauucccaggaugcc

SEQ ID NO: 1754566 - RNA, 19 nt, Artificial Sequence
  Description of Artificial Sequence: Synthetic oligonucleotide
aauggccaccgcaucuuga

SEQ ID NO: 1754567 - RNA, 19 nt, Artificial Sequence
  Description of Artificial Sequence: Synthetic oligonucleotide
ucgcuagguccuuccuggg

SEQ ID NO: 1754568 - RNA, 19 nt, Artificial Sequence
  Description of Artificial Sequence: Synthetic oligonucleotide
cagugcauacagcaaccuc

SEQ ID NO: 1754569 - RNA, 19 nt, Artificial Sequence
  Description of Artificial Sequence: Synthetic oligonucleotide
aaccccaccagguguucuu

SEQ ID NO: 1754570 - RNA, 19 nt, Artificial Sequence
  Description of Artificial Sequence: Synthetic oligonucleotide
ccaccuagcacuuucgcca

SEQ ID NO: 1754571 - RNA, 19 nt, Artificial Sequence
  Description of Artificial Sequence: Synthetic oligonucleotide
cuuccuuugaccccgguuu

SEQ ID NO: 1754572 - RNA, 19 nt, Artificial Sequence
  Description of Artificial Sequence: Synthetic oligonucleotide
gcacuuucgccauuugcac

SEQ ID NO: 1754573 - RNA, 19 nt, Artificial Sequence
  Description of Artificial Sequence: Synthetic oligonucleotide
ggcuucaucaagagaggcc

SEQ ID NO: 1754574 - RNA, 19 nt, Artificial Sequence
  Description of Artificial Sequence: Synthetic oligonucleotide
cuuccucccuccauugaga

SEQ ID NO: 1754575 - RNA, 19 nt, Artificial Sequence
  Description of Artificial Sequence: Synthetic oligonucleotide
cauuugcaccggccugucg

SEQ ID NO: 1754576 - RNA, 19 nt, Artificial Sequence
  Description of Artificial Sequence: Synthetic oligonucleotide
aaaccccaccagguguucu

SEQ ID NO: 1754577 - RNA, 19 nt, Artificial Sequence
  Description of Artificial Sequence: Synthetic oligonucleotide
cucaguagaaacggaaacu

SEQ ID NO: 1754578 - RNA, 19 nt, Artificial Sequence
  Description of Artificial Sequence: Synthetic oligonucleotide
caggaaaaccccaccaggu

SEQ ID NO: 1754579 - RNA, 19 nt, Artificial Sequence
  Description of Artificial Sequence: Synthetic oligonucleotide
ugucggaauccgagucgga

SEQ ID NO: 1754580 - RNA, 19 nt, Artificial Sequence
  Description of Artificial Sequence: Synthetic oligonucleotide
aggccguuuccguuugaga

SEQ ID NO: 1754581 - RNA, 19 nt, Artificial Sequence
  Description of Artificial Sequence: Synthetic oligonucleotide
uccaaauccugaggauggu

SEQ ID NO: 1754582 - RNA, 19 nt, Artificial Sequence
  Description of Artificial Sequence: Synthetic oligonucleotide
accgcaucuugauuuuguu

SEQ ID NO: 1754583 - RNA, 19 nt, Artificial Sequence
  Description of Artificial Sequence: Synthetic oligonucleotide
ucgcuggguacgaccguca

SEQ ID NO: 1754584 - RNA, 19 nt, Artificial Sequence
  Description of Artificial Sequence: Synthetic oligonucleotide
uucuacucuguugcccagu

SEQ ID NO: 1754585 - RNA, 19 nt, Artificial Sequence
  Description of Artificial Sequence: Synthetic oligonucleotide
gcaaauaauuguaggucuc

SEQ ID NO: 1754586 - RNA, 19 nt, Artificial Sequence
  Description of Artificial Sequence: Synthetic oligonucleotide
gacuaccauucauuauaaa

SEQ ID NO: 1754587 - RNA, 19 nt, Artificial Sequence
  Description of Artificial Sequence: Synthetic oligonucleotide
ggaaaaccccaccaggugu

SEQ ID NO: 1754588 - RNA, 19 nt, Artificial Sequence
  Description of Artificial Sequence: Synthetic oligonucleotide
cgucaugucggaauccgag

SEQ ID NO: 1754589 - RNA, 19 nt, Artificial Sequence
  Description of Artificial Sequence: Synthetic oligonucleotide
gccguuuccguuugagaug

SEQ ID NO: 1754590 - RNA, 19 nt, Artificial Sequence
  Description of Artificial Sequence: Synthetic oligonucleotide
gcaccccaaauauuguuca

SEQ ID NO: 1754591 - RNA, 19 nt, Artificial Sequence
  Description of Artificial Sequence: Synthetic oligonucleotide
cuagcacuuucgccauuug

SEQ ID NO: 1754592 - RNA, 19 nt, Artificial Sequence
  Description of Artificial Sequence: Synthetic oligonucleotide
cccaccuagcacuuucgcc

SEQ ID NO: 1754593 - RNA, 19 nt, Artificial Sequence
  Description of Artificial Sequence: Synthetic oligonucleotide
guggacucuugagacuccc

SEQ ID NO: 1754594 - RNA, 19 nt, Artificial Sequence
  Description of Artificial Sequence: Synthetic oligonucleotide
gucacuugcaaaaguuucu

SEQ ID NO: 1754595 - RNA, 19 nt, Artificial Sequence
  Description of Artificial Sequence: Synthetic oligonucleotide
gaccgucaugucggaaucc

SEQ ID NO: 1754596 - RNA, 19 nt, Artificial Sequence
  Description of Artificial Sequence: Synthetic oligonucleotide
cucuggccaaacggaaaag

SEQ ID NO: 1754597 - RNA, 19 nt, Artificial Sequence
  Description of Artificial Sequence: Synthetic oligonucleotide
ccguuugagaugaccuugc

SEQ ID NO: 1754598 - RNA, 19 nt, Artificial Sequence
  Description of Artificial Sequence: Synthetic oligonucleotide
gccaaguucaauggccacc

SEQ ID NO: 1754599 - RNA, 19 nt, Artificial Sequence
  Description of Artificial Sequence: Synthetic oligonucleotide
ugucgcuggguacgaccgu

SEQ ID NO: 1754600 - RNA, 19 nt, Artificial Sequence
  Description of Artificial Sequence: Synthetic oligonucleotide
agaugaccuugcccauucu

SEQ ID NO: 1754601 - RNA, 19 nt, Artificial Sequence
  Description of Artificial Sequence: Synthetic oligonucleotide
acaguccgauaaugugaca

SEQ ID NO: 1754602 - RNA, 19 nt, Artificial Sequence
  Description of Artificial Sequence: Synthetic oligonucleotide
cuugagagucaucuucggu

SEQ ID NO: 1754603 - RNA, 19 nt, Artificial Sequence
  Description of Artificial Sequence: Synthetic oligonucleotide
caggccguuuccguuugag

SEQ ID NO: 1754604 - RNA, 19 nt, Artificial Sequence
  Description of Artificial Sequence: Synthetic oligonucleotide
gucaugucggaauccgagu

SEQ ID NO: 1754605 - RNA, 19 nt, Artificial Sequence
  Description of Artificial Sequence: Synthetic oligonucleotide
ugcuucugucaaggguacc

SEQ ID NO: 1754606 - RNA, 19 nt, Artificial Sequence
  Description of Artificial Sequence: Synthetic oligonucleotide
cuuucgccauuugcaccgg

SEQ ID NO: 1754607 - RNA, 19 nt, Artificial Sequence
  Description of Artificial Sequence: Synthetic oligonucleotide
cugacugcucuggccaaac

SEQ ID NO: 1754608 - RNA, 19 nt, Artificial Sequence
  Description of Artificial Sequence: Synthetic oligonucleotide
gucggaaaagcugcccguc

SEQ ID NO: 1754609 - RNA, 19 nt, Artificial Sequence
  Description of Artificial Sequence: Synthetic oligonucleotide
gucggaauccgagucggaa

SEQ ID NO: 1754610 - RNA, 19 nt, Artificial Sequence
  Description of Artificial Sequence: Synthetic oligonucleotide
ggccguuuccguuugagau

SEQ ID NO: 1754611 - RNA, 19 nt, Artificial Sequence
  Description of Artificial Sequence: Synthetic oligonucleotide
caccucgauggcuuccuca

SEQ ID NO: 1754612 - RNA, 19 nt, Artificial Sequence
  Description of Artificial Sequence: Synthetic oligonucleotide
gcuuccguuuccaaagaga

SEQ ID NO: 1754613 - RNA, 19 nt, Artificial Sequence
  Description of Artificial Sequence: Synthetic oligonucleotide
gcucuggccaaacggaaaa

SEQ ID NO: 1754614 - RNA, 19 nt, Artificial Sequence
  Description of Artificial Sequence: Synthetic oligonucleotide
cgauaaugugacacuggug

SEQ ID NO: 1754615 - RNA, 19 nt, Artificial Sequence
  Description of Artificial Sequence: Synthetic oligonucleotide
gaaaaccccaccagguguu

SEQ ID NO: 1754616 - RNA, 19 nt, Artificial Sequence
  Description of Artificial Sequence: Synthetic oligonucleotide
cugcucuggccaaacggaa

SEQ ID NO: 1754617 - RNA, 19 nt, Artificial Sequence
  Description of Artificial Sequence: Synthetic oligonucleotide
gucuauucuucaaaauguu

SEQ ID NO: 1754618 - RNA, 19 nt, Artificial Sequence
  Description of Artificial Sequence: Synthetic oligonucleotide
uggccaccgcaucuugauu

SEQ ID NO: 1754619 - RNA, 19 nt, Artificial Sequence
  Description of Artificial Sequence: Synthetic oligonucleotide
gcuggguacgaccgucaug

SEQ ID NO: 1754620 - RNA, 19 nt, Artificial Sequence
  Description of Artificial Sequence: Synthetic oligonucleotide
gucgcuggguacgaccguc

SEQ ID NO: 1754621 - RNA, 19 nt, Artificial Sequence
  Description of Artificial Sequence: Synthetic oligonucleotide
cucagacugccugcuucug

SEQ ID NO: 1754622 - RNA, 19 nt, Artificial Sequence
  Description of Artificial Sequence: Synthetic oligonucleotide
cuucuucgacuaccauuca

SEQ ID NO: 1754623 - RNA, 19 nt, Artificial Sequence
  Description of Artificial Sequence: Synthetic oligonucleotide
ucccuccauugagagcugu

SEQ ID NO: 1754624 - RNA, 19 nt, Artificial Sequence
  Description of Artificial Sequence: Synthetic oligonucleotide
uccucacuacucgggcuau

SEQ ID NO: 1754625 - RNA, 19 nt, Artificial Sequence
  Description of Artificial Sequence: Synthetic oligonucleotide
ccucccuccauugagagcu

SEQ ID NO: 1754626 - RNA, 19 nt, Artificial Sequence
  Description of Artificial Sequence: Synthetic oligonucleotide
caccgcaucuugauuuugu

SEQ ID NO: 1754627 - RNA, 19 nt, Artificial Sequence
  Description of Artificial Sequence: Synthetic oligonucleotide
ccuuuugauuuucaaugua

SEQ ID NO: 1754628 - RNA, 19 nt, Artificial Sequence
  Description of Artificial Sequence: Synthetic oligonucleotide
uugcaccggccugucgcug

SEQ ID NO: 1754629 - RNA, 19 nt, Artificial Sequence
  Description of Artificial Sequence: Synthetic oligonucleotide
ccccaaauauuguucaccu

SEQ ID NO: 1754630 - RNA, 19 nt, Artificial Sequence
  Description of Artificial Sequence: Synthetic oligonucleotide
ucgggcuaucaggucuuuc

SEQ ID NO: 1754631 - RNA, 19 nt, Artificial Sequence
  Description of Artificial Sequence: Synthetic oligonucleotide
uacgaccgucaugucggaa

SEQ ID NO: 1754632 - RNA, 19 nt, Artificial Sequence
  Description of Artificial Sequence: Synthetic oligonucleotide
ccgagucggaaaagcugcc

SEQ ID NO: 1754633 - RNA, 19 nt, Artificial Sequence
  Description of Artificial Sequence: Synthetic oligonucleotide
cguuugagaugaccuugcc

SEQ ID NO: 1754634 - RNA, 19 nt, Artificial Sequence
  Description of Artificial Sequence: Synthetic oligonucleotide
gcuucugucaaggguaccu

SEQ ID NO: 1754635 - RNA, 19 nt, Artificial Sequence
  Description of Artificial Sequence: Synthetic oligonucleotide
gcauccagcuugguuucgc

SEQ ID NO: 1754636 - RNA, 19 nt, Artificial Sequence
  Description of Artificial Sequence: Synthetic oligonucleotide
ccguuuccaaagagagcag

SEQ ID NO: 1754637 - RNA, 19 nt, Artificial Sequence
  Description of Artificial Sequence: Synthetic oligonucleotide
cauagcggccuuuguaguu

SEQ ID NO: 1754638 - RNA, 19 nt, Artificial Sequence
  Description of Artificial Sequence: Synthetic oligonucleotide
gugucacuugcaaaaguuu

SEQ ID NO: 1754639 - RNA, 19 nt, Artificial Sequence
  Description of Artificial Sequence: Synthetic oligonucleotide
uggguacgaccgucauguc

SEQ ID NO: 1754640 - RNA, 19 nt, Artificial Sequence
  Description of Artificial Sequence: Synthetic oligonucleotide
cucccuccauugagagcug

SEQ ID NO: 1754641 - RNA, 19 nt, Artificial Sequence
  Description of Artificial Sequence: Synthetic oligonucleotide
ccgauaaugugacacuggu

SEQ ID NO: 1754642 - RNA, 19 nt, Artificial Sequence
  Description of Artificial Sequence: Synthetic oligonucleotide
ccguuuccguuugagauga

SEQ ID NO: 1754643 - RNA, 19 nt, Artificial Sequence
  Description of Artificial Sequence: Synthetic oligonucleotide
guacgaccgucaugucgga

SEQ ID NO: 1754644 - RNA, 19 nt, Artificial Sequence
  Description of Artificial Sequence: Synthetic oligonucleotide
gagcagucuucaucugaau

SEQ ID NO: 1754645 - RNA, 19 nt, Artificial Sequence
  Description of Artificial Sequence: Synthetic oligonucleotide
ccaaacggaaaaggcucug

SEQ ID NO: 1754646 - RNA, 19 nt, Artificial Sequence
  Description of Artificial Sequence: Synthetic oligonucleotide
acaggccguuuccguuuga

SEQ ID NO: 1754647 - RNA, 19 nt, Artificial Sequence
  Description of Artificial Sequence: Synthetic oligonucleotide
cauccagcuugguuucgcu

SEQ ID NO: 1754648 - RNA, 19 nt, Artificial Sequence
  Description of Artificial Sequence: Synthetic oligonucleotide
ggccaccgcaucuugauuu

SEQ ID NO: 1754649 - RNA, 19 nt, Artificial Sequence
  Description of Artificial Sequence: Synthetic oligonucleotide
caaagagagcagucuucau

SEQ ID NO: 1754650 - RNA, 19 nt, Artificial Sequence
  Description of Artificial Sequence: Synthetic oligonucleotide
gagagucaucuucggugau

SEQ ID NO: 1754651 - RNA, 19 nt, Artificial Sequence
  Description of Artificial Sequence: Synthetic oligonucleotide
ccaugcauauauucaucua

SEQ ID NO: 1754652 - RNA, 19 nt, Artificial Sequence
  Description of Artificial Sequence: Synthetic oligonucleotide
acucgggcuaucaggucuu

SEQ ID NO: 1754653 - RNA, 19 nt, Artificial Sequence
  Description of Artificial Sequence: Synthetic oligonucleotide
ccccaccuagcacuuucgc

SEQ ID NO: 1754654 - RNA, 19 nt, Artificial Sequence
  Description of Artificial Sequence: Synthetic oligonucleotide
ggcuaucaggucuuucuuu

SEQ ID NO: 1754655 - RNA, 19 nt, Artificial Sequence
  Description of Artificial Sequence: Synthetic oligonucleotide
ggccucauuagugucacuu

SEQ ID NO: 1754656 - RNA, 19 nt, Artificial Sequence
  Description of Artificial Sequence: Synthetic oligonucleotide
guuucucgugauguaucau

SEQ ID NO: 1754657 - RNA, 19 nt, Artificial Sequence
  Description of Artificial Sequence: Synthetic oligonucleotide
accuagcacuuucgccauu

SEQ ID NO: 1754658 - RNA, 19 nt, Artificial Sequence
  Description of Artificial Sequence: Synthetic oligonucleotide
cagcaccccaaauauuguu

SEQ ID NO: 1754659 - RNA, 19 nt, Artificial Sequence
  Description of Artificial Sequence: Synthetic oligonucleotide
cugucgcuuccguuuccaa

SEQ ID NO: 1754660 - RNA, 19 nt, Artificial Sequence
  Description of Artificial Sequence: Synthetic oligonucleotide
cauucccaggaugccaagu

SEQ ID NO: 1754661 - RNA, 19 nt, Artificial Sequence
  Description of Artificial Sequence: Synthetic oligonucleotide
cgagucggaaaagcugccc

SEQ ID NO: 1754662 - RNA, 19 nt, Artificial Sequence
  Description of Artificial Sequence: Synthetic oligonucleotide
cuguugcccagucugucuu

SEQ ID NO: 1754663 - RNA, 19 nt, Artificial Sequence
  Description of Artificial Sequence: Synthetic oligonucleotide
cgacuaccauucauuauaa

SEQ ID NO: 1754664 - RNA, 19 nt, Artificial Sequence
  Description of Artificial Sequence: Synthetic oligonucleotide
ggucccaauuauccucacu

SEQ ID NO: 1754665 - RNA, 19 nt, Artificial Sequence
  Description of Artificial Sequence: Synthetic oligonucleotide
cuguaaccugaaagcaauu

SEQ ID NO: 1754666 - RNA, 19 nt, Artificial Sequence
  Description of Artificial Sequence: Synthetic oligonucleotide
cggaauccgagucggaaaa

SEQ ID NO: 1754667 - RNA, 19 nt, Artificial Sequence
  Description of Artificial Sequence: Synthetic oligonucleotide
cgaccgucaugucggaauc

SEQ ID NO: 1754668 - RNA, 19 nt, Artificial Sequence
  Description of Artificial Sequence: Synthetic oligonucleotide
gguuugggaggaggguuaa

SEQ ID NO: 1754669 - RNA, 19 nt, Artificial Sequence
  Description of Artificial Sequence: Synthetic oligonucleotide
gguccaccucgauggcuuc

SEQ ID NO: 1754670 - RNA, 19 nt, Artificial Sequence
  Description of Artificial Sequence: Synthetic oligonucleotide
ccuggagcacagcacccca

SEQ ID NO: 1754671 - RNA, 19 nt, Artificial Sequence
  Description of Artificial Sequence: Synthetic oligonucleotide
caauagcuguguucuucuu

SEQ ID NO: 1754672 - RNA, 19 nt, Artificial Sequence
  Description of Artificial Sequence: Synthetic oligonucleotide
caccuagcacuuucgccau

SEQ ID NO: 1754673 - RNA, 19 nt, Artificial Sequence
  Description of Artificial Sequence: Synthetic oligonucleotide
gccauuugcaccggccugu

SEQ ID NO: 1754674 - RNA, 19 nt, Artificial Sequence
  Description of Artificial Sequence: Synthetic oligonucleotide
cgccauuugcaccggccug

SEQ ID NO: 1754675 - RNA, 19 nt, Artificial Sequence
  Description of Artificial Sequence: Synthetic oligonucleotide
ggugcacaagcaacacugu

SEQ ID NO: 1754676 - RNA, 19 nt, Artificial Sequence
  Description of Artificial Sequence: Synthetic oligonucleotide
ccggccugucgcuggguac

SEQ ID NO: 1754677 - RNA, 19 nt, Artificial Sequence
  Description of Artificial Sequence: Synthetic oligonucleotide
gccaaacggaaaaggcucu

SEQ ID NO: 1754678 - RNA, 19 nt, Artificial Sequence
  Description of Artificial Sequence: Synthetic oligonucleotide
cccgucuuccaugucgcca

SEQ ID NO: 1754679 - RNA, 19 nt, Artificial Sequence
  Description of Artificial Sequence: Synthetic oligonucleotide
gcccgucuuccaugucgcc

SEQ ID NO: 1754680 - RNA, 19 nt, Artificial Sequence
  Description of Artificial Sequence: Synthetic oligonucleotide
ccgucaugucggaauccga

SEQ ID NO: 1754681 - RNA, 19 nt, Artificial Sequence
  Description of Artificial Sequence: Synthetic oligonucleotide
ccaccgcaucuugauuuug

SEQ ID NO: 1754682 - RNA, 19 nt, Artificial Sequence
  Description of Artificial Sequence: Synthetic oligonucleotide
gacucccgcuuaaguuucu

SEQ ID NO: 1754683 - RNA, 19 nt, Artificial Sequence
  Description of Artificial Sequence: Synthetic oligonucleotide
ccauuugcaccggccuguc

SEQ ID NO: 1754684 - RNA, 19 nt, Artificial Sequence
  Description of Artificial Sequence: Synthetic oligonucleotide
cagcuugguuucgcuaggu

SEQ ID NO: 1754685 - RNA, 19 nt, Artificial Sequence
  Description of Artificial Sequence: Synthetic oligonucleotide
agcggccuuuguaguucau

SEQ ID NO: 1754686 - RNA, 19 nt, Artificial Sequence
  Description of Artificial Sequence: Synthetic oligonucleotide
cccaaauauuguucaccuu

SEQ ID NO: 1754687 - RNA, 19 nt, Artificial Sequence
  Description of Artificial Sequence: Synthetic oligonucleotide
ccuagcacuuucgccauuu

SEQ ID NO: 1754688 - RNA, 19 nt, Artificial Sequence
  Description of Artificial Sequence: Synthetic oligonucleotide
ccucacuacucgggcuauc

SEQ ID NO: 1754689 - RNA, 19 nt, Artificial Sequence
  Description of Artificial Sequence: Synthetic oligonucleotide
ggccugucgcuggguacga

SEQ ID NO: 1754690 - RNA, 19 nt, Artificial Sequence
  Description of Artificial Sequence: Synthetic oligonucleotide
cguuuccguuugagaugac

SEQ ID NO: 1754691 - RNA, 19 nt, Artificial Sequence
  Description of Artificial Sequence: Synthetic oligonucleotide
gccugucgcuggguacgac

SEQ ID NO: 1754692 - RNA, 19 nt, Artificial Sequence
  Description of Artificial Sequence: Synthetic oligonucleotide
cccuccauugagagcuguu

SEQ ID NO: 1754693 - RNA, 19 nt, Artificial Sequence
  Description of Artificial Sequence: Synthetic oligonucleotide
cucgggcuaucaggucuuu

SEQ ID NO: 1754694 - RNA, 19 nt, Artificial Sequence
  Description of Artificial Sequence: Synthetic oligonucleotide
caccggccugucgcugggu

SEQ ID NO: 1754695 - RNA, 19 nt, Artificial Sequence
  Description of Artificial Sequence: Synthetic oligonucleotide
cgcuggguacgaccgucau

SEQ ID NO: 1754696 - RNA, 19 nt, Artificial Sequence
  Description of Artificial Sequence: Synthetic oligonucleotide
cgccagcuuccagcgccau

SEQ ID NO: 1754697 - RNA, 19 nt, Artificial Sequence
  Description of Artificial Sequence: Synthetic oligonucleotide
ucuuccauaacuuauaaac

SEQ ID NO: 1754698 - RNA, 19 nt, Artificial Sequence
  Description of Artificial Sequence: Synthetic oligonucleotide
aguuacugcucacagagcc

SEQ ID NO: 1754699 - RNA, 19 nt, Artificial Sequence
  Description of Artificial Sequence: Synthetic oligonucleotide
uuuguugacuguaaguuug

SEQ ID NO: 1754700 - RNA, 19 nt, Artificial Sequence
  Description of Artificial Sequence: Synthetic oligonucleotide
aaacaugauuucuauggag

SEQ ID NO: 1754701 - RNA, 19 nt, Artificial Sequence
  Description of Artificial Sequence: Synthetic oligonucleotide
aaauuccagaacucccucc

SEQ ID NO: 1754702 - RNA, 19 nt, Artificial Sequence
  Description of Artificial Sequence: Synthetic oligonucleotide
aguucacgaacuuugacug

SEQ ID NO: 1754703 - RNA, 19 nt, Artificial Sequence
  Description of Artificial Sequence: Synthetic oligonucleotide
guauuucccagcuagagac

SEQ ID NO: 1754704 - RNA, 19 nt, Artificial Sequence
  Description of Artificial Sequence: Synthetic oligonucleotide
gagauagugggccacgagg

SEQ ID NO: 1754705 - RNA, 19 nt, Artificial Sequence
  Description of Artificial Sequence: Synthetic oligonucleotide
uuugaagaggaaguuagcc

SEQ ID NO: 1754706 - RNA, 19 nt, Artificial Sequence
  Description of Artificial Sequence: Synthetic oligonucleotide
auaacuuauaaacaugauu

SEQ ID NO: 1754707 - RNA, 19 nt, Artificial Sequence
  Description of Artificial Sequence: Synthetic oligonucleotide
uguucaacguguauuuccc

SEQ ID NO: 1754708 - RNA, 19 nt, Artificial Sequence
  Description of Artificial Sequence: Synthetic oligonucleotide
acaugauuucuauggaggg

SEQ ID NO: 1754709 - RNA, 19 nt, Artificial Sequence
  Description of Artificial Sequence: Synthetic oligonucleotide
ugugguaguacguugcgug

SEQ ID NO: 1754710 - RNA, 19 nt, Artificial Sequence
  Description of Artificial Sequence: Synthetic oligonucleotide
uccauaacuuauaaacaug

SEQ ID NO: 1754711 - RNA, 19 nt, Artificial Sequence
  Description of Artificial Sequence: Synthetic oligonucleotide
uuacucaacccuuuguuga

SEQ ID NO: 1754712 - RNA, 19 nt, Artificial Sequence
  Description of Artificial Sequence: Synthetic oligonucleotide
guugacuguaaguuugacg

SEQ ID NO: 1754713 - RNA, 19 nt, Artificial Sequence
  Description of Artificial Sequence: Synthetic oligonucleotide
uaaacaugauuucuaugga

SEQ ID NO: 1754714 - RNA, 19 nt, Artificial Sequence
  Description of Artificial Sequence: Synthetic oligonucleotide
ugugcauugaggcugccac

SEQ ID NO: 1754715 - RNA, 19 nt, Artificial Sequence
  Description of Artificial Sequence: Synthetic oligonucleotide
uuugugguaguacguugcg

SEQ ID NO: 1754716 - RNA, 19 nt, Artificial Sequence
  Description of Artificial Sequence: Synthetic oligonucleotide
uucaacguguauuucccag

SEQ ID NO: 1754717 - RNA, 19 nt, Artificial Sequence
  Description of Artificial Sequence: Synthetic oligonucleotide
ucuaccagggcgcucauaa

SEQ ID NO: 1754718 - RNA, 19 nt, Artificial Sequence
  Description of Artificial Sequence: Synthetic oligonucleotide
uacguugcgugcaugcccg

SEQ ID NO: 1754719 - RNA, 19 nt, Artificial Sequence
  Description of Artificial Sequence: Synthetic oligonucleotide
uaauuggacuccccaauug

SEQ ID NO: 1754720 - RNA, 19 nt, Artificial Sequence
  Description of Artificial Sequence: Synthetic oligonucleotide
gaacuuauucuugcggugg

SEQ ID NO: 1754721 - RNA, 19 nt, Artificial Sequence
  Description of Artificial Sequence: Synthetic oligonucleotide
acgucuuucgucccugagc

SEQ ID NO: 1754722 - RNA, 19 nt, Artificial Sequence
  Description of Artificial Sequence: Synthetic oligonucleotide
ugccaguucacgaacuuug

SEQ ID NO: 1754723 - RNA, 19 nt, Artificial Sequence
  Description of Artificial Sequence: Synthetic oligonucleotide
acuuauaaacaugauuucu

SEQ ID NO: 1754724 - RNA, 19 nt, Artificial Sequence
  Description of Artificial Sequence: Synthetic oligonucleotide
acauacgugaccccaaagu

SEQ ID NO: 1754725 - RNA, 19 nt, Artificial Sequence
  Description of Artificial Sequence: Synthetic oligonucleotide
agggcgacagggcucagcc

SEQ ID NO: 1754726 - RNA, 19 nt, Artificial Sequence
  Description of Artificial Sequence: Synthetic oligonucleotide
gaugaucugugcauugagg

SEQ ID NO: 1754727 - RNA, 19 nt, Artificial Sequence
  Description of Artificial Sequence: Synthetic oligonucleotide
uguccagccaccucuacca

SEQ ID NO: 1754728 - RNA, 19 nt, Artificial Sequence
  Description of Artificial Sequence: Synthetic oligonucleotide
cauacgugaccccaaagug

SEQ ID NO: 1754729 - RNA, 19 nt, Artificial Sequence
  Description of Artificial Sequence: Synthetic oligonucleotide
ucgagcaugaggugggucc

SEQ ID NO: 1754730 - RNA, 19 nt, Artificial Sequence
  Description of Artificial Sequence: Synthetic oligonucleotide
agagacaugacagugcccu

SEQ ID NO: 1754731 - RNA, 19 nt, Artificial Sequence
  Description of Artificial Sequence: Synthetic oligonucleotide
aggaacuuauucuugcggu

SEQ ID NO: 1754732 - RNA, 19 nt, Artificial Sequence
  Description of Artificial Sequence: Synthetic oligonucleotide
guuacucaacccuuuguug

SEQ ID NO: 1754733 - RNA, 19 nt, Artificial Sequence
  Description of Artificial Sequence: Synthetic oligonucleotide
aguuugacgcccuccaucu

SEQ ID NO: 1754734 - RNA, 19 nt, Artificial Sequence
  Description of Artificial Sequence: Synthetic oligonucleotide
uacgugaccccaaaguggu

SEQ ID NO: 1754735 - RNA, 19 nt, Artificial Sequence
  Description of Artificial Sequence: Synthetic oligonucleotide
ucaacguguauuucccagc

SEQ ID NO: 1754736 - RNA, 19 nt, Artificial Sequence
  Description of Artificial Sequence: Synthetic oligonucleotide
cacgucacgucuuucgucc

SEQ ID NO: 1754737 - RNA, 19 nt, Artificial Sequence
  Description of Artificial Sequence: Synthetic oligonucleotide
aguuguucaacguguauuu

SEQ ID NO: 1754738 - RNA, 19 nt, Artificial Sequence
  Description of Artificial Sequence: Synthetic oligonucleotide
aaccgagugcccuucaaau

SEQ ID NO: 1754739 - RNA, 19 nt, Artificial Sequence
  Description of Artificial Sequence: Synthetic oligonucleotide
cuuccauaacuuauaaaca

SEQ ID NO: 1754740 - RNA, 19 nt, Artificial Sequence
  Description of Artificial Sequence: Synthetic oligonucleotide
uucguccccacauacguga

SEQ ID NO: 1754741 - RNA, 19 nt, Artificial Sequence
  Description of Artificial Sequence: Synthetic oligonucleotide
augauuucuauggaggggu

SEQ ID NO: 1754742 - RNA, 19 nt, Artificial Sequence
  Description of Artificial Sequence: Synthetic oligonucleotide
gaacucgacgcccaccugc

SEQ ID NO: 1754743 - RNA, 19 nt, Artificial Sequence
  Description of Artificial Sequence: Synthetic oligonucleotide
gaaagugacgggcggccgg

SEQ ID NO: 1754744 - RNA, 19 nt, Artificial Sequence
  Description of Artificial Sequence: Synthetic oligonucleotide
ccuuugaagaggaaguuag

SEQ ID NO: 1754745 - RNA, 19 nt, Artificial Sequence
  Description of Artificial Sequence: Synthetic oligonucleotide
ucuggguugccuaggguga

SEQ ID NO: 1754746 - RNA, 19 nt, Artificial Sequence
  Description of Artificial Sequence: Synthetic oligonucleotide
gauuucuauggaggggugg

SEQ ID NO: 1754747 - RNA, 19 nt, Artificial Sequence
  Description of Artificial Sequence: Synthetic oligonucleotide
auacgugaccccaaagugg

SEQ ID NO: 1754748 - RNA, 19 nt, Artificial Sequence
  Description of Artificial Sequence: Synthetic oligonucleotide
uaaacgagcucuccuccca

SEQ ID NO: 1754749 - RNA, 19 nt, Artificial Sequence
  Description of Artificial Sequence: Synthetic oligonucleotide
aacuuauucuugcgguggu

SEQ ID NO: 1754750 - RNA, 19 nt, Artificial Sequence
  Description of Artificial Sequence: Synthetic oligonucleotide
caugauuucuauggagggg

SEQ ID NO: 1754751 - RNA, 19 nt, Artificial Sequence
  Description of Artificial Sequence: Synthetic oligonucleotide
cuuugaagaggaaguuagc

SEQ ID NO: 1754752 - RNA, 19 nt, Artificial Sequence
  Description of Artificial Sequence: Synthetic oligonucleotide
gaaguuagccuugggcagg

SEQ ID NO: 1754753 - RNA, 19 nt, Artificial Sequence
  Description of Artificial Sequence: Synthetic oligonucleotide
ucuuucgucccugagccug

SEQ ID NO: 1754754 - RNA, 19 nt, Artificial Sequence
  Description of Artificial Sequence: Synthetic oligonucleotide
cuuccgguggcacuccucg

SEQ ID NO: 1754755 - RNA, 19 nt, Artificial Sequence
  Description of Artificial Sequence: Synthetic oligonucleotide
uaguacguugcgugcaugc

SEQ ID NO: 1754756 - RNA, 19 nt, Artificial Sequence
  Description of Artificial Sequence: Synthetic oligonucleotide
uuucuguaaaaugucccgu

SEQ ID NO: 1754757 - RNA, 19 nt, Artificial Sequence
  Description of Artificial Sequence: Synthetic oligonucleotide
guuagccuugggcaggucc

SEQ ID NO: 1754758 - RNA, 19 nt, Artificial Sequence
  Description of Artificial Sequence: Synthetic oligonucleotide
uucccagcuagagacauga

SEQ ID NO: 1754759 - RNA, 19 nt, Artificial Sequence
  Description of Artificial Sequence: Synthetic oligonucleotide
caucugaacuggaaacagc

SEQ ID NO: 1754760 - RNA, 19 nt, Artificial Sequence
  Description of Artificial Sequence: Synthetic oligonucleotide
agcucuuugcacuuccggu

SEQ ID NO: 1754761 - RNA, 19 nt, Artificial Sequence
  Description of Artificial Sequence: Synthetic oligonucleotide
caccaagacaucuggguug

SEQ ID NO: 1754762 - RNA, 19 nt, Artificial Sequence
  Description of Artificial Sequence: Synthetic oligonucleotide
uugcggugguucaggaagg

SEQ ID NO: 1754763 - RNA, 19 nt, Artificial Sequence
  Description of Artificial Sequence: Synthetic oligonucleotide
aaagugacgggcggccggg

SEQ ID NO: 1754764 - RNA, 19 nt, Artificial Sequence
  Description of Artificial Sequence: Synthetic oligonucleotide
ugugaagucggagccccgg

SEQ ID NO: 1754765 - RNA, 19 nt, Artificial Sequence
  Description of Artificial Sequence: Synthetic oligonucleotide
uuguugacuguaaguuuga

SEQ ID NO: 1754766 - RNA, 19 nt, Artificial Sequence
  Description of Artificial Sequence: Synthetic oligonucleotide
agcuagagacaugacagug

SEQ ID NO: 1754767 - RNA, 19 nt, Artificial Sequence
  Description of Artificial Sequence: Synthetic oligonucleotide
ugauuucuauggaggggug

SEQ ID NO: 1754768 - RNA, 19 nt, Artificial Sequence
  Description of Artificial Sequence: Synthetic oligonucleotide
ugaacccaccaagacaucu

SEQ ID NO: 1754769 - RNA, 19 nt, Artificial Sequence
  Description of Artificial Sequence: Synthetic oligonucleotide
ugaacuggaaacagcucuu

SEQ ID NO: 1754770 - RNA, 19 nt, Artificial Sequence
  Description of Artificial Sequence: Synthetic oligonucleotide
auagugggccacgaggauc

SEQ ID NO: 1754771 - RNA, 19 nt, Artificial Sequence
  Description of Artificial Sequence: Synthetic oligonucleotide
uagggugacagcagcugug

SEQ ID NO: 1754772 - RNA, 19 nt, Artificial Sequence
  Description of Artificial Sequence: Synthetic oligonucleotide
gaagucggagccccgguac

SEQ ID NO: 1754773 - RNA, 19 nt, Artificial Sequence
  Description of Artificial Sequence: Synthetic oligonucleotide
agggacgucacgucacguc

SEQ ID NO: 1754774 - RNA, 19 nt, Artificial Sequence
  Description of Artificial Sequence: Synthetic oligonucleotide
acagcagcugugaagucgg

SEQ ID NO: 1754775 - RNA, 19 nt, Artificial Sequence
  Description of Artificial Sequence: Synthetic oligonucleotide
gaaggaggcacuggugucc

SEQ ID NO: 1754776 - RNA, 19 nt, Artificial Sequence
  Description of Artificial Sequence: Synthetic oligonucleotide
ucugaacuggaaacagcuc

SEQ ID NO: 1754777 - RNA, 19 nt, Artificial Sequence
  Description of Artificial Sequence: Synthetic oligonucleotide
cacuccucgaacgugcccg

SEQ ID NO: 1754778 - RNA, 19 nt, Artificial Sequence
  Description of Artificial Sequence: Synthetic oligonucleotide
guacguugcgugcaugccc

SEQ ID NO: 1754779 - RNA, 19 nt, Artificial Sequence
  Description of Artificial Sequence: Synthetic oligonucleotide
uggcacuccucgaacgugc

SEQ ID NO: 1754780 - RNA, 19 nt, Artificial Sequence
  Description of Artificial Sequence: Synthetic oligonucleotide
uacucaacccuuuguugac

SEQ ID NO: 1754781 - RNA, 19 nt, Artificial Sequence
  Description of Artificial Sequence: Synthetic oligonucleotide
aggacagggacgucacguc

SEQ ID NO: 1754782 - RNA, 19 nt, Artificial Sequence
  Description of Artificial Sequence: Synthetic oligonucleotide
gaggggaaagugacgggcg

SEQ ID NO: 1754783 - RNA, 19 nt, Artificial Sequence
  Description of Artificial Sequence: Synthetic oligonucleotide
aggggaaagugacgggcgg

SEQ ID NO: 1754784 - RNA, 19 nt, Artificial Sequence
  Description of Artificial Sequence: Synthetic oligonucleotide
ugguaauuggacuccccaa

SEQ ID NO: 1754785 - RNA, 19 nt, Artificial Sequence
  Description of Artificial Sequence: Synthetic oligonucleotide
acgagcucuccucccaggg

SEQ ID NO: 1754786 - RNA, 19 nt, Artificial Sequence
  Description of Artificial Sequence: Synthetic oligonucleotide
ucagccgauggugaggcca

SEQ ID NO: 1754787 - RNA, 19 nt, Artificial Sequence
  Description of Artificial Sequence: Synthetic oligonucleotide
uaaccgagugcccuucaaa

SEQ ID NO: 1754788 - RNA, 19 nt, Artificial Sequence
  Description of Artificial Sequence: Synthetic oligonucleotide
aacgugcccggguugggca

SEQ ID NO: 1754789 - RNA, 19 nt, Artificial Sequence
  Description of Artificial Sequence: Synthetic oligonucleotide
cucaacccuuuguugacug

SEQ ID NO: 1754790 - RNA, 19 nt, Artificial Sequence
  Description of Artificial Sequence: Synthetic oligonucleotide
guacuccccauccaccugc

SEQ ID NO: 1754791 - RNA, 19 nt, Artificial Sequence
  Description of Artificial Sequence: Synthetic oligonucleotide
aaggcgcacagggacagug

SEQ ID NO: 1754792 - RNA, 19 nt, Artificial Sequence
  Description of Artificial Sequence: Synthetic oligonucleotide
ucgcccaccagcacgggga

SEQ ID NO: 1754793 - RNA, 19 nt, Artificial Sequence
  Description of Artificial Sequence: Synthetic oligonucleotide
caaauuccagaacucccuc

SEQ ID NO: 1754794 - RNA, 19 nt, Artificial Sequence
  Description of Artificial Sequence: Synthetic oligonucleotide
acagggacgucacgucacg

SEQ ID NO: 1754795 - RNA, 19 nt, Artificial Sequence
  Description of Artificial Sequence: Synthetic oligonucleotide
agcgucacuguggccaacc

SEQ ID NO: 1754796 - RNA, 19 nt, Artificial Sequence
  Description of Artificial Sequence: Synthetic oligonucleotide
ucgaacgugcccggguugg

SEQ ID NO: 1754797 - RNA, 19 nt, Artificial Sequence
  Description of Artificial Sequence: Synthetic oligonucleotide
ggaacuuauucuugcggug

SEQ ID NO: 1754798 - RNA, 19 nt, Artificial Sequence
  Description of Artificial Sequence: Synthetic oligonucleotide
gaaccgguuacucaacccu

SEQ ID NO: 1754799 - RNA, 19 nt, Artificial Sequence
  Description of Artificial Sequence: Synthetic oligonucleotide
gucaccuggaaccgguuac

SEQ ID NO: 1754800 - RNA, 19 nt, Artificial Sequence
  Description of Artificial Sequence: Synthetic oligonucleotide
uagagacaugacagugccc

SEQ ID NO: 1754801 - RNA, 19 nt, Artificial Sequence
  Description of Artificial Sequence: Synthetic oligonucleotide
aaugucccguucuuccaua

SEQ ID NO: 1754802 - RNA, 19 nt, Artificial Sequence
  Description of Artificial Sequence: Synthetic oligonucleotide
cugaacuggaaacagcucu

SEQ ID NO: 1754803 - RNA, 19 nt, Artificial Sequence
  Description of Artificial Sequence: Synthetic oligonucleotide
ggaugaucugugcauugag

SEQ ID NO: 1754804 - RNA, 19 nt, Artificial Sequence
  Description of Artificial Sequence: Synthetic oligonucleotide
uggucugcagaggaagggc

SEQ ID NO: 1754805 - RNA, 19 nt, Artificial Sequence
  Description of Artificial Sequence: Synthetic oligonucleotide
agggcaacuguguggguca

SEQ ID NO: 1754806 - RNA, 19 nt, Artificial Sequence
  Description of Artificial Sequence: Synthetic oligonucleotide
gugguaguacguugcgugc

SEQ ID NO: 1754807 - RNA, 19 nt, Artificial Sequence
  Description of Artificial Sequence: Synthetic oligonucleotide
uccagcguggcgcccacga

SEQ ID NO: 1754808 - RNA, 19 nt, Artificial Sequence
  Description of Artificial Sequence: Synthetic oligonucleotide
cuggauggccaucuuggac

SEQ ID NO: 1754809 - RNA, 19 nt, Artificial Sequence
  Description of Artificial Sequence: Synthetic oligonucleotide
auuggacuccccaauugug

SEQ ID NO: 1754810 - RNA, 19 nt, Artificial Sequence
  Description of Artificial Sequence: Synthetic oligonucleotide
ucgacgcccaccugcagcu

SEQ ID NO: 1754811 - RNA, 19 nt, Artificial Sequence
  Description of Artificial Sequence: Synthetic oligonucleotide
agcgguggucugcagagga

SEQ ID NO: 1754812 - RNA, 19 nt, Artificial Sequence
  Description of Artificial Sequence: Synthetic oligonucleotide
uguccccuggcgcugggga

SEQ ID NO: 1754813 - RNA, 19 nt, Artificial Sequence
  Description of Artificial Sequence: Synthetic oligonucleotide
ucccguucuuccauaacuu

SEQ ID NO: 1754814 - RNA, 19 nt, Artificial Sequence
  Description of Artificial Sequence: Synthetic oligonucleotide
guucacgaacuuugacugc

SEQ ID NO: 1754815 - RNA, 19 nt, Artificial Sequence
  Description of Artificial Sequence: Synthetic oligonucleotide
gaacccaccaagacaucug

SEQ ID NO: 1754816 - RNA, 19 nt, Artificial Sequence
  Description of Artificial Sequence: Synthetic oligonucleotide
cuguccagccaccucuacc

SEQ ID NO: 1754817 - RNA, 19 nt, Artificial Sequence
  Description of Artificial Sequence: Synthetic oligonucleotide
uaaguuugacgcccuccau

SEQ ID NO: 1754818 - RNA, 19 nt, Artificial Sequence
  Description of Artificial Sequence: Synthetic oligonucleotide
cacgaggaucccugaaccc

SEQ ID NO: 1754819 - RNA, 19 nt, Artificial Sequence
  Description of Artificial Sequence: Synthetic oligonucleotide
guggccaaccaguuguuca

SEQ ID NO: 1754820 - RNA, 19 nt, Artificial Sequence
  Description of Artificial Sequence: Synthetic oligonucleotide
cugauggaugaucugugca

SEQ ID NO: 1754821 - RNA, 19 nt, Artificial Sequence
  Description of Artificial Sequence: Synthetic oligonucleotide
cucccagggccagacaugg

SEQ ID NO: 1754822 - RNA, 19 nt, Artificial Sequence
  Description of Artificial Sequence: Synthetic oligonucleotide
cucgacgcccaccugcagc

SEQ ID NO: 1754823 - RNA, 19 nt, Artificial Sequence
  Description of Artificial Sequence: Synthetic oligonucleotide
aagucggagccccgguacu

SEQ ID NO: 1754824 - RNA, 19 nt, Artificial Sequence
  Description of Artificial Sequence: Synthetic oligonucleotide
acgucacgucuuucguccc

SEQ ID NO: 1754825 - RNA, 19 nt, Artificial Sequence
  Description of Artificial Sequence: Synthetic oligonucleotide
uggccaaccaguuguucaa

SEQ ID NO: 1754826 - RNA, 19 nt, Artificial Sequence
  Description of Artificial Sequence: Synthetic oligonucleotide
caguucacgaacuuugacu

SEQ ID NO: 1754827 - RNA, 19 nt, Artificial Sequence
  Description of Artificial Sequence: Synthetic oligonucleotide
guggucugcagaggaaggg

SEQ ID NO: 1754828 - RNA, 19 nt, Artificial Sequence
  Description of Artificial Sequence: Synthetic oligonucleotide
gauccucgagcaugaggug

SEQ ID NO: 1754829 - RNA, 19 nt, Artificial Sequence
  Description of Artificial Sequence: Synthetic oligonucleotide
ugguaguacguugcgugca

SEQ ID NO: 1754830 - RNA, 19 nt, Artificial Sequence
  Description of Artificial Sequence: Synthetic oligonucleotide
ggacucagcugcuucgucc

SEQ ID NO: 1754831 - RNA, 19 nt, Artificial Sequence
  Description of Artificial Sequence: Synthetic oligonucleotide
ucacgucacgucuuucguc

SEQ ID NO: 1754832 - RNA, 19 nt, Artificial Sequence
  Description of Artificial Sequence: Synthetic oligonucleotide
ucuggagauagugggccac

SEQ ID NO: 1754833 - RNA, 19 nt, Artificial Sequence
  Description of Artificial Sequence: Synthetic oligonucleotide
cgucuuucgucccugagcc

SEQ ID NO: 1754834 - RNA, 19 nt, Artificial Sequence
  Description of Artificial Sequence: Synthetic oligonucleotide
acgauccaguuacugcuca

SEQ ID NO: 1754835 - RNA, 19 nt, Artificial Sequence
  Description of Artificial Sequence: Synthetic oligonucleotide
agugacgggcggccgggcg

SEQ ID NO: 1754836 - RNA, 19 nt, Artificial Sequence
  Description of Artificial Sequence: Synthetic oligonucleotide
uguugacuguaaguuugac

SEQ ID NO: 1754837 - RNA, 19 nt, Artificial Sequence
  Description of Artificial Sequence: Synthetic oligonucleotide
acgaggaucccugaaccca

SEQ ID NO: 1754838 - RNA, 19 nt, Artificial Sequence
  Description of Artificial Sequence: Synthetic oligonucleotide
cacauacgugaccccaaag

SEQ ID NO: 1754839 - RNA, 19 nt, Artificial Sequence
  Description of Artificial Sequence: Synthetic oligonucleotide
ugcacuuccgguggcacuc

SEQ ID NO: 1754840 - RNA, 19 nt, Artificial Sequence
  Description of Artificial Sequence: Synthetic oligonucleotide
uuugcacuuccgguggcac

SEQ ID NO: 1754841 - RNA, 19 nt, Artificial Sequence
  Description of Artificial Sequence: Synthetic oligonucleotide
agacauggcgugaugcucu

SEQ ID NO: 1754842 - RNA, 19 nt, Artificial Sequence
  Description of Artificial Sequence: Synthetic oligonucleotide
ugaagucggagccccggua

SEQ ID NO: 1754843 - RNA, 19 nt, Artificial Sequence
  Description of Artificial Sequence: Synthetic oligonucleotide
uccccauccaccugccagu

SEQ ID NO: 1754844 - RNA, 19 nt, Artificial Sequence
  Description of Artificial Sequence: Synthetic oligonucleotide
gcgcucauaaccgagugcc

SEQ ID NO: 1754845 - RNA, 19 nt, Artificial Sequence
  Description of Artificial Sequence: Synthetic oligonucleotide
acaugacagugcccucuuc

SEQ ID NO: 1754846 - RNA, 19 nt, Artificial Sequence
  Description of Artificial Sequence: Synthetic oligonucleotide
ucaacccuuuguugacugu

SEQ ID NO: 1754847 - RNA, 19 nt, Artificial Sequence
  Description of Artificial Sequence: Synthetic oligonucleotide
uuugacugcugggucugga

SEQ ID NO: 1754848 - RNA, 19 nt, Artificial Sequence
  Description of Artificial Sequence: Synthetic oligonucleotide
uccucgaacgugcccgggu

SEQ ID NO: 1754849 - RNA, 19 nt, Artificial Sequence
  Description of Artificial Sequence: Synthetic oligonucleotide
caguuacugcucacagagc

SEQ ID NO: 1754850 - RNA, 19 nt, Artificial Sequence
  Description of Artificial Sequence: Synthetic oligonucleotide
aacguguauuucccagcua

SEQ ID NO: 1754851 - RNA, 19 nt, Artificial Sequence
  Description of Artificial Sequence: Synthetic oligonucleotide
ugucccguucuuccauaac

SEQ ID NO: 1754852 - RNA, 19 nt, Artificial Sequence
  Description of Artificial Sequence: Synthetic oligonucleotide
ccacuguuguccaugucgc

SEQ ID NO: 1754853 - RNA, 19 nt, Artificial Sequence
  Description of Artificial Sequence: Synthetic oligonucleotide
accucuaccagggcgcuca

SEQ ID NO: 1754854 - RNA, 19 nt, Artificial Sequence
  Description of Artificial Sequence: Synthetic oligonucleotide
gagggcaacuguguggguc

SEQ ID NO: 1754855 - RNA, 19 nt, Artificial Sequence
  Description of Artificial Sequence: Synthetic oligonucleotide
cuggcgcuggggauccucg

SEQ ID NO: 1754856 - RNA, 19 nt, Artificial Sequence
  Description of Artificial Sequence: Synthetic oligonucleotide
gcuagagacaugacagugc

SEQ ID NO: 1754857 - RNA, 19 nt, Artificial Sequence
  Description of Artificial Sequence: Synthetic oligonucleotide
agcugauggaugaucugug

SEQ ID NO: 1754858 - RNA, 19 nt, Artificial Sequence
  Description of Artificial Sequence: Synthetic oligonucleotide
cuucguccccacauacgug

SEQ ID NO: 1754859 - RNA, 19 nt, Artificial Sequence
  Description of Artificial Sequence: Synthetic oligonucleotide
gacagggacgucacgucac

SEQ ID NO: 1754860 - RNA, 19 nt, Artificial Sequence
  Description of Artificial Sequence: Synthetic oligonucleotide
gacgcccuccaucugaacu

SEQ ID NO: 1754861 - RNA, 19 nt, Artificial Sequence
  Description of Artificial Sequence: Synthetic oligonucleotide
uugugguaguacguugcgu

SEQ ID NO: 1754862 - RNA, 19 nt, Artificial Sequence
  Description of Artificial Sequence: Synthetic oligonucleotide
cccacgauccaguuacugc

SEQ ID NO: 1754863 - RNA, 19 nt, Artificial Sequence
  Description of Artificial Sequence: Synthetic oligonucleotide
uacccgaaggaggcacugg

SEQ ID NO: 1754864 - RNA, 19 nt, Artificial Sequence
  Description of Artificial Sequence: Synthetic oligonucleotide
uugcgugcaugcccgccug

SEQ ID NO: 1754865 - RNA, 19 nt, Artificial Sequence
  Description of Artificial Sequence: Synthetic oligonucleotide
ucuugcggugguucaggaa

SEQ ID NO: 1754866 - RNA, 19 nt, Artificial Sequence
  Description of Artificial Sequence: Synthetic oligonucleotide
auaaccgagugcccuucaa

SEQ ID NO: 1754867 - RNA, 19 nt, Artificial Sequence
  Description of Artificial Sequence: Synthetic oligonucleotide
gcgcccacgauccaguuac

SEQ ID NO: 1754868 - RNA, 19 nt, Artificial Sequence
  Description of Artificial Sequence: Synthetic oligonucleotide
aacucgacgcccaccugca

SEQ ID NO: 1754869 - RNA, 19 nt, Artificial Sequence
  Description of Artificial Sequence: Synthetic oligonucleotide
cacuguuguccaugucgcc

SEQ ID NO: 1754870 - RNA, 19 nt, Artificial Sequence
  Description of Artificial Sequence: Synthetic oligonucleotide
cuggagauagugggccacg

SEQ ID NO: 1754871 - RNA, 19 nt, Artificial Sequence
  Description of Artificial Sequence: Synthetic oligonucleotide
ucugccgcccucgggagga

SEQ ID NO: 1754872 - RNA, 19 nt, Artificial Sequence
  Description of Artificial Sequence: Synthetic oligonucleotide
gucccguucuuccauaacu

SEQ ID NO: 1754873 - RNA, 19 nt, Artificial Sequence
  Description of Artificial Sequence: Synthetic oligonucleotide
gcuggccucgaacucgacg

SEQ ID NO: 1754874 - RNA, 19 nt, Artificial Sequence
  Description of Artificial Sequence: Synthetic oligonucleotide
aaagccgcacaggaacuua

SEQ ID NO: 1754875 - RNA, 19 nt, Artificial Sequence
  Description of Artificial Sequence: Synthetic oligonucleotide
ucauaaccgagugcccuuc

SEQ ID NO: 1754876 - RNA, 19 nt, Artificial Sequence
  Description of Artificial Sequence: Synthetic oligonucleotide
ccacgaggaucccugaacc

SEQ ID NO: 1754877 - RNA, 19 nt, Artificial Sequence
  Description of Artificial Sequence: Synthetic oligonucleotide
aacccuuuguugacuguaa

SEQ ID NO: 1754878 - RNA, 19 nt, Artificial Sequence
  Description of Artificial Sequence: Synthetic oligonucleotide
ggauccucgagcaugaggu

SEQ ID NO: 1754879 - RNA, 19 nt, Artificial Sequence
  Description of Artificial Sequence: Synthetic oligonucleotide
uggccucgaacucgacgcc

SEQ ID NO: 1754880 - RNA, 19 nt, Artificial Sequence
  Description of Artificial Sequence: Synthetic oligonucleotide
guucaacguguauuuccca

SEQ ID NO: 1754881 - RNA, 19 nt, Artificial Sequence
  Description of Artificial Sequence: Synthetic oligonucleotide
ccgagugcccuucaaauuc

SEQ ID NO: 1754882 - RNA, 19 nt, Artificial Sequence
  Description of Artificial Sequence: Synthetic oligonucleotide
ggucuggauggccaucuug

SEQ ID NO: 1754883 - RNA, 19 nt, Artificial Sequence
  Description of Artificial Sequence: Synthetic oligonucleotide
ggagauagugggccacgag

SEQ ID NO: 1754884 - RNA, 19 nt, Artificial Sequence
  Description of Artificial Sequence: Synthetic oligonucleotide
accgagugcccuucaaauu

SEQ ID NO: 1754885 - RNA, 19 nt, Artificial Sequence
  Description of Artificial Sequence: Synthetic oligonucleotide
aagugacgggcggccgggc

SEQ ID NO: 1754886 - RNA, 19 nt, Artificial Sequence
  Description of Artificial Sequence: Synthetic oligonucleotide
cuggaaccgguuacucaac

SEQ ID NO: 1754887 - RNA, 19 nt, Artificial Sequence
  Description of Artificial Sequence: Synthetic oligonucleotide
uggagauagugggccacga

SEQ ID NO: 1754888 - RNA, 19 nt, Artificial Sequence
  Description of Artificial Sequence: Synthetic oligonucleotide
ggcgacagggcucagccga

SEQ ID NO: 1754889 - RNA, 19 nt, Artificial Sequence
  Description of Artificial Sequence: Synthetic oligonucleotide
cauaacuuauaaacaugau

SEQ ID NO: 1754890 - RNA, 19 nt, Artificial Sequence
  Description of Artificial Sequence: Synthetic oligonucleotide
guuguucaacguguauuuc

SEQ ID NO: 1754891 - RNA, 19 nt, Artificial Sequence
  Description of Artificial Sequence: Synthetic oligonucleotide
gguggucugcagaggaagg

SEQ ID NO: 1754892 - RNA, 19 nt, Artificial Sequence
  Description of Artificial Sequence: Synthetic oligonucleotide
gacuccccaauugugccga

SEQ ID NO: 1754893 - RNA, 19 nt, Artificial Sequence
  Description of Artificial Sequence: Synthetic oligonucleotide
ccagcgguggucugcagag

SEQ ID NO: 1754894 - RNA, 19 nt, Artificial Sequence
  Description of Artificial Sequence: Synthetic oligonucleotide
cacgucuuucgucccugag

SEQ ID NO: 1754895 - RNA, 19 nt, Artificial Sequence
  Description of Artificial Sequence: Synthetic oligonucleotide
gaggacagggacgucacgu

SEQ ID NO: 1754896 - RNA, 19 nt, Artificial Sequence
  Description of Artificial Sequence: Synthetic oligonucleotide
gagggcggcggcccagcgg

SEQ ID NO: 1754897 - RNA, 19 nt, Artificial Sequence
  Description of Artificial Sequence: Synthetic oligonucleotide
aaccgguuacucaacccuu

SEQ ID NO: 1754898 - RNA, 19 nt, Artificial Sequence
  Description of Artificial Sequence: Synthetic oligonucleotide
gugguaaacgagcucuccu

SEQ ID NO: 1754899 - RNA, 19 nt, Artificial Sequence
  Description of Artificial Sequence: Synthetic oligonucleotide
gucgcccaccagcacgggg

SEQ ID NO: 1754900 - RNA, 19 nt, Artificial Sequence
  Description of Artificial Sequence: Synthetic oligonucleotide
cgucacgucacgucuuucg

SEQ ID NO: 1754901 - RNA, 19 nt, Artificial Sequence
  Description of Artificial Sequence: Synthetic oligonucleotide
ugagccuguccagccaccu

SEQ ID NO: 1754902 - RNA, 19 nt, Artificial Sequence
  Description of Artificial Sequence: Synthetic oligonucleotide
ggugguaaacgagcucucc

SEQ ID NO: 1754903 - RNA, 19 nt, Artificial Sequence
  Description of Artificial Sequence: Synthetic oligonucleotide
cacggggaaggccucugug

SEQ ID NO: 1754904 - RNA, 19 nt, Artificial Sequence
  Description of Artificial Sequence: Synthetic oligonucleotide
cuuuguugacuguaaguuu

SEQ ID NO: 1754905 - RNA, 19 nt, Artificial Sequence
  Description of Artificial Sequence: Synthetic oligonucleotide
ucacgucuuucgucccuga

SEQ ID NO: 1754906 - RNA, 19 nt, Artificial Sequence
  Description of Artificial Sequence: Synthetic oligonucleotide
acguugcgugcaugcccgc

SEQ ID NO: 1754907 - RNA, 19 nt, Artificial Sequence
  Description of Artificial Sequence: Synthetic oligonucleotide
gguggaggggaaagugacg

SEQ ID NO: 1754908 - RNA, 19 nt, Artificial Sequence
  Description of Artificial Sequence: Synthetic oligonucleotide
gguaauuggacuccccaau

SEQ ID NO: 1754909 - RNA, 19 nt, Artificial Sequence
  Description of Artificial Sequence: Synthetic oligonucleotide
ccgagggcaacuguguggg

SEQ ID NO: 1754910 - RNA, 19 nt, Artificial Sequence
  Description of Artificial Sequence: Synthetic oligonucleotide
cagcguggcgcccacgauc

SEQ ID NO: 1754911 - RNA, 19 nt, Artificial Sequence
  Description of Artificial Sequence: Synthetic oligonucleotide
cucgaacgugcccggguug

SEQ ID NO: 1754912 - RNA, 19 nt, Artificial Sequence
  Description of Artificial Sequence: Synthetic oligonucleotide
ugggacucagcugcuucgu

SEQ ID NO: 1754913 - RNA, 19 nt, Artificial Sequence
  Description of Artificial Sequence: Synthetic oligonucleotide
guaauuggacuccccaauu

SEQ ID NO: 1754914 - RNA, 19 nt, Artificial Sequence
  Description of Artificial Sequence: Synthetic oligonucleotide
guuugacgcccuccaucug

SEQ ID NO: 1754915 - RNA, 19 nt, Artificial Sequence
  Description of Artificial Sequence: Synthetic oligonucleotide
caacguguauuucccagcu

SEQ ID NO: 1754916 - RNA, 19 nt, Artificial Sequence
  Description of Artificial Sequence: Synthetic oligonucleotide
gucacgucuuucgucccug

SEQ ID NO: 1754917 - RNA, 19 nt, Artificial Sequence
  Description of Artificial Sequence: Synthetic oligonucleotide
augucccguucuuccauaa

SEQ ID NO: 1754918 - RNA, 19 nt, Artificial Sequence
  Description of Artificial Sequence: Synthetic oligonucleotide
aagccgcacaggaacuuau

SEQ ID NO: 1754919 - RNA, 19 nt, Artificial Sequence
  Description of Artificial Sequence: Synthetic oligonucleotide
ugagguggguccccuccuu

SEQ ID NO: 1754920 - RNA, 19 nt, Artificial Sequence
  Description of Artificial Sequence: Synthetic oligonucleotide
gggaaagugacgggcggcc

SEQ ID NO: 1754921 - RNA, 19 nt, Artificial Sequence
  Description of Artificial Sequence: Synthetic oligonucleotide
ccuggaaccgguuacucaa

SEQ ID NO: 1754922 - RNA, 19 nt, Artificial Sequence
  Description of Artificial Sequence: Synthetic oligonucleotide
uccccacauacgugacccc

SEQ ID NO: 1754923 - RNA, 19 nt, Artificial Sequence
  Description of Artificial Sequence: Synthetic oligonucleotide
gguuacucaacccuuuguu

SEQ ID NO: 1754924 - RNA, 19 nt, Artificial Sequence
  Description of Artificial Sequence: Synthetic oligonucleotide
gugacgggcggccgggcgc

SEQ ID NO: 1754925 - RNA, 19 nt, Artificial Sequence
  Description of Artificial Sequence: Synthetic oligonucleotide
guaguacguugcgugcaug

SEQ ID NO: 1754926 - RNA, 19 nt, Artificial Sequence
  Description of Artificial Sequence: Synthetic oligonucleotide
ggaaagugacgggcggccg

SEQ ID NO: 1754927 - RNA, 19 nt, Artificial Sequence
  Description of Artificial Sequence: Synthetic oligonucleotide
cuuugacugcugggucugg

SEQ ID NO: 1754928 - RNA, 19 nt, Artificial Sequence
  Description of Artificial Sequence: Synthetic oligonucleotide
ccaguucacgaacuuugac

SEQ ID NO: 1754929 - RNA, 19 nt, Artificial Sequence
  Description of Artificial Sequence: Synthetic oligonucleotide
ggcgcucauaaccgagugc

SEQ ID NO: 1754930 - RNA, 19 nt, Artificial Sequence
  Description of Artificial Sequence: Synthetic oligonucleotide
gauggaugaucugugcauu

SEQ ID NO: 1754931 - RNA, 19 nt, Artificial Sequence
  Description of Artificial Sequence: Synthetic oligonucleotide
cuguaaguuugacgcccuc

SEQ ID NO: 1754932 - RNA, 19 nt, Artificial Sequence
  Description of Artificial Sequence: Synthetic oligonucleotide
guacccgaaggaggcacug

SEQ ID NO: 1754933 - RNA, 19 nt, Artificial Sequence
  Description of Artificial Sequence: Synthetic oligonucleotide
gccgcacaggaacuuauuc

SEQ ID NO: 1754934 - RNA, 19 nt, Artificial Sequence
  Description of Artificial Sequence: Synthetic oligonucleotide
guggcacuccucgaacgug

SEQ ID NO: 1754935 - RNA, 19 nt, Artificial Sequence
  Description of Artificial Sequence: Synthetic oligonucleotide
gucccugagccuguccagc

SEQ ID NO: 1754936 - RNA, 19 nt, Artificial Sequence
  Description of Artificial Sequence: Synthetic oligonucleotide
cuccccaauugugccgagg

SEQ ID NO: 1754937 - RNA, 19 nt, Artificial Sequence
  Description of Artificial Sequence: Synthetic oligonucleotide
cccagcuagagacaugaca

SEQ ID NO: 1754938 - RNA, 19 nt, Artificial Sequence
  Description of Artificial Sequence: Synthetic oligonucleotide
gcuucguccccacauacgu

SEQ ID NO: 1754939 - RNA, 19 nt, Artificial Sequence
  Description of Artificial Sequence: Synthetic oligonucleotide
gcucagccgauggugaggc

SEQ ID NO: 1754940 - RNA, 19 nt, Artificial Sequence
  Description of Artificial Sequence: Synthetic oligonucleotide
caacugugugggucaccug

SEQ ID NO: 1754941 - RNA, 19 nt, Artificial Sequence
  Description of Artificial Sequence: Synthetic oligonucleotide
acucgacgcccaccugcag

SEQ ID NO: 1754942 - RNA, 19 nt, Artificial Sequence
  Description of Artificial Sequence: Synthetic oligonucleotide
ccgccggugguaaacgagc

SEQ ID NO: 1754943 - RNA, 19 nt, Artificial Sequence
  Description of Artificial Sequence: Synthetic oligonucleotide
aggccgccggugguaaacg

SEQ ID NO: 1754944 - RNA, 19 nt, Artificial Sequence
  Description of Artificial Sequence: Synthetic oligonucleotide
uuccgguggcacuccucga

SEQ ID NO: 1754945 - RNA, 19 nt, Artificial Sequence
  Description of Artificial Sequence: Synthetic oligonucleotide
gucacgucacgucuuucgu

SEQ ID NO: 1754946 - RNA, 19 nt, Artificial Sequence
  Description of Artificial Sequence: Synthetic oligonucleotide
acuuauucuugcggugguu

SEQ ID NO: 1754947 - RNA, 19 nt, Artificial Sequence
  Description of Artificial Sequence: Synthetic oligonucleotide
gugggucaccuggaaccgg

SEQ ID NO: 1754948 - RNA, 19 nt, Artificial Sequence
  Description of Artificial Sequence: Synthetic oligonucleotide
gggcgcucauaaccgagug

SEQ ID NO: 1754949 - RNA, 19 nt, Artificial Sequence
  Description of Artificial Sequence: Synthetic oligonucleotide
caauugugccgagggcaac

SEQ ID NO: 1754950 - RNA, 19 nt, Artificial Sequence
  Description of Artificial Sequence: Synthetic oligonucleotide
agggcucagccgaugguga

SEQ ID NO: 1754951 - RNA, 19 nt, Artificial Sequence
  Description of Artificial Sequence: Synthetic oligonucleotide
gagcaugaggugggucccc

SEQ ID NO: 1754952 - RNA, 19 nt, Artificial Sequence
  Description of Artificial Sequence: Synthetic oligonucleotide
ggcgcuggggauccucgag

SEQ ID NO: 1754953 - RNA, 19 nt, Artificial Sequence
  Description of Artificial Sequence: Synthetic oligonucleotide
agcaugagguggguccccu

SEQ ID NO: 1754954 - RNA, 19 nt, Artificial Sequence
  Description of Artificial Sequence: Synthetic oligonucleotide
cauaaccgagugcccuuca

SEQ ID NO: 1754955 - RNA, 19 nt, Artificial Sequence
  Description of Artificial Sequence: Synthetic oligonucleotide
ggguugccuagggugacag

SEQ ID NO: 1754956 - RNA, 19 nt, Artificial Sequence
  Description of Artificial Sequence: Synthetic oligonucleotide
ggugaggccaaagccgcac

SEQ ID NO: 1754957 - RNA, 19 nt, Artificial Sequence
  Description of Artificial Sequence: Synthetic oligonucleotide
ggcucagccgauggugagg

SEQ ID NO: 1754958 - RNA, 19 nt, Artificial Sequence
  Description of Artificial Sequence: Synthetic oligonucleotide
cugaacccaccaagacauc

SEQ ID NO: 1754959 - RNA, 19 nt, Artificial Sequence
  Description of Artificial Sequence: Synthetic oligonucleotide
uggguugccuagggugaca

SEQ ID NO: 1754960 - RNA, 19 nt, Artificial Sequence
  Description of Artificial Sequence: Synthetic oligonucleotide
cgagugcccuucaaauucc

SEQ ID NO: 1754961 - RNA, 19 nt, Artificial Sequence
  Description of Artificial Sequence: Synthetic oligonucleotide
ccaaagugguaauuggacu

SEQ ID NO: 1754962 - RNA, 19 nt, Artificial Sequence
  Description of Artificial Sequence: Synthetic oligonucleotide
cccaauugugccgagggca

SEQ ID NO: 1754963 - RNA, 19 nt, Artificial Sequence
  Description of Artificial Sequence: Synthetic oligonucleotide
guugcgugcaugcccgccu

SEQ ID NO: 1754964 - RNA, 19 nt, Artificial Sequence
  Description of Artificial Sequence: Synthetic oligonucleotide
caacccuuuguugacugua

SEQ ID NO: 1754965 - RNA, 19 nt, Artificial Sequence
  Description of Artificial Sequence: Synthetic oligonucleotide
acuccccaauugugccgag

SEQ ID NO: 1754966 - RNA, 19 nt, Artificial Sequence
  Description of Artificial Sequence: Synthetic oligonucleotide
acgucacgucacgucuuuc

SEQ ID NO: 1754967 - RNA, 19 nt, Artificial Sequence
  Description of Artificial Sequence: Synthetic oligonucleotide
agggacagugucaggggaa

SEQ ID NO: 1754968 - RNA, 19 nt, Artificial Sequence
  Description of Artificial Sequence: Synthetic oligonucleotide
cuuggaccugaggccuggg

SEQ ID NO: 1754969 - RNA, 19 nt, Artificial Sequence
  Description of Artificial Sequence: Synthetic oligonucleotide
ggaagggcgacagggcuca

SEQ ID NO: 1754970 - RNA, 19 nt, Artificial Sequence
  Description of Artificial Sequence: Synthetic oligonucleotide
caggccgccggugguaaac

SEQ ID NO: 1754971 - RNA, 19 nt, Artificial Sequence
  Description of Artificial Sequence: Synthetic oligonucleotide
caguuguucaacguguauu

SEQ ID NO: 1754972 - RNA, 19 nt, Artificial Sequence
  Description of Artificial Sequence: Synthetic oligonucleotide
agggcgcucauaaccgagu

SEQ ID NO: 1754973 - RNA, 19 nt, Artificial Sequence
  Description of Artificial Sequence: Synthetic oligonucleotide
ccgguacuccccauccacc

SEQ ID NO: 1754974 - RNA, 19 nt, Artificial Sequence
  Description of Artificial Sequence: Synthetic oligonucleotide
accugccaguucacgaacu

SEQ ID NO: 1754975 - RNA, 19 nt, Artificial Sequence
  Description of Artificial Sequence: Synthetic oligonucleotide
cucagccgauggugaggcc

SEQ ID NO: 1754976 - RNA, 19 nt, Artificial Sequence
  Description of Artificial Sequence: Synthetic oligonucleotide
cccgguacuccccauccac

SEQ ID NO: 1754977 - RNA, 19 nt, Artificial Sequence
  Description of Artificial Sequence: Synthetic oligonucleotide
cuggguugccuagggugac

SEQ ID NO: 1754978 - RNA, 19 nt, Artificial Sequence
  Description of Artificial Sequence: Synthetic oligonucleotide
gggacgucacgucacgucu

SEQ ID NO: 1754979 - RNA, 19 nt, Artificial Sequence
  Description of Artificial Sequence: Synthetic oligonucleotide
cccugaacccaccaagaca

SEQ ID NO: 1754980 - RNA, 19 nt, Artificial Sequence
  Description of Artificial Sequence: Synthetic oligonucleotide
aguuagccuugggcagguc

SEQ ID NO: 1754981 - RNA, 19 nt, Artificial Sequence
  Description of Artificial Sequence: Synthetic oligonucleotide
cucgagcaugagguggguc

SEQ ID NO: 1754982 - RNA, 19 nt, Artificial Sequence
  Description of Artificial Sequence: Synthetic oligonucleotide
cccagcgucacuguggcca

SEQ ID NO: 1754983 - RNA, 19 nt, Artificial Sequence
  Description of Artificial Sequence: Synthetic oligonucleotide
gacaugacagugcccucuu

SEQ ID NO: 1754984 - RNA, 19 nt, Artificial Sequence
  Description of Artificial Sequence: Synthetic oligonucleotide
ccacgauccaguuacugcu

SEQ ID NO: 1754985 - RNA, 19 nt, Artificial Sequence
  Description of Artificial Sequence: Synthetic oligonucleotide
uccaggccgccggugguaa

SEQ ID NO: 1754986 - RNA, 19 nt, Artificial Sequence
  Description of Artificial Sequence: Synthetic oligonucleotide
gcggugguucaggaaggcg

SEQ ID NO: 1754987 - RNA, 19 nt, Artificial Sequence
  Description of Artificial Sequence: Synthetic oligonucleotide
agggccagacauggcguga

SEQ ID NO: 1754988 - RNA, 19 nt, Artificial Sequence
  Description of Artificial Sequence: Synthetic oligonucleotide
ugacgggcggccgggcgcu

SEQ ID NO: 1754989 - RNA, 19 nt, Artificial Sequence
  Description of Artificial Sequence: Synthetic oligonucleotide
ccuuuguugacuguaaguu

SEQ ID NO: 1754990 - RNA, 19 nt, Artificial Sequence
  Description of Artificial Sequence: Synthetic oligonucleotide
cagcuagagacaugacagu

SEQ ID NO: 1754991 - RNA, 19 nt, Artificial Sequence
  Description of Artificial Sequence: Synthetic oligonucleotide
gcaacugugugggucaccu

SEQ ID NO: 1754992 - RNA, 19 nt, Artificial Sequence
  Description of Artificial Sequence: Synthetic oligonucleotide
accgguuacucaacccuuu

SEQ ID NO: 1754993 - RNA, 19 nt, Artificial Sequence
  Description of Artificial Sequence: Synthetic oligonucleotide
cuccucgaacgugcccggg

SEQ ID NO: 1754994 - RNA, 19 nt, Artificial Sequence
  Description of Artificial Sequence: Synthetic oligonucleotide
ccaauugugccgagggcaa

SEQ ID NO: 1754995 - RNA, 19 nt, Artificial Sequence
  Description of Artificial Sequence: Synthetic oligonucleotide
cucgggaggacagggacgu

SEQ ID NO: 1754996 - RNA, 19 nt, Artificial Sequence
  Description of Artificial Sequence: Synthetic oligonucleotide
gggcgacagggcucagccg

SEQ ID NO: 1754997 - RNA, 19 nt, Artificial Sequence
  Description of Artificial Sequence: Synthetic oligonucleotide
ccgguuacucaacccuuug

SEQ ID NO: 1754998 - RNA, 19 nt, Artificial Sequence
  Description of Artificial Sequence: Synthetic oligonucleotide
gugcauugaggcugccacu

SEQ ID NO: 1754999 - RNA, 19 nt, Artificial Sequence
  Description of Artificial Sequence: Synthetic oligonucleotide
cagccgauggugaggccaa

SEQ ID NO: 1755000 - RNA, 19 nt, Artificial Sequence
  Description of Artificial Sequence: Synthetic oligonucleotide
cccgaaggaggcacuggug

SEQ ID NO: 1755001 - RNA, 19 nt, Artificial Sequence
  Description of Artificial Sequence: Synthetic oligonucleotide
cucauaaccgagugcccuu

SEQ ID NO: 1755002 - RNA, 19 nt, Artificial Sequence
  Description of Artificial Sequence: Synthetic oligonucleotide
gacgucacgucacgucuuu

SEQ ID NO: 1755003 - RNA, 19 nt, Artificial Sequence
  Description of Artificial Sequence: Synthetic oligonucleotide
ccccaauugugccgagggc

SEQ ID NO: 1755004 - RNA, 19 nt, Artificial Sequence
  Description of Artificial Sequence: Synthetic oligonucleotide
gguggcacuccucgaacgu

SEQ ID NO: 1755005 - RNA, 19 nt, Artificial Sequence
  Description of Artificial Sequence: Synthetic oligonucleotide
cguucuuccauaacuuaua

SEQ ID NO: 1755006 - RNA, 19 nt, Artificial Sequence
  Description of Artificial Sequence: Synthetic oligonucleotide
ccggacacuguccccuggc

SEQ ID NO: 1755007 - RNA, 19 nt, Artificial Sequence
  Description of Artificial Sequence: Synthetic oligonucleotide
gccgauggugaggccaaag

SEQ ID NO: 1755008 - RNA, 19 nt, Artificial Sequence
  Description of Artificial Sequence: Synthetic oligonucleotide
gcacuccucgaacgugccc

SEQ ID NO: 1755009 - RNA, 19 nt, Artificial Sequence
  Description of Artificial Sequence: Synthetic oligonucleotide
cccaccaagacaucugggu

SEQ ID NO: 1755010 - RNA, 19 nt, Artificial Sequence
  Description of Artificial Sequence: Synthetic oligonucleotide
ggccucgaacucgacgccc

SEQ ID NO: 1755011 - RNA, 19 nt, Artificial Sequence
  Description of Artificial Sequence: Synthetic oligonucleotide
gcucauaaccgagugcccu

SEQ ID NO: 1755012 - RNA, 19 nt, Artificial Sequence
  Description of Artificial Sequence: Synthetic oligonucleotide
ggucaccuggaaccgguua

SEQ ID NO: 1755013 - RNA, 19 nt, Artificial Sequence
  Description of Artificial Sequence: Synthetic oligonucleotide
gugaagucggagccccggu

SEQ ID NO: 1755014 - RNA, 19 nt, Artificial Sequence
  Description of Artificial Sequence: Synthetic oligonucleotide
gccgccggugguaaacgag

SEQ ID NO: 1755015 - RNA, 19 nt, Artificial Sequence
  Description of Artificial Sequence: Synthetic oligonucleotide
cuuucgucccugagccugu

SEQ ID NO: 1755016 - RNA, 19 nt, Artificial Sequence
  Description of Artificial Sequence: Synthetic oligonucleotide
ccucccagggccagacaug

SEQ ID NO: 1755017 - RNA, 19 nt, Artificial Sequence
  Description of Artificial Sequence: Synthetic oligonucleotide
cuguccccuggcgcugggg

SEQ ID NO: 1755018 - RNA, 19 nt, Artificial Sequence
  Description of Artificial Sequence: Synthetic oligonucleotide
gguaguacguugcgugcau

SEQ ID NO: 1755019 - RNA, 19 nt, Artificial Sequence
  Description of Artificial Sequence: Synthetic oligonucleotide
gcccacgauccaguuacug

SEQ ID NO: 1755020 - RNA, 19 nt, Artificial Sequence
  Description of Artificial Sequence: Synthetic oligonucleotide
ccgcacaggaacuuauucu

SEQ ID NO: 1755021 - RNA, 19 nt, Artificial Sequence
  Description of Artificial Sequence: Synthetic oligonucleotide
gccaguucacgaacuuuga

SEQ ID NO: 1755022 - RNA, 19 nt, Artificial Sequence
  Description of Artificial Sequence: Synthetic oligonucleotide
ggccagacauggcgugaug

SEQ ID NO: 1755023 - RNA, 19 nt, Artificial Sequence
  Description of Artificial Sequence: Synthetic oligonucleotide
cggacacuguccccuggcg

SEQ ID NO: 1755024 - RNA, 19 nt, Artificial Sequence
  Description of Artificial Sequence: Synthetic oligonucleotide
ccgaaggaggcacuggugu

SEQ ID NO: 1755025 - RNA, 19 nt, Artificial Sequence
  Description of Artificial Sequence: Synthetic oligonucleotide
cgguggucugcagaggaag

SEQ ID NO: 1755026 - RNA, 19 nt, Artificial Sequence
  Description of Artificial Sequence: Synthetic oligonucleotide
cgcucauaaccgagugccc

SEQ ID NO: 1755027 - RNA, 19 nt, Artificial Sequence
  Description of Artificial Sequence: Synthetic oligonucleotide
gccggugguaaacgagcuc

SEQ ID NO: 1755028 - RNA, 19 nt, Artificial Sequence
  Description of Artificial Sequence: Synthetic oligonucleotide
caucuggguugccuagggu

SEQ ID NO: 1755029 - RNA, 19 nt, Artificial Sequence
  Description of Artificial Sequence: Synthetic oligonucleotide
ggcaacugugugggucacc

SEQ ID NO: 1755030 - RNA, 19 nt, Artificial Sequence
  Description of Artificial Sequence: Synthetic oligonucleotide
ccggugguaaacgagcucu

SEQ ID NO: 1755031 - RNA, 19 nt, Artificial Sequence
  Description of Artificial Sequence: Synthetic oligonucleotide
gaagggcgacagggcucag

SEQ ID NO: 1755032 - RNA, 19 nt, Artificial Sequence
  Description of Artificial Sequence: Synthetic oligonucleotide
cgauccaguuacugcucac

SEQ ID NO: 1755033 - RNA, 19 nt, Artificial Sequence
  Description of Artificial Sequence: Synthetic oligonucleotide
uggcgcccacgauccaguu

SEQ ID NO: 1755034 - RNA, 19 nt, Artificial Sequence
  Description of Artificial Sequence: Synthetic oligonucleotide
cagagccuuugaagaggaa

SEQ ID NO: 1755035 - RNA, 19 nt, Artificial Sequence
  Description of Artificial Sequence: Synthetic oligonucleotide
agccgcacaggaacuuauu

SEQ ID NO: 1755036 - RNA, 19 nt, Artificial Sequence
  Description of Artificial Sequence: Synthetic oligonucleotide
cguccccacauacgugacc

SEQ ID NO: 1755037 - RNA, 19 nt, Artificial Sequence
  Description of Artificial Sequence: Synthetic oligonucleotide
auccuggugcuggccucga

SEQ ID NO: 1755038 - RNA, 19 nt, Artificial Sequence
  Description of Artificial Sequence: Synthetic oligonucleotide
cccggacacuguccccugg

SEQ ID NO: 1755039 - RNA, 19 nt, Artificial Sequence
  Description of Artificial Sequence: Synthetic oligonucleotide
ggcuuugugguaguacguu

SEQ ID NO: 1755040 - RNA, 19 nt, Artificial Sequence
  Description of Artificial Sequence: Synthetic oligonucleotide
gugcccggguugggcaggc

SEQ ID NO: 1755041 - RNA, 19 nt, Artificial Sequence
  Description of Artificial Sequence: Synthetic oligonucleotide
ccucuucuccaggccgccg

SEQ ID NO: 1755042 - RNA, 19 nt, Artificial Sequence
  Description of Artificial Sequence: Synthetic oligonucleotide
guggcgcccacgauccagu

SEQ ID NO: 1755043 - RNA, 19 nt, Artificial Sequence
  Description of Artificial Sequence: Synthetic oligonucleotide
ggccgccggugguaaacga

SEQ ID NO: 1755044 - RNA, 19 nt, Artificial Sequence
  Description of Artificial Sequence: Synthetic oligonucleotide
gcacuuccgguggcacucc

SEQ ID NO: 1755045 - RNA, 19 nt, Artificial Sequence
  Description of Artificial Sequence: Synthetic oligonucleotide
ggccaaagccgcacaggaa

SEQ ID NO: 1755046 - RNA, 19 nt, Artificial Sequence
  Description of Artificial Sequence: Synthetic oligonucleotide
ucgggaggacagggacguc

SEQ ID NO: 1755047 - RNA, 19 nt, Artificial Sequence
  Description of Artificial Sequence: Synthetic oligonucleotide
caaagccgcacaggaacuu

SEQ ID NO: 1755048 - RNA, 19 nt, Artificial Sequence
  Description of Artificial Sequence: Synthetic oligonucleotide
ccaccaagacaucuggguu

SEQ ID NO: 1755049 - RNA, 19 nt, Artificial Sequence
  Description of Artificial Sequence: Synthetic oligonucleotide
cggugguaaacgagcucuc

SEQ ID NO: 1755050 - RNA, 19 nt, Artificial Sequence
  Description of Artificial Sequence: Synthetic oligonucleotide
cguugcgugcaugcccgcc

SEQ ID NO: 1755051 - RNA, 19 nt, Artificial Sequence
  Description of Artificial Sequence: Synthetic oligonucleotide
ggcgcccacgauccaguua

SEQ ID NO: 1755052 - RNA, 19 nt, Artificial Sequence
  Description of Artificial Sequence: Synthetic oligonucleotide
gaaggcgcacagggacagu

SEQ ID NO: 1755053 - RNA, 19 nt, Artificial Sequence
  Description of Artificial Sequence: Synthetic oligonucleotide
gguacccgaaggaggcacu

SEQ ID NO: 1755054 - RNA, 19 nt, Artificial Sequence
  Description of Artificial Sequence: Synthetic oligonucleotide
gggcaacugugugggucac

SEQ ID NO: 1755055 - RNA, 19 nt, Artificial Sequence
  Description of Artificial Sequence: Synthetic oligonucleotide
ggcccagcgguggucugca

SEQ ID NO: 1755056 - RNA, 19 nt, Artificial Sequence
  Description of Artificial Sequence: Synthetic oligonucleotide
gggccacgaggaucccuga

SEQ ID NO: 1755057 - RNA, 19 nt, Artificial Sequence
  Description of Artificial Sequence: Synthetic oligonucleotide
cgggaggacagggacguca

SEQ ID NO: 1755058 - RNA, 19 nt, Artificial Sequence
  Description of Artificial Sequence: Synthetic oligonucleotide
agccgauggugaggccaaa

SEQ ID NO: 1755059 - RNA, 19 nt, Artificial Sequence
  Description of Artificial Sequence: Synthetic oligonucleotide
ccaagacaucuggguugcc

SEQ ID NO: 1755060 - RNA, 19 nt, Artificial Sequence
  Description of Artificial Sequence: Synthetic oligonucleotide
ggaaggccucugugggacu

SEQ ID NO: 1755061 - RNA, 19 nt, Artificial Sequence
  Description of Artificial Sequence: Synthetic oligonucleotide
ccccuggcgcuggggaucc

SEQ ID NO: 1755062 - RNA, 19 nt, Artificial Sequence
  Description of Artificial Sequence: Synthetic oligonucleotide
acgugaccccaaaguggua

SEQ ID NO: 1755063 - RNA, 19 nt, Artificial Sequence
  Description of Artificial Sequence: Synthetic oligonucleotide
cgaacgugcccggguuggg

SEQ ID NO: 1755064 - RNA, 19 nt, Artificial Sequence
  Description of Artificial Sequence: Synthetic oligonucleotide
cccugagccuguccagcca

SEQ ID NO: 1755065 - RNA, 19 nt, Artificial Sequence
  Description of Artificial Sequence: Synthetic oligonucleotide
gcggccgggcgcuccucug

SEQ ID NO: 1755066 - RNA, 19 nt, Artificial Sequence
  Description of Artificial Sequence: Synthetic oligonucleotide
gcccagcgucacuguggcc

SEQ ID NO: 1755067 - RNA, 19 nt, Artificial Sequence
  Description of Artificial Sequence: Synthetic oligonucleotide
cuccaggccgccgguggua

SEQ ID NO: 1755068 - RNA, 19 nt, Artificial Sequence
  Description of Artificial Sequence: Synthetic oligonucleotide
cagggacgucacgucacgu

SEQ ID NO: 1755069 - RNA, 19 nt, Artificial Sequence
  Description of Artificial Sequence: Synthetic oligonucleotide
cgguacuccccauccaccu

SEQ ID NO: 1755070 - RNA, 19 nt, Artificial Sequence
  Description of Artificial Sequence: Synthetic oligonucleotide
gcgguggucugcagaggaa

SEQ ID NO: 1755071 - RNA, 19 nt, Artificial Sequence
  Description of Artificial Sequence: Synthetic oligonucleotide
gcacggggaaggccucugu

SEQ ID NO: 1755072 - RNA, 19 nt, Artificial Sequence
  Description of Artificial Sequence: Synthetic oligonucleotide
cgggcgcuccucugccgcc

SEQ ID NO: 1755073 - RNA, 19 nt, Artificial Sequence
  Description of Artificial Sequence: Synthetic oligonucleotide
cugccgcccucgggaggac

SEQ ID NO: 1755074 - RNA, 19 nt, Artificial Sequence
  Description of Artificial Sequence: Synthetic oligonucleotide
gcgugaugcucuggagaua

SEQ ID NO: 1755075 - RNA, 19 nt, Artificial Sequence
  Description of Artificial Sequence: Synthetic oligonucleotide
ggacgucacgucacgucuu

SEQ ID NO: 1755076 - RNA, 19 nt, Artificial Sequence
  Description of Artificial Sequence: Synthetic oligonucleotide
ccgccuggcccagcgucac

SEQ ID NO: 1755077 - RNA, 19 nt, Artificial Sequence
  Description of Artificial Sequence: Synthetic oligonucleotide
ccucgaacgugcccggguu

SEQ ID NO: 1755078 - RNA, 19 nt, Artificial Sequence
  Description of Artificial Sequence: Synthetic oligonucleotide
cggcccagcgguggucugc

SEQ ID NO: 1755079 - RNA, 19 nt, Artificial Sequence
  Description of Artificial Sequence: Synthetic oligonucleotide
gcccuccaucugaacugga

SEQ ID NO: 1755080 - RNA, 19 nt, Artificial Sequence
  Description of Artificial Sequence: Synthetic oligonucleotide
cgucacgucuuucgucccu

SEQ ID NO: 1755081 - RNA, 19 nt, Artificial Sequence
  Description of Artificial Sequence: Synthetic oligonucleotide
gggucuggauggccaucuu

SEQ ID NO: 1755082 - RNA, 19 nt, Artificial Sequence
  Description of Artificial Sequence: Synthetic oligonucleotide
ggcugccacuguuguccau

SEQ ID NO: 1755083 - RNA, 19 nt, Artificial Sequence
  Description of Artificial Sequence: Synthetic oligonucleotide
gcguggcgcccacgaucca

SEQ ID NO: 1755084 - RNA, 19 nt, Artificial Sequence
  Description of Artificial Sequence: Synthetic oligonucleotide
ccaggccgccggugguaaa

SEQ ID NO: 1755085 - RNA, 19 nt, Artificial Sequence
  Description of Artificial Sequence: Synthetic oligonucleotide
gggucaccuggaaccgguu

SEQ ID NO: 1755086 - RNA, 19 nt, Artificial Sequence
  Description of Artificial Sequence: Synthetic oligonucleotide
cgcccaccagcacggggaa

SEQ ID NO: 1755087 - RNA, 19 nt, Artificial Sequence
  Description of Artificial Sequence: Synthetic oligonucleotide
ccagcguggcgcccacgau

SEQ ID NO: 1755088 - RNA, 19 nt, Artificial Sequence
  Description of Artificial Sequence: Synthetic oligonucleotide
ccucgagcaugaggugggu

SEQ ID NO: 1755089 - RNA, 19 nt, Artificial Sequence
  Description of Artificial Sequence: Synthetic oligonucleotide
ccucuaccagggcgcucau

SEQ ID NO: 1755090 - RNA, 19 nt, Artificial Sequence
  Description of Artificial Sequence: Synthetic oligonucleotide
cgcccacgauccaguuacu

SEQ ID NO: 1755091 - RNA, 19 nt, Artificial Sequence
  Description of Artificial Sequence: Synthetic oligonucleotide
aauaugucauuuuagaucu

SEQ ID NO: 1755092 - RNA, 19 nt, Artificial Sequence
  Description of Artificial Sequence: Synthetic oligonucleotide
aagaaugacguuuagggag

SEQ ID NO: 1755093 - RNA, 19 nt, Artificial Sequence
  Description of Artificial Sequence: Synthetic oligonucleotide
aaagcuauuccuuuaguag

SEQ ID NO: 1755094 - RNA, 19 nt, Artificial Sequence
  Description of Artificial Sequence: Synthetic oligonucleotide
uuaugguaaggccagaacg

SEQ ID NO: 1755095 - RNA, 19 nt, Artificial Sequence
  Description of Artificial Sequence: Synthetic oligonucleotide
auacauaaaauucugaagu

SEQ ID NO: 1755096 - RNA, 19 nt, Artificial Sequence
  Description of Artificial Sequence: Synthetic oligonucleotide
acauugaucacauagcguc

SEQ ID NO: 1755097 - RNA, 19 nt, Artificial Sequence
  Description of Artificial Sequence: Synthetic oligonucleotide
auucgaaagaaacauaguc

SEQ ID NO: 1755098 - RNA, 19 nt, Artificial Sequence
  Description of Artificial Sequence: Synthetic oligonucleotide
uacuauaugguuaacauaa

SEQ ID NO: 1755099 - RNA, 19 nt, Artificial Sequence
  Description of Artificial Sequence: Synthetic oligonucleotide
uucuacuagagcaagcugg

SEQ ID NO: 1755100 - RNA, 19 nt, Artificial Sequence
  Description of Artificial Sequence: Synthetic oligonucleotide
gaagcuaacacauugguca

SEQ ID NO: 1755101 - RNA, 19 nt, Artificial Sequence
  Description of Artificial Sequence: Synthetic oligonucleotide
aguuguucaacccagagca

SEQ ID NO: 1755102 - RNA, 19 nt, Artificial Sequence
  Description of Artificial Sequence: Synthetic oligonucleotide
aauauuacuauaugguuaa

SEQ ID NO: 1755103 - RNA, 19 nt, Artificial Sequence
  Description of Artificial Sequence: Synthetic oligonucleotide
gaaagaaacauagucagag

SEQ ID NO: 1755104 - RNA, 19 nt, Artificial Sequence
  Description of Artificial Sequence: Synthetic oligonucleotide
ucgaaagaaacauagucag

SEQ ID NO: 1755105 - RNA, 19 nt, Artificial Sequence
  Description of Artificial Sequence: Synthetic oligonucleotide
uaugguaaggccagaacgg

SEQ ID NO: 1755106 - RNA, 19 nt, Artificial Sequence
  Description of Artificial Sequence: Synthetic oligonucleotide
aaagugauagcucuuggga

SEQ ID NO: 1755107 - RNA, 19 nt, Artificial Sequence
  Description of Artificial Sequence: Synthetic oligonucleotide
aaacguuuagugaacaaac

SEQ ID NO: 1755108 - RNA, 19 nt, Artificial Sequence
  Description of Artificial Sequence: Synthetic oligonucleotide
gaauaugucauuuuagauc

SEQ ID NO: 1755109 - RNA, 19 nt, Artificial Sequence
  Description of Artificial Sequence: Synthetic oligonucleotide
uuuuagugaauaacuuucg

SEQ ID NO: 1755110 - RNA, 19 nt, Artificial Sequence
  Description of Artificial Sequence: Synthetic oligonucleotide
uucgaaagaaacauaguca

SEQ ID NO: 1755111 - RNA, 19 nt, Artificial Sequence
  Description of Artificial Sequence: Synthetic oligonucleotide
uccauuaaacuuuagaaau

SEQ ID NO: 1755112 - RNA, 19 nt, Artificial Sequence
  Description of Artificial Sequence: Synthetic oligonucleotide
uuuagugaauaacuuucgg

SEQ ID NO: 1755113 - RNA, 19 nt, Artificial Sequence
  Description of Artificial Sequence: Synthetic oligonucleotide
agcagugccaaugugaacc

SEQ ID NO: 1755114 - RNA, 19 nt, Artificial Sequence
  Description of Artificial Sequence: Synthetic oligonucleotide
uuugaagcuaacacauugg

SEQ ID NO: 1755115 - RNA, 19 nt, Artificial Sequence
  Description of Artificial Sequence: Synthetic oligonucleotide
auuuuagugaauaacuuuc

SEQ ID NO: 1755116 - RNA, 19 nt, Artificial Sequence
  Description of Artificial Sequence: Synthetic oligonucleotide
uagcuuaccauccacacca

SEQ ID NO: 1755117 - RNA, 19 nt, Artificial Sequence
  Description of Artificial Sequence: Synthetic oligonucleotide
aggggauugacacuuuucc

SEQ ID NO: 1755118 - RNA, 19 nt, Artificial Sequence
  Description of Artificial Sequence: Synthetic oligonucleotide
cucauaguaacguagcagc

SEQ ID NO: 1755119 - RNA, 19 nt, Artificial Sequence
  Description of Artificial Sequence: Synthetic oligonucleotide
aagcuaauauauuccacag

SEQ ID NO: 1755120 - RNA, 19 nt, Artificial Sequence
  Description of Artificial Sequence: Synthetic oligonucleotide
auauguuaaggauauguug

SEQ ID NO: 1755121 - RNA, 19 nt, Artificial Sequence
  Description of Artificial Sequence: Synthetic oligonucleotide
aauaacuuucgguggguuc

SEQ ID NO: 1755122 - RNA, 19 nt, Artificial Sequence
  Description of Artificial Sequence: Synthetic oligonucleotide
uagauuaaaauauuacuau

SEQ ID NO: 1755123 - RNA, 19 nt, Artificial Sequence
  Description of Artificial Sequence: Synthetic oligonucleotide
aaagagcaaaaguuaagcu

SEQ ID NO: 1755124 - RNA, 19 nt, Artificial Sequence
  Description of Artificial Sequence: Synthetic oligonucleotide
uauacuacuuuaguaacag

SEQ ID NO: 1755125 - RNA, 19 nt, Artificial Sequence
  Description of Artificial Sequence: Synthetic oligonucleotide
uugucuuucacaccuaugu

SEQ ID NO: 1755126 - RNA, 19 nt, Artificial Sequence
  Description of Artificial Sequence: Synthetic oligonucleotide
auuacuauaugguuaacau

SEQ ID NO: 1755127 - RNA, 19 nt, Artificial Sequence
  Description of Artificial Sequence: Synthetic oligonucleotide
uuuaucuuugauaggacuc

SEQ ID NO: 1755128 - RNA, 19 nt, Artificial Sequence
  Description of Artificial Sequence: Synthetic oligonucleotide
ucuguugggaucuucuuag

SEQ ID NO: 1755129 - RNA, 19 nt, Artificial Sequence
  Description of Artificial Sequence: Synthetic oligonucleotide
auaacuuucgguggguucc

SEQ ID NO: 1755130 - RNA, 19 nt, Artificial Sequence
  Description of Artificial Sequence: Synthetic oligonucleotide
caaguugaugcacacaucc

SEQ ID NO: 1755131 - RNA, 19 nt, Artificial Sequence
  Description of Artificial Sequence: Synthetic oligonucleotide
agugauagcucuugggaac

SEQ ID NO: 1755132 - RNA, 19 nt, Artificial Sequence
  Description of Artificial Sequence: Synthetic oligonucleotide
auuagguauacauaaaauu

SEQ ID NO: 1755133 - RNA, 19 nt, Artificial Sequence
  Description of Artificial Sequence: Synthetic oligonucleotide
agaacggagccucauauag

SEQ ID NO: 1755134 - RNA, 19 nt, Artificial Sequence
  Description of Artificial Sequence: Synthetic oligonucleotide
gcuaauauauuccacagug

SEQ ID NO: 1755135 - RNA, 19 nt, Artificial Sequence
  Description of Artificial Sequence: Synthetic oligonucleotide
aguagcuuaccauccacac

SEQ ID NO: 1755136 - RNA, 19 nt, Artificial Sequence
  Description of Artificial Sequence: Synthetic oligonucleotide
ugaagugcuaaguaaacaa

SEQ ID NO: 1755137 - RNA, 19 nt, Artificial Sequence
  Description of Artificial Sequence: Synthetic oligonucleotide
agguaagcaaagcuauucc

SEQ ID NO: 1755138 - RNA, 19 nt, Artificial Sequence
  Description of Artificial Sequence: Synthetic oligonucleotide
auaguaacguagcagcauc

SEQ ID NO: 1755139 - RNA, 19 nt, Artificial Sequence
  Description of Artificial Sequence: Synthetic oligonucleotide
aagcuauuccuuuaguaga

SEQ ID NO: 1755140 - RNA, 19 nt, Artificial Sequence
  Description of Artificial Sequence: Synthetic oligonucleotide
uguugggaucuucuuagcg

SEQ ID NO: 1755141 - RNA, 19 nt, Artificial Sequence
  Description of Artificial Sequence: Synthetic oligonucleotide
cacacauccaaagugauag

SEQ ID NO: 1755142 - RNA, 19 nt, Artificial Sequence
  Description of Artificial Sequence: Synthetic oligonucleotide
ucuuaaacaugauauuuuc

SEQ ID NO: 1755143 - RNA, 19 nt, Artificial Sequence
  Description of Artificial Sequence: Synthetic oligonucleotide
cuuugaagcuaacacauug

SEQ ID NO: 1755144 - RNA, 19 nt, Artificial Sequence
  Description of Artificial Sequence: Synthetic oligonucleotide
ucuagguaagcaaagcuau

SEQ ID NO: 1755145 - RNA, 19 nt, Artificial Sequence
  Description of Artificial Sequence: Synthetic oligonucleotide
acuugaaaccauuagguau

SEQ ID NO: 1755146 - RNA, 19 nt, Artificial Sequence
  Description of Artificial Sequence: Synthetic oligonucleotide
cuauguaugucccacguug

SEQ ID NO: 1755147 - RNA, 19 nt, Artificial Sequence
  Description of Artificial Sequence: Synthetic oligonucleotide
uuauacuacuuuaguaaca

SEQ ID NO: 1755148 - RNA, 19 nt, Artificial Sequence
  Description of Artificial Sequence: Synthetic oligonucleotide
uccuucucaaaguaacagg

SEQ ID NO: 1755149 - RNA, 19 nt, Artificial Sequence
  Description of Artificial Sequence: Synthetic oligonucleotide
aauucuggagguugaauau

SEQ ID NO: 1755150 - RNA, 19 nt, Artificial Sequence
  Description of Artificial Sequence: Synthetic oligonucleotide
agauauguuaaggauaugu

SEQ ID NO: 1755151 - RNA, 19 nt, Artificial Sequence
  Description of Artificial Sequence: Synthetic oligonucleotide
aagugcuaaguaaacaaag

SEQ ID NO: 1755152 - RNA, 19 nt, Artificial Sequence
  Description of Artificial Sequence: Synthetic oligonucleotide
aaaucuuaaacaugauauu

SEQ ID NO: 1755153 - RNA, 19 nt, Artificial Sequence
  Description of Artificial Sequence: Synthetic oligonucleotide
uaacguagcagcaucuugu

SEQ ID NO: 1755154 - RNA, 19 nt, Artificial Sequence
  Description of Artificial Sequence: Synthetic oligonucleotide
uuacauucgaaagaaacau

SEQ ID NO: 1755155 - RNA, 19 nt, Artificial Sequence
  Description of Artificial Sequence: Synthetic oligonucleotide
uauuacuauaugguuaaca

SEQ ID NO: 1755156 - RNA, 19 nt, Artificial Sequence
  Description of Artificial Sequence: Synthetic oligonucleotide
uggcaaauuucuuuggucu

SEQ ID NO: 1755157 - RNA, 19 nt, Artificial Sequence
  Description of Artificial Sequence: Synthetic oligonucleotide
ugaauaugucauuuuagau

SEQ ID NO: 1755158 - RNA, 19 nt, Artificial Sequence
  Description of Artificial Sequence: Synthetic oligonucleotide
uuaagcuaauauauuccac

SEQ ID NO: 1755159 - RNA, 19 nt, Artificial Sequence
  Description of Artificial Sequence: Synthetic oligonucleotide
agagucuucaacauugauc

SEQ ID NO: 1755160 - RNA, 19 nt, Artificial Sequence
  Description of Artificial Sequence: Synthetic oligonucleotide
cauuuaaguuguucaaccc

SEQ ID NO: 1755161 - RNA, 19 nt, Artificial Sequence
  Description of Artificial Sequence: Synthetic oligonucleotide
uuuguguaaggagagcaag

SEQ ID NO: 1755162 - RNA, 19 nt, Artificial Sequence
  Description of Artificial Sequence: Synthetic oligonucleotide
gugaauaacuuucgguggg

SEQ ID NO: 1755163 - RNA, 19 nt, Artificial Sequence
  Description of Artificial Sequence: Synthetic oligonucleotide
uucuaccugauuuuaguga

SEQ ID NO: 1755164 - RNA, 19 nt, Artificial Sequence
  Description of Artificial Sequence: Synthetic oligonucleotide
aacggggagacucauagua

SEQ ID NO: 1755165 - RNA, 19 nt, Artificial Sequence
  Description of Artificial Sequence: Synthetic oligonucleotide
ugucuagguaagcaaagcu

SEQ ID NO: 1755166 - RNA, 19 nt, Artificial Sequence
  Description of Artificial Sequence: Synthetic oligonucleotide
caaagugauagcucuuggg

SEQ ID NO: 1755167 - RNA, 19 nt, Artificial Sequence
  Description of Artificial Sequence: Synthetic oligonucleotide
aacguagcagcaucuuguc

SEQ ID NO: 1755168 - RNA, 19 nt, Artificial Sequence
  Description of Artificial Sequence: Synthetic oligonucleotide
gaaaccauuagguauacau

SEQ ID NO: 1755169 - RNA, 19 nt, Artificial Sequence
  Description of Artificial Sequence: Synthetic oligonucleotide
uugaagcuaacacauuggu

SEQ ID NO: 1755170 - RNA, 19 nt, Artificial Sequence
  Description of Artificial Sequence: Synthetic oligonucleotide
uuucuaccugauuuuagug

SEQ ID NO: 1755171 - RNA, 19 nt, Artificial Sequence
  Description of Artificial Sequence: Synthetic oligonucleotide
auucauucgaggaacgggg

SEQ ID NO: 1755172 - RNA, 19 nt, Artificial Sequence
  Description of Artificial Sequence: Synthetic oligonucleotide
agaaacauagucagaggac

SEQ ID NO: 1755173 - RNA, 19 nt, Artificial Sequence
  Description of Artificial Sequence: Synthetic oligonucleotide
ucuaccugauuuuagugaa

SEQ ID NO: 1755174 - RNA, 19 nt, Artificial Sequence
  Description of Artificial Sequence: Synthetic oligonucleotide
uguguaaggagagcaagcc

SEQ ID NO: 1755175 - RNA, 19 nt, Artificial Sequence
  Description of Artificial Sequence: Synthetic oligonucleotide
guuaagcuaauauauucca

SEQ ID NO: 1755176 - RNA, 19 nt, Artificial Sequence
  Description of Artificial Sequence: Synthetic oligonucleotide
uauuccacagugagcagug

SEQ ID NO: 1755177 - RNA, 19 nt, Artificial Sequence
  Description of Artificial Sequence: Synthetic oligonucleotide
gagagcaagccauagagaa

SEQ ID NO: 1755178 - RNA, 19 nt, Artificial Sequence
  Description of Artificial Sequence: Synthetic oligonucleotide
uguugucuagguaagcaaa

SEQ ID NO: 1755179 - RNA, 19 nt, Artificial Sequence
  Description of Artificial Sequence: Synthetic oligonucleotide
ugaacaaacuugaaaccau

SEQ ID NO: 1755180 - RNA, 19 nt, Artificial Sequence
  Description of Artificial Sequence: Synthetic oligonucleotide
guugggaucuucuuagcgc

SEQ ID NO: 1755181 - RNA, 19 nt, Artificial Sequence
  Description of Artificial Sequence: Synthetic oligonucleotide
uugauucuuacauucgaaa

SEQ ID NO: 1755182 - RNA, 19 nt, Artificial Sequence
  Description of Artificial Sequence: Synthetic oligonucleotide
agaaaucuuaaacaugaua

SEQ ID NO: 1755183 - RNA, 19 nt, Artificial Sequence
  Description of Artificial Sequence: Synthetic oligonucleotide
ucugaagugcuaaguaaac

SEQ ID NO: 1755184 - RNA, 19 nt, Artificial Sequence
  Description of Artificial Sequence: Synthetic oligonucleotide
aagugauagcucuugggaa

SEQ ID NO: 1755185 - RNA, 19 nt, Artificial Sequence
  Description of Artificial Sequence: Synthetic oligonucleotide
aaauucugaagugcuaagu

SEQ ID NO: 1755186 - RNA, 19 nt, Artificial Sequence
  Description of Artificial Sequence: Synthetic oligonucleotide
guaugucccacguugauuc

SEQ ID NO: 1755187 - RNA, 19 nt, Artificial Sequence
  Description of Artificial Sequence: Synthetic oligonucleotide
augacguuuagggaggagg

SEQ ID NO: 1755188 - RNA, 19 nt, Artificial Sequence
  Description of Artificial Sequence: Synthetic oligonucleotide
uuaucuuugauaggacuca

SEQ ID NO: 1755189 - RNA, 19 nt, Artificial Sequence
  Description of Artificial Sequence: Synthetic oligonucleotide
aacggagccucauauagua

SEQ ID NO: 1755190 - RNA, 19 nt, Artificial Sequence
  Description of Artificial Sequence: Synthetic oligonucleotide
ucuacuagagcaagcuggu

SEQ ID NO: 1755191 - RNA, 19 nt, Artificial Sequence
  Description of Artificial Sequence: Synthetic oligonucleotide
cuuaccauccacaccauca

SEQ ID NO: 1755192 - RNA, 19 nt, Artificial Sequence
  Description of Artificial Sequence: Synthetic oligonucleotide
cacguugauucuuacauuc

SEQ ID NO: 1755193 - RNA, 19 nt, Artificial Sequence
  Description of Artificial Sequence: Synthetic oligonucleotide
aguagaaauugcuguuguc

SEQ ID NO: 1755194 - RNA, 19 nt, Artificial Sequence
  Description of Artificial Sequence: Synthetic oligonucleotide
uauuccuuuaguagauuaa

SEQ ID NO: 1755195 - RNA, 19 nt, Artificial Sequence
  Description of Artificial Sequence: Synthetic oligonucleotide
ugugaacccaaacaacaaa

SEQ ID NO: 1755196 - RNA, 19 nt, Artificial Sequence
  Description of Artificial Sequence: Synthetic oligonucleotide
uguucaacccagagcauac

SEQ ID NO: 1755197 - RNA, 19 nt, Artificial Sequence
  Description of Artificial Sequence: Synthetic oligonucleotide
ucuccaaaacuuugaagcu

SEQ ID NO: 1755198 - RNA, 19 nt, Artificial Sequence
  Description of Artificial Sequence: Synthetic oligonucleotide
ucauaguaacguagcagca

SEQ ID NO: 1755199 - RNA, 19 nt, Artificial Sequence
  Description of Artificial Sequence: Synthetic oligonucleotide
agacucauaguaacguagc

SEQ ID NO: 1755200 - RNA, 19 nt, Artificial Sequence
  Description of Artificial Sequence: Synthetic oligonucleotide
aacuugaaaccauuaggua

SEQ ID NO: 1755201 - RNA, 19 nt, Artificial Sequence
  Description of Artificial Sequence: Synthetic oligonucleotide
acuagagcaagcugguugu

SEQ ID NO: 1755202 - RNA, 19 nt, Artificial Sequence
  Description of Artificial Sequence: Synthetic oligonucleotide
ccucauauaguagacaugg

SEQ ID NO: 1755203 - RNA, 19 nt, Artificial Sequence
  Description of Artificial Sequence: Synthetic oligonucleotide
auagagaaauuucauccaa

SEQ ID NO: 1755204 - RNA, 19 nt, Artificial Sequence
  Description of Artificial Sequence: Synthetic oligonucleotide
caucaguagcuuaccaucc

SEQ ID NO: 1755205 - RNA, 19 nt, Artificial Sequence
  Description of Artificial Sequence: Synthetic oligonucleotide
gggauugacacuuuuccag

SEQ ID NO: 1755206 - RNA, 19 nt, Artificial Sequence
  Description of Artificial Sequence: Synthetic oligonucleotide
ugaagcuaacacauugguc

SEQ ID NO: 1755207 - RNA, 19 nt, Artificial Sequence
  Description of Artificial Sequence: Synthetic oligonucleotide
uuuuguguaaggagagcaa

SEQ ID NO: 1755208 - RNA, 19 nt, Artificial Sequence
  Description of Artificial Sequence: Synthetic oligonucleotide
gucauuggcaugcagccug

SEQ ID NO: 1755209 - RNA, 19 nt, Artificial Sequence
  Description of Artificial Sequence: Synthetic oligonucleotide
acucauaguaacguagcag

SEQ ID NO: 1755210 - RNA, 19 nt, Artificial Sequence
  Description of Artificial Sequence: Synthetic oligonucleotide
gugcuaaguaaacaaagca

SEQ ID NO: 1755211 - RNA, 19 nt, Artificial Sequence
  Description of Artificial Sequence: Synthetic oligonucleotide
uuacuauaugguuaacaua

SEQ ID NO: 1755212 - RNA, 19 nt, Artificial Sequence
  Description of Artificial Sequence: Synthetic oligonucleotide
uuuagugaacaaacuugaa

SEQ ID NO: 1755213 - RNA, 19 nt, Artificial Sequence
  Description of Artificial Sequence: Synthetic oligonucleotide
uuccuuuaguagauuaaaa

SEQ ID NO: 1755214 - RNA, 19 nt, Artificial Sequence
  Description of Artificial Sequence: Synthetic oligonucleotide
ggaacggggagacucauag

SEQ ID NO: 1755215 - RNA, 19 nt, Artificial Sequence
  Description of Artificial Sequence: Synthetic oligonucleotide
agaaugacguuuagggagg

SEQ ID NO: 1755216 - RNA, 19 nt, Artificial Sequence
  Description of Artificial Sequence: Synthetic oligonucleotide
uagaaauugcuguugucua

SEQ ID NO: 1755217 - RNA, 19 nt, Artificial Sequence
  Description of Artificial Sequence: Synthetic oligonucleotide
agccucauauaguagacau

SEQ ID NO: 1755218 - RNA, 19 nt, Artificial Sequence
  Description of Artificial Sequence: Synthetic oligonucleotide
cauugaucacauagcgucc

SEQ ID NO: 1755219 - RNA, 19 nt, Artificial Sequence
  Description of Artificial Sequence: Synthetic oligonucleotide
guuuagugaacaaacuuga

SEQ ID NO: 1755220 - RNA, 19 nt, Artificial Sequence
  Description of Artificial Sequence: Synthetic oligonucleotide
agcucuugggaacugguga

SEQ ID NO: 1755221 - RNA, 19 nt, Artificial Sequence
  Description of Artificial Sequence: Synthetic oligonucleotide
acaccuauguaugucccac

SEQ ID NO: 1755222 - RNA, 19 nt, Artificial Sequence
  Description of Artificial Sequence: Synthetic oligonucleotide
uuaaguuguucaacccaga

SEQ ID NO: 1755223 - RNA, 19 nt, Artificial Sequence
  Description of Artificial Sequence: Synthetic oligonucleotide
uuucacgcuuucuaccuga

SEQ ID NO: 1755224 - RNA, 19 nt, Artificial Sequence
  Description of Artificial Sequence: Synthetic oligonucleotide
agggcuuugccuguugcgc

SEQ ID NO: 1755225 - RNA, 19 nt, Artificial Sequence
  Description of Artificial Sequence: Synthetic oligonucleotide
cuuaugguaaggccagaac

SEQ ID NO: 1755226 - RNA, 19 nt, Artificial Sequence
  Description of Artificial Sequence: Synthetic oligonucleotide
uagguaagcaaagcuauuc

SEQ ID NO: 1755227 - RNA, 19 nt, Artificial Sequence
  Description of Artificial Sequence: Synthetic oligonucleotide
acauuggucauuguaugug

SEQ ID NO: 1755228 - RNA, 19 nt, Artificial Sequence
  Description of Artificial Sequence: Synthetic oligonucleotide
aacguuuagugaacaaacu

SEQ ID NO: 1755229 - RNA, 19 nt, Artificial Sequence
  Description of Artificial Sequence: Synthetic oligonucleotide
uggucauuguaugugcuca

SEQ ID NO: 1755230 - RNA, 19 nt, Artificial Sequence
  Description of Artificial Sequence: Synthetic oligonucleotide
acguuuagugaacaaacuu

SEQ ID NO: 1755231 - RNA, 19 nt, Artificial Sequence
  Description of Artificial Sequence: Synthetic oligonucleotide
guaacguagcagcaucuug

SEQ ID NO: 1755232 - RNA, 19 nt, Artificial Sequence
  Description of Artificial Sequence: Synthetic oligonucleotide
agcaucuuauuccauuaaa

SEQ ID NO: 1755233 - RNA, 19 nt, Artificial Sequence
  Description of Artificial Sequence: Synthetic oligonucleotide
acauccaaagugauagcuc

SEQ ID NO: 1755234 - RNA, 19 nt, Artificial Sequence
  Description of Artificial Sequence: Synthetic oligonucleotide
auucgaggaacggggagac

SEQ ID NO: 1755235 - RNA, 19 nt, Artificial Sequence
  Description of Artificial Sequence: Synthetic oligonucleotide
agcuaauauauuccacagu

SEQ ID NO: 1755236 - RNA, 19 nt, Artificial Sequence
  Description of Artificial Sequence: Synthetic oligonucleotide
guugucuagguaagcaaag

SEQ ID NO: 1755237 - RNA, 19 nt, Artificial Sequence
  Description of Artificial Sequence: Synthetic oligonucleotide
uuccuuucacgcuuucuac

SEQ ID NO: 1755238 - RNA, 19 nt, Artificial Sequence
  Description of Artificial Sequence: Synthetic oligonucleotide
caucuuauuccauuaaacu

SEQ ID NO: 1755239 - RNA, 19 nt, Artificial Sequence
  Description of Artificial Sequence: Synthetic oligonucleotide
gaaacauagucagaggacu

SEQ ID NO: 1755240 - RNA, 19 nt, Artificial Sequence
  Description of Artificial Sequence: Synthetic oligonucleotide
cacaccaucaccugauuca

SEQ ID NO: 1755241 - RNA, 19 nt, Artificial Sequence
  Description of Artificial Sequence: Synthetic oligonucleotide
augguuaacauaaauuaua

SEQ ID NO: 1755242 - RNA, 19 nt, Artificial Sequence
  Description of Artificial Sequence: Synthetic oligonucleotide
uuagggaggaggagauaug

SEQ ID NO: 1755243 - RNA, 19 nt, Artificial Sequence
  Description of Artificial Sequence: Synthetic oligonucleotide
uguuggucaaaagaaccaa

SEQ ID NO: 1755244 - RNA, 19 nt, Artificial Sequence
  Description of Artificial Sequence: Synthetic oligonucleotide
uaguaacguagcagcaucu

SEQ ID NO: 1755245 - RNA, 19 nt, Artificial Sequence
  Description of Artificial Sequence: Synthetic oligonucleotide
accuauguaugucccacgu

SEQ ID NO: 1755246 - RNA, 19 nt, Artificial Sequence
  Description of Artificial Sequence: Synthetic oligonucleotide
guagcuuaccauccacacc

SEQ ID NO: 1755247 - RNA, 19 nt, Artificial Sequence
  Description of Artificial Sequence: Synthetic oligonucleotide
uucuuagcgcgcaugguuu

SEQ ID NO: 1755248 - RNA, 19 nt, Artificial Sequence
  Description of Artificial Sequence: Synthetic oligonucleotide
aagcaucuuauuccauuaa

SEQ ID NO: 1755249 - RNA, 19 nt, Artificial Sequence
  Description of Artificial Sequence: Synthetic oligonucleotide
cucauauaguagacauggc

SEQ ID NO: 1755250 - RNA, 19 nt, Artificial Sequence
  Description of Artificial Sequence: Synthetic oligonucleotide
ugucuuucacaccuaugua

SEQ ID NO: 1755251 - RNA, 19 nt, Artificial Sequence
  Description of Artificial Sequence: Synthetic oligonucleotide
cuggagguugaauauguca

SEQ ID NO: 1755252 - RNA, 19 nt, Artificial Sequence
  Description of Artificial Sequence: Synthetic oligonucleotide
uucgguggguuccuucuca

SEQ ID NO: 1755253 - RNA, 19 nt, Artificial Sequence
  Description of Artificial Sequence: Synthetic oligonucleotide
aguaacaguaaaacacaca

SEQ ID NO: 1755254 - RNA, 19 nt, Artificial Sequence
  Description of Artificial Sequence: Synthetic oligonucleotide
gacucauaguaacguagca

SEQ ID NO: 1755255 - RNA, 19 nt, Artificial Sequence
  Description of Artificial Sequence: Synthetic oligonucleotide
ucgaggaacggggagacuc

SEQ ID NO: 1755256 - RNA, 19 nt, Artificial Sequence
  Description of Artificial Sequence: Synthetic oligonucleotide
agucuucaacauugaucac

SEQ ID NO: 1755257 - RNA, 19 nt, Artificial Sequence
  Description of Artificial Sequence: Synthetic oligonucleotide
uuggucauuguaugugcuc

SEQ ID NO: 1755258 - RNA, 19 nt, Artificial Sequence
  Description of Artificial Sequence: Synthetic oligonucleotide
caaagcuauuccuuuagua

SEQ ID NO: 1755259 - RNA, 19 nt, Artificial Sequence
  Description of Artificial Sequence: Synthetic oligonucleotide
aacauagucagaggacuuu

SEQ ID NO: 1755260 - RNA, 19 nt, Artificial Sequence
  Description of Artificial Sequence: Synthetic oligonucleotide
ucuuaugguaaggccagaa

SEQ ID NO: 1755261 - RNA, 19 nt, Artificial Sequence
  Description of Artificial Sequence: Synthetic oligonucleotide
ugcacacauccaaagugau

SEQ ID NO: 1755262 - RNA, 19 nt, Artificial Sequence
  Description of Artificial Sequence: Synthetic oligonucleotide
aaugacguuuagggaggag

SEQ ID NO: 1755263 - RNA, 19 nt, Artificial Sequence
  Description of Artificial Sequence: Synthetic oligonucleotide
accugauucauucgaggaa

SEQ ID NO: 1755264 - RNA, 19 nt, Artificial Sequence
  Description of Artificial Sequence: Synthetic oligonucleotide
auauuacuauaugguuaac

SEQ ID NO: 1755265 - RNA, 19 nt, Artificial Sequence
  Description of Artificial Sequence: Synthetic oligonucleotide
ugaauaacuuucggugggu

SEQ ID NO: 1755266 - RNA, 19 nt, Artificial Sequence
  Description of Artificial Sequence: Synthetic oligonucleotide
gucauuguaugugcucagg

SEQ ID NO: 1755267 - RNA, 19 nt, Artificial Sequence
  Description of Artificial Sequence: Synthetic oligonucleotide
auguuggucaaaagaacca

SEQ ID NO: 1755268 - RNA, 19 nt, Artificial Sequence
  Description of Artificial Sequence: Synthetic oligonucleotide
ccuuucuuaugguaaggcc

SEQ ID NO: 1755269 - RNA, 19 nt, Artificial Sequence
  Description of Artificial Sequence: Synthetic oligonucleotide
agcaagcugguugucuuuc

SEQ ID NO: 1755270 - RNA, 19 nt, Artificial Sequence
  Description of Artificial Sequence: Synthetic oligonucleotide
acguugauucuuacauucg

SEQ ID NO: 1755271 - RNA, 19 nt, Artificial Sequence
  Description of Artificial Sequence: Synthetic oligonucleotide
agcguccauucuccaaaac

SEQ ID NO: 1755272 - RNA, 19 nt, Artificial Sequence
  Description of Artificial Sequence: Synthetic oligonucleotide
agagcaagcugguugucuu

SEQ ID NO: 1755273 - RNA, 19 nt, Artificial Sequence
  Description of Artificial Sequence: Synthetic oligonucleotide
gcuaacacauuggucauug

SEQ ID NO: 1755274 - RNA, 19 nt, Artificial Sequence
  Description of Artificial Sequence: Synthetic oligonucleotide
acguuuagggaggaggaga

SEQ ID NO: 1755275 - RNA, 19 nt, Artificial Sequence
  Description of Artificial Sequence: Synthetic oligonucleotide
ccaucaguagcuuaccauc

SEQ ID NO: 1755276 - RNA, 19 nt, Artificial Sequence
  Description of Artificial Sequence: Synthetic oligonucleotide
caccuauguaugucccacg

SEQ ID NO: 1755277 - RNA, 19 nt, Artificial Sequence
  Description of Artificial Sequence: Synthetic oligonucleotide
gcaucuuauuccauuaaac

SEQ ID NO: 1755278 - RNA, 19 nt, Artificial Sequence
  Description of Artificial Sequence: Synthetic oligonucleotide
cuuuagugguaacauuuaa

SEQ ID NO: 1755279 - RNA, 19 nt, Artificial Sequence
  Description of Artificial Sequence: Synthetic oligonucleotide
ugucccacguugauucuua

SEQ ID NO: 1755280 - RNA, 19 nt, Artificial Sequence
  Description of Artificial Sequence: Synthetic oligonucleotide
caccugauucauucgagga

SEQ ID NO: 1755281 - RNA, 19 nt, Artificial Sequence
  Description of Artificial Sequence: Synthetic oligonucleotide
caucaccugauucauucga

SEQ ID NO: 1755282 - RNA, 19 nt, Artificial Sequence
  Description of Artificial Sequence: Synthetic oligonucleotide
agcguggcuggggaaauuc

SEQ ID NO: 1755283 - RNA, 19 nt, Artificial Sequence
  Description of Artificial Sequence: Synthetic oligonucleotide
gcaaaaguuaagcuaauau

SEQ ID NO: 1755284 - RNA, 19 nt, Artificial Sequence
  Description of Artificial Sequence: Synthetic oligonucleotide
auaguagacauggcaaauu

SEQ ID NO: 1755285 - RNA, 19 nt, Artificial Sequence
  Description of Artificial Sequence: Synthetic oligonucleotide
gagcaagccauagagaaau

SEQ ID NO: 1755286 - RNA, 19 nt, Artificial Sequence
  Description of Artificial Sequence: Synthetic oligonucleotide
aguaggcaaagaauuuccu

SEQ ID NO: 1755287 - RNA, 19 nt, Artificial Sequence
  Description of Artificial Sequence: Synthetic oligonucleotide
uguaugucccacguugauu

SEQ ID NO: 1755288 - RNA, 19 nt, Artificial Sequence
  Description of Artificial Sequence: Synthetic oligonucleotide
ucccacguugauucuuaca

SEQ ID NO: 1755289 - RNA, 19 nt, Artificial Sequence
  Description of Artificial Sequence: Synthetic oligonucleotide
auaaaauucugaagugcua

SEQ ID NO: 1755290 - RNA, 19 nt, Artificial Sequence
  Description of Artificial Sequence: Synthetic oligonucleotide
agcgcgcaugguuucacca

SEQ ID NO: 1755291 - RNA, 19 nt, Artificial Sequence
  Description of Artificial Sequence: Synthetic oligonucleotide
cuuucacgcuuucuaccug

SEQ ID NO: 1755292 - RNA, 19 nt, Artificial Sequence
  Description of Artificial Sequence: Synthetic oligonucleotide
ucuuagcgcgcaugguuuc

SEQ ID NO: 1755293 - RNA, 19 nt, Artificial Sequence
  Description of Artificial Sequence: Synthetic oligonucleotide
ccaaugugaacccaaacaa

SEQ ID NO: 1755294 - RNA, 19 nt, Artificial Sequence
  Description of Artificial Sequence: Synthetic oligonucleotide
agguugaauaugucauuuu

SEQ ID NO: 1755295 - RNA, 19 nt, Artificial Sequence
  Description of Artificial Sequence: Synthetic oligonucleotide
gguauacauaaaauucuga

SEQ ID NO: 1755296 - RNA, 19 nt, Artificial Sequence
  Description of Artificial Sequence: Synthetic oligonucleotide
cuauaugguuaacauaaau

SEQ ID NO: 1755297 - RNA, 19 nt, Artificial Sequence
  Description of Artificial Sequence: Synthetic oligonucleotide
uaucuuugauaggacucau

SEQ ID NO: 1755298 - RNA, 19 nt, Artificial Sequence
  Description of Artificial Sequence: Synthetic oligonucleotide
cugaagugcuaaguaaaca

SEQ ID NO: 1755299 - RNA, 19 nt, Artificial Sequence
  Description of Artificial Sequence: Synthetic oligonucleotide
guugucuuucacaccuaug

SEQ ID NO: 1755300 - RNA, 19 nt, Artificial Sequence
  Description of Artificial Sequence: Synthetic oligonucleotide
ggaguaggcaaagaauuuc

SEQ ID NO: 1755301 - RNA, 19 nt, Artificial Sequence
  Description of Artificial Sequence: Synthetic oligonucleotide
ccaaagugauagcucuugg

SEQ ID NO: 1755302 - RNA, 19 nt, Artificial Sequence
  Description of Artificial Sequence: Synthetic oligonucleotide
agcuauuccuuuaguagau

SEQ ID NO: 1755303 - RNA, 19 nt, Artificial Sequence
  Description of Artificial Sequence: Synthetic oligonucleotide
caguagcuuaccauccaca

SEQ ID NO: 1755304 - RNA, 19 nt, Artificial Sequence
  Description of Artificial Sequence: Synthetic oligonucleotide
caugguuucaccagggcuu

SEQ ID NO: 1755305 - RNA, 19 nt, Artificial Sequence
  Description of Artificial Sequence: Synthetic oligonucleotide
gguaagcaaagcuauuccu

SEQ ID NO: 1755306 - RNA, 19 nt, Artificial Sequence
  Description of Artificial Sequence: Synthetic oligonucleotide
gaggggauugacacuuuuc

SEQ ID NO: 1755307 - RNA, 19 nt, Artificial Sequence
  Description of Artificial Sequence: Synthetic oligonucleotide
auagcucuugggaacuggu

SEQ ID NO: 1755308 - RNA, 19 nt, Artificial Sequence
  Description of Artificial Sequence: Synthetic oligonucleotide
ggggagacucauaguaacg

SEQ ID NO: 1755309 - RNA, 19 nt, Artificial Sequence
  Description of Artificial Sequence: Synthetic oligonucleotide
acauagucagaggacuuuu

SEQ ID NO: 1755310 - RNA, 19 nt, Artificial Sequence
  Description of Artificial Sequence: Synthetic oligonucleotide
agcaaaaguuaagcuaaua

SEQ ID NO: 1755311 - RNA, 19 nt, Artificial Sequence
  Description of Artificial Sequence: Synthetic oligonucleotide
ugccuguugcgcugcucag

SEQ ID NO: 1755312 - RNA, 19 nt, Artificial Sequence
  Description of Artificial Sequence: Synthetic oligonucleotide
uucacgcuuucuaccugau

SEQ ID NO: 1755313 - RNA, 19 nt, Artificial Sequence
  Description of Artificial Sequence: Synthetic oligonucleotide
cauucgaaagaaacauagu

SEQ ID NO: 1755314 - RNA, 19 nt, Artificial Sequence
  Description of Artificial Sequence: Synthetic oligonucleotide
ggugagaaggauucuuucu

SEQ ID NO: 1755315 - RNA, 19 nt, Artificial Sequence
  Description of Artificial Sequence: Synthetic oligonucleotide
aguaacguagcagcaucuu

SEQ ID NO: 1755316 - RNA, 19 nt, Artificial Sequence
  Description of Artificial Sequence: Synthetic oligonucleotide
agcauacaagcaucuuauu

SEQ ID NO: 1755317 - RNA, 19 nt, Artificial Sequence
  Description of Artificial Sequence: Synthetic oligonucleotide
acuauaugguuaacauaaa

SEQ ID NO: 1755318 - RNA, 19 nt, Artificial Sequence
  Description of Artificial Sequence: Synthetic oligonucleotide
gguuucaccagggcuuugc

SEQ ID NO: 1755319 - RNA, 19 nt, Artificial Sequence
  Description of Artificial Sequence: Synthetic oligonucleotide
uuagcgcgcaugguuucac

SEQ ID NO: 1755320 - RNA, 19 nt, Artificial Sequence
  Description of Artificial Sequence: Synthetic oligonucleotide
uagcgcgcaugguuucacc

SEQ ID NO: 1755321 - RNA, 19 nt, Artificial Sequence
  Description of Artificial Sequence: Synthetic oligonucleotide
uaacuuucgguggguuccu

SEQ ID NO: 1755322 - RNA, 19 nt, Artificial Sequence
  Description of Artificial Sequence: Synthetic oligonucleotide
uagcguccauucuccaaaa

SEQ ID NO: 1755323 - RNA, 19 nt, Artificial Sequence
  Description of Artificial Sequence: Synthetic oligonucleotide
ggggauugacacuuuucca

SEQ ID NO: 1755324 - RNA, 19 nt, Artificial Sequence
  Description of Artificial Sequence: Synthetic oligonucleotide
accauuagguauacauaaa

SEQ ID NO: 1755325 - RNA, 19 nt, Artificial Sequence
  Description of Artificial Sequence: Synthetic oligonucleotide
ugaucacauagcguccauu

SEQ ID NO: 1755326 - RNA, 19 nt, Artificial Sequence
  Description of Artificial Sequence: Synthetic oligonucleotide
guggguuccuucucaaagu

SEQ ID NO: 1755327 - RNA, 19 nt, Artificial Sequence
  Description of Artificial Sequence: Synthetic oligonucleotide
cacucuuucuuuaguggua

SEQ ID NO: 1755328 - RNA, 19 nt, Artificial Sequence
  Description of Artificial Sequence: Synthetic oligonucleotide
ucgguggguuccuucucaa

SEQ ID NO: 1755329 - RNA, 19 nt, Artificial Sequence
  Description of Artificial Sequence: Synthetic oligonucleotide
agagcaagccauagagaaa

SEQ ID NO: 1755330 - RNA, 19 nt, Artificial Sequence
  Description of Artificial Sequence: Synthetic oligonucleotide
cacauuggucauuguaugu

SEQ ID NO: 1755331 - RNA, 19 nt, Artificial Sequence
  Description of Artificial Sequence: Synthetic oligonucleotide
cacaccuauguauguccca

SEQ ID NO: 1755332 - RNA, 19 nt, Artificial Sequence
  Description of Artificial Sequence: Synthetic oligonucleotide
ucacgcuuucuaccugauu

SEQ ID NO: 1755333 - RNA, 19 nt, Artificial Sequence
  Description of Artificial Sequence: Synthetic oligonucleotide
ggaggaggagauauguuaa

SEQ ID NO: 1755334 - RNA, 19 nt, Artificial Sequence
  Description of Artificial Sequence: Synthetic oligonucleotide
gaaugacguuuagggagga

SEQ ID NO: 1755335 - RNA, 19 nt, Artificial Sequence
  Description of Artificial Sequence: Synthetic oligonucleotide
ugguugucuuucacaccua

SEQ ID NO: 1755336 - RNA, 19 nt, Artificial Sequence
  Description of Artificial Sequence: Synthetic oligonucleotide
acggagccucauauaguag

SEQ ID NO: 1755337 - RNA, 19 nt, Artificial Sequence
  Description of Artificial Sequence: Synthetic oligonucleotide
ggagacucauaguaacgua

SEQ ID NO: 1755338 - RNA, 19 nt, Artificial Sequence
  Description of Artificial Sequence: Synthetic oligonucleotide
caccaucaguagcuuacca

SEQ ID NO: 1755339 - RNA, 19 nt, Artificial Sequence
  Description of Artificial Sequence: Synthetic oligonucleotide
gcguccauucuccaaaacu

SEQ ID NO: 1755340 - RNA, 19 nt, Artificial Sequence
  Description of Artificial Sequence: Synthetic oligonucleotide
uuugccuguugcgcugcuc

SEQ ID NO: 1755341 - RNA, 19 nt, Artificial Sequence
  Description of Artificial Sequence: Synthetic oligonucleotide
cauaguaacguagcagcau

SEQ ID NO: 1755342 - RNA, 19 nt, Artificial Sequence
  Description of Artificial Sequence: Synthetic oligonucleotide
gcaugguuucaccagggcu

SEQ ID NO: 1755343 - RNA, 19 nt, Artificial Sequence
  Description of Artificial Sequence: Synthetic oligonucleotide
gcgcgcaugguuucaccag

SEQ ID NO: 1755344 - RNA, 19 nt, Artificial Sequence
  Description of Artificial Sequence: Synthetic oligonucleotide
acggggagacucauaguaa

SEQ ID NO: 1755345 - RNA, 19 nt, Artificial Sequence
  Description of Artificial Sequence: Synthetic oligonucleotide
ugguaacauuuaaguuguu

SEQ ID NO: 1755346 - RNA, 19 nt, Artificial Sequence
  Description of Artificial Sequence: Synthetic oligonucleotide
gaacggagccucauauagu

SEQ ID NO: 1755347 - RNA, 19 nt, Artificial Sequence
  Description of Artificial Sequence: Synthetic oligonucleotide
gccucauauaguagacaug

SEQ ID NO: 1755348 - RNA, 19 nt, Artificial Sequence
  Description of Artificial Sequence: Synthetic oligonucleotide
cguugauucuuacauucga

SEQ ID NO: 1755349 - RNA, 19 nt, Artificial Sequence
  Description of Artificial Sequence: Synthetic oligonucleotide
gucccacguugauucuuac

SEQ ID NO: 1755350 - RNA, 19 nt, Artificial Sequence
  Description of Artificial Sequence: Synthetic oligonucleotide
cccacguugauucuuacau

SEQ ID NO: 1755351 - RNA, 19 nt, Artificial Sequence
  Description of Artificial Sequence: Synthetic oligonucleotide
uggggaaauucuggagguu

SEQ ID NO: 1755352 - RNA, 19 nt, Artificial Sequence
  Description of Artificial Sequence: Synthetic oligonucleotide
cagaacggagccucauaua

SEQ ID NO: 1755353 - RNA, 19 nt, Artificial Sequence
  Description of Artificial Sequence: Synthetic oligonucleotide
gaauaacuuucgguggguu

SEQ ID NO: 1755354 - RNA, 19 nt, Artificial Sequence
  Description of Artificial Sequence: Synthetic oligonucleotide
gaacggggagacucauagu

SEQ ID NO: 1755355 - RNA, 19 nt, Artificial Sequence
  Description of Artificial Sequence: Synthetic oligonucleotide
cuuagcgcgcaugguuuca

SEQ ID NO: 1755356 - RNA, 19 nt, Artificial Sequence
  Description of Artificial Sequence: Synthetic oligonucleotide
cgcgcaugguuucaccagg

SEQ ID NO: 1755357 - RNA, 19 nt, Artificial Sequence
  Description of Artificial Sequence: Synthetic oligonucleotide
ggucuccuuucuuauggua

SEQ ID NO: 1755358 - RNA, 19 nt, Artificial Sequence
  Description of Artificial Sequence: Synthetic oligonucleotide
uucgaggaacggggagacu

SEQ ID NO: 1755359 - RNA, 19 nt, Artificial Sequence
  Description of Artificial Sequence: Synthetic oligonucleotide
cuagguaagcaaagcuauu

SEQ ID NO: 1755360 - RNA, 19 nt, Artificial Sequence
  Description of Artificial Sequence: Synthetic oligonucleotide
agcuaacacauuggucauu

SEQ ID NO: 1755361 - RNA, 19 nt, Artificial Sequence
  Description of Artificial Sequence: Synthetic oligonucleotide
ugguuucaccagggcuuug

SEQ ID NO: 1755362 - RNA, 19 nt, Artificial Sequence
  Description of Artificial Sequence: Synthetic oligonucleotide
cgaaagaaacauagucaga

SEQ ID NO: 1755363 - RNA, 19 nt, Artificial Sequence
  Description of Artificial Sequence: Synthetic oligonucleotide
aacuuucgguggguuccuu

SEQ ID NO: 1755364 - RNA, 19 nt, Artificial Sequence
  Description of Artificial Sequence: Synthetic oligonucleotide
gguugucuuucacaccuau

SEQ ID NO: 1755365 - RNA, 19 nt, Artificial Sequence
  Description of Artificial Sequence: Synthetic oligonucleotide
cuaacacauuggucauugu

SEQ ID NO: 1755366 - RNA, 19 nt, Artificial Sequence
  Description of Artificial Sequence: Synthetic oligonucleotide
ggagguugaauaugucauu

SEQ ID NO: 1755367 - RNA, 19 nt, Artificial Sequence
  Description of Artificial Sequence: Synthetic oligonucleotide
gcaggaguaggcaaagaau

SEQ ID NO: 1755368 - RNA, 19 nt, Artificial Sequence
  Description of Artificial Sequence: Synthetic oligonucleotide
cuaccugauuuuagugaau

SEQ ID NO: 1755369 - RNA, 19 nt, Artificial Sequence
  Description of Artificial Sequence: Synthetic oligonucleotide
gagcaaaaguuaagcuaau

SEQ ID NO: 1755370 - RNA, 19 nt, Artificial Sequence
  Description of Artificial Sequence: Synthetic oligonucleotide
cuucaacauugaucacaua

SEQ ID NO: 1755371 - RNA, 19 nt, Artificial Sequence
  Description of Artificial Sequence: Synthetic oligonucleotide
gcuuugccuguugcgcugc

SEQ ID NO: 1755372 - RNA, 19 nt, Artificial Sequence
  Description of Artificial Sequence: Synthetic oligonucleotide
cgcaugguuucaccagggc

SEQ ID NO: 1755373 - RNA, 19 nt, Artificial Sequence
  Description of Artificial Sequence: Synthetic oligonucleotide
agcaagccauagagaaauu

SEQ ID NO: 1755374 - RNA, 19 nt, Artificial Sequence
  Description of Artificial Sequence: Synthetic oligonucleotide
ccagaacggagccucauau

SEQ ID NO: 1755375 - RNA, 19 nt, Artificial Sequence
  Description of Artificial Sequence: Synthetic oligonucleotide
agcuuaccauccacaccau

SEQ ID NO: 1755376 - RNA, 19 nt, Artificial Sequence
  Description of Artificial Sequence: Synthetic oligonucleotide
aggaacggggagacucaua

SEQ ID NO: 1755377 - RNA, 19 nt, Artificial Sequence
  Description of Artificial Sequence: Synthetic oligonucleotide
gaggaacggggagacucau

SEQ ID NO: 1755378 - RNA, 19 nt, Artificial Sequence
  Description of Artificial Sequence: Synthetic oligonucleotide
ggcaugcagccugaugucu

SEQ ID NO: 1755379 - RNA, 19 nt, Artificial Sequence
  Description of Artificial Sequence: Synthetic oligonucleotide
cguuuagggaggaggagau

SEQ ID NO: 1755380 - RNA, 19 nt, Artificial Sequence
  Description of Artificial Sequence: Synthetic oligonucleotide
ggaucuucuuagcgcgcau

SEQ ID NO: 1755381 - RNA, 19 nt, Artificial Sequence
  Description of Artificial Sequence: Synthetic oligonucleotide
cuacuagagcaagcugguu

SEQ ID NO: 1755382 - RNA, 19 nt, Artificial Sequence
  Description of Artificial Sequence: Synthetic oligonucleotide
gcuauuccuuuaguagauu

SEQ ID NO: 1755383 - RNA, 19 nt, Artificial Sequence
  Description of Artificial Sequence: Synthetic oligonucleotide
ccuauguaugucccacguu

SEQ ID NO: 1755384 - RNA, 19 nt, Artificial Sequence
  Description of Artificial Sequence: Synthetic oligonucleotide
cagcguggcuggggaaauu

SEQ ID NO: 1755385 - RNA, 19 nt, Artificial Sequence
  Description of Artificial Sequence: Synthetic oligonucleotide
auuaccaacguuuauuccc

SEQ ID NO: 1755386 - RNA, 19 nt, Artificial Sequence
  Description of Artificial Sequence: Synthetic oligonucleotide
acuguagugacguaggggc

SEQ ID NO: 1755387 - RNA, 19 nt, Artificial Sequence
  Description of Artificial Sequence: Synthetic oligonucleotide
uauucccugauuuugaagg

SEQ ID NO: 1755388 - RNA, 19 nt, Artificial Sequence
  Description of Artificial Sequence: Synthetic oligonucleotide
  modified_base (2)..(2): a, c, u, g, unknown or other
  modified_base (6)..(6): a, c, u, g, unknown or other
unacunauugcugagaagc

SEQ ID NO: 1755389 - RNA, 19 nt, Artificial Sequence
  Description of Artificial Sequence: Synthetic oligonucleotide
acucagucaaaucugaguc

SEQ ID NO: 1755390 - RNA, 19 nt, Artificial Sequence
  Description of Artificial Sequence: Synthetic oligonucleotide
aaagggagcuaacaucagc

SEQ ID NO: 1755391 - RNA, 19 nt, Artificial Sequence
  Description of Artificial Sequence: Synthetic oligonucleotide
aaaaucgccaccaaacagg

SEQ ID NO: 1755392 - RNA, 19 nt, Artificial Sequence
  Description of Artificial Sequence: Synthetic oligonucleotide
  modified_base (7)..(7): a, c, u, g, unknown or other
  modified_base (11)..(11): a, c, u, g, unknown or other
aagguunacunauugcuga

SEQ ID NO: 1755393 - RNA, 19 nt, Artificial Sequence
  Description of Artificial Sequence: Synthetic oligonucleotide
uguucauuuaucaaggaua

SEQ ID NO: 1755394 - RNA, 19 nt, Artificial Sequence
  Description of Artificial Sequence: Synthetic oligonucleotide
acaaaguaguauaagauuc

SEQ ID NO: 1755395 - RNA, 19 nt, Artificial Sequence
  Description of Artificial Sequence: Synthetic oligonucleotide
cucacuagcaacaacaguc

SEQ ID NO: 1755396 - RNA, 19 nt, Artificial Sequence
  Description of Artificial Sequence: Synthetic oligonucleotide
ugacguaggggcuagaagc

SEQ ID NO: 1755397 - RNA, 19 nt, Artificial Sequence
  Description of Artificial Sequence: Synthetic oligonucleotide
aaaacauugcugaagccuc

SEQ ID NO: 1755398 - RNA, 19 nt, Artificial Sequence
  Description of Artificial Sequence: Synthetic oligonucleotide
  modified_base (3)..(3): a, c, u, g, unknown or other
cunauugcugagaagcagg

SEQ ID NO: 1755399 - RNA, 19 nt, Artificial Sequence
  Description of Artificial Sequence: Synthetic oligonucleotide
aggaauggauuccugaagg

SEQ ID NO: 1755400 - RNA, 19 nt, Artificial Sequence
  Description of Artificial Sequence: Synthetic oligonucleotide
aacuacuucauuugugaug

SEQ ID NO: 1755401 - RNA, 19 nt, Artificial Sequence
  Description of Artificial Sequence: Synthetic oligonucleotide
ucaacuacuucauuuguga

SEQ ID NO: 1755402 - RNA, 19 nt, Artificial Sequence
  Description of Artificial Sequence: Synthetic oligonucleotide
aacacuggaguagaggccg

SEQ ID NO: 1755403 - RNA, 19 nt, Artificial Sequence
  Description of Artificial Sequence: Synthetic oligonucleotide
agugucagauauuaccaac

SEQ ID NO: 1755404 - RNA, 19 nt, Artificial Sequence
  Description of Artificial Sequence: Synthetic oligonucleotide
cagaccaacacccagcucc

SEQ ID NO: 1755405 - RNA, 19 nt, Artificial Sequence
  Description of Artificial Sequence: Synthetic oligonucleotide
  modified_base (3)..(3): a, c, u, g, unknown or other
  modified_base (7)..(7): a, c, u, g, unknown or other
uunacunauugcugagaag

SEQ ID NO: 1755406 - RNA, 19 nt, Artificial Sequence
  Description of Artificial Sequence: Synthetic oligonucleotide
augguuguuucccagcuac

SEQ ID NO: 1755407 - RNA, 19 nt, Artificial Sequence
  Description of Artificial Sequence: Synthetic oligonucleotide
cacaguauguacauguggc

SEQ ID NO: 1755408 - RNA, 19 nt, Artificial Sequence
  Description of Artificial Sequence: Synthetic oligonucleotide
cuacuguagacccaagugg

SEQ ID NO: 1755409 - RNA, 19 nt, Artificial Sequence
  Description of Artificial Sequence: Synthetic oligonucleotide
aucugagucauggaaauac

SEQ ID NO: 1755410 - RNA, 19 nt, Artificial Sequence
  Description of Artificial Sequence: Synthetic oligonucleotide
aacguuuauucccugauuu

SEQ ID NO: 1755411 - RNA, 19 nt, Artificial Sequence
  Description of Artificial Sequence: Synthetic oligonucleotide
agucaaaucugagucaugg

SEQ ID NO: 1755412 - RNA, 19 nt, Artificial Sequence
  Description of Artificial Sequence: Synthetic oligonucleotide
uacauguaggaacagugca

SEQ ID NO: 1755413 - RNA, 19 nt, Artificial Sequence
  Description of Artificial Sequence: Synthetic oligonucleotide
aaaucgccaccaaacaggc

SEQ ID NO: 1755414 - RNA, 19 nt, Artificial Sequence
  Description of Artificial Sequence: Synthetic oligonucleotide
ugccuggugugcaaaaucg

SEQ ID NO: 1755415 - RNA, 19 nt, Artificial Sequence
  Description of Artificial Sequence: Synthetic oligonucleotide
uuguuucccagcuacaugu

SEQ ID NO: 1755416 - RNA, 19 nt, Artificial Sequence
  Description of Artificial Sequence: Synthetic oligonucleotide
aaugaaacccugacccucc

SEQ ID NO: 1755417 - RNA, 19 nt, Artificial Sequence
  Description of Artificial Sequence: Synthetic oligonucleotide
acuagauggugguagauga

SEQ ID NO: 1755418 - RNA, 19 nt, Artificial Sequence
  Description of Artificial Sequence: Synthetic oligonucleotide
uggguuacaucaaacaguc

SEQ ID NO: 1755419 - RNA, 19 nt, Artificial Sequence
  Description of Artificial Sequence: Synthetic oligonucleotide
aguaacuagauggugguag

SEQ ID NO: 1755420 - RNA, 19 nt, Artificial Sequence
  Description of Artificial Sequence: Synthetic oligonucleotide
  modified_base (10)..(10): a, c, u, g, unknown or other
gaagcagganccaugcaag

SEQ ID NO: 1755421 - RNA, 19 nt, Artificial Sequence
  Description of Artificial Sequence: Synthetic oligonucleotide
ugcgggaaaacauugcuga

SEQ ID NO: 1755422 - RNA, 19 nt, Artificial Sequence
  Description of Artificial Sequence: Synthetic oligonucleotide
acucacaguauguacaugu

SEQ ID NO: 1755423 - RNA, 19 nt, Artificial Sequence
  Description of Artificial Sequence: Synthetic oligonucleotide
aaaaguagggugagacccc

SEQ ID NO: 1755424 - RNA, 19 nt, Artificial Sequence
  Description of Artificial Sequence: Synthetic oligonucleotide
agagcuggacuucaagaac

SEQ ID NO: 1755425 - RNA, 19 nt, Artificial Sequence
  Description of Artificial Sequence: Synthetic oligonucleotide
aguauguacauguggcaag

SEQ ID NO: 1755426 - RNA, 19 nt, Artificial Sequence
  Description of Artificial Sequence: Synthetic oligonucleotide
uagcauugaaguaacuaga

SEQ ID NO: 1755427 - RNA, 19 nt, Artificial Sequence
  Description of Artificial Sequence: Synthetic oligonucleotide
uggcucacuagcaacaaca

SEQ ID NO: 1755428 - RNA, 19 nt, Artificial Sequence
  Description of Artificial Sequence: Synthetic oligonucleotide
uacaaaguaguauaagauu

SEQ ID NO: 1755429 - RNA, 19 nt, Artificial Sequence
  Description of Artificial Sequence: Synthetic oligonucleotide
auagucaacuacuucauuu

SEQ ID NO: 1755430 - RNA, 19 nt, Artificial Sequence
  Description of Artificial Sequence: Synthetic oligonucleotide
gauaaagucuuggauugag

SEQ ID NO: 1755431 - RNA, 19 nt, Artificial Sequence
  Description of Artificial Sequence: Synthetic oligonucleotide
acugauauagucaacuacu

SEQ ID NO: 1755432 - RNA, 19 nt, Artificial Sequence
  Description of Artificial Sequence: Synthetic oligonucleotide
auugcugaagccuccacca

SEQ ID NO: 1755433 - RNA, 19 nt, Artificial Sequence
  Description of Artificial Sequence: Synthetic oligonucleotide
  modified_base (13)..(13): a, c, u, g, unknown or other
  modified_base (17)..(17): a, c, u, g, unknown or other
uguggcaagguunacunau

SEQ ID NO: 1755434 - RNA, 19 nt, Artificial Sequence
  Description of Artificial Sequence: Synthetic oligonucleotide
uggaagaugaaauguguuc

SEQ ID NO: 1755435 - RNA, 19 nt, Artificial Sequence
  Description of Artificial Sequence: Synthetic oligonucleotide
  modified_base (6)..(6): a, c, u, g, unknown or other
cagganccaugcaagaagg

SEQ ID NO: 1755436 - RNA, 19 nt, Artificial Sequence
  Description of Artificial Sequence: Synthetic oligonucleotide
  modified_base (11)..(11): a, c, u, g, unknown or other
agaagcagganccaugcaa

SEQ ID NO: 1755437 - RNA, 19 nt, Artificial Sequence
  Description of Artificial Sequence: Synthetic oligonucleotide
auuucaauacuguaugguu

SEQ ID NO: 1755438 - RNA, 19 nt, Artificial Sequence
  Description of Artificial Sequence: Synthetic oligonucleotide
ugcagcaacgucuggguag

SEQ ID NO: 1755439 - RNA, 19 nt, Artificial Sequence
  Description of Artificial Sequence: Synthetic oligonucleotide
gaagcuaggacggaacuug

SEQ ID NO: 1755440 - RNA, 19 nt, Artificial Sequence
  Description of Artificial Sequence: Synthetic oligonucleotide
uggaaauacuguuccagga

SEQ ID NO: 1755441 - RNA, 19 nt, Artificial Sequence
  Description of Artificial Sequence: Synthetic oligonucleotide
  modified_base (10)..(10): a, c, u, g, unknown or other
  modified_base (14)..(14): a, c, u, g, unknown or other
ggcaagguunacunauugc

SEQ ID NO: 1755442 - RNA, 19 nt, Artificial Sequence
  Description of Artificial Sequence: Synthetic oligonucleotide
  modified_base (6)..(6): a, c, u, g, unknown or other
  modified_base (10)..(10): a, c, u, g, unknown or other
agguunacunauugcugag

SEQ ID NO: 1755443 - RNA, 19 nt, Artificial Sequence
  Description of Artificial Sequence: Synthetic oligonucleotide
agaaagggagcuaacauca

SEQ ID NO: 1755444 - RNA, 19 nt, Artificial Sequence
  Description of Artificial Sequence: Synthetic oligonucleotide
agggauacaaaguaguaua

SEQ ID NO: 1755445 - RNA, 19 nt, Artificial Sequence
  Description of Artificial Sequence: Synthetic oligonucleotide
uuaccaacguuuauucccu

SEQ ID NO: 1755446 - RNA, 19 nt, Artificial Sequence
  Description of Artificial Sequence: Synthetic oligonucleotide
caaaaucgccaccaaacag

SEQ ID NO: 1755447 - RNA, 19 nt, Artificial Sequence
  Description of Artificial Sequence: Synthetic oligonucleotide
  modified_base (2)..(2): a, c, u, g, unknown or other
unauugcugagaagcagga

SEQ ID NO: 1755448 - RNA, 19 nt, Artificial Sequence
  Description of Artificial Sequence: Synthetic oligonucleotide
ugucagauauuaccaacgu

SEQ ID NO: 1755449 - RNA, 19 nt, Artificial Sequence
  Description of Artificial Sequence: Synthetic oligonucleotide
guagccaucagaaagugca

SEQ ID NO: 1755450 - RNA, 19 nt, Artificial Sequence
  Description of Artificial Sequence: Synthetic oligonucleotide
  modified_base (4)..(4): a, c, u, g, unknown or other
  modified_base (8)..(8): a, c, u, g, unknown or other
guunacunauugcugagaa

SEQ ID NO: 1755451 - RNA, 19 nt, Artificial Sequence
  Description of Artificial Sequence: Synthetic oligonucleotide
cuucauucagacaggacuc

SEQ ID NO: 1755452 - RNA, 19 nt, Artificial Sequence
  Description of Artificial Sequence: Synthetic oligonucleotide
uuauucccugauuuugaag

SEQ ID NO: 1755453 - RNA, 19 nt, Artificial Sequence
  Description of Artificial Sequence: Synthetic oligonucleotide
uuacucaguaaucuuugaa

SEQ ID NO: 1755454 - RNA, 19 nt, Artificial Sequence
  Description of Artificial Sequence: Synthetic oligonucleotide
uauuaccaacguuuauucc

SEQ ID NO: 1755455 - RNA, 19 nt, Artificial Sequence
  Description of Artificial Sequence: Synthetic oligonucleotide
uguaugguuguuucccagc

SEQ ID NO: 1755456 - RNA, 19 nt, Artificial Sequence
  Description of Artificial Sequence: Synthetic oligonucleotide
  modified_base (4)..(4): a, c, u, g, unknown or other
acunauugcugagaagcag

SEQ ID NO: 1755457 - RNA, 19 nt, Artificial Sequence
  Description of Artificial Sequence: Synthetic oligonucleotide
  modified_base (8)..(8): a, c, u, g, unknown or other
  modified_base (12)..(12): a, c, u, g, unknown or other
caagguunacunauugcug

SEQ ID NO: 1755458 - RNA, 19 nt, Artificial Sequence
  Description of Artificial Sequence: Synthetic oligonucleotide
aaaguagggugagaccccg

SEQ ID NO: 1755459 - RNA, 19 nt, Artificial Sequence
  Description of Artificial Sequence: Synthetic oligonucleotide
agaaagugcagcaacgucu

SEQ ID NO: 1755460 - RNA, 19 nt, Artificial Sequence
  Description of Artificial Sequence: Synthetic oligonucleotide
aagggagcuaacaucagcu

SEQ ID NO: 1755461 - RNA, 19 nt, Artificial Sequence
  Description of Artificial Sequence: Synthetic oligonucleotide
ggaauggggaccuuguugc

SEQ ID NO: 1755462 - RNA, 19 nt, Artificial Sequence
  Description of Artificial Sequence: Synthetic oligonucleotide
aacuagauggugguagaug

SEQ ID NO: 1755463 - RNA, 19 nt, Artificial Sequence
  Description of Artificial Sequence: Synthetic oligonucleotide
caagugucagauauuacca

SEQ ID NO: 1755464 - RNA, 19 nt, Artificial Sequence
  Description of Artificial Sequence: Synthetic oligonucleotide
uacuguagugacguagggg

SEQ ID NO: 1755465 - RNA, 19 nt, Artificial Sequence
  Description of Artificial Sequence: Synthetic oligonucleotide
gugucagauauuaccaacg

SEQ ID NO: 1755466 - RNA, 19 nt, Artificial Sequence
  Description of Artificial Sequence: Synthetic oligonucleotide
  modified_base (2)..(2): a, c, u, g, unknown or other
anccaugcaagaagggcuc

SEQ ID NO: 1755467 - RNA, 19 nt, Artificial Sequence
  Description of Artificial Sequence: Synthetic oligonucleotide
auacaaaguaguauaagau

SEQ ID NO: 1755468 - RNA, 19 nt, Artificial Sequence
  Description of Artificial Sequence: Synthetic oligonucleotide
uuuacucaguaaucuuuga

SEQ ID NO: 1755469 - RNA, 19 nt, Artificial Sequence
  Description of Artificial Sequence: Synthetic oligonucleotide
  modified_base (11)..(11): a, c, u, g, unknown or other
  modified_base (15)..(15): a, c, u, g, unknown or other
uggcaagguunacunauug

SEQ ID NO: 1755470 - RNA, 19 nt, Artificial Sequence
  Description of Artificial Sequence: Synthetic oligonucleotide
uuauugguggugccagagc

SEQ ID NO: 1755471 - RNA, 19 nt, Artificial Sequence
  Description of Artificial Sequence: Synthetic oligonucleotide
ucugagucauggaaauacu

SEQ ID NO: 1755472 - RNA, 19 nt, Artificial Sequence
  Description of Artificial Sequence: Synthetic oligonucleotide
aaauacuguuccaggaacu

SEQ ID NO: 1755473 - RNA, 19 nt, Artificial Sequence
  Description of Artificial Sequence: Synthetic oligonucleotide
uugaaguaacuagauggug

SEQ ID NO: 1755474 - RNA, 19 nt, Artificial Sequence
  Description of Artificial Sequence: Synthetic oligonucleotide
ucaagaacugggccacugc

SEQ ID NO: 1755475 - RNA, 19 nt, Artificial Sequence
  Description of Artificial Sequence: Synthetic oligonucleotide
gaaaacauugcugaagccu

SEQ ID NO: 1755476 - RNA, 19 nt, Artificial Sequence
  Description of Artificial Sequence: Synthetic oligonucleotide
auuauugguggugccagag

SEQ ID NO: 1755477 - RNA, 19 nt, Artificial Sequence
  Description of Artificial Sequence: Synthetic oligonucleotide
ucgucuccauaacucacag

SEQ ID NO: 1755478 - RNA, 19 nt, Artificial Sequence
  Description of Artificial Sequence: Synthetic oligonucleotide
guauguacauguggcaagg

SEQ ID NO: 1755479 - RNA, 19 nt, Artificial Sequence
  Description of Artificial Sequence: Synthetic oligonucleotide
cugagucauggaaauacug

SEQ ID NO: 1755480 - RNA, 19 nt, Artificial Sequence
  Description of Artificial Sequence: Synthetic oligonucleotide
agguuccagauacccaugg

SEQ ID NO: 1755481 - RNA, 19 nt, Artificial Sequence
  Description of Artificial Sequence: Synthetic oligonucleotide
auugaaguaacuagauggu

SEQ ID NO: 1755482 - RNA, 19 nt, Artificial Sequence
  Description of Artificial Sequence: Synthetic oligonucleotide
accacugauauagucaacu

SEQ ID NO: 1755483 - RNA, 19 nt, Artificial Sequence
  Description of Artificial Sequence: Synthetic oligonucleotide
  modified_base (7)..(7): a, c, u, g, unknown or other
gcagganccaugcaagaag

SEQ ID NO: 1755484 - RNA, 19 nt, Artificial Sequence
  Description of Artificial Sequence: Synthetic oligonucleotide
uucaugaacucgguguuga

SEQ ID NO: 1755485 - RNA, 19 nt, Artificial Sequence
  Description of Artificial Sequence: Synthetic oligonucleotide
ugcaagaagggcuccugug

SEQ ID NO: 1755486 - RNA, 19 nt, Artificial Sequence
  Description of Artificial Sequence: Synthetic oligonucleotide
guugcugacuacccaguag

SEQ ID NO: 1755487 - RNA, 19 nt, Artificial Sequence
  Description of Artificial Sequence: Synthetic oligonucleotide
uguguucauuuaucaagga

SEQ ID NO: 1755488 - RNA, 19 nt, Artificial Sequence
  Description of Artificial Sequence: Synthetic oligonucleotide
auugaguauucuguguuca

SEQ ID NO: 1755489 - RNA, 19 nt, Artificial Sequence
  Description of Artificial Sequence: Synthetic oligonucleotide
ucagucaaaucugagucau

SEQ ID NO: 1755490 - RNA, 19 nt, Artificial Sequence
  Description of Artificial Sequence: Synthetic oligonucleotide
cucgguguugacucucugg

SEQ ID NO: 1755491 - RNA, 19 nt, Artificial Sequence
  Description of Artificial Sequence: Synthetic oligonucleotide
cugccuaauuccaaguguc

SEQ ID NO: 1755492 - RNA, 19 nt, Artificial Sequence
  Description of Artificial Sequence: Synthetic oligonucleotide
uggugugcaaaaucgccac

SEQ ID NO: 1755493 - RNA, 19 nt, Artificial Sequence
  Description of Artificial Sequence: Synthetic oligonucleotide
caaaucugagucauggaaa

SEQ ID NO: 1755494 - RNA, 19 nt, Artificial Sequence
  Description of Artificial Sequence: Synthetic oligonucleotide
auggguuacaucaaacagu

SEQ ID NO: 1755495 - RNA, 19 nt, Artificial Sequence
  Description of Artificial Sequence: Synthetic oligonucleotide
cuccaugcugcugauaaag

SEQ ID NO: 1755496 - RNA, 19 nt, Artificial Sequence
  Description of Artificial Sequence: Synthetic oligonucleotide
cuaggacggaacuuguguc

SEQ ID NO: 1755497 - RNA, 19 nt, Artificial Sequence
  Description of Artificial Sequence: Synthetic oligonucleotide
acccaaguggagauguggc

SEQ ID NO: 1755498 - RNA, 19 nt, Artificial Sequence
  Description of Artificial Sequence: Synthetic oligonucleotide
  modified_base (9)..(9): a, c, u, g, unknown or other
aagcagganccaugcaaga

SEQ ID NO: 1755499 - RNA, 19 nt, Artificial Sequence
  Description of Artificial Sequence: Synthetic oligonucleotide
aacuggcaauuucaauacu

SEQ ID NO: 1755500 - RNA, 19 nt, Artificial Sequence
  Description of Artificial Sequence: Synthetic oligonucleotide
ugccuaauuccaaguguca

SEQ ID NO: 1755501 - RNA, 19 nt, Artificial Sequence
  Description of Artificial Sequence: Synthetic oligonucleotide
uagggauacaaaguaguau

SEQ ID NO: 1755502 - RNA, 19 nt, Artificial Sequence
  Description of Artificial Sequence: Synthetic oligonucleotide
acuagcauugaaguaacua

SEQ ID NO: 1755503 - RNA, 19 nt, Artificial Sequence
  Description of Artificial Sequence: Synthetic oligonucleotide
aggcgcaugaacucaguca

SEQ ID NO: 1755504 - RNA, 19 nt, Artificial Sequence
  Description of Artificial Sequence: Synthetic oligonucleotide
aaacaggcgcaugaacuca

SEQ ID NO: 1755505 - RNA, 19 nt, Artificial Sequence
  Description of Artificial Sequence: Synthetic oligonucleotide
aucuggaagaugaaaugug

SEQ ID NO: 1755506 - RNA, 19 nt, Artificial Sequence
  Description of Artificial Sequence: Synthetic oligonucleotide
agcugccuaauuccaagug

SEQ ID NO: 1755507 - RNA, 19 nt, Artificial Sequence
  Description of Artificial Sequence: Synthetic oligonucleotide
gaagguagguuuugauguc

SEQ ID NO: 1755508 - RNA, 19 nt, Artificial Sequence
  Description of Artificial Sequence: Synthetic oligonucleotide
cuacuguagugacguaggg

SEQ ID NO: 1755509 - RNA, 19 nt, Artificial Sequence
  Description of Artificial Sequence: Synthetic oligonucleotide
agugccgccuacuguagug

SEQ ID NO: 1755510 - RNA, 19 nt, Artificial Sequence
  Description of Artificial Sequence: Synthetic oligonucleotide
aagaugaaauguguucuuu

SEQ ID NO: 1755511 - RNA, 19 nt, Artificial Sequence
  Description of Artificial Sequence: Synthetic oligonucleotide
cuuccagagacagaccaac

SEQ ID NO: 1755512 - RNA, 19 nt, Artificial Sequence
  Description of Artificial Sequence: Synthetic oligonucleotide
ugaaggaagugccgccuac

SEQ ID NO: 1755513 - RNA, 19 nt, Artificial Sequence
  Description of Artificial Sequence: Synthetic oligonucleotide
aggcaaacaaacuggcaau

SEQ ID NO: 1755514 - RNA, 19 nt, Artificial Sequence
  Description of Artificial Sequence: Synthetic oligonucleotide
uggcuauuauugguggugc

SEQ ID NO: 1755515 - RNA, 19 nt, Artificial Sequence
  Description of Artificial Sequence: Synthetic oligonucleotide
  modified_base (4)..(4): a, c, u, g, unknown or other
gganccaugcaagaagggc

SEQ ID NO: 1755516 - RNA, 19 nt, Artificial Sequence
  Description of Artificial Sequence: Synthetic oligonucleotide
acuagcaacaacagucuga

SEQ ID NO: 1755517 - RNA, 19 nt, Artificial Sequence
  Description of Artificial Sequence: Synthetic oligonucleotide
ucgagcuacugaugccugg

SEQ ID NO: 1755518 - RNA, 19 nt, Artificial Sequence
  Description of Artificial Sequence: Synthetic oligonucleotide
ccuacuguagugacguagg

SEQ ID NO: 1755519 - RNA, 19 nt, Artificial Sequence
  Description of Artificial Sequence: Synthetic oligonucleotide
agauauuaccaacguuuau

SEQ ID NO: 1755520 - RNA, 19 nt, Artificial Sequence
  Description of Artificial Sequence: Synthetic oligonucleotide
uauagucaacuacuucauu

SEQ ID NO: 1755521 - RNA, 19 nt, Artificial Sequence
  Description of Artificial Sequence: Synthetic oligonucleotide
uauuauugguggugccaga

SEQ ID NO: 1755522 - RNA, 19 nt, Artificial Sequence
  Description of Artificial Sequence: Synthetic oligonucleotide
ucuccauaacucacaguau

SEQ ID NO: 1755523 - RNA, 19 nt, Artificial Sequence
  Description of Artificial Sequence: Synthetic oligonucleotide
agucuuggauugagaaagc

SEQ ID NO: 1755524 - RNA, 19 nt, Artificial Sequence
  Description of Artificial Sequence: Synthetic oligonucleotide
uccaagugucagauauuac

SEQ ID NO: 1755525 - RNA, 19 nt, Artificial Sequence
  Description of Artificial Sequence: Synthetic oligonucleotide
  modified_base (3)..(3): a, c, u, g, unknown or other
ganccaugcaagaagggcu

SEQ ID NO: 1755526 - RNA, 19 nt, Artificial Sequence
  Description of Artificial Sequence: Synthetic oligonucleotide
acagucugaggaaggaaag

SEQ ID NO: 1755527 - RNA, 19 nt, Artificial Sequence
  Description of Artificial Sequence: Synthetic oligonucleotide
gugacguaggggcuagaag

SEQ ID NO: 1755528 - RNA, 19 nt, Artificial Sequence
  Description of Artificial Sequence: Synthetic oligonucleotide
guaacuagauggugguaga

SEQ ID NO: 1755529 - RNA, 19 nt, Artificial Sequence
  Description of Artificial Sequence: Synthetic oligonucleotide
agggagucuucaucgucuc

SEQ ID NO: 1755530 - RNA, 19 nt, Artificial Sequence
  Description of Artificial Sequence: Synthetic oligonucleotide
caacgucuggguaggcacg

SEQ ID NO: 1755531 - RNA, 19 nt, Artificial Sequence
  Description of Artificial Sequence: Synthetic oligonucleotide
uggcaauuucaauacugua

SEQ ID NO: 1755532 - RNA, 19 nt, Artificial Sequence
  Description of Artificial Sequence: Synthetic oligonucleotide
cugcgggaaaacauugcug

SEQ ID NO: 1755533 - RNA, 19 nt, Artificial Sequence
  Description of Artificial Sequence: Synthetic oligonucleotide
uacccauggaauggggacc

SEQ ID NO: 1755534 - RNA, 19 nt, Artificial Sequence
  Description of Artificial Sequence: Synthetic oligonucleotide
acggccacuagcauugaag

SEQ ID NO: 1755535 - RNA, 19 nt, Artificial Sequence
  Description of Artificial Sequence: Synthetic oligonucleotide
uggugguagaugagagcug

SEQ ID NO: 1755536 - RNA, 19 nt, Artificial Sequence
  Description of Artificial Sequence: Synthetic oligonucleotide
accaacguuuauucccuga

SEQ ID NO: 1755537 - RNA, 19 nt, Artificial Sequence
  Description of Artificial Sequence: Synthetic oligonucleotide
ugaguauucuguguucauu

SEQ ID NO: 1755538 - RNA, 19 nt, Artificial Sequence
  Description of Artificial Sequence: Synthetic oligonucleotide
agcauugaaguaacuagau

SEQ ID NO: 1755539 - RNA, 19 nt, Artificial Sequence
  Description of Artificial Sequence: Synthetic oligonucleotide
gaaagggagcuaacaucag

SEQ ID NO: 1755540 - RNA, 19 nt, Artificial Sequence
  Description of Artificial Sequence: Synthetic oligonucleotide
accuagggauacaaaguag

SEQ ID NO: 1755541 - RNA, 19 nt, Artificial Sequence
  Description of Artificial Sequence: Synthetic oligonucleotide
uugaguauucuguguucau

SEQ ID NO: 1755542 - RNA, 19 nt, Artificial Sequence
  Description of Artificial Sequence: Synthetic oligonucleotide
uguugcugacuacccagua

SEQ ID NO: 1755543 - RNA, 19 nt, Artificial Sequence
  Description of Artificial Sequence: Synthetic oligonucleotide
gacaggacucauggcagcc

SEQ ID NO: 1755544 - RNA, 19 nt, Artificial Sequence
  Description of Artificial Sequence: Synthetic oligonucleotide
gcuaacaucagcugccuaa

SEQ ID NO: 1755545 - RNA, 19 nt, Artificial Sequence
  Description of Artificial Sequence: Synthetic oligonucleotide
auaaagucuuggauugaga

SEQ ID NO: 1755546 - RNA, 19 nt, Artificial Sequence
  Description of Artificial Sequence: Synthetic oligonucleotide
cuuuuacucaguaaucuuu

SEQ ID NO: 1755547 - RNA, 19 nt, Artificial Sequence
  Description of Artificial Sequence: Synthetic oligonucleotide
aggaagugccgccuacugu

SEQ ID NO: 1755548 - RNA, 19 nt, Artificial Sequence
  Description of Artificial Sequence: Synthetic oligonucleotide
acccugacccuccacuucu

SEQ ID NO: 1755549 - RNA, 19 nt, Artificial Sequence
  Description of Artificial Sequence: Synthetic oligonucleotide
guaggcacggccacuagca

SEQ ID NO: 1755550 - RNA, 19 nt, Artificial Sequence
  Description of Artificial Sequence: Synthetic oligonucleotide
uguagugacguaggggcua

SEQ ID NO: 1755551 - RNA, 19 nt, Artificial Sequence
  Description of Artificial Sequence: Synthetic oligonucleotide
cuacccaguagccaucaga

SEQ ID NO: 1755552 - RNA, 19 nt, Artificial Sequence
  Description of Artificial Sequence: Synthetic oligonucleotide
  modified_base (5)..(5): a, c, u, g, unknown or other
agganccaugcaagaaggg

SEQ ID NO: 1755553 - RNA, 19 nt, Artificial Sequence
  Description of Artificial Sequence: Synthetic oligonucleotide
cuccaccacugauauaguc

SEQ ID NO: 1755554 - RNA, 19 nt, Artificial Sequence
  Description of Artificial Sequence: Synthetic oligonucleotide
acguuuauucccugauuuu

SEQ ID NO: 1755555 - RNA, 19 nt, Artificial Sequence
  Description of Artificial Sequence: Synthetic oligonucleotide
gcaaaaucgccaccaaaca

SEQ ID NO: 1755556 - RNA, 19 nt, Artificial Sequence
  Description of Artificial Sequence: Synthetic oligonucleotide
cuagggauacaaaguagua

SEQ ID NO: 1755557 - RNA, 19 nt, Artificial Sequence
  Description of Artificial Sequence: Synthetic oligonucleotide
ucaugaacucgguguugac

SEQ ID NO: 1755558 - RNA, 19 nt, Artificial Sequence
  Description of Artificial Sequence: Synthetic oligonucleotide
gcaacgucuggguaggcac

SEQ ID NO: 1755559 - RNA, 19 nt, Artificial Sequence
  Description of Artificial Sequence: Synthetic oligonucleotide
aaucgccaccaaacaggcg

SEQ ID NO: 1755560 - RNA, 19 nt, Artificial Sequence
  Description of Artificial Sequence: Synthetic oligonucleotide
  modified_base (9)..(9): a, c, u, g, unknown or other
  modified_base (13)..(13): a, c, u, g, unknown or other
gcaagguunacunauugcu

SEQ ID NO: 1755561 - RNA, 19 nt, Artificial Sequence
  Description of Artificial Sequence: Synthetic oligonucleotide
ggcgcaugaacucagucaa

SEQ ID NO: 1755562 - RNA, 19 nt, Artificial Sequence
  Description of Artificial Sequence: Synthetic oligonucleotide
uggaguagaggccgagguu

SEQ ID NO: 1755563 - RNA, 19 nt, Artificial Sequence
  Description of Artificial Sequence: Synthetic oligonucleotide
aagugccgccuacuguagu

SEQ ID NO: 1755564 - RNA, 19 nt, Artificial Sequence
  Description of Artificial Sequence: Synthetic oligonucleotide
gacguaggggcuagaagca

SEQ ID NO: 1755565 - RNA, 19 nt, Artificial Sequence
  Description of Artificial Sequence: Synthetic oligonucleotide
acuguagacccaaguggag

SEQ ID NO: 1755566 - RNA, 19 nt, Artificial Sequence
  Description of Artificial Sequence: Synthetic oligonucleotide
ggccauugaguauucugug

SEQ ID NO: 1755567 - RNA, 19 nt, Artificial Sequence
  Description of Artificial Sequence: Synthetic oligonucleotide
  modified_base (18)..(18): a, c, u, g, unknown or other
guacauguggcaagguuna

SEQ ID NO: 1755568 - RNA, 19 nt, Artificial Sequence
  Description of Artificial Sequence: Synthetic oligonucleotide
ggaagaugaaauguguucu

SEQ ID NO: 1755569 - RNA, 19 nt, Artificial Sequence
  Description of Artificial Sequence: Synthetic oligonucleotide
gagcuacugaugccuggug

SEQ ID NO: 1755570 - RNA, 19 nt, Artificial Sequence
  Description of Artificial Sequence: Synthetic oligonucleotide
uguuucccagcuacaugua

SEQ ID NO: 1755571 - RNA, 19 nt, Artificial Sequence
  Description of Artificial Sequence: Synthetic oligonucleotide
uaacuagauggugguagau

SEQ ID NO: 1755572 - RNA, 19 nt, Artificial Sequence
  Description of Artificial Sequence: Synthetic oligonucleotide
ggccucgagcuacugaugc

SEQ ID NO: 1755573 - RNA, 19 nt, Artificial Sequence
  Description of Artificial Sequence: Synthetic oligonucleotide
ugaugccuggugugcaaaa

SEQ ID NO: 1755574 - RNA, 19 nt, Artificial Sequence
  Description of Artificial Sequence: Synthetic oligonucleotide
gccacuagcauugaaguaa

SEQ ID NO: 1755575 - RNA, 19 nt, Artificial Sequence
  Description of Artificial Sequence: Synthetic oligonucleotide
cuggcaauuucaauacugu

SEQ ID NO: 1755576 - RNA, 19 nt, Artificial Sequence
  Description of Artificial Sequence: Synthetic oligonucleotide
caucagcugccuaauucca

SEQ ID NO: 1755577 - RNA, 19 nt, Artificial Sequence
  Description of Artificial Sequence: Synthetic oligonucleotide
caugcaagaagggcuccug

SEQ ID NO: 1755578 - RNA, 19 nt, Artificial Sequence
  Description of Artificial Sequence: Synthetic oligonucleotide
guagugacguaggggcuag

SEQ ID NO: 1755579 - RNA, 19 nt, Artificial Sequence
  Description of Artificial Sequence: Synthetic oligonucleotide
cucgagcuacugaugccug

SEQ ID NO: 1755580 - RNA, 19 nt, Artificial Sequence
  Description of Artificial Sequence: Synthetic oligonucleotide
cuaauuccaagugucagau

SEQ ID NO: 1755581 - RNA, 19 nt, Artificial Sequence
  Description of Artificial Sequence: Synthetic oligonucleotide
gccuaauuccaagugucag

SEQ ID NO: 1755582 - RNA, 19 nt, Artificial Sequence
  Description of Artificial Sequence: Synthetic oligonucleotide
guguucauuuaucaaggau

SEQ ID NO: 1755583 - RNA, 19 nt, Artificial Sequence
  Description of Artificial Sequence: Synthetic oligonucleotide
agggugagaccccgagcag

SEQ ID NO: 1755584 - RNA, 19 nt, Artificial Sequence
  Description of Artificial Sequence: Synthetic oligonucleotide
  modified_base (8)..(8): a, c, u, g, unknown or other
agcagganccaugcaagaa

SEQ ID NO: 1755585 - RNA, 19 nt, Artificial Sequence
  Description of Artificial Sequence: Synthetic oligonucleotide
ucuggcucacuagcaacaa

SEQ ID NO: 1755586 - RNA, 19 nt, Artificial Sequence
  Description of Artificial Sequence: Synthetic oligonucleotide
caguagccaucagaaagug

SEQ ID NO: 1755587 - RNA, 19 nt, Artificial Sequence
  Description of Artificial Sequence: Synthetic oligonucleotide
gaugucccugacuuuuacu

SEQ ID NO: 1755588 - RNA, 19 nt, Artificial Sequence
  Description of Artificial Sequence: Synthetic oligonucleotide
caguauguacauguggcaa

SEQ ID NO: 1755589 - RNA, 19 nt, Artificial Sequence
  Description of Artificial Sequence: Synthetic oligonucleotide
gccuacuguagugacguag

SEQ ID NO: 1755590 - RNA, 19 nt, Artificial Sequence
  Description of Artificial Sequence: Synthetic oligonucleotide
aaguaacuagaugguggua

SEQ ID NO: 1755591 - RNA, 19 nt, Artificial Sequence
  Description of Artificial Sequence: Synthetic oligonucleotide
uucccugauuuugaaggua

SEQ ID NO: 1755592 - RNA, 19 nt, Artificial Sequence
  Description of Artificial Sequence: Synthetic oligonucleotide
  modified_base (5)..(5): a, c, u, g, unknown or other
  modified_base (9)..(9): a, c, u, g, unknown or other
gguunacunauugcugaga

SEQ ID NO: 1755593 - RNA, 19 nt, Artificial Sequence
  Description of Artificial Sequence: Synthetic oligonucleotide
aagcuaggacggaacuugu

SEQ ID NO: 1755594 - RNA, 19 nt, Artificial Sequence
  Description of Artificial Sequence: Synthetic oligonucleotide
agugacguaggggcuagaa

SEQ ID NO: 1755595 - RNA, 19 nt, Artificial Sequence
  Description of Artificial Sequence: Synthetic oligonucleotide
gcggccauugaguauucug

SEQ ID NO: 1755596 - RNA, 19 nt, Artificial Sequence
  Description of Artificial Sequence: Synthetic oligonucleotide
ggcuauuauugguggugcc

SEQ ID NO: 1755597 - RNA, 19 nt, Artificial Sequence
  Description of Artificial Sequence: Synthetic oligonucleotide
agcaacgucuggguaggca

SEQ ID NO: 1755598 - RNA, 19 nt, Artificial Sequence
  Description of Artificial Sequence: Synthetic oligonucleotide
cagucaaaucugagucaug

SEQ ID NO: 1755599 - RNA, 19 nt, Artificial Sequence
  Description of Artificial Sequence: Synthetic oligonucleotide
ccuaauuccaagugucaga

SEQ ID NO: 1755600 - RNA, 19 nt, Artificial Sequence
  Description of Artificial Sequence: Synthetic oligonucleotide
caguaaucuuugaagaguu

SEQ ID NO: 1755601 - RNA, 19 nt, Artificial Sequence
  Description of Artificial Sequence: Synthetic oligonucleotide
gcagcaacgucuggguagg

SEQ ID NO: 1755602 - RNA, 19 nt, Artificial Sequence
  Description of Artificial Sequence: Synthetic oligonucleotide
cuggcucacuagcaacaac

SEQ ID NO: 1755603 - RNA, 19 nt, Artificial Sequence
  Description of Artificial Sequence: Synthetic oligonucleotide
gcuauuauugguggugcca

SEQ ID NO: 1755604 - RNA, 19 nt, Artificial Sequence
  Description of Artificial Sequence: Synthetic oligonucleotide
cuccuuuaucuggaagaug

SEQ ID NO: 1755605 - RNA, 19 nt, Artificial Sequence
  Description of Artificial Sequence: Synthetic oligonucleotide
ggugugcaaaaucgccacc

SEQ ID NO: 1755606 - RNA, 19 nt, Artificial Sequence
  Description of Artificial Sequence: Synthetic oligonucleotide
cguuuauucccugauuuug

SEQ ID NO: 1755607 - RNA, 19 nt, Artificial Sequence
  Description of Artificial Sequence: Synthetic oligonucleotide
ugccgccuacuguagugac

SEQ ID NO: 1755608 - RNA, 19 nt, Artificial Sequence
  Description of Artificial Sequence: Synthetic oligonucleotide
gaacucgguguugacucuc

SEQ ID NO: 1755609 - RNA, 19 nt, Artificial Sequence
  Description of Artificial Sequence: Synthetic oligonucleotide
acguaggggcuagaagcag

SEQ ID NO: 1755610 - RNA, 19 nt, Artificial Sequence
  Description of Artificial Sequence: Synthetic oligonucleotide
agcuggacuucaagaacug

SEQ ID NO: 1755611 - RNA, 19 nt, Artificial Sequence
  Description of Artificial Sequence: Synthetic oligonucleotide
ccacuagcauugaaguaac

SEQ ID NO: 1755612 - RNA, 19 nt, Artificial Sequence
  Description of Artificial Sequence: Synthetic oligonucleotide
cauggaauggggaccuugu

SEQ ID NO: 1755613 - RNA, 19 nt, Artificial Sequence
  Description of Artificial Sequence: Synthetic oligonucleotide
gcaugaacucagucaaauc

SEQ ID NO: 1755614 - RNA, 19 nt, Artificial Sequence
  Description of Artificial Sequence: Synthetic oligonucleotide
gcuaggacggaacuugugu

SEQ ID NO: 1755615 - RNA, 19 nt, Artificial Sequence
  Description of Artificial Sequence: Synthetic oligonucleotide
gauguggcaccagcacuca

SEQ ID NO: 1755616 - RNA, 19 nt, Artificial Sequence
  Description of Artificial Sequence: Synthetic oligonucleotide
uaggcacggccacuagcau

SEQ ID NO: 1755617 - RNA, 19 nt, Artificial Sequence
  Description of Artificial Sequence: Synthetic oligonucleotide
acggaacuugugucuucca

SEQ ID NO: 1755618 - RNA, 19 nt, Artificial Sequence
  Description of Artificial Sequence: Synthetic oligonucleotide
  modified_base (17)..(17): a, c, u, g, unknown or other
uacauguggcaagguunac

SEQ ID NO: 1755619 - RNA, 19 nt, Artificial Sequence
  Description of Artificial Sequence: Synthetic oligonucleotide
caccacugauauagucaac

SEQ ID NO: 1755620 - RNA, 19 nt, Artificial Sequence
  Description of Artificial Sequence: Synthetic oligonucleotide
gccgagguuccagauaccc

SEQ ID NO: 1755621 - RNA, 19 nt, Artificial Sequence
  Description of Artificial Sequence: Synthetic oligonucleotide
aggcacggccacuagcauu

SEQ ID NO: 1755622 - RNA, 19 nt, Artificial Sequence
  Description of Artificial Sequence: Synthetic oligonucleotide
ccuagggauacaaaguagu

SEQ ID NO: 1755623 - RNA, 19 nt, Artificial Sequence
  Description of Artificial Sequence: Synthetic oligonucleotide
uggguaggcacggccacua

SEQ ID NO: 1755624 - RNA, 19 nt, Artificial Sequence
  Description of Artificial Sequence: Synthetic oligonucleotide
cugauuuugaagguagguu

SEQ ID NO: 1755625 - RNA, 19 nt, Artificial Sequence
  Description of Artificial Sequence: Synthetic oligonucleotide
agcuaggacggaacuugug

SEQ ID NO: 1755626 - RNA, 19 nt, Artificial Sequence
  Description of Artificial Sequence: Synthetic oligonucleotide
cuggaagaugaaauguguu

SEQ ID NO: 1755627 - RNA, 19 nt, Artificial Sequence
  Description of Artificial Sequence: Synthetic oligonucleotide
caugaacucgguguugacu

SEQ ID NO: 1755628 - RNA, 19 nt, Artificial Sequence
  Description of Artificial Sequence: Synthetic oligonucleotide
agcuaacaucagcugccua

SEQ ID NO: 1755629 - RNA, 19 nt, Artificial Sequence
  Description of Artificial Sequence: Synthetic oligonucleotide
gguuuugaugucccugacu

SEQ ID NO: 1755630 - RNA, 19 nt, Artificial Sequence
  Description of Artificial Sequence: Synthetic oligonucleotide
aaguagggugagaccccga

SEQ ID NO: 1755631 - RNA, 19 nt, Artificial Sequence
  Description of Artificial Sequence: Synthetic oligonucleotide
ucccagcuacauguaggaa

SEQ ID NO: 1755632 - RNA, 19 nt, Artificial Sequence
  Description of Artificial Sequence: Synthetic oligonucleotide
uugugcugucagguuguau

SEQ ID NO: 1755633 - RNA, 19 nt, Artificial Sequence
  Description of Artificial Sequence: Synthetic oligonucleotide
ggaccuagggauacaaagu

SEQ ID NO: 1755634 - RNA, 19 nt, Artificial Sequence
  Description of Artificial Sequence: Synthetic oligonucleotide
gccucgagcuacugaugcc

SEQ ID NO: 1755635 - RNA, 19 nt, Artificial Sequence
  Description of Artificial Sequence: Synthetic oligonucleotide
cuaacaucagcugccuaau

SEQ ID NO: 1755636 - RNA, 19 nt, Artificial Sequence
  Description of Artificial Sequence: Synthetic oligonucleotide
ggcugcgggaaaacauugc

SEQ ID NO: 1755637 - RNA, 19 nt, Artificial Sequence
  Description of Artificial Sequence: Synthetic oligonucleotide
gaugccuggugugcaaaau

SEQ ID NO: 1755638 - RNA, 19 nt, Artificial Sequence
  Description of Artificial Sequence: Synthetic oligonucleotide
auguggcaccagcacucau

SEQ ID NO: 1755639 - RNA, 19 nt, Artificial Sequence
  Description of Artificial Sequence: Synthetic oligonucleotide
gccuggugugcaaaaucgc

SEQ ID NO: 1755640 - RNA, 19 nt, Artificial Sequence
  Description of Artificial Sequence: Synthetic oligonucleotide
ugccggccagggcuacugu

SEQ ID NO: 1755641 - RNA, 19 nt, Artificial Sequence
  Description of Artificial Sequence: Synthetic oligonucleotide
cuguagugacguaggggcu

SEQ ID NO: 1755642 - RNA, 19 nt, Artificial Sequence
  Description of Artificial Sequence: Synthetic oligonucleotide
gccgccuacuguagugacg

SEQ ID NO: 1755643 - RNA, 19 nt, Artificial Sequence
  Description of Artificial Sequence: Synthetic oligonucleotide
cuagacuggccucgagcua

SEQ ID NO: 1755644 - RNA, 19 nt, Artificial Sequence
  Description of Artificial Sequence: Synthetic oligonucleotide
ggcuacuguagacccaagu

SEQ ID NO: 1755645 - RNA, 19 nt, Artificial Sequence
  Description of Artificial Sequence: Synthetic oligonucleotide
ccauggaauggggaccuug

SEQ ID NO: 1755646 - RNA, 19 nt, Artificial Sequence
  Description of Artificial Sequence: Synthetic oligonucleotide
gggaagcuaggacggaacu

SEQ ID NO: 1755647 - RNA, 19 nt, Artificial Sequence
  Description of Artificial Sequence: Synthetic oligonucleotide
cagccauggguuacaucaa

SEQ ID NO: 1755648 - RNA, 19 nt, Artificial Sequence
  Description of Artificial Sequence: Synthetic oligonucleotide
gugccgccuacuguaguga

SEQ ID NO: 1755649 - RNA, 19 nt, Artificial Sequence
  Description of Artificial Sequence: Synthetic oligonucleotide
gguuguuucccagcuacau

SEQ ID NO: 1755650 - RNA, 19 nt, Artificial Sequence
  Description of Artificial Sequence: Synthetic oligonucleotide
gcucacuagcaacaacagu

SEQ ID NO: 1755651 - RNA, 19 nt, Artificial Sequence
  Description of Artificial Sequence: Synthetic oligonucleotide
caacguuuauucccugauu

SEQ ID NO: 1755652 - RNA, 19 nt, Artificial Sequence
  Description of Artificial Sequence: Synthetic oligonucleotide
gugcagcaacgucugggua

SEQ ID NO: 1755653 - RNA, 19 nt, Artificial Sequence
  Description of Artificial Sequence: Synthetic oligonucleotide
caccaaacaggcgcaugaa

SEQ ID NO: 1755654 - RNA, 19 nt, Artificial Sequence
  Description of Artificial Sequence: Synthetic oligonucleotide
ccauugaguauucuguguu

SEQ ID NO: 1755655 - RNA, 19 nt, Artificial Sequence
  Description of Artificial Sequence: Synthetic oligonucleotide
uagugacguaggggcuaga

SEQ ID NO: 1755656 - RNA, 19 nt, Artificial Sequence
  Description of Artificial Sequence: Synthetic oligonucleotide
ccuuuaucuggaagaugaa

SEQ ID NO: 1755657 - RNA, 19 nt, Artificial Sequence
  Description of Artificial Sequence: Synthetic oligonucleotide
ccauaacucacaguaugua

SEQ ID NO: 1755658 - RNA, 19 nt, Artificial Sequence
  Description of Artificial Sequence: Synthetic oligonucleotide
agacuggccucgagcuacu

SEQ ID NO: 1755659 - RNA, 19 nt, Artificial Sequence
  Description of Artificial Sequence: Synthetic oligonucleotide
cacuagcauugaaguaacu

SEQ ID NO: 1755660 - RNA, 19 nt, Artificial Sequence
  Description of Artificial Sequence: Synthetic oligonucleotide
cgagguuccagauacccau

SEQ ID NO: 1755661 - RNA, 19 nt, Artificial Sequence
  Description of Artificial Sequence: Synthetic oligonucleotide
ccaacguuuauucccugau

SEQ ID NO: 1755662 - RNA, 19 nt, Artificial Sequence
  Description of Artificial Sequence: Synthetic oligonucleotide
gacccuccacuucuucauu

SEQ ID NO: 1755663 - RNA, 19 nt, Artificial Sequence
  Description of Artificial Sequence: Synthetic oligonucleotide
ggcaaacaaacuggcaauu

SEQ ID NO: 1755664 - RNA, 19 nt, Artificial Sequence
  Description of Artificial Sequence: Synthetic oligonucleotide
cacggccacuagcauugaa

SEQ ID NO: 1755665 - RNA, 19 nt, Artificial Sequence
  Description of Artificial Sequence: Synthetic oligonucleotide
cagcaacgucuggguaggc

SEQ ID NO: 1755666 - RNA, 19 nt, Artificial Sequence
  Description of Artificial Sequence: Synthetic oligonucleotide
cggccauugaguauucugu

SEQ ID NO: 1755667 - RNA, 19 nt, Artificial Sequence
  Description of Artificial Sequence: Synthetic oligonucleotide
ggaagcuaggacggaacuu

SEQ ID NO: 1755668 - RNA, 19 nt, Artificial Sequence
  Description of Artificial Sequence: Synthetic oligonucleotide
caccagcacucaucaggua

SEQ ID NO: 1755669 - RNA, 19 nt, Artificial Sequence
  Description of Artificial Sequence: Synthetic oligonucleotide
ggggcggccauugaguauu

SEQ ID NO: 1755670 - RNA, 19 nt, Artificial Sequence
  Description of Artificial Sequence: Synthetic oligonucleotide
cggccacuagcauugaagu

SEQ ID NO: 1755671 - RNA, 19 nt, Artificial Sequence
  Description of Artificial Sequence: Synthetic oligonucleotide
ccgccuacuguagugacgu

SEQ ID NO: 1755672 - RNA, 19 nt, Artificial Sequence
  Description of Artificial Sequence: Synthetic oligonucleotide
ggcuagaagcagggaagcu

SEQ ID NO: 1755673 - RNA, 19 nt, Artificial Sequence
  Description of Artificial Sequence: Synthetic oligonucleotide
gggcuacuguagacccaag

SEQ ID NO: 1755674 - RNA, 19 nt, Artificial Sequence
  Description of Artificial Sequence: Synthetic oligonucleotide
ccuggcuauuauugguggu

SEQ ID NO: 1755675 - RNA, 19 nt, Artificial Sequence
  Description of Artificial Sequence: Synthetic oligonucleotide
ggccgagguuccagauacc

SEQ ID NO: 1755676 - RNA, 19 nt, Artificial Sequence
  Description of Artificial Sequence: Synthetic oligonucleotide
gccggccagggcuacugua

SEQ ID NO: 1755677 - RNA, 19 nt, Artificial Sequence
  Description of Artificial Sequence: Synthetic oligonucleotide
gcgcaugaacucagucaaa

SEQ ID NO: 1755678 - RNA, 19 nt, Artificial Sequence
  Description of Artificial Sequence: Synthetic oligonucleotide
gggcggccauugaguauuc

SEQ ID NO: 1755679 - RNA, 19 nt, Artificial Sequence
  Description of Artificial Sequence: Synthetic oligonucleotide
cgagcuacugaugccuggu

SEQ ID NO: 1755680 - RNA, 19 nt, Artificial Sequence
  Description of Artificial Sequence: Synthetic oligonucleotide
gcacggccacuagcauuga

SEQ ID NO: 1755681 - RNA, 19 nt, Artificial Sequence
  Description of Artificial Sequence: Synthetic oligonucleotide
  modified_base (1)..(1): a, c, u, g, unknown or other
  modified_base (5)..(5): a, c, u, g, unknown or other
nacunauugcugagaagca

SEQ ID NO: 1755682 - RNA, 19 nt, Artificial Sequence
  Description of Artificial Sequence: Synthetic oligonucleotide
  modified_base (1)..(1): a, c, u, g, unknown or other
nccaugcaagaagggcucc

SEQ ID NO: 1755683 - RNA, 19 nt, Artificial Sequence
  Description of Artificial Sequence: Synthetic oligonucleotide
aacaauauauccauaaucc

SEQ ID NO: 1755684 - RNA, 19 nt, Artificial Sequence
  Description of Artificial Sequence: Synthetic oligonucleotide
aaaauagugacauucaugu

SEQ ID NO: 1755685 - RNA, 19 nt, Artificial Sequence
  Description of Artificial Sequence: Synthetic oligonucleotide
aaaacauggacacucaagg

SEQ ID NO: 1755686 - RNA, 19 nt, Artificial Sequence
  Description of Artificial Sequence: Synthetic oligonucleotide
aauaauaucucuccuuuac

SEQ ID NO: 1755687 - RNA, 19 nt, Artificial Sequence
  Description of Artificial Sequence: Synthetic oligonucleotide
uugaaaauaaaauagugac

SEQ ID NO: 1755688 - RNA, 19 nt, Artificial Sequence
  Description of Artificial Sequence: Synthetic oligonucleotide
agugaagaaauauauuagc

SEQ ID NO: 1755689 - RNA, 19 nt, Artificial Sequence
  Description of Artificial Sequence: Synthetic oligonucleotide
aagauuuacaauaauaucu

SEQ ID NO: 1755690 - RNA, 19 nt, Artificial Sequence
  Description of Artificial Sequence: Synthetic oligonucleotide
auauccauaauccaugauc

SEQ ID NO: 1755691 - RNA, 19 nt, Artificial Sequence
  Description of Artificial Sequence: Synthetic oligonucleotide
ugaaagauaauauugcaac

SEQ ID NO: 1755692 - RNA, 19 nt, Artificial Sequence
  Description of Artificial Sequence: Synthetic oligonucleotide
aaaugaaugccccucacug

SEQ ID NO: 1755693 - RNA, 19 nt, Artificial Sequence
  Description of Artificial Sequence: Synthetic oligonucleotide
auagguaauaauuaccuug

SEQ ID NO: 1755694 - RNA, 19 nt, Artificial Sequence
  Description of Artificial Sequence: Synthetic oligonucleotide
aauuggacagucuggauug

SEQ ID NO: 1755695 - RNA, 19 nt, Artificial Sequence
  Description of Artificial Sequence: Synthetic oligonucleotide
ugggaaauauccaaaauga

SEQ ID NO: 1755696 - RNA, 19 nt, Artificial Sequence
  Description of Artificial Sequence: Synthetic oligonucleotide
aauaucaguugaaauaagg

SEQ ID NO: 1755697 - RNA, 19 nt, Artificial Sequence
  Description of Artificial Sequence: Synthetic oligonucleotide
aaagccugaaaugaaugcc

SEQ ID NO: 1755698 - RNA, 19 nt, Artificial Sequence
  Description of Artificial Sequence: Synthetic oligonucleotide
guuaaaaccguguucaccc

SEQ ID NO: 1755699 - RNA, 19 nt, Artificial Sequence
  Description of Artificial Sequence: Synthetic oligonucleotide
aaacccugaagaccuaacc

SEQ ID NO: 1755700 - RNA, 19 nt, Artificial Sequence
  Description of Artificial Sequence: Synthetic oligonucleotide
acuucuuagaccuccuugc

SEQ ID NO: 1755701 - RNA, 19 nt, Artificial Sequence
  Description of Artificial Sequence: Synthetic oligonucleotide
uccaaaaugacaacuggcc

SEQ ID NO: 1755702 - RNA, 19 nt, Artificial Sequence
  Description of Artificial Sequence: Synthetic oligonucleotide
uguuaaagcugcaucaccc

SEQ ID NO: 1755703 - RNA, 19 nt, Artificial Sequence
  Description of Artificial Sequence: Synthetic oligonucleotide
auaagguaguuuuaaaaug

SEQ ID NO: 1755704 - RNA, 19 nt, Artificial Sequence
  Description of Artificial Sequence: Synthetic oligonucleotide
aagauaauauugcaacaug

SEQ ID NO: 1755705 - RNA, 19 nt, Artificial Sequence
  Description of Artificial Sequence: Synthetic oligonucleotide
gaaaagacacuucuuagac

SEQ ID NO: 1755706 - RNA, 19 nt, Artificial Sequence
  Description of Artificial Sequence: Synthetic oligonucleotide
auguucacagaucuuaggg

SEQ ID NO: 1755707 - RNA, 19 nt, Artificial Sequence
  Description of Artificial Sequence: Synthetic oligonucleotide
uggaguguggcagagaacg

SEQ ID NO: 1755708 - RNA, 19 nt, Artificial Sequence
  Description of Artificial Sequence: Synthetic oligonucleotide
ugugagauuguucugugca

SEQ ID NO: 1755709 - RNA, 19 nt, Artificial Sequence
  Description of Artificial Sequence: Synthetic oligonucleotide
acgcacuuggccuacagcc

SEQ ID NO: 1755710 - RNA, 19 nt, Artificial Sequence
  Description of Artificial Sequence: Synthetic oligonucleotide
accguguucacccugcacc

SEQ ID NO: 1755711 - RNA, 19 nt, Artificial Sequence
  Description of Artificial Sequence: Synthetic oligonucleotide
cuaaccucauaauagggcc

SEQ ID NO: 1755712 - RNA, 19 nt, Artificial Sequence
  Description of Artificial Sequence: Synthetic oligonucleotide
aucaguugaaauaagguag

SEQ ID NO: 1755713 - RNA, 19 nt, Artificial Sequence
  Description of Artificial Sequence: Synthetic oligonucleotide
gauaauauugcaacaugag

SEQ ID NO: 1755714 - RNA, 19 nt, Artificial Sequence
  Description of Artificial Sequence: Synthetic oligonucleotide
ucaagucacaaaacagugg

SEQ ID NO: 1755715 - RNA, 19 nt, Artificial Sequence
  Description of Artificial Sequence: Synthetic oligonucleotide
ucauguuaaagcugcauca

SEQ ID NO: 1755716 - RNA, 19 nt, Artificial Sequence
  Description of Artificial Sequence: Synthetic oligonucleotide
ugacacucaccacaggugg

SEQ ID NO: 1755717 - RNA, 19 nt, Artificial Sequence
  Description of Artificial Sequence: Synthetic oligonucleotide
cauaauagggccaacccug

SEQ ID NO: 1755718 - RNA, 19 nt, Artificial Sequence
  Description of Artificial Sequence: Synthetic oligonucleotide
uuuguggugagauccacgc

SEQ ID NO: 1755719 - RNA, 19 nt, Artificial Sequence
  Description of Artificial Sequence: Synthetic oligonucleotide
aagcccucacaccacaugg

SEQ ID NO: 1755720 - RNA, 19 nt, Artificial Sequence
  Description of Artificial Sequence: Synthetic oligonucleotide
aaagauaauauugcaacau

SEQ ID NO: 1755721 - RNA, 19 nt, Artificial Sequence
  Description of Artificial Sequence: Synthetic oligonucleotide
uuauuuugggaaauaucca

SEQ ID NO: 1755722 - RNA, 19 nt, Artificial Sequence
  Description of Artificial Sequence: Synthetic oligonucleotide
ugguuucaaacccugaaga

SEQ ID NO: 1755723 - RNA, 19 nt, Artificial Sequence
  Description of Artificial Sequence: Synthetic oligonucleotide
ugagggaaaagacacuucu

SEQ ID NO: 1755724 - RNA, 19 nt, Artificial Sequence
  Description of Artificial Sequence: Synthetic oligonucleotide
aagccugaaaugaaugccc

SEQ ID NO: 1755725 - RNA, 19 nt, Artificial Sequence
  Description of Artificial Sequence: Synthetic oligonucleotide
uguaaagucaccguggcaa

SEQ ID NO: 1755726 - RNA, 19 nt, Artificial Sequence
  Description of Artificial Sequence: Synthetic oligonucleotide
acugcuuggaccaucacac

SEQ ID NO: 1755727 - RNA, 19 nt, Artificial Sequence
  Description of Artificial Sequence: Synthetic oligonucleotide
aaaauggugcaguggcuuc

SEQ ID NO: 1755728 - RNA, 19 nt, Artificial Sequence
  Description of Artificial Sequence: Synthetic oligonucleotide
auguuaaagcugcaucacc

SEQ ID NO: 1755729 - RNA, 19 nt, Artificial Sequence
  Description of Artificial Sequence: Synthetic oligonucleotide
acacaucguggacagaacc

SEQ ID NO: 1755730 - RNA, 19 nt, Artificial Sequence
  Description of Artificial Sequence: Synthetic oligonucleotide
agucuggauugucacagcc

SEQ ID NO: 1755731 - RNA, 19 nt, Artificial Sequence
  Description of Artificial Sequence: Synthetic oligonucleotide
uaucaguugaaauaaggua

SEQ ID NO: 1755732 - RNA, 19 nt, Artificial Sequence
  Description of Artificial Sequence: Synthetic oligonucleotide
gaccuaaccucauaauagg

SEQ ID NO: 1755733 - RNA, 19 nt, Artificial Sequence
  Description of Artificial Sequence: Synthetic oligonucleotide
aaugacaacuggccacugg

SEQ ID NO: 1755734 - RNA, 19 nt, Artificial Sequence
  Description of Artificial Sequence: Synthetic oligonucleotide
uggaccaucacaccucuag

SEQ ID NO: 1755735 - RNA, 19 nt, Artificial Sequence
  Description of Artificial Sequence: Synthetic oligonucleotide
uugguuucaaacccugaag

SEQ ID NO: 1755736 - RNA, 19 nt, Artificial Sequence
  Description of Artificial Sequence: Synthetic oligonucleotide
ucuccguucauagaaaaug

SEQ ID NO: 1755737 - RNA, 19 nt, Artificial Sequence
  Description of Artificial Sequence: Synthetic oligonucleotide
uauugcaacaugagugaag

SEQ ID NO: 1755738 - RNA, 19 nt, Artificial Sequence
  Description of Artificial Sequence: Synthetic oligonucleotide
ucauaauagggccaacccu

SEQ ID NO: 1755739 - RNA, 19 nt, Artificial Sequence
  Description of Artificial Sequence: Synthetic oligonucleotide
uuuuauaauucaucaugcu

SEQ ID NO: 1755740 - RNA, 19 nt, Artificial Sequence
  Description of Artificial Sequence: Synthetic oligonucleotide
aaaguugacaguccuggaa

SEQ ID NO: 1755741 - RNA, 19 nt, Artificial Sequence
  Description of Artificial Sequence: Synthetic oligonucleotide
cacaggagcaagcaggugg

SEQ ID NO: 1755742 - RNA, 19 nt, Artificial Sequence
  Description of Artificial Sequence: Synthetic oligonucleotide
aaaaccguguucacccugc

SEQ ID NO: 1755743 - RNA, 19 nt, Artificial Sequence
  Description of Artificial Sequence: Synthetic oligonucleotide
aagaccuaaccucauaaua

SEQ ID NO: 1755744 - RNA, 19 nt, Artificial Sequence
  Description of Artificial Sequence: Synthetic oligonucleotide
cacuguuugguuucaaacc

SEQ ID NO: 1755745 - RNA, 19 nt, Artificial Sequence
  Description of Artificial Sequence: Synthetic oligonucleotide
uauauuagcuugcuacuuc

SEQ ID NO: 1755746 - RNA, 19 nt, Artificial Sequence
  Description of Artificial Sequence: Synthetic oligonucleotide
aauagggccaacccuggca

SEQ ID NO: 1755747 - RNA, 19 nt, Artificial Sequence
  Description of Artificial Sequence: Synthetic oligonucleotide
uccguucauagaaaauggg

SEQ ID NO: 1755748 - RNA, 19 nt, Artificial Sequence
  Description of Artificial Sequence: Synthetic oligonucleotide
ucuuagaccuccuugcuuc

SEQ ID NO: 1755749 - RNA, 19 nt, Artificial Sequence
  Description of Artificial Sequence: Synthetic oligonucleotide
ugaaauaagguaguuuuaa

SEQ ID NO: 1755750 - RNA, 19 nt, Artificial Sequence
  Description of Artificial Sequence: Synthetic oligonucleotide
auaauuaccuugaaaauaa

SEQ ID NO: 1755751 - RNA, 19 nt, Artificial Sequence
  Description of Artificial Sequence: Synthetic oligonucleotide
cucaagucacaaaacagug

SEQ ID NO: 1755752 - RNA, 19 nt, Artificial Sequence
  Description of Artificial Sequence: Synthetic oligonucleotide
gacauagguaauaauuacc

SEQ ID NO: 1755753 - RNA, 19 nt, Artificial Sequence
  Description of Artificial Sequence: Synthetic oligonucleotide
ucaguugaaauaagguagu

SEQ ID NO: 1755754 - RNA, 19 nt, Artificial Sequence
  Description of Artificial Sequence: Synthetic oligonucleotide
caguguuauugcuugaagc

SEQ ID NO: 1755755 - RNA, 19 nt, Artificial Sequence
  Description of Artificial Sequence: Synthetic oligonucleotide
aagucaccguggcaagucc

SEQ ID NO: 1755756 - RNA, 19 nt, Artificial Sequence
  Description of Artificial Sequence: Synthetic oligonucleotide
cucauaauagggccaaccc

SEQ ID NO: 1755757 - RNA, 19 nt, Artificial Sequence
  Description of Artificial Sequence: Synthetic oligonucleotide
agaacgaacaccacagcac

SEQ ID NO: 1755758 - RNA, 19 nt, Artificial Sequence
  Description of Artificial Sequence: Synthetic oligonucleotide
aaugaaugccccucacugu

SEQ ID NO: 1755759 - RNA, 19 nt, Artificial Sequence
  Description of Artificial Sequence: Synthetic oligonucleotide
auagggccaacccuggcac

SEQ ID NO: 1755760 - RNA, 19 nt, Artificial Sequence
  Description of Artificial Sequence: Synthetic oligonucleotide
ucacuguuugguuucaaac

SEQ ID NO: 1755761 - RNA, 19 nt, Artificial Sequence
  Description of Artificial Sequence: Synthetic oligonucleotide
cuccguucauagaaaaugg

SEQ ID NO: 1755762 - RNA, 19 nt, Artificial Sequence
  Description of Artificial Sequence: Synthetic oligonucleotide
agaccuaaccucauaauag

SEQ ID NO: 1755763 - RNA, 19 nt, Artificial Sequence
  Description of Artificial Sequence: Synthetic oligonucleotide
agggauagaaggcaagaug

SEQ ID NO: 1755764 - RNA, 19 nt, Artificial Sequence
  Description of Artificial Sequence: Synthetic oligonucleotide
uaaagcugcaucacccuga

SEQ ID NO: 1755765 - RNA, 19 nt, Artificial Sequence
  Description of Artificial Sequence: Synthetic oligonucleotide
uggaagacacagccggugg

SEQ ID NO: 1755766 - RNA, 19 nt, Artificial Sequence
  Description of Artificial Sequence: Synthetic oligonucleotide
guuucaaacccugaagacc

SEQ ID NO: 1755767 - RNA, 19 nt, Artificial Sequence
  Description of Artificial Sequence: Synthetic oligonucleotide
auauuagcuugcuacuucu

SEQ ID NO: 1755768 - RNA, 19 nt, Artificial Sequence
  Description of Artificial Sequence: Synthetic oligonucleotide
agauaauauugcaacauga

SEQ ID NO: 1755769 - RNA, 19 nt, Artificial Sequence
  Description of Artificial Sequence: Synthetic oligonucleotide
agagaacgaacaccacagc

SEQ ID NO: 1755770 - RNA, 19 nt, Artificial Sequence
  Description of Artificial Sequence: Synthetic oligonucleotide
ugugcaaaauggugcagug

SEQ ID NO: 1755771 - RNA, 19 nt, Artificial Sequence
  Description of Artificial Sequence: Synthetic oligonucleotide
auaucaguugaaauaaggu

SEQ ID NO: 1755772 - RNA, 19 nt, Artificial Sequence
  Description of Artificial Sequence: Synthetic oligonucleotide
acaguggcaguacaccagg

SEQ ID NO: 1755773 - RNA, 19 nt, Artificial Sequence
  Description of Artificial Sequence: Synthetic oligonucleotide
cauguaaagucaccguggc

SEQ ID NO: 1755774 - RNA, 19 nt, Artificial Sequence
  Description of Artificial Sequence: Synthetic oligonucleotide
aacccuggcacgguagagc

SEQ ID NO: 1755775 - RNA, 19 nt, Artificial Sequence
  Description of Artificial Sequence: Synthetic oligonucleotide
gagaacgaacaccacagca

SEQ ID NO: 1755776 - RNA, 19 nt, Artificial Sequence
  Description of Artificial Sequence: Synthetic oligonucleotide
cacucaauuggacagucug

SEQ ID NO: 1755777 - RNA, 19 nt, Artificial Sequence
  Description of Artificial Sequence: Synthetic oligonucleotide
cugaacacaucguggacag

SEQ ID NO: 1755778 - RNA, 19 nt, Artificial Sequence
  Description of Artificial Sequence: Synthetic oligonucleotide
aaaaguugacaguccugga

SEQ ID NO: 1755779 - RNA, 19 nt, Artificial Sequence
  Description of Artificial Sequence: Synthetic oligonucleotide
ucuagcauguucacagauc

SEQ ID NO: 1755780 - RNA, 19 nt, Artificial Sequence
  Description of Artificial Sequence: Synthetic oligonucleotide
gauggaguguggcagagaa

SEQ ID NO: 1755781 - RNA, 19 nt, Artificial Sequence
  Description of Artificial Sequence: Synthetic oligonucleotide
accacauggcucuucacug

SEQ ID NO: 1755782 - RNA, 19 nt, Artificial Sequence
  Description of Artificial Sequence: Synthetic oligonucleotide
acaguguuauugcuugaag

SEQ ID NO: 1755783 - RNA, 19 nt, Artificial Sequence
  Description of Artificial Sequence: Synthetic oligonucleotide
ugcuuggaccaucacaccu

SEQ ID NO: 1755784 - RNA, 19 nt, Artificial Sequence
  Description of Artificial Sequence: Synthetic oligonucleotide
ucuccuuuacaaaggggac

SEQ ID NO: 1755785 - RNA, 19 nt, Artificial Sequence
  Description of Artificial Sequence: Synthetic oligonucleotide
cuggaaaacauggacacuc

SEQ ID NO: 1755786 - RNA, 19 nt, Artificial Sequence
  Description of Artificial Sequence: Synthetic oligonucleotide
guacaccagguuaaaaccg

SEQ ID NO: 1755787 - RNA, 19 nt, Artificial Sequence
  Description of Artificial Sequence: Synthetic oligonucleotide
uaaaaccguguucacccug

SEQ ID NO: 1755788 - RNA, 19 nt, Artificial Sequence
  Description of Artificial Sequence: Synthetic oligonucleotide
aggaguugaucucuggaca

SEQ ID NO: 1755789 - RNA, 19 nt, Artificial Sequence
  Description of Artificial Sequence: Synthetic oligonucleotide
uacaccagguuaaaaccgu

SEQ ID NO: 1755790 - RNA, 19 nt, Artificial Sequence
  Description of Artificial Sequence: Synthetic oligonucleotide
agggaaaagacacuucuua

SEQ ID NO: 1755791 - RNA, 19 nt, Artificial Sequence
  Description of Artificial Sequence: Synthetic oligonucleotide
uggccuacagccccaagug

SEQ ID NO: 1755792 - RNA, 19 nt, Artificial Sequence
  Description of Artificial Sequence: Synthetic oligonucleotide
uccuacugaccucaccugc

SEQ ID NO: 1755793 - RNA, 19 nt, Artificial Sequence
  Description of Artificial Sequence: Synthetic oligonucleotide
acaucguggacagaaccac

SEQ ID NO: 1755794 - RNA, 19 nt, Artificial Sequence
  Description of Artificial Sequence: Synthetic oligonucleotide
ugaaaugaaugccccucac

SEQ ID NO: 1755795 - RNA, 19 nt, Artificial Sequence
  Description of Artificial Sequence: Synthetic oligonucleotide
uaggcagugaagaccaguc

SEQ ID NO: 1755796 - RNA, 19 nt, Artificial Sequence
  Description of Artificial Sequence: Synthetic oligonucleotide
uuggccuacagccccaagu

SEQ ID NO: 1755797 - RNA, 19 nt, Artificial Sequence
  Description of Artificial Sequence: Synthetic oligonucleotide
guuauugcuugaagcaucc

SEQ ID NO: 1755798 - RNA, 19 nt, Artificial Sequence
  Description of Artificial Sequence: Synthetic oligonucleotide
acccucaagucacaaaaca

SEQ ID NO: 1755799 - RNA, 19 nt, Artificial Sequence
  Description of Artificial Sequence: Synthetic oligonucleotide
uggaaaacauggacacuca

SEQ ID NO: 1755800 - RNA, 19 nt, Artificial Sequence
  Description of Artificial Sequence: Synthetic oligonucleotide
gauagaaggcaagaugcca

SEQ ID NO: 1755801 - RNA, 19 nt, Artificial Sequence
  Description of Artificial Sequence: Synthetic oligonucleotide
gggaaaagacacuucuuag

SEQ ID NO: 1755802 - RNA, 19 nt, Artificial Sequence
  Description of Artificial Sequence: Synthetic oligonucleotide
gaccucaccugcuggacag

SEQ ID NO: 1755803 - RNA, 19 nt, Artificial Sequence
  Description of Artificial Sequence: Synthetic oligonucleotide
guauaggcagugaagacca

SEQ ID NO: 1755804 - RNA, 19 nt, Artificial Sequence
  Description of Artificial Sequence: Synthetic oligonucleotide
cagguuaaaaccguguuca

SEQ ID NO: 1755805 - RNA, 19 nt, Artificial Sequence
  Description of Artificial Sequence: Synthetic oligonucleotide
aaugccccucacuguuugg

SEQ ID NO: 1755806 - RNA, 19 nt, Artificial Sequence
  Description of Artificial Sequence: Synthetic oligonucleotide
aacacaucguggacagaac

SEQ ID NO: 1755807 - RNA, 19 nt, Artificial Sequence
  Description of Artificial Sequence: Synthetic oligonucleotide
agguuaaaaccguguucac

SEQ ID NO: 1755808 - RNA, 19 nt, Artificial Sequence
  Description of Artificial Sequence: Synthetic oligonucleotide
agacggucagcacugcuug

SEQ ID NO: 1755809 - RNA, 19 nt, Artificial Sequence
  Description of Artificial Sequence: Synthetic oligonucleotide
aaauagugacauucauguu

SEQ ID NO: 1755810 - RNA, 19 nt, Artificial Sequence
  Description of Artificial Sequence: Synthetic oligonucleotide
aguguggcagagaacgaac

SEQ ID NO: 1755811 - RNA, 19 nt, Artificial Sequence
  Description of Artificial Sequence: Synthetic oligonucleotide
uucuuauuuugggaaauau

SEQ ID NO: 1755812 - RNA, 19 nt, Artificial Sequence
  Description of Artificial Sequence: Synthetic oligonucleotide
uggacagaaccacuuuccu

SEQ ID NO: 1755813 - RNA, 19 nt, Artificial Sequence
  Description of Artificial Sequence: Synthetic oligonucleotide
accuugaaaauaaaauagu

SEQ ID NO: 1755814 - RNA, 19 nt, Artificial Sequence
  Description of Artificial Sequence: Synthetic oligonucleotide
caugagugaagaaauauau

SEQ ID NO: 1755815 - RNA, 19 nt, Artificial Sequence
  Description of Artificial Sequence: Synthetic oligonucleotide
guaaagucaccguggcaag

SEQ ID NO: 1755816 - RNA, 19 nt, Artificial Sequence
  Description of Artificial Sequence: Synthetic oligonucleotide
cacgcaggcaaagugaaac

SEQ ID NO: 1755817 - RNA, 19 nt, Artificial Sequence
  Description of Artificial Sequence: Synthetic oligonucleotide
ccuaaccucauaauagggc

SEQ ID NO: 1755818 - RNA, 19 nt, Artificial Sequence
  Description of Artificial Sequence: Synthetic oligonucleotide
aaagcugcaucacccugau

SEQ ID NO: 1755819 - RNA, 19 nt, Artificial Sequence
  Description of Artificial Sequence: Synthetic oligonucleotide
ggacauagguaauaauuac

SEQ ID NO: 1755820 - RNA, 19 nt, Artificial Sequence
  Description of Artificial Sequence: Synthetic oligonucleotide
ggaaaagacacuucuuaga

SEQ ID NO: 1755821 - RNA, 19 nt, Artificial Sequence
  Description of Artificial Sequence: Synthetic oligonucleotide
agaccuccuugcuucaaag

SEQ ID NO: 1755822 - RNA, 19 nt, Artificial Sequence
  Description of Artificial Sequence: Synthetic oligonucleotide
uauauccauaauccaugau

SEQ ID NO: 1755823 - RNA, 19 nt, Artificial Sequence
  Description of Artificial Sequence: Synthetic oligonucleotide
agccugaaaugaaugcccc

SEQ ID NO: 1755824 - RNA, 19 nt, Artificial Sequence
  Description of Artificial Sequence: Synthetic oligonucleotide
cauguuaaagcugcaucac

SEQ ID NO: 1755825 - RNA, 19 nt, Artificial Sequence
  Description of Artificial Sequence: Synthetic oligonucleotide
uccuuuacaaaggggacau

SEQ ID NO: 1755826 - RNA, 19 nt, Artificial Sequence
  Description of Artificial Sequence: Synthetic oligonucleotide
gugagauccacgcaggcaa

SEQ ID NO: 1755827 - RNA, 19 nt, Artificial Sequence
  Description of Artificial Sequence: Synthetic oligonucleotide
accuaaccucauaauaggg

SEQ ID NO: 1755828 - RNA, 19 nt, Artificial Sequence
  Description of Artificial Sequence: Synthetic oligonucleotide
caauauauccauaauccau

SEQ ID NO: 1755829 - RNA, 19 nt, Artificial Sequence
  Description of Artificial Sequence: Synthetic oligonucleotide
acaccucuagcauguucac

SEQ ID NO: 1755830 - RNA, 19 nt, Artificial Sequence
  Description of Artificial Sequence: Synthetic oligonucleotide
uuaaaaccguguucacccu

SEQ ID NO: 1755831 - RNA, 19 nt, Artificial Sequence
  Description of Artificial Sequence: Synthetic oligonucleotide
agaucuuagggcucaguuu

SEQ ID NO: 1755832 - RNA, 19 nt, Artificial Sequence
  Description of Artificial Sequence: Synthetic oligonucleotide
gaaugccccucacuguuug

SEQ ID NO: 1755833 - RNA, 19 nt, Artificial Sequence
  Description of Artificial Sequence: Synthetic oligonucleotide
ggaguugaucucuggacag

SEQ ID NO: 1755834 - RNA, 19 nt, Artificial Sequence
  Description of Artificial Sequence: Synthetic oligonucleotide
ggagccugcauguaaaguc

SEQ ID NO: 1755835 - RNA, 19 nt, Artificial Sequence
  Description of Artificial Sequence: Synthetic oligonucleotide
aucaugcuucuucuauaag

SEQ ID NO: 1755836 - RNA, 19 nt, Artificial Sequence
  Description of Artificial Sequence: Synthetic oligonucleotide
uccacgcaggcaaagugaa

SEQ ID NO: 1755837 - RNA, 19 nt, Artificial Sequence
  Description of Artificial Sequence: Synthetic oligonucleotide
auaauagggccaacccugg

SEQ ID NO: 1755838 - RNA, 19 nt, Artificial Sequence
  Description of Artificial Sequence: Synthetic oligonucleotide
uucacagaucuuagggcuc

SEQ ID NO: 1755839 - RNA, 19 nt, Artificial Sequence
  Description of Artificial Sequence: Synthetic oligonucleotide
agcuugcuacuucuucuuc

SEQ ID NO: 1755840 - RNA, 19 nt, Artificial Sequence
  Description of Artificial Sequence: Synthetic oligonucleotide
aguugaucucuggacagug

SEQ ID NO: 1755841 - RNA, 19 nt, Artificial Sequence
  Description of Artificial Sequence: Synthetic oligonucleotide
aaauggugcaguggcuucu

SEQ ID NO: 1755842 - RNA, 19 nt, Artificial Sequence
  Description of Artificial Sequence: Synthetic oligonucleotide
gaaaauggguucaaagccu

SEQ ID NO: 1755843 - RNA, 19 nt, Artificial Sequence
  Description of Artificial Sequence: Synthetic oligonucleotide
aguugaaauaagguaguuu

SEQ ID NO: 1755844 - RNA, 19 nt, Artificial Sequence
  Description of Artificial Sequence: Synthetic oligonucleotide
aaggggacauagguaauaa

SEQ ID NO: 1755845 - RNA, 19 nt, Artificial Sequence
  Description of Artificial Sequence: Synthetic oligonucleotide
auaugcacaggagcaagca

SEQ ID NO: 1755846 - RNA, 19 nt, Artificial Sequence
  Description of Artificial Sequence: Synthetic oligonucleotide
gaccuccuugcuucaaagc

SEQ ID NO: 1755847 - RNA, 19 nt, Artificial Sequence
  Description of Artificial Sequence: Synthetic oligonucleotide
aucacccugauggauggag

SEQ ID NO: 1755848 - RNA, 19 nt, Artificial Sequence
  Description of Artificial Sequence: Synthetic oligonucleotide
ugaucucuggacaguguua

SEQ ID NO: 1755849 - RNA, 19 nt, Artificial Sequence
  Description of Artificial Sequence: Synthetic oligonucleotide
agaguggaagacacagccg

SEQ ID NO: 1755850 - RNA, 19 nt, Artificial Sequence
  Description of Artificial Sequence: Synthetic oligonucleotide
accagguuaaaaccguguu

SEQ ID NO: 1755851 - RNA, 19 nt, Artificial Sequence
  Description of Artificial Sequence: Synthetic oligonucleotide
gguuaaaaccguguucacc

SEQ ID NO: 1755852 - RNA, 19 nt, Artificial Sequence
  Description of Artificial Sequence: Synthetic oligonucleotide
ccugcauguaaagucaccg

SEQ ID NO: 1755853 - RNA, 19 nt, Artificial Sequence
  Description of Artificial Sequence: Synthetic oligonucleotide
ucaaagcuccucucaguau

SEQ ID NO: 1755854 - RNA, 19 nt, Artificial Sequence
  Description of Artificial Sequence: Synthetic oligonucleotide
gacaggugagggauagaag

SEQ ID NO: 1755855 - RNA, 19 nt, Artificial Sequence
  Description of Artificial Sequence: Synthetic oligonucleotide
cugugagauuguucugugc

SEQ ID NO: 1755856 - RNA, 19 nt, Artificial Sequence
  Description of Artificial Sequence: Synthetic oligonucleotide
acugaccucaccugcugga

SEQ ID NO: 1755857 - RNA, 19 nt, Artificial Sequence
  Description of Artificial Sequence: Synthetic oligonucleotide
ugaccucaccugcuggaca

SEQ ID NO: 1755858 - RNA, 19 nt, Artificial Sequence
  Description of Artificial Sequence: Synthetic oligonucleotide
gaaaugaaugccccucacu

SEQ ID NO: 1755859 - RNA, 19 nt, Artificial Sequence
  Description of Artificial Sequence: Synthetic oligonucleotide
uugcuuucccagugcuggg

SEQ ID NO: 1755860 - RNA, 19 nt, Artificial Sequence
  Description of Artificial Sequence: Synthetic oligonucleotide
agucaccguggcaaguccc

SEQ ID NO: 1755861 - RNA, 19 nt, Artificial Sequence
  Description of Artificial Sequence: Synthetic oligonucleotide
cucaauuggacagucugga

SEQ ID NO: 1755862 - RNA, 19 nt, Artificial Sequence
  Description of Artificial Sequence: Synthetic oligonucleotide
ucaauuggacagucuggau

SEQ ID NO: 1755863 - RNA, 19 nt, Artificial Sequence
  Description of Artificial Sequence: Synthetic oligonucleotide
caucuuuacauuauuuaau

SEQ ID NO: 1755864 - RNA, 19 nt, Artificial Sequence
  Description of Artificial Sequence: Synthetic oligonucleotide
uuguggugagauccacgca

SEQ ID NO: 1755865 - RNA, 19 nt, Artificial Sequence
  Description of Artificial Sequence: Synthetic oligonucleotide
uagaccuccuugcuucaaa

SEQ ID NO: 1755866 - RNA, 19 nt, Artificial Sequence
  Description of Artificial Sequence: Synthetic oligonucleotide
cuugaagcaucccugccaa

SEQ ID NO: 1755867 - RNA, 19 nt, Artificial Sequence
  Description of Artificial Sequence: Synthetic oligonucleotide
gacacagccgguggccugg

SEQ ID NO: 1755868 - RNA, 19 nt, Artificial Sequence
  Description of Artificial Sequence: Synthetic oligonucleotide
aggcaaagugaaaccacuc

SEQ ID NO: 1755869 - RNA, 19 nt, Artificial Sequence
  Description of Artificial Sequence: Synthetic oligonucleotide
ggcaaagugaaaccacuca

SEQ ID NO: 1755870 - RNA, 19 nt, Artificial Sequence
  Description of Artificial Sequence: Synthetic oligonucleotide
ggcagugaagaccagucuc

SEQ ID NO: 1755871 - RNA, 19 nt, Artificial Sequence
  Description of Artificial Sequence: Synthetic oligonucleotide
cauaauccaugauccaaaa

SEQ ID NO: 1755872 - RNA, 19 nt, Artificial Sequence
  Description of Artificial Sequence: Synthetic oligonucleotide
auguaaagucaccguggca

SEQ ID NO: 1755873 - RNA, 19 nt, Artificial Sequence
  Description of Artificial Sequence: Synthetic oligonucleotide
gacggucagcacugcuugg

SEQ ID NO: 1755874 - RNA, 19 nt, Artificial Sequence
  Description of Artificial Sequence: Synthetic oligonucleotide
aaaccguguucacccugca

SEQ ID NO: 1755875 - RNA, 19 nt, Artificial Sequence
  Description of Artificial Sequence: Synthetic oligonucleotide
auggguucaaagccugaaa

SEQ ID NO: 1755876 - RNA, 19 nt, Artificial Sequence
  Description of Artificial Sequence: Synthetic oligonucleotide
gggcuuuguggugagaucc

SEQ ID NO: 1755877 - RNA, 19 nt, Artificial Sequence
  Description of Artificial Sequence: Synthetic oligonucleotide
caaagcuccucucaguaua

SEQ ID NO: 1755878 - RNA, 19 nt, Artificial Sequence
  Description of Artificial Sequence: Synthetic oligonucleotide
agugaagaccagucuccgu

SEQ ID NO: 1755879 - RNA, 19 nt, Artificial Sequence
  Description of Artificial Sequence: Synthetic oligonucleotide
cugagggaaaagacacuuc

SEQ ID NO: 1755880 - RNA, 19 nt, Artificial Sequence
  Description of Artificial Sequence: Synthetic oligonucleotide
gcaagucccugugagauug

SEQ ID NO: 1755881 - RNA, 19 nt, Artificial Sequence
  Description of Artificial Sequence: Synthetic oligonucleotide
uggauggaguguggcagag

SEQ ID NO: 1755882 - RNA, 19 nt, Artificial Sequence
  Description of Artificial Sequence: Synthetic oligonucleotide
ucaaacccugaagaccuaa

SEQ ID NO: 1755883 - RNA, 19 nt, Artificial Sequence
  Description of Artificial Sequence: Synthetic oligonucleotide
uaaagucaccguggcaagu

SEQ ID NO: 1755884 - RNA, 19 nt, Artificial Sequence
  Description of Artificial Sequence: Synthetic oligonucleotide
auuaaacaauauauccaua

SEQ ID NO: 1755885 - RNA, 19 nt, Artificial Sequence
  Description of Artificial Sequence: Synthetic oligonucleotide
ccaagugacacucaccaca

SEQ ID NO: 1755886 - RNA, 19 nt, Artificial Sequence
  Description of Artificial Sequence: Synthetic oligonucleotide
uuauugcuugaagcauccc

SEQ ID NO: 1755887 - RNA, 19 nt, Artificial Sequence
  Description of Artificial Sequence: Synthetic oligonucleotide
cuacugaccucaccugcug

SEQ ID NO: 1755888 - RNA, 19 nt, Artificial Sequence
  Description of Artificial Sequence: Synthetic oligonucleotide
cucaaggcugacccucaag

SEQ ID NO: 1755889 - RNA, 19 nt, Artificial Sequence
  Description of Artificial Sequence: Synthetic oligonucleotide
aggcagugaagaccagucu

SEQ ID NO: 1755890 - RNA, 19 nt, Artificial Sequence
  Description of Artificial Sequence: Synthetic oligonucleotide
aagaccagucuccguucau

SEQ ID NO: 1755891 - RNA, 19 nt, Artificial Sequence
  Description of Artificial Sequence: Synthetic oligonucleotide
agcccucacaccacauggc

SEQ ID NO: 1755892 - RNA, 19 nt, Artificial Sequence
  Description of Artificial Sequence: Synthetic oligonucleotide
gagauccacgcaggcaaag

SEQ ID NO: 1755893 - RNA, 19 nt, Artificial Sequence
  Description of Artificial Sequence: Synthetic oligonucleotide
caagcccucacaccacaug

SEQ ID NO: 1755894 - RNA, 19 nt, Artificial Sequence
  Description of Artificial Sequence: Synthetic oligonucleotide
cuccuacugaccucaccug

SEQ ID NO: 1755895 - RNA, 19 nt, Artificial Sequence
  Description of Artificial Sequence: Synthetic oligonucleotide
agggccaacccuggcacgg

SEQ ID NO: 1755896 - RNA, 19 nt, Artificial Sequence
  Description of Artificial Sequence: Synthetic oligonucleotide
uugaagcaucccugccaag

SEQ ID NO: 1755897 - RNA, 19 nt, Artificial Sequence
  Description of Artificial Sequence: Synthetic oligonucleotide
accguggcaagucccugug

SEQ ID NO: 1755898 - RNA, 19 nt, Artificial Sequence
  Description of Artificial Sequence: Synthetic oligonucleotide
agguaguuuuaaaaugaaa

SEQ ID NO: 1755899 - RNA, 19 nt, Artificial Sequence
  Description of Artificial Sequence: Synthetic oligonucleotide
gguguugcuuucccagugc

SEQ ID NO: 1755900 - RNA, 19 nt, Artificial Sequence
  Description of Artificial Sequence: Synthetic oligonucleotide
ggauagaaggcaagaugcc

SEQ ID NO: 1755901 - RNA, 19 nt, Artificial Sequence
  Description of Artificial Sequence: Synthetic oligonucleotide
ggacagucuggauugucac

SEQ ID NO: 1755902 - RNA, 19 nt, Artificial Sequence
  Description of Artificial Sequence: Synthetic oligonucleotide
gaagaccuaaccucauaau

SEQ ID NO: 1755903 - RNA, 19 nt, Artificial Sequence
  Description of Artificial Sequence: Synthetic oligonucleotide
augagugaagaaauauauu

SEQ ID NO: 1755904 - RNA, 19 nt, Artificial Sequence
  Description of Artificial Sequence: Synthetic oligonucleotide
ggagcaagcagguggccac

SEQ ID NO: 1755905 - RNA, 19 nt, Artificial Sequence
  Description of Artificial Sequence: Synthetic oligonucleotide
auccacgcaggcaaaguga

SEQ ID NO: 1755906 - RNA, 19 nt, Artificial Sequence
  Description of Artificial Sequence: Synthetic oligonucleotide
ggaggaguugaucucugga

SEQ ID NO: 1755907 - RNA, 19 nt, Artificial Sequence
  Description of Artificial Sequence: Synthetic oligonucleotide
gacccucaagucacaaaac

SEQ ID NO: 1755908 - RNA, 19 nt, Artificial Sequence
  Description of Artificial Sequence: Synthetic oligonucleotide
cugcuuggaccaucacacc

SEQ ID NO: 1755909 - RNA, 19 nt, Artificial Sequence
  Description of Artificial Sequence: Synthetic oligonucleotide
gggacauagguaauaauua

SEQ ID NO: 1755910 - RNA, 19 nt, Artificial Sequence
  Description of Artificial Sequence: Synthetic oligonucleotide
cauggcucuucacugcaga

SEQ ID NO: 1755911 - RNA, 19 nt, Artificial Sequence
  Description of Artificial Sequence: Synthetic oligonucleotide
ugaaugccccucacuguuu

SEQ ID NO: 1755912 - RNA, 19 nt, Artificial Sequence
  Description of Artificial Sequence: Synthetic oligonucleotide
cuacagccccaagugacac

SEQ ID NO: 1755913 - RNA, 19 nt, Artificial Sequence
  Description of Artificial Sequence: Synthetic oligonucleotide
caucacaccucuagcaugu

SEQ ID NO: 1755914 - RNA, 19 nt, Artificial Sequence
  Description of Artificial Sequence: Synthetic oligonucleotide
ccucauaauagggccaacc

SEQ ID NO: 1755915 - RNA, 19 nt, Artificial Sequence
  Description of Artificial Sequence: Synthetic oligonucleotide
ucguggacagaaccacuuu

SEQ ID NO: 1755916 - RNA, 19 nt, Artificial Sequence
  Description of Artificial Sequence: Synthetic oligonucleotide
ugcuuucccagugcuggga

SEQ ID NO: 1755917 - RNA, 19 nt, Artificial Sequence
  Description of Artificial Sequence: Synthetic oligonucleotide
accagucuccguucauaga

SEQ ID NO: 1755918 - RNA, 19 nt, Artificial Sequence
  Description of Artificial Sequence: Synthetic oligonucleotide
agcaucccugccaaggccu

SEQ ID NO: 1755919 - RNA, 19 nt, Artificial Sequence
  Description of Artificial Sequence: Synthetic oligonucleotide
gugaagaccagucuccguu

SEQ ID NO: 1755920 - RNA, 19 nt, Artificial Sequence
  Description of Artificial Sequence: Synthetic oligonucleotide
aggggacauagguaauaau

SEQ ID NO: 1755921 - RNA, 19 nt, Artificial Sequence
  Description of Artificial Sequence: Synthetic oligonucleotide
auggaguguggcagagaac

SEQ ID NO: 1755922 - RNA, 19 nt, Artificial Sequence
  Description of Artificial Sequence: Synthetic oligonucleotide
ccagguuaaaaccguguuc

SEQ ID NO: 1755923 - RNA, 19 nt, Artificial Sequence
  Description of Artificial Sequence: Synthetic oligonucleotide
agaaggcaagaugccauau

SEQ ID NO: 1755924 - RNA, 19 nt, Artificial Sequence
  Description of Artificial Sequence: Synthetic oligonucleotide
caauuggacagucuggauu

SEQ ID NO: 1755925 - RNA, 19 nt, Artificial Sequence
  Description of Artificial Sequence: Synthetic oligonucleotide
gaggggagccugcauguaa

SEQ ID NO: 1755926 - RNA, 19 nt, Artificial Sequence
  Description of Artificial Sequence: Synthetic oligonucleotide
uugcaacaugagugaagaa

SEQ ID NO: 1755927 - RNA, 19 nt, Artificial Sequence
  Description of Artificial Sequence: Synthetic oligonucleotide
agacacagccgguggccug

SEQ ID NO: 1755928 - RNA, 19 nt, Artificial Sequence
  Description of Artificial Sequence: Synthetic oligonucleotide
gagaggggagccugcaugu

SEQ ID NO: 1755929 - RNA, 19 nt, Artificial Sequence
  Description of Artificial Sequence: Synthetic oligonucleotide
ccugaaaugaaugccccuc

SEQ ID NO: 1755930 - RNA, 19 nt, Artificial Sequence
  Description of Artificial Sequence: Synthetic oligonucleotide
cagccauccacaagcccuc

SEQ ID NO: 1755931 - RNA, 19 nt, Artificial Sequence
  Description of Artificial Sequence: Synthetic oligonucleotide
aggcaagaugccauaugca

SEQ ID NO: 1755932 - RNA, 19 nt, Artificial Sequence
  Description of Artificial Sequence: Synthetic oligonucleotide
gguggccuggcuccuacug

SEQ ID NO: 1755933 - RNA, 19 nt, Artificial Sequence
  Description of Artificial Sequence: Synthetic oligonucleotide
caacaugagugaagaaaua

SEQ ID NO: 1755934 - RNA, 19 nt, Artificial Sequence
  Description of Artificial Sequence: Synthetic oligonucleotide
gcaagaugccauaugcaca

SEQ ID NO: 1755935 - RNA, 19 nt, Artificial Sequence
  Description of Artificial Sequence: Synthetic oligonucleotide
caguccuggaaaacaugga

SEQ ID NO: 1755936 - RNA, 19 nt, Artificial Sequence
  Description of Artificial Sequence: Synthetic oligonucleotide
aggcagacggucagcacug

SEQ ID NO: 1755937 - RNA, 19 nt, Artificial Sequence
  Description of Artificial Sequence: Synthetic oligonucleotide
ccagucuccguucauagaa

SEQ ID NO: 1755938 - RNA, 19 nt, Artificial Sequence
  Description of Artificial Sequence: Synthetic oligonucleotide
aucguggacagaaccacuu

SEQ ID NO: 1755939 - RNA, 19 nt, Artificial Sequence
  Description of Artificial Sequence: Synthetic oligonucleotide
gcuccuacugaccucaccu

SEQ ID NO: 1755940 - RNA, 19 nt, Artificial Sequence
  Description of Artificial Sequence: Synthetic oligonucleotide
ccauaauccaugauccaaa

SEQ ID NO: 1755941 - RNA, 19 nt, Artificial Sequence
  Description of Artificial Sequence: Synthetic oligonucleotide
guguggcagagaacgaaca

SEQ ID NO: 1755942 - RNA, 19 nt, Artificial Sequence
  Description of Artificial Sequence: Synthetic oligonucleotide
ccugugagauuguucugug

SEQ ID NO: 1755943 - RNA, 19 nt, Artificial Sequence
  Description of Artificial Sequence: Synthetic oligonucleotide
cuggcuccuacugaccuca

SEQ ID NO: 1755944 - RNA, 19 nt, Artificial Sequence
  Description of Artificial Sequence: Synthetic oligonucleotide
acccugauggauggagugu

SEQ ID NO: 1755945 - RNA, 19 nt, Artificial Sequence
  Description of Artificial Sequence: Synthetic oligonucleotide
cguggcaagucccugugag

SEQ ID NO: 1755946 - RNA, 19 nt, Artificial Sequence
  Description of Artificial Sequence: Synthetic oligonucleotide
uuagaccuccuugcuucaa

SEQ ID NO: 1755947 - RNA, 19 nt, Artificial Sequence
  Description of Artificial Sequence: Synthetic oligonucleotide
augccccucacuguuuggu

SEQ ID NO: 1755948 - RNA, 19 nt, Artificial Sequence
  Description of Artificial Sequence: Synthetic oligonucleotide
cugaccucaccugcuggac

SEQ ID NO: 1755949 - RNA, 19 nt, Artificial Sequence
  Description of Artificial Sequence: Synthetic oligonucleotide
cauagguaauaauuaccuu

SEQ ID NO: 1755950 - RNA, 19 nt, Artificial Sequence
  Description of Artificial Sequence: Synthetic oligonucleotide
ccucaagucacaaaacagu

SEQ ID NO: 1755951 - RNA, 19 nt, Artificial Sequence
  Description of Artificial Sequence: Synthetic oligonucleotide
caccacauggcucuucacu

SEQ ID NO: 1755952 - RNA, 19 nt, Artificial Sequence
  Description of Artificial Sequence: Synthetic oligonucleotide
acagaucuuagggcucagu

SEQ ID NO: 1755953 - RNA, 19 nt, Artificial Sequence
  Description of Artificial Sequence: Synthetic oligonucleotide
gcuccucucaguauaggca

SEQ ID NO: 1755954 - RNA, 19 nt, Artificial Sequence
  Description of Artificial Sequence: Synthetic oligonucleotide
gccuacagccccaagugac

SEQ ID NO: 1755955 - RNA, 19 nt, Artificial Sequence
  Description of Artificial Sequence: Synthetic oligonucleotide
agaccagucuccguucaua

SEQ ID NO: 1755956 - RNA, 19 nt, Artificial Sequence
  Description of Artificial Sequence: Synthetic oligonucleotide
ccuggcacgguagagcaug

SEQ ID NO: 1755957 - RNA, 19 nt, Artificial Sequence
  Description of Artificial Sequence: Synthetic oligonucleotide
ggggacauagguaauaauu

SEQ ID NO: 1755958 - RNA, 19 nt, Artificial Sequence
  Description of Artificial Sequence: Synthetic oligonucleotide
ugaacacaucguggacaga

SEQ ID NO: 1755959 - RNA, 19 nt, Artificial Sequence
  Description of Artificial Sequence: Synthetic oligonucleotide
uccuugcuucaaagcuccu

SEQ ID NO: 1755960 - RNA, 19 nt, Artificial Sequence
  Description of Artificial Sequence: Synthetic oligonucleotide
cuucuuauuuugggaaaua

SEQ ID NO: 1755961 - RNA, 19 nt, Artificial Sequence
  Description of Artificial Sequence: Synthetic oligonucleotide
ggggagccugcauguaaag

SEQ ID NO: 1755962 - RNA, 19 nt, Artificial Sequence
  Description of Artificial Sequence: Synthetic oligonucleotide
cagaucuuagggcucaguu

SEQ ID NO: 1755963 - RNA, 19 nt, Artificial Sequence
  Description of Artificial Sequence: Synthetic oligonucleotide
ugccccucacuguuugguu

SEQ ID NO: 1755964 - RNA, 19 nt, Artificial Sequence
  Description of Artificial Sequence: Synthetic oligonucleotide
acucaaggcugacccucaa

SEQ ID NO: 1755965 - RNA, 19 nt, Artificial Sequence
  Description of Artificial Sequence: Synthetic oligonucleotide
cccugaagaccuaaccuca

SEQ ID NO: 1755966 - RNA, 19 nt, Artificial Sequence
  Description of Artificial Sequence: Synthetic oligonucleotide
cuuggaccaucacaccucu

SEQ ID NO: 1755967 - RNA, 19 nt, Artificial Sequence
  Description of Artificial Sequence: Synthetic oligonucleotide
cagucuccguucauagaaa

SEQ ID NO: 1755968 - RNA, 19 nt, Artificial Sequence
  Description of Artificial Sequence: Synthetic oligonucleotide
cugaagaccuaaccucaua

SEQ ID NO: 1755969 - RNA, 19 nt, Artificial Sequence
  Description of Artificial Sequence: Synthetic oligonucleotide
cugacccucaagucacaaa

SEQ ID NO: 1755970 - RNA, 19 nt, Artificial Sequence
  Description of Artificial Sequence: Synthetic oligonucleotide
caaaauggugcaguggcuu

SEQ ID NO: 1755971 - RNA, 19 nt, Artificial Sequence
  Description of Artificial Sequence: Synthetic oligonucleotide
aggggagccugcauguaaa

SEQ ID NO: 1755972 - RNA, 19 nt, Artificial Sequence
  Description of Artificial Sequence: Synthetic oligonucleotide
caccagguuaaaaccgugu

SEQ ID NO: 1755973 - RNA, 19 nt, Artificial Sequence
  Description of Artificial Sequence: Synthetic oligonucleotide
cugugcaaaauggugcagu

SEQ ID NO: 1755974 - RNA, 19 nt, Artificial Sequence
  Description of Artificial Sequence: Synthetic oligonucleotide
ccguucauagaaaaugggu

SEQ ID NO: 1755975 - RNA, 19 nt, Artificial Sequence
  Description of Artificial Sequence: Synthetic oligonucleotide
aucucuggacaguguuauu

SEQ ID NO: 1755976 - RNA, 19 nt, Artificial Sequence
  Description of Artificial Sequence: Synthetic oligonucleotide
accucaccugcuggacagg

SEQ ID NO: 1755977 - RNA, 19 nt, Artificial Sequence
  Description of Artificial Sequence: Synthetic oligonucleotide
ggcuccuacugaccucacc

SEQ ID NO: 1755978 - RNA, 19 nt, Artificial Sequence
  Description of Artificial Sequence: Synthetic oligonucleotide
uuggaccaucacaccucua

SEQ ID NO: 1755979 - RNA, 19 nt, Artificial Sequence
  Description of Artificial Sequence: Synthetic oligonucleotide
caucguggacagaaccacu

SEQ ID NO: 1755980 - RNA, 19 nt, Artificial Sequence
  Description of Artificial Sequence: Synthetic oligonucleotide
agguugcaggagaggggag

SEQ ID NO: 1755981 - RNA, 19 nt, Artificial Sequence
  Description of Artificial Sequence: Synthetic oligonucleotide
guucacccugcaccacgca

SEQ ID NO: 1755982 - RNA, 19 nt, Artificial Sequence
  Description of Artificial Sequence: Synthetic oligonucleotide
ggacaguguuauugcuuga

SEQ ID NO: 1755983 - RNA, 19 nt, Artificial Sequence
  Description of Artificial Sequence: Synthetic oligonucleotide
ccucacaccacauggcucu

SEQ ID NO: 1755984 - RNA, 19 nt, Artificial Sequence
  Description of Artificial Sequence: Synthetic oligonucleotide
ccuacagccccaagugaca

SEQ ID NO: 1755985 - RNA, 19 nt, Artificial Sequence
  Description of Artificial Sequence: Synthetic oligonucleotide
cagacggucagcacugcuu

SEQ ID NO: 1755986 - RNA, 19 nt, Artificial Sequence
  Description of Artificial Sequence: Synthetic oligonucleotide
ggccuacagccccaaguga

SEQ ID NO: 1755987 - RNA, 19 nt, Artificial Sequence
  Description of Artificial Sequence: Synthetic oligonucleotide
auggugcaguggcuucuua

SEQ ID NO: 1755988 - RNA, 19 nt, Artificial Sequence
  Description of Artificial Sequence: Synthetic oligonucleotide
cccucacaccacauggcuc

SEQ ID NO: 1755989 - RNA, 19 nt, Artificial Sequence
  Description of Artificial Sequence: Synthetic oligonucleotide
acaagcccucacaccacau

SEQ ID NO: 1755990 - RNA, 19 nt, Artificial Sequence
  Description of Artificial Sequence: Synthetic oligonucleotide
gccaacccuggcacgguag

SEQ ID NO: 1755991 - RNA, 19 nt, Artificial Sequence
  Description of Artificial Sequence: Synthetic oligonucleotide
ccguguucacccugcacca

SEQ ID NO: 1755992 - RNA, 19 nt, Artificial Sequence
  Description of Artificial Sequence: Synthetic oligonucleotide
gucaccguggcaagucccu

SEQ ID NO: 1755993 - RNA, 19 nt, Artificial Sequence
  Description of Artificial Sequence: Synthetic oligonucleotide
gccauaugcacaggagcaa

SEQ ID NO: 1755994 - RNA, 19 nt, Artificial Sequence
  Description of Artificial Sequence: Synthetic oligonucleotide
ccugcuggacaggcagacg

SEQ ID NO: 1755995 - RNA, 19 nt, Artificial Sequence
  Description of Artificial Sequence: Synthetic oligonucleotide
agaggggagccugcaugua

SEQ ID NO: 1755996 - RNA, 19 nt, Artificial Sequence
  Description of Artificial Sequence: Synthetic oligonucleotide
agccauccacaagcccuca

SEQ ID NO: 1755997 - RNA, 19 nt, Artificial Sequence
  Description of Artificial Sequence: Synthetic oligonucleotide
caccacgcacuuggccuac

SEQ ID NO: 1755998 - RNA, 19 nt, Artificial Sequence
  Description of Artificial Sequence: Synthetic oligonucleotide
gcccucacaccacauggcu

SEQ ID NO: 1755999 - RNA, 19 nt, Artificial Sequence
  Description of Artificial Sequence: Synthetic oligonucleotide
ggcaguacaccagguuaaa

SEQ ID NO: 1756000 - RNA, 19 nt, Artificial Sequence
  Description of Artificial Sequence: Synthetic oligonucleotide
ccuacugaccucaccugcu

SEQ ID NO: 1756001 - RNA, 19 nt, Artificial Sequence
  Description of Artificial Sequence: Synthetic oligonucleotide
gccuggcuccuacugaccu

SEQ ID NO: 1756002 - RNA, 19 nt, Artificial Sequence
  Description of Artificial Sequence: Synthetic oligonucleotide
gccugaaaugaaugccccu

SEQ ID NO: 1756003 - RNA, 19 nt, Artificial Sequence
  Description of Artificial Sequence: Synthetic oligonucleotide
cgcaggcaaagugaaacca

SEQ ID NO: 1756004 - RNA, 19 nt, Artificial Sequence
  Description of Artificial Sequence: Synthetic oligonucleotide
ccaacccuggcacgguaga

SEQ ID NO: 1756005 - RNA, 19 nt, Artificial Sequence
  Description of Artificial Sequence: Synthetic oligonucleotide
caguugaaauaagguaguu

SEQ ID NO: 1756006 - RNA, 19 nt, Artificial Sequence
  Description of Artificial Sequence: Synthetic oligonucleotide
ggauggaguguggcagaga

SEQ ID NO: 1756007 - RNA, 19 nt, Artificial Sequence
  Description of Artificial Sequence: Synthetic oligonucleotide
cagccccaagugacacuca

SEQ ID NO: 1756008 - RNA, 19 nt, Artificial Sequence
  Description of Artificial Sequence: Synthetic oligonucleotide
ggccuggcuccuacugacc

SEQ ID NO: 1756009 - RNA, 19 nt, Artificial Sequence
  Description of Artificial Sequence: Synthetic oligonucleotide
gcaccacgcacuuggccua

SEQ ID NO: 1756010 - RNA, 19 nt, Artificial Sequence
  Description of Artificial Sequence: Synthetic oligonucleotide
cggucagcacugcuuggac

SEQ ID NO: 1756011 - RNA, 19 nt, Artificial Sequence
  Description of Artificial Sequence: Synthetic oligonucleotide
ggcagacggucagcacugc

SEQ ID NO: 1756012 - RNA, 19 nt, Artificial Sequence
  Description of Artificial Sequence: Synthetic oligonucleotide
caagucccugugagauugu

SEQ ID NO: 1756013 - RNA, 19 nt, Artificial Sequence
  Description of Artificial Sequence: Synthetic oligonucleotide
caucacccugauggaugga

SEQ ID NO: 1756014 - RNA, 19 nt, Artificial Sequence
  Description of Artificial Sequence: Synthetic oligonucleotide
acccugcaccacgcacuug

SEQ ID NO: 1756015 - RNA, 19 nt, Artificial Sequence
  Description of Artificial Sequence: Synthetic oligonucleotide
cccugugagauuguucugu

SEQ ID NO: 1756016 - RNA, 19 nt, Artificial Sequence
  Description of Artificial Sequence: Synthetic oligonucleotide
gcagacggucagcacugcu

SEQ ID NO: 1756017 - RNA, 19 nt, Artificial Sequence
  Description of Artificial Sequence: Synthetic oligonucleotide
ccgguggccuggcuccuac

SEQ ID NO: 1756018 - RNA, 19 nt, Artificial Sequence
  Description of Artificial Sequence: Synthetic oligonucleotide
gccccucacuguuugguuu

SEQ ID NO: 1756019 - RNA, 19 nt, Artificial Sequence
  Description of Artificial Sequence: Synthetic oligonucleotide
ggccaacccuggcacggua

SEQ ID NO: 1756020 - RNA, 19 nt, Artificial Sequence
  Description of Artificial Sequence: Synthetic oligonucleotide
cguguucacccugcaccac

SEQ ID NO: 1756021 - RNA, 19 nt, Artificial Sequence
  Description of Artificial Sequence: Synthetic oligonucleotide
ccacgcaggcaaagugaaa

SEQ ID NO: 1756022 - RNA, 19 nt, Artificial Sequence
  Description of Artificial Sequence: Synthetic oligonucleotide
ccuggaaaacauggacacu

SEQ ID NO: 1756023 - RNA, 19 nt, Artificial Sequence
  Description of Artificial Sequence: Synthetic oligonucleotide
ccguggcaagucccuguga

SEQ ID NO: 1756024 - RNA, 19 nt, Artificial Sequence
  Description of Artificial Sequence: Synthetic oligonucleotide
ccucacuguuugguuucaa

SEQ ID NO: 1756025 - RNA, 19 nt, Artificial Sequence
  Description of Artificial Sequence: Synthetic oligonucleotide
cucacaccacauggcucuu

SEQ ID NO: 1756026 - RNA, 19 nt, Artificial Sequence
  Description of Artificial Sequence: Synthetic oligonucleotide
gggccaacccuggcacggu

SEQ ID NO: 1756027 - RNA, 19 nt, Artificial Sequence
  Description of Artificial Sequence: Synthetic oligonucleotide
cccuggcacgguagagcau

SEQ ID NO: 1756028 - RNA, 19 nt, Artificial Sequence
  Description of Artificial Sequence: Synthetic oligonucleotide
gccgguggccuggcuccua

SEQ ID NO: 1756029 - RNA, 19 nt, Artificial Sequence
  Description of Artificial Sequence: Synthetic oligonucleotide
cgguggccuggcuccuacu

SEQ ID NO: 1756030 - RNA, 19 nt, Artificial Sequence
  Description of Artificial Sequence: Synthetic oligonucleotide
aauuacaccgaauacaggc

SEQ ID NO: 1756031 - RNA, 19 nt, Artificial Sequence
  Description of Artificial Sequence: Synthetic oligonucleotide
uuuaauggaaagaacaggg

SEQ ID NO: 1756032 - RNA, 19 nt, Artificial Sequence
  Description of Artificial Sequence: Synthetic oligonucleotide
aagucgaugacuucugaac

SEQ ID NO: 1756033 - RNA, 19 nt, Artificial Sequence
  Description of Artificial Sequence: Synthetic oligonucleotide
aauagucgaauccacagcu

SEQ ID NO: 1756034 - RNA, 19 nt, Artificial Sequence
  Description of Artificial Sequence: Synthetic oligonucleotide
aauauuagcuaaaaggugu

SEQ ID NO: 1756035 - RNA, 19 nt, Artificial Sequence
  Description of Artificial Sequence: Synthetic oligonucleotide
cuuguuguuaucauguccc

SEQ ID NO: 1756036 - RNA, 19 nt, Artificial Sequence
  Description of Artificial Sequence: Synthetic oligonucleotide
auuguaggaaccuugucuc

SEQ ID NO: 1756037 - RNA, 19 nt, Artificial Sequence
  Description of Artificial Sequence: Synthetic oligonucleotide
uaaauagugggucauauuu

SEQ ID NO: 1756038 - RNA, 19 nt, Artificial Sequence
  Description of Artificial Sequence: Synthetic oligonucleotide
uguguaaaugacaaauagc

SEQ ID NO: 1756039 - RNA, 19 nt, Artificial Sequence
  Description of Artificial Sequence: Synthetic oligonucleotide
caacuuacugcuuucaagg

SEQ ID NO: 1756040 - RNA, 19 nt, Artificial Sequence
  Description of Artificial Sequence: Synthetic oligonucleotide
aucgaggugcuccagaccc

SEQ ID NO: 1756041 - RNA, 19 nt, Artificial Sequence
  Description of Artificial Sequence: Synthetic oligonucleotide
acagcuggcuuuuaggagc

SEQ ID NO: 1756042 - RNA, 19 nt, Artificial Sequence
  Description of Artificial Sequence: Synthetic oligonucleotide
uugcagggaaauuacaccg

SEQ ID NO: 1756043 - RNA, 19 nt, Artificial Sequence
  Description of Artificial Sequence: Synthetic oligonucleotide
aaguuagugcaguucugcc

SEQ ID NO: 1756044 - RNA, 19 nt, Artificial Sequence
  Description of Artificial Sequence: Synthetic oligonucleotide
auguguaaaugacaaauag

SEQ ID NO: 1756045 - RNA, 19 nt, Artificial Sequence
  Description of Artificial Sequence: Synthetic oligonucleotide
augacaaauagccacuguc

SEQ ID NO: 1756046 - RNA, 19 nt, Artificial Sequence
  Description of Artificial Sequence: Synthetic oligonucleotide
ucuaaaguuuccacuggcg

SEQ ID NO: 1756047 - RNA, 19 nt, Artificial Sequence
  Description of Artificial Sequence: Synthetic oligonucleotide
ucuucuauuucacugggac

SEQ ID NO: 1756048 - RNA, 19 nt, Artificial Sequence
  Description of Artificial Sequence: Synthetic oligonucleotide
uugcaauuaaaacacuuca

SEQ ID NO: 1756049 - RNA, 19 nt, Artificial Sequence
  Description of Artificial Sequence: Synthetic oligonucleotide
gaauacaggcuuuucaggc

SEQ ID NO: 1756050 - RNA, 19 nt, Artificial Sequence
  Description of Artificial Sequence: Synthetic oligonucleotide
acaauagucgaauccacag

SEQ ID NO: 1756051 - RNA, 19 nt, Artificial Sequence
  Description of Artificial Sequence: Synthetic oligonucleotide
uuguacaauagucgaaucc

SEQ ID NO: 1756052 - RNA, 19 nt, Artificial Sequence
  Description of Artificial Sequence: Synthetic oligonucleotide
uuucugaucacgcugccug

SEQ ID NO: 1756053 - RNA, 19 nt, Artificial Sequence
  Description of Artificial Sequence: Synthetic oligonucleotide
uucuuuacaaccguccgcg

SEQ ID NO: 1756054 - RNA, 19 nt, Artificial Sequence
  Description of Artificial Sequence: Synthetic oligonucleotide
uguuacauguugauuuucc

SEQ ID NO: 1756055 - RNA, 19 nt, Artificial Sequence
  Description of Artificial Sequence: Synthetic oligonucleotide
aucgcuuucuacuaucuuc

SEQ ID NO: 1756056 - RNA, 19 nt, Artificial Sequence
  Description of Artificial Sequence: Synthetic oligonucleotide
uguacaauagucgaaucca

SEQ ID NO: 1756057 - RNA, 19 nt, Artificial Sequence
  Description of Artificial Sequence: Synthetic oligonucleotide
uuugcagggaaauuacacc

SEQ ID NO: 1756058 - RNA, 19 nt, Artificial Sequence
  Description of Artificial Sequence: Synthetic oligonucleotide
uuaauggaaagaacagggc

SEQ ID NO: 1756059 - RNA, 19 nt, Artificial Sequence
  Description of Artificial Sequence: Synthetic oligonucleotide
uuuacaaccguccgcgacc

SEQ ID NO: 1756060 - RNA, 19 nt, Artificial Sequence
  Description of Artificial Sequence: Synthetic oligonucleotide
cuaaaagguguuugaaucc

SEQ ID NO: 1756061 - RNA, 19 nt, Artificial Sequence
  Description of Artificial Sequence: Synthetic oligonucleotide
uagucuaaaguuuccacug

SEQ ID NO: 1756062 - RNA, 19 nt, Artificial Sequence
  Description of Artificial Sequence: Synthetic oligonucleotide
uucuguuacauguugauuu

SEQ ID NO: 1756063 - RNA, 19 nt, Artificial Sequence
  Description of Artificial Sequence: Synthetic oligonucleotide
ucacuuuagacaaauuuau

SEQ ID NO: 1756064 - RNA, 19 nt, Artificial Sequence
  Description of Artificial Sequence: Synthetic oligonucleotide
uguuugaauccccuacggg

SEQ ID NO: 1756065 - RNA, 19 nt, Artificial Sequence
  Description of Artificial Sequence: Synthetic oligonucleotide
ugauguguaaaugacaaau

SEQ ID NO: 1756066 - RNA, 19 nt, Artificial Sequence
  Description of Artificial Sequence: Synthetic oligonucleotide
auuuugcucacuuuagaca

SEQ ID NO: 1756067 - RNA, 19 nt, Artificial Sequence
  Description of Artificial Sequence: Synthetic oligonucleotide
gauaaggguacuauccucc

SEQ ID NO: 1756068 - RNA, 19 nt, Artificial Sequence
  Description of Artificial Sequence: Synthetic oligonucleotide
aauacaggcuuuucaggcu

SEQ ID NO: 1756069 - RNA, 19 nt, Artificial Sequence
  Description of Artificial Sequence: Synthetic oligonucleotide
agguguuugaauccccuac

SEQ ID NO: 1756070 - RNA, 19 nt, Artificial Sequence
  Description of Artificial Sequence: Synthetic oligonucleotide
ucgucaaaauauuagcuaa

SEQ ID NO: 1756071 - RNA, 19 nt, Artificial Sequence
  Description of Artificial Sequence: Synthetic oligonucleotide
auaucgaggugcuccagac

SEQ ID NO: 1756072 - RNA, 19 nt, Artificial Sequence
  Description of Artificial Sequence: Synthetic oligonucleotide
uguauuagcuggaaugcuc

SEQ ID NO: 1756073 - RNA, 19 nt, Artificial Sequence
  Description of Artificial Sequence: Synthetic oligonucleotide
aaaagguguuugaaucccc

SEQ ID NO: 1756074 - RNA, 19 nt, Artificial Sequence
  Description of Artificial Sequence: Synthetic oligonucleotide
acaacguauccucugguug

SEQ ID NO: 1756075 - RNA, 19 nt, Artificial Sequence
  Description of Artificial Sequence: Synthetic oligonucleotide
uuguuaucaugucccacag

SEQ ID NO: 1756076 - RNA, 19 nt, Artificial Sequence
  Description of Artificial Sequence: Synthetic oligonucleotide
agaccacucuuucaaacuc

SEQ ID NO: 1756077 - RNA, 19 nt, Artificial Sequence
  Description of Artificial Sequence: Synthetic oligonucleotide
gaggauaucgaggugcucc

SEQ ID NO: 1756078 - RNA, 19 nt, Artificial Sequence
  Description of Artificial Sequence: Synthetic oligonucleotide
gguagcucgcucuaaauag

SEQ ID NO: 1756079 - RNA, 19 nt, Artificial Sequence
  Description of Artificial Sequence: Synthetic oligonucleotide
gauuguaggaaccuugucu

SEQ ID NO: 1756080 - RNA, 19 nt, Artificial Sequence
  Description of Artificial Sequence: Synthetic oligonucleotide
acagcuuucccguuugcag

SEQ ID NO: 1756081 - RNA, 19 nt, Artificial Sequence
  Description of Artificial Sequence: Synthetic oligonucleotide
uucgucaaaauauuagcua

SEQ ID NO: 1756082 - RNA, 19 nt, Artificial Sequence
  Description of Artificial Sequence: Synthetic oligonucleotide
aauguugaacagaccacuc

SEQ ID NO: 1756083 - RNA, 19 nt, Artificial Sequence
  Description of Artificial Sequence: Synthetic oligonucleotide
acacuuuguacaauagucg

SEQ ID NO: 1756084 - RNA, 19 nt, Artificial Sequence
  Description of Artificial Sequence: Synthetic oligonucleotide
agucuaaaguuuccacugg

SEQ ID NO: 1756085 - RNA, 19 nt, Artificial Sequence
  Description of Artificial Sequence: Synthetic oligonucleotide
uacaauagucgaauccaca

SEQ ID NO: 1756086 - RNA, 19 nt, Artificial Sequence
  Description of Artificial Sequence: Synthetic oligonucleotide
agggaaauuacaccgaaua

SEQ ID NO: 1756087 - RNA, 19 nt, Artificial Sequence
  Description of Artificial Sequence: Synthetic oligonucleotide
uacgggagagcucacugag

SEQ ID NO: 1756088 - RNA, 19 nt, Artificial Sequence
  Description of Artificial Sequence: Synthetic oligonucleotide
guuguuaucaugucccaca

SEQ ID NO: 1756089 - RNA, 19 nt, Artificial Sequence
  Description of Artificial Sequence: Synthetic oligonucleotide
uugcuuugcuguauuagcu

SEQ ID NO: 1756090 - RNA, 19 nt, Artificial Sequence
  Description of Artificial Sequence: Synthetic oligonucleotide
aacuuacugcuuucaagga

SEQ ID NO: 1756091 - RNA, 19 nt, Artificial Sequence
  Description of Artificial Sequence: Synthetic oligonucleotide
agucgaugacuucugaaca

SEQ ID NO: 1756092 - RNA, 19 nt, Artificial Sequence
  Description of Artificial Sequence: Synthetic oligonucleotide
uccacuuuaggguuucgcu

SEQ ID NO: 1756093 - RNA, 19 nt, Artificial Sequence
  Description of Artificial Sequence: Synthetic oligonucleotide
uuuaucgcuuucuacuauc

SEQ ID NO: 1756094 - RNA, 19 nt, Artificial Sequence
  Description of Artificial Sequence: Synthetic oligonucleotide
uuaucaugucccacaguug

SEQ ID NO: 1756095 - RNA, 19 nt, Artificial Sequence
  Description of Artificial Sequence: Synthetic oligonucleotide
gagcuugccauucgaacag

SEQ ID NO: 1756096 - RNA, 19 nt, Artificial Sequence
  Description of Artificial Sequence: Synthetic oligonucleotide
aauggaaagaacagggcuu

SEQ ID NO: 1756097 - RNA, 19 nt, Artificial Sequence
  Description of Artificial Sequence: Synthetic oligonucleotide
uacagcuggcuuuuaggag

SEQ ID NO: 1756098 - RNA, 19 nt, Artificial Sequence
  Description of Artificial Sequence: Synthetic oligonucleotide
aaauuacaccgaauacagg

SEQ ID NO: 1756099 - RNA, 19 nt, Artificial Sequence
  Description of Artificial Sequence: Synthetic oligonucleotide
guuggcgacucaaugaaag

SEQ ID NO: 1756100 - RNA, 19 nt, Artificial Sequence
  Description of Artificial Sequence: Synthetic oligonucleotide
uuaucgcuuucuacuaucu

SEQ ID NO: 1756101 - RNA, 19 nt, Artificial Sequence
  Description of Artificial Sequence: Synthetic oligonucleotide
agagccuuucugaucacgc

SEQ ID NO: 1756102 - RNA, 19 nt, Artificial Sequence
  Description of Artificial Sequence: Synthetic oligonucleotide
uaggguuucgcuuggaauu

SEQ ID NO: 1756103 - RNA, 19 nt, Artificial Sequence
  Description of Artificial Sequence: Synthetic oligonucleotide
ugguuucuaaagcaauccu

SEQ ID NO: 1756104 - RNA, 19 nt, Artificial Sequence
  Description of Artificial Sequence: Synthetic oligonucleotide
caauagucgaauccacagc

SEQ ID NO: 1756105 - RNA, 19 nt, Artificial Sequence
  Description of Artificial Sequence: Synthetic oligonucleotide
cacuuuaggguuucgcuug

SEQ ID NO: 1756106 - RNA, 19 nt, Artificial Sequence
  Description of Artificial Sequence: Synthetic oligonucleotide
uuacauguugauuuuccuu

SEQ ID NO: 1756107 - RNA, 19 nt, Artificial Sequence
  Description of Artificial Sequence: Synthetic oligonucleotide
cuucuuuacaaccguccgc

SEQ ID NO: 1756108 - RNA, 19 nt, Artificial Sequence
  Description of Artificial Sequence: Synthetic oligonucleotide
cagaccgcugcaaacggcg

SEQ ID NO: 1756109 - RNA, 19 nt, Artificial Sequence
  Description of Artificial Sequence: Synthetic oligonucleotide
cucacuuuagacaaauuua

SEQ ID NO: 1756110 - RNA, 19 nt, Artificial Sequence
  Description of Artificial Sequence: Synthetic oligonucleotide
uguaggaaccuugucuccc

SEQ ID NO: 1756111 - RNA, 19 nt, Artificial Sequence
  Description of Artificial Sequence: Synthetic oligonucleotide
gcuucgucaaaauauuagc

SEQ ID NO: 1756112 - RNA, 19 nt, Artificial Sequence
  Description of Artificial Sequence: Synthetic oligonucleotide
uuacaggaaggcuccaaac

SEQ ID NO: 1756113 - RNA, 19 nt, Artificial Sequence
  Description of Artificial Sequence: Synthetic oligonucleotide
auccuuacaggaaggcucc

SEQ ID NO: 1756114 - RNA, 19 nt, Artificial Sequence
  Description of Artificial Sequence: Synthetic oligonucleotide
accgaauacaggcuuuuca

SEQ ID NO: 1756115 - RNA, 19 nt, Artificial Sequence
  Description of Artificial Sequence: Synthetic oligonucleotide
gguguuugaauccccuacg

SEQ ID NO: 1756116 - RNA, 19 nt, Artificial Sequence
  Description of Artificial Sequence: Synthetic oligonucleotide
uuaggagcuugccauucga

SEQ ID NO: 1756117 - RNA, 19 nt, Artificial Sequence
  Description of Artificial Sequence: Synthetic oligonucleotide
agcuucgucaaaauauuag

SEQ ID NO: 1756118 - RNA, 19 nt, Artificial Sequence
  Description of Artificial Sequence: Synthetic oligonucleotide
ucuugccaauuauauuuug

SEQ ID NO: 1756119 - RNA, 19 nt, Artificial Sequence
  Description of Artificial Sequence: Synthetic oligonucleotide
agcuaaaagguguuugaau

SEQ ID NO: 1756120 - RNA, 19 nt, Artificial Sequence
  Description of Artificial Sequence: Synthetic oligonucleotide
gucgaugacuucugaacag

SEQ ID NO: 1756121 - RNA, 19 nt, Artificial Sequence
  Description of Artificial Sequence: Synthetic oligonucleotide
uuuucuugccaauuauauu

SEQ ID NO: 1756122 - RNA, 19 nt, Artificial Sequence
  Description of Artificial Sequence: Synthetic oligonucleotide
uuuguacaauagucgaauc

SEQ ID NO: 1756123 - RNA, 19 nt, Artificial Sequence
  Description of Artificial Sequence: Synthetic oligonucleotide
uugccauucgaacagucuu

SEQ ID NO: 1756124 - RNA, 19 nt, Artificial Sequence
  Description of Artificial Sequence: Synthetic oligonucleotide
ugauaaucacacagacacu

SEQ ID NO: 1756125 - RNA, 19 nt, Artificial Sequence
  Description of Artificial Sequence: Synthetic oligonucleotide
uagcucgcucuaaauagug

SEQ ID NO: 1756126 - RNA, 19 nt, Artificial Sequence
  Description of Artificial Sequence: Synthetic oligonucleotide
aaugcucuuuuaucgcuuu

SEQ ID NO: 1756127 - RNA, 19 nt, Artificial Sequence
  Description of Artificial Sequence: Synthetic oligonucleotide
gcuuugcuguauuagcugg

SEQ ID NO: 1756128 - RNA, 19 nt, Artificial Sequence
  Description of Artificial Sequence: Synthetic oligonucleotide
acuuuaggguuucgcuugg

SEQ ID NO: 1756129 - RNA, 19 nt, Artificial Sequence
  Description of Artificial Sequence: Synthetic oligonucleotide
uucugaucacgcugccugg

SEQ ID NO: 1756130 - RNA, 19 nt, Artificial Sequence
  Description of Artificial Sequence: Synthetic oligonucleotide
ucuuccaaauuuugcucac

SEQ ID NO: 1756131 - RNA, 19 nt, Artificial Sequence
  Description of Artificial Sequence: Synthetic oligonucleotide
ugcagggaaauuacaccga

SEQ ID NO: 1756132 - RNA, 19 nt, Artificial Sequence
  Description of Artificial Sequence: Synthetic oligonucleotide
caaauagccacugucuuca

SEQ ID NO: 1756133 - RNA, 19 nt, Artificial Sequence
  Description of Artificial Sequence: Synthetic oligonucleotide
cuuuacaaccguccgcgac

SEQ ID NO: 1756134 - RNA, 19 nt, Artificial Sequence
  Description of Artificial Sequence: Synthetic oligonucleotide
uuacaaccguccgcgaccg

SEQ ID NO: 1756135 - RNA, 19 nt, Artificial Sequence
  Description of Artificial Sequence: Synthetic oligonucleotide
aaagguguuugaauccccu

SEQ ID NO: 1756136 - RNA, 19 nt, Artificial Sequence
  Description of Artificial Sequence: Synthetic oligonucleotide
uuacaccgaauacaggcuu

SEQ ID NO: 1756137 - RNA, 19 nt, Artificial Sequence
  Description of Artificial Sequence: Synthetic oligonucleotide
uagucgaauccacagcuuu

SEQ ID NO: 1756138 - RNA, 19 nt, Artificial Sequence
  Description of Artificial Sequence: Synthetic oligonucleotide
aaauagugggucauauuuu

SEQ ID NO: 1756139 - RNA, 19 nt, Artificial Sequence
  Description of Artificial Sequence: Synthetic oligonucleotide
ucuguuacauguugauuuu

SEQ ID NO: 1756140 - RNA, 19 nt, Artificial Sequence
  Description of Artificial Sequence: Synthetic oligonucleotide
cagucuacuggccucuagc

SEQ ID NO: 1756141 - RNA, 19 nt, Artificial Sequence
  Description of Artificial Sequence: Synthetic oligonucleotide
agaacgcgggccccggcgc

SEQ ID NO: 1756142 - RNA, 19 nt, Artificial Sequence
  Description of Artificial Sequence: Synthetic oligonucleotide
gauaucgaggugcuccaga

SEQ ID NO: 1756143 - RNA, 19 nt, Artificial Sequence
  Description of Artificial Sequence: Synthetic oligonucleotide
uaucgaggugcuccagacc

SEQ ID NO: 1756144 - RNA, 19 nt, Artificial Sequence
  Description of Artificial Sequence: Synthetic oligonucleotide
acauguugauuuuccuugu

SEQ ID NO: 1756145 - RNA, 19 nt, Artificial Sequence
  Description of Artificial Sequence: Synthetic oligonucleotide
auaaggguacuauccuccu

SEQ ID NO: 1756146 - RNA, 19 nt, Artificial Sequence
  Description of Artificial Sequence: Synthetic oligonucleotide
uauccucugguugaagagu

SEQ ID NO: 1756147 - RNA, 19 nt, Artificial Sequence
  Description of Artificial Sequence: Synthetic oligonucleotide
guagucuaaaguuuccacu

SEQ ID NO: 1756148 - RNA, 19 nt, Artificial Sequence
  Description of Artificial Sequence: Synthetic oligonucleotide
uggcgacucaaugaaagac

SEQ ID NO: 1756149 - RNA, 19 nt, Artificial Sequence
  Description of Artificial Sequence: Synthetic oligonucleotide
gagaacgcgggccccggcg

SEQ ID NO: 1756150 - RNA, 19 nt, Artificial Sequence
  Description of Artificial Sequence: Synthetic oligonucleotide
uucuacuaucuucuuccaa

SEQ ID NO: 1756151 - RNA, 19 nt, Artificial Sequence
  Description of Artificial Sequence: Synthetic oligonucleotide
uccccuacgggagagcuca

SEQ ID NO: 1756152 - RNA, 19 nt, Artificial Sequence
  Description of Artificial Sequence: Synthetic oligonucleotide
aacagaccacucuuucaaa

SEQ ID NO: 1756153 - RNA, 19 nt, Artificial Sequence
  Description of Artificial Sequence: Synthetic oligonucleotide
uuguuguuaucauguccca

SEQ ID NO: 1756154 - RNA, 19 nt, Artificial Sequence
  Description of Artificial Sequence: Synthetic oligonucleotide
ugaucacgcugccugggga

SEQ ID NO: 1756155 - RNA, 19 nt, Artificial Sequence
  Description of Artificial Sequence: Synthetic oligonucleotide
uuggcgacucaaugaaaga

SEQ ID NO: 1756156 - RNA, 19 nt, Artificial Sequence
  Description of Artificial Sequence: Synthetic oligonucleotide
uauugaggauuuucuguua

SEQ ID NO: 1756157 - RNA, 19 nt, Artificial Sequence
  Description of Artificial Sequence: Synthetic oligonucleotide
aaugucuuggccaccucaa

SEQ ID NO: 1756158 - RNA, 19 nt, Artificial Sequence
  Description of Artificial Sequence: Synthetic oligonucleotide
ccgaauacaggcuuuucag

SEQ ID NO: 1756159 - RNA, 19 nt, Artificial Sequence
  Description of Artificial Sequence: Synthetic oligonucleotide
auuacaccgaauacaggcu

SEQ ID NO: 1756160 - RNA, 19 nt, Artificial Sequence
  Description of Artificial Sequence: Synthetic oligonucleotide
uguuaucaugucccacagu

SEQ ID NO: 1756161 - RNA, 19 nt, Artificial Sequence
  Description of Artificial Sequence: Synthetic oligonucleotide
ucgaauccacagcuuuccc

SEQ ID NO: 1756162 - RNA, 19 nt, Artificial Sequence
  Description of Artificial Sequence: Synthetic oligonucleotide
cucaugccggagaacgcgg

SEQ ID NO: 1756163 - RNA, 19 nt, Artificial Sequence
  Description of Artificial Sequence: Synthetic oligonucleotide
acggcgucgggcucaugcc

SEQ ID NO: 1756164 - RNA, 19 nt, Artificial Sequence
  Description of Artificial Sequence: Synthetic oligonucleotide
cuucgucaaaauauuagcu

SEQ ID NO: 1756165 - RNA, 19 nt, Artificial Sequence
  Description of Artificial Sequence: Synthetic oligonucleotide
gucgaauccacagcuuucc

SEQ ID NO: 1756166 - RNA, 19 nt, Artificial Sequence
  Description of Artificial Sequence: Synthetic oligonucleotide
uugauguguaaaugacaaa

SEQ ID NO: 1756167 - RNA, 19 nt, Artificial Sequence
  Description of Artificial Sequence: Synthetic oligonucleotide
uguuguuaucaugucccac

SEQ ID NO: 1756168 - RNA, 19 nt, Artificial Sequence
  Description of Artificial Sequence: Synthetic oligonucleotide
gauguguaaaugacaaaua

SEQ ID NO: 1756169 - RNA, 19 nt, Artificial Sequence
  Description of Artificial Sequence: Synthetic oligonucleotide
ugaauccccuacgggagag

SEQ ID NO: 1756170 - RNA, 19 nt, Artificial Sequence
  Description of Artificial Sequence: Synthetic oligonucleotide
agcuggaaugcucuuuuau

SEQ ID NO: 1756171 - RNA, 19 nt, Artificial Sequence
  Description of Artificial Sequence: Synthetic oligonucleotide
gcuguauuagcuggaaugc

SEQ ID NO: 1756172 - RNA, 19 nt, Artificial Sequence
  Description of Artificial Sequence: Synthetic oligonucleotide
gaccacucuuucaaacucc

SEQ ID NO: 1756173 - RNA, 19 nt, Artificial Sequence
  Description of Artificial Sequence: Synthetic oligonucleotide
acaaccguccgcgaccguc

SEQ ID NO: 1756174 - RNA, 19 nt, Artificial Sequence
  Description of Artificial Sequence: Synthetic oligonucleotide
agaaaggucaggguugcaa

SEQ ID NO: 1756175 - RNA, 19 nt, Artificial Sequence
  Description of Artificial Sequence: Synthetic oligonucleotide
aggguuucgcuuggaauuc

SEQ ID NO: 1756176 - RNA, 19 nt, Artificial Sequence
  Description of Artificial Sequence: Synthetic oligonucleotide
augccggagaacgcgggcc

SEQ ID NO: 1756177 - RNA, 19 nt, Artificial Sequence
  Description of Artificial Sequence: Synthetic oligonucleotide
caacguauccucugguuga

SEQ ID NO: 1756178 - RNA, 19 nt, Artificial Sequence
  Description of Artificial Sequence: Synthetic oligonucleotide
aggauaucgaggugcucca

SEQ ID NO: 1756179 - RNA, 19 nt, Artificial Sequence
  Description of Artificial Sequence: Synthetic oligonucleotide
aagguguuugaauccccua

SEQ ID NO: 1756180 - RNA, 19 nt, Artificial Sequence
  Description of Artificial Sequence: Synthetic oligonucleotide
agucgaauccacagcuuuc

SEQ ID NO: 1756181 - RNA, 19 nt, Artificial Sequence
  Description of Artificial Sequence: Synthetic oligonucleotide
uugggauacuggucugagc

SEQ ID NO: 1756182 - RNA, 19 nt, Artificial Sequence
  Description of Artificial Sequence: Synthetic oligonucleotide
auacaggcuuuucaggcuu

SEQ ID NO: 1756183 - RNA, 19 nt, Artificial Sequence
  Description of Artificial Sequence: Synthetic oligonucleotide
ccuucuuuacaaccguccg

SEQ ID NO: 1756184 - RNA, 19 nt, Artificial Sequence
  Description of Artificial Sequence: Synthetic oligonucleotide
gacaacuuacugcuuucaa

SEQ ID NO: 1756185 - RNA, 19 nt, Artificial Sequence
  Description of Artificial Sequence: Synthetic oligonucleotide
uuugcucacuuuagacaaa

SEQ ID NO: 1756186 - RNA, 19 nt, Artificial Sequence
  Description of Artificial Sequence: Synthetic oligonucleotide
accgcugcaaacggcgucg

SEQ ID NO: 1756187 - RNA, 19 nt, Artificial Sequence
  Description of Artificial Sequence: Synthetic oligonucleotide
ucgcucuaaauaguggguc

SEQ ID NO: 1756188 - RNA, 19 nt, Artificial Sequence
  Description of Artificial Sequence: Synthetic oligonucleotide
guacuauccuccuggucac

SEQ ID NO: 1756189 - RNA, 19 nt, Artificial Sequence
  Description of Artificial Sequence: Synthetic oligonucleotide
agguagcucgcucuaaaua

SEQ ID NO: 1756190 - RNA, 19 nt, Artificial Sequence
  Description of Artificial Sequence: Synthetic oligonucleotide
ugccauucgaacagucuuu

SEQ ID NO: 1756191 - RNA, 19 nt, Artificial Sequence
  Description of Artificial Sequence: Synthetic oligonucleotide
cauucgaacagucuuuggu

SEQ ID NO: 1756192 - RNA, 19 nt, Artificial Sequence
  Description of Artificial Sequence: Synthetic oligonucleotide
guugggauacuggucugag

SEQ ID NO: 1756193 - RNA, 19 nt, Artificial Sequence
  Description of Artificial Sequence: Synthetic oligonucleotide
gugcagugacaacuuacug

SEQ ID NO: 1756194 - RNA, 19 nt, Artificial Sequence
  Description of Artificial Sequence: Synthetic oligonucleotide
uucaggcuuucauuguuuu

SEQ ID NO: 1756195 - RNA, 19 nt, Artificial Sequence
  Description of Artificial Sequence: Synthetic oligonucleotide
uuucuguuacauguugauu

SEQ ID NO: 1756196 - RNA, 19 nt, Artificial Sequence
  Description of Artificial Sequence: Synthetic oligonucleotide
uaggagcuugccauucgaa

SEQ ID NO: 1756197 - RNA, 19 nt, Artificial Sequence
  Description of Artificial Sequence: Synthetic oligonucleotide
cugaucacgcugccugggg

SEQ ID NO: 1756198 - RNA, 19 nt, Artificial Sequence
  Description of Artificial Sequence: Synthetic oligonucleotide
aggagcccaagucgaugac

SEQ ID NO: 1756199 - RNA, 19 nt, Artificial Sequence
  Description of Artificial Sequence: Synthetic oligonucleotide
accguccgcgcgccgaggc

SEQ ID NO: 1756200 - RNA, 19 nt, Artificial Sequence
  Description of Artificial Sequence: Synthetic oligonucleotide
uacaccgaauacaggcuuu

SEQ ID NO: 1756201 - RNA, 19 nt, Artificial Sequence
  Description of Artificial Sequence: Synthetic oligonucleotide
uaucgcuuucuacuaucuu

SEQ ID NO: 1756202 - RNA, 19 nt, Artificial Sequence
  Description of Artificial Sequence: Synthetic oligonucleotide
caaccguccgcgaccgucc

SEQ ID NO: 1756203 - RNA, 19 nt, Artificial Sequence
  Description of Artificial Sequence: Synthetic oligonucleotide
agcucgcucuaaauagugg

SEQ ID NO: 1756204 - RNA, 19 nt, Artificial Sequence
  Description of Artificial Sequence: Synthetic oligonucleotide
cuuacaggaaggcuccaaa

SEQ ID NO: 1756205 - RNA, 19 nt, Artificial Sequence
  Description of Artificial Sequence: Synthetic oligonucleotide
cagguuuuaccacuuccca

SEQ ID NO: 1756206 - RNA, 19 nt, Artificial Sequence
  Description of Artificial Sequence: Synthetic oligonucleotide
ugggcagaccgcugcaaac

SEQ ID NO: 1756207 - RNA, 19 nt, Artificial Sequence
  Description of Artificial Sequence: Synthetic oligonucleotide
gacaaauagccacugucuu

SEQ ID NO: 1756208 - RNA, 19 nt, Artificial Sequence
  Description of Artificial Sequence: Synthetic oligonucleotide
uauuagcuaaaagguguuu

SEQ ID NO: 1756209 - RNA, 19 nt, Artificial Sequence
  Description of Artificial Sequence: Synthetic oligonucleotide
ucuuuacaaccguccgcga

SEQ ID NO: 1756210 - RNA, 19 nt, Artificial Sequence
  Description of Artificial Sequence: Synthetic oligonucleotide
uccgcgaccguccgcgcgc

SEQ ID NO: 1756211 - RNA, 19 nt, Artificial Sequence
  Description of Artificial Sequence: Synthetic oligonucleotide
gcgacucaaugaaagacag

SEQ ID NO: 1756212 - RNA, 19 nt, Artificial Sequence
  Description of Artificial Sequence: Synthetic oligonucleotide
cuauugaggauuuucuguu

SEQ ID NO: 1756213 - RNA, 19 nt, Artificial Sequence
  Description of Artificial Sequence: Synthetic oligonucleotide
acuuuguacaauagucgaa

SEQ ID NO: 1756214 - RNA, 19 nt, Artificial Sequence
  Description of Artificial Sequence: Synthetic oligonucleotide
auuucucgauccacuuuag

SEQ ID NO: 1756215 - RNA, 19 nt, Artificial Sequence
  Description of Artificial Sequence: Synthetic oligonucleotide
uaccacuucccaguucaga

SEQ ID NO: 1756216 - RNA, 19 nt, Artificial Sequence
  Description of Artificial Sequence: Synthetic oligonucleotide
cuuuguacaauagucgaau

SEQ ID NO: 1756217 - RNA, 19 nt, Artificial Sequence
  Description of Artificial Sequence: Synthetic oligonucleotide
ucgggcucaugccggagaa

SEQ ID NO: 1756218 - RNA, 19 nt, Artificial Sequence
  Description of Artificial Sequence: Synthetic oligonucleotide
uaggaaccuugucucccac

SEQ ID NO: 1756219 - RNA, 19 nt, Artificial Sequence
  Description of Artificial Sequence: Synthetic oligonucleotide
guaggaaccuugucuccca

SEQ ID NO: 1756220 - RNA, 19 nt, Artificial Sequence
  Description of Artificial Sequence: Synthetic oligonucleotide
auacagucuacuggccucu

SEQ ID NO: 1756221 - RNA, 19 nt, Artificial Sequence
  Description of Artificial Sequence: Synthetic oligonucleotide
uauuagcuggaaugcucuu

SEQ ID NO: 1756222 - RNA, 19 nt, Artificial Sequence
  Description of Artificial Sequence: Synthetic oligonucleotide
ggcagaccgcugcaaacgg

SEQ ID NO: 1756223 - RNA, 19 nt, Artificial Sequence
  Description of Artificial Sequence: Synthetic oligonucleotide
caagucgaugacuucugaa

SEQ ID NO: 1756224 - RNA, 19 nt, Artificial Sequence
  Description of Artificial Sequence: Synthetic oligonucleotide
ucgaacagucuuugguguu

SEQ ID NO: 1756225 - RNA, 19 nt, Artificial Sequence
  Description of Artificial Sequence: Synthetic oligonucleotide
agcccaagucgaugacuuc

SEQ ID NO: 1756226 - RNA, 19 nt, Artificial Sequence
  Description of Artificial Sequence: Synthetic oligonucleotide
ucuauuucacugggacuau

SEQ ID NO: 1756227 - RNA, 19 nt, Artificial Sequence
  Description of Artificial Sequence: Synthetic oligonucleotide
guauuagcuggaaugcucu

SEQ ID NO: 1756228 - RNA, 19 nt, Artificial Sequence
  Description of Artificial Sequence: Synthetic oligonucleotide
gggacuauugaggauuuuc

SEQ ID NO: 1756229 - RNA, 19 nt, Artificial Sequence
  Description of Artificial Sequence: Synthetic oligonucleotide
aacguauccucugguugaa

SEQ ID NO: 1756230 - RNA, 19 nt, Artificial Sequence
  Description of Artificial Sequence: Synthetic oligonucleotide
gcucaugccggagaacgcg

SEQ ID NO: 1756231 - RNA, 19 nt, Artificial Sequence
  Description of Artificial Sequence: Synthetic oligonucleotide
cccacaacguauccucugg

SEQ ID NO: 1756232 - RNA, 19 nt, Artificial Sequence
  Description of Artificial Sequence: Synthetic oligonucleotide
cuguuacauguugauuuuc

SEQ ID NO: 1756233 - RNA, 19 nt, Artificial Sequence
  Description of Artificial Sequence: Synthetic oligonucleotide
uuagugcaguucugcccac

SEQ ID NO: 1756234 - RNA, 19 nt, Artificial Sequence
  Description of Artificial Sequence: Synthetic oligonucleotide
ucgauccacuuuaggguuu

SEQ ID NO: 1756235 - RNA, 19 nt, Artificial Sequence
  Description of Artificial Sequence: Synthetic oligonucleotide
gggcagaccgcugcaaacg

SEQ ID NO: 1756236 - RNA, 19 nt, Artificial Sequence
  Description of Artificial Sequence: Synthetic oligonucleotide
aggucaggguugcaauuaa

SEQ ID NO: 1756237 - RNA, 19 nt, Artificial Sequence
  Description of Artificial Sequence: Synthetic oligonucleotide
aggguacuauccuccuggu

SEQ ID NO: 1756238 - RNA, 19 nt, Artificial Sequence
  Description of Artificial Sequence: Synthetic oligonucleotide
gauccacuuuaggguuucg

SEQ ID NO: 1756239 - RNA, 19 nt, Artificial Sequence
  Description of Artificial Sequence: Synthetic oligonucleotide
cuacgggagagcucacuga

SEQ ID NO: 1756240 - RNA, 19 nt, Artificial Sequence
  Description of Artificial Sequence: Synthetic oligonucleotide
caauuauauuuuguagucu

SEQ ID NO: 1756241 - RNA, 19 nt, Artificial Sequence
  Description of Artificial Sequence: Synthetic oligonucleotide
ggcgacucaaugaaagaca

SEQ ID NO: 1756242 - RNA, 19 nt, Artificial Sequence
  Description of Artificial Sequence: Synthetic oligonucleotide
cuugccauucgaacagucu

SEQ ID NO: 1756243 - RNA, 19 nt, Artificial Sequence
  Description of Artificial Sequence: Synthetic oligonucleotide
ggacggccugggcagaccg

SEQ ID NO: 1756244 - RNA, 19 nt, Artificial Sequence
  Description of Artificial Sequence: Synthetic oligonucleotide
ugcucacuuuagacaaauu

SEQ ID NO: 1756245 - RNA, 19 nt, Artificial Sequence
  Description of Artificial Sequence: Synthetic oligonucleotide
ucgcccagcuucgucaaaa

SEQ ID NO: 1756246 - RNA, 19 nt, Artificial Sequence
  Description of Artificial Sequence: Synthetic oligonucleotide
ugucgcccagcuucgucaa

SEQ ID NO: 1756247 - RNA, 19 nt, Artificial Sequence
  Description of Artificial Sequence: Synthetic oligonucleotide
cugugccggcuguaggcag

SEQ ID NO: 1756248 - RNA, 19 nt, Artificial Sequence
  Description of Artificial Sequence: Synthetic oligonucleotide
gaccgcugcaaacggcguc

SEQ ID NO: 1756249 - RNA, 19 nt, Artificial Sequence
  Description of Artificial Sequence: Synthetic oligonucleotide
cagucuuugguguuauuau

SEQ ID NO: 1756250 - RNA, 19 nt, Artificial Sequence
  Description of Artificial Sequence: Synthetic oligonucleotide
ugcaaacggcgucgggcuc

SEQ ID NO: 1756251 - RNA, 19 nt, Artificial Sequence
  Description of Artificial Sequence: Synthetic oligonucleotide
ccuacgggagagcucacug

SEQ ID NO: 1756252 - RNA, 19 nt, Artificial Sequence
  Description of Artificial Sequence: Synthetic oligonucleotide
uggucacuuugauguguaa

SEQ ID NO: 1756253 - RNA, 19 nt, Artificial Sequence
  Description of Artificial Sequence: Synthetic oligonucleotide
ggaaugcucuuuuaucgcu

SEQ ID NO: 1756254 - RNA, 19 nt, Artificial Sequence
  Description of Artificial Sequence: Synthetic oligonucleotide
acaggauuguaggaaccuu

SEQ ID NO: 1756255 - RNA, 19 nt, Artificial Sequence
  Description of Artificial Sequence: Synthetic oligonucleotide
ucuccaggauaaggguacu

SEQ ID NO: 1756256 - RNA, 19 nt, Artificial Sequence
  Description of Artificial Sequence: Synthetic oligonucleotide
acgggagagcucacugagg

SEQ ID NO: 1756257 - RNA, 19 nt, Artificial Sequence
  Description of Artificial Sequence: Synthetic oligonucleotide
ccauucgaacagucuuugg

SEQ ID NO: 1756258 - RNA, 19 nt, Artificial Sequence
  Description of Artificial Sequence: Synthetic oligonucleotide
guccgcgaccguccgcgcg

SEQ ID NO: 1756259 - RNA, 19 nt, Artificial Sequence
  Description of Artificial Sequence: Synthetic oligonucleotide
cuggucacuuugaugugua

SEQ ID NO: 1756260 - RNA, 19 nt, Artificial Sequence
  Description of Artificial Sequence: Synthetic oligonucleotide
ggucacuuugauguguaaa

SEQ ID NO: 1756261 - RNA, 19 nt, Artificial Sequence
  Description of Artificial Sequence: Synthetic oligonucleotide
cuaaauagugggucauauu

SEQ ID NO: 1756262 - RNA, 19 nt, Artificial Sequence
  Description of Artificial Sequence: Synthetic oligonucleotide
ugaggauaucgaggugcuc

SEQ ID NO: 1756263 - RNA, 19 nt, Artificial Sequence
  Description of Artificial Sequence: Synthetic oligonucleotide
auagucgaauccacagcuu

SEQ ID NO: 1756264 - RNA, 19 nt, Artificial Sequence
  Description of Artificial Sequence: Synthetic oligonucleotide
ugcagguagcucgcucuaa

SEQ ID NO: 1756265 - RNA, 19 nt, Artificial Sequence
  Description of Artificial Sequence: Synthetic oligonucleotide
cccagcuucgucaaaauau

SEQ ID NO: 1756266 - RNA, 19 nt, Artificial Sequence
  Description of Artificial Sequence: Synthetic oligonucleotide
cucgauccacuuuaggguu

SEQ ID NO: 1756267 - RNA, 19 nt, Artificial Sequence
  Description of Artificial Sequence: Synthetic oligonucleotide
acguauccucugguugaag

SEQ ID NO: 1756268 - RNA, 19 nt, Artificial Sequence
  Description of Artificial Sequence: Synthetic oligonucleotide
cagcuucgucaaaauauua

SEQ ID NO: 1756269 - RNA, 19 nt, Artificial Sequence
  Description of Artificial Sequence: Synthetic oligonucleotide
acaccgaauacaggcuuuu

SEQ ID NO: 1756270 - RNA, 19 nt, Artificial Sequence
  Description of Artificial Sequence: Synthetic oligonucleotide
cagacccauuuucuugcca

SEQ ID NO: 1756271 - RNA, 19 nt, Artificial Sequence
  Description of Artificial Sequence: Synthetic oligonucleotide
gggauacuggucugagcuc

SEQ ID NO: 1756272 - RNA, 19 nt, Artificial Sequence
  Description of Artificial Sequence: Synthetic oligonucleotide
guagcucgcucuaaauagu

SEQ ID NO: 1756273 - RNA, 19 nt, Artificial Sequence
  Description of Artificial Sequence: Synthetic oligonucleotide
uccuuacaggaaggcucca

SEQ ID NO: 1756274 - RNA, 19 nt, Artificial Sequence
  Description of Artificial Sequence: Synthetic oligonucleotide
uacuauccuccuggucacu

SEQ ID NO: 1756275 - RNA, 19 nt, Artificial Sequence
  Description of Artificial Sequence: Synthetic oligonucleotide
gagcccaagucgaugacuu

SEQ ID NO: 1756276 - RNA, 19 nt, Artificial Sequence
  Description of Artificial Sequence: Synthetic oligonucleotide
auccccuacgggagagcuc

SEQ ID NO: 1756277 - RNA, 19 nt, Artificial Sequence
  Description of Artificial Sequence: Synthetic oligonucleotide
cuuuuaggagcuugccauu

SEQ ID NO: 1756278 - RNA, 19 nt, Artificial Sequence
  Description of Artificial Sequence: Synthetic oligonucleotide
ggauaucgaggugcuccag

SEQ ID NO: 1756279 - RNA, 19 nt, Artificial Sequence
  Description of Artificial Sequence: Synthetic oligonucleotide
caccgaauacaggcuuuuc

SEQ ID NO: 1756280 - RNA, 19 nt, Artificial Sequence
  Description of Artificial Sequence: Synthetic oligonucleotide
cucuaaauagugggucaua

SEQ ID NO: 1756281 - RNA, 19 nt, Artificial Sequence
  Description of Artificial Sequence: Synthetic oligonucleotide
gcagguagcucgcucuaaa

SEQ ID NO: 1756282 - RNA, 19 nt, Artificial Sequence
  Description of Artificial Sequence: Synthetic oligonucleotide
gaacgcgggccccggcgca

SEQ ID NO: 1756283 - RNA, 19 nt, Artificial Sequence
  Description of Artificial Sequence: Synthetic oligonucleotide
cacaacguauccucugguu

SEQ ID NO: 1756284 - RNA, 19 nt, Artificial Sequence
  Description of Artificial Sequence: Synthetic oligonucleotide
cccggcgcaggugaagugg

SEQ ID NO: 1756285 - RNA, 19 nt, Artificial Sequence
  Description of Artificial Sequence: Synthetic oligonucleotide
cugggcagaccgcugcaaa

SEQ ID NO: 1756286 - RNA, 19 nt, Artificial Sequence
  Description of Artificial Sequence: Synthetic oligonucleotide
ggguacuauccuccugguc

SEQ ID NO: 1756287 - RNA, 19 nt, Artificial Sequence
  Description of Artificial Sequence: Synthetic oligonucleotide
gugccggcuguaggcagag

SEQ ID NO: 1756288 - RNA, 19 nt, Artificial Sequence
  Description of Artificial Sequence: Synthetic oligonucleotide
uacaaccguccgcgaccgu

SEQ ID NO: 1756289 - RNA, 19 nt, Artificial Sequence
  Description of Artificial Sequence: Synthetic oligonucleotide
aacuuggcuugagcaucuu

SEQ ID NO: 1756290 - RNA, 19 nt, Artificial Sequence
  Description of Artificial Sequence: Synthetic oligonucleotide
agaccgcugcaaacggcgu

SEQ ID NO: 1756291 - RNA, 19 nt, Artificial Sequence
  Description of Artificial Sequence: Synthetic oligonucleotide
uacagucuacuggccucua

SEQ ID NO: 1756292 - RNA, 19 nt, Artificial Sequence
  Description of Artificial Sequence: Synthetic oligonucleotide
cgcucuaaauaguggguca

SEQ ID NO: 1756293 - RNA, 19 nt, Artificial Sequence
  Description of Artificial Sequence: Synthetic oligonucleotide
ggcucaugccggagaacgc

SEQ ID NO: 1756294 - RNA, 19 nt, Artificial Sequence
  Description of Artificial Sequence: Synthetic oligonucleotide
cagggaaauuacaccgaau

SEQ ID NO: 1756295 - RNA, 19 nt, Artificial Sequence
  Description of Artificial Sequence: Synthetic oligonucleotide
gaccguccgcgcgccgagg

SEQ ID NO: 1756296 - RNA, 19 nt, Artificial Sequence
  Description of Artificial Sequence: Synthetic oligonucleotide
cagcuggcuuuuaggagcu

SEQ ID NO: 1756297 - RNA, 19 nt, Artificial Sequence
  Description of Artificial Sequence: Synthetic oligonucleotide
gcaaacggcgucgggcuca

SEQ ID NO: 1756298 - RNA, 19 nt, Artificial Sequence
  Description of Artificial Sequence: Synthetic oligonucleotide
cagguagcucgcucuaaau

SEQ ID NO: 1756299 - RNA, 19 nt, Artificial Sequence
  Description of Artificial Sequence: Synthetic oligonucleotide
gcauugcuuugcuguauua

SEQ ID NO: 1756300 - RNA, 19 nt, Artificial Sequence
  Description of Artificial Sequence: Synthetic oligonucleotide
ggagaacgcgggccccggc

SEQ ID NO: 1756301 - RNA, 19 nt, Artificial Sequence
  Description of Artificial Sequence: Synthetic oligonucleotide
gcccaagucgaugacuucu

SEQ ID NO: 1756302 - RNA, 19 nt, Artificial Sequence
  Description of Artificial Sequence: Synthetic oligonucleotide
ccagcuucgucaaaauauu

SEQ ID NO: 1756303 - RNA, 19 nt, Artificial Sequence
  Description of Artificial Sequence: Synthetic oligonucleotide
ggucaggguugcaauuaaa

SEQ ID NO: 1756304 - RNA, 19 nt, Artificial Sequence
  Description of Artificial Sequence: Synthetic oligonucleotide
ccacuuuaggguuucgcuu

SEQ ID NO: 1756305 - RNA, 19 nt, Artificial Sequence
  Description of Artificial Sequence: Synthetic oligonucleotide
gcucuaaauagugggucau

SEQ ID NO: 1756306 - RNA, 19 nt, Artificial Sequence
  Description of Artificial Sequence: Synthetic oligonucleotide
cggcgucgggcucaugccg

SEQ ID NO: 1756307 - RNA, 19 nt, Artificial Sequence
  Description of Artificial Sequence: Synthetic oligonucleotide
cacugggacuauugaggau

SEQ ID NO: 1756308 - RNA, 19 nt, Artificial Sequence
  Description of Artificial Sequence: Synthetic oligonucleotide
aaacggcgucgggcucaug

SEQ ID NO: 1756309 - RNA, 19 nt, Artificial Sequence
  Description of Artificial Sequence: Synthetic oligonucleotide
cguccgcgcgccgaggccg

SEQ ID NO: 1756310 - RNA, 19 nt, Artificial Sequence
  Description of Artificial Sequence: Synthetic oligonucleotide
ggugcuccagacccauuuu

SEQ ID NO: 1756311 - RNA, 19 nt, Artificial Sequence
  Description of Artificial Sequence: Synthetic oligonucleotide
gucgcccagcuucgucaaa

SEQ ID NO: 1756312 - RNA, 19 nt, Artificial Sequence
  Description of Artificial Sequence: Synthetic oligonucleotide
cgauccacuuuaggguuuc

SEQ ID NO: 1756313 - RNA, 19 nt, Artificial Sequence
  Description of Artificial Sequence: Synthetic oligonucleotide
ccuuacaggaaggcuccaa

SEQ ID NO: 1756314 - RNA, 19 nt, Artificial Sequence
  Description of Artificial Sequence: Synthetic oligonucleotide
ggggacuguuucugaaauu

SEQ ID NO: 1756315 - RNA, 19 nt, Artificial Sequence
  Description of Artificial Sequence: Synthetic oligonucleotide
gcgcgccgaggccgcaggg

SEQ ID NO: 1756316 - RNA, 19 nt, Artificial Sequence
  Description of Artificial Sequence: Synthetic oligonucleotide
ggccucuagcucuucuauu

SEQ ID NO: 1756317 - RNA, 19 nt, Artificial Sequence
  Description of Artificial Sequence: Synthetic oligonucleotide
cgcugcaaacggcgucggg

SEQ ID NO: 1756318 - RNA, 19 nt, Artificial Sequence
  Description of Artificial Sequence: Synthetic oligonucleotide
ccgcugcaaacggcgucgg

SEQ ID NO: 1756319 - RNA, 19 nt, Artificial Sequence
  Description of Artificial Sequence: Synthetic oligonucleotide
ccguccgcgcgccgaggcc

SEQ ID NO: 1756320 - RNA, 19 nt, Artificial Sequence
  Description of Artificial Sequence: Synthetic oligonucleotide
ccggcuguaggcagagccu

SEQ ID NO: 1756321 - RNA, 19 nt, Artificial Sequence
  Description of Artificial Sequence: Synthetic oligonucleotide
ccacaacguauccucuggu

SEQ ID NO: 1756322 - RNA, 19 nt, Artificial Sequence
  Description of Artificial Sequence: Synthetic oligonucleotide
gguuucgcuuggaauucuu

SEQ ID NO: 1756323 - RNA, 19 nt, Artificial Sequence
  Description of Artificial Sequence: Synthetic oligonucleotide
gcgucgggcucaugccgga

SEQ ID NO: 1756324 - RNA, 19 nt, Artificial Sequence
  Description of Artificial Sequence: Synthetic oligonucleotide
ccccggcgcaggugaagug

SEQ ID NO: 1756325 - RNA, 19 nt, Artificial Sequence
  Description of Artificial Sequence: Synthetic oligonucleotide
gcgaccguccgcgcgccga

SEQ ID NO: 1756326 - RNA, 19 nt, Artificial Sequence
  Description of Artificial Sequence: Synthetic oligonucleotide
cgcgccgaggccgcagggg

SEQ ID NO: 1756327 - RNA, 19 nt, Artificial Sequence
  Description of Artificial Sequence: Synthetic oligonucleotide
cgaccguccgcgcgccgag

SEQ ID NO: 1756328 - RNA, 19 nt, Artificial Sequence
  Description of Artificial Sequence: Synthetic oligonucleotide
cgcgcgccgaggccgcagg

SEQ ID NO: 1756329 - RNA, 19 nt, Artificial Sequence
  Description of Artificial Sequence: Synthetic oligonucleotide
gcuuucccguuugcaggua

SEQ ID NO: 1756330 - RNA, 19 nt, Artificial Sequence
  Description of Artificial Sequence: Synthetic oligonucleotide
ccccuacgggagagcucac

SEQ ID NO: 1756331 - RNA, 19 nt, Artificial Sequence
  Description of Artificial Sequence: Synthetic oligonucleotide
gccccggcgcaggugaagu

SEQ ID NO: 1756332 - RNA, 19 nt, Artificial Sequence
  Description of Artificial Sequence: Synthetic oligonucleotide
cgucgggcucaugccggag

SEQ ID NO: 1756333 - RNA, 19 nt, Artificial Sequence
  Description of Artificial Sequence: Synthetic oligonucleotide
ccgaggccgcaggggcagg

SEQ ID NO: 1756334 - RNA, 19 nt, Artificial Sequence
  Description of Artificial Sequence: Synthetic oligonucleotide
ccgcgaccguccgcgcgcc

SEQ ID NO: 1756335 - RNA, 19 nt, Artificial Sequence
  Description of Artificial Sequence: Synthetic oligonucleotide
cccuacgggagagcucacu

SEQ ID NO: 1756336 - RNA, 19 nt, Artificial Sequence
  Description of Artificial Sequence: Synthetic oligonucleotide
ccgcgcgccgaggccgcag

SEQ ID NO: 1756337 - RNA, 19 nt, Artificial Sequence
  Description of Artificial Sequence: Synthetic oligonucleotide
cgcgaccguccgcgcgccg

SEQ ID NO: 1756338 - RNA, 19 nt, Artificial Sequence
  Description of Artificial Sequence: Synthetic oligonucleotide
agauagaaagcuuaaaacc

SEQ ID NO: 1756339 - RNA, 19 nt, Artificial Sequence
  Description of Artificial Sequence: Synthetic oligonucleotide
ugcaucaaaacuaacauag

SEQ ID NO: 1756340 - RNA, 19 nt, Artificial Sequence
  Description of Artificial Sequence: Synthetic oligonucleotide
uauacuacuauguauuugg

SEQ ID NO: 1756341 - RNA, 19 nt, Artificial Sequence
  Description of Artificial Sequence: Synthetic oligonucleotide
ucaguuacaacuuuaaccc

SEQ ID NO: 1756342 - RNA, 19 nt, Artificial Sequence
  Description of Artificial Sequence: Synthetic oligonucleotide
aaaaucuauuuauagcugg

SEQ ID NO: 1756343 - RNA, 19 nt, Artificial Sequence
  Description of Artificial Sequence: Synthetic oligonucleotide
uguacuauaauacaauccu

SEQ ID NO: 1756344 - RNA, 19 nt, Artificial Sequence
  Description of Artificial Sequence: Synthetic oligonucleotide
  modified_base (11)..(11): a, c, u, g, unknown or other
uaacaguaaanaaaggucc

SEQ ID NO: 1756345 - RNA, 19 nt, Artificial Sequence
  Description of Artificial Sequence: Synthetic oligonucleotide
uuaauaacguuuuaagacc

SEQ ID NO: 1756346 - RNA, 19 nt, Artificial Sequence
  Description of Artificial Sequence: Synthetic oligonucleotide
  modified_base (7)..(7): a, c, u, g, unknown or other
aguaaanaaagguccaauc

SEQ ID NO: 1756347 - RNA, 19 nt, Artificial Sequence
  Description of Artificial Sequence: Synthetic oligonucleotide
uggauaaguaauuaaaagc

SEQ ID NO: 1756348 - RNA, 19 nt, Artificial Sequence
  Description of Artificial Sequence: Synthetic oligonucleotide
uucaacuuaacauuuaaga

SEQ ID NO: 1756349 - RNA, 19 nt, Artificial Sequence
  Description of Artificial Sequence: Synthetic oligonucleotide
agauuaaucaugcaaaugu

SEQ ID NO: 1756350 - RNA, 19 nt, Artificial Sequence
  Description of Artificial Sequence: Synthetic oligonucleotide
gauaauagcccuuuaauca

SEQ ID NO: 1756351 - RNA, 19 nt, Artificial Sequence
  Description of Artificial Sequence: Synthetic oligonucleotide
acuauugucagcaagauug

SEQ ID NO: 1756352 - RNA, 19 nt, Artificial Sequence
  Description of Artificial Sequence: Synthetic oligonucleotide
  modified_base (2)..(2): a, c, u, g, unknown or other
unuaaaaggauuccaagaa

SEQ ID NO: 1756353 - RNA, 19 nt, Artificial Sequence
  Description of Artificial Sequence: Synthetic oligonucleotide
  modified_base (4)..(4): a, c, u, g, unknown or other
ugunuaaaaggauuccaag

SEQ ID NO: 1756354 - RNA, 19 nt, Artificial Sequence
  Description of Artificial Sequence: Synthetic oligonucleotide
ugcaguuucaaucauguac

SEQ ID NO: 1756355 - RNA, 19 nt, Artificial Sequence
  Description of Artificial Sequence: Synthetic oligonucleotide
aaaaccaguuccuuucaac

SEQ ID NO: 1756356 - RNA, 19 nt, Artificial Sequence
  Description of Artificial Sequence: Synthetic oligonucleotide
uuggauaaguaauuaaaag

SEQ ID NO: 1756357 - RNA, 19 nt, Artificial Sequence
  Description of Artificial Sequence: Synthetic oligonucleotide
uuaugcaucaaaacuaaca

SEQ ID NO: 1756358 - RNA, 19 nt, Artificial Sequence
  Description of Artificial Sequence: Synthetic oligonucleotide
gucaguuacaacuuuaacc

SEQ ID NO: 1756359 - RNA, 19 nt, Artificial Sequence
  Description of Artificial Sequence: Synthetic oligonucleotide
ucuagaaaucauuuuaaug

SEQ ID NO: 1756360 - RNA, 19 nt, Artificial Sequence
  Description of Artificial Sequence: Synthetic oligonucleotide
agauugucgagauaaauug

SEQ ID NO: 1756361 - RNA, 19 nt, Artificial Sequence
  Description of Artificial Sequence: Synthetic oligonucleotide
uaaauugggacuaauguau

SEQ ID NO: 1756362 - RNA, 19 nt, Artificial Sequence
  Description of Artificial Sequence: Synthetic oligonucleotide
uauaagguuaauuuccuga

SEQ ID NO: 1756363 - RNA, 19 nt, Artificial Sequence
  Description of Artificial Sequence: Synthetic oligonucleotide
aaaguaauccccaaccagg

SEQ ID NO: 1756364 - RNA, 19 nt, Artificial Sequence
  Description of Artificial Sequence: Synthetic oligonucleotide
augaacacugauaauagcc

SEQ ID NO: 1756365 - RNA, 19 nt, Artificial Sequence
  Description of Artificial Sequence: Synthetic oligonucleotide
  modified_base (5)..(5): a, c, u, g, unknown or other
uaaanaaagguccaaucaa

SEQ ID NO: 1756366 - RNA, 19 nt, Artificial Sequence
  Description of Artificial Sequence: Synthetic oligonucleotide
ugcaaaugugcuaacauca

SEQ ID NO: 1756367 - RNA, 19 nt, Artificial Sequence
  Description of Artificial Sequence: Synthetic oligonucleotide
ugguuugugccauauaagg

SEQ ID NO: 1756368 - RNA, 19 nt, Artificial Sequence
  Description of Artificial Sequence: Synthetic oligonucleotide
uacucaaguaccuuggucc

SEQ ID NO: 1756369 - RNA, 19 nt, Artificial Sequence
  Description of Artificial Sequence: Synthetic oligonucleotide
aucauuuuaauguaagaca

SEQ ID NO: 1756370 - RNA, 19 nt, Artificial Sequence
  Description of Artificial Sequence: Synthetic oligonucleotide
uuaaucaugcaaaugugcu

SEQ ID NO: 1756371 - RNA, 19 nt, Artificial Sequence
  Description of Artificial Sequence: Synthetic oligonucleotide
gacaauuuaucacugaauc

SEQ ID NO: 1756372 - RNA, 19 nt, Artificial Sequence
  Description of Artificial Sequence: Synthetic oligonucleotide
auguaagacaauuuaucac

SEQ ID NO: 1756373 - RNA, 19 nt, Artificial Sequence
  Description of Artificial Sequence: Synthetic oligonucleotide
aagguuaauuuccugauau

SEQ ID NO: 1756374 - RNA, 19 nt, Artificial Sequence
  Description of Artificial Sequence: Synthetic oligonucleotide
uacuauaauacaauccugu

SEQ ID NO: 1756375 - RNA, 19 nt, Artificial Sequence
  Description of Artificial Sequence: Synthetic oligonucleotide
aaugugugcagguucaccu

SEQ ID NO: 1756376 - RNA, 19 nt, Artificial Sequence
  Description of Artificial Sequence: Synthetic oligonucleotide
  modified_base (7)..(7): a, c, u, g, unknown or other
aguugunuaaaaggauucc

SEQ ID NO: 1756377 - RNA, 19 nt, Artificial Sequence
  Description of Artificial Sequence: Synthetic oligonucleotide
uuauagauaccuacggaug

SEQ ID NO: 1756378 - RNA, 19 nt, Artificial Sequence
  Description of Artificial Sequence: Synthetic oligonucleotide
acuaauguauuuuaggcaa

SEQ ID NO: 1756379 - RNA, 19 nt, Artificial Sequence
  Description of Artificial Sequence: Synthetic oligonucleotide
ugaacacugauaauagccc

SEQ ID NO: 1756380 - RNA, 19 nt, Artificial Sequence
  Description of Artificial Sequence: Synthetic oligonucleotide
uaucacugaaucaagcuac

SEQ ID NO: 1756381 - RNA, 19 nt, Artificial Sequence
  Description of Artificial Sequence: Synthetic oligonucleotide
uacacaugucuaaacaucc

SEQ ID NO: 1756382 - RNA, 19 nt, Artificial Sequence
  Description of Artificial Sequence: Synthetic oligonucleotide
ucuucuugcaguuucaauc

SEQ ID NO: 1756383 - RNA, 19 nt, Artificial Sequence
  Description of Artificial Sequence: Synthetic oligonucleotide
ugagcuauguucuacacau

SEQ ID NO: 1756384 - RNA, 19 nt, Artificial Sequence
  Description of Artificial Sequence: Synthetic oligonucleotide
  modified_base (2)..(2): a, c, u, g, unknown or other
anaaagguccaaucaauau

SEQ ID NO: 1756385 - RNA, 19 nt, Artificial Sequence
  Description of Artificial Sequence: Synthetic oligonucleotide
gaaugucgaaauuaaacac

SEQ ID NO: 1756386 - RNA, 19 nt, Artificial Sequence
  Description of Artificial Sequence: Synthetic oligonucleotide
aacguuuuaagaccugucu

SEQ ID NO: 1756387 - RNA, 19 nt, Artificial Sequence
  Description of Artificial Sequence: Synthetic oligonucleotide
caguuucuuaguaaaaugc

SEQ ID NO: 1756388 - RNA, 19 nt, Artificial Sequence
  Description of Artificial Sequence: Synthetic oligonucleotide
aauacaauccuguaaccuu

SEQ ID NO: 1756389 - RNA, 19 nt, Artificial Sequence
  Description of Artificial Sequence: Synthetic oligonucleotide
ucgaaauuaaacacugaca

SEQ ID NO: 1756390 - RNA, 19 nt, Artificial Sequence
  Description of Artificial Sequence: Synthetic oligonucleotide
acuaacauagaaagugucc

SEQ ID NO: 1756391 - RNA, 19 nt, Artificial Sequence
  Description of Artificial Sequence: Synthetic oligonucleotide
  modified_base (13)..(13): a, c, u, g, unknown or other
cauucuaguugunuaaaag

SEQ ID NO: 1756392 - RNA, 19 nt, Artificial Sequence
  Description of Artificial Sequence: Synthetic oligonucleotide
  modified_base (10)..(10): a, c, u, g, unknown or other
ucuaguugunuaaaaggau

SEQ ID NO: 1756393 - RNA, 19 nt, Artificial Sequence
  Description of Artificial Sequence: Synthetic oligonucleotide
gucuagaagaaauaaaaca

SEQ ID NO: 1756394 - RNA, 19 nt, Artificial Sequence
  Description of Artificial Sequence: Synthetic oligonucleotide
aaacucauccauauacuac

SEQ ID NO: 1756395 - RNA, 19 nt, Artificial Sequence
  Description of Artificial Sequence: Synthetic oligonucleotide
cuuaaaaccaguuccuuuc

SEQ ID NO: 1756396 - RNA, 19 nt, Artificial Sequence
  Description of Artificial Sequence: Synthetic oligonucleotide
  modified_base (6)..(6): a, c, u, g, unknown or other
guaaanaaagguccaauca

SEQ ID NO: 1756397 - RNA, 19 nt, Artificial Sequence
  Description of Artificial Sequence: Synthetic oligonucleotide
ugacaacugagauuaauca

SEQ ID NO: 1756398 - RNA, 19 nt, Artificial Sequence
  Description of Artificial Sequence: Synthetic oligonucleotide
gauaaauugggacuaaugu

SEQ ID NO: 1756399 - RNA, 19 nt, Artificial Sequence
  Description of Artificial Sequence: Synthetic oligonucleotide
uucaggugaacaaauauua

SEQ ID NO: 1756400 - RNA, 19 nt, Artificial Sequence
  Description of Artificial Sequence: Synthetic oligonucleotide
uauagauaccuacggaugu

SEQ ID NO: 1756401 - RNA, 19 nt, Artificial Sequence
  Description of Artificial Sequence: Synthetic oligonucleotide
uauauuuccuguguauagg

SEQ ID NO: 1756402 - RNA, 19 nt, Artificial Sequence
  Description of Artificial Sequence: Synthetic oligonucleotide
auguacuauaauacaaucc

SEQ ID NO: 1756403 - RNA, 19 nt, Artificial Sequence
  Description of Artificial Sequence: Synthetic oligonucleotide
uuuucuuagcucuuuaaau

SEQ ID NO: 1756404 - RNA, 19 nt, Artificial Sequence
  Description of Artificial Sequence: Synthetic oligonucleotide
ucauccauauacuacuaug

SEQ ID NO: 1756405 - RNA, 19 nt, Artificial Sequence
  Description of Artificial Sequence: Synthetic oligonucleotide
uaauuuuaguucaagucau

SEQ ID NO: 1756406 - RNA, 19 nt, Artificial Sequence
  Description of Artificial Sequence: Synthetic oligonucleotide
uucuacacaugucuaaaca

SEQ ID NO: 1756407 - RNA, 19 nt, Artificial Sequence
  Description of Artificial Sequence: Synthetic oligonucleotide
ugauaauagcccuuuaauc

SEQ ID NO: 1756408 - RNA, 19 nt, Artificial Sequence
  Description of Artificial Sequence: Synthetic oligonucleotide
aggauuccaagaauuaugc

SEQ ID NO: 1756409 - RNA, 19 nt, Artificial Sequence
  Description of Artificial Sequence: Synthetic oligonucleotide
uaauaacguuuuaagaccu

SEQ ID NO: 1756410 - RNA, 19 nt, Artificial Sequence
  Description of Artificial Sequence: Synthetic oligonucleotide
aaaucuauuuauagcuggg

SEQ ID NO: 1756411 - RNA, 19 nt, Artificial Sequence
  Description of Artificial Sequence: Synthetic oligonucleotide
aaugucgaaauuaaacacu

SEQ ID NO: 1756412 - RNA, 19 nt, Artificial Sequence
  Description of Artificial Sequence: Synthetic oligonucleotide
uuaaauguagaaacucauc

SEQ ID NO: 1756413 - RNA, 19 nt, Artificial Sequence
  Description of Artificial Sequence: Synthetic oligonucleotide
caaaacaucaauaaagcua

SEQ ID NO: 1756414 - RNA, 19 nt, Artificial Sequence
  Description of Artificial Sequence: Synthetic oligonucleotide
cauuacucaaguaccuugg

SEQ ID NO: 1756415 - RNA, 19 nt, Artificial Sequence
  Description of Artificial Sequence: Synthetic oligonucleotide
ucauuacucaaguaccuug

SEQ ID NO: 1756416 - RNA, 19 nt, Artificial Sequence
  Description of Artificial Sequence: Synthetic oligonucleotide
uauaggaugaacacugaua

SEQ ID NO: 1756417 - RNA, 19 nt, Artificial Sequence
  Description of Artificial Sequence: Synthetic oligonucleotide
auuccaagaauuaugcauc

SEQ ID NO: 1756418 - RNA, 19 nt, Artificial Sequence
  Description of Artificial Sequence: Synthetic oligonucleotide
  modified_base (3)..(3): a, c, u, g, unknown or other
gunuaaaaggauuccaaga

SEQ ID NO: 1756419 - RNA, 19 nt, Artificial Sequence
  Description of Artificial Sequence: Synthetic oligonucleotide
aaucaagcuacuauuguca

SEQ ID NO: 1756420 - RNA, 19 nt, Artificial Sequence
  Description of Artificial Sequence: Synthetic oligonucleotide
  modified_base (5)..(5): a, c, u, g, unknown or other
uugunuaaaaggauuccaa

SEQ ID NO: 1756421 - RNA, 19 nt, Artificial Sequence
  Description of Artificial Sequence: Synthetic oligonucleotide
uucuuagcucuuuaaaugu

SEQ ID NO: 1756422 - RNA, 19 nt, Artificial Sequence
  Description of Artificial Sequence: Synthetic oligonucleotide
ugucacuuauuacauacaa

SEQ ID NO: 1756423 - RNA, 19 nt, Artificial Sequence
  Description of Artificial Sequence: Synthetic oligonucleotide
ugccauauaagguuaauuu

SEQ ID NO: 1756424 - RNA, 19 nt, Artificial Sequence
  Description of Artificial Sequence: Synthetic oligonucleotide
  modified_base (10)..(10): a, c, u, g, unknown or other
aacaguaaanaaaggucca

SEQ ID NO: 1756425 - RNA, 19 nt, Artificial Sequence
  Description of Artificial Sequence: Synthetic oligonucleotide
uuucuuaguaaaaugcauu

SEQ ID NO: 1756426 - RNA, 19 nt, Artificial Sequence
  Description of Artificial Sequence: Synthetic oligonucleotide
gucgaaauuaaacacugac

SEQ ID NO: 1756427 - RNA, 19 nt, Artificial Sequence
  Description of Artificial Sequence: Synthetic oligonucleotide
augcauuaauuuuaguuca

SEQ ID NO: 1756428 - RNA, 19 nt, Artificial Sequence
  Description of Artificial Sequence: Synthetic oligonucleotide
  modified_base (4)..(4): a, c, u, g, unknown or other
aaanaaagguccaaucaau

SEQ ID NO: 1756429 - RNA, 19 nt, Artificial Sequence
  Description of Artificial Sequence: Synthetic oligonucleotide
agguccaaucaauauguac

SEQ ID NO: 1756430 - RNA, 19 nt, Artificial Sequence
  Description of Artificial Sequence: Synthetic oligonucleotide
auaaauugggacuaaugua

SEQ ID NO: 1756431 - RNA, 19 nt, Artificial Sequence
  Description of Artificial Sequence: Synthetic oligonucleotide
auugucgagauaaauuggg

SEQ ID NO: 1756432 - RNA, 19 nt, Artificial Sequence
  Description of Artificial Sequence: Synthetic oligonucleotide
cacagugguacuuacaguc

SEQ ID NO: 1756433 - RNA, 19 nt, Artificial Sequence
  Description of Artificial Sequence: Synthetic oligonucleotide
aaggauuccaagaauuaug

SEQ ID NO: 1756434 - RNA, 19 nt, Artificial Sequence
  Description of Artificial Sequence: Synthetic oligonucleotide
ucuacucacuguaaugugu

SEQ ID NO: 1756435 - RNA, 19 nt, Artificial Sequence
  Description of Artificial Sequence: Synthetic oligonucleotide
guacuuacagucuugugac

SEQ ID NO: 1756436 - RNA, 19 nt, Artificial Sequence
  Description of Artificial Sequence: Synthetic oligonucleotide
  modified_base (17)..(17): a, c, u, g, unknown or other
uccacuuaacaguaaanaa

SEQ ID NO: 1756437 - RNA, 19 nt, Artificial Sequence
  Description of Artificial Sequence: Synthetic oligonucleotide
  modified_base (8)..(8): a, c, u, g, unknown or other
uaguugunuaaaaggauuc

SEQ ID NO: 1756438 - RNA, 19 nt, Artificial Sequence
  Description of Artificial Sequence: Synthetic oligonucleotide
agcccuuuaaucauuacuc

SEQ ID NO: 1756439 - RNA, 19 nt, Artificial Sequence
  Description of Artificial Sequence: Synthetic oligonucleotide
gacuaauguauuuuaggca

SEQ ID NO: 1756440 - RNA, 19 nt, Artificial Sequence
  Description of Artificial Sequence: Synthetic oligonucleotide
caacugagauuaaucaugc

SEQ ID NO: 1756441 - RNA, 19 nt, Artificial Sequence
  Description of Artificial Sequence: Synthetic oligonucleotide
guuuaugacaugauacucc

SEQ ID NO: 1756442 - RNA, 19 nt, Artificial Sequence
  Description of Artificial Sequence: Synthetic oligonucleotide
uucuuaguaaaaugcauua

SEQ ID NO: 1756443 - RNA, 19 nt, Artificial Sequence
  Description of Artificial Sequence: Synthetic oligonucleotide
uugguuugugccauauaag

SEQ ID NO: 1756444 - RNA, 19 nt, Artificial Sequence
  Description of Artificial Sequence: Synthetic oligonucleotide
augucuaaacaucccgugg

SEQ ID NO: 1756445 - RNA, 19 nt, Artificial Sequence
  Description of Artificial Sequence: Synthetic oligonucleotide
aaacugagcuauguucuac

SEQ ID NO: 1756446 - RNA, 19 nt, Artificial Sequence
  Description of Artificial Sequence: Synthetic oligonucleotide
gauugucgagauaaauugg

SEQ ID NO: 1756447 - RNA, 19 nt, Artificial Sequence
  Description of Artificial Sequence: Synthetic oligonucleotide
ggauaaguaauuaaaagca

SEQ ID NO: 1756448 - RNA, 19 nt, Artificial Sequence
  Description of Artificial Sequence: Synthetic oligonucleotide
auuucaggugaacaaauau

SEQ ID NO: 1756449 - RNA, 19 nt, Artificial Sequence
  Description of Artificial Sequence: Synthetic oligonucleotide
acaacugagauuaaucaug

SEQ ID NO: 1756450 - RNA, 19 nt, Artificial Sequence
  Description of Artificial Sequence: Synthetic oligonucleotide
cacaugucuaaacaucccg

SEQ ID NO: 1756451 - RNA, 19 nt, Artificial Sequence
  Description of Artificial Sequence: Synthetic oligonucleotide
uccauauacuacuauguau

SEQ ID NO: 1756452 - RNA, 19 nt, Artificial Sequence
  Description of Artificial Sequence: Synthetic oligonucleotide
agcuauguucuacacaugu

SEQ ID NO: 1756453 - RNA, 19 nt, Artificial Sequence
  Description of Artificial Sequence: Synthetic oligonucleotide
  modified_base (14)..(14): a, c, u, g, unknown or other
acuuaacaguaaanaaagg

SEQ ID NO: 1756454 - RNA, 19 nt, Artificial Sequence
  Description of Artificial Sequence: Synthetic oligonucleotide
uuucaggugaacaaauauu

SEQ ID NO: 1756455 - RNA, 19 nt, Artificial Sequence
  Description of Artificial Sequence: Synthetic oligonucleotide
ucuacacaugucuaaacau

SEQ ID NO: 1756456 - RNA, 19 nt, Artificial Sequence
  Description of Artificial Sequence: Synthetic oligonucleotide
guguauaggaugaacacug

SEQ ID NO: 1756457 - RNA, 19 nt, Artificial Sequence
  Description of Artificial Sequence: Synthetic oligonucleotide
aauuaugcaucaaaacuaa

SEQ ID NO: 1756458 - RNA, 19 nt, Artificial Sequence
  Description of Artificial Sequence: Synthetic oligonucleotide
uacggauguauaaaaugga

SEQ ID NO: 1756459 - RNA, 19 nt, Artificial Sequence
  Description of Artificial Sequence: Synthetic oligonucleotide
agcaagauugucgagauaa

SEQ ID NO: 1756460 - RNA, 19 nt, Artificial Sequence
  Description of Artificial Sequence: Synthetic oligonucleotide
gaugaacacugauaauagc

SEQ ID NO: 1756461 - RNA, 19 nt, Artificial Sequence
  Description of Artificial Sequence: Synthetic oligonucleotide
uucauuuggagcacuugga

SEQ ID NO: 1756462 - RNA, 19 nt, Artificial Sequence
  Description of Artificial Sequence: Synthetic oligonucleotide
uaauguauuuuaggcaaag

SEQ ID NO: 1756463 - RNA, 19 nt, Artificial Sequence
  Description of Artificial Sequence: Synthetic oligonucleotide
uaauacaauccuguaaccu

SEQ ID NO: 1756464 - RNA, 19 nt, Artificial Sequence
  Description of Artificial Sequence: Synthetic oligonucleotide
ugggauagucuacucacug

SEQ ID NO: 1756465 - RNA, 19 nt, Artificial Sequence
  Description of Artificial Sequence: Synthetic oligonucleotide
ggaaugucgaaauuaaaca

SEQ ID NO: 1756466 - RNA, 19 nt, Artificial Sequence
  Description of Artificial Sequence: Synthetic oligonucleotide
gauuccaagaauuaugcau

SEQ ID NO: 1756467 - RNA, 19 nt, Artificial Sequence
  Description of Artificial Sequence: Synthetic oligonucleotide
cacuuauuacauacaacag

SEQ ID NO: 1756468 - RNA, 19 nt, Artificial Sequence
  Description of Artificial Sequence: Synthetic oligonucleotide
ugggacuaauguauuuuag

SEQ ID NO: 1756469 - RNA, 19 nt, Artificial Sequence
  Description of Artificial Sequence: Synthetic oligonucleotide
aauggaaugucgaaauuaa

SEQ ID NO: 1756470 - RNA, 19 nt, Artificial Sequence
  Description of Artificial Sequence: Synthetic oligonucleotide
auaauagcccuuuaaucau

SEQ ID NO: 1756471 - RNA, 19 nt, Artificial Sequence
  Description of Artificial Sequence: Synthetic oligonucleotide
cuuauuacauacaacagau

SEQ ID NO: 1756472 - RNA, 19 nt, Artificial Sequence
  Description of Artificial Sequence: Synthetic oligonucleotide
aacugagcuauguucuaca

SEQ ID NO: 1756473 - RNA, 19 nt, Artificial Sequence
  Description of Artificial Sequence: Synthetic oligonucleotide
gguacuuacagucuuguga

SEQ ID NO: 1756474 - RNA, 19 nt, Artificial Sequence
  Description of Artificial Sequence: Synthetic oligonucleotide
gggacuaauguauuuuagg

SEQ ID NO: 1756475 - RNA, 19 nt, Artificial Sequence
  Description of Artificial Sequence: Synthetic oligonucleotide
aauuuuaguucaagucauc

SEQ ID NO: 1756476 - RNA, 19 nt, Artificial Sequence
  Description of Artificial Sequence: Synthetic oligonucleotide
cuacacaugucuaaacauc

SEQ ID NO: 1756477 - RNA, 19 nt, Artificial Sequence
  Description of Artificial Sequence: Synthetic oligonucleotide
ugagauuaaucaugcaaau

SEQ ID NO: 1756478 - RNA, 19 nt, Artificial Sequence
  Description of Artificial Sequence: Synthetic oligonucleotide
uagcccuuuaaucauuacu

SEQ ID NO: 1756479 - RNA, 19 nt, Artificial Sequence
  Description of Artificial Sequence: Synthetic oligonucleotide
guaauccccaaccagguuc

SEQ ID NO: 1756480 - RNA, 19 nt, Artificial Sequence
  Description of Artificial Sequence: Synthetic oligonucleotide
gacaugauacuccaggucu

SEQ ID NO: 1756481 - RNA, 19 nt, Artificial Sequence
  Description of Artificial Sequence: Synthetic oligonucleotide
aaucuauuuauagcuggga

SEQ ID NO: 1756482 - RNA, 19 nt, Artificial Sequence
  Description of Artificial Sequence: Synthetic oligonucleotide
acacugacaacugagauua

SEQ ID NO: 1756483 - RNA, 19 nt, Artificial Sequence
  Description of Artificial Sequence: Synthetic oligonucleotide
cagguucaccuccagagcg

SEQ ID NO: 1756484 - RNA, 19 nt, Artificial Sequence
  Description of Artificial Sequence: Synthetic oligonucleotide
ucuaaacaucccguggcgg

SEQ ID NO: 1756485 - RNA, 19 nt, Artificial Sequence
  Description of Artificial Sequence: Synthetic oligonucleotide
gauaccuacggauguauaa

SEQ ID NO: 1756486 - RNA, 19 nt, Artificial Sequence
  Description of Artificial Sequence: Synthetic oligonucleotide
aucaagcuacuauugucag

SEQ ID NO: 1756487 - RNA, 19 nt, Artificial Sequence
  Description of Artificial Sequence: Synthetic oligonucleotide
aagauugucgagauaaauu

SEQ ID NO: 1756488 - RNA, 19 nt, Artificial Sequence
  Description of Artificial Sequence: Synthetic oligonucleotide
uagucuacucacuguaaug

SEQ ID NO: 1756489 - RNA, 19 nt, Artificial Sequence
  Description of Artificial Sequence: Synthetic oligonucleotide
  modified_base (14)..(14): a, c, u, g, unknown or other
acauucuaguugunuaaaa

SEQ ID NO: 1756490 - RNA, 19 nt, Artificial Sequence
  Description of Artificial Sequence: Synthetic oligonucleotide
caagaauuaugcaucaaaa

SEQ ID NO: 1756491 - RNA, 19 nt, Artificial Sequence
  Description of Artificial Sequence: Synthetic oligonucleotide
agagcuauuaaaacuaaaa

SEQ ID NO: 1756492 - RNA, 19 nt, Artificial Sequence
  Description of Artificial Sequence: Synthetic oligonucleotide
  modified_base (3)..(3): a, c, u, g, unknown or other
aanaaagguccaaucaaua

SEQ ID NO: 1756493 - RNA, 19 nt, Artificial Sequence
  Description of Artificial Sequence: Synthetic oligonucleotide
agcuacuauugucagcaag

SEQ ID NO: 1756494 - RNA, 19 nt, Artificial Sequence
  Description of Artificial Sequence: Synthetic oligonucleotide
caagcuacuauugucagca

SEQ ID NO: 1756495 - RNA, 19 nt, Artificial Sequence
  Description of Artificial Sequence: Synthetic oligonucleotide
uuuaaucauuacucaagua

SEQ ID NO: 1756496 - RNA, 19 nt, Artificial Sequence
  Description of Artificial Sequence: Synthetic oligonucleotide
aauguauuuuaggcaaagu

SEQ ID NO: 1756497 - RNA, 19 nt, Artificial Sequence
  Description of Artificial Sequence: Synthetic oligonucleotide
ucauuuggagcacuuggau

SEQ ID NO: 1756498 - RNA, 19 nt, Artificial Sequence
  Description of Artificial Sequence: Synthetic oligonucleotide
cuacucacuguaaugugug

SEQ ID NO: 1756499 - RNA, 19 nt, Artificial Sequence
  Description of Artificial Sequence: Synthetic oligonucleotide
uuacucaaguaccuugguc

SEQ ID NO: 1756500 - RNA, 19 nt, Artificial Sequence
  Description of Artificial Sequence: Synthetic oligonucleotide
caugucuaaacaucccgug

SEQ ID NO: 1756501 - RNA, 19 nt, Artificial Sequence
  Description of Artificial Sequence: Synthetic oligonucleotide
agucuacucacuguaaugu

SEQ ID NO: 1756502 - RNA, 19 nt, Artificial Sequence
  Description of Artificial Sequence: Synthetic oligonucleotide
gucuaaacaucccguggcg

SEQ ID NO: 1756503 - RNA, 19 nt, Artificial Sequence
  Description of Artificial Sequence: Synthetic oligonucleotide
aggucuagaagaaauaaaa

SEQ ID NO: 1756504 - RNA, 19 nt, Artificial Sequence
  Description of Artificial Sequence: Synthetic oligonucleotide
agauaaauugggacuaaug

SEQ ID NO: 1756505 - RNA, 19 nt, Artificial Sequence
  Description of Artificial Sequence: Synthetic oligonucleotide
acuauaauacaauccugua

SEQ ID NO: 1756506 - RNA, 19 nt, Artificial Sequence
  Description of Artificial Sequence: Synthetic oligonucleotide
ucagcaagauugucgagau

SEQ ID NO: 1756507 - RNA, 19 nt, Artificial Sequence
  Description of Artificial Sequence: Synthetic oligonucleotide
augucgaaauuaaacacug

SEQ ID NO: 1756508 - RNA, 19 nt, Artificial Sequence
  Description of Artificial Sequence: Synthetic oligonucleotide
uguguuuaacauugcuuuc

SEQ ID NO: 1756509 - RNA, 19 nt, Artificial Sequence
  Description of Artificial Sequence: Synthetic oligonucleotide
uucuuuagauagaaagcuu

SEQ ID NO: 1756510 - RNA, 19 nt, Artificial Sequence
  Description of Artificial Sequence: Synthetic oligonucleotide
uaauccccaaccagguucu

SEQ ID NO: 1756511 - RNA, 19 nt, Artificial Sequence
  Description of Artificial Sequence: Synthetic oligonucleotide
ucaagcuacuauugucagc

SEQ ID NO: 1756512 - RNA, 19 nt, Artificial Sequence
  Description of Artificial Sequence: Synthetic oligonucleotide
uuaugacaugauacuccag

SEQ ID NO: 1756513 - RNA, 19 nt, Artificial Sequence
  Description of Artificial Sequence: Synthetic oligonucleotide
guaagacaauuuaucacug

SEQ ID NO: 1756514 - RNA, 19 nt, Artificial Sequence
  Description of Artificial Sequence: Synthetic oligonucleotide
  modified_base (6)..(6): a, c, u, g, unknown or other
guugunuaaaaggauucca

SEQ ID NO: 1756515 - RNA, 19 nt, Artificial Sequence
  Description of Artificial Sequence: Synthetic oligonucleotide
ucuuaguaaaaugcauuaa

SEQ ID NO: 1756516 - RNA, 19 nt, Artificial Sequence
  Description of Artificial Sequence: Synthetic oligonucleotide
gguccaaucaauauguaca

SEQ ID NO: 1756517 - RNA, 19 nt, Artificial Sequence
  Description of Artificial Sequence: Synthetic oligonucleotide
uaacguuuuaagaccuguc

SEQ ID NO: 1756518 - RNA, 19 nt, Artificial Sequence
  Description of Artificial Sequence: Synthetic oligonucleotide
auaacguuuuaagaccugu

SEQ ID NO: 1756519 - RNA, 19 nt, Artificial Sequence
  Description of Artificial Sequence: Synthetic oligonucleotide
aauaacguuuuaagaccug

SEQ ID NO: 1756520 - RNA, 19 nt, Artificial Sequence
  Description of Artificial Sequence: Synthetic oligonucleotide
auagcccuuuaaucauuac

SEQ ID NO: 1756521 - RNA, 19 nt, Artificial Sequence
  Description of Artificial Sequence: Synthetic oligonucleotide
uaagguuaauuuccugaua

SEQ ID NO: 1756522 - RNA, 19 nt, Artificial Sequence
  Description of Artificial Sequence: Synthetic oligonucleotide
uguucuacacaugucuaaa

SEQ ID NO: 1756523 - RNA, 19 nt, Artificial Sequence
  Description of Artificial Sequence: Synthetic oligonucleotide
acacaugucuaaacauccc

SEQ ID NO: 1756524 - RNA, 19 nt, Artificial Sequence
  Description of Artificial Sequence: Synthetic oligonucleotide
auuaugcaucaaaacuaac

SEQ ID NO: 1756525 - RNA, 19 nt, Artificial Sequence
  Description of Artificial Sequence: Synthetic oligonucleotide
ggaugaacacugauaauag

SEQ ID NO: 1756526 - RNA, 19 nt, Artificial Sequence
  Description of Artificial Sequence: Synthetic oligonucleotide
cuauguucuacacaugucu

SEQ ID NO: 1756527 - RNA, 19 nt, Artificial Sequence
  Description of Artificial Sequence: Synthetic oligonucleotide
cuaccucggugcaagacug

SEQ ID NO: 1756528 - RNA, 19 nt, Artificial Sequence
  Description of Artificial Sequence: Synthetic oligonucleotide
ucgagauaaauugggacua

SEQ ID NO: 1756529 - RNA, 19 nt, Artificial Sequence
  Description of Artificial Sequence: Synthetic oligonucleotide
ugcaagacugccguuuaug

SEQ ID NO: 1756530 - RNA, 19 nt, Artificial Sequence
  Description of Artificial Sequence: Synthetic oligonucleotide
acugccguuuaugacauga

SEQ ID NO: 1756531 - RNA, 19 nt, Artificial Sequence
  Description of Artificial Sequence: Synthetic oligonucleotide
auuacucaaguaccuuggu

SEQ ID NO: 1756532 - RNA, 19 nt, Artificial Sequence
  Description of Artificial Sequence: Synthetic oligonucleotide
uugggacuaauguauuuua

SEQ ID NO: 1756533 - RNA, 19 nt, Artificial Sequence
  Description of Artificial Sequence: Synthetic oligonucleotide
uuauuacauacaacagauu

SEQ ID NO: 1756534 - RNA, 19 nt, Artificial Sequence
  Description of Artificial Sequence: Synthetic oligonucleotide
guacuauaauacaauccug

SEQ ID NO: 1756535 - RNA, 19 nt, Artificial Sequence
  Description of Artificial Sequence: Synthetic oligonucleotide
acucaaguaccuugguccu

SEQ ID NO: 1756536 - RNA, 19 nt, Artificial Sequence
  Description of Artificial Sequence: Synthetic oligonucleotide
caagacugccguuuaugac

SEQ ID NO: 1756537 - RNA, 19 nt, Artificial Sequence
  Description of Artificial Sequence: Synthetic oligonucleotide
uaccuacggauguauaaaa

SEQ ID NO: 1756538 - RNA, 19 nt, Artificial Sequence
  Description of Artificial Sequence: Synthetic oligonucleotide
uacuacuauguauuugguu

SEQ ID NO: 1756539 - RNA, 19 nt, Artificial Sequence
  Description of Artificial Sequence: Synthetic oligonucleotide
uaaugugugcagguucacc

SEQ ID NO: 1756540 - RNA, 19 nt, Artificial Sequence
  Description of Artificial Sequence: Synthetic oligonucleotide
gucgagauaaauugggacu

SEQ ID NO: 1756541 - RNA, 19 nt, Artificial Sequence
  Description of Artificial Sequence: Synthetic oligonucleotide
auccauauacuacuaugua

SEQ ID NO: 1756542 - RNA, 19 nt, Artificial Sequence
  Description of Artificial Sequence: Synthetic oligonucleotide
auagcugggauagucuacu

SEQ ID NO: 1756543 - RNA, 19 nt, Artificial Sequence
  Description of Artificial Sequence: Synthetic oligonucleotide
  modified_base (15)..(15): a, c, u, g, unknown or other
uacauucuaguugunuaaa

SEQ ID NO: 1756544 - RNA, 19 nt, Artificial Sequence
  Description of Artificial Sequence: Synthetic oligonucleotide
uccaggucuagaagaaaua

SEQ ID NO: 1756545 - RNA, 19 nt, Artificial Sequence
  Description of Artificial Sequence: Synthetic oligonucleotide
ggguacuguacauaguuca

SEQ ID NO: 1756546 - RNA, 19 nt, Artificial Sequence
  Description of Artificial Sequence: Synthetic oligonucleotide
ugccguuuaugacaugaua

SEQ ID NO: 1756547 - RNA, 19 nt, Artificial Sequence
  Description of Artificial Sequence: Synthetic oligonucleotide
gucuacucacuguaaugug

SEQ ID NO: 1756548 - RNA, 19 nt, Artificial Sequence
  Description of Artificial Sequence: Synthetic oligonucleotide
uacucacuguaaugugugc

SEQ ID NO: 1756549 - RNA, 19 nt, Artificial Sequence
  Description of Artificial Sequence: Synthetic oligonucleotide
aaguaccuugguccuuuca

SEQ ID NO: 1756550 - RNA, 19 nt, Artificial Sequence
  Description of Artificial Sequence: Synthetic oligonucleotide
aggucaguugccuuuuaaa

SEQ ID NO: 1756551 - RNA, 19 nt, Artificial Sequence
  Description of Artificial Sequence: Synthetic oligonucleotide
cauccauauacuacuaugu

SEQ ID NO: 1756552 - RNA, 19 nt, Artificial Sequence
  Description of Artificial Sequence: Synthetic oligonucleotide
aucuuacacauacauucua

SEQ ID NO: 1756553 - RNA, 19 nt, Artificial Sequence
  Description of Artificial Sequence: Synthetic oligonucleotide
auugggacuaauguauuuu

SEQ ID NO: 1756554 - RNA, 19 nt, Artificial Sequence
  Description of Artificial Sequence: Synthetic oligonucleotide
ggaaaucuuacacauacau

SEQ ID NO: 1756555 - RNA, 19 nt, Artificial Sequence
  Description of Artificial Sequence: Synthetic oligonucleotide
  modified_base (9)..(9): a, c, u, g, unknown or other
cuaguugunuaaaaggauu

SEQ ID NO: 1756556 - RNA, 19 nt, Artificial Sequence
  Description of Artificial Sequence: Synthetic oligonucleotide
ugacucaucugaccucuuc

SEQ ID NO: 1756557 - RNA, 19 nt, Artificial Sequence
  Description of Artificial Sequence: Synthetic oligonucleotide
gucagcaagauugucgaga

SEQ ID NO: 1756558 - RNA, 19 nt, Artificial Sequence
  Description of Artificial Sequence: Synthetic oligonucleotide
guccaaucaauauguacaa

SEQ ID NO: 1756559 - RNA, 19 nt, Artificial Sequence
  Description of Artificial Sequence: Synthetic oligonucleotide
cauauaagguuaauuuccu

SEQ ID NO: 1756560 - RNA, 19 nt, Artificial Sequence
  Description of Artificial Sequence: Synthetic oligonucleotide
gccguuuaugacaugauac

SEQ ID NO: 1756561 - RNA, 19 nt, Artificial Sequence
  Description of Artificial Sequence: Synthetic oligonucleotide
uacuauugucagcaagauu

SEQ ID NO: 1756562 - RNA, 19 nt, Artificial Sequence
  Description of Artificial Sequence: Synthetic oligonucleotide
  modified_base (18)..(18): a, c, u, g, unknown or other
guccacuuaacaguaaana

SEQ ID NO: 1756563 - RNA, 19 nt, Artificial Sequence
  Description of Artificial Sequence: Synthetic oligonucleotide
auaccuacggauguauaaa

SEQ ID NO: 1756564 - RNA, 19 nt, Artificial Sequence
  Description of Artificial Sequence: Synthetic oligonucleotide
acaugucuaaacaucccgu

SEQ ID NO: 1756565 - RNA, 19 nt, Artificial Sequence
  Description of Artificial Sequence: Synthetic oligonucleotide
ugguacuuacagucuugug

SEQ ID NO: 1756566 - RNA, 19 nt, Artificial Sequence
  Description of Artificial Sequence: Synthetic oligonucleotide
agaaaagggccugcuaccu

SEQ ID NO: 1756567 - RNA, 19 nt, Artificial Sequence
  Description of Artificial Sequence: Synthetic oligonucleotide
acauugcagggacaggaaa

SEQ ID NO: 1756568 - RNA, 19 nt, Artificial Sequence
  Description of Artificial Sequence: Synthetic oligonucleotide
aguuacaacuuuaacccuu

SEQ ID NO: 1756569 - RNA, 19 nt, Artificial Sequence
  Description of Artificial Sequence: Synthetic oligonucleotide
uaggcaaaguaauccccaa

SEQ ID NO: 1756570 - RNA, 19 nt, Artificial Sequence
  Description of Artificial Sequence: Synthetic oligonucleotide
uacaauccuguaaccuuau

SEQ ID NO: 1756571 - RNA, 19 nt, Artificial Sequence
  Description of Artificial Sequence: Synthetic oligonucleotide
ccugggguacuguacauag

SEQ ID NO: 1756572 - RNA, 19 nt, Artificial Sequence
  Description of Artificial Sequence: Synthetic oligonucleotide
acccuuuaggucaguugcc

SEQ ID NO: 1756573 - RNA, 19 nt, Artificial Sequence
  Description of Artificial Sequence: Synthetic oligonucleotide
  modified_base (9)..(9): a, c, u, g, unknown or other
acaguaaanaaagguccaa

SEQ ID NO: 1756574 - RNA, 19 nt, Artificial Sequence
  Description of Artificial Sequence: Synthetic oligonucleotide
agacaauuuaucacugaau

SEQ ID NO: 1756575 - RNA, 19 nt, Artificial Sequence
  Description of Artificial Sequence: Synthetic oligonucleotide
uagauaccuacggauguau

SEQ ID NO: 1756576 - RNA, 19 nt, Artificial Sequence
  Description of Artificial Sequence: Synthetic oligonucleotide
gcuacuauugucagcaaga

SEQ ID NO: 1756577 - RNA, 19 nt, Artificial Sequence
  Description of Artificial Sequence: Synthetic oligonucleotide
acggauguauaaaauggaa

SEQ ID NO: 1756578 - RNA, 19 nt, Artificial Sequence
  Description of Artificial Sequence: Synthetic oligonucleotide
cugauaauagcccuuuaau

SEQ ID NO: 1756579 - RNA, 19 nt, Artificial Sequence
  Description of Artificial Sequence: Synthetic oligonucleotide
ccuguguauaggaugaaca

SEQ ID NO: 1756580 - RNA, 19 nt, Artificial Sequence
  Description of Artificial Sequence: Synthetic oligonucleotide
uacuuacagucuugugacu

SEQ ID NO: 1756581 - RNA, 19 nt, Artificial Sequence
  Description of Artificial Sequence: Synthetic oligonucleotide
uugugacucaucugaccuc

SEQ ID NO: 1756582 - RNA, 19 nt, Artificial Sequence
  Description of Artificial Sequence: Synthetic oligonucleotide
ggugaacaaauauuaaaau

SEQ ID NO: 1756583 - RNA, 19 nt, Artificial Sequence
  Description of Artificial Sequence: Synthetic oligonucleotide
auacaauccuguaaccuua

SEQ ID NO: 1756584 - RNA, 19 nt, Artificial Sequence
  Description of Artificial Sequence: Synthetic oligonucleotide
uugugccauauaagguuaa

SEQ ID NO: 1756585 - RNA, 19 nt, Artificial Sequence
  Description of Artificial Sequence: Synthetic oligonucleotide
gauagucuacucacuguaa

SEQ ID NO: 1756586 - RNA, 19 nt, Artificial Sequence
  Description of Artificial Sequence: Synthetic oligonucleotide
caggucuagaagaaauaaa

SEQ ID NO: 1756587 - RNA, 19 nt, Artificial Sequence
  Description of Artificial Sequence: Synthetic oligonucleotide
agguuaauuuccugauauu

SEQ ID NO: 1756588 - RNA, 19 nt, Artificial Sequence
  Description of Artificial Sequence: Synthetic oligonucleotide
ggauagucuacucacugua

SEQ ID NO: 1756589 - RNA, 19 nt, Artificial Sequence
  Description of Artificial Sequence: Synthetic oligonucleotide
uccaaucaauauguacaaa

SEQ ID NO: 1756590 - RNA, 19 nt, Artificial Sequence
  Description of Artificial Sequence: Synthetic oligonucleotide
ucccguggcgggauuuagc

SEQ ID NO: 1756591 - RNA, 19 nt, Artificial Sequence
  Description of Artificial Sequence: Synthetic oligonucleotide
gcaagacugccguuuauga

SEQ ID NO: 1756592 - RNA, 19 nt, Artificial Sequence
  Description of Artificial Sequence: Synthetic oligonucleotide
aguaauccccaaccagguu

SEQ ID NO: 1756593 - RNA, 19 nt, Artificial Sequence
  Description of Artificial Sequence: Synthetic oligonucleotide
ugugccauauaagguuaau

SEQ ID NO: 1756594 - RNA, 19 nt, Artificial Sequence
  Description of Artificial Sequence: Synthetic oligonucleotide
auacuacuauguauuuggu

SEQ ID NO: 1756595 - RNA, 19 nt, Artificial Sequence
  Description of Artificial Sequence: Synthetic oligonucleotide
guagaaacucauccauaua

SEQ ID NO: 1756596 - RNA, 19 nt, Artificial Sequence
  Description of Artificial Sequence: Synthetic oligonucleotide
gcaguuucaaucauguacu

SEQ ID NO: 1756597 - RNA, 19 nt, Artificial Sequence
  Description of Artificial Sequence: Synthetic oligonucleotide
aagcuacuauugucagcaa

SEQ ID NO: 1756598 - RNA, 19 nt, Artificial Sequence
  Description of Artificial Sequence: Synthetic oligonucleotide
uaccucggugcaagacugc

SEQ ID NO: 1756599 - RNA, 19 nt, Artificial Sequence
  Description of Artificial Sequence: Synthetic oligonucleotide
auagauaccuacggaugua

SEQ ID NO: 1756600 - RNA, 19 nt, Artificial Sequence
  Description of Artificial Sequence: Synthetic oligonucleotide
aggaaaucuuacacauaca

SEQ ID NO: 1756601 - RNA, 19 nt, Artificial Sequence
  Description of Artificial Sequence: Synthetic oligonucleotide
cacugaaucaagcuacuau

SEQ ID NO: 1756602 - RNA, 19 nt, Artificial Sequence
  Description of Artificial Sequence: Synthetic oligonucleotide
guauaggaugaacacugau

SEQ ID NO: 1756603 - RNA, 19 nt, Artificial Sequence
  Description of Artificial Sequence: Synthetic oligonucleotide
aaacaucccguggcgggau

SEQ ID NO: 1756604 - RNA, 19 nt, Artificial Sequence
  Description of Artificial Sequence: Synthetic oligonucleotide
gucaucuagaaaucauuuu

SEQ ID NO: 1756605 - RNA, 19 nt, Artificial Sequence
  Description of Artificial Sequence: Synthetic oligonucleotide
ucacugaaucaagcuacua

SEQ ID NO: 1756606 - RNA, 19 nt, Artificial Sequence
  Description of Artificial Sequence: Synthetic oligonucleotide
ccauauacuacuauguauu

SEQ ID NO: 1756607 - RNA, 19 nt, Artificial Sequence
  Description of Artificial Sequence: Synthetic oligonucleotide
accuacggauguauaaaau

SEQ ID NO: 1756608 - RNA, 19 nt, Artificial Sequence
  Description of Artificial Sequence: Synthetic oligonucleotide
gcccuuuaaucauuacuca

SEQ ID NO: 1756609 - RNA, 19 nt, Artificial Sequence
  Description of Artificial Sequence: Synthetic oligonucleotide
cauauacuacuauguauuu

SEQ ID NO: 1756610 - RNA, 19 nt, Artificial Sequence
  Description of Artificial Sequence: Synthetic oligonucleotide
auggaaugucgaaauuaaa

SEQ ID NO: 1756611 - RNA, 19 nt, Artificial Sequence
  Description of Artificial Sequence: Synthetic oligonucleotide
agacugccguuuaugacau

SEQ ID NO: 1756612 - RNA, 19 nt, Artificial Sequence
  Description of Artificial Sequence: Synthetic oligonucleotide
gagcuauguucuacacaug

SEQ ID NO: 1756613 - RNA, 19 nt, Artificial Sequence
  Description of Artificial Sequence: Synthetic oligonucleotide
uagcugggauagucuacuc

SEQ ID NO: 1756614 - RNA, 19 nt, Artificial Sequence
  Description of Artificial Sequence: Synthetic oligonucleotide
cucggugcaagacugccgu

SEQ ID NO: 1756615 - RNA, 19 nt, Artificial Sequence
  Description of Artificial Sequence: Synthetic oligonucleotide
cguuuaugacaugauacuc

SEQ ID NO: 1756616 - RNA, 19 nt, Artificial Sequence
  Description of Artificial Sequence: Synthetic oligonucleotide
acaugauacuccaggucua

SEQ ID NO: 1756617 - RNA, 19 nt, Artificial Sequence
  Description of Artificial Sequence: Synthetic oligonucleotide
caagauugucgagauaaau

SEQ ID NO: 1756618 - RNA, 19 nt, Artificial Sequence
  Description of Artificial Sequence: Synthetic oligonucleotide
aacaucccguggcgggauu

SEQ ID NO: 1756619 - RNA, 19 nt, Artificial Sequence
  Description of Artificial Sequence: Synthetic oligonucleotide
gcuauguucuacacauguc

SEQ ID NO: 1756620 - RNA, 19 nt, Artificial Sequence
  Description of Artificial Sequence: Synthetic oligonucleotide
cccuuuaaucauuacucaa

SEQ ID NO: 1756621 - RNA, 19 nt, Artificial Sequence
  Description of Artificial Sequence: Synthetic oligonucleotide
ccucggugcaagacugccg

SEQ ID NO: 1756622 - RNA, 19 nt, Artificial Sequence
  Description of Artificial Sequence: Synthetic oligonucleotide
  modified_base (8)..(8): a, c, u, g, unknown or other
caguaaanaaagguccaau

SEQ ID NO: 1756623 - RNA, 19 nt, Artificial Sequence
  Description of Artificial Sequence: Synthetic oligonucleotide
aucccguggcgggauuuag

SEQ ID NO: 1756624 - RNA, 19 nt, Artificial Sequence
  Description of Artificial Sequence: Synthetic oligonucleotide
ccuuucaaccuaugcaaaa

SEQ ID NO: 1756625 - RNA, 19 nt, Artificial Sequence
  Description of Artificial Sequence: Synthetic oligonucleotide
agauaccuacggauguaua

SEQ ID NO: 1756626 - RNA, 19 nt, Artificial Sequence
  Description of Artificial Sequence: Synthetic oligonucleotide
cguuuuaagaccugucucu

SEQ ID NO: 1756627 - RNA, 19 nt, Artificial Sequence
  Description of Artificial Sequence: Synthetic oligonucleotide
agcgcucacagugguacuu

SEQ ID NO: 1756628 - RNA, 19 nt, Artificial Sequence
  Description of Artificial Sequence: Synthetic oligonucleotide
ccguuuaugacaugauacu

SEQ ID NO: 1756629 - RNA, 19 nt, Artificial Sequence
  Description of Artificial Sequence: Synthetic oligonucleotide
cucauccauauacuacuau

SEQ ID NO: 1756630 - RNA, 19 nt, Artificial Sequence
  Description of Artificial Sequence: Synthetic oligonucleotide
cuacuauugucagcaagau

SEQ ID NO: 1756631 - RNA, 19 nt, Artificial Sequence
  Description of Artificial Sequence: Synthetic oligonucleotide
gacugccguuuaugacaug

SEQ ID NO: 1756632 - RNA, 19 nt, Artificial Sequence
  Description of Artificial Sequence: Synthetic oligonucleotide
gggguacuguacauaguuc

SEQ ID NO: 1756633 - RNA, 19 nt, Artificial Sequence
  Description of Artificial Sequence: Synthetic oligonucleotide
ggugcaagacugccguuua

SEQ ID NO: 1756634 - RNA, 19 nt, Artificial Sequence
  Description of Artificial Sequence: Synthetic oligonucleotide
cccguggcgggauuuagca

SEQ ID NO: 1756635 - RNA, 19 nt, Artificial Sequence
  Description of Artificial Sequence: Synthetic oligonucleotide
guauuugguuugugccaua

SEQ ID NO: 1756636 - RNA, 19 nt, Artificial Sequence
  Description of Artificial Sequence: Synthetic oligonucleotide
gugccauauaagguuaauu

SEQ ID NO: 1756637 - RNA, 19 nt, Artificial Sequence
  Description of Artificial Sequence: Synthetic oligonucleotide
ucggugcaagacugccguu

SEQ ID NO: 1756638 - RNA, 19 nt, Artificial Sequence
  Description of Artificial Sequence: Synthetic oligonucleotide
gcgggauuuagcaguuuuc

SEQ ID NO: 1756639 - RNA, 19 nt, Artificial Sequence
  Description of Artificial Sequence: Synthetic oligonucleotide
cagugguacuuacagucuu

SEQ ID NO: 1756640 - RNA, 19 nt, Artificial Sequence
  Description of Artificial Sequence: Synthetic oligonucleotide
ccguggcgggauuuagcag

SEQ ID NO: 1756641 - RNA, 19 nt, Artificial Sequence
  Description of Artificial Sequence: Synthetic oligonucleotide
gcaagauugucgagauaaa

SEQ ID NO: 1756642 - RNA, 19 nt, Artificial Sequence
  Description of Artificial Sequence: Synthetic oligonucleotide
cggauguauaaaauggaau

SEQ ID NO: 1756643 - RNA, 19 nt, Artificial Sequence
  Description of Artificial Sequence: Synthetic oligonucleotide
ggcgggauuuagcaguuuu

SEQ ID NO: 1756644 - RNA, 19 nt, Artificial Sequence
  Description of Artificial Sequence: Synthetic oligonucleotide
cguggcgggauuuagcagu

SEQ ID NO: 1756645 - RNA, 19 nt, Artificial Sequence
  Description of Artificial Sequence: Synthetic oligonucleotide
cugccguuuaugacaugau

SEQ ID NO: 1756646 - RNA, 19 nt, Artificial Sequence
  Description of Artificial Sequence: Synthetic oligonucleotide
cagagcgcucacaguggua

SEQ ID NO: 1756647 - RNA, 19 nt, Artificial Sequence
  Description of Artificial Sequence: Synthetic oligonucleotide
cugcuaccucggugcaaga

SEQ ID NO: 1756648 - RNA, 19 nt, Artificial Sequence
  Description of Artificial Sequence: Synthetic oligonucleotide
cacugacaacugagauuaa

SEQ ID NO: 1756649 - RNA, 19 nt, Artificial Sequence
  Description of Artificial Sequence: Synthetic oligonucleotide
cagcaagauugucgagaua

SEQ ID NO: 1756650 - RNA, 19 nt, Artificial Sequence
  Description of Artificial Sequence: Synthetic oligonucleotide
gugcaagacugccguuuau

SEQ ID NO: 1756651 - RNA, 19 nt, Artificial Sequence
  Description of Artificial Sequence: Synthetic oligonucleotide
gaccucuuccugggguacu

SEQ ID NO: 1756652 - RNA, 19 nt, Artificial Sequence
  Description of Artificial Sequence: Synthetic oligonucleotide
uggcgggauuuagcaguuu

SEQ ID NO: 1756653 - RNA, 19 nt, Artificial Sequence
  Description of Artificial Sequence: Synthetic oligonucleotide
caucccguggcgggauuua

SEQ ID NO: 1756654 - RNA, 19 nt, Artificial Sequence
  Description of Artificial Sequence: Synthetic oligonucleotide
guggcgggauuuagcaguu

SEQ ID NO: 1756655 - RNA, 19 nt, Artificial Sequence
  Description of Artificial Sequence: Synthetic oligonucleotide
cucaaguaccuugguccuu

SEQ ID NO: 1756656 - RNA, 19 nt, Artificial Sequence
  Description of Artificial Sequence: Synthetic oligonucleotide
ccagagcgcucacaguggu

SEQ ID NO: 1756657 - RNA, 19 nt, Artificial Sequence
  Description of Artificial Sequence: Synthetic oligonucleotide
gugacucaucugaccucuu

SEQ ID NO: 1756658 - RNA, 19 nt, Artificial Sequence
  Description of Artificial Sequence: Synthetic oligonucleotide
ugaauaaagaagaacguag

SEQ ID NO: 1756659 - RNA, 19 nt, Artificial Sequence
  Description of Artificial Sequence: Synthetic oligonucleotide
ugugguaagaauaaucagg

SEQ ID NO: 1756660 - RNA, 19 nt, Artificial Sequence
  Description of Artificial Sequence: Synthetic oligonucleotide
aagacuuugugguaaagcg

SEQ ID NO: 1756661 - RNA, 19 nt, Artificial Sequence
  Description of Artificial Sequence: Synthetic oligonucleotide
uuuacuagcacgauuaaca

SEQ ID NO: 1756662 - RNA, 19 nt, Artificial Sequence
  Description of Artificial Sequence: Synthetic oligonucleotide
acuagcacgauuaacaucc

SEQ ID NO: 1756663 - RNA, 19 nt, Artificial Sequence
  Description of Artificial Sequence: Synthetic oligonucleotide
gaugguacaaaauguaugc

SEQ ID NO: 1756664 - RNA, 19 nt, Artificial Sequence
  Description of Artificial Sequence: Synthetic oligonucleotide
auaaagaagaacguagcgc

SEQ ID NO: 1756665 - RNA, 19 nt, Artificial Sequence
  Description of Artificial Sequence: Synthetic oligonucleotide
uacagagcgaagcaaaccg

SEQ ID NO: 1756666 - RNA, 19 nt, Artificial Sequence
  Description of Artificial Sequence: Synthetic oligonucleotide
aaagaguacauguguaaag

SEQ ID NO: 1756667 - RNA, 19 nt, Artificial Sequence
  Description of Artificial Sequence: Synthetic oligonucleotide
uacuugaaaacuguggucg

SEQ ID NO: 1756668 - RNA, 19 nt, Artificial Sequence
  Description of Artificial Sequence: Synthetic oligonucleotide
auacguacuacuugaaaac

SEQ ID NO: 1756669 - RNA, 19 nt, Artificial Sequence
  Description of Artificial Sequence: Synthetic oligonucleotide
guuaguggcaucuucacag

SEQ ID NO: 1756670 - RNA, 19 nt, Artificial Sequence
  Description of Artificial Sequence: Synthetic oligonucleotide
auuccauaaaaucuuucac

SEQ ID NO: 1756671 - RNA, 19 nt, Artificial Sequence
  Description of Artificial Sequence: Synthetic oligonucleotide
aaggguucacuugaaaggc

SEQ ID NO: 1756672 - RNA, 19 nt, Artificial Sequence
  Description of Artificial Sequence: Synthetic oligonucleotide
aaaaucuuucacuaucagu

SEQ ID NO: 1756673 - RNA, 19 nt, Artificial Sequence
  Description of Artificial Sequence: Synthetic oligonucleotide
aaaggcuaugaauagcuca

SEQ ID NO: 1756674 - RNA, 19 nt, Artificial Sequence
  Description of Artificial Sequence: Synthetic oligonucleotide
acuguggucgacaaaaugc

SEQ ID NO: 1756675 - RNA, 19 nt, Artificial Sequence
  Description of Artificial Sequence: Synthetic oligonucleotide
uauacguacuacuugaaaa

SEQ ID NO: 1756676 - RNA, 19 nt, Artificial Sequence
  Description of Artificial Sequence: Synthetic oligonucleotide
ucgacaguuaucuauacgu

SEQ ID NO: 1756677 - RNA, 19 nt, Artificial Sequence
  Description of Artificial Sequence: Synthetic oligonucleotide
acgauuaacauccauacaa

SEQ ID NO: 1756678 - RNA, 19 nt, Artificial Sequence
  Description of Artificial Sequence: Synthetic oligonucleotide
auuaaauuauccaagauuu

SEQ ID NO: 1756679 - RNA, 19 nt, Artificial Sequence
  Description of Artificial Sequence: Synthetic oligonucleotide
ugaugguucuaugacaugg

SEQ ID NO: 1756680 - RNA, 19 nt, Artificial Sequence
  Description of Artificial Sequence: Synthetic oligonucleotide
ugaugguacaaaauguaug

SEQ ID NO: 1756681 - RNA, 19 nt, Artificial Sequence
  Description of Artificial Sequence: Synthetic oligonucleotide
auguguaaaguccagauaa

SEQ ID NO: 1756682 - RNA, 19 nt, Artificial Sequence
  Description of Artificial Sequence: Synthetic oligonucleotide
aaaugcauagcugguauag

SEQ ID NO: 1756683 - RNA, 19 nt, Artificial Sequence
  Description of Artificial Sequence: Synthetic oligonucleotide
ugcuuugauggucuuauag

SEQ ID NO: 1756684 - RNA, 19 nt, Artificial Sequence
  Description of Artificial Sequence: Synthetic oligonucleotide
uucacuggguuuucuaucg

SEQ ID NO: 1756685 - RNA, 19 nt, Artificial Sequence
  Description of Artificial Sequence: Synthetic oligonucleotide
agaauaaucagguucccga

SEQ ID NO: 1756686 - RNA, 19 nt, Artificial Sequence
  Description of Artificial Sequence: Synthetic oligonucleotide
ucuaugacauggcacaaca

SEQ ID NO: 1756687 - RNA, 19 nt, Artificial Sequence
  Description of Artificial Sequence: Synthetic oligonucleotide
acuacuugaaaacuguggu

SEQ ID NO: 1756688 - RNA, 19 nt, Artificial Sequence
  Description of Artificial Sequence: Synthetic oligonucleotide
guaagaauaaucagguucc

SEQ ID NO: 1756689 - RNA, 19 nt, Artificial Sequence
  Description of Artificial Sequence: Synthetic oligonucleotide
uucuuuacuagcacgauua

SEQ ID NO: 1756690 - RNA, 19 nt, Artificial Sequence
  Description of Artificial Sequence: Synthetic oligonucleotide
ugcaaaaggguucacuuga

SEQ ID NO: 1756691 - RNA, 19 nt, Artificial Sequence
  Description of Artificial Sequence: Synthetic oligonucleotide
ucccgauaggcaaagauca

SEQ ID NO: 1756692 - RNA, 19 nt, Artificial Sequence
  Description of Artificial Sequence: Synthetic oligonucleotide
gauuccauaaaaucuuuca

SEQ ID NO: 1756693 - RNA, 19 nt, Artificial Sequence
  Description of Artificial Sequence: Synthetic oligonucleotide
ucuauagagucauugcaga

SEQ ID NO: 1756694 - RNA, 19 nt, Artificial Sequence
  Description of Artificial Sequence: Synthetic oligonucleotide
uaucuauacguacuacuug

SEQ ID NO: 1756695 - RNA, 19 nt, Artificial Sequence
  Description of Artificial Sequence: Synthetic oligonucleotide
aacgccuccccaucgcucc

SEQ ID NO: 1756696 - RNA, 19 nt, Artificial Sequence
  Description of Artificial Sequence: Synthetic oligonucleotide
aaaucagagauuaaauuau

SEQ ID NO: 1756697 - RNA, 19 nt, Artificial Sequence
  Description of Artificial Sequence: Synthetic oligonucleotide
uggucgacaaaaugcauag

SEQ ID NO: 1756698 - RNA, 19 nt, Artificial Sequence
  Description of Artificial Sequence: Synthetic oligonucleotide
uccauaaaaucuuucacua

SEQ ID NO: 1756699 - RNA, 19 nt, Artificial Sequence
  Description of Artificial Sequence: Synthetic oligonucleotide
aaugauuccauaaaaucuu

SEQ ID NO: 1756700 - RNA, 19 nt, Artificial Sequence
  Description of Artificial Sequence: Synthetic oligonucleotide
aucuauacguacuacuuga

SEQ ID NO: 1756701 - RNA, 19 nt, Artificial Sequence
  Description of Artificial Sequence: Synthetic oligonucleotide
cuugaaaggcuaugaauag

SEQ ID NO: 1756702 - RNA, 19 nt, Artificial Sequence
  Description of Artificial Sequence: Synthetic oligonucleotide
uuuggcccaauccauaagu

SEQ ID NO: 1756703 - RNA, 19 nt, Artificial Sequence
  Description of Artificial Sequence: Synthetic oligonucleotide
uuauuaaaaugaugguaca

SEQ ID NO: 1756704 - RNA, 19 nt, Artificial Sequence
  Description of Artificial Sequence: Synthetic oligonucleotide
uuuucuaucgagccguaaa

SEQ ID NO: 1756705 - RNA, 19 nt, Artificial Sequence
  Description of Artificial Sequence: Synthetic oligonucleotide
aagaguacauguguaaagu

SEQ ID NO: 1756706 - RNA, 19 nt, Artificial Sequence
  Description of Artificial Sequence: Synthetic oligonucleotide
agaguacauguguaaaguc

SEQ ID NO: 1756707 - RNA, 19 nt, Artificial Sequence
  Description of Artificial Sequence: Synthetic oligonucleotide
aagaauaaucagguucccg

SEQ ID NO: 1756708 - RNA, 19 nt, Artificial Sequence
  Description of Artificial Sequence: Synthetic oligonucleotide
agucuauagagucauugca

SEQ ID NO: 1756709 - RNA, 19 nt, Artificial Sequence
  Description of Artificial Sequence: Synthetic oligonucleotide
ucgacaaaaugcauagcug

SEQ ID NO: 1756710 - RNA, 19 nt, Artificial Sequence
  Description of Artificial Sequence: Synthetic oligonucleotide
uuucuaucgagccguaaac

SEQ ID NO: 1756711 - RNA, 19 nt, Artificial Sequence
  Description of Artificial Sequence: Synthetic oligonucleotide
uccuacacaagacuuugug

SEQ ID NO: 1756712 - RNA, 19 nt, Artificial Sequence
  Description of Artificial Sequence: Synthetic oligonucleotide
gagauuaaauuauccaaga

SEQ ID NO: 1756713 - RNA, 19 nt, Artificial Sequence
  Description of Artificial Sequence: Synthetic oligonucleotide
uauccgaucucuugccucg

SEQ ID NO: 1756714 - RNA, 19 nt, Artificial Sequence
  Description of Artificial Sequence: Synthetic oligonucleotide
aaauguaugcuuggcuccg

SEQ ID NO: 1756715 - RNA, 19 nt, Artificial Sequence
  Description of Artificial Sequence: Synthetic oligonucleotide
ucuaugaugugcucagaug

SEQ ID NO: 1756716 - RNA, 19 nt, Artificial Sequence
  Description of Artificial Sequence: Synthetic oligonucleotide
gacaguuaucuauacguac

SEQ ID NO: 1756717 - RNA, 19 nt, Artificial Sequence
  Description of Artificial Sequence: Synthetic oligonucleotide
caaaucagagauuaaauua

SEQ ID NO: 1756718 - RNA, 19 nt, Artificial Sequence
  Description of Artificial Sequence: Synthetic oligonucleotide
cagaguuuugcucuuacug

SEQ ID NO: 1756719 - RNA, 19 nt, Artificial Sequence
  Description of Artificial Sequence: Synthetic oligonucleotide
cuugcgacagaccagagca

SEQ ID NO: 1756720 - RNA, 19 nt, Artificial Sequence
  Description of Artificial Sequence: Synthetic oligonucleotide
gauuaaauuauccaagauu

SEQ ID NO: 1756721 - RNA, 19 nt, Artificial Sequence
  Description of Artificial Sequence: Synthetic oligonucleotide
agagcaggucauuauaucu

SEQ ID NO: 1756722 - RNA, 19 nt, Artificial Sequence
  Description of Artificial Sequence: Synthetic oligonucleotide
auuuucauuuggcccaauc

SEQ ID NO: 1756723 - RNA, 19 nt, Artificial Sequence
  Description of Artificial Sequence: Synthetic oligonucleotide
ucuguuaauguauuuucau

SEQ ID NO: 1756724 - RNA, 19 nt, Artificial Sequence
  Description of Artificial Sequence: Synthetic oligonucleotide
uauagagucauugcagaca

SEQ ID NO: 1756725 - RNA, 19 nt, Artificial Sequence
  Description of Artificial Sequence: Synthetic oligonucleotide
aaaaggauaggggaauccu

SEQ ID NO: 1756726 - RNA, 19 nt, Artificial Sequence
  Description of Artificial Sequence: Synthetic oligonucleotide
aauagcucauucacgaagu

SEQ ID NO: 1756727 - RNA, 19 nt, Artificial Sequence
  Description of Artificial Sequence: Synthetic oligonucleotide
uggguuuucuaucgagccg

SEQ ID NO: 1756728 - RNA, 19 nt, Artificial Sequence
  Description of Artificial Sequence: Synthetic oligonucleotide
auaugaugguucuaugaca

SEQ ID NO: 1756729 - RNA, 19 nt, Artificial Sequence
  Description of Artificial Sequence: Synthetic oligonucleotide
aaguaaccaugcuuucauc

SEQ ID NO: 1756730 - RNA, 19 nt, Artificial Sequence
  Description of Artificial Sequence: Synthetic oligonucleotide
cuucuauccgaucucuugc

SEQ ID NO: 1756731 - RNA, 19 nt, Artificial Sequence
  Description of Artificial Sequence: Synthetic oligonucleotide
ugaacaaaucuuugucccc

SEQ ID NO: 1756732 - RNA, 19 nt, Artificial Sequence
  Description of Artificial Sequence: Synthetic oligonucleotide
ucuaucgagccguaaacaa

SEQ ID NO: 1756733 - RNA, 19 nt, Artificial Sequence
  Description of Artificial Sequence: Synthetic oligonucleotide
aagcaaaccgccgagggca

SEQ ID NO: 1756734 - RNA, 19 nt, Artificial Sequence
  Description of Artificial Sequence: Synthetic oligonucleotide
cuugccucgaggauguuac

SEQ ID NO: 1756735 - RNA, 19 nt, Artificial Sequence
  Description of Artificial Sequence: Synthetic oligonucleotide
uaugaugugcucagaugug

SEQ ID NO: 1756736 - RNA, 19 nt, Artificial Sequence
  Description of Artificial Sequence: Synthetic oligonucleotide
gaggauguuacgguuagug

SEQ ID NO: 1756737 - RNA, 19 nt, Artificial Sequence
  Description of Artificial Sequence: Synthetic oligonucleotide
uuugauggucuuauaggaa

SEQ ID NO: 1756738 - RNA, 19 nt, Artificial Sequence
  Description of Artificial Sequence: Synthetic oligonucleotide
uaaccaugcuuucaucucu

SEQ ID NO: 1756739 - RNA, 19 nt, Artificial Sequence
  Description of Artificial Sequence: Synthetic oligonucleotide
agacuuugugguaaagcgc

SEQ ID NO: 1756740 - RNA, 19 nt, Artificial Sequence
  Description of Artificial Sequence: Synthetic oligonucleotide
aaugaugguacaaaaugua

SEQ ID NO: 1756741 - RNA, 19 nt, Artificial Sequence
  Description of Artificial Sequence: Synthetic oligonucleotide
aacguagcgcuccaacucu

SEQ ID NO: 1756742 - RNA, 19 nt, Artificial Sequence
  Description of Artificial Sequence: Synthetic oligonucleotide
uuaacagaauggcacuuau

SEQ ID NO: 1756743 - RNA, 19 nt, Artificial Sequence
  Description of Artificial Sequence: Synthetic oligonucleotide
caagcuuuagcuccguaug

SEQ ID NO: 1756744 - RNA, 19 nt, Artificial Sequence
  Description of Artificial Sequence: Synthetic oligonucleotide
ugguaaagcgcacagccau

SEQ ID NO: 1756745 - RNA, 19 nt, Artificial Sequence
  Description of Artificial Sequence: Synthetic oligonucleotide
ucgagccguaaacaaagcc

SEQ ID NO: 1756746 - RNA, 19 nt, Artificial Sequence
  Description of Artificial Sequence: Synthetic oligonucleotide
aguuaucuauacguacuac

SEQ ID NO: 1756747 - RNA, 19 nt, Artificial Sequence
  Description of Artificial Sequence: Synthetic oligonucleotide
ucgaggauguuacgguuag

SEQ ID NO: 1756748 - RNA, 19 nt, Artificial Sequence
  Description of Artificial Sequence: Synthetic oligonucleotide
acuugaaaggcuaugaaua

SEQ ID NO: 1756749 - RNA, 19 nt, Artificial Sequence
  Description of Artificial Sequence: Synthetic oligonucleotide
acuuauaugaugguucuau

SEQ ID NO: 1756750 - RNA, 19 nt, Artificial Sequence
  Description of Artificial Sequence: Synthetic oligonucleotide
agauuaaauuauccaagau

SEQ ID NO: 1756751 - RNA, 19 nt, Artificial Sequence
  Description of Artificial Sequence: Synthetic oligonucleotide
ucauucacgaagucacucu

SEQ ID NO: 1756752 - RNA, 19 nt, Artificial Sequence
  Description of Artificial Sequence: Synthetic oligonucleotide
cagucuauagagucauugc

SEQ ID NO: 1756753 - RNA, 19 nt, Artificial Sequence
  Description of Artificial Sequence: Synthetic oligonucleotide
acagucuauagagucauug

SEQ ID NO: 1756754 - RNA, 19 nt, Artificial Sequence
  Description of Artificial Sequence: Synthetic oligonucleotide
aauaaucagguucccgaua

SEQ ID NO: 1756755 - RNA, 19 nt, Artificial Sequence
  Description of Artificial Sequence: Synthetic oligonucleotide
gucuauagagucauugcag

SEQ ID NO: 1756756 - RNA, 19 nt, Artificial Sequence
  Description of Artificial Sequence: Synthetic oligonucleotide
ucuacagagcgaagcaaac

SEQ ID NO: 1756757 - RNA, 19 nt, Artificial Sequence
  Description of Artificial Sequence: Synthetic oligonucleotide
ugguucuaugacauggcac

SEQ ID NO: 1756758 - RNA, 19 nt, Artificial Sequence
  Description of Artificial Sequence: Synthetic oligonucleotide
uucauuuggcccaauccau

SEQ ID NO: 1756759 - RNA, 19 nt, Artificial Sequence
  Description of Artificial Sequence: Synthetic oligonucleotide
cuuauaugaugguucuaug

SEQ ID NO: 1756760 - RNA, 19 nt, Artificial Sequence
  Description of Artificial Sequence: Synthetic oligonucleotide
gacuuugugguaaagcgca

SEQ ID NO: 1756761 - RNA, 19 nt, Artificial Sequence
  Description of Artificial Sequence: Synthetic oligonucleotide
ggucuugaaguuuaugggc

SEQ ID NO: 1756762 - RNA, 19 nt, Artificial Sequence
  Description of Artificial Sequence: Synthetic oligonucleotide
aagcuuuagcuccguaugu

SEQ ID NO: 1756763 - RNA, 19 nt, Artificial Sequence
  Description of Artificial Sequence: Synthetic oligonucleotide
ucuugcgacagaccagagc

SEQ ID NO: 1756764 - RNA, 19 nt, Artificial Sequence
  Description of Artificial Sequence: Synthetic oligonucleotide
uuacuagcacgauuaacau

SEQ ID NO: 1756765 - RNA, 19 nt, Artificial Sequence
  Description of Artificial Sequence: Synthetic oligonucleotide
cacucuaaagagcagguca

SEQ ID NO: 1756766 - RNA, 19 nt, Artificial Sequence
  Description of Artificial Sequence: Synthetic oligonucleotide
aaggauaggggaauccuga

SEQ ID NO: 1756767 - RNA, 19 nt, Artificial Sequence
  Description of Artificial Sequence: Synthetic oligonucleotide
ugaaaacuguggucgacaa

SEQ ID NO: 1756768 - RNA, 19 nt, Artificial Sequence
  Description of Artificial Sequence: Synthetic oligonucleotide
aagucauaucucuucuuua

SEQ ID NO: 1756769 - RNA, 19 nt, Artificial Sequence
  Description of Artificial Sequence: Synthetic oligonucleotide
gacugaauguuccaggacu

SEQ ID NO: 1756770 - RNA, 19 nt, Artificial Sequence
  Description of Artificial Sequence: Synthetic oligonucleotide
gucgacaguuaucuauacg

SEQ ID NO: 1756771 - RNA, 19 nt, Artificial Sequence
  Description of Artificial Sequence: Synthetic oligonucleotide
agaacguagcgcuccaacu

SEQ ID NO: 1756772 - RNA, 19 nt, Artificial Sequence
  Description of Artificial Sequence: Synthetic oligonucleotide
gaacguagcgcuccaacuc

SEQ ID NO: 1756773 - RNA, 19 nt, Artificial Sequence
  Description of Artificial Sequence: Synthetic oligonucleotide
uaaucagguucccgauagg

SEQ ID NO: 1756774 - RNA, 19 nt, Artificial Sequence
  Description of Artificial Sequence: Synthetic oligonucleotide
cagagcgaagcaaaccgcc

SEQ ID NO: 1756775 - RNA, 19 nt, Artificial Sequence
  Description of Artificial Sequence: Synthetic oligonucleotide
uggcacaacaaaucagaga

SEQ ID NO: 1756776 - RNA, 19 nt, Artificial Sequence
  Description of Artificial Sequence: Synthetic oligonucleotide
cuucagcacucuaaagagc

SEQ ID NO: 1756777 - RNA, 19 nt, Artificial Sequence
  Description of Artificial Sequence: Synthetic oligonucleotide
cuacuugaaaacugugguc

SEQ ID NO: 1756778 - RNA, 19 nt, Artificial Sequence
  Description of Artificial Sequence: Synthetic oligonucleotide
gauguuacgguuaguggca

SEQ ID NO: 1756779 - RNA, 19 nt, Artificial Sequence
  Description of Artificial Sequence: Synthetic oligonucleotide
agggcauuuccccuaccgg

SEQ ID NO: 1756780 - RNA, 19 nt, Artificial Sequence
  Description of Artificial Sequence: Synthetic oligonucleotide
acaguuaucuauacguacu

SEQ ID NO: 1756781 - RNA, 19 nt, Artificial Sequence
  Description of Artificial Sequence: Synthetic oligonucleotide
cuuucacuaucagugcucc

SEQ ID NO: 1756782 - RNA, 19 nt, Artificial Sequence
  Description of Artificial Sequence: Synthetic oligonucleotide
gaagcaaaccgccgagggc

SEQ ID NO: 1756783 - RNA, 19 nt, Artificial Sequence
  Description of Artificial Sequence: Synthetic oligonucleotide
auagcucauucacgaaguc

SEQ ID NO: 1756784 - RNA, 19 nt, Artificial Sequence
  Description of Artificial Sequence: Synthetic oligonucleotide
aaggcuaugaauagcucau

SEQ ID NO: 1756785 - RNA, 19 nt, Artificial Sequence
  Description of Artificial Sequence: Synthetic oligonucleotide
ugggcaagcuuuagcuccg

SEQ ID NO: 1756786 - RNA, 19 nt, Artificial Sequence
  Description of Artificial Sequence: Synthetic oligonucleotide
gucgacaaaaugcauagcu

SEQ ID NO: 1756787 - RNA, 19 nt, Artificial Sequence
  Description of Artificial Sequence: Synthetic oligonucleotide
guuaucuauacguacuacu

SEQ ID NO: 1756788 - RNA, 19 nt, Artificial Sequence
  Description of Artificial Sequence: Synthetic oligonucleotide
uguguaaaguccagauaau

SEQ ID NO: 1756789 - RNA, 19 nt, Artificial Sequence
  Description of Artificial Sequence: Synthetic oligonucleotide
ugaaguuuaugggcaagcu

SEQ ID NO: 1756790 - RNA, 19 nt, Artificial Sequence
  Description of Artificial Sequence: Synthetic oligonucleotide
uggccauucucuguuaaug

SEQ ID NO: 1756791 - RNA, 19 nt, Artificial Sequence
  Description of Artificial Sequence: Synthetic oligonucleotide
ucuauacguacuacuugaa

SEQ ID NO: 1756792 - RNA, 19 nt, Artificial Sequence
  Description of Artificial Sequence: Synthetic oligonucleotide
ccaauccauaaguaggugg

SEQ ID NO: 1756793 - RNA, 19 nt, Artificial Sequence
  Description of Artificial Sequence: Synthetic oligonucleotide
gaugguucuaugacauggc

SEQ ID NO: 1756794 - RNA, 19 nt, Artificial Sequence
  Description of Artificial Sequence: Synthetic oligonucleotide
uucuaucgagccguaaaca

SEQ ID NO: 1756795 - RNA, 19 nt, Artificial Sequence
  Description of Artificial Sequence: Synthetic oligonucleotide
acagagcgaagcaaaccgc

SEQ ID NO: 1756796 - RNA, 19 nt, Artificial Sequence
  Description of Artificial Sequence: Synthetic oligonucleotide
ugccucgaggauguuacgg

SEQ ID NO: 1756797 - RNA, 19 nt, Artificial Sequence
  Description of Artificial Sequence: Synthetic oligonucleotide
gcacgauuaacauccauac

SEQ ID NO: 1756798 - RNA, 19 nt, Artificial Sequence
  Description of Artificial Sequence: Synthetic oligonucleotide
aaccgccgagggcauuucc

SEQ ID NO: 1756799 - RNA, 19 nt, Artificial Sequence
  Description of Artificial Sequence: Synthetic oligonucleotide
ucuauccgaucucuugccu

SEQ ID NO: 1756800 - RNA, 19 nt, Artificial Sequence
  Description of Artificial Sequence: Synthetic oligonucleotide
cacacgagcaucacggcuc

SEQ ID NO: 1756801 - RNA, 19 nt, Artificial Sequence
  Description of Artificial Sequence: Synthetic oligonucleotide
uaagaauaaucagguuccc

SEQ ID NO: 1756802 - RNA, 19 nt, Artificial Sequence
  Description of Artificial Sequence: Synthetic oligonucleotide
aaugcauagcugguauagu

SEQ ID NO: 1756803 - RNA, 19 nt, Artificial Sequence
  Description of Artificial Sequence: Synthetic oligonucleotide
ggucuuauaggaaagagua

SEQ ID NO: 1756804 - RNA, 19 nt, Artificial Sequence
  Description of Artificial Sequence: Synthetic oligonucleotide
cuuccuacacaagacuuug

SEQ ID NO: 1756805 - RNA, 19 nt, Artificial Sequence
  Description of Artificial Sequence: Synthetic oligonucleotide
ucacuaucagugcuccuuc

SEQ ID NO: 1756806 - RNA, 19 nt, Artificial Sequence
  Description of Artificial Sequence: Synthetic oligonucleotide
uucacuaucagugcuccuu

SEQ ID NO: 1756807 - RNA, 19 nt, Artificial Sequence
  Description of Artificial Sequence: Synthetic oligonucleotide
augguucuaugacauggca

SEQ ID NO: 1756808 - RNA, 19 nt, Artificial Sequence
  Description of Artificial Sequence: Synthetic oligonucleotide
uuuaacagaauggcacuua

SEQ ID NO: 1756809 - RNA, 19 nt, Artificial Sequence
  Description of Artificial Sequence: Synthetic oligonucleotide
augcauagcugguauaguu

SEQ ID NO: 1756810 - RNA, 19 nt, Artificial Sequence
  Description of Artificial Sequence: Synthetic oligonucleotide
ugaugugcucagaugugaa

SEQ ID NO: 1756811 - RNA, 19 nt, Artificial Sequence
  Description of Artificial Sequence: Synthetic oligonucleotide
cacgaagucacucucugga

SEQ ID NO: 1756812 - RNA, 19 nt, Artificial Sequence
  Description of Artificial Sequence: Synthetic oligonucleotide
cuuuacuagcacgauuaac

SEQ ID NO: 1756813 - RNA, 19 nt, Artificial Sequence
  Description of Artificial Sequence: Synthetic oligonucleotide
gcugguauaguuuuauuaa

SEQ ID NO: 1756814 - RNA, 19 nt, Artificial Sequence
  Description of Artificial Sequence: Synthetic oligonucleotide
ggcccaauccauaaguagg

SEQ ID NO: 1756815 - RNA, 19 nt, Artificial Sequence
  Description of Artificial Sequence: Synthetic oligonucleotide
ucacucucuggaauuuuaa

SEQ ID NO: 1756816 - RNA, 19 nt, Artificial Sequence
  Description of Artificial Sequence: Synthetic oligonucleotide
uacuagcacgauuaacauc

SEQ ID NO: 1756817 - RNA, 19 nt, Artificial Sequence
  Description of Artificial Sequence: Synthetic oligonucleotide
uccguauguauggacagaa

SEQ ID NO: 1756818 - RNA, 19 nt, Artificial Sequence
  Description of Artificial Sequence: Synthetic oligonucleotide
agcgaagcaaaccgccgag

SEQ ID NO: 1756819 - RNA, 19 nt, Artificial Sequence
  Description of Artificial Sequence: Synthetic oligonucleotide
cacucucuggaauuuuaac

SEQ ID NO: 1756820 - RNA, 19 nt, Artificial Sequence
  Description of Artificial Sequence: Synthetic oligonucleotide
ugaauagcucauucacgaa

SEQ ID NO: 1756821 - RNA, 19 nt, Artificial Sequence
  Description of Artificial Sequence: Synthetic oligonucleotide
gugcaaaaggguucacuug

SEQ ID NO: 1756822 - RNA, 19 nt, Artificial Sequence
  Description of Artificial Sequence: Synthetic oligonucleotide
uagcacaauugcuguguag

SEQ ID NO: 1756823 - RNA, 19 nt, Artificial Sequence
  Description of Artificial Sequence: Synthetic oligonucleotide
guuaaguuuauuuggccau

SEQ ID NO: 1756824 - RNA, 19 nt, Artificial Sequence
  Description of Artificial Sequence: Synthetic oligonucleotide
cacuggguuuucuaucgag

SEQ ID NO: 1756825 - RNA, 19 nt, Artificial Sequence
  Description of Artificial Sequence: Synthetic oligonucleotide
cauucacgaagucacucuc

SEQ ID NO: 1756826 - RNA, 19 nt, Artificial Sequence
  Description of Artificial Sequence: Synthetic oligonucleotide
aacucuugcgacagaccag

SEQ ID NO: 1756827 - RNA, 19 nt, Artificial Sequence
  Description of Artificial Sequence: Synthetic oligonucleotide
uaaguuuauuuggccauuc

SEQ ID NO: 1756828 - RNA, 19 nt, Artificial Sequence
  Description of Artificial Sequence: Synthetic oligonucleotide
uccagauaaugauuccaua

SEQ ID NO: 1756829 - RNA, 19 nt, Artificial Sequence
  Description of Artificial Sequence: Synthetic oligonucleotide
ucuuacuuucuggaggcau

SEQ ID NO: 1756830 - RNA, 19 nt, Artificial Sequence
  Description of Artificial Sequence: Synthetic oligonucleotide
cuauccgaucucuugccuc

SEQ ID NO: 1756831 - RNA, 19 nt, Artificial Sequence
  Description of Artificial Sequence: Synthetic oligonucleotide
uacacaagacuuuguggua

SEQ ID NO: 1756832 - RNA, 19 nt, Artificial Sequence
  Description of Artificial Sequence: Synthetic oligonucleotide
aagccuggucgacaguuau

SEQ ID NO: 1756833 - RNA, 19 nt, Artificial Sequence
  Description of Artificial Sequence: Synthetic oligonucleotide
ccuaccucaggccaggccc

SEQ ID NO: 1756834 - RNA, 19 nt, Artificial Sequence
  Description of Artificial Sequence: Synthetic oligonucleotide
gugguaagaauaaucaggu

SEQ ID NO: 1756835 - RNA, 19 nt, Artificial Sequence
  Description of Artificial Sequence: Synthetic oligonucleotide
uguggucgacaaaaugcau

SEQ ID NO: 1756836 - RNA, 19 nt, Artificial Sequence
  Description of Artificial Sequence: Synthetic oligonucleotide
ucccuccuaccucaggcca

SEQ ID NO: 1756837 - RNA, 19 nt, Artificial Sequence
  Description of Artificial Sequence: Synthetic oligonucleotide
acguacuacuugaaaacug

SEQ ID NO: 1756838 - RNA, 19 nt, Artificial Sequence
  Description of Artificial Sequence: Synthetic oligonucleotide
acgagcaucacggcucagg

SEQ ID NO: 1756839 - RNA, 19 nt, Artificial Sequence
  Description of Artificial Sequence: Synthetic oligonucleotide
uaaagcgcacagccaugug

SEQ ID NO: 1756840 - RNA, 19 nt, Artificial Sequence
  Description of Artificial Sequence: Synthetic oligonucleotide
cucaggcacaagcagcgac

SEQ ID NO: 1756841 - RNA, 19 nt, Artificial Sequence
  Description of Artificial Sequence: Synthetic oligonucleotide
ugcacauccccagaguuuu

SEQ ID NO: 1756842 - RNA, 19 nt, Artificial Sequence
  Description of Artificial Sequence: Synthetic oligonucleotide
ggcacuuauaugaugguuc

SEQ ID NO: 1756843 - RNA, 19 nt, Artificial Sequence
  Description of Artificial Sequence: Synthetic oligonucleotide
caugucaacucuuuucugu

SEQ ID NO: 1756844 - RNA, 19 nt, Artificial Sequence
  Description of Artificial Sequence: Synthetic oligonucleotide
agagcgaagcaaaccgccg

SEQ ID NO: 1756845 - RNA, 19 nt, Artificial Sequence
  Description of Artificial Sequence: Synthetic oligonucleotide
cauugcagacacuuuucca

SEQ ID NO: 1756846 - RNA, 19 nt, Artificial Sequence
  Description of Artificial Sequence: Synthetic oligonucleotide
uucuaugacauggcacaac

SEQ ID NO: 1756847 - RNA, 19 nt, Artificial Sequence
  Description of Artificial Sequence: Synthetic oligonucleotide
uguaugcuuggcuccgaaa

SEQ ID NO: 1756848 - RNA, 19 nt, Artificial Sequence
  Description of Artificial Sequence: Synthetic oligonucleotide
caucgcuccucuacagagc

SEQ ID NO: 1756849 - RNA, 19 nt, Artificial Sequence
  Description of Artificial Sequence: Synthetic oligonucleotide
gcaacagcuagcacaauug

SEQ ID NO: 1756850 - RNA, 19 nt, Artificial Sequence
  Description of Artificial Sequence: Synthetic oligonucleotide
ccaugugguaagaauaauc

SEQ ID NO: 1756851 - RNA, 19 nt, Artificial Sequence
  Description of Artificial Sequence: Synthetic oligonucleotide
uuaaguuuauuuggccauu

SEQ ID NO: 1756852 - RNA, 19 nt, Artificial Sequence
  Description of Artificial Sequence: Synthetic oligonucleotide
cucuacagagcgaagcaaa

SEQ ID NO: 1756853 - RNA, 19 nt, Artificial Sequence
  Description of Artificial Sequence: Synthetic oligonucleotide
agaagaacguagcgcucca

SEQ ID NO: 1756854 - RNA, 19 nt, Artificial Sequence
  Description of Artificial Sequence: Synthetic oligonucleotide
uuagcuccguauguaugga

SEQ ID NO: 1756855 - RNA, 19 nt, Artificial Sequence
  Description of Artificial Sequence: Synthetic oligonucleotide
agcacgauuaacauccaua

SEQ ID NO: 1756856 - RNA, 19 nt, Artificial Sequence
  Description of Artificial Sequence: Synthetic oligonucleotide
ggaaagaguacauguguaa

SEQ ID NO: 1756857 - RNA, 19 nt, Artificial Sequence
  Description of Artificial Sequence: Synthetic oligonucleotide
acacaagacuuugugguaa

SEQ ID NO: 1756858 - RNA, 19 nt, Artificial Sequence
  Description of Artificial Sequence: Synthetic oligonucleotide
gcccacacgagcaucacgg

SEQ ID NO: 1756859 - RNA, 19 nt, Artificial Sequence
  Description of Artificial Sequence: Synthetic oligonucleotide
aucgagccguaaacaaagc

SEQ ID NO: 1756860 - RNA, 19 nt, Artificial Sequence
  Description of Artificial Sequence: Synthetic oligonucleotide
cuauacguacuacuugaaa

SEQ ID NO: 1756861 - RNA, 19 nt, Artificial Sequence
  Description of Artificial Sequence: Synthetic oligonucleotide
guuuaugggcaagcuuuag

SEQ ID NO: 1756862 - RNA, 19 nt, Artificial Sequence
  Description of Artificial Sequence: Synthetic oligonucleotide
cuaucgagccguaaacaaa

SEQ ID NO: 1756863 - RNA, 19 nt, Artificial Sequence
  Description of Artificial Sequence: Synthetic oligonucleotide
cacuaucagugcuccuucc

SEQ ID NO: 1756864 - RNA, 19 nt, Artificial Sequence
  Description of Artificial Sequence: Synthetic oligonucleotide
gagcgaagcaaaccgccga

SEQ ID NO: 1756865 - RNA, 19 nt, Artificial Sequence
  Description of Artificial Sequence: Synthetic oligonucleotide
guucacuugaaaggcuaug

SEQ ID NO: 1756866 - RNA, 19 nt, Artificial Sequence
  Description of Artificial Sequence: Synthetic oligonucleotide
uuuccagccuggugcaaaa

SEQ ID NO: 1756867 - RNA, 19 nt, Artificial Sequence
  Description of Artificial Sequence: Synthetic oligonucleotide
caccgcggagaguagggcc

SEQ ID NO: 1756868 - RNA, 19 nt, Artificial Sequence
  Description of Artificial Sequence: Synthetic oligonucleotide
accacgcaacagcuagcac

SEQ ID NO: 1756869 - RNA, 19 nt, Artificial Sequence
  Description of Artificial Sequence: Synthetic oligonucleotide
gaaaggcuaugaauagcuc

SEQ ID NO: 1756870 - RNA, 19 nt, Artificial Sequence
  Description of Artificial Sequence: Synthetic oligonucleotide
auggcacuuauaugauggu

SEQ ID NO: 1756871 - RNA, 19 nt, Artificial Sequence
  Description of Artificial Sequence: Synthetic oligonucleotide
ggagaguagggcccacacg

SEQ ID NO: 1756872 - RNA, 19 nt, Artificial Sequence
  Description of Artificial Sequence: Synthetic oligonucleotide
gucuuauaggaaagaguac

SEQ ID NO: 1756873 - RNA, 19 nt, Artificial Sequence
  Description of Artificial Sequence: Synthetic oligonucleotide
cuccccaucgcuccucuac

SEQ ID NO: 1756874 - RNA, 19 nt, Artificial Sequence
  Description of Artificial Sequence: Synthetic oligonucleotide
cuuacuguucuuacuuucu

SEQ ID NO: 1756875 - RNA, 19 nt, Artificial Sequence
  Description of Artificial Sequence: Synthetic oligonucleotide
acaagacuuugugguaaag

SEQ ID NO: 1756876 - RNA, 19 nt, Artificial Sequence
  Description of Artificial Sequence: Synthetic oligonucleotide
cacgcaacagcuagcacaa

SEQ ID NO: 1756877 - RNA, 19 nt, Artificial Sequence
  Description of Artificial Sequence: Synthetic oligonucleotide
aauguaugcuuggcuccga

SEQ ID NO: 1756878 - RNA, 19 nt, Artificial Sequence
  Description of Artificial Sequence: Synthetic oligonucleotide
agcuccguauguauggaca

SEQ ID NO: 1756879 - RNA, 19 nt, Artificial Sequence
  Description of Artificial Sequence: Synthetic oligonucleotide
gcuccguauguauggacag

SEQ ID NO: 1756880 - RNA, 19 nt, Artificial Sequence
  Description of Artificial Sequence: Synthetic oligonucleotide
ugguaagaauaaucagguu

SEQ ID NO: 1756881 - RNA, 19 nt, Artificial Sequence
  Description of Artificial Sequence: Synthetic oligonucleotide
acuuugugguaaagcgcac

SEQ ID NO: 1756882 - RNA, 19 nt, Artificial Sequence
  Description of Artificial Sequence: Synthetic oligonucleotide
ccaucgcuccucuacagag

SEQ ID NO: 1756883 - RNA, 19 nt, Artificial Sequence
  Description of Artificial Sequence: Synthetic oligonucleotide
uugccucgaggauguuacg

SEQ ID NO: 1756884 - RNA, 19 nt, Artificial Sequence
  Description of Artificial Sequence: Synthetic oligonucleotide
gaaguuuaugggcaagcuu

SEQ ID NO: 1756885 - RNA, 19 nt, Artificial Sequence
  Description of Artificial Sequence: Synthetic oligonucleotide
aucagguucccgauaggca

SEQ ID NO: 1756886 - RNA, 19 nt, Artificial Sequence
  Description of Artificial Sequence: Synthetic oligonucleotide
guuacgguuaguggcaucu

SEQ ID NO: 1756887 - RNA, 19 nt, Artificial Sequence
  Description of Artificial Sequence: Synthetic oligonucleotide
acgaagucacucucuggaa

SEQ ID NO: 1756888 - RNA, 19 nt, Artificial Sequence
  Description of Artificial Sequence: Synthetic oligonucleotide
uuucacuaucagugcuccu

SEQ ID NO: 1756889 - RNA, 19 nt, Artificial Sequence
  Description of Artificial Sequence: Synthetic oligonucleotide
uagcacgauuaacauccau

SEQ ID NO: 1756890 - RNA, 19 nt, Artificial Sequence
  Description of Artificial Sequence: Synthetic oligonucleotide
agaccacgcaacagcuagc

SEQ ID NO: 1756891 - RNA, 19 nt, Artificial Sequence
  Description of Artificial Sequence: Synthetic oligonucleotide
uagcuccguauguauggac

SEQ ID NO: 1756892 - RNA, 19 nt, Artificial Sequence
  Description of Artificial Sequence: Synthetic oligonucleotide
gaccacgcaacagcuagca

SEQ ID NO: 1756893 - RNA, 19 nt, Artificial Sequence
  Description of Artificial Sequence: Synthetic oligonucleotide
uugcgacagaccagagcac

SEQ ID NO: 1756894 - RNA, 19 nt, Artificial Sequence
  Description of Artificial Sequence: Synthetic oligonucleotide
aggauaggggaauccugau

SEQ ID NO: 1756895 - RNA, 19 nt, Artificial Sequence
  Description of Artificial Sequence: Synthetic oligonucleotide
acacgagcaucacggcuca

SEQ ID NO: 1756896 - RNA, 19 nt, Artificial Sequence
  Description of Artificial Sequence: Synthetic oligonucleotide
auguauggacagaaacaca

SEQ ID NO: 1756897 - RNA, 19 nt, Artificial Sequence
  Description of Artificial Sequence: Synthetic oligonucleotide
aaaccgccgagggcauuuc

SEQ ID NO: 1756898 - RNA, 19 nt, Artificial Sequence
  Description of Artificial Sequence: Synthetic oligonucleotide
ccauaaguagguggggucc

SEQ ID NO: 1756899 - RNA, 19 nt, Artificial Sequence
  Description of Artificial Sequence: Synthetic oligonucleotide
uggcacuuauaugaugguu

SEQ ID NO: 1756900 - RNA, 19 nt, Artificial Sequence
  Description of Artificial Sequence: Synthetic oligonucleotide
cacgauuaacauccauaca

SEQ ID NO: 1756901 - RNA, 19 nt, Artificial Sequence
  Description of Artificial Sequence: Synthetic oligonucleotide
ccacgcaacagcuagcaca

SEQ ID NO: 1756902 - RNA, 19 nt, Artificial Sequence
  Description of Artificial Sequence: Synthetic oligonucleotide
cucaggccaggcccaacgc

SEQ ID NO: 1756903 - RNA, 19 nt, Artificial Sequence
  Description of Artificial Sequence: Synthetic oligonucleotide
gagcaccgcggagaguagg

SEQ ID NO: 1756904 - RNA, 19 nt, Artificial Sequence
  Description of Artificial Sequence: Synthetic oligonucleotide
uguuacgguuaguggcauc

SEQ ID NO: 1756905 - RNA, 19 nt, Artificial Sequence
  Description of Artificial Sequence: Synthetic oligonucleotide
ucuugccucgaggauguua

SEQ ID NO: 1756906 - RNA, 19 nt, Artificial Sequence
  Description of Artificial Sequence: Synthetic oligonucleotide
cuggucgacaguuaucuau

SEQ ID NO: 1756907 - RNA, 19 nt, Artificial Sequence
  Description of Artificial Sequence: Synthetic oligonucleotide
caguuaucuauacguacua

SEQ ID NO: 1756908 - RNA, 19 nt, Artificial Sequence
  Description of Artificial Sequence: Synthetic oligonucleotide
auguaugcuuggcuccgaa

SEQ ID NO: 1756909 - RNA, 19 nt, Artificial Sequence
  Description of Artificial Sequence: Synthetic oligonucleotide
cacggcucaggcacaagca

SEQ ID NO: 1756910 - RNA, 19 nt, Artificial Sequence
  Description of Artificial Sequence: Synthetic oligonucleotide
uucuuacuuucuggaggca

SEQ ID NO: 1756911 - RNA, 19 nt, Artificial Sequence
  Description of Artificial Sequence: Synthetic oligonucleotide
guggucgacaaaaugcaua

SEQ ID NO: 1756912 - RNA, 19 nt, Artificial Sequence
  Description of Artificial Sequence: Synthetic oligonucleotide
cagagcaccgcggagagua

SEQ ID NO: 1756913 - RNA, 19 nt, Artificial Sequence
  Description of Artificial Sequence: Synthetic oligonucleotide
ggacugaauguuccaggac

SEQ ID NO: 1756914 - RNA, 19 nt, Artificial Sequence
  Description of Artificial Sequence: Synthetic oligonucleotide
ggugcaaaaggguucacuu

SEQ ID NO: 1756915 - RNA, 19 nt, Artificial Sequence
  Description of Artificial Sequence: Synthetic oligonucleotide
cuaugacauggcacaacaa

SEQ ID NO: 1756916 - RNA, 19 nt, Artificial Sequence
  Description of Artificial Sequence: Synthetic oligonucleotide
agguucccgauaggcaaag

SEQ ID NO: 1756917 - RNA, 19 nt, Artificial Sequence
  Description of Artificial Sequence: Synthetic oligonucleotide
gcauuuccccuaccggucc

SEQ ID NO: 1756918 - RNA, 19 nt, Artificial Sequence
  Description of Artificial Sequence: Synthetic oligonucleotide
cucgaggauguuacgguua

SEQ ID NO: 1756919 - RNA, 19 nt, Artificial Sequence
  Description of Artificial Sequence: Synthetic oligonucleotide
aaagccuggucgacaguua

SEQ ID NO: 1756920 - RNA, 19 nt, Artificial Sequence
  Description of Artificial Sequence: Synthetic oligonucleotide
aguuuaugggcaagcuuua

SEQ ID NO: 1756921 - RNA, 19 nt, Artificial Sequence
  Description of Artificial Sequence: Synthetic oligonucleotide
cucuugcgacagaccagag

SEQ ID NO: 1756922 - RNA, 19 nt, Artificial Sequence
  Description of Artificial Sequence: Synthetic oligonucleotide
caacgccuccccaucgcuc

SEQ ID NO: 1756923 - RNA, 19 nt, Artificial Sequence
  Description of Artificial Sequence: Synthetic oligonucleotide
gcugaauaaagaagaacgu

SEQ ID NO: 1756924 - RNA, 19 nt, Artificial Sequence
  Description of Artificial Sequence: Synthetic oligonucleotide
gagccguaaacaaagccuu

SEQ ID NO: 1756925 - RNA, 19 nt, Artificial Sequence
  Description of Artificial Sequence: Synthetic oligonucleotide
guaaagcgcacagccaugu

SEQ ID NO: 1756926 - RNA, 19 nt, Artificial Sequence
  Description of Artificial Sequence: Synthetic oligonucleotide
aggguucacuugaaaggcu

SEQ ID NO: 1756927 - RNA, 19 nt, Artificial Sequence
  Description of Artificial Sequence: Synthetic oligonucleotide
gcaaguaaccaugcuuuca

SEQ ID NO: 1756928 - RNA, 19 nt, Artificial Sequence
  Description of Artificial Sequence: Synthetic oligonucleotide
ggcaaguaaccaugcuuuc

SEQ ID NO: 1756929 - RNA, 19 nt, Artificial Sequence
  Description of Artificial Sequence: Synthetic oligonucleotide
cacaagacuuugugguaaa

SEQ ID NO: 1756930 - RNA, 19 nt, Artificial Sequence
  Description of Artificial Sequence: Synthetic oligonucleotide
cauagcugguauaguuuua

SEQ ID NO: 1756931 - RNA, 19 nt, Artificial Sequence
  Description of Artificial Sequence: Synthetic oligonucleotide
gguaaagcgcacagccaug

SEQ ID NO: 1756932 - RNA, 19 nt, Artificial Sequence
  Description of Artificial Sequence: Synthetic oligonucleotide
guauuuucauuuggcccaa

SEQ ID NO: 1756933 - RNA, 19 nt, Artificial Sequence
  Description of Artificial Sequence: Synthetic oligonucleotide
gugcuccuuccuuuguuaa

SEQ ID NO: 1756934 - RNA, 19 nt, Artificial Sequence
  Description of Artificial Sequence: Synthetic oligonucleotide
cuagcacgauuaacaucca

SEQ ID NO: 1756935 - RNA, 19 nt, Artificial Sequence
  Description of Artificial Sequence: Synthetic oligonucleotide
guaggugggguccacuguu

SEQ ID NO: 1756936 - RNA, 19 nt, Artificial Sequence
  Description of Artificial Sequence: Synthetic oligonucleotide
gccguaaacaaagccuuuc

SEQ ID NO: 1756937 - RNA, 19 nt, Artificial Sequence
  Description of Artificial Sequence: Synthetic oligonucleotide
gcgacagaccagagcaccg

SEQ ID NO: 1756938 - RNA, 19 nt, Artificial Sequence
  Description of Artificial Sequence: Synthetic oligonucleotide
guccagauaaugauuccau

SEQ ID NO: 1756939 - RNA, 19 nt, Artificial Sequence
  Description of Artificial Sequence: Synthetic oligonucleotide
gccauucucuguuaaugua

SEQ ID NO: 1756940 - RNA, 19 nt, Artificial Sequence
  Description of Artificial Sequence: Synthetic oligonucleotide
gggcauuuccccuaccggu

SEQ ID NO: 1756941 - RNA, 19 nt, Artificial Sequence
  Description of Artificial Sequence: Synthetic oligonucleotide
auguuacgguuaguggcau

SEQ ID NO: 1756942 - RNA, 19 nt, Artificial Sequence
  Description of Artificial Sequence: Synthetic oligonucleotide
gcaagcuuuagcuccguau

SEQ ID NO: 1756943 - RNA, 19 nt, Artificial Sequence
  Description of Artificial Sequence: Synthetic oligonucleotide
ggcauuuccccuaccgguc

SEQ ID NO: 1756944 - RNA, 19 nt, Artificial Sequence
  Description of Artificial Sequence: Synthetic oligonucleotide
agucacucucuggaauuuu

SEQ ID NO: 1756945 - RNA, 19 nt, Artificial Sequence
  Description of Artificial Sequence: Synthetic oligonucleotide
gcgaagcaaaccgccgagg

SEQ ID NO: 1756946 - RNA, 19 nt, Artificial Sequence
  Description of Artificial Sequence: Synthetic oligonucleotide
gcuagcacaauugcugugu

SEQ ID NO: 1756947 - RNA, 19 nt, Artificial Sequence
  Description of Artificial Sequence: Synthetic oligonucleotide
ggucgacaaaaugcauagc

SEQ ID NO: 1756948 - RNA, 19 nt, Artificial Sequence
  Description of Artificial Sequence: Synthetic oligonucleotide
gaagaacguagcgcuccaa

SEQ ID NO: 1756949 - RNA, 19 nt, Artificial Sequence
  Description of Artificial Sequence: Synthetic oligonucleotide
guuuucuaucgagccguaa

SEQ ID NO: 1756950 - RNA, 19 nt, Artificial Sequence
  Description of Artificial Sequence: Synthetic oligonucleotide
cguacuacuugaaaacugu

SEQ ID NO: 1756951 - RNA, 19 nt, Artificial Sequence
  Description of Artificial Sequence: Synthetic oligonucleotide
uacuuucuggaggcaucua

SEQ ID NO: 1756952 - RNA, 19 nt, Artificial Sequence
  Description of Artificial Sequence: Synthetic oligonucleotide
cagcaucaggacugaaugu

SEQ ID NO: 1756953 - RNA, 19 nt, Artificial Sequence
  Description of Artificial Sequence: Synthetic oligonucleotide
gcccaacgccuccccaucg

SEQ ID NO: 1756954 - RNA, 19 nt, Artificial Sequence
  Description of Artificial Sequence: Synthetic oligonucleotide
cgagccguaaacaaagccu

SEQ ID NO: 1756955 - RNA, 19 nt, Artificial Sequence
  Description of Artificial Sequence: Synthetic oligonucleotide
aucacggcucaggcacaag

SEQ ID NO: 1756956 - RNA, 19 nt, Artificial Sequence
  Description of Artificial Sequence: Synthetic oligonucleotide
cuccguauguauggacaga

SEQ ID NO: 1756957 - RNA, 19 nt, Artificial Sequence
  Description of Artificial Sequence: Synthetic oligonucleotide
caccuucaggggcaaguaa

SEQ ID NO: 1756958 - RNA, 19 nt, Artificial Sequence
  Description of Artificial Sequence: Synthetic oligonucleotide
gggcaaguaaccaugcuuu

SEQ ID NO: 1756959 - RNA, 19 nt, Artificial Sequence
  Description of Artificial Sequence: Synthetic oligonucleotide
gccuggucgacaguuaucu

SEQ ID NO: 1756960 - RNA, 19 nt, Artificial Sequence
  Description of Artificial Sequence: Synthetic oligonucleotide
caucuaugaugugcucaga

SEQ ID NO: 1756961 - RNA, 19 nt, Artificial Sequence
  Description of Artificial Sequence: Synthetic oligonucleotide
ggacugcagaccacgcaac

SEQ ID NO: 1756962 - RNA, 19 nt, Artificial Sequence
  Description of Artificial Sequence: Synthetic oligonucleotide
ccuggugcaaaaggguuca

SEQ ID NO: 1756963 - RNA, 19 nt, Artificial Sequence
  Description of Artificial Sequence: Synthetic oligonucleotide
cccacacgagcaucacggc

SEQ ID NO: 1756964 - RNA, 19 nt, Artificial Sequence
  Description of Artificial Sequence: Synthetic oligonucleotide
ccuccuaccucaggccagg

SEQ ID NO: 1756965 - RNA, 19 nt, Artificial Sequence
  Description of Artificial Sequence: Synthetic oligonucleotide
cccuccuaccucaggccag

SEQ ID NO: 1756966 - RNA, 19 nt, Artificial Sequence
  Description of Artificial Sequence: Synthetic oligonucleotide
agccguaaacaaagccuuu

SEQ ID NO: 1756967 - RNA, 19 nt, Artificial Sequence
  Description of Artificial Sequence: Synthetic oligonucleotide
gcacucuaaagagcagguc

SEQ ID NO: 1756968 - RNA, 19 nt, Artificial Sequence
  Description of Artificial Sequence: Synthetic oligonucleotide
gccucgaggauguuacggu

SEQ ID NO: 1756969 - RNA, 19 nt, Artificial Sequence
  Description of Artificial Sequence: Synthetic oligonucleotide
cuggugcaaaaggguucac

SEQ ID NO: 1756970 - RNA, 19 nt, Artificial Sequence
  Description of Artificial Sequence: Synthetic oligonucleotide
auccgaucucuugccucga

SEQ ID NO: 1756971 - RNA, 19 nt, Artificial Sequence
  Description of Artificial Sequence: Synthetic oligonucleotide
gcaaaaggguucacuugaa

SEQ ID NO: 1756972 - RNA, 19 nt, Artificial Sequence
  Description of Artificial Sequence: Synthetic oligonucleotide
cggagaguagggcccacac

SEQ ID NO: 1756973 - RNA, 19 nt, Artificial Sequence
  Description of Artificial Sequence: Synthetic oligonucleotide
gcccaauccauaaguaggu

SEQ ID NO: 1756974 - RNA, 19 nt, Artificial Sequence
  Description of Artificial Sequence: Synthetic oligonucleotide
ccgauaggcaaagaucaaa

SEQ ID NO: 1756975 - RNA, 19 nt, Artificial Sequence
  Description of Artificial Sequence: Synthetic oligonucleotide
cacuuauaugaugguucua

SEQ ID NO: 1756976 - RNA, 19 nt, Artificial Sequence
  Description of Artificial Sequence: Synthetic oligonucleotide
agcaaaccgccgagggcau

SEQ ID NO: 1756977 - RNA, 19 nt, Artificial Sequence
  Description of Artificial Sequence: Synthetic oligonucleotide
uaccucaggccaggcccaa

SEQ ID NO: 1756978 - RNA, 19 nt, Artificial Sequence
  Description of Artificial Sequence: Synthetic oligonucleotide
ggcccaacgccuccccauc

SEQ ID NO: 1756979 - RNA, 19 nt, Artificial Sequence
  Description of Artificial Sequence: Synthetic oligonucleotide
ccguaaacaaagccuuucu

SEQ ID NO: 1756980 - RNA, 19 nt, Artificial Sequence
  Description of Artificial Sequence: Synthetic oligonucleotide
gcgcuccaacucuugcgac

SEQ ID NO: 1756981 - RNA, 19 nt, Artificial Sequence
  Description of Artificial Sequence: Synthetic oligonucleotide
caucacggcucaggcacaa

SEQ ID NO: 1756982 - RNA, 19 nt, Artificial Sequence
  Description of Artificial Sequence: Synthetic oligonucleotide
gcgacagcugggcucccuc

SEQ ID NO: 1756983 - RNA, 19 nt, Artificial Sequence
  Description of Artificial Sequence: Synthetic oligonucleotide
cgacaguuaucuauacgua

SEQ ID NO: 1756984 - RNA, 19 nt, Artificial Sequence
  Description of Artificial Sequence: Synthetic oligonucleotide
guagggcccacacgagcau

SEQ ID NO: 1756985 - RNA, 19 nt, Artificial Sequence
  Description of Artificial Sequence: Synthetic oligonucleotide
ccgagggcauuuccccuac

SEQ ID NO: 1756986 - RNA, 19 nt, Artificial Sequence
  Description of Artificial Sequence: Synthetic oligonucleotide
gccgagggcauuuccccua

SEQ ID NO: 1756987 - RNA, 19 nt, Artificial Sequence
  Description of Artificial Sequence: Synthetic oligonucleotide
ccguauguauggacagaaa

SEQ ID NO: 1756988 - RNA, 19 nt, Artificial Sequence
  Description of Artificial Sequence: Synthetic oligonucleotide
cccaucgcuccucuacaga

SEQ ID NO: 1756989 - RNA, 19 nt, Artificial Sequence
  Description of Artificial Sequence: Synthetic oligonucleotide
gguucacuugaaaggcuau

SEQ ID NO: 1756990 - RNA, 19 nt, Artificial Sequence
  Description of Artificial Sequence: Synthetic oligonucleotide
caaaccgccgagggcauuu

SEQ ID NO: 1756991 - RNA, 19 nt, Artificial Sequence
  Description of Artificial Sequence: Synthetic oligonucleotide
ccucuacagagcgaagcaa

SEQ ID NO: 1756992 - RNA, 19 nt, Artificial Sequence
  Description of Artificial Sequence: Synthetic oligonucleotide
cucuaaagagcaggucauu

SEQ ID NO: 1756993 - RNA, 19 nt, Artificial Sequence
  Description of Artificial Sequence: Synthetic oligonucleotide
ggcaagcuuuagcuccgua

SEQ ID NO: 1756994 - RNA, 19 nt, Artificial Sequence
  Description of Artificial Sequence: Synthetic oligonucleotide
cgcuccaacucuugcgaca

SEQ ID NO: 1756995 - RNA, 19 nt, Artificial Sequence
  Description of Artificial Sequence: Synthetic oligonucleotide
cccgauaggcaaagaucaa

SEQ ID NO: 1756996 - RNA, 19 nt, Artificial Sequence
  Description of Artificial Sequence: Synthetic oligonucleotide
gguuuucuaucgagccgua

SEQ ID NO: 1756997 - RNA, 19 nt, Artificial Sequence
  Description of Artificial Sequence: Synthetic oligonucleotide
gguucccgauaggcaaaga

SEQ ID NO: 1756998 - RNA, 19 nt, Artificial Sequence
  Description of Artificial Sequence: Synthetic oligonucleotide
acgcaacagcuagcacaau

SEQ ID NO: 1756999 - RNA, 19 nt, Artificial Sequence
  Description of Artificial Sequence: Synthetic oligonucleotide
gcaucacggcucaggcaca

SEQ ID NO: 1757000 - RNA, 19 nt, Artificial Sequence
  Description of Artificial Sequence: Synthetic oligonucleotide
gcggagaguagggcccaca

SEQ ID NO: 1757001 - RNA, 19 nt, Artificial Sequence
  Description of Artificial Sequence: Synthetic oligonucleotide
gggcccacacgagcaucac

SEQ ID NO: 1757002 - RNA, 19 nt, Artificial Sequence
  Description of Artificial Sequence: Synthetic oligonucleotide
ccucgaggauguuacgguu

SEQ ID NO: 1757003 - RNA, 19 nt, Artificial Sequence
  Description of Artificial Sequence: Synthetic oligonucleotide
ccuggucgacaguuaucua

SEQ ID NO: 1757004 - RNA, 19 nt, Artificial Sequence
  Description of Artificial Sequence: Synthetic oligonucleotide
gggcaagcuuuagcuccgu

SEQ ID NO: 1757005 - RNA, 19 nt, Artificial Sequence
  Description of Artificial Sequence: Synthetic oligonucleotide
cgcggagaguagggcccac

SEQ ID NO: 1757006 - RNA, 19 nt, Artificial Sequence
  Description of Artificial Sequence: Synthetic oligonucleotide
cucuugccucgaggauguu

SEQ ID NO: 1757007 - RNA, 19 nt, Artificial Sequence
  Description of Artificial Sequence: Synthetic oligonucleotide
aauauaaccauuaauaucu

SEQ ID NO: 1757008 - RNA, 19 nt, Artificial Sequence
  Description of Artificial Sequence: Synthetic oligonucleotide
uuaucuucaaggaugacgg

SEQ ID NO: 1757009 - RNA, 19 nt, Artificial Sequence
  Description of Artificial Sequence: Synthetic oligonucleotide
uuuccaaccaacauaauag

SEQ ID NO: 1757010 - RNA, 19 nt, Artificial Sequence
  Description of Artificial Sequence: Synthetic oligonucleotide
cauaguuuuaucuucaagg

SEQ ID NO: 1757011 - RNA, 19 nt, Artificial Sequence
  Description of Artificial Sequence: Synthetic oligonucleotide
uuuacugugaucaacuuug

SEQ ID NO: 1757012 - RNA, 19 nt, Artificial Sequence
  Description of Artificial Sequence: Synthetic oligonucleotide
aacucauuuggacagaguc

SEQ ID NO: 1757013 - RNA, 19 nt, Artificial Sequence
  Description of Artificial Sequence: Synthetic oligonucleotide
aacaaauuggccuucaaca

SEQ ID NO: 1757014 - RNA, 19 nt, Artificial Sequence
  Description of Artificial Sequence: Synthetic oligonucleotide
aauaugauuguuuaaaauu

SEQ ID NO: 1757015 - RNA, 19 nt, Artificial Sequence
  Description of Artificial Sequence: Synthetic oligonucleotide
uaaccauuaauaucuaugg

SEQ ID NO: 1757016 - RNA, 19 nt, Artificial Sequence
  Description of Artificial Sequence: Synthetic oligonucleotide
auuuuaaacaacaaacuac

SEQ ID NO: 1757017 - RNA, 19 nt, Artificial Sequence
  Description of Artificial Sequence: Synthetic oligonucleotide
auuaaugccgauaaaauuc

SEQ ID NO: 1757018 - RNA, 19 nt, Artificial Sequence
  Description of Artificial Sequence: Synthetic oligonucleotide
uauaaauugaaaauaugau

SEQ ID NO: 1757019 - RNA, 19 nt, Artificial Sequence
  Description of Artificial Sequence: Synthetic oligonucleotide
accauuaauaucuauggag

SEQ ID NO: 1757020 - RNA, 19 nt, Artificial Sequence
  Description of Artificial Sequence: Synthetic oligonucleotide
uauauugaagccuaguuaa

SEQ ID NO: 1757021 - RNA, 19 nt, Artificial Sequence
  Description of Artificial Sequence: Synthetic oligonucleotide
ugaauugucaaugaggacu

SEQ ID NO: 1757022 - RNA, 19 nt, Artificial Sequence
  Description of Artificial Sequence: Synthetic oligonucleotide
ucagacguuaacauaaucu

SEQ ID NO: 1757023 - RNA, 19 nt, Artificial Sequence
  Description of Artificial Sequence: Synthetic oligonucleotide
auaucuauggaguaugucu

SEQ ID NO: 1757024 - RNA, 19 nt, Artificial Sequence
  Description of Artificial Sequence: Synthetic oligonucleotide
uguaacaugucuaucauuu

SEQ ID NO: 1757025 - RNA, 19 nt, Artificial Sequence
  Description of Artificial Sequence: Synthetic oligonucleotide
aggacuuccccacagaccg

SEQ ID NO: 1757026 - RNA, 19 nt, Artificial Sequence
  Description of Artificial Sequence: Synthetic oligonucleotide
auauaaauugaaaauauga

SEQ ID NO: 1757027 - RNA, 19 nt, Artificial Sequence
  Description of Artificial Sequence: Synthetic oligonucleotide
uuaauaguaguguaacaug

SEQ ID NO: 1757028 - RNA, 19 nt, Artificial Sequence
  Description of Artificial Sequence: Synthetic oligonucleotide
uauggaguaugucugagga

SEQ ID NO: 1757029 - RNA, 19 nt, Artificial Sequence
  Description of Artificial Sequence: Synthetic oligonucleotide
aaauugaaaauaugauugu

SEQ ID NO: 1757030 - RNA, 19 nt, Artificial Sequence
  Description of Artificial Sequence: Synthetic oligonucleotide
acugugaucaacuuuguga

SEQ ID NO: 1757031 - RNA, 19 nt, Artificial Sequence
  Description of Artificial Sequence: Synthetic oligonucleotide
auaaauugaaaauaugauu

SEQ ID NO: 1757032 - RNA, 19 nt, Artificial Sequence
  Description of Artificial Sequence: Synthetic oligonucleotide
aaauuggccuucaacaaac

SEQ ID NO: 1757033 - RNA, 19 nt, Artificial Sequence
  Description of Artificial Sequence: Synthetic oligonucleotide
uuuggacagagucagacgu

SEQ ID NO: 1757034 - RNA, 19 nt, Artificial Sequence
  Description of Artificial Sequence: Synthetic oligonucleotide
ugauugauguaacagaaua

SEQ ID NO: 1757035 - RNA, 19 nt, Artificial Sequence
  Description of Artificial Sequence: Synthetic oligonucleotide
agugaacucauuuggacag

SEQ ID NO: 1757036 - RNA, 19 nt, Artificial Sequence
  Description of Artificial Sequence: Synthetic oligonucleotide
aaggggaggaccucugacc

SEQ ID NO: 1757037 - RNA, 19 nt, Artificial Sequence
  Description of Artificial Sequence: Synthetic oligonucleotide
aauuaaugccgauaaaauu

SEQ ID NO: 1757038 - RNA, 19 nt, Artificial Sequence
  Description of Artificial Sequence: Synthetic oligonucleotide
auugaagccuaguuaauag

SEQ ID NO: 1757039 - RNA, 19 nt, Artificial Sequence
  Description of Artificial Sequence: Synthetic oligonucleotide
aauuugaaaauggaaguga

SEQ ID NO: 1757040 - RNA, 19 nt, Artificial Sequence
  Description of Artificial Sequence: Synthetic oligonucleotide
aaaacaaauuaagguuugc

SEQ ID NO: 1757041 - RNA, 19 nt, Artificial Sequence
  Description of Artificial Sequence: Synthetic oligonucleotide
ucuaucauuuugaugauua

SEQ ID NO: 1757042 - RNA, 19 nt, Artificial Sequence
  Description of Artificial Sequence: Synthetic oligonucleotide
gauuguuuaaaauuugaaa

SEQ ID NO: 1757043 - RNA, 19 nt, Artificial Sequence
  Description of Artificial Sequence: Synthetic oligonucleotide
aacauaaucugaaagggga

SEQ ID NO: 1757044 - RNA, 19 nt, Artificial Sequence
  Description of Artificial Sequence: Synthetic oligonucleotide
auaggagucaacaaauugg

SEQ ID NO: 1757045 - RNA, 19 nt, Artificial Sequence
  Description of Artificial Sequence: Synthetic oligonucleotide
uaugauuguuuaaaauuug

SEQ ID NO: 1757046 - RNA, 19 nt, Artificial Sequence
  Description of Artificial Sequence: Synthetic oligonucleotide
augccgauaaaauucuugg

SEQ ID NO: 1757047 - RNA, 19 nt, Artificial Sequence
  Description of Artificial Sequence: Synthetic oligonucleotide
ucugauuuuccuuugcaga

SEQ ID NO: 1757048 - RNA, 19 nt, Artificial Sequence
  Description of Artificial Sequence: Synthetic oligonucleotide
gugaaaguguuuucuaugg

SEQ ID NO: 1757049 - RNA, 19 nt, Artificial Sequence
  Description of Artificial Sequence: Synthetic oligonucleotide
caacauaauagguaucugc

SEQ ID NO: 1757050 - RNA, 19 nt, Artificial Sequence
  Description of Artificial Sequence: Synthetic oligonucleotide
uucagguggaguaaauucc

SEQ ID NO: 1757051 - RNA, 19 nt, Artificial Sequence
  Description of Artificial Sequence: Synthetic oligonucleotide
aaguguuuucuaugguugg

SEQ ID NO: 1757052 - RNA, 19 nt, Artificial Sequence
  Description of Artificial Sequence: Synthetic oligonucleotide
aaacugaauugucaaugag

SEQ ID NO: 1757053 - RNA, 19 nt, Artificial Sequence
  Description of Artificial Sequence: Synthetic oligonucleotide
uaguguaacaugucuauca

SEQ ID NO: 1757054 - RNA, 19 nt, Artificial Sequence
  Description of Artificial Sequence: Synthetic oligonucleotide
aauggaagugaacucauuu

SEQ ID NO: 1757055 - RNA, 19 nt, Artificial Sequence
  Description of Artificial Sequence: Synthetic oligonucleotide
aaaguguuuucuaugguug

SEQ ID NO: 1757056 - RNA, 19 nt, Artificial Sequence
  Description of Artificial Sequence: Synthetic oligonucleotide
aaaggggaggaccucugac

SEQ ID NO: 1757057 - RNA, 19 nt, Artificial Sequence
  Description of Artificial Sequence: Synthetic oligonucleotide
aacauaauagguaucugca

SEQ ID NO: 1757058 - RNA, 19 nt, Artificial Sequence
  Description of Artificial Sequence: Synthetic oligonucleotide
ucagguuaacagaagaaaa

SEQ ID NO: 1757059 - RNA, 19 nt, Artificial Sequence
  Description of Artificial Sequence: Synthetic oligonucleotide
ugugucuacaagcuggaga

SEQ ID NO: 1757060 - RNA, 19 nt, Artificial Sequence
  Description of Artificial Sequence: Synthetic oligonucleotide
aauaucuauggaguauguc

SEQ ID NO: 1757061 - RNA, 19 nt, Artificial Sequence
  Description of Artificial Sequence: Synthetic oligonucleotide
auugauguaacagaauaca

SEQ ID NO: 1757062 - RNA, 19 nt, Artificial Sequence
  Description of Artificial Sequence: Synthetic oligonucleotide
cuuuugauugauguaacag

SEQ ID NO: 1757063 - RNA, 19 nt, Artificial Sequence
  Description of Artificial Sequence: Synthetic oligonucleotide
auaguaguguaacaugucu

SEQ ID NO: 1757064 - RNA, 19 nt, Artificial Sequence
  Description of Artificial Sequence: Synthetic oligonucleotide
aaagcuuucccuucuucgu

SEQ ID NO: 1757065 - RNA, 19 nt, Artificial Sequence
  Description of Artificial Sequence: Synthetic oligonucleotide
auaaccauuaauaucuaug

SEQ ID NO: 1757066 - RNA, 19 nt, Artificial Sequence
  Description of Artificial Sequence: Synthetic oligonucleotide
agaaucaucacaucaccga

SEQ ID NO: 1757067 - RNA, 19 nt, Artificial Sequence
  Description of Artificial Sequence: Synthetic oligonucleotide
uuccaaccaacauaauagg

SEQ ID NO: 1757068 - RNA, 19 nt, Artificial Sequence
  Description of Artificial Sequence: Synthetic oligonucleotide
aaauuaaugccgauaaaau

SEQ ID NO: 1757069 - RNA, 19 nt, Artificial Sequence
  Description of Artificial Sequence: Synthetic oligonucleotide
gauacucuugcccauuuac

SEQ ID NO: 1757070 - RNA, 19 nt, Artificial Sequence
  Description of Artificial Sequence: Synthetic oligonucleotide
aaaacuuuugauugaugua

SEQ ID NO: 1757071 - RNA, 19 nt, Artificial Sequence
  Description of Artificial Sequence: Synthetic oligonucleotide
cagacguuaacauaaucug

SEQ ID NO: 1757072 - RNA, 19 nt, Artificial Sequence
  Description of Artificial Sequence: Synthetic oligonucleotide
uacaagcuggagaugauac

SEQ ID NO: 1757073 - RNA, 19 nt, Artificial Sequence
  Description of Artificial Sequence: Synthetic oligonucleotide
ugcccauuuacugugauca

SEQ ID NO: 1757074 - RNA, 19 nt, Artificial Sequence
  Description of Artificial Sequence: Synthetic oligonucleotide
gaugauuacauuauuuuaa

SEQ ID NO: 1757075 - RNA, 19 nt, Artificial Sequence
  Description of Artificial Sequence: Synthetic oligonucleotide
cuggagaugauacucuugc

SEQ ID NO: 1757076 - RNA, 19 nt, Artificial Sequence
  Description of Artificial Sequence: Synthetic oligonucleotide
uugauguaacagaauacac

SEQ ID NO: 1757077 - RNA, 19 nt, Artificial Sequence
  Description of Artificial Sequence: Synthetic oligonucleotide
gaagcauaguuuuaucuuc

SEQ ID NO: 1757078 - RNA, 19 nt, Artificial Sequence
  Description of Artificial Sequence: Synthetic oligonucleotide
aagaaucaucacaucaccg

SEQ ID NO: 1757079 - RNA, 19 nt, Artificial Sequence
  Description of Artificial Sequence: Synthetic oligonucleotide
ucuucguaacugaucaccc

SEQ ID NO: 1757080 - RNA, 19 nt, Artificial Sequence
  Description of Artificial Sequence: Synthetic oligonucleotide
acaaacugaauugucaaug

SEQ ID NO: 1757081 - RNA, 19 nt, Artificial Sequence
  Description of Artificial Sequence: Synthetic oligonucleotide
ucuuggucauaauauuaag

SEQ ID NO: 1757082 - RNA, 19 nt, Artificial Sequence
  Description of Artificial Sequence: Synthetic oligonucleotide
auagguaucugcacuuucc

SEQ ID NO: 1757083 - RNA, 19 nt, Artificial Sequence
  Description of Artificial Sequence: Synthetic oligonucleotide
auauauugaagccuaguua

SEQ ID NO: 1757084 - RNA, 19 nt, Artificial Sequence
  Description of Artificial Sequence: Synthetic oligonucleotide
aggggaggaccucugaccc

SEQ ID NO: 1757085 - RNA, 19 nt, Artificial Sequence
  Description of Artificial Sequence: Synthetic oligonucleotide
uuccuugugaagcugcccc

SEQ ID NO: 1757086 - RNA, 19 nt, Artificial Sequence
  Description of Artificial Sequence: Synthetic oligonucleotide
uacucuugcccauuuacug

SEQ ID NO: 1757087 - RNA, 19 nt, Artificial Sequence
  Description of Artificial Sequence: Synthetic oligonucleotide
ucagguggaguaaauuccc

SEQ ID NO: 1757088 - RNA, 19 nt, Artificial Sequence
  Description of Artificial Sequence: Synthetic oligonucleotide
acugaauugucaaugagga

SEQ ID NO: 1757089 - RNA, 19 nt, Artificial Sequence
  Description of Artificial Sequence: Synthetic oligonucleotide
ucuaugguuggaucauagg

SEQ ID NO: 1757090 - RNA, 19 nt, Artificial Sequence
  Description of Artificial Sequence: Synthetic oligonucleotide
ucugcagcagaaagaauca

SEQ ID NO: 1757091 - RNA, 19 nt, Artificial Sequence
  Description of Artificial Sequence: Synthetic oligonucleotide
aagccuaguuaauaguagu

SEQ ID NO: 1757092 - RNA, 19 nt, Artificial Sequence
  Description of Artificial Sequence: Synthetic oligonucleotide
ucuuccgggacuuggacug

SEQ ID NO: 1757093 - RNA, 19 nt, Artificial Sequence
  Description of Artificial Sequence: Synthetic oligonucleotide
aacuuuugauugauguaac

SEQ ID NO: 1757094 - RNA, 19 nt, Artificial Sequence
  Description of Artificial Sequence: Synthetic oligonucleotide
ugaugauuacauuauuuua

SEQ ID NO: 1757095 - RNA, 19 nt, Artificial Sequence
  Description of Artificial Sequence: Synthetic oligonucleotide
ugaagccuaguuaauagua

SEQ ID NO: 1757096 - RNA, 19 nt, Artificial Sequence
  Description of Artificial Sequence: Synthetic oligonucleotide
aaccauuaauaucuaugga

SEQ ID NO: 1757097 - RNA, 19 nt, Artificial Sequence
  Description of Artificial Sequence: Synthetic oligonucleotide
cauaggagucaacaaauug

SEQ ID NO: 1757098 - RNA, 19 nt, Artificial Sequence
  Description of Artificial Sequence: Synthetic oligonucleotide
uucuucguaacugaucacc

SEQ ID NO: 1757099 - RNA, 19 nt, Artificial Sequence
  Description of Artificial Sequence: Synthetic oligonucleotide
ugccccaucaaucuuuucu

SEQ ID NO: 1757100 - RNA, 19 nt, Artificial Sequence
  Description of Artificial Sequence: Synthetic oligonucleotide
ccaaaugacaucuuucagg

SEQ ID NO: 1757101 - RNA, 19 nt, Artificial Sequence
  Description of Artificial Sequence: Synthetic oligonucleotide
cuucagguggaguaaauuc

SEQ ID NO: 1757102 - RNA, 19 nt, Artificial Sequence
  Description of Artificial Sequence: Synthetic oligonucleotide
aucaacggcagucugauuu

SEQ ID NO: 1757103 - RNA, 19 nt, Artificial Sequence
  Description of Artificial Sequence: Synthetic oligonucleotide
aggauggcgaucuuccggg

SEQ ID NO: 1757104 - RNA, 19 nt, Artificial Sequence
  Description of Artificial Sequence: Synthetic oligonucleotide
aguaguguaacaugucuau

SEQ ID NO: 1757105 - RNA, 19 nt, Artificial Sequence
  Description of Artificial Sequence: Synthetic oligonucleotide
uggaucauaggagucaaca

SEQ ID NO: 1757106 - RNA, 19 nt, Artificial Sequence
  Description of Artificial Sequence: Synthetic oligonucleotide
uaguuaauaguaguguaac

SEQ ID NO: 1757107 - RNA, 19 nt, Artificial Sequence
  Description of Artificial Sequence: Synthetic oligonucleotide
ugauuacauuauuuuaaac

SEQ ID NO: 1757108 - RNA, 19 nt, Artificial Sequence
  Description of Artificial Sequence: Synthetic oligonucleotide
aacaugucuaucauuuuga

SEQ ID NO: 1757109 - RNA, 19 nt, Artificial Sequence
  Description of Artificial Sequence: Synthetic oligonucleotide
ucaccgagcaugaagacuu

SEQ ID NO: 1757110 - RNA, 19 nt, Artificial Sequence
  Description of Artificial Sequence: Synthetic oligonucleotide
cauaaucugaaaggggagg

SEQ ID NO: 1757111 - RNA, 19 nt, Artificial Sequence
  Description of Artificial Sequence: Synthetic oligonucleotide
ugcacuuuccccaccauau

SEQ ID NO: 1757112 - RNA, 19 nt, Artificial Sequence
  Description of Artificial Sequence: Synthetic oligonucleotide
cuaugguuggaucauagga

SEQ ID NO: 1757113 - RNA, 19 nt, Artificial Sequence
  Description of Artificial Sequence: Synthetic oligonucleotide
gauugauguaacagaauac

SEQ ID NO: 1757114 - RNA, 19 nt, Artificial Sequence
  Description of Artificial Sequence: Synthetic oligonucleotide
aaagcugcguuccaagauu

SEQ ID NO: 1757115 - RNA, 19 nt, Artificial Sequence
  Description of Artificial Sequence: Synthetic oligonucleotide
ucacccuuuccauaugcag

SEQ ID NO: 1757116 - RNA, 19 nt, Artificial Sequence
  Description of Artificial Sequence: Synthetic oligonucleotide
uggauaacuuuaauuacuu

SEQ ID NO: 1757117 - RNA, 19 nt, Artificial Sequence
  Description of Artificial Sequence: Synthetic oligonucleotide
uccaaccaacauaauaggu

SEQ ID NO: 1757118 - RNA, 19 nt, Artificial Sequence
  Description of Artificial Sequence: Synthetic oligonucleotide
cuuuaauuacuucaaaacu

SEQ ID NO: 1757119 - RNA, 19 nt, Artificial Sequence
  Description of Artificial Sequence: Synthetic oligonucleotide
uccaagauucugccaaagc

SEQ ID NO: 1757120 - RNA, 19 nt, Artificial Sequence
  Description of Artificial Sequence: Synthetic oligonucleotide
gaagccuaguuaauaguag

SEQ ID NO: 1757121 - RNA, 19 nt, Artificial Sequence
  Description of Artificial Sequence: Synthetic oligonucleotide
aguuaauaguaguguaaca

SEQ ID NO: 1757122 - RNA, 19 nt, Artificial Sequence
  Description of Artificial Sequence: Synthetic oligonucleotide
ggagaugauacucuugccc

SEQ ID NO: 1757123 - RNA, 19 nt, Artificial Sequence
  Description of Artificial Sequence: Synthetic oligonucleotide
auaugauuguuuaaaauuu

SEQ ID NO: 1757124 - RNA, 19 nt, Artificial Sequence
  Description of Artificial Sequence: Synthetic oligonucleotide
accaacauaauagguaucu

SEQ ID NO: 1757125 - RNA, 19 nt, Artificial Sequence
  Description of Artificial Sequence: Synthetic oligonucleotide
uggucauaauauuaagaaa

SEQ ID NO: 1757126 - RNA, 19 nt, Artificial Sequence
  Description of Artificial Sequence: Synthetic oligonucleotide
agguuaacagaagaaaaca

SEQ ID NO: 1757127 - RNA, 19 nt, Artificial Sequence
  Description of Artificial Sequence: Synthetic oligonucleotide
cuuggucauaauauuaaga

SEQ ID NO: 1757128 - RNA, 19 nt, Artificial Sequence
  Description of Artificial Sequence: Synthetic oligonucleotide
agaccgguagcccaggaug

SEQ ID NO: 1757129 - RNA, 19 nt, Artificial Sequence
  Description of Artificial Sequence: Synthetic oligonucleotide
aaacaucaacggcagucug

SEQ ID NO: 1757130 - RNA, 19 nt, Artificial Sequence
  Description of Artificial Sequence: Synthetic oligonucleotide
ugaaaguguuuucuauggu

SEQ ID NO: 1757131 - RNA, 19 nt, Artificial Sequence
  Description of Artificial Sequence: Synthetic oligonucleotide
uaauaucuauggaguaugu

SEQ ID NO: 1757132 - RNA, 19 nt, Artificial Sequence
  Description of Artificial Sequence: Synthetic oligonucleotide
auuaauaucuauggaguau

SEQ ID NO: 1757133 - RNA, 19 nt, Artificial Sequence
  Description of Artificial Sequence: Synthetic oligonucleotide
gucugauuuuccuuugcag

SEQ ID NO: 1757134 - RNA, 19 nt, Artificial Sequence
  Description of Artificial Sequence: Synthetic oligonucleotide
gucucuagagccgaguucc

SEQ ID NO: 1757135 - RNA, 19 nt, Artificial Sequence
  Description of Artificial Sequence: Synthetic oligonucleotide
gguggaguaaauucccagg

SEQ ID NO: 1757136 - RNA, 19 nt, Artificial Sequence
  Description of Artificial Sequence: Synthetic oligonucleotide
uuugugaaaguguuuucua

SEQ ID NO: 1757137 - RNA, 19 nt, Artificial Sequence
  Description of Artificial Sequence: Synthetic oligonucleotide
gaucacccuuuccauaugc

SEQ ID NO: 1757138 - RNA, 19 nt, Artificial Sequence
  Description of Artificial Sequence: Synthetic oligonucleotide
augaagacuuuccuuguga

SEQ ID NO: 1757139 - RNA, 19 nt, Artificial Sequence
  Description of Artificial Sequence: Synthetic oligonucleotide
agaauacacaagaauauaa

SEQ ID NO: 1757140 - RNA, 19 nt, Artificial Sequence
  Description of Artificial Sequence: Synthetic oligonucleotide
agcaacuugccauggauaa

SEQ ID NO: 1757141 - RNA, 19 nt, Artificial Sequence
  Description of Artificial Sequence: Synthetic oligonucleotide
cacaucaccgagcaugaag

SEQ ID NO: 1757142 - RNA, 19 nt, Artificial Sequence
  Description of Artificial Sequence: Synthetic oligonucleotide
acuuuccuugugaagcugc

SEQ ID NO: 1757143 - RNA, 19 nt, Artificial Sequence
  Description of Artificial Sequence: Synthetic oligonucleotide
cauuuggacagagucagac

SEQ ID NO: 1757144 - RNA, 19 nt, Artificial Sequence
  Description of Artificial Sequence: Synthetic oligonucleotide
ccuucaacaaacugaauug

SEQ ID NO: 1757145 - RNA, 19 nt, Artificial Sequence
  Description of Artificial Sequence: Synthetic oligonucleotide
gacugcggcaucucggcgg

SEQ ID NO: 1757146 - RNA, 19 nt, Artificial Sequence
  Description of Artificial Sequence: Synthetic oligonucleotide
ugcguuccaagauucugcc

SEQ ID NO: 1757147 - RNA, 19 nt, Artificial Sequence
  Description of Artificial Sequence: Synthetic oligonucleotide
auugaaaauaugauuguuu

SEQ ID NO: 1757148 - RNA, 19 nt, Artificial Sequence
  Description of Artificial Sequence: Synthetic oligonucleotide
uaguaguguaacaugucua

SEQ ID NO: 1757149 - RNA, 19 nt, Artificial Sequence
  Description of Artificial Sequence: Synthetic oligonucleotide
gauauauugaagccuaguu

SEQ ID NO: 1757150 - RNA, 19 nt, Artificial Sequence
  Description of Artificial Sequence: Synthetic oligonucleotide
ugaagacuuuccuugugaa

SEQ ID NO: 1757151 - RNA, 19 nt, Artificial Sequence
  Description of Artificial Sequence: Synthetic oligonucleotide
caaauuaagguuugcagcu

SEQ ID NO: 1757152 - RNA, 19 nt, Artificial Sequence
  Description of Artificial Sequence: Synthetic oligonucleotide
auggauaacuuuaauuacu

SEQ ID NO: 1757153 - RNA, 19 nt, Artificial Sequence
  Description of Artificial Sequence: Synthetic oligonucleotide
auuuugaugauuacauuau

SEQ ID NO: 1757154 - RNA, 19 nt, Artificial Sequence
  Description of Artificial Sequence: Synthetic oligonucleotide
gacguuaacauaaucugaa

SEQ ID NO: 1757155 - RNA, 19 nt, Artificial Sequence
  Description of Artificial Sequence: Synthetic oligonucleotide
agguggaguaaauucccag

SEQ ID NO: 1757156 - RNA, 19 nt, Artificial Sequence
  Description of Artificial Sequence: Synthetic oligonucleotide
aguguaacaugucuaucau

SEQ ID NO: 1757157 - RNA, 19 nt, Artificial Sequence
  Description of Artificial Sequence: Synthetic oligonucleotide
uucugcuuccaaaauuauc

SEQ ID NO: 1757158 - RNA, 19 nt, Artificial Sequence
  Description of Artificial Sequence: Synthetic oligonucleotide
uucguaacugaucacccuu

SEQ ID NO: 1757159 - RNA, 19 nt, Artificial Sequence
  Description of Artificial Sequence: Synthetic oligonucleotide
acuuuugauugauguaaca

SEQ ID NO: 1757160 - RNA, 19 nt, Artificial Sequence
  Description of Artificial Sequence: Synthetic oligonucleotide
cuugccauggauaacuuua

SEQ ID NO: 1757161 - RNA, 19 nt, Artificial Sequence
  Description of Artificial Sequence: Synthetic oligonucleotide
cuaguuaauaguaguguaa

SEQ ID NO: 1757162 - RNA, 19 nt, Artificial Sequence
  Description of Artificial Sequence: Synthetic oligonucleotide
aacggcagucugauuuucc

SEQ ID NO: 1757163 - RNA, 19 nt, Artificial Sequence
  Description of Artificial Sequence: Synthetic oligonucleotide
gagucagacguuaacauaa

SEQ ID NO: 1757164 - RNA, 19 nt, Artificial Sequence
  Description of Artificial Sequence: Synthetic oligonucleotide
ucugccaaagcuuucccuu

SEQ ID NO: 1757165 - RNA, 19 nt, Artificial Sequence
  Description of Artificial Sequence: Synthetic oligonucleotide
ugauuuuccuuugcagaag

SEQ ID NO: 1757166 - RNA, 19 nt, Artificial Sequence
  Description of Artificial Sequence: Synthetic oligonucleotide
gaucaacuuugugaaagug

SEQ ID NO: 1757167 - RNA, 19 nt, Artificial Sequence
  Description of Artificial Sequence: Synthetic oligonucleotide
ugauauauugaagccuagu

SEQ ID NO: 1757168 - RNA, 19 nt, Artificial Sequence
  Description of Artificial Sequence: Synthetic oligonucleotide
cugcguuccaagauucugc

SEQ ID NO: 1757169 - RNA, 19 nt, Artificial Sequence
  Description of Artificial Sequence: Synthetic oligonucleotide
auaaucugaaaggggagga

SEQ ID NO: 1757170 - RNA, 19 nt, Artificial Sequence
  Description of Artificial Sequence: Synthetic oligonucleotide
ggcccaaccacaugaaccg

SEQ ID NO: 1757171 - RNA, 19 nt, Artificial Sequence
  Description of Artificial Sequence: Synthetic oligonucleotide
acagagucagacguuaaca

SEQ ID NO: 1757172 - RNA, 19 nt, Artificial Sequence
  Description of Artificial Sequence: Synthetic oligonucleotide
cugugaucaacuuugugaa

SEQ ID NO: 1757173 - RNA, 19 nt, Artificial Sequence
  Description of Artificial Sequence: Synthetic oligonucleotide
uaagguuugcagcuauuuu

SEQ ID NO: 1757174 - RNA, 19 nt, Artificial Sequence
  Description of Artificial Sequence: Synthetic oligonucleotide
ugcuucuucagguggagua

SEQ ID NO: 1757175 - RNA, 19 nt, Artificial Sequence
  Description of Artificial Sequence: Synthetic oligonucleotide
guaacugaucacccuuucc

SEQ ID NO: 1757176 - RNA, 19 nt, Artificial Sequence
  Description of Artificial Sequence: Synthetic oligonucleotide
gcacgcggcauacagagcg

SEQ ID NO: 1757177 - RNA, 19 nt, Artificial Sequence
  Description of Artificial Sequence: Synthetic oligonucleotide
uacugugaucaacuuugug

SEQ ID NO: 1757178 - RNA, 19 nt, Artificial Sequence
  Description of Artificial Sequence: Synthetic oligonucleotide
aauucccaggugucuucag

SEQ ID NO: 1757179 - RNA, 19 nt, Artificial Sequence
  Description of Artificial Sequence: Synthetic oligonucleotide
guuaauaguaguguaacau

SEQ ID NO: 1757180 - RNA, 19 nt, Artificial Sequence
  Description of Artificial Sequence: Synthetic oligonucleotide
augauuguuuaaaauuuga

SEQ ID NO: 1757181 - RNA, 19 nt, Artificial Sequence
  Description of Artificial Sequence: Synthetic oligonucleotide
uugauugauguaacagaau

SEQ ID NO: 1757182 - RNA, 19 nt, Artificial Sequence
  Description of Artificial Sequence: Synthetic oligonucleotide
auaugcagguccuucuuau

SEQ ID NO: 1757183 - RNA, 19 nt, Artificial Sequence
  Description of Artificial Sequence: Synthetic oligonucleotide
aagcauaguuuuaucuuca

SEQ ID NO: 1757184 - RNA, 19 nt, Artificial Sequence
  Description of Artificial Sequence: Synthetic oligonucleotide
uccauaugcagguccuucu

SEQ ID NO: 1757185 - RNA, 19 nt, Artificial Sequence
  Description of Artificial Sequence: Synthetic oligonucleotide
aguaaauucccaggugucu

SEQ ID NO: 1757186 - RNA, 19 nt, Artificial Sequence
  Description of Artificial Sequence: Synthetic oligonucleotide
aagcugcguuccaagauuc

SEQ ID NO: 1757187 - RNA, 19 nt, Artificial Sequence
  Description of Artificial Sequence: Synthetic oligonucleotide
caggauggcgaucuuccgg

SEQ ID NO: 1757188 - RNA, 19 nt, Artificial Sequence
  Description of Artificial Sequence: Synthetic oligonucleotide
acugauauauugaagccua

SEQ ID NO: 1757189 - RNA, 19 nt, Artificial Sequence
  Description of Artificial Sequence: Synthetic oligonucleotide
cucuugcccauuuacugug

SEQ ID NO: 1757190 - RNA, 19 nt, Artificial Sequence
  Description of Artificial Sequence: Synthetic oligonucleotide
uuaagguuugcagcuauuu

SEQ ID NO: 1757191 - RNA, 19 nt, Artificial Sequence
  Description of Artificial Sequence: Synthetic oligonucleotide
acauaaucugaaaggggag

SEQ ID NO: 1757192 - RNA, 19 nt, Artificial Sequence
  Description of Artificial Sequence: Synthetic oligonucleotide
aaccaacauaauagguauc

SEQ ID NO: 1757193 - RNA, 19 nt, Artificial Sequence
  Description of Artificial Sequence: Synthetic oligonucleotide
aggagucaacaaauuggcc

SEQ ID NO: 1757194 - RNA, 19 nt, Artificial Sequence
  Description of Artificial Sequence: Synthetic oligonucleotide
ggaccucugacccaaauga

SEQ ID NO: 1757195 - RNA, 19 nt, Artificial Sequence
  Description of Artificial Sequence: Synthetic oligonucleotide
gccgauaaaauucuugguc

SEQ ID NO: 1757196 - RNA, 19 nt, Artificial Sequence
  Description of Artificial Sequence: Synthetic oligonucleotide
ggucauaauauuaagaaau

SEQ ID NO: 1757197 - RNA, 19 nt, Artificial Sequence
  Description of Artificial Sequence: Synthetic oligonucleotide
ucauaggagucaacaaauu

SEQ ID NO: 1757198 - RNA, 19 nt, Artificial Sequence
  Description of Artificial Sequence: Synthetic oligonucleotide
aacaucaacggcagucuga

SEQ ID NO: 1757199 - RNA, 19 nt, Artificial Sequence
  Description of Artificial Sequence: Synthetic oligonucleotide
aggaccucugacccaaaug

SEQ ID NO: 1757200 - RNA, 19 nt, Artificial Sequence
  Description of Artificial Sequence: Synthetic oligonucleotide
uccuuugcagaagauucca

SEQ ID NO: 1757201 - RNA, 19 nt, Artificial Sequence
  Description of Artificial Sequence: Synthetic oligonucleotide
cugauuuuccuuugcagaa

SEQ ID NO: 1757202 - RNA, 19 nt, Artificial Sequence
  Description of Artificial Sequence: Synthetic oligonucleotide
ggagucaacaaauuggccu

SEQ ID NO: 1757203 - RNA, 19 nt, Artificial Sequence
  Description of Artificial Sequence: Synthetic oligonucleotide
aaauucccaggugucuuca

SEQ ID NO: 1757204 - RNA, 19 nt, Artificial Sequence
  Description of Artificial Sequence: Synthetic oligonucleotide
gaagcugccccaucaaucu

SEQ ID NO: 1757205 - RNA, 19 nt, Artificial Sequence
  Description of Artificial Sequence: Synthetic oligonucleotide
cugauauauugaagccuag

SEQ ID NO: 1757206 - RNA, 19 nt, Artificial Sequence
  Description of Artificial Sequence: Synthetic oligonucleotide
agagucagacguuaacaua

SEQ ID NO: 1757207 - RNA, 19 nt, Artificial Sequence
  Description of Artificial Sequence: Synthetic oligonucleotide
aucuauggaguaugucuga

SEQ ID NO: 1757208 - RNA, 19 nt, Artificial Sequence
  Description of Artificial Sequence: Synthetic oligonucleotide
uuuccccaccauauccagc

SEQ ID NO: 1757209 - RNA, 19 nt, Artificial Sequence
  Description of Artificial Sequence: Synthetic oligonucleotide
uugccauggauaacuuuaa

SEQ ID NO: 1757210 - RNA, 19 nt, Artificial Sequence
  Description of Artificial Sequence: Synthetic oligonucleotide
gucuacaagcuggagauga

SEQ ID NO: 1757211 - RNA, 19 nt, Artificial Sequence
  Description of Artificial Sequence: Synthetic oligonucleotide
caugaagacuuuccuugug

SEQ ID NO: 1757212 - RNA, 19 nt, Artificial Sequence
  Description of Artificial Sequence: Synthetic oligonucleotide
acaugaaccgcggcggcgg

SEQ ID NO: 1757213 - RNA, 19 nt, Artificial Sequence
  Description of Artificial Sequence: Synthetic oligonucleotide
aauugucaaugaggacuuc

SEQ ID NO: 1757214 - RNA, 19 nt, Artificial Sequence
  Description of Artificial Sequence: Synthetic oligonucleotide
cauuaauaucuauggagua

SEQ ID NO: 1757215 - RNA, 19 nt, Artificial Sequence
  Description of Artificial Sequence: Synthetic oligonucleotide
gaucuuccgggacuuggac

SEQ ID NO: 1757216 - RNA, 19 nt, Artificial Sequence
  Description of Artificial Sequence: Synthetic oligonucleotide
ugugaagcugccccaucaa

SEQ ID NO: 1757217 - RNA, 19 nt, Artificial Sequence
  Description of Artificial Sequence: Synthetic oligonucleotide
uucugccaaagcuuucccu

SEQ ID NO: 1757218 - RNA, 19 nt, Artificial Sequence
  Description of Artificial Sequence: Synthetic oligonucleotide
gaccgguagcccaggaugg

SEQ ID NO: 1757219 - RNA, 19 nt, Artificial Sequence
  Description of Artificial Sequence: Synthetic oligonucleotide
auggcgaucuuccgggacu

SEQ ID NO: 1757220 - RNA, 19 nt, Artificial Sequence
  Description of Artificial Sequence: Synthetic oligonucleotide
cugaauugucaaugaggac

SEQ ID NO: 1757221 - RNA, 19 nt, Artificial Sequence
  Description of Artificial Sequence: Synthetic oligonucleotide
uuccaagauucugccaaag

SEQ ID NO: 1757222 - RNA, 19 nt, Artificial Sequence
  Description of Artificial Sequence: Synthetic oligonucleotide
gugucuacaagcuggagau

SEQ ID NO: 1757223 - RNA, 19 nt, Artificial Sequence
  Description of Artificial Sequence: Synthetic oligonucleotide
aaauuaagguuugcagcua

SEQ ID NO: 1757224 - RNA, 19 nt, Artificial Sequence
  Description of Artificial Sequence: Synthetic oligonucleotide
gcauaguuuuaucuucaag

SEQ ID NO: 1757225 - RNA, 19 nt, Artificial Sequence
  Description of Artificial Sequence: Synthetic oligonucleotide
uaaucugaaaggggaggac

SEQ ID NO: 1757226 - RNA, 19 nt, Artificial Sequence
  Description of Artificial Sequence: Synthetic oligonucleotide
augcagguccuucuuauuu

SEQ ID NO: 1757227 - RNA, 19 nt, Artificial Sequence
  Description of Artificial Sequence: Synthetic oligonucleotide
ugugaucaacuuugugaaa

SEQ ID NO: 1757228 - RNA, 19 nt, Artificial Sequence
  Description of Artificial Sequence: Synthetic oligonucleotide
acggcagucugauuuuccu

SEQ ID NO: 1757229 - RNA, 19 nt, Artificial Sequence
  Description of Artificial Sequence: Synthetic oligonucleotide
ucuacaagcuggagaugau

SEQ ID NO: 1757230 - RNA, 19 nt, Artificial Sequence
  Description of Artificial Sequence: Synthetic oligonucleotide
gaguaaauucccagguguc

SEQ ID NO: 1757231 - RNA, 19 nt, Artificial Sequence
  Description of Artificial Sequence: Synthetic oligonucleotide
ugaucacccuuuccauaug

SEQ ID NO: 1757232 - RNA, 19 nt, Artificial Sequence
  Description of Artificial Sequence: Synthetic oligonucleotide
acguuaacauaaucugaaa

SEQ ID NO: 1757233 - RNA, 19 nt, Artificial Sequence
  Description of Artificial Sequence: Synthetic oligonucleotide
gaggacuuccccacagacc

SEQ ID NO: 1757234 - RNA, 19 nt, Artificial Sequence
  Description of Artificial Sequence: Synthetic oligonucleotide
caaccaacauaauagguau

SEQ ID NO: 1757235 - RNA, 19 nt, Artificial Sequence
  Description of Artificial Sequence: Synthetic oligonucleotide
ccgauaaaauucuugguca

SEQ ID NO: 1757236 - RNA, 19 nt, Artificial Sequence
  Description of Artificial Sequence: Synthetic oligonucleotide
ggaguaaauucccaggugu

SEQ ID NO: 1757237 - RNA, 19 nt, Artificial Sequence
  Description of Artificial Sequence: Synthetic oligonucleotide
ugucuaucauuuugaugau

SEQ ID NO: 1757238 - RNA, 19 nt, Artificial Sequence
  Description of Artificial Sequence: Synthetic oligonucleotide
ccuucuucguaacugauca

SEQ ID NO: 1757239 - RNA, 19 nt, Artificial Sequence
  Description of Artificial Sequence: Synthetic oligonucleotide
caaauuggccuucaacaaa

SEQ ID NO: 1757240 - RNA, 19 nt, Artificial Sequence
  Description of Artificial Sequence: Synthetic oligonucleotide
cuagagccgaguuccagga

SEQ ID NO: 1757241 - RNA, 19 nt, Artificial Sequence
  Description of Artificial Sequence: Synthetic oligonucleotide
gggcacgcggcauacagag

SEQ ID NO: 1757242 - RNA, 19 nt, Artificial Sequence
  Description of Artificial Sequence: Synthetic oligonucleotide
agucaacaaauuggccuuc

SEQ ID NO: 1757243 - RNA, 19 nt, Artificial Sequence
  Description of Artificial Sequence: Synthetic oligonucleotide
cagaagcauaguuuuaucu

SEQ ID NO: 1757244 - RNA, 19 nt, Artificial Sequence
  Description of Artificial Sequence: Synthetic oligonucleotide
ucauuuggacagagucaga

SEQ ID NO: 1757245 - RNA, 19 nt, Artificial Sequence
  Description of Artificial Sequence: Synthetic oligonucleotide
uccuugugaagcugcccca

SEQ ID NO: 1757246 - RNA, 19 nt, Artificial Sequence
  Description of Artificial Sequence: Synthetic oligonucleotide
auguaacagaauacacaag

SEQ ID NO: 1757247 - RNA, 19 nt, Artificial Sequence
  Description of Artificial Sequence: Synthetic oligonucleotide
ucguaacugaucacccuuu

SEQ ID NO: 1757248 - RNA, 19 nt, Artificial Sequence
  Description of Artificial Sequence: Synthetic oligonucleotide
auacagagcgcggcggcgg

SEQ ID NO: 1757249 - RNA, 19 nt, Artificial Sequence
  Description of Artificial Sequence: Synthetic oligonucleotide
agaugauacucuugcccau

SEQ ID NO: 1757250 - RNA, 19 nt, Artificial Sequence
  Description of Artificial Sequence: Synthetic oligonucleotide
cagcagaaagaaucaucac

SEQ ID NO: 1757251 - RNA, 19 nt, Artificial Sequence
  Description of Artificial Sequence: Synthetic oligonucleotide
ucaacggcagucugauuuu

SEQ ID NO: 1757252 - RNA, 19 nt, Artificial Sequence
  Description of Artificial Sequence: Synthetic oligonucleotide
uccagcaacuugccaugga

SEQ ID NO: 1757253 - RNA, 19 nt, Artificial Sequence
  Description of Artificial Sequence: Synthetic oligonucleotide
aucaccgagcaugaagacu

SEQ ID NO: 1757254 - RNA, 19 nt, Artificial Sequence
  Description of Artificial Sequence: Synthetic oligonucleotide
uggacagagucagacguua

SEQ ID NO: 1757255 - RNA, 19 nt, Artificial Sequence
  Description of Artificial Sequence: Synthetic oligonucleotide
uggucucuagagccgaguu

SEQ ID NO: 1757256 - RNA, 19 nt, Artificial Sequence
  Description of Artificial Sequence: Synthetic oligonucleotide
agcuuucccuucuucguaa

SEQ ID NO: 1757257 - RNA, 19 nt, Artificial Sequence
  Description of Artificial Sequence: Synthetic oligonucleotide
gagucaacaaauuggccuu

SEQ ID NO: 1757258 - RNA, 19 nt, Artificial Sequence
  Description of Artificial Sequence: Synthetic oligonucleotide
gucagacguuaacauaauc

SEQ ID NO: 1757259 - RNA, 19 nt, Artificial Sequence
  Description of Artificial Sequence: Synthetic oligonucleotide
uccgggacuuggacugcgg

SEQ ID NO: 1757260 - RNA, 19 nt, Artificial Sequence
  Description of Artificial Sequence: Synthetic oligonucleotide
agguuugcagcuauuuuau

SEQ ID NO: 1757261 - RNA, 19 nt, Artificial Sequence
  Description of Artificial Sequence: Synthetic oligonucleotide
ugccauggauaacuuuaau

SEQ ID NO: 1757262 - RNA, 19 nt, Artificial Sequence
  Description of Artificial Sequence: Synthetic oligonucleotide
cuucuucguaacugaucac

SEQ ID NO: 1757263 - RNA, 19 nt, Artificial Sequence
  Description of Artificial Sequence: Synthetic oligonucleotide
cauacagagcgcggcggcg

SEQ ID NO: 1757264 - RNA, 19 nt, Artificial Sequence
  Description of Artificial Sequence: Synthetic oligonucleotide
acucagccccggcccaacc

SEQ ID NO: 1757265 - RNA, 19 nt, Artificial Sequence
  Description of Artificial Sequence: Synthetic oligonucleotide
gguccuucuuauuuccaac

SEQ ID NO: 1757266 - RNA, 19 nt, Artificial Sequence
  Description of Artificial Sequence: Synthetic oligonucleotide
ggauaacuuuaauuacuuc

SEQ ID NO: 1757267 - RNA, 19 nt, Artificial Sequence
  Description of Artificial Sequence: Synthetic oligonucleotide
accgucggcggcgagugcg

SEQ ID NO: 1757268 - RNA, 19 nt, Artificial Sequence
  Description of Artificial Sequence: Synthetic oligonucleotide
acgggcaguuugcuucuuc

SEQ ID NO: 1757269 - RNA, 19 nt, Artificial Sequence
  Description of Artificial Sequence: Synthetic oligonucleotide
ugacgggcaguuugcuucu

SEQ ID NO: 1757270 - RNA, 19 nt, Artificial Sequence
  Description of Artificial Sequence: Synthetic oligonucleotide
ucucuagagccgaguucca

SEQ ID NO: 1757271 - RNA, 19 nt, Artificial Sequence
  Description of Artificial Sequence: Synthetic oligonucleotide
uaauagguaucugcacuuu

SEQ ID NO: 1757272 - RNA, 19 nt, Artificial Sequence
  Description of Artificial Sequence: Synthetic oligonucleotide
uugcccauuuacugugauc

SEQ ID NO: 1757273 - RNA, 19 nt, Artificial Sequence
  Description of Artificial Sequence: Synthetic oligonucleotide
augauacucuugcccauuu

SEQ ID NO: 1757274 - RNA, 19 nt, Artificial Sequence
  Description of Artificial Sequence: Synthetic oligonucleotide
uaaugccgauaaaauucuu

SEQ ID NO: 1757275 - RNA, 19 nt, Artificial Sequence
  Description of Artificial Sequence: Synthetic oligonucleotide
caggcauugguggugcgug

SEQ ID NO: 1757276 - RNA, 19 nt, Artificial Sequence
  Description of Artificial Sequence: Synthetic oligonucleotide
uucaaggaugacgggcagu

SEQ ID NO: 1757277 - RNA, 19 nt, Artificial Sequence
  Description of Artificial Sequence: Synthetic oligonucleotide
ccaaccacaugaaccgcgg

SEQ ID NO: 1757278 - RNA, 19 nt, Artificial Sequence
  Description of Artificial Sequence: Synthetic oligonucleotide
ccaaccaacauaauaggua

SEQ ID NO: 1757279 - RNA, 19 nt, Artificial Sequence
  Description of Artificial Sequence: Synthetic oligonucleotide
uaugcagguccuucuuauu

SEQ ID NO: 1757280 - RNA, 19 nt, Artificial Sequence
  Description of Artificial Sequence: Synthetic oligonucleotide
aaauggaagugaacucauu

SEQ ID NO: 1757281 - RNA, 19 nt, Artificial Sequence
  Description of Artificial Sequence: Synthetic oligonucleotide
guaguguaacaugucuauc

SEQ ID NO: 1757282 - RNA, 19 nt, Artificial Sequence
  Description of Artificial Sequence: Synthetic oligonucleotide
cccaaccacaugaaccgcg

SEQ ID NO: 1757283 - RNA, 19 nt, Artificial Sequence
  Description of Artificial Sequence: Synthetic oligonucleotide
uuccgggacuuggacugcg

SEQ ID NO: 1757284 - RNA, 19 nt, Artificial Sequence
  Description of Artificial Sequence: Synthetic oligonucleotide
acuugccauggauaacuuu

SEQ ID NO: 1757285 - RNA, 19 nt, Artificial Sequence
  Description of Artificial Sequence: Synthetic oligonucleotide
gaauugucaaugaggacuu

SEQ ID NO: 1757286 - RNA, 19 nt, Artificial Sequence
  Description of Artificial Sequence: Synthetic oligonucleotide
gaccucugacccaaaugac

SEQ ID NO: 1757287 - RNA, 19 nt, Artificial Sequence
  Description of Artificial Sequence: Synthetic oligonucleotide
cacaugaaccgcggcggcg

SEQ ID NO: 1757288 - RNA, 19 nt, Artificial Sequence
  Description of Artificial Sequence: Synthetic oligonucleotide
caacuugccauggauaacu

SEQ ID NO: 1757289 - RNA, 19 nt, Artificial Sequence
  Description of Artificial Sequence: Synthetic oligonucleotide
accgagcaugaagacuuuc

SEQ ID NO: 1757290 - RNA, 19 nt, Artificial Sequence
  Description of Artificial Sequence: Synthetic oligonucleotide
ugucuacaagcuggagaug

SEQ ID NO: 1757291 - RNA, 19 nt, Artificial Sequence
  Description of Artificial Sequence: Synthetic oligonucleotide
cagaauacacaagaauaua

SEQ ID NO: 1757292 - RNA, 19 nt, Artificial Sequence
  Description of Artificial Sequence: Synthetic oligonucleotide
auauugaagccuaguuaau

SEQ ID NO: 1757293 - RNA, 19 nt, Artificial Sequence
  Description of Artificial Sequence: Synthetic oligonucleotide
gcagaaagaaucaucacau

SEQ ID NO: 1757294 - RNA, 19 nt, Artificial Sequence
  Description of Artificial Sequence: Synthetic oligonucleotide
cucuagagccgaguuccag

SEQ ID NO: 1757295 - RNA, 19 nt, Artificial Sequence
  Description of Artificial Sequence: Synthetic oligonucleotide
cccaaaugacaucuuucag

SEQ ID NO: 1757296 - RNA, 19 nt, Artificial Sequence
  Description of Artificial Sequence: Synthetic oligonucleotide
auccagcaacuugccaugg

SEQ ID NO: 1757297 - RNA, 19 nt, Artificial Sequence
  Description of Artificial Sequence: Synthetic oligonucleotide
cuugugaagcugccccauc

SEQ ID NO: 1757298 - RNA, 19 nt, Artificial Sequence
  Description of Artificial Sequence: Synthetic oligonucleotide
cugaucacccuuuccauau

SEQ ID NO: 1757299 - RNA, 19 nt, Artificial Sequence
  Description of Artificial Sequence: Synthetic oligonucleotide
acgcggcauacagagcgcg

SEQ ID NO: 1757300 - RNA, 19 nt, Artificial Sequence
  Description of Artificial Sequence: Synthetic oligonucleotide
cucugacccaaaugacauc

SEQ ID NO: 1757301 - RNA, 19 nt, Artificial Sequence
  Description of Artificial Sequence: Synthetic oligonucleotide
agaccgucggcggcgagug

SEQ ID NO: 1757302 - RNA, 19 nt, Artificial Sequence
  Description of Artificial Sequence: Synthetic oligonucleotide
gccuucaacaaacugaauu

SEQ ID NO: 1757303 - RNA, 19 nt, Artificial Sequence
  Description of Artificial Sequence: Synthetic oligonucleotide
cuucaacaaacugaauugu

SEQ ID NO: 1757304 - RNA, 19 nt, Artificial Sequence
  Description of Artificial Sequence: Synthetic oligonucleotide
ccauauccagcaacuugcc

SEQ ID NO: 1757305 - RNA, 19 nt, Artificial Sequence
  Description of Artificial Sequence: Synthetic oligonucleotide
ccuaguuaauaguagugua

SEQ ID NO: 1757306 - RNA, 19 nt, Artificial Sequence
  Description of Artificial Sequence: Synthetic oligonucleotide
cacgcggcauacagagcgc

SEQ ID NO: 1757307 - RNA, 19 nt, Artificial Sequence
  Description of Artificial Sequence: Synthetic oligonucleotide
cggcccaaccacaugaacc

SEQ ID NO: 1757308 - RNA, 19 nt, Artificial Sequence
  Description of Artificial Sequence: Synthetic oligonucleotide
cagagucagacguuaacau

SEQ ID NO: 1757309 - RNA, 19 nt, Artificial Sequence
  Description of Artificial Sequence: Synthetic oligonucleotide
aucacccuuuccauaugca

SEQ ID NO: 1757310 - RNA, 19 nt, Artificial Sequence
  Description of Artificial Sequence: Synthetic oligonucleotide
auauaaccauuaauaucua

SEQ ID NO: 1757311 - RNA, 19 nt, Artificial Sequence
  Description of Artificial Sequence: Synthetic oligonucleotide
cagguggaguaaauuccca

SEQ ID NO: 1757312 - RNA, 19 nt, Artificial Sequence
  Description of Artificial Sequence: Synthetic oligonucleotide
ucaucacaucaccgagcau

SEQ ID NO: 1757313 - RNA, 19 nt, Artificial Sequence
  Description of Artificial Sequence: Synthetic oligonucleotide
ggucucuagagccgaguuc

SEQ ID NO: 1757314 - RNA, 19 nt, Artificial Sequence
  Description of Artificial Sequence: Synthetic oligonucleotide
gccuacucagccccggccc

SEQ ID NO: 1757315 - RNA, 19 nt, Artificial Sequence
  Description of Artificial Sequence: Synthetic oligonucleotide
gcgaucuuccgggacuugg

SEQ ID NO: 1757316 - RNA, 19 nt, Artificial Sequence
  Description of Artificial Sequence: Synthetic oligonucleotide
gcauacagagcgcggcggc

SEQ ID NO: 1757317 - RNA, 19 nt, Artificial Sequence
  Description of Artificial Sequence: Synthetic oligonucleotide
caucucggcggccuacuca

SEQ ID NO: 1757318 - RNA, 19 nt, Artificial Sequence
  Description of Artificial Sequence: Synthetic oligonucleotide
cccauuuacugugaucaac

SEQ ID NO: 1757319 - RNA, 19 nt, Artificial Sequence
  Description of Artificial Sequence: Synthetic oligonucleotide
ccccaucaaucuuuucugc

SEQ ID NO: 1757320 - RNA, 19 nt, Artificial Sequence
  Description of Artificial Sequence: Synthetic oligonucleotide
ggcuccucgggcucagacc

SEQ ID NO: 1757321 - RNA, 19 nt, Artificial Sequence
  Description of Artificial Sequence: Synthetic oligonucleotide
auuaagguuugcagcuauu

SEQ ID NO: 1757322 - RNA, 19 nt, Artificial Sequence
  Description of Artificial Sequence: Synthetic oligonucleotide
cagcaacuugccauggaua

SEQ ID NO: 1757323 - RNA, 19 nt, Artificial Sequence
  Description of Artificial Sequence: Synthetic oligonucleotide
cuucguaacugaucacccu

SEQ ID NO: 1757324 - RNA, 19 nt, Artificial Sequence
  Description of Artificial Sequence: Synthetic oligonucleotide
acagaccgguagcccagga

SEQ ID NO: 1757325 - RNA, 19 nt, Artificial Sequence
  Description of Artificial Sequence: Synthetic oligonucleotide
caugaaccgcggcggcggc

SEQ ID NO: 1757326 - RNA, 19 nt, Artificial Sequence
  Description of Artificial Sequence: Synthetic oligonucleotide
agucagacguuaacauaau

SEQ ID NO: 1757327 - RNA, 19 nt, Artificial Sequence
  Description of Artificial Sequence: Synthetic oligonucleotide
guaaauucccaggugucuu

SEQ ID NO: 1757328 - RNA, 19 nt, Artificial Sequence
  Description of Artificial Sequence: Synthetic oligonucleotide
cugugucuacaagcuggag

SEQ ID NO: 1757329 - RNA, 19 nt, Artificial Sequence
  Description of Artificial Sequence: Synthetic oligonucleotide
ucagaccgucggcggcgag

SEQ ID NO: 1757330 - RNA, 19 nt, Artificial Sequence
  Description of Artificial Sequence: Synthetic oligonucleotide
ucucggcggccuacucagc

SEQ ID NO: 1757331 - RNA, 19 nt, Artificial Sequence
  Description of Artificial Sequence: Synthetic oligonucleotide
caaugaggacuuccccaca

SEQ ID NO: 1757332 - RNA, 19 nt, Artificial Sequence
  Description of Artificial Sequence: Synthetic oligonucleotide
aguauacauuuaacacaau

SEQ ID NO: 1757333 - RNA, 19 nt, Artificial Sequence
  Description of Artificial Sequence: Synthetic oligonucleotide
gggcucagaccgucggcgg

SEQ ID NO: 1757334 - RNA, 19 nt, Artificial Sequence
  Description of Artificial Sequence: Synthetic oligonucleotide
gaugacgggcaguuugcuu

SEQ ID NO: 1757335 - RNA, 19 nt, Artificial Sequence
  Description of Artificial Sequence: Synthetic oligonucleotide
gcucagaccgucggcggcg

SEQ ID NO: 1757336 - RNA, 19 nt, Artificial Sequence
  Description of Artificial Sequence: Synthetic oligonucleotide
cacagaccgguagcccagg

SEQ ID NO: 1757337 - RNA, 19 nt, Artificial Sequence
  Description of Artificial Sequence: Synthetic oligonucleotide
ggccuacucagccccggcc

SEQ ID NO: 1757338 - RNA, 19 nt, Artificial Sequence
  Description of Artificial Sequence: Synthetic oligonucleotide
gccuaguuaauaguagugu

SEQ ID NO: 1757339 - RNA, 19 nt, Artificial Sequence
  Description of Artificial Sequence: Synthetic oligonucleotide
agcugccccaucaaucuuu

SEQ ID NO: 1757340 - RNA, 19 nt, Artificial Sequence
  Description of Artificial Sequence: Synthetic oligonucleotide
caacggcagucugauuuuc

SEQ ID NO: 1757341 - RNA, 19 nt, Artificial Sequence
  Description of Artificial Sequence: Synthetic oligonucleotide
gaugauacucuugcccauu

SEQ ID NO: 1757342 - RNA, 19 nt, Artificial Sequence
  Description of Artificial Sequence: Synthetic oligonucleotide
ccacagaccgguagcccag

SEQ ID NO: 1757343 - RNA, 19 nt, Artificial Sequence
  Description of Artificial Sequence: Synthetic oligonucleotide
cuuccgggacuuggacugc

SEQ ID NO: 1757344 - RNA, 19 nt, Artificial Sequence
  Description of Artificial Sequence: Synthetic oligonucleotide
ggcucagaccgucggcggc

SEQ ID NO: 1757345 - RNA, 19 nt, Artificial Sequence
  Description of Artificial Sequence: Synthetic oligonucleotide
gcggcauacagagcgcggc

SEQ ID NO: 1757346 - RNA, 19 nt, Artificial Sequence
  Description of Artificial Sequence: Synthetic oligonucleotide
gaacucauuuggacagagu

SEQ ID NO: 1757347 - RNA, 19 nt, Artificial Sequence
  Description of Artificial Sequence: Synthetic oligonucleotide
agccgaguuccaggacagg

SEQ ID NO: 1757348 - RNA, 19 nt, Artificial Sequence
  Description of Artificial Sequence: Synthetic oligonucleotide
cugcacuuuccccaccaua

SEQ ID NO: 1757349 - RNA, 19 nt, Artificial Sequence
  Description of Artificial Sequence: Synthetic oligonucleotide
gugaagcugccccaucaau

SEQ ID NO: 1757350 - RNA, 19 nt, Artificial Sequence
  Description of Artificial Sequence: Synthetic oligonucleotide
uacucagccccggcccaac

SEQ ID NO: 1757351 - RNA, 19 nt, Artificial Sequence
  Description of Artificial Sequence: Synthetic oligonucleotide
gcaugaagacuuuccuugu

SEQ ID NO: 1757352 - RNA, 19 nt, Artificial Sequence
  Description of Artificial Sequence: Synthetic oligonucleotide
gcaacuugccauggauaac

SEQ ID NO: 1757353 - RNA, 19 nt, Artificial Sequence
  Description of Artificial Sequence: Synthetic oligonucleotide
gaggaccucugacccaaau

SEQ ID NO: 1757354 - RNA, 19 nt, Artificial Sequence
  Description of Artificial Sequence: Synthetic oligonucleotide
ggaguaugucugaggaaaa

SEQ ID NO: 1757355 - RNA, 19 nt, Artificial Sequence
  Description of Artificial Sequence: Synthetic oligonucleotide
gcuucuucagguggaguaa

SEQ ID NO: 1757356 - RNA, 19 nt, Artificial Sequence
  Description of Artificial Sequence: Synthetic oligonucleotide
caacuuugugaaaguguuu

SEQ ID NO: 1757357 - RNA, 19 nt, Artificial Sequence
  Description of Artificial Sequence: Synthetic oligonucleotide
cguaacugaucacccuuuc

SEQ ID NO: 1757358 - RNA, 19 nt, Artificial Sequence
  Description of Artificial Sequence: Synthetic oligonucleotide
ccgggacuuggacugcggc

SEQ ID NO: 1757359 - RNA, 19 nt, Artificial Sequence
  Description of Artificial Sequence: Synthetic oligonucleotide
ccgguagcccaggauggcg

SEQ ID NO: 1757360 - RNA, 19 nt, Artificial Sequence
  Description of Artificial Sequence: Synthetic oligonucleotide
gggaggaccucugacccaa

SEQ ID NO: 1757361 - RNA, 19 nt, Artificial Sequence
  Description of Artificial Sequence: Synthetic oligonucleotide
guagcccaggauggcgauc

SEQ ID NO: 1757362 - RNA, 19 nt, Artificial Sequence
  Description of Artificial Sequence: Synthetic oligonucleotide
gaccgucggcggcgagugc

SEQ ID NO: 1757363 - RNA, 19 nt, Artificial Sequence
  Description of Artificial Sequence: Synthetic oligonucleotide
cgcggcauacagagcgcgg

SEQ ID NO: 1757364 - RNA, 19 nt, Artificial Sequence
  Description of Artificial Sequence: Synthetic oligonucleotide
ccccggcccaaccacauga

SEQ ID NO: 1757365 - RNA, 19 nt, Artificial Sequence
  Description of Artificial Sequence: Synthetic oligonucleotide
ggggaggaccucugaccca

SEQ ID NO: 1757366 - RNA, 19 nt, Artificial Sequence
  Description of Artificial Sequence: Synthetic oligonucleotide
ccagcaacuugccauggau

SEQ ID NO: 1757367 - RNA, 19 nt, Artificial Sequence
  Description of Artificial Sequence: Synthetic oligonucleotide
gcccauuuacugugaucaa

SEQ ID NO: 1757368 - RNA, 19 nt, Artificial Sequence
  Description of Artificial Sequence: Synthetic oligonucleotide
gcccaaccacaugaaccgc

SEQ ID NO: 1757369 - RNA, 19 nt, Artificial Sequence
  Description of Artificial Sequence: Synthetic oligonucleotide
ggacagagucagacguuaa

SEQ ID NO: 1757370 - RNA, 19 nt, Artificial Sequence
  Description of Artificial Sequence: Synthetic oligonucleotide
gcggccuacucagccccgg

SEQ ID NO: 1757371 - RNA, 19 nt, Artificial Sequence
  Description of Artificial Sequence: Synthetic oligonucleotide
gguuugcagcuauuuuauu

SEQ ID NO: 1757372 - RNA, 19 nt, Artificial Sequence
  Description of Artificial Sequence: Synthetic oligonucleotide
ccuacucagccccggccca

SEQ ID NO: 1757373 - RNA, 19 nt, Artificial Sequence
  Description of Artificial Sequence: Synthetic oligonucleotide
ggcacgcggcauacagagc

SEQ ID NO: 1757374 - RNA, 19 nt, Artificial Sequence
  Description of Artificial Sequence: Synthetic oligonucleotide
cagaccgguagcccaggau

SEQ ID NO: 1757375 - RNA, 19 nt, Artificial Sequence
  Description of Artificial Sequence: Synthetic oligonucleotide
cucagaccgucggcggcga

SEQ ID NO: 1757376 - RNA, 19 nt, Artificial Sequence
  Description of Artificial Sequence: Synthetic oligonucleotide
ggcggccuacucagccccg

SEQ ID NO: 1757377 - RNA, 19 nt, Artificial Sequence
  Description of Artificial Sequence: Synthetic oligonucleotide
ccgucggcggcgagugcgc

SEQ ID NO: 1757378 - RNA, 19 nt, Artificial Sequence
  Description of Artificial Sequence: Synthetic oligonucleotide
cuacucagccccggcccaa

SEQ ID NO: 1757379 - RNA, 19 nt, Artificial Sequence
  Description of Artificial Sequence: Synthetic oligonucleotide
ggggcacgcggcauacaga

SEQ ID NO: 1757380 - RNA, 19 nt, Artificial Sequence
  Description of Artificial Sequence: Synthetic oligonucleotide
ggcgaucuuccgggacuug

SEQ ID NO: 1757381 - RNA, 19 nt, Artificial Sequence
  Description of Artificial Sequence: Synthetic oligonucleotide
ggaugacgggcaguuugcu

SEQ ID NO: 1757382 - RNA, 19 nt, Artificial Sequence
  Description of Artificial Sequence: Synthetic oligonucleotide
cagaccgucggcggcgagu

SEQ ID NO: 1757383 - RNA, 19 nt, Artificial Sequence
  Description of Artificial Sequence: Synthetic oligonucleotide
ccauaugcagguccuucuu

SEQ ID NO: 1757384 - RNA, 19 nt, Artificial Sequence
  Description of Artificial Sequence: Synthetic oligonucleotide
ggcaucucggcggccuacu

SEQ ID NO: 1757385 - RNA, 19 nt, Artificial Sequence
  Description of Artificial Sequence: Synthetic oligonucleotide
caccgagcaugaagacuuu

SEQ ID NO: 1757386 - RNA, 19 nt, Artificial Sequence
  Description of Artificial Sequence: Synthetic oligonucleotide
cggccuacucagccccggc

SEQ ID NO: 1757387 - RNA, 19 nt, Artificial Sequence
  Description of Artificial Sequence: Synthetic oligonucleotide
caaggaugacgggcaguuu

SEQ ID NO: 1757388 - RNA, 19 nt, Artificial Sequence
  Description of Artificial Sequence: Synthetic oligonucleotide
cccggcccaaccacaugaa

SEQ ID NO: 1757389 - RNA, 19 nt, Artificial Sequence
  Description of Artificial Sequence: Synthetic oligonucleotide
ggaggaccucugacccaaa

SEQ ID NO: 1757390 - RNA, 19 nt, Artificial Sequence
  Description of Artificial Sequence: Synthetic oligonucleotide
gacgggcaguuugcuucuu

SEQ ID NO: 1757391 - RNA, 19 nt, Artificial Sequence
  Description of Artificial Sequence: Synthetic oligonucleotide
gcggcaucucggcggccua

SEQ ID NO: 1757392 - RNA, 19 nt, Artificial Sequence
  Description of Artificial Sequence: Synthetic oligonucleotide
gcggcggcggcggcggcuc

SEQ ID NO: 1757393 - RNA, 19 nt, Artificial Sequence
  Description of Artificial Sequence: Synthetic oligonucleotide
cgucggcggcgagugcgcc

SEQ ID NO: 1757394 - RNA, 19 nt, Artificial Sequence
  Description of Artificial Sequence: Synthetic oligonucleotide
cggcaucucggcggccuac

SEQ ID NO: 1757395 - RNA, 19 nt, Artificial Sequence
  Description of Artificial Sequence: Synthetic oligonucleotide
ccgcggcggcggcggcggc

SEQ ID NO: 1757396 - RNA, 19 nt, Artificial Sequence
  Description of Artificial Sequence: Synthetic oligonucleotide
cgcggcggcggcggcggcu

SEQ ID NO: 1757397 - RNA, 19 nt, Artificial Sequence
  Description of Artificial Sequence: Synthetic oligonucleotide
uuuauuaccaacuauacac

SEQ ID NO: 1757398 - RNA, 19 nt, Artificial Sequence
  Description of Artificial Sequence: Synthetic oligonucleotide
aaguuuagcacuuaagguc

SEQ ID NO: 1757399 - RNA, 19 nt, Artificial Sequence
  Description of Artificial Sequence: Synthetic oligonucleotide
aguaaauuggacccaaugc

SEQ ID NO: 1757400 - RNA, 19 nt, Artificial Sequence
  Description of Artificial Sequence: Synthetic oligonucleotide
aauacuguuaauucuaacu

SEQ ID NO: 1757401 - RNA, 19 nt, Artificial Sequence
  Description of Artificial Sequence: Synthetic oligonucleotide
gauuauaucaaaguaguag

SEQ ID NO: 1757402 - RNA, 19 nt, Artificial Sequence
  Description of Artificial Sequence: Synthetic oligonucleotide
uccaacaucauauauaagu

SEQ ID NO: 1757403 - RNA, 19 nt, Artificial Sequence
  Description of Artificial Sequence: Synthetic oligonucleotide
uuuauagauuauaucaaag

SEQ ID NO: 1757404 - RNA, 19 nt, Artificial Sequence
  Description of Artificial Sequence: Synthetic oligonucleotide
cuaaguuuagcacuuaagg

SEQ ID NO: 1757405 - RNA, 19 nt, Artificial Sequence
  Description of Artificial Sequence: Synthetic oligonucleotide
aagaauauaaaugaagccu

SEQ ID NO: 1757406 - RNA, 19 nt, Artificial Sequence
  Description of Artificial Sequence: Synthetic oligonucleotide
auuuacaauguauuuuacc

SEQ ID NO: 1757407 - RNA, 19 nt, Artificial Sequence
  Description of Artificial Sequence: Synthetic oligonucleotide
uauaaaugaagccuuuaag

SEQ ID NO: 1757408 - RNA, 19 nt, Artificial Sequence
  Description of Artificial Sequence: Synthetic oligonucleotide
ugagcaguuauccagaaga

SEQ ID NO: 1757409 - RNA, 19 nt, Artificial Sequence
  Description of Artificial Sequence: Synthetic oligonucleotide
uuagaagugauacaauuca

SEQ ID NO: 1757410 - RNA, 19 nt, Artificial Sequence
  Description of Artificial Sequence: Synthetic oligonucleotide
acuaaaauagcuccauucg

SEQ ID NO: 1757411 - RNA, 19 nt, Artificial Sequence
  Description of Artificial Sequence: Synthetic oligonucleotide
uuaauucuaacuccauugg

SEQ ID NO: 1757412 - RNA, 19 nt, Artificial Sequence
  Description of Artificial Sequence: Synthetic oligonucleotide
acaaacagauuucauuucc

SEQ ID NO: 1757413 - RNA, 19 nt, Artificial Sequence
  Description of Artificial Sequence: Synthetic oligonucleotide
agauaaaauauuuaauaug

SEQ ID NO: 1757414 - RNA, 19 nt, Artificial Sequence
  Description of Artificial Sequence: Synthetic oligonucleotide
cuaucauucuuuuacagag

SEQ ID NO: 1757415 - RNA, 19 nt, Artificial Sequence
  Description of Artificial Sequence: Synthetic oligonucleotide
auuauaucaaaguaguaga

SEQ ID NO: 1757416 - RNA, 19 nt, Artificial Sequence
  Description of Artificial Sequence: Synthetic oligonucleotide
auaaacguaauuuaaaaua

SEQ ID NO: 1757417 - RNA, 19 nt, Artificial Sequence
  Description of Artificial Sequence: Synthetic oligonucleotide
aaaauagaacuucagguau

SEQ ID NO: 1757418 - RNA, 19 nt, Artificial Sequence
  Description of Artificial Sequence: Synthetic oligonucleotide
aaagcuuagggaucgucac

SEQ ID NO: 1757419 - RNA, 19 nt, Artificial Sequence
  Description of Artificial Sequence: Synthetic oligonucleotide
uuuguuaacauuuguagaa

SEQ ID NO: 1757420 - RNA, 19 nt, Artificial Sequence
  Description of Artificial Sequence: Synthetic oligonucleotide
aauagcuccauucgaaucu

SEQ ID NO: 1757421 - RNA, 19 nt, Artificial Sequence
  Description of Artificial Sequence: Synthetic oligonucleotide
uuaccaacuauacacaaac

SEQ ID NO: 1757422 - RNA, 19 nt, Artificial Sequence
  Description of Artificial Sequence: Synthetic oligonucleotide
cugaaaggaaucuucaucc

SEQ ID NO: 1757423 - RNA, 19 nt, Artificial Sequence
  Description of Artificial Sequence: Synthetic oligonucleotide
aauuggacccaaugcaugg

SEQ ID NO: 1757424 - RNA, 19 nt, Artificial Sequence
  Description of Artificial Sequence: Synthetic oligonucleotide
uccacuaccgcucugagcu

SEQ ID NO: 1757425 - RNA, 19 nt, Artificial Sequence
  Description of Artificial Sequence: Synthetic oligonucleotide
uuauagauuauaucaaagu

SEQ ID NO: 1757426 - RNA, 19 nt, Artificial Sequence
  Description of Artificial Sequence: Synthetic oligonucleotide
aaguaguagacaguuaggg

SEQ ID NO: 1757427 - RNA, 19 nt, Artificial Sequence
  Description of Artificial Sequence: Synthetic oligonucleotide
uuaacauuuguagaaaaug

SEQ ID NO: 1757428 - RNA, 19 nt, Artificial Sequence
  Description of Artificial Sequence: Synthetic oligonucleotide
aaauagcuccauucgaauc

SEQ ID NO: 1757429 - RNA, 19 nt, Artificial Sequence
  Description of Artificial Sequence: Synthetic oligonucleotide
guaguagacaguuaggggc

SEQ ID NO: 1757430 - RNA, 19 nt, Artificial Sequence
  Description of Artificial Sequence: Synthetic oligonucleotide
aagugauacaauucaaacu

SEQ ID NO: 1757431 - RNA, 19 nt, Artificial Sequence
  Description of Artificial Sequence: Synthetic oligonucleotide
aauguauaccauuccaaca

SEQ ID NO: 1757432 - RNA, 19 nt, Artificial Sequence
  Description of Artificial Sequence: Synthetic oligonucleotide
aaugacgugacuuggaaua

SEQ ID NO: 1757433 - RNA, 19 nt, Artificial Sequence
  Description of Artificial Sequence: Synthetic oligonucleotide
accaacuauacacaaacag

SEQ ID NO: 1757434 - RNA, 19 nt, Artificial Sequence
  Description of Artificial Sequence: Synthetic oligonucleotide
uuaagaaagaugccugcag

SEQ ID NO: 1757435 - RNA, 19 nt, Artificial Sequence
  Description of Artificial Sequence: Synthetic oligonucleotide
uuaagacaaagugaaagag

SEQ ID NO: 1757436 - RNA, 19 nt, Artificial Sequence
  Description of Artificial Sequence: Synthetic oligonucleotide
agcacguuaagacaaagug

SEQ ID NO: 1757437 - RNA, 19 nt, Artificial Sequence
  Description of Artificial Sequence: Synthetic oligonucleotide
uguuuuguuuagcagaagu

SEQ ID NO: 1757438 - RNA, 19 nt, Artificial Sequence
  Description of Artificial Sequence: Synthetic oligonucleotide
cugagcuugagguucaucg

SEQ ID NO: 1757439 - RNA, 19 nt, Artificial Sequence
  Description of Artificial Sequence: Synthetic oligonucleotide
uauuccucauuaaagaaaa

SEQ ID NO: 1757440 - RNA, 19 nt, Artificial Sequence
  Description of Artificial Sequence: Synthetic oligonucleotide
uguagaaaaugccaauucu

SEQ ID NO: 1757441 - RNA, 19 nt, Artificial Sequence
  Description of Artificial Sequence: Synthetic oligonucleotide
uucaguguuauaaacguaa

SEQ ID NO: 1757442 - RNA, 19 nt, Artificial Sequence
  Description of Artificial Sequence: Synthetic oligonucleotide
augauaauguuuugcuccc

SEQ ID NO: 1757443 - RNA, 19 nt, Artificial Sequence
  Description of Artificial Sequence: Synthetic oligonucleotide
uaaguuuagcacuuaaggu

SEQ ID NO: 1757444 - RNA, 19 nt, Artificial Sequence
  Description of Artificial Sequence: Synthetic oligonucleotide
uuuguuugaguuucacacg

SEQ ID NO: 1757445 - RNA, 19 nt, Artificial Sequence
  Description of Artificial Sequence: Synthetic oligonucleotide
uuuagaagugauacaauuc

SEQ ID NO: 1757446 - RNA, 19 nt, Artificial Sequence
  Description of Artificial Sequence: Synthetic oligonucleotide
ucgguaguaaauuggaccc

SEQ ID NO: 1757447 - RNA, 19 nt, Artificial Sequence
  Description of Artificial Sequence: Synthetic oligonucleotide
uuaaguaggucuuuucuac

SEQ ID NO: 1757448 - RNA, 19 nt, Artificial Sequence
  Description of Artificial Sequence: Synthetic oligonucleotide
agucuauuuuauuaccaac

SEQ ID NO: 1757449 - RNA, 19 nt, Artificial Sequence
  Description of Artificial Sequence: Synthetic oligonucleotide
uguuuauagauuauaucaa

SEQ ID NO: 1757450 - RNA, 19 nt, Artificial Sequence
  Description of Artificial Sequence: Synthetic oligonucleotide
uuuaccuucugaaaggaau

SEQ ID NO: 1757451 - RNA, 19 nt, Artificial Sequence
  Description of Artificial Sequence: Synthetic oligonucleotide
uuggauagaaacaugucuc

SEQ ID NO: 1757452 - RNA, 19 nt, Artificial Sequence
  Description of Artificial Sequence: Synthetic oligonucleotide
acuauacacaaacagauuu

SEQ ID NO: 1757453 - RNA, 19 nt, Artificial Sequence
  Description of Artificial Sequence: Synthetic oligonucleotide
aagaacagcacccuccacu

SEQ ID NO: 1757454 - RNA, 19 nt, Artificial Sequence
  Description of Artificial Sequence: Synthetic oligonucleotide
aguaguagacaguuagggg

SEQ ID NO: 1757455 - RNA, 19 nt, Artificial Sequence
  Description of Artificial Sequence: Synthetic oligonucleotide
uuguuaagaaagaugccug

SEQ ID NO: 1757456 - RNA, 19 nt, Artificial Sequence
  Description of Artificial Sequence: Synthetic oligonucleotide
aagugaaagagggugauca

SEQ ID NO: 1757457 - RNA, 19 nt, Artificial Sequence
  Description of Artificial Sequence: Synthetic oligonucleotide
uaccauuccaacaucauau

SEQ ID NO: 1757458 - RNA, 19 nt, Artificial Sequence
  Description of Artificial Sequence: Synthetic oligonucleotide
cucgguaguaaauuggacc

SEQ ID NO: 1757459 - RNA, 19 nt, Artificial Sequence
  Description of Artificial Sequence: Synthetic oligonucleotide
uuagggaucgucaccaaca

SEQ ID NO: 1757460 - RNA, 19 nt, Artificial Sequence
  Description of Artificial Sequence: Synthetic oligonucleotide
uuccguagcucuuugaccc

SEQ ID NO: 1757461 - RNA, 19 nt, Artificial Sequence
  Description of Artificial Sequence: Synthetic oligonucleotide
agcuaauucacuuuacagu

SEQ ID NO: 1757462 - RNA, 19 nt, Artificial Sequence
  Description of Artificial Sequence: Synthetic oligonucleotide
uccguuauaucauaaacua

SEQ ID NO: 1757463 - RNA, 19 nt, Artificial Sequence
  Description of Artificial Sequence: Synthetic oligonucleotide
aaacagauuucauuuccca

SEQ ID NO: 1757464 - RNA, 19 nt, Artificial Sequence
  Description of Artificial Sequence: Synthetic oligonucleotide
uacuguuaauucuaacucc

SEQ ID NO: 1757465 - RNA, 19 nt, Artificial Sequence
  Description of Artificial Sequence: Synthetic oligonucleotide
guaaauuggacccaaugca

SEQ ID NO: 1757466 - RNA, 19 nt, Artificial Sequence
  Description of Artificial Sequence: Synthetic oligonucleotide
uuauuccucauuaaagaaa

SEQ ID NO: 1757467 - RNA, 19 nt, Artificial Sequence
  Description of Artificial Sequence: Synthetic oligonucleotide
ucuaucauucuuuuacaga

SEQ ID NO: 1757468 - RNA, 19 nt, Artificial Sequence
  Description of Artificial Sequence: Synthetic oligonucleotide
cauggaaucucucuugacc

SEQ ID NO: 1757469 - RNA, 19 nt, Artificial Sequence
  Description of Artificial Sequence: Synthetic oligonucleotide
uaguaaauuggacccaaug

SEQ ID NO: 1757470 - RNA, 19 nt, Artificial Sequence
  Description of Artificial Sequence: Synthetic oligonucleotide
agcgccauugccuuucgcc

SEQ ID NO: 1757471 - RNA, 19 nt, Artificial Sequence
  Description of Artificial Sequence: Synthetic oligonucleotide
ugcauauuauuccucauua

SEQ ID NO: 1757472 - RNA, 19 nt, Artificial Sequence
  Description of Artificial Sequence: Synthetic oligonucleotide
uccaccaauauuuaacuuc

SEQ ID NO: 1757473 - RNA, 19 nt, Artificial Sequence
  Description of Artificial Sequence: Synthetic oligonucleotide
aagcuuagggaucgucacc

SEQ ID NO: 1757474 - RNA, 19 nt, Artificial Sequence
  Description of Artificial Sequence: Synthetic oligonucleotide
uuguuugaguuucacacgu

SEQ ID NO: 1757475 - RNA, 19 nt, Artificial Sequence
  Description of Artificial Sequence: Synthetic oligonucleotide
acuccacuaaguuuagcac

SEQ ID NO: 1757476 - RNA, 19 nt, Artificial Sequence
  Description of Artificial Sequence: Synthetic oligonucleotide
aaaaugacgugacuuggaa

SEQ ID NO: 1757477 - RNA, 19 nt, Artificial Sequence
  Description of Artificial Sequence: Synthetic oligonucleotide
aaucucgguaguaaauugg

SEQ ID NO: 1757478 - RNA, 19 nt, Artificial Sequence
  Description of Artificial Sequence: Synthetic oligonucleotide
auugguaaaaugacgugac

SEQ ID NO: 1757479 - RNA, 19 nt, Artificial Sequence
  Description of Artificial Sequence: Synthetic oligonucleotide
uuuuccguagcucuuugac

SEQ ID NO: 1757480 - RNA, 19 nt, Artificial Sequence
  Description of Artificial Sequence: Synthetic oligonucleotide
aaaauagcuccauucgaau

SEQ ID NO: 1757481 - RNA, 19 nt, Artificial Sequence
  Description of Artificial Sequence: Synthetic oligonucleotide
uguuaagaaagaugccugc

SEQ ID NO: 1757482 - RNA, 19 nt, Artificial Sequence
  Description of Artificial Sequence: Synthetic oligonucleotide
ugcuguuuagaagugauac

SEQ ID NO: 1757483 - RNA, 19 nt, Artificial Sequence
  Description of Artificial Sequence: Synthetic oligonucleotide
uuacagucaccaauaagac

SEQ ID NO: 1757484 - RNA, 19 nt, Artificial Sequence
  Description of Artificial Sequence: Synthetic oligonucleotide
agaaguaugauaauguuuu

SEQ ID NO: 1757485 - RNA, 19 nt, Artificial Sequence
  Description of Artificial Sequence: Synthetic oligonucleotide
agggugaucacuguaacag

SEQ ID NO: 1757486 - RNA, 19 nt, Artificial Sequence
  Description of Artificial Sequence: Synthetic oligonucleotide
ucugauuuaaaagaauaua

SEQ ID NO: 1757487 - RNA, 19 nt, Artificial Sequence
  Description of Artificial Sequence: Synthetic oligonucleotide
auguauaccauuccaacau

SEQ ID NO: 1757488 - RNA, 19 nt, Artificial Sequence
  Description of Artificial Sequence: Synthetic oligonucleotide
ugaguuucacacgugagca

SEQ ID NO: 1757489 - RNA, 19 nt, Artificial Sequence
  Description of Artificial Sequence: Synthetic oligonucleotide
aaauagaacuucagguauc

SEQ ID NO: 1757490 - RNA, 19 nt, Artificial Sequence
  Description of Artificial Sequence: Synthetic oligonucleotide
aauagaacuucagguaucu

SEQ ID NO: 1757491 - RNA, 19 nt, Artificial Sequence
  Description of Artificial Sequence: Synthetic oligonucleotide
aauguuuugcucccacaga

SEQ ID NO: 1757492 - RNA, 19 nt, Artificial Sequence
  Description of Artificial Sequence: Synthetic oligonucleotide
auuauuccucauuaaagaa

SEQ ID NO: 1757493 - RNA, 19 nt, Artificial Sequence
  Description of Artificial Sequence: Synthetic oligonucleotide
uuuaaguaggucuuuucua

SEQ ID NO: 1757494 - RNA, 19 nt, Artificial Sequence
  Description of Artificial Sequence: Synthetic oligonucleotide
auauaaaugaagccuuuaa

SEQ ID NO: 1757495 - RNA, 19 nt, Artificial Sequence
  Description of Artificial Sequence: Synthetic oligonucleotide
ucagguaucugcuaaucaa

SEQ ID NO: 1757496 - RNA, 19 nt, Artificial Sequence
  Description of Artificial Sequence: Synthetic oligonucleotide
cuaccacaaaauacaaagg

SEQ ID NO: 1757497 - RNA, 19 nt, Artificial Sequence
  Description of Artificial Sequence: Synthetic oligonucleotide
cauauggcaagguuuacuc

SEQ ID NO: 1757498 - RNA, 19 nt, Artificial Sequence
  Description of Artificial Sequence: Synthetic oligonucleotide
cauucuuuuacagagguca

SEQ ID NO: 1757499 - RNA, 19 nt, Artificial Sequence
  Description of Artificial Sequence: Synthetic oligonucleotide
ucuguuuuguuugaguuuc

SEQ ID NO: 1757500 - RNA, 19 nt, Artificial Sequence
  Description of Artificial Sequence: Synthetic oligonucleotide
auggaaucucucuugaccu

SEQ ID NO: 1757501 - RNA, 19 nt, Artificial Sequence
  Description of Artificial Sequence: Synthetic oligonucleotide
uuguaaaagcagauaaaau

SEQ ID NO: 1757502 - RNA, 19 nt, Artificial Sequence
  Description of Artificial Sequence: Synthetic oligonucleotide
uccauucgaaucucgguag

SEQ ID NO: 1757503 - RNA, 19 nt, Artificial Sequence
  Description of Artificial Sequence: Synthetic oligonucleotide
cauuucccaacauuuuccg

SEQ ID NO: 1757504 - RNA, 19 nt, Artificial Sequence
  Description of Artificial Sequence: Synthetic oligonucleotide
gaaucucgguaguaaauug

SEQ ID NO: 1757505 - RNA, 19 nt, Artificial Sequence
  Description of Artificial Sequence: Synthetic oligonucleotide
uaaaaugacgugacuugga

SEQ ID NO: 1757506 - RNA, 19 nt, Artificial Sequence
  Description of Artificial Sequence: Synthetic oligonucleotide
guaaaaugacgugacuugg

SEQ ID NO: 1757507 - RNA, 19 nt, Artificial Sequence
  Description of Artificial Sequence: Synthetic oligonucleotide
auagaaacaugucucuccu

SEQ ID NO: 1757508 - RNA, 19 nt, Artificial Sequence
  Description of Artificial Sequence: Synthetic oligonucleotide
gcauacaggauguuuauag

SEQ ID NO: 1757509 - RNA, 19 nt, Artificial Sequence
  Description of Artificial Sequence: Synthetic oligonucleotide
aacagauuucauuucccaa

SEQ ID NO: 1757510 - RNA, 19 nt, Artificial Sequence
  Description of Artificial Sequence: Synthetic oligonucleotide
uuuggcagaagcacguuaa

SEQ ID NO: 1757511 - RNA, 19 nt, Artificial Sequence
  Description of Artificial Sequence: Synthetic oligonucleotide
aaaagcuuagggaucguca

SEQ ID NO: 1757512 - RNA, 19 nt, Artificial Sequence
  Description of Artificial Sequence: Synthetic oligonucleotide
caaacagauuucauuuccc

SEQ ID NO: 1757513 - RNA, 19 nt, Artificial Sequence
  Description of Artificial Sequence: Synthetic oligonucleotide
gguaaaaugacgugacuug

SEQ ID NO: 1757514 - RNA, 19 nt, Artificial Sequence
  Description of Artificial Sequence: Synthetic oligonucleotide
uuucccaacauuuuccgua

SEQ ID NO: 1757515 - RNA, 19 nt, Artificial Sequence
  Description of Artificial Sequence: Synthetic oligonucleotide
uuggcuagcgccauugccu

SEQ ID NO: 1757516 - RNA, 19 nt, Artificial Sequence
  Description of Artificial Sequence: Synthetic oligonucleotide
aucauauauaaguuauuaa

SEQ ID NO: 1757517 - RNA, 19 nt, Artificial Sequence
  Description of Artificial Sequence: Synthetic oligonucleotide
auucuaacuccauugguaa

SEQ ID NO: 1757518 - RNA, 19 nt, Artificial Sequence
  Description of Artificial Sequence: Synthetic oligonucleotide
aauucuaacuccauuggua

SEQ ID NO: 1757519 - RNA, 19 nt, Artificial Sequence
  Description of Artificial Sequence: Synthetic oligonucleotide
uuacagaggucaaggaaga

SEQ ID NO: 1757520 - RNA, 19 nt, Artificial Sequence
  Description of Artificial Sequence: Synthetic oligonucleotide
uccuuuguuuuguuuagca

SEQ ID NO: 1757521 - RNA, 19 nt, Artificial Sequence
  Description of Artificial Sequence: Synthetic oligonucleotide
uucaucgucgaugaucugc

SEQ ID NO: 1757522 - RNA, 19 nt, Artificial Sequence
  Description of Artificial Sequence: Synthetic oligonucleotide
gauaauguuuugcucccac

SEQ ID NO: 1757523 - RNA, 19 nt, Artificial Sequence
  Description of Artificial Sequence: Synthetic oligonucleotide
accgcucugagcuugaggu

SEQ ID NO: 1757524 - RNA, 19 nt, Artificial Sequence
  Description of Artificial Sequence: Synthetic oligonucleotide
gcuaauucacuuuacaguc

SEQ ID NO: 1757525 - RNA, 19 nt, Artificial Sequence
  Description of Artificial Sequence: Synthetic oligonucleotide
aacuucagguaucugcuaa

SEQ ID NO: 1757526 - RNA, 19 nt, Artificial Sequence
  Description of Artificial Sequence: Synthetic oligonucleotide
cacguuaagacaaagugaa

SEQ ID NO: 1757527 - RNA, 19 nt, Artificial Sequence
  Description of Artificial Sequence: Synthetic oligonucleotide
agcacuuaaggucucuuca

SEQ ID NO: 1757528 - RNA, 19 nt, Artificial Sequence
  Description of Artificial Sequence: Synthetic oligonucleotide
accaauaagacaauuguau

SEQ ID NO: 1757529 - RNA, 19 nt, Artificial Sequence
  Description of Artificial Sequence: Synthetic oligonucleotide
ucaucgucgaugaucugca

SEQ ID NO: 1757530 - RNA, 19 nt, Artificial Sequence
  Description of Artificial Sequence: Synthetic oligonucleotide
cacgugagcaguuauccag

SEQ ID NO: 1757531 - RNA, 19 nt, Artificial Sequence
  Description of Artificial Sequence: Synthetic oligonucleotide
ucgucgaugaucugcacac

SEQ ID NO: 1757532 - RNA, 19 nt, Artificial Sequence
  Description of Artificial Sequence: Synthetic oligonucleotide
agaaacaugucucuccuuu

SEQ ID NO: 1757533 - RNA, 19 nt, Artificial Sequence
  Description of Artificial Sequence: Synthetic oligonucleotide
augaucugcacaccucgac

SEQ ID NO: 1757534 - RNA, 19 nt, Artificial Sequence
  Description of Artificial Sequence: Synthetic oligonucleotide
cucuaucauucuuuuacag

SEQ ID NO: 1757535 - RNA, 19 nt, Artificial Sequence
  Description of Artificial Sequence: Synthetic oligonucleotide
acaaacuccacuaaguuua

SEQ ID NO: 1757536 - RNA, 19 nt, Artificial Sequence
  Description of Artificial Sequence: Synthetic oligonucleotide
agugaaagagggugaucac

SEQ ID NO: 1757537 - RNA, 19 nt, Artificial Sequence
  Description of Artificial Sequence: Synthetic oligonucleotide
caguuauccagaagaacag

SEQ ID NO: 1757538 - RNA, 19 nt, Artificial Sequence
  Description of Artificial Sequence: Synthetic oligonucleotide
uugagguucaucgucgaug

SEQ ID NO: 1757539 - RNA, 19 nt, Artificial Sequence
  Description of Artificial Sequence: Synthetic oligonucleotide
ucucuaucauucuuuuaca

SEQ ID NO: 1757540 - RNA, 19 nt, Artificial Sequence
  Description of Artificial Sequence: Synthetic oligonucleotide
aaacguaauuuaaaauacu

SEQ ID NO: 1757541 - RNA, 19 nt, Artificial Sequence
  Description of Artificial Sequence: Synthetic oligonucleotide
guuuauagauuauaucaaa

SEQ ID NO: 1757542 - RNA, 19 nt, Artificial Sequence
  Description of Artificial Sequence: Synthetic oligonucleotide
cauauuauuccucauuaaa

SEQ ID NO: 1757543 - RNA, 19 nt, Artificial Sequence
  Description of Artificial Sequence: Synthetic oligonucleotide
uggauagaaacaugucucu

SEQ ID NO: 1757544 - RNA, 19 nt, Artificial Sequence
  Description of Artificial Sequence: Synthetic oligonucleotide
uaucaaaguaguagacagu

SEQ ID NO: 1757545 - RNA, 19 nt, Artificial Sequence
  Description of Artificial Sequence: Synthetic oligonucleotide
uauggcaagguuuacucuu

SEQ ID NO: 1757546 - RNA, 19 nt, Artificial Sequence
  Description of Artificial Sequence: Synthetic oligonucleotide
aaaugacgugacuuggaau

SEQ ID NO: 1757547 - RNA, 19 nt, Artificial Sequence
  Description of Artificial Sequence: Synthetic oligonucleotide
aaaugccaauucucugguc

SEQ ID NO: 1757548 - RNA, 19 nt, Artificial Sequence
  Description of Artificial Sequence: Synthetic oligonucleotide
aguuuagcacuuaaggucu

SEQ ID NO: 1757549 - RNA, 19 nt, Artificial Sequence
  Description of Artificial Sequence: Synthetic oligonucleotide
acagcuaauucacuuuaca

SEQ ID NO: 1757550 - RNA, 19 nt, Artificial Sequence
  Description of Artificial Sequence: Synthetic oligonucleotide
aacagcuaauucacuuuac

SEQ ID NO: 1757551 - RNA, 19 nt, Artificial Sequence
  Description of Artificial Sequence: Synthetic oligonucleotide
uagcagaaguaugauaaug

SEQ ID NO: 1757552 - RNA, 19 nt, Artificial Sequence
  Description of Artificial Sequence: Synthetic oligonucleotide
agguucaucgucgaugauc

SEQ ID NO: 1757553 - RNA, 19 nt, Artificial Sequence
  Description of Artificial Sequence: Synthetic oligonucleotide
gaaguaugauaauguuuug

SEQ ID NO: 1757554 - RNA, 19 nt, Artificial Sequence
  Description of Artificial Sequence: Synthetic oligonucleotide
aaagcagauaaaauauuua

SEQ ID NO: 1757555 - RNA, 19 nt, Artificial Sequence
  Description of Artificial Sequence: Synthetic oligonucleotide
auacgacucugcuucuugg

SEQ ID NO: 1757556 - RNA, 19 nt, Artificial Sequence
  Description of Artificial Sequence: Synthetic oligonucleotide
uagggaucgucaccaacag

SEQ ID NO: 1757557 - RNA, 19 nt, Artificial Sequence
  Description of Artificial Sequence: Synthetic oligonucleotide
agaauauaaaugaagccuu

SEQ ID NO: 1757558 - RNA, 19 nt, Artificial Sequence
  Description of Artificial Sequence: Synthetic oligonucleotide
acuaaguuuagcacuuaag

SEQ ID NO: 1757559 - RNA, 19 nt, Artificial Sequence
  Description of Artificial Sequence: Synthetic oligonucleotide
uguuuagaagugauacaau

SEQ ID NO: 1757560 - RNA, 19 nt, Artificial Sequence
  Description of Artificial Sequence: Synthetic oligonucleotide
uauaccauuccaacaucau

SEQ ID NO: 1757561 - RNA, 19 nt, Artificial Sequence
  Description of Artificial Sequence: Synthetic oligonucleotide
ggcagaagcacguuaagac

SEQ ID NO: 1757562 - RNA, 19 nt, Artificial Sequence
  Description of Artificial Sequence: Synthetic oligonucleotide
uguauaccauuccaacauc

SEQ ID NO: 1757563 - RNA, 19 nt, Artificial Sequence
  Description of Artificial Sequence: Synthetic oligonucleotide
cuaaaauagcuccauucga

SEQ ID NO: 1757564 - RNA, 19 nt, Artificial Sequence
  Description of Artificial Sequence: Synthetic oligonucleotide
accaauauuuaacuucuuu

SEQ ID NO: 1757565 - RNA, 19 nt, Artificial Sequence
  Description of Artificial Sequence: Synthetic oligonucleotide
aaagagggugaucacugua

SEQ ID NO: 1757566 - RNA, 19 nt, Artificial Sequence
  Description of Artificial Sequence: Synthetic oligonucleotide
accuugcgcuuguaaaagc

SEQ ID NO: 1757567 - RNA, 19 nt, Artificial Sequence
  Description of Artificial Sequence: Synthetic oligonucleotide
acuguuaauucuaacucca

SEQ ID NO: 1757568 - RNA, 19 nt, Artificial Sequence
  Description of Artificial Sequence: Synthetic oligonucleotide
uccacuaaguuuagcacuu

SEQ ID NO: 1757569 - RNA, 19 nt, Artificial Sequence
  Description of Artificial Sequence: Synthetic oligonucleotide
cacacgugagcaguuaucc

SEQ ID NO: 1757570 - RNA, 19 nt, Artificial Sequence
  Description of Artificial Sequence: Synthetic oligonucleotide
ugguaaaaugacgugacuu

SEQ ID NO: 1757571 - RNA, 19 nt, Artificial Sequence
  Description of Artificial Sequence: Synthetic oligonucleotide
caagucuauuuuauuacca

SEQ ID NO: 1757572 - RNA, 19 nt, Artificial Sequence
  Description of Artificial Sequence: Synthetic oligonucleotide
gucaccaauaagacaauug

SEQ ID NO: 1757573 - RNA, 19 nt, Artificial Sequence
  Description of Artificial Sequence: Synthetic oligonucleotide
auaauguuuugcucccaca

SEQ ID NO: 1757574 - RNA, 19 nt, Artificial Sequence
  Description of Artificial Sequence: Synthetic oligonucleotide
gaucugcacaccucgacga

SEQ ID NO: 1757575 - RNA, 19 nt, Artificial Sequence
  Description of Artificial Sequence: Synthetic oligonucleotide
ucaguguuauaaacguaau

SEQ ID NO: 1757576 - RNA, 19 nt, Artificial Sequence
  Description of Artificial Sequence: Synthetic oligonucleotide
auccguuauaucauaaacu

SEQ ID NO: 1757577 - RNA, 19 nt, Artificial Sequence
  Description of Artificial Sequence: Synthetic oligonucleotide
ucccauauggcaagguuua

SEQ ID NO: 1757578 - RNA, 19 nt, Artificial Sequence
  Description of Artificial Sequence: Synthetic oligonucleotide
auguauuuuaccagcucag

SEQ ID NO: 1757579 - RNA, 19 nt, Artificial Sequence
  Description of Artificial Sequence: Synthetic oligonucleotide
uuuuggcagaagcacguua

SEQ ID NO: 1757580 - RNA, 19 nt, Artificial Sequence
  Description of Artificial Sequence: Synthetic oligonucleotide
ucgaaucucgguaguaaau

SEQ ID NO: 1757581 - RNA, 19 nt, Artificial Sequence
  Description of Artificial Sequence: Synthetic oligonucleotide
cagaaucugcauacgacuc

SEQ ID NO: 1757582 - RNA, 19 nt, Artificial Sequence
  Description of Artificial Sequence: Synthetic oligonucleotide
gacaguuaggggccugugc

SEQ ID NO: 1757583 - RNA, 19 nt, Artificial Sequence
  Description of Artificial Sequence: Synthetic oligonucleotide
ucucgguaguaaauuggac

SEQ ID NO: 1757584 - RNA, 19 nt, Artificial Sequence
  Description of Artificial Sequence: Synthetic oligonucleotide
uugguaaaaugacgugacu

SEQ ID NO: 1757585 - RNA, 19 nt, Artificial Sequence
  Description of Artificial Sequence: Synthetic oligonucleotide
ucauccguuauaucauaaa

SEQ ID NO: 1757586 - RNA, 19 nt, Artificial Sequence
  Description of Artificial Sequence: Synthetic oligonucleotide
uuggcagaagcacguuaag

SEQ ID NO: 1757587 - RNA, 19 nt, Artificial Sequence
  Description of Artificial Sequence: Synthetic oligonucleotide
augcauggaaucucucuug

SEQ ID NO: 1757588 - RNA, 19 nt, Artificial Sequence
  Description of Artificial Sequence: Synthetic oligonucleotide
uucgaaucucgguaguaaa

SEQ ID NO: 1757589 - RNA, 19 nt, Artificial Sequence
  Description of Artificial Sequence: Synthetic oligonucleotide
cauuccaacaucauauaua

SEQ ID NO: 1757590 - RNA, 19 nt, Artificial Sequence
  Description of Artificial Sequence: Synthetic oligonucleotide
ugcgcuuguaaaagcagau

SEQ ID NO: 1757591 - RNA, 19 nt, Artificial Sequence
  Description of Artificial Sequence: Synthetic oligonucleotide
ugagcuugagguucaucgu

SEQ ID NO: 1757592 - RNA, 19 nt, Artificial Sequence
  Description of Artificial Sequence: Synthetic oligonucleotide
gcaguuauccagaagaaca

SEQ ID NO: 1757593 - RNA, 19 nt, Artificial Sequence
  Description of Artificial Sequence: Synthetic oligonucleotide
uaucccauauggcaagguu

SEQ ID NO: 1757594 - RNA, 19 nt, Artificial Sequence
  Description of Artificial Sequence: Synthetic oligonucleotide
auauggcaagguuuacucu

SEQ ID NO: 1757595 - RNA, 19 nt, Artificial Sequence
  Description of Artificial Sequence: Synthetic oligonucleotide
caguaugcuguuuagaagu

SEQ ID NO: 1757596 - RNA, 19 nt, Artificial Sequence
  Description of Artificial Sequence: Synthetic oligonucleotide
aaggaaucuucauccguua

SEQ ID NO: 1757597 - RNA, 19 nt, Artificial Sequence
  Description of Artificial Sequence: Synthetic oligonucleotide
uuccaacaucauauauaag

SEQ ID NO: 1757598 - RNA, 19 nt, Artificial Sequence
  Description of Artificial Sequence: Synthetic oligonucleotide
gaagcacguuaagacaaag

SEQ ID NO: 1757599 - RNA, 19 nt, Artificial Sequence
  Description of Artificial Sequence: Synthetic oligonucleotide
aguuucacacgugagcagu

SEQ ID NO: 1757600 - RNA, 19 nt, Artificial Sequence
  Description of Artificial Sequence: Synthetic oligonucleotide
agggaucgucaccaacagc

SEQ ID NO: 1757601 - RNA, 19 nt, Artificial Sequence
  Description of Artificial Sequence: Synthetic oligonucleotide
agaagugauacaauucaaa

SEQ ID NO: 1757602 - RNA, 19 nt, Artificial Sequence
  Description of Artificial Sequence: Synthetic oligonucleotide
agcuugagguucaucgucg

SEQ ID NO: 1757603 - RNA, 19 nt, Artificial Sequence
  Description of Artificial Sequence: Synthetic oligonucleotide
auaccauuccaacaucaua

SEQ ID NO: 1757604 - RNA, 19 nt, Artificial Sequence
  Description of Artificial Sequence: Synthetic oligonucleotide
ucauucuuuuacagagguc

SEQ ID NO: 1757605 - RNA, 19 nt, Artificial Sequence
  Description of Artificial Sequence: Synthetic oligonucleotide
uuagcagaaguaugauaau

SEQ ID NO: 1757606 - RNA, 19 nt, Artificial Sequence
  Description of Artificial Sequence: Synthetic oligonucleotide
caucauauauaaguuauua

SEQ ID NO: 1757607 - RNA, 19 nt, Artificial Sequence
  Description of Artificial Sequence: Synthetic oligonucleotide
uaccgcucugagcuugagg

SEQ ID NO: 1757608 - RNA, 19 nt, Artificial Sequence
  Description of Artificial Sequence: Synthetic oligonucleotide
caauaagacaauuguauau

SEQ ID NO: 1757609 - RNA, 19 nt, Artificial Sequence
  Description of Artificial Sequence: Synthetic oligonucleotide
caauguauuuuaccagcuc

SEQ ID NO: 1757610 - RNA, 19 nt, Artificial Sequence
  Description of Artificial Sequence: Synthetic oligonucleotide
cagaagcacguuaagacaa

SEQ ID NO: 1757611 - RNA, 19 nt, Artificial Sequence
  Description of Artificial Sequence: Synthetic oligonucleotide
cauacaggauguuuauaga

SEQ ID NO: 1757612 - RNA, 19 nt, Artificial Sequence
  Description of Artificial Sequence: Synthetic oligonucleotide
aucugauuuaaaagaauau

SEQ ID NO: 1757613 - RNA, 19 nt, Artificial Sequence
  Description of Artificial Sequence: Synthetic oligonucleotide
agcuuagggaucgucacca

SEQ ID NO: 1757614 - RNA, 19 nt, Artificial Sequence
  Description of Artificial Sequence: Synthetic oligonucleotide
uggaaucucucuugaccug

SEQ ID NO: 1757615 - RNA, 19 nt, Artificial Sequence
  Description of Artificial Sequence: Synthetic oligonucleotide
gaaaggaaucuucauccgu

SEQ ID NO: 1757616 - RNA, 19 nt, Artificial Sequence
  Description of Artificial Sequence: Synthetic oligonucleotide
cuaauucacuuuacaguca

SEQ ID NO: 1757617 - RNA, 19 nt, Artificial Sequence
  Description of Artificial Sequence: Synthetic oligonucleotide
cuuagggaucgucaccaac

SEQ ID NO: 1757618 - RNA, 19 nt, Artificial Sequence
  Description of Artificial Sequence: Synthetic oligonucleotide
agaaagaugccugcagggu

SEQ ID NO: 1757619 - RNA, 19 nt, Artificial Sequence
  Description of Artificial Sequence: Synthetic oligonucleotide
uuggaauauggcagucuuc

SEQ ID NO: 1757620 - RNA, 19 nt, Artificial Sequence
  Description of Artificial Sequence: Synthetic oligonucleotide
auuucccaacauuuuccgu

SEQ ID NO: 1757621 - RNA, 19 nt, Artificial Sequence
  Description of Artificial Sequence: Synthetic oligonucleotide
ucucucuugaccugcugua

SEQ ID NO: 1757622 - RNA, 19 nt, Artificial Sequence
  Description of Artificial Sequence: Synthetic oligonucleotide
acaauguauuuuaccagcu

SEQ ID NO: 1757623 - RNA, 19 nt, Artificial Sequence
  Description of Artificial Sequence: Synthetic oligonucleotide
auagcuccauucgaaucuc

SEQ ID NO: 1757624 - RNA, 19 nt, Artificial Sequence
  Description of Artificial Sequence: Synthetic oligonucleotide
uucacacgugagcaguuau

SEQ ID NO: 1757625 - RNA, 19 nt, Artificial Sequence
  Description of Artificial Sequence: Synthetic oligonucleotide
agacaauuguauauguuuu

SEQ ID NO: 1757626 - RNA, 19 nt, Artificial Sequence
  Description of Artificial Sequence: Synthetic oligonucleotide
ucacacgugagcaguuauc

SEQ ID NO: 1757627 - RNA, 19 nt, Artificial Sequence
  Description of Artificial Sequence: Synthetic oligonucleotide
aagcacguuaagacaaagu

SEQ ID NO: 1757628 - RNA, 19 nt, Artificial Sequence
  Description of Artificial Sequence: Synthetic oligonucleotide
gaaucuucauccguuauau

SEQ ID NO: 1757629 - RNA, 19 nt, Artificial Sequence
  Description of Artificial Sequence: Synthetic oligonucleotide
uagcuccauucgaaucucg

SEQ ID NO: 1757630 - RNA, 19 nt, Artificial Sequence
  Description of Artificial Sequence: Synthetic oligonucleotide
ucgaugaucugcacaccuc

SEQ ID NO: 1757631 - RNA, 19 nt, Artificial Sequence
  Description of Artificial Sequence: Synthetic oligonucleotide
ccaacuauacacaaacaga

SEQ ID NO: 1757632 - RNA, 19 nt, Artificial Sequence
  Description of Artificial Sequence: Synthetic oligonucleotide
aacuauacacaaacagauu

SEQ ID NO: 1757633 - RNA, 19 nt, Artificial Sequence
  Description of Artificial Sequence: Synthetic oligonucleotide
caacaucauauauaaguua

SEQ ID NO: 1757634 - RNA, 19 nt, Artificial Sequence
  Description of Artificial Sequence: Synthetic oligonucleotide
uggcagaagcacguuaaga

SEQ ID NO: 1757635 - RNA, 19 nt, Artificial Sequence
  Description of Artificial Sequence: Synthetic oligonucleotide
cacuguaacagagucaaaa

SEQ ID NO: 1757636 - RNA, 19 nt, Artificial Sequence
  Description of Artificial Sequence: Synthetic oligonucleotide
uucuaacuccauugguaaa

SEQ ID NO: 1757637 - RNA, 19 nt, Artificial Sequence
  Description of Artificial Sequence: Synthetic oligonucleotide
uagcacuuaaggucucuuc

SEQ ID NO: 1757638 - RNA, 19 nt, Artificial Sequence
  Description of Artificial Sequence: Synthetic oligonucleotide
uuaggggccugugcaaacc

SEQ ID NO: 1757639 - RNA, 19 nt, Artificial Sequence
  Description of Artificial Sequence: Synthetic oligonucleotide
auuuuccguagcucuuuga

SEQ ID NO: 1757640 - RNA, 19 nt, Artificial Sequence
  Description of Artificial Sequence: Synthetic oligonucleotide
guuuagcagaaguaugaua

SEQ ID NO: 1757641 - RNA, 19 nt, Artificial Sequence
  Description of Artificial Sequence: Synthetic oligonucleotide
uuuagcacuuaaggucucu

SEQ ID NO: 1757642 - RNA, 19 nt, Artificial Sequence
  Description of Artificial Sequence: Synthetic oligonucleotide
acccaaugcauggaaucuc

SEQ ID NO: 1757643 - RNA, 19 nt, Artificial Sequence
  Description of Artificial Sequence: Synthetic oligonucleotide
ucugcacaccucgacgagc

SEQ ID NO: 1757644 - RNA, 19 nt, Artificial Sequence
  Description of Artificial Sequence: Synthetic oligonucleotide
aucucgguaguaaauugga

SEQ ID NO: 1757645 - RNA, 19 nt, Artificial Sequence
  Description of Artificial Sequence: Synthetic oligonucleotide
agcuccauucgaaucucgg

SEQ ID NO: 1757646 - RNA, 19 nt, Artificial Sequence
  Description of Artificial Sequence: Synthetic oligonucleotide
auucgaaucucgguaguaa

SEQ ID NO: 1757647 - RNA, 19 nt, Artificial Sequence
  Description of Artificial Sequence: Synthetic oligonucleotide
aggauguuuauagauuaua

SEQ ID NO: 1757648 - RNA, 19 nt, Artificial Sequence
  Description of Artificial Sequence: Synthetic oligonucleotide
gaucgucaccaacagcuaa

SEQ ID NO: 1757649 - RNA, 19 nt, Artificial Sequence
  Description of Artificial Sequence: Synthetic oligonucleotide
gcacuuaaggucucuucag

SEQ ID NO: 1757650 - RNA, 19 nt, Artificial Sequence
  Description of Artificial Sequence: Synthetic oligonucleotide
gagggugaucacuguaaca

SEQ ID NO: 1757651 - RNA, 19 nt, Artificial Sequence
  Description of Artificial Sequence: Synthetic oligonucleotide
aucugcacaccucgacgag

SEQ ID NO: 1757652 - RNA, 19 nt, Artificial Sequence
  Description of Artificial Sequence: Synthetic oligonucleotide
guccagcuuggcuagcgcc

SEQ ID NO: 1757653 - RNA, 19 nt, Artificial Sequence
  Description of Artificial Sequence: Synthetic oligonucleotide
cauuuuccguagcucuuug

SEQ ID NO: 1757654 - RNA, 19 nt, Artificial Sequence
  Description of Artificial Sequence: Synthetic oligonucleotide
uguugagggcaaugaucca

SEQ ID NO: 1757655 - RNA, 19 nt, Artificial Sequence
  Description of Artificial Sequence: Synthetic oligonucleotide
acgugacuuggaauauggc

SEQ ID NO: 1757656 - RNA, 19 nt, Artificial Sequence
  Description of Artificial Sequence: Synthetic oligonucleotide
uggacccaaugcauggaau

SEQ ID NO: 1757657 - RNA, 19 nt, Artificial Sequence
  Description of Artificial Sequence: Synthetic oligonucleotide
caccuugcgcuuguaaaag

SEQ ID NO: 1757658 - RNA, 19 nt, Artificial Sequence
  Description of Artificial Sequence: Synthetic oligonucleotide
cuuucgcccucucauccac

SEQ ID NO: 1757659 - RNA, 19 nt, Artificial Sequence
  Description of Artificial Sequence: Synthetic oligonucleotide
ugauaauguuuugcuccca

SEQ ID NO: 1757660 - RNA, 19 nt, Artificial Sequence
  Description of Artificial Sequence: Synthetic oligonucleotide
acuuggaauauggcagucu

SEQ ID NO: 1757661 - RNA, 19 nt, Artificial Sequence
  Description of Artificial Sequence: Synthetic oligonucleotide
aggaaucuucauccguuau

SEQ ID NO: 1757662 - RNA, 19 nt, Artificial Sequence
  Description of Artificial Sequence: Synthetic oligonucleotide
ugacgugacuuggaauaug

SEQ ID NO: 1757663 - RNA, 19 nt, Artificial Sequence
  Description of Artificial Sequence: Synthetic oligonucleotide
cuucagguaucugcuaauc

SEQ ID NO: 1757664 - RNA, 19 nt, Artificial Sequence
  Description of Artificial Sequence: Synthetic oligonucleotide
acgacucugcuucuuggau

SEQ ID NO: 1757665 - RNA, 19 nt, Artificial Sequence
  Description of Artificial Sequence: Synthetic oligonucleotide
acacgugagcaguuaucca

SEQ ID NO: 1757666 - RNA, 19 nt, Artificial Sequence
  Description of Artificial Sequence: Synthetic oligonucleotide
cuccauucgaaucucggua

SEQ ID NO: 1757667 - RNA, 19 nt, Artificial Sequence
  Description of Artificial Sequence: Synthetic oligonucleotide
accauuccaacaucauaua

SEQ ID NO: 1757668 - RNA, 19 nt, Artificial Sequence
  Description of Artificial Sequence: Synthetic oligonucleotide
ggacccaaugcauggaauc

SEQ ID NO: 1757669 - RNA, 19 nt, Artificial Sequence
  Description of Artificial Sequence: Synthetic oligonucleotide
cuccacuaccgcucugagc

SEQ ID NO: 1757670 - RNA, 19 nt, Artificial Sequence
  Description of Artificial Sequence: Synthetic oligonucleotide
guuaggggccugugcaaac

SEQ ID NO: 1757671 - RNA, 19 nt, Artificial Sequence
  Description of Artificial Sequence: Synthetic oligonucleotide
ucccaacauuuuccguagc

SEQ ID NO: 1757672 - RNA, 19 nt, Artificial Sequence
  Description of Artificial Sequence: Synthetic oligonucleotide
agcuuggcuagcgccauug

SEQ ID NO: 1757673 - RNA, 19 nt, Artificial Sequence
  Description of Artificial Sequence: Synthetic oligonucleotide
cgaugaucugcacaccucg

SEQ ID NO: 1757674 - RNA, 19 nt, Artificial Sequence
  Description of Artificial Sequence: Synthetic oligonucleotide
caacagcuaauucacuuua

SEQ ID NO: 1757675 - RNA, 19 nt, Artificial Sequence
  Description of Artificial Sequence: Synthetic oligonucleotide
gccauugguaauugcuuug

SEQ ID NO: 1757676 - RNA, 19 nt, Artificial Sequence
  Description of Artificial Sequence: Synthetic oligonucleotide
aucccauauggcaagguuu

SEQ ID NO: 1757677 - RNA, 19 nt, Artificial Sequence
  Description of Artificial Sequence: Synthetic oligonucleotide
cagaggucaaggaagaguu

SEQ ID NO: 1757678 - RNA, 19 nt, Artificial Sequence
  Description of Artificial Sequence: Synthetic oligonucleotide
caaugcauggaaucucucu

SEQ ID NO: 1757679 - RNA, 19 nt, Artificial Sequence
  Description of Artificial Sequence: Synthetic oligonucleotide
gcuguuuagaagugauaca

SEQ ID NO: 1757680 - RNA, 19 nt, Artificial Sequence
  Description of Artificial Sequence: Synthetic oligonucleotide
uagacaguuaggggccugu

SEQ ID NO: 1757681 - RNA, 19 nt, Artificial Sequence
  Description of Artificial Sequence: Synthetic oligonucleotide
agguaucugcuaaucaaaa

SEQ ID NO: 1757682 - RNA, 19 nt, Artificial Sequence
  Description of Artificial Sequence: Synthetic oligonucleotide
cugcacaccucgacgagca

SEQ ID NO: 1757683 - RNA, 19 nt, Artificial Sequence
  Description of Artificial Sequence: Synthetic oligonucleotide
uuagcacuuaaggucucuu

SEQ ID NO: 1757684 - RNA, 19 nt, Artificial Sequence
  Description of Artificial Sequence: Synthetic oligonucleotide
ccauugguaaaaugacgug

SEQ ID NO: 1757685 - RNA, 19 nt, Artificial Sequence
  Description of Artificial Sequence: Synthetic oligonucleotide
ugaagccuuuaaguagguc

SEQ ID NO: 1757686 - RNA, 19 nt, Artificial Sequence
  Description of Artificial Sequence: Synthetic oligonucleotide
gcacguuaagacaaaguga

SEQ ID NO: 1757687 - RNA, 19 nt, Artificial Sequence
  Description of Artificial Sequence: Synthetic oligonucleotide
ugcauacgacucugcuucu

SEQ ID NO: 1757688 - RNA, 19 nt, Artificial Sequence
  Description of Artificial Sequence: Synthetic oligonucleotide
gucgaugaucugcacaccu

SEQ ID NO: 1757689 - RNA, 19 nt, Artificial Sequence
  Description of Artificial Sequence: Synthetic oligonucleotide
uuucacacgugagcaguua

SEQ ID NO: 1757690 - RNA, 19 nt, Artificial Sequence
  Description of Artificial Sequence: Synthetic oligonucleotide
ggaaucuucauccguuaua

SEQ ID NO: 1757691 - RNA, 19 nt, Artificial Sequence
  Description of Artificial Sequence: Synthetic oligonucleotide
guaugcuguuuagaaguga

SEQ ID NO: 1757692 - RNA, 19 nt, Artificial Sequence
  Description of Artificial Sequence: Synthetic oligonucleotide
uuucgcccucucauccacu

SEQ ID NO: 1757693 - RNA, 19 nt, Artificial Sequence
  Description of Artificial Sequence: Synthetic oligonucleotide
cacuaaguuuagcacuuaa

SEQ ID NO: 1757694 - RNA, 19 nt, Artificial Sequence
  Description of Artificial Sequence: Synthetic oligonucleotide
ccuuuaaguaggucuuuuc

SEQ ID NO: 1757695 - RNA, 19 nt, Artificial Sequence
  Description of Artificial Sequence: Synthetic oligonucleotide
cuucaguguuauaaacgua

SEQ ID NO: 1757696 - RNA, 19 nt, Artificial Sequence
  Description of Artificial Sequence: Synthetic oligonucleotide
ccucaauuccuuuguuuug

SEQ ID NO: 1757697 - RNA, 19 nt, Artificial Sequence
  Description of Artificial Sequence: Synthetic oligonucleotide
gcgccauugccuuucgccc

SEQ ID NO: 1757698 - RNA, 19 nt, Artificial Sequence
  Description of Artificial Sequence: Synthetic oligonucleotide
aguuaggggccugugcaaa

SEQ ID NO: 1757699 - RNA, 19 nt, Artificial Sequence
  Description of Artificial Sequence: Synthetic oligonucleotide
cuagcgccauugccuuucg

SEQ ID NO: 1757700 - RNA, 19 nt, Artificial Sequence
  Description of Artificial Sequence: Synthetic oligonucleotide
gagcaguuauccagaagaa

SEQ ID NO: 1757701 - RNA, 19 nt, Artificial Sequence
  Description of Artificial Sequence: Synthetic oligonucleotide
cuuggaauauggcagucuu

SEQ ID NO: 1757702 - RNA, 19 nt, Artificial Sequence
  Description of Artificial Sequence: Synthetic oligonucleotide
acgagcagguccagcuugg

SEQ ID NO: 1757703 - RNA, 19 nt, Artificial Sequence
  Description of Artificial Sequence: Synthetic oligonucleotide
gaacuucagguaucugcua

SEQ ID NO: 1757704 - RNA, 19 nt, Artificial Sequence
  Description of Artificial Sequence: Synthetic oligonucleotide
uggcuagcgccauugccuu

SEQ ID NO: 1757705 - RNA, 19 nt, Artificial Sequence
  Description of Artificial Sequence: Synthetic oligonucleotide
uucgcccucucauccacuu

SEQ ID NO: 1757706 - RNA, 19 nt, Artificial Sequence
  Description of Artificial Sequence: Synthetic oligonucleotide
ccaauaagacaauuguaua

SEQ ID NO: 1757707 - RNA, 19 nt, Artificial Sequence
  Description of Artificial Sequence: Synthetic oligonucleotide
accucgacgagcaggucca

SEQ ID NO: 1757708 - RNA, 19 nt, Artificial Sequence
  Description of Artificial Sequence: Synthetic oligonucleotide
caguucuguuuuguuugag

SEQ ID NO: 1757709 - RNA, 19 nt, Artificial Sequence
  Description of Artificial Sequence: Synthetic oligonucleotide
cuucauccguuauaucaua

SEQ ID NO: 1757710 - RNA, 19 nt, Artificial Sequence
  Description of Artificial Sequence: Synthetic oligonucleotide
cucaauuccuuuguuuugu

SEQ ID NO: 1757711 - RNA, 19 nt, Artificial Sequence
  Description of Artificial Sequence: Synthetic oligonucleotide
acgugagcaguuauccaga

SEQ ID NO: 1757712 - RNA, 19 nt, Artificial Sequence
  Description of Artificial Sequence: Synthetic oligonucleotide
ggauagaaacaugucucuc

SEQ ID NO: 1757713 - RNA, 19 nt, Artificial Sequence
  Description of Artificial Sequence: Synthetic oligonucleotide
gacccaaugcauggaaucu

SEQ ID NO: 1757714 - RNA, 19 nt, Artificial Sequence
  Description of Artificial Sequence: Synthetic oligonucleotide
ucgcccucucauccacuug

SEQ ID NO: 1757715 - RNA, 19 nt, Artificial Sequence
  Description of Artificial Sequence: Synthetic oligonucleotide
augacgugacuuggaauau

SEQ ID NO: 1757716 - RNA, 19 nt, Artificial Sequence
  Description of Artificial Sequence: Synthetic oligonucleotide
uggcaagguuuacucuuuu

SEQ ID NO: 1757717 - RNA, 19 nt, Artificial Sequence
  Description of Artificial Sequence: Synthetic oligonucleotide
gguaguaaauuggacccaa

SEQ ID NO: 1757718 - RNA, 19 nt, Artificial Sequence
  Description of Artificial Sequence: Synthetic oligonucleotide
aguagacaguuaggggccu

SEQ ID NO: 1757719 - RNA, 19 nt, Artificial Sequence
  Description of Artificial Sequence: Synthetic oligonucleotide
cacuaccgcucugagcuug

SEQ ID NO: 1757720 - RNA, 19 nt, Artificial Sequence
  Description of Artificial Sequence: Synthetic oligonucleotide
ccuugcgcuuguaaaagca

SEQ ID NO: 1757721 - RNA, 19 nt, Artificial Sequence
  Description of Artificial Sequence: Synthetic oligonucleotide
agacaguuaggggccugug

SEQ ID NO: 1757722 - RNA, 19 nt, Artificial Sequence
  Description of Artificial Sequence: Synthetic oligonucleotide
cgcuuguaaaagcagauaa

SEQ ID NO: 1757723 - RNA, 19 nt, Artificial Sequence
  Description of Artificial Sequence: Synthetic oligonucleotide
agaagcacguuaagacaaa

SEQ ID NO: 1757724 - RNA, 19 nt, Artificial Sequence
  Description of Artificial Sequence: Synthetic oligonucleotide
caucgucgaugaucugcac

SEQ ID NO: 1757725 - RNA, 19 nt, Artificial Sequence
  Description of Artificial Sequence: Synthetic oligonucleotide
cacuuaaggucucuucagu

SEQ ID NO: 1757726 - RNA, 19 nt, Artificial Sequence
  Description of Artificial Sequence: Synthetic oligonucleotide
uagcgccauugccuuucgc

SEQ ID NO: 1757727 - RNA, 19 nt, Artificial Sequence
  Description of Artificial Sequence: Synthetic oligonucleotide
guagacaguuaggggccug

SEQ ID NO: 1757728 - RNA, 19 nt, Artificial Sequence
  Description of Artificial Sequence: Synthetic oligonucleotide
gcauggaaucucucuugac

SEQ ID NO: 1757729 - RNA, 19 nt, Artificial Sequence
  Description of Artificial Sequence: Synthetic oligonucleotide
gagggcaaugauccacagu

SEQ ID NO: 1757730 - RNA, 19 nt, Artificial Sequence
  Description of Artificial Sequence: Synthetic oligonucleotide
augaagccuuuaaguaggu

SEQ ID NO: 1757731 - RNA, 19 nt, Artificial Sequence
  Description of Artificial Sequence: Synthetic oligonucleotide
guuuagcacuuaaggucuc

SEQ ID NO: 1757732 - RNA, 19 nt, Artificial Sequence
  Description of Artificial Sequence: Synthetic oligonucleotide
caugcauauuauuccucau

SEQ ID NO: 1757733 - RNA, 19 nt, Artificial Sequence
  Description of Artificial Sequence: Synthetic oligonucleotide
caguguuauaaacguaauu

SEQ ID NO: 1757734 - RNA, 19 nt, Artificial Sequence
  Description of Artificial Sequence: Synthetic oligonucleotide
cauucgaaucucgguagua

SEQ ID NO: 1757735 - RNA, 19 nt, Artificial Sequence
  Description of Artificial Sequence: Synthetic oligonucleotide
caguuaggggccugugcaa

SEQ ID NO: 1757736 - RNA, 19 nt, Artificial Sequence
  Description of Artificial Sequence: Synthetic oligonucleotide
cuguuaauucuaacuccau

SEQ ID NO: 1757737 - RNA, 19 nt, Artificial Sequence
  Description of Artificial Sequence: Synthetic oligonucleotide
ccguuauaucauaaacuaa

SEQ ID NO: 1757738 - RNA, 19 nt, Artificial Sequence
  Description of Artificial Sequence: Synthetic oligonucleotide
augcuguuuagaagugaua

SEQ ID NO: 1757739 - RNA, 19 nt, Artificial Sequence
  Description of Artificial Sequence: Synthetic oligonucleotide
cccacagaaucugcauacg

SEQ ID NO: 1757740 - RNA, 19 nt, Artificial Sequence
  Description of Artificial Sequence: Synthetic oligonucleotide
gcuagcgccauugccuuuc

SEQ ID NO: 1757741 - RNA, 19 nt, Artificial Sequence
  Description of Artificial Sequence: Synthetic oligonucleotide
ccaaugcauggaaucucuc

SEQ ID NO: 1757742 - RNA, 19 nt, Artificial Sequence
  Description of Artificial Sequence: Synthetic oligonucleotide
cagcauacaggauguuuau

SEQ ID NO: 1757743 - RNA, 19 nt, Artificial Sequence
  Description of Artificial Sequence: Synthetic oligonucleotide
gcuuggcuagcgccauugc

SEQ ID NO: 1757744 - RNA, 19 nt, Artificial Sequence
  Description of Artificial Sequence: Synthetic oligonucleotide
caggauguuuauagauuau

SEQ ID NO: 1757745 - RNA, 19 nt, Artificial Sequence
  Description of Artificial Sequence: Synthetic oligonucleotide
cagcacccuccacuaccgc

SEQ ID NO: 1757746 - RNA, 19 nt, Artificial Sequence
  Description of Artificial Sequence: Synthetic oligonucleotide
ggggccugugcaaacccug

SEQ ID NO: 1757747 - RNA, 19 nt, Artificial Sequence
  Description of Artificial Sequence: Synthetic oligonucleotide
acuaccgcucugagcuuga

SEQ ID NO: 1757748 - RNA, 19 nt, Artificial Sequence
  Description of Artificial Sequence: Synthetic oligonucleotide
gcuccauucgaaucucggu

SEQ ID NO: 1757749 - RNA, 19 nt, Artificial Sequence
  Description of Artificial Sequence: Synthetic oligonucleotide
uuugcaccuugcgcuugua

SEQ ID NO: 1757750 - RNA, 19 nt, Artificial Sequence
  Description of Artificial Sequence: Synthetic oligonucleotide
gccugugcaaacccugcaa

SEQ ID NO: 1757751 - RNA, 19 nt, Artificial Sequence
  Description of Artificial Sequence: Synthetic oligonucleotide
cuaccgcucugagcuugag

SEQ ID NO: 1757752 - RNA, 19 nt, Artificial Sequence
  Description of Artificial Sequence: Synthetic oligonucleotide
gccaauucucuggucacaa

SEQ ID NO: 1757753 - RNA, 19 nt, Artificial Sequence
  Description of Artificial Sequence: Synthetic oligonucleotide
aggggccugugcaaacccu

SEQ ID NO: 1757754 - RNA, 19 nt, Artificial Sequence
  Description of Artificial Sequence: Synthetic oligonucleotide
gcacccuccacuaccgcuc

SEQ ID NO: 1757755 - RNA, 19 nt, Artificial Sequence
  Description of Artificial Sequence: Synthetic oligonucleotide
guaucccauauggcaaggu

SEQ ID NO: 1757756 - RNA, 19 nt, Artificial Sequence
  Description of Artificial Sequence: Synthetic oligonucleotide
ccuccacuaccgcucugag

SEQ ID NO: 1757757 - RNA, 19 nt, Artificial Sequence
  Description of Artificial Sequence: Synthetic oligonucleotide
cauugguaauugcuuuguu

SEQ ID NO: 1757758 - RNA, 19 nt, Artificial Sequence
  Description of Artificial Sequence: Synthetic oligonucleotide
guaguaaauuggacccaau

SEQ ID NO: 1757759 - RNA, 19 nt, Artificial Sequence
  Description of Artificial Sequence: Synthetic oligonucleotide
cuugagguucaucgucgau

SEQ ID NO: 1757760 - RNA, 19 nt, Artificial Sequence
  Description of Artificial Sequence: Synthetic oligonucleotide
cccaaugcauggaaucucu

SEQ ID NO: 1757761 - RNA, 19 nt, Artificial Sequence
  Description of Artificial Sequence: Synthetic oligonucleotide
acccuccacuaccgcucug

SEQ ID NO: 1757762 - RNA, 19 nt, Artificial Sequence
  Description of Artificial Sequence: Synthetic oligonucleotide
ccaacagcuaauucacuuu

SEQ ID NO: 1757763 - RNA, 19 nt, Artificial Sequence
  Description of Artificial Sequence: Synthetic oligonucleotide
ccuuucgcccucucaucca

SEQ ID NO: 1757764 - RNA, 19 nt, Artificial Sequence
  Description of Artificial Sequence: Synthetic oligonucleotide
cccauauggcaagguuuac

SEQ ID NO: 1757765 - RNA, 19 nt, Artificial Sequence
  Description of Artificial Sequence: Synthetic oligonucleotide
gcuuagggaucgucaccaa

SEQ ID NO: 1757766 - RNA, 19 nt, Artificial Sequence
  Description of Artificial Sequence: Synthetic oligonucleotide
ggaucgucaccaacagcua

SEQ ID NO: 1757767 - RNA, 19 nt, Artificial Sequence
  Description of Artificial Sequence: Synthetic oligonucleotide
gcgcuuguaaaagcagaua

SEQ ID NO: 1757768 - RNA, 19 nt, Artificial Sequence
  Description of Artificial Sequence: Synthetic oligonucleotide
caccaauauuuaacuucuu

SEQ ID NO: 1757769 - RNA, 19 nt, Artificial Sequence
  Description of Artificial Sequence: Synthetic oligonucleotide
gcccucucauccacuugug

SEQ ID NO: 1757770 - RNA, 19 nt, Artificial Sequence
  Description of Artificial Sequence: Synthetic oligonucleotide
cgacucugcuucuuggaua

SEQ ID NO: 1757771 - RNA, 19 nt, Artificial Sequence
  Description of Artificial Sequence: Synthetic oligonucleotide
cccuccacuaccgcucuga

SEQ ID NO: 1757772 - RNA, 19 nt, Artificial Sequence
  Description of Artificial Sequence: Synthetic oligonucleotide
cgugagcaguuauccagaa

SEQ ID NO: 1757773 - RNA, 19 nt, Artificial Sequence
  Description of Artificial Sequence: Synthetic oligonucleotide
cacccuccacuaccgcucu

SEQ ID NO: 1757774 - RNA, 19 nt, Artificial Sequence
  Description of Artificial Sequence: Synthetic oligonucleotide
ccauucgaaucucgguagu

SEQ ID NO: 1757775 - RNA, 19 nt, Artificial Sequence
  Description of Artificial Sequence: Synthetic oligonucleotide
cgguaguaaauuggaccca

SEQ ID NO: 1757776 - RNA, 19 nt, Artificial Sequence
  Description of Artificial Sequence: Synthetic oligonucleotide
ccucgacgagcagguccag

SEQ ID NO: 1757777 - RNA, 19 nt, Artificial Sequence
  Description of Artificial Sequence: Synthetic oligonucleotide
ccacuaaguuuagcacuua

SEQ ID NO: 1757778 - RNA, 19 nt, Artificial Sequence
  Description of Artificial Sequence: Synthetic oligonucleotide
cgccauugccuuucgcccu

SEQ ID NO: 1757779 - RNA, 19 nt, Artificial Sequence
  Description of Artificial Sequence: Synthetic oligonucleotide
ccgcucugagcuugagguu

SEQ ID NO: 1757780 - RNA, 19 nt, Artificial Sequence
  Description of Artificial Sequence: Synthetic oligonucleotide
gcucagcauacaggauguu

SEQ ID NO: 1757781 - RNA, 19 nt, Artificial Sequence
  Description of Artificial Sequence: Synthetic oligonucleotide
ccacuaccgcucugagcuu

SEQ ID NO: 1757782 - RNA, 19 nt, Artificial Sequence
  Description of Artificial Sequence: Synthetic oligonucleotide
cgacgagcagguccagcuu

SEQ ID NO: 1757783 - RNA, 19 nt, Artificial Sequence
  Description of Artificial Sequence: Synthetic oligonucleotide
ccauugccuuucgcccucu

SEQ ID NO: 1757784 - RNA, 19 nt, Artificial Sequence
  Description of Artificial Sequence: Synthetic oligonucleotide
aaaauucuaaaggagaagc

SEQ ID NO: 1757785 - RNA, 19 nt, Artificial Sequence
  Description of Artificial Sequence: Synthetic oligonucleotide
aauuuauggccacagaugg

SEQ ID NO: 1757786 - RNA, 19 nt, Artificial Sequence
  Description of Artificial Sequence: Synthetic oligonucleotide
aauaagaacugguaugcac

SEQ ID NO: 1757787 - RNA, 19 nt, Artificial Sequence
  Description of Artificial Sequence: Synthetic oligonucleotide
cuuucgaagaaauuuaugg

SEQ ID NO: 1757788 - RNA, 19 nt, Artificial Sequence
  Description of Artificial Sequence: Synthetic oligonucleotide
uuacuuuccaaaauggacg

SEQ ID NO: 1757789 - RNA, 19 nt, Artificial Sequence
  Description of Artificial Sequence: Synthetic oligonucleotide
aaaucugaauaccauagag

SEQ ID NO: 1757790 - RNA, 19 nt, Artificial Sequence
  Description of Artificial Sequence: Synthetic oligonucleotide
acgacuaugauccacaauc

SEQ ID NO: 1757791 - RNA, 19 nt, Artificial Sequence
  Description of Artificial Sequence: Synthetic oligonucleotide
cauaaguggacuuugauac

SEQ ID NO: 1757792 - RNA, 19 nt, Artificial Sequence
  Description of Artificial Sequence: Synthetic oligonucleotide
uauaauaagaacugguaug

SEQ ID NO: 1757793 - RNA, 19 nt, Artificial Sequence
  Description of Artificial Sequence: Synthetic oligonucleotide
ugaaaucugaauaccauag

SEQ ID NO: 1757794 - RNA, 19 nt, Artificial Sequence
  Description of Artificial Sequence: Synthetic oligonucleotide
agaacugguaugcacaacc

SEQ ID NO: 1757795 - RNA, 19 nt, Artificial Sequence
  Description of Artificial Sequence: Synthetic oligonucleotide
gagagauccagacacaugg

SEQ ID NO: 1757796 - RNA, 19 nt, Artificial Sequence
  Description of Artificial Sequence: Synthetic oligonucleotide
ucuguaaaggcucugcagg

SEQ ID NO: 1757797 - RNA, 19 nt, Artificial Sequence
  Description of Artificial Sequence: Synthetic oligonucleotide
auaauaagaacugguaugc

SEQ ID NO: 1757798 - RNA, 19 nt, Artificial Sequence
  Description of Artificial Sequence: Synthetic oligonucleotide
ugaaucuuuuccaagacug

SEQ ID NO: 1757799 - RNA, 19 nt, Artificial Sequence
  Description of Artificial Sequence: Synthetic oligonucleotide
cuccaaacgacuaugaucc

SEQ ID NO: 1757800 - RNA, 19 nt, Artificial Sequence
  Description of Artificial Sequence: Synthetic oligonucleotide
ugcaaugugggaaagguag

SEQ ID NO: 1757801 - RNA, 19 nt, Artificial Sequence
  Description of Artificial Sequence: Synthetic oligonucleotide
aaguggaugaacuucacca

SEQ ID NO: 1757802 - RNA, 19 nt, Artificial Sequence
  Description of Artificial Sequence: Synthetic oligonucleotide
uguuguaucuguaagauuu

SEQ ID NO: 1757803 - RNA, 19 nt, Artificial Sequence
  Description of Artificial Sequence: Synthetic oligonucleotide
aagauuuaccuuuaugugu

SEQ ID NO: 1757804 - RNA, 19 nt, Artificial Sequence
  Description of Artificial Sequence: Synthetic oligonucleotide
acaguuuaauucuacuggc

SEQ ID NO: 1757805 - RNA, 19 nt, Artificial Sequence
  Description of Artificial Sequence: Synthetic oligonucleotide
uucgaagaaauuuauggcc

SEQ ID NO: 1757806 - RNA, 19 nt, Artificial Sequence
  Description of Artificial Sequence: Synthetic oligonucleotide
guuucuuugaacuccagcc

SEQ ID NO: 1757807 - RNA, 19 nt, Artificial Sequence
  Description of Artificial Sequence: Synthetic oligonucleotide
uaugcacaaccucaaaacg

SEQ ID NO: 1757808 - RNA, 19 nt, Artificial Sequence
  Description of Artificial Sequence: Synthetic oligonucleotide
ugagcucugacucuaaggc

SEQ ID NO: 1757809 - RNA, 19 nt, Artificial Sequence
  Description of Artificial Sequence: Synthetic oligonucleotide
gaucaaagacacuugacug

SEQ ID NO: 1757810 - RNA, 19 nt, Artificial Sequence
  Description of Artificial Sequence: Synthetic oligonucleotide
auuacuuuccaaaauggac

SEQ ID NO: 1757811 - RNA, 19 nt, Artificial Sequence
  Description of Artificial Sequence: Synthetic oligonucleotide
acauuuaauagccaugucu

SEQ ID NO: 1757812 - RNA, 19 nt, Artificial Sequence
  Description of Artificial Sequence: Synthetic oligonucleotide
cuugauucauuucaguugc

SEQ ID NO: 1757813 - RNA, 19 nt, Artificial Sequence
  Description of Artificial Sequence: Synthetic oligonucleotide
auacauguguuccaguaac

SEQ ID NO: 1757814 - RNA, 19 nt, Artificial Sequence
  Description of Artificial Sequence: Synthetic oligonucleotide
auaccauagagauuugagg

SEQ ID NO: 1757815 - RNA, 19 nt, Artificial Sequence
  Description of Artificial Sequence: Synthetic oligonucleotide
uguucuugugacaagcgag

SEQ ID NO: 1757816 - RNA, 19 nt, Artificial Sequence
  Description of Artificial Sequence: Synthetic oligonucleotide
uuucgaagaaauuuauggc

SEQ ID NO: 1757817 - RNA, 19 nt, Artificial Sequence
  Description of Artificial Sequence: Synthetic oligonucleotide
agagggaccagucacuucg

SEQ ID NO: 1757818 - RNA, 19 nt, Artificial Sequence
  Description of Artificial Sequence: Synthetic oligonucleotide
uaccauagagauuugaggu

SEQ ID NO: 1757819 - RNA, 19 nt, Artificial Sequence
  Description of Artificial Sequence: Synthetic oligonucleotide
uuugacagcugcuuucugg

SEQ ID NO: 1757820 - RNA, 19 nt, Artificial Sequence
  Description of Artificial Sequence: Synthetic oligonucleotide
aaaccuuuggcaucuguug

SEQ ID NO: 1757821 - RNA, 19 nt, Artificial Sequence
  Description of Artificial Sequence: Synthetic oligonucleotide
uguaagauuuaccuuuaug

SEQ ID NO: 1757822 - RNA, 19 nt, Artificial Sequence
  Description of Artificial Sequence: Synthetic oligonucleotide
ucuuuggagaucaaagaca

SEQ ID NO: 1757823 - RNA, 19 nt, Artificial Sequence
  Description of Artificial Sequence: Synthetic oligonucleotide
aaggagaagcuacuacucg

SEQ ID NO: 1757824 - RNA, 19 nt, Artificial Sequence
  Description of Artificial Sequence: Synthetic oligonucleotide
aagcgagaacuuuucaggg

SEQ ID NO: 1757825 - RNA, 19 nt, Artificial Sequence
  Description of Artificial Sequence: Synthetic oligonucleotide
agaucaaagacacuugacu

SEQ ID NO: 1757826 - RNA, 19 nt, Artificial Sequence
  Description of Artificial Sequence: Synthetic oligonucleotide
uggugcaugaaucuuuucc

SEQ ID NO: 1757827 - RNA, 19 nt, Artificial Sequence
  Description of Artificial Sequence: Synthetic oligonucleotide
acuugauucauuucaguug

SEQ ID NO: 1757828 - RNA, 19 nt, Artificial Sequence
  Description of Artificial Sequence: Synthetic oligonucleotide
uuuaagucaacagaccaug

SEQ ID NO: 1757829 - RNA, 19 nt, Artificial Sequence
  Description of Artificial Sequence: Synthetic oligonucleotide
caagcgagaacuuuucagg

SEQ ID NO: 1757830 - RNA, 19 nt, Artificial Sequence
  Description of Artificial Sequence: Synthetic oligonucleotide
aaauuuauggccacagaug

SEQ ID NO: 1757831 - RNA, 19 nt, Artificial Sequence
  Description of Artificial Sequence: Synthetic oligonucleotide
aaagguagucagcauggag

SEQ ID NO: 1757832 - RNA, 19 nt, Artificial Sequence
  Description of Artificial Sequence: Synthetic oligonucleotide
guaagauuuaccuuuaugu

SEQ ID NO: 1757833 - RNA, 19 nt, Artificial Sequence
  Description of Artificial Sequence: Synthetic oligonucleotide
aagaaauuuauggccacag

SEQ ID NO: 1757834 - RNA, 19 nt, Artificial Sequence
  Description of Artificial Sequence: Synthetic oligonucleotide
uuucuuugaacuccagccc

SEQ ID NO: 1757835 - RNA, 19 nt, Artificial Sequence
  Description of Artificial Sequence: Synthetic oligonucleotide
uaagucaacagaccaugag

SEQ ID NO: 1757836 - RNA, 19 nt, Artificial Sequence
  Description of Artificial Sequence: Synthetic oligonucleotide
uguaucuguaagauuuacc

SEQ ID NO: 1757837 - RNA, 19 nt, Artificial Sequence
  Description of Artificial Sequence: Synthetic oligonucleotide
auucuaaaggagaagcuac

SEQ ID NO: 1757838 - RNA, 19 nt, Artificial Sequence
  Description of Artificial Sequence: Synthetic oligonucleotide
aaaauggacgcaggaacac

SEQ ID NO: 1757839 - RNA, 19 nt, Artificial Sequence
  Description of Artificial Sequence: Synthetic oligonucleotide
aggaguuucuuugaacucc

SEQ ID NO: 1757840 - RNA, 19 nt, Artificial Sequence
  Description of Artificial Sequence: Synthetic oligonucleotide
cacaaccucaaaacgaggg

SEQ ID NO: 1757841 - RNA, 19 nt, Artificial Sequence
  Description of Artificial Sequence: Synthetic oligonucleotide
uucucuguaaaagagggac

SEQ ID NO: 1757842 - RNA, 19 nt, Artificial Sequence
  Description of Artificial Sequence: Synthetic oligonucleotide
caucgcuccuguuugaugg

SEQ ID NO: 1757843 - RNA, 19 nt, Artificial Sequence
  Description of Artificial Sequence: Synthetic oligonucleotide
uugacugaucuguaaaggc

SEQ ID NO: 1757844 - RNA, 19 nt, Artificial Sequence
  Description of Artificial Sequence: Synthetic oligonucleotide
cugacucuaaggcacaagg

SEQ ID NO: 1757845 - RNA, 19 nt, Artificial Sequence
  Description of Artificial Sequence: Synthetic oligonucleotide
gaagcuacuacucgacaag

SEQ ID NO: 1757846 - RNA, 19 nt, Artificial Sequence
  Description of Artificial Sequence: Synthetic oligonucleotide
acaagcgagaacuuuucag

SEQ ID NO: 1757847 - RNA, 19 nt, Artificial Sequence
  Description of Artificial Sequence: Synthetic oligonucleotide
cagucucuggaucacaucg

SEQ ID NO: 1757848 - RNA, 19 nt, Artificial Sequence
  Description of Artificial Sequence: Synthetic oligonucleotide
ucugguugagaacacuuga

SEQ ID NO: 1757849 - RNA, 19 nt, Artificial Sequence
  Description of Artificial Sequence: Synthetic oligonucleotide
caugucuuauaauaagaac

SEQ ID NO: 1757850 - RNA, 19 nt, Artificial Sequence
  Description of Artificial Sequence: Synthetic oligonucleotide
cucuggaucacaucgcucc

SEQ ID NO: 1757851 - RNA, 19 nt, Artificial Sequence
  Description of Artificial Sequence: Synthetic oligonucleotide
aaauggacgcaggaacacc

SEQ ID NO: 1757852 - RNA, 19 nt, Artificial Sequence
  Description of Artificial Sequence: Synthetic oligonucleotide
uacucgacaaggauggugu

SEQ ID NO: 1757853 - RNA, 19 nt, Artificial Sequence
  Description of Artificial Sequence: Synthetic oligonucleotide
aucuguaagauuuaccuuu

SEQ ID NO: 1757854 - RNA, 19 nt, Artificial Sequence
  Description of Artificial Sequence: Synthetic oligonucleotide
accaugaggaaguaaauaa

SEQ ID NO: 1757855 - RNA, 19 nt, Artificial Sequence
  Description of Artificial Sequence: Synthetic oligonucleotide
ugacugaucuguaaaggcu

SEQ ID NO: 1757856 - RNA, 19 nt, Artificial Sequence
  Description of Artificial Sequence: Synthetic oligonucleotide
guaugcacaaccucaaaac

SEQ ID NO: 1757857 - RNA, 19 nt, Artificial Sequence
  Description of Artificial Sequence: Synthetic oligonucleotide
uacuuuccaaaauggacgc

SEQ ID NO: 1757858 - RNA, 19 nt, Artificial Sequence
  Description of Artificial Sequence: Synthetic oligonucleotide
uguaaaagagggaccaguc

SEQ ID NO: 1757859 - RNA, 19 nt, Artificial Sequence
  Description of Artificial Sequence: Synthetic oligonucleotide
aaucugaauaccauagaga

SEQ ID NO: 1757860 - RNA, 19 nt, Artificial Sequence
  Description of Artificial Sequence: Synthetic oligonucleotide
guaacuggcucuuucgaag

SEQ ID NO: 1757861 - RNA, 19 nt, Artificial Sequence
  Description of Artificial Sequence: Synthetic oligonucleotide
ucuuucgaagaaauuuaug

SEQ ID NO: 1757862 - RNA, 19 nt, Artificial Sequence
  Description of Artificial Sequence: Synthetic oligonucleotide
ggaaguaaauaauuuauga

SEQ ID NO: 1757863 - RNA, 19 nt, Artificial Sequence
  Description of Artificial Sequence: Synthetic oligonucleotide
ugucuuuggagaucaaaga

SEQ ID NO: 1757864 - RNA, 19 nt, Artificial Sequence
  Description of Artificial Sequence: Synthetic oligonucleotide
agcauggagaaaucggauc

SEQ ID NO: 1757865 - RNA, 19 nt, Artificial Sequence
  Description of Artificial Sequence: Synthetic oligonucleotide
auucuacuggcucuguguc

SEQ ID NO: 1757866 - RNA, 19 nt, Artificial Sequence
  Description of Artificial Sequence: Synthetic oligonucleotide
ugucucagguuacugcggg

SEQ ID NO: 1757867 - RNA, 19 nt, Artificial Sequence
  Description of Artificial Sequence: Synthetic oligonucleotide
ucgguuuccacuguuacug

SEQ ID NO: 1757868 - RNA, 19 nt, Artificial Sequence
  Description of Artificial Sequence: Synthetic oligonucleotide
uuuuaagucaacagaccau

SEQ ID NO: 1757869 - RNA, 19 nt, Artificial Sequence
  Description of Artificial Sequence: Synthetic oligonucleotide
acuugacugaucuguaaag

SEQ ID NO: 1757870 - RNA, 19 nt, Artificial Sequence
  Description of Artificial Sequence: Synthetic oligonucleotide
aaaacgagggacaaauuau

SEQ ID NO: 1757871 - RNA, 19 nt, Artificial Sequence
  Description of Artificial Sequence: Synthetic oligonucleotide
aguaauggcauaaguggac

SEQ ID NO: 1757872 - RNA, 19 nt, Artificial Sequence
  Description of Artificial Sequence: Synthetic oligonucleotide
uacugcgggacucgaaacg

SEQ ID NO: 1757873 - RNA, 19 nt, Artificial Sequence
  Description of Artificial Sequence: Synthetic oligonucleotide
aaggcaagucuaaauguuc

SEQ ID NO: 1757874 - RNA, 19 nt, Artificial Sequence
  Description of Artificial Sequence: Synthetic oligonucleotide
ucggcuagagugcucaggc

SEQ ID NO: 1757875 - RNA, 19 nt, Artificial Sequence
  Description of Artificial Sequence: Synthetic oligonucleotide
caccaaacgggagagaucc

SEQ ID NO: 1757876 - RNA, 19 nt, Artificial Sequence
  Description of Artificial Sequence: Synthetic oligonucleotide
uuuaauagccaugucuuau

SEQ ID NO: 1757877 - RNA, 19 nt, Artificial Sequence
  Description of Artificial Sequence: Synthetic oligonucleotide
aucacaucgcuccuguuug

SEQ ID NO: 1757878 - RNA, 19 nt, Artificial Sequence
  Description of Artificial Sequence: Synthetic oligonucleotide
guugagaacacuugauuca

SEQ ID NO: 1757879 - RNA, 19 nt, Artificial Sequence
  Description of Artificial Sequence: Synthetic oligonucleotide
gucuuuggagaucaaagac

SEQ ID NO: 1757880 - RNA, 19 nt, Artificial Sequence
  Description of Artificial Sequence: Synthetic oligonucleotide
uaaguggacuuugauacug

SEQ ID NO: 1757881 - RNA, 19 nt, Artificial Sequence
  Description of Artificial Sequence: Synthetic oligonucleotide
ucucuguaaaagagggacc

SEQ ID NO: 1757882 - RNA, 19 nt, Artificial Sequence
  Description of Artificial Sequence: Synthetic oligonucleotide
cuuauaauaagaacuggua

SEQ ID NO: 1757883 - RNA, 19 nt, Artificial Sequence
  Description of Artificial Sequence: Synthetic oligonucleotide
uucaguugcaaugugggaa

SEQ ID NO: 1757884 - RNA, 19 nt, Artificial Sequence
  Description of Artificial Sequence: Synthetic oligonucleotide
ucaucuagcccaauugcaa

SEQ ID NO: 1757885 - RNA, 19 nt, Artificial Sequence
  Description of Artificial Sequence: Synthetic oligonucleotide
aucuguaaaggcucugcag

SEQ ID NO: 1757886 - RNA, 19 nt, Artificial Sequence
  Description of Artificial Sequence: Synthetic oligonucleotide
cuacuacucgacaaggaug

SEQ ID NO: 1757887 - RNA, 19 nt, Artificial Sequence
  Description of Artificial Sequence: Synthetic oligonucleotide
ugacucuaaggcacaaggc

SEQ ID NO: 1757888 - RNA, 19 nt, Artificial Sequence
  Description of Artificial Sequence: Synthetic oligonucleotide
uugaaaucugaauaccaua

SEQ ID NO: 1757889 - RNA, 19 nt, Artificial Sequence
  Description of Artificial Sequence: Synthetic oligonucleotide
aagcuacuacucgacaagg

SEQ ID NO: 1757890 - RNA, 19 nt, Artificial Sequence
  Description of Artificial Sequence: Synthetic oligonucleotide
agcucugacucuaaggcac

SEQ ID NO: 1757891 - RNA, 19 nt, Artificial Sequence
  Description of Artificial Sequence: Synthetic oligonucleotide
auaagaacugguaugcaca

SEQ ID NO: 1757892 - RNA, 19 nt, Artificial Sequence
  Description of Artificial Sequence: Synthetic oligonucleotide
ucugggccaaugaauuucc

SEQ ID NO: 1757893 - RNA, 19 nt, Artificial Sequence
  Description of Artificial Sequence: Synthetic oligonucleotide
uuuauggccacagauggua

SEQ ID NO: 1757894 - RNA, 19 nt, Artificial Sequence
  Description of Artificial Sequence: Synthetic oligonucleotide
agcgagaacuuuucagggg

SEQ ID NO: 1757895 - RNA, 19 nt, Artificial Sequence
  Description of Artificial Sequence: Synthetic oligonucleotide
agcuaagccuccugcauuc

SEQ ID NO: 1757896 - RNA, 19 nt, Artificial Sequence
  Description of Artificial Sequence: Synthetic oligonucleotide
uuaagucaacagaccauga

SEQ ID NO: 1757897 - RNA, 19 nt, Artificial Sequence
  Description of Artificial Sequence: Synthetic oligonucleotide
ucuggguuguugaaaucug

SEQ ID NO: 1757898 - RNA, 19 nt, Artificial Sequence
  Description of Artificial Sequence: Synthetic oligonucleotide
guuacauuuaauagccaug

SEQ ID NO: 1757899 - RNA, 19 nt, Artificial Sequence
  Description of Artificial Sequence: Synthetic oligonucleotide
acuaugauccacaaucugu

SEQ ID NO: 1757900 - RNA, 19 nt, Artificial Sequence
  Description of Artificial Sequence: Synthetic oligonucleotide
aacaccaaacgggagagau

SEQ ID NO: 1757901 - RNA, 19 nt, Artificial Sequence
  Description of Artificial Sequence: Synthetic oligonucleotide
aaugugggaaagguaguca

SEQ ID NO: 1757902 - RNA, 19 nt, Artificial Sequence
  Description of Artificial Sequence: Synthetic oligonucleotide
ugcaagagagagcugcaac

SEQ ID NO: 1757903 - RNA, 19 nt, Artificial Sequence
  Description of Artificial Sequence: Synthetic oligonucleotide
agaagcuacuacucgacaa

SEQ ID NO: 1757904 - RNA, 19 nt, Artificial Sequence
  Description of Artificial Sequence: Synthetic oligonucleotide
gacuaugauccacaaucug

SEQ ID NO: 1757905 - RNA, 19 nt, Artificial Sequence
  Description of Artificial Sequence: Synthetic oligonucleotide
auucaagagccucacugcu

SEQ ID NO: 1757906 - RNA, 19 nt, Artificial Sequence
  Description of Artificial Sequence: Synthetic oligonucleotide
gucagcauggagaaaucgg

SEQ ID NO: 1757907 - RNA, 19 nt, Artificial Sequence
  Description of Artificial Sequence: Synthetic oligonucleotide
ugggagaucacagucucug

SEQ ID NO: 1757908 - RNA, 19 nt, Artificial Sequence
  Description of Artificial Sequence: Synthetic oligonucleotide
uaauucuacuggcucugug

SEQ ID NO: 1757909 - RNA, 19 nt, Artificial Sequence
  Description of Artificial Sequence: Synthetic oligonucleotide
uuaauagccaugucuuaua

SEQ ID NO: 1757910 - RNA, 19 nt, Artificial Sequence
  Description of Artificial Sequence: Synthetic oligonucleotide
ugauacuguucucuguaaa

SEQ ID NO: 1757911 - RNA, 19 nt, Artificial Sequence
  Description of Artificial Sequence: Synthetic oligonucleotide
caucuagcccaauugcaag

SEQ ID NO: 1757912 - RNA, 19 nt, Artificial Sequence
  Description of Artificial Sequence: Synthetic oligonucleotide
acgcaggaacaccaaacgg

SEQ ID NO: 1757913 - RNA, 19 nt, Artificial Sequence
  Description of Artificial Sequence: Synthetic oligonucleotide
acugcgggacucgaaacgc

SEQ ID NO: 1757914 - RNA, 19 nt, Artificial Sequence
  Description of Artificial Sequence: Synthetic oligonucleotide
gguugagaacacuugauuc

SEQ ID NO: 1757915 - RNA, 19 nt, Artificial Sequence
  Description of Artificial Sequence: Synthetic oligonucleotide
gaucacagucucuggauca

SEQ ID NO: 1757916 - RNA, 19 nt, Artificial Sequence
  Description of Artificial Sequence: Synthetic oligonucleotide
uaagaacugguaugcacaa

SEQ ID NO: 1757917 - RNA, 19 nt, Artificial Sequence
  Description of Artificial Sequence: Synthetic oligonucleotide
ucuugugacaagcgagaac

SEQ ID NO: 1757918 - RNA, 19 nt, Artificial Sequence
  Description of Artificial Sequence: Synthetic oligonucleotide
aggaaguaaauaauuuaug

SEQ ID NO: 1757919 - RNA, 19 nt, Artificial Sequence
  Description of Artificial Sequence: Synthetic oligonucleotide
aggagaagcuacuacucga

SEQ ID NO: 1757920 - RNA, 19 nt, Artificial Sequence
  Description of Artificial Sequence: Synthetic oligonucleotide
gguuguugaaaucugaaua

SEQ ID NO: 1757921 - RNA, 19 nt, Artificial Sequence
  Description of Artificial Sequence: Synthetic oligonucleotide
ucacuucggaagaggauga

SEQ ID NO: 1757922 - RNA, 19 nt, Artificial Sequence
  Description of Artificial Sequence: Synthetic oligonucleotide
acaucggaccagcugucac

SEQ ID NO: 1757923 - RNA, 19 nt, Artificial Sequence
  Description of Artificial Sequence: Synthetic oligonucleotide
ggcuagagugcucaggcgg

SEQ ID NO: 1757924 - RNA, 19 nt, Artificial Sequence
  Description of Artificial Sequence: Synthetic oligonucleotide
aagagggaccagucacuuc

SEQ ID NO: 1757925 - RNA, 19 nt, Artificial Sequence
  Description of Artificial Sequence: Synthetic oligonucleotide
uggguuguugaaaucugaa

SEQ ID NO: 1757926 - RNA, 19 nt, Artificial Sequence
  Description of Artificial Sequence: Synthetic oligonucleotide
aaaauggugcaugaaucuu

SEQ ID NO: 1757927 - RNA, 19 nt, Artificial Sequence
  Description of Artificial Sequence: Synthetic oligonucleotide
cauuacuuuccaaaaugga

SEQ ID NO: 1757928 - RNA, 19 nt, Artificial Sequence
  Description of Artificial Sequence: Synthetic oligonucleotide
aagaacugguaugcacaac

SEQ ID NO: 1757929 - RNA, 19 nt, Artificial Sequence
  Description of Artificial Sequence: Synthetic oligonucleotide
agcagcucgguuuccacug

SEQ ID NO: 1757930 - RNA, 19 nt, Artificial Sequence
  Description of Artificial Sequence: Synthetic oligonucleotide
uuucaguugcaauguggga

SEQ ID NO: 1757931 - RNA, 19 nt, Artificial Sequence
  Description of Artificial Sequence: Synthetic oligonucleotide
cuugugacaagcgagaacu

SEQ ID NO: 1757932 - RNA, 19 nt, Artificial Sequence
  Description of Artificial Sequence: Synthetic oligonucleotide
uccaguaacuggcucuuuc

SEQ ID NO: 1757933 - RNA, 19 nt, Artificial Sequence
  Description of Artificial Sequence: Synthetic oligonucleotide
ccuccugcauucaagagcc

SEQ ID NO: 1757934 - RNA, 19 nt, Artificial Sequence
  Description of Artificial Sequence: Synthetic oligonucleotide
auguucuugugacaagcga

SEQ ID NO: 1757935 - RNA, 19 nt, Artificial Sequence
  Description of Artificial Sequence: Synthetic oligonucleotide
caaaauggacgcaggaaca

SEQ ID NO: 1757936 - RNA, 19 nt, Artificial Sequence
  Description of Artificial Sequence: Synthetic oligonucleotide
ugacaagcgagaacuuuuc

SEQ ID NO: 1757937 - RNA, 19 nt, Artificial Sequence
  Description of Artificial Sequence: Synthetic oligonucleotide
caaaacgagggacaaauua

SEQ ID NO: 1757938 - RNA, 19 nt, Artificial Sequence
  Description of Artificial Sequence: Synthetic oligonucleotide
aauggcauaaguggacuuu

SEQ ID NO: 1757939 - RNA, 19 nt, Artificial Sequence
  Description of Artificial Sequence: Synthetic oligonucleotide
cuugggagaucacagucuc

SEQ ID NO: 1757940 - RNA, 19 nt, Artificial Sequence
  Description of Artificial Sequence: Synthetic oligonucleotide
uguauacauguguuccagu

SEQ ID NO: 1757941 - RNA, 19 nt, Artificial Sequence
  Description of Artificial Sequence: Synthetic oligonucleotide
caaguggaugaacuucacc

SEQ ID NO: 1757942 - RNA, 19 nt, Artificial Sequence
  Description of Artificial Sequence: Synthetic oligonucleotide
acuuccuugugugagcucu

SEQ ID NO: 1757943 - RNA, 19 nt, Artificial Sequence
  Description of Artificial Sequence: Synthetic oligonucleotide
uggaucacaucgcuccugu

SEQ ID NO: 1757944 - RNA, 19 nt, Artificial Sequence
  Description of Artificial Sequence: Synthetic oligonucleotide
aggucauuacuuuccaaaa

SEQ ID NO: 1757945 - RNA, 19 nt, Artificial Sequence
  Description of Artificial Sequence: Synthetic oligonucleotide
ugcugaaaccucugggcca

SEQ ID NO: 1757946 - RNA, 19 nt, Artificial Sequence
  Description of Artificial Sequence: Synthetic oligonucleotide
uguguuccaguaacuggcu

SEQ ID NO: 1757947 - RNA, 19 nt, Artificial Sequence
  Description of Artificial Sequence: Synthetic oligonucleotide
gacugaucuguaaaggcuc

SEQ ID NO: 1757948 - RNA, 19 nt, Artificial Sequence
  Description of Artificial Sequence: Synthetic oligonucleotide
agaaaucggaucccuuccu

SEQ ID NO: 1757949 - RNA, 19 nt, Artificial Sequence
  Description of Artificial Sequence: Synthetic oligonucleotide
auaaguggacuuugauacu

SEQ ID NO: 1757950 - RNA, 19 nt, Artificial Sequence
  Description of Artificial Sequence: Synthetic oligonucleotide
agauuuaccuuuaugugua

SEQ ID NO: 1757951 - RNA, 19 nt, Artificial Sequence
  Description of Artificial Sequence: Synthetic oligonucleotide
aaacgcuccccgcaguaau

SEQ ID NO: 1757952 - RNA, 19 nt, Artificial Sequence
  Description of Artificial Sequence: Synthetic oligonucleotide
uuauggccacagaugguac

SEQ ID NO: 1757953 - RNA, 19 nt, Artificial Sequence
  Description of Artificial Sequence: Synthetic oligonucleotide
ucugaauaccauagagauu

SEQ ID NO: 1757954 - RNA, 19 nt, Artificial Sequence
  Description of Artificial Sequence: Synthetic oligonucleotide
caaccucaaaacgagggac

SEQ ID NO: 1757955 - RNA, 19 nt, Artificial Sequence
  Description of Artificial Sequence: Synthetic oligonucleotide
guuuaauucuacuggcucu

SEQ ID NO: 1757956 - RNA, 19 nt, Artificial Sequence
  Description of Artificial Sequence: Synthetic oligonucleotide
aucuagcccaauugcaaga

SEQ ID NO: 1757957 - RNA, 19 nt, Artificial Sequence
  Description of Artificial Sequence: Synthetic oligonucleotide
uauggccacagaugguaca

SEQ ID NO: 1757958 - RNA, 19 nt, Artificial Sequence
  Description of Artificial Sequence: Synthetic oligonucleotide
ucuguaaaagagggaccag

SEQ ID NO: 1757959 - RNA, 19 nt, Artificial Sequence
  Description of Artificial Sequence: Synthetic oligonucleotide
guguauacauguguuccag

SEQ ID NO: 1757960 - RNA, 19 nt, Artificial Sequence
  Description of Artificial Sequence: Synthetic oligonucleotide
gagaucaaagacacuugac

SEQ ID NO: 1757961 - RNA, 19 nt, Artificial Sequence
  Description of Artificial Sequence: Synthetic oligonucleotide
uuguaucuguaagauuuac

SEQ ID NO: 1757962 - RNA, 19 nt, Artificial Sequence
  Description of Artificial Sequence: Synthetic oligonucleotide
aggaccucggcuagagugc

SEQ ID NO: 1757963 - RNA, 19 nt, Artificial Sequence
  Description of Artificial Sequence: Synthetic oligonucleotide
aacgacuaugauccacaau

SEQ ID NO: 1757964 - RNA, 19 nt, Artificial Sequence
  Description of Artificial Sequence: Synthetic oligonucleotide
uugagaacacuugauucau

SEQ ID NO: 1757965 - RNA, 19 nt, Artificial Sequence
  Description of Artificial Sequence: Synthetic oligonucleotide
aaacgagggacaaauuauu

SEQ ID NO: 1757966 - RNA, 19 nt, Artificial Sequence
  Description of Artificial Sequence: Synthetic oligonucleotide
uccaucaucuagcccaauu

SEQ ID NO: 1757967 - RNA, 19 nt, Artificial Sequence
  Description of Artificial Sequence: Synthetic oligonucleotide
gaugaggaguggccuuggg

SEQ ID NO: 1757968 - RNA, 19 nt, Artificial Sequence
  Description of Artificial Sequence: Synthetic oligonucleotide
uugauacuguucucuguaa

SEQ ID NO: 1757969 - RNA, 19 nt, Artificial Sequence
  Description of Artificial Sequence: Synthetic oligonucleotide
caguaauggcauaagugga

SEQ ID NO: 1757970 - RNA, 19 nt, Artificial Sequence
  Description of Artificial Sequence: Synthetic oligonucleotide
uguccacacuuccuugugu

SEQ ID NO: 1757971 - RNA, 19 nt, Artificial Sequence
  Description of Artificial Sequence: Synthetic oligonucleotide
acgagggacaaauuauuuu

SEQ ID NO: 1757972 - RNA, 19 nt, Artificial Sequence
  Description of Artificial Sequence: Synthetic oligonucleotide
ugucacaauacugcugaaa

SEQ ID NO: 1757973 - RNA, 19 nt, Artificial Sequence
  Description of Artificial Sequence: Synthetic oligonucleotide
aucacagucucuggaucac

SEQ ID NO: 1757974 - RNA, 19 nt, Artificial Sequence
  Description of Artificial Sequence: Synthetic oligonucleotide
agaugguacaacugauuuu

SEQ ID NO: 1757975 - RNA, 19 nt, Artificial Sequence
  Description of Artificial Sequence: Synthetic oligonucleotide
cucuguaaaagagggacca

SEQ ID NO: 1757976 - RNA, 19 nt, Artificial Sequence
  Description of Artificial Sequence: Synthetic oligonucleotide
aauggugcaugaaucuuuu

SEQ ID NO: 1757977 - RNA, 19 nt, Artificial Sequence
  Description of Artificial Sequence: Synthetic oligonucleotide
cugucucagguuacugcgg

SEQ ID NO: 1757978 - RNA, 19 nt, Artificial Sequence
  Description of Artificial Sequence: Synthetic oligonucleotide
ggagaaaucggaucccuuc

SEQ ID NO: 1757979 - RNA, 19 nt, Artificial Sequence
  Description of Artificial Sequence: Synthetic oligonucleotide
acucgaaacgcuccccgca

SEQ ID NO: 1757980 - RNA, 19 nt, Artificial Sequence
  Description of Artificial Sequence: Synthetic oligonucleotide
gaauaccauagagauuuga

SEQ ID NO: 1757981 - RNA, 19 nt, Artificial Sequence
  Description of Artificial Sequence: Synthetic oligonucleotide
cgcaggaacaccaaacggg

SEQ ID NO: 1757982 - RNA, 19 nt, Artificial Sequence
  Description of Artificial Sequence: Synthetic oligonucleotide
accaaguggaugaacuuca

SEQ ID NO: 1757983 - RNA, 19 nt, Artificial Sequence
  Description of Artificial Sequence: Synthetic oligonucleotide
gauccagacacauggguau

SEQ ID NO: 1757984 - RNA, 19 nt, Artificial Sequence
  Description of Artificial Sequence: Synthetic oligonucleotide
cagacacauggguaugcag

SEQ ID NO: 1757985 - RNA, 19 nt, Artificial Sequence
  Description of Artificial Sequence: Synthetic oligonucleotide
uggcauaaguggacuuuga

SEQ ID NO: 1757986 - RNA, 19 nt, Artificial Sequence
  Description of Artificial Sequence: Synthetic oligonucleotide
cauggagaaaucggauccc

SEQ ID NO: 1757987 - RNA, 19 nt, Artificial Sequence
  Description of Artificial Sequence: Synthetic oligonucleotide
aacgagggacaaauuauuu

SEQ ID NO: 1757988 - RNA, 19 nt, Artificial Sequence
  Description of Artificial Sequence: Synthetic oligonucleotide
gacucgaaacgcuccccgc

SEQ ID NO: 1757989 - RNA, 19 nt, Artificial Sequence
  Description of Artificial Sequence: Synthetic oligonucleotide
cucgacaaggauggugucc

SEQ ID NO: 1757990 - RNA, 19 nt, Artificial Sequence
  Description of Artificial Sequence: Synthetic oligonucleotide
ucaaaacgagggacaaauu

SEQ ID NO: 1757991 - RNA, 19 nt, Artificial Sequence
  Description of Artificial Sequence: Synthetic oligonucleotide
gguaugcacaaccucaaaa

SEQ ID NO: 1757992 - RNA, 19 nt, Artificial Sequence
  Description of Artificial Sequence: Synthetic oligonucleotide
cauagagauuugaggucug

SEQ ID NO: 1757993 - RNA, 19 nt, Artificial Sequence
  Description of Artificial Sequence: Synthetic oligonucleotide
uccuccaaacgacuaugau

SEQ ID NO: 1757994 - RNA, 19 nt, Artificial Sequence
  Description of Artificial Sequence: Synthetic oligonucleotide
ccuccaaacgacuaugauc

SEQ ID NO: 1757995 - RNA, 19 nt, Artificial Sequence
  Description of Artificial Sequence: Synthetic oligonucleotide
ugcacagucucugguugag

SEQ ID NO: 1757996 - RNA, 19 nt, Artificial Sequence
  Description of Artificial Sequence: Synthetic oligonucleotide
ugugacaagcgagaacuuu

SEQ ID NO: 1757997 - RNA, 19 nt, Artificial Sequence
  Description of Artificial Sequence: Synthetic oligonucleotide
gagaagcuacuacucgaca

SEQ ID NO: 1757998 - RNA, 19 nt, Artificial Sequence
  Description of Artificial Sequence: Synthetic oligonucleotide
gacaagcgagaacuuuuca

SEQ ID NO: 1757999 - RNA, 19 nt, Artificial Sequence
  Description of Artificial Sequence: Synthetic oligonucleotide
ggaggaguuucuuugaacu

SEQ ID NO: 1758000 - RNA, 19 nt, Artificial Sequence
  Description of Artificial Sequence: Synthetic oligonucleotide
cuacucgacaaggauggug

SEQ ID NO: 1758001 - RNA, 19 nt, Artificial Sequence
  Description of Artificial Sequence: Synthetic oligonucleotide
cuuccuccaaacgacuaug

SEQ ID NO: 1758002 - RNA, 19 nt, Artificial Sequence
  Description of Artificial Sequence: Synthetic oligonucleotide
uccacacuuccuuguguga

SEQ ID NO: 1758003 - RNA, 19 nt, Artificial Sequence
  Description of Artificial Sequence: Synthetic oligonucleotide
auggguaugcaggugcugu

SEQ ID NO: 1758004 - RNA, 19 nt, Artificial Sequence
  Description of Artificial Sequence: Synthetic oligonucleotide
ugguguccacacuuccuug

SEQ ID NO: 1758005 - RNA, 19 nt, Artificial Sequence
  Description of Artificial Sequence: Synthetic oligonucleotide
acucgacaaggaugguguc

SEQ ID NO: 1758006 - RNA, 19 nt, Artificial Sequence
  Description of Artificial Sequence: Synthetic oligonucleotide
gcccaauugcaagagagag

SEQ ID NO: 1758007 - RNA, 19 nt, Artificial Sequence
  Description of Artificial Sequence: Synthetic oligonucleotide
caagucuaaauguucuugu

SEQ ID NO: 1758008 - RNA, 19 nt, Artificial Sequence
  Description of Artificial Sequence: Synthetic oligonucleotide
gacuuugauacuguucucu

SEQ ID NO: 1758009 - RNA, 19 nt, Artificial Sequence
  Description of Artificial Sequence: Synthetic oligonucleotide
ggacucgaaacgcuccccg

SEQ ID NO: 1758010 - RNA, 19 nt, Artificial Sequence
  Description of Artificial Sequence: Synthetic oligonucleotide
uaauggcauaaguggacuu

SEQ ID NO: 1758011 - RNA, 19 nt, Artificial Sequence
  Description of Artificial Sequence: Synthetic oligonucleotide
guucuugugacaagcgaga

SEQ ID NO: 1758012 - RNA, 19 nt, Artificial Sequence
  Description of Artificial Sequence: Synthetic oligonucleotide
aggcaagucuaaauguucu

SEQ ID NO: 1758013 - RNA, 19 nt, Artificial Sequence
  Description of Artificial Sequence: Synthetic oligonucleotide
caaugugggaaagguaguc

SEQ ID NO: 1758014 - RNA, 19 nt, Artificial Sequence
  Description of Artificial Sequence: Synthetic oligonucleotide
caugaggaaguaaauaauu

SEQ ID NO: 1758015 - RNA, 19 nt, Artificial Sequence
  Description of Artificial Sequence: Synthetic oligonucleotide
cuguaaaggcucugcagga

SEQ ID NO: 1758016 - RNA, 19 nt, Artificial Sequence
  Description of Artificial Sequence: Synthetic oligonucleotide
auggugcaugaaucuuuuc

SEQ ID NO: 1758017 - RNA, 19 nt, Artificial Sequence
  Description of Artificial Sequence: Synthetic oligonucleotide
gccuccugcauucaagagc

SEQ ID NO: 1758018 - RNA, 19 nt, Artificial Sequence
  Description of Artificial Sequence: Synthetic oligonucleotide
ugcgggacucgaaacgcuc

SEQ ID NO: 1758019 - RNA, 19 nt, Artificial Sequence
  Description of Artificial Sequence: Synthetic oligonucleotide
cgcaguaauggcauaagug

SEQ ID NO: 1758020 - RNA, 19 nt, Artificial Sequence
  Description of Artificial Sequence: Synthetic oligonucleotide
uuaauucuacuggcucugu

SEQ ID NO: 1758021 - RNA, 19 nt, Artificial Sequence
  Description of Artificial Sequence: Synthetic oligonucleotide
aaguggacuuugauacugu

SEQ ID NO: 1758022 - RNA, 19 nt, Artificial Sequence
  Description of Artificial Sequence: Synthetic oligonucleotide
caccaaguggaugaacuuc

SEQ ID NO: 1758023 - RNA, 19 nt, Artificial Sequence
  Description of Artificial Sequence: Synthetic oligonucleotide
ugcauucaagagccucacu

SEQ ID NO: 1758024 - RNA, 19 nt, Artificial Sequence
  Description of Artificial Sequence: Synthetic oligonucleotide
cacagucucugguugagaa

SEQ ID NO: 1758025 - RNA, 19 nt, Artificial Sequence
  Description of Artificial Sequence: Synthetic oligonucleotide
gaucacaucgcuccuguuu

SEQ ID NO: 1758026 - RNA, 19 nt, Artificial Sequence
  Description of Artificial Sequence: Synthetic oligonucleotide
caacagaccaugaggaagu

SEQ ID NO: 1758027 - RNA, 19 nt, Artificial Sequence
  Description of Artificial Sequence: Synthetic oligonucleotide
cucaaaacgagggacaaau

SEQ ID NO: 1758028 - RNA, 19 nt, Artificial Sequence
  Description of Artificial Sequence: Synthetic oligonucleotide
ugagaacacuugauucauu

SEQ ID NO: 1758029 - RNA, 19 nt, Artificial Sequence
  Description of Artificial Sequence: Synthetic oligonucleotide
aggaugguguccacacuuc

SEQ ID NO: 1758030 - RNA, 19 nt, Artificial Sequence
  Description of Artificial Sequence: Synthetic oligonucleotide
uugggagaucacagucucu

SEQ ID NO: 1758031 - RNA, 19 nt, Artificial Sequence
  Description of Artificial Sequence: Synthetic oligonucleotide
cacuugacugaucuguaaa

SEQ ID NO: 1758032 - RNA, 19 nt, Artificial Sequence
  Description of Artificial Sequence: Synthetic oligonucleotide
gaccaugaggaaguaaaua

SEQ ID NO: 1758033 - RNA, 19 nt, Artificial Sequence
  Description of Artificial Sequence: Synthetic oligonucleotide
gcauaaguggacuuugaua

SEQ ID NO: 1758034 - RNA, 19 nt, Artificial Sequence
  Description of Artificial Sequence: Synthetic oligonucleotide
cuaugauccacaaucuguu

SEQ ID NO: 1758035 - RNA, 19 nt, Artificial Sequence
  Description of Artificial Sequence: Synthetic oligonucleotide
acuguuacugggaggaguu

SEQ ID NO: 1758036 - RNA, 19 nt, Artificial Sequence
  Description of Artificial Sequence: Synthetic oligonucleotide
agugcucaggcggcgcugg

SEQ ID NO: 1758037 - RNA, 19 nt, Artificial Sequence
  Description of Artificial Sequence: Synthetic oligonucleotide
cagucacuucggaagagga

SEQ ID NO: 1758038 - RNA, 19 nt, Artificial Sequence
  Description of Artificial Sequence: Synthetic oligonucleotide
acacuuccuugugugagcu

SEQ ID NO: 1758039 - RNA, 19 nt, Artificial Sequence
  Description of Artificial Sequence: Synthetic oligonucleotide
agauccagacacaugggua

SEQ ID NO: 1758040 - RNA, 19 nt, Artificial Sequence
  Description of Artificial Sequence: Synthetic oligonucleotide
cuagagugcucaggcggcg

SEQ ID NO: 1758041 - RNA, 19 nt, Artificial Sequence
  Description of Artificial Sequence: Synthetic oligonucleotide
acugaucuguaaaggcucu

SEQ ID NO: 1758042 - RNA, 19 nt, Artificial Sequence
  Description of Artificial Sequence: Synthetic oligonucleotide
cccaauugcaagagagagc

SEQ ID NO: 1758043 - RNA, 19 nt, Artificial Sequence
  Description of Artificial Sequence: Synthetic oligonucleotide
gacaaggaugguguccaca

SEQ ID NO: 1758044 - RNA, 19 nt, Artificial Sequence
  Description of Artificial Sequence: Synthetic oligonucleotide
cucggcuagagugcucagg

SEQ ID NO: 1758045 - RNA, 19 nt, Artificial Sequence
  Description of Artificial Sequence: Synthetic oligonucleotide
ucacaucgcuccuguuuga

SEQ ID NO: 1758046 - RNA, 19 nt, Artificial Sequence
  Description of Artificial Sequence: Synthetic oligonucleotide
cuggguuguugaaaucuga

SEQ ID NO: 1758047 - RNA, 19 nt, Artificial Sequence
  Description of Artificial Sequence: Synthetic oligonucleotide
auugcaagagagagcugca

SEQ ID NO: 1758048 - RNA, 19 nt, Artificial Sequence
  Description of Artificial Sequence: Synthetic oligonucleotide
gugcaugaaucuuuuccaa

SEQ ID NO: 1758049 - RNA, 19 nt, Artificial Sequence
  Description of Artificial Sequence: Synthetic oligonucleotide
gggagaucacagucucugg

SEQ ID NO: 1758050 - RNA, 19 nt, Artificial Sequence
  Description of Artificial Sequence: Synthetic oligonucleotide
gucaccaaguggaugaacu

SEQ ID NO: 1758051 - RNA, 19 nt, Artificial Sequence
  Description of Artificial Sequence: Synthetic oligonucleotide
ucggaucccuuccuccaaa

SEQ ID NO: 1758052 - RNA, 19 nt, Artificial Sequence
  Description of Artificial Sequence: Synthetic oligonucleotide
agagugcucaggcggcgcu

SEQ ID NO: 1758053 - RNA, 19 nt, Artificial Sequence
  Description of Artificial Sequence: Synthetic oligonucleotide
cacuuccaucaucuagccc

SEQ ID NO: 1758054 - RNA, 19 nt, Artificial Sequence
  Description of Artificial Sequence: Synthetic oligonucleotide
acgcuccccgcaguaaugg

SEQ ID NO: 1758055 - RNA, 19 nt, Artificial Sequence
  Description of Artificial Sequence: Synthetic oligonucleotide
uccaaacgacuaugaucca

SEQ ID NO: 1758056 - RNA, 19 nt, Artificial Sequence
  Description of Artificial Sequence: Synthetic oligonucleotide
caucggaccagcugucaca

SEQ ID NO: 1758057 - RNA, 19 nt, Artificial Sequence
  Description of Artificial Sequence: Synthetic oligonucleotide
auuuauggccacagauggu

SEQ ID NO: 1758058 - RNA, 19 nt, Artificial Sequence
  Description of Artificial Sequence: Synthetic oligonucleotide
gcccuuguuugacagcugc

SEQ ID NO: 1758059 - RNA, 19 nt, Artificial Sequence
  Description of Artificial Sequence: Synthetic oligonucleotide
ugucaccaaguggaugaac

SEQ ID NO: 1758060 - RNA, 19 nt, Artificial Sequence
  Description of Artificial Sequence: Synthetic oligonucleotide
caguaacuggcucuuucga

SEQ ID NO: 1758061 - RNA, 19 nt, Artificial Sequence
  Description of Artificial Sequence: Synthetic oligonucleotide
ccaauugcaagagagagcu

SEQ ID NO: 1758062 - RNA, 19 nt, Artificial Sequence
  Description of Artificial Sequence: Synthetic oligonucleotide
gucaacagaccaugaggaa

SEQ ID NO: 1758063 - RNA, 19 nt, Artificial Sequence
  Description of Artificial Sequence: Synthetic oligonucleotide
ggagaagcuacuacucgac

SEQ ID NO: 1758064 - RNA, 19 nt, Artificial Sequence
  Description of Artificial Sequence: Synthetic oligonucleotide
ccaugucuuauaauaagaa

SEQ ID NO: 1758065 - RNA, 19 nt, Artificial Sequence
  Description of Artificial Sequence: Synthetic oligonucleotide
gagggaccagucacuucgg

SEQ ID NO: 1758066 - RNA, 19 nt, Artificial Sequence
  Description of Artificial Sequence: Synthetic oligonucleotide
cuuugauacuguucucugu

SEQ ID NO: 1758067 - RNA, 19 nt, Artificial Sequence
  Description of Artificial Sequence: Synthetic oligonucleotide
guaauggcauaaguggacu

SEQ ID NO: 1758068 - RNA, 19 nt, Artificial Sequence
  Description of Artificial Sequence: Synthetic oligonucleotide
cugguaugcacaaccucaa

SEQ ID NO: 1758069 - RNA, 19 nt, Artificial Sequence
  Description of Artificial Sequence: Synthetic oligonucleotide
accucaaaacgagggacaa

SEQ ID NO: 1758070 - RNA, 19 nt, Artificial Sequence
  Description of Artificial Sequence: Synthetic oligonucleotide
uuccuugugugagcucuga

SEQ ID NO: 1758071 - RNA, 19 nt, Artificial Sequence
  Description of Artificial Sequence: Synthetic oligonucleotide
cagaugguacaacugauuu

SEQ ID NO: 1758072 - RNA, 19 nt, Artificial Sequence
  Description of Artificial Sequence: Synthetic oligonucleotide
uugugacaagcgagaacuu

SEQ ID NO: 1758073 - RNA, 19 nt, Artificial Sequence
  Description of Artificial Sequence: Synthetic oligonucleotide
gccaugucuuauaauaaga

SEQ ID NO: 1758074 - RNA, 19 nt, Artificial Sequence
  Description of Artificial Sequence: Synthetic oligonucleotide
gggacaucggaccagcugu

SEQ ID NO: 1758075 - RNA, 19 nt, Artificial Sequence
  Description of Artificial Sequence: Synthetic oligonucleotide
agcuacuacucgacaagga

SEQ ID NO: 1758076 - RNA, 19 nt, Artificial Sequence
  Description of Artificial Sequence: Synthetic oligonucleotide
aucgcuccuguuugaugga

SEQ ID NO: 1758077 - RNA, 19 nt, Artificial Sequence
  Description of Artificial Sequence: Synthetic oligonucleotide
caguuuaauucuacuggcu

SEQ ID NO: 1758078 - RNA, 19 nt, Artificial Sequence
  Description of Artificial Sequence: Synthetic oligonucleotide
ggggacaucggaccagcug

SEQ ID NO: 1758079 - RNA, 19 nt, Artificial Sequence
  Description of Artificial Sequence: Synthetic oligonucleotide
gcaagagagagcugcaacu

SEQ ID NO: 1758080 - RNA, 19 nt, Artificial Sequence
  Description of Artificial Sequence: Synthetic oligonucleotide
aucggaccagcugucacaa

SEQ ID NO: 1758081 - RNA, 19 nt, Artificial Sequence
  Description of Artificial Sequence: Synthetic oligonucleotide
ccaaacgggagagauccag

SEQ ID NO: 1758082 - RNA, 19 nt, Artificial Sequence
  Description of Artificial Sequence: Synthetic oligonucleotide
cugggaggaguuucuuuga

SEQ ID NO: 1758083 - RNA, 19 nt, Artificial Sequence
  Description of Artificial Sequence: Synthetic oligonucleotide
gcucgguuuccacuguuac

SEQ ID NO: 1758084 - RNA, 19 nt, Artificial Sequence
  Description of Artificial Sequence: Synthetic oligonucleotide
uggcucuuucgaagaaauu

SEQ ID NO: 1758085 - RNA, 19 nt, Artificial Sequence
  Description of Artificial Sequence: Synthetic oligonucleotide
auccagacacauggguaug

SEQ ID NO: 1758086 - RNA, 19 nt, Artificial Sequence
  Description of Artificial Sequence: Synthetic oligonucleotide
guguuccaguaacuggcuc

SEQ ID NO: 1758087 - RNA, 19 nt, Artificial Sequence
  Description of Artificial Sequence: Synthetic oligonucleotide
gcaggaacaccaaacggga

SEQ ID NO: 1758088 - RNA, 19 nt, Artificial Sequence
  Description of Artificial Sequence: Synthetic oligonucleotide
agaccaugaggaaguaaau

SEQ ID NO: 1758089 - RNA, 19 nt, Artificial Sequence
  Description of Artificial Sequence: Synthetic oligonucleotide
aucggaucccuuccuccaa

SEQ ID NO: 1758090 - RNA, 19 nt, Artificial Sequence
  Description of Artificial Sequence: Synthetic oligonucleotide
cucuuucgaagaaauuuau

SEQ ID NO: 1758091 - RNA, 19 nt, Artificial Sequence
  Description of Artificial Sequence: Synthetic oligonucleotide
caaaccuuuggcaucuguu

SEQ ID NO: 1758092 - RNA, 19 nt, Artificial Sequence
  Description of Artificial Sequence: Synthetic oligonucleotide
gaacugguaugcacaaccu

SEQ ID NO: 1758093 - RNA, 19 nt, Artificial Sequence
  Description of Artificial Sequence: Synthetic oligonucleotide
gacacuugacugaucugua

SEQ ID NO: 1758094 - RNA, 19 nt, Artificial Sequence
  Description of Artificial Sequence: Synthetic oligonucleotide
gucucuggaucacaucgcu

SEQ ID NO: 1758095 - RNA, 19 nt, Artificial Sequence
  Description of Artificial Sequence: Synthetic oligonucleotide
aggugcugucucagguuac

SEQ ID NO: 1758096 - RNA, 19 nt, Artificial Sequence
  Description of Artificial Sequence: Synthetic oligonucleotide
guuguaucuguaagauuua

SEQ ID NO: 1758097 - RNA, 19 nt, Artificial Sequence
  Description of Artificial Sequence: Synthetic oligonucleotide
gcuagagugcucaggcggc

SEQ ID NO: 1758098 - RNA, 19 nt, Artificial Sequence
  Description of Artificial Sequence: Synthetic oligonucleotide
ggagagauccagacacaug

SEQ ID NO: 1758099 - RNA, 19 nt, Artificial Sequence
  Description of Artificial Sequence: Synthetic oligonucleotide
guuacugggaggaguuucu

SEQ ID NO: 1758100 - RNA, 19 nt, Artificial Sequence
  Description of Artificial Sequence: Synthetic oligonucleotide
ucgcuccuguuugauggac

SEQ ID NO: 1758101 - RNA, 19 nt, Artificial Sequence
  Description of Artificial Sequence: Synthetic oligonucleotide
gcuacuacucgacaaggau

SEQ ID NO: 1758102 - RNA, 19 nt, Artificial Sequence
  Description of Artificial Sequence: Synthetic oligonucleotide
gacaucggaccagcuguca

SEQ ID NO: 1758103 - RNA, 19 nt, Artificial Sequence
  Description of Artificial Sequence: Synthetic oligonucleotide
ggcucuuucgaagaaauuu

SEQ ID NO: 1758104 - RNA, 19 nt, Artificial Sequence
  Description of Artificial Sequence: Synthetic oligonucleotide
acagaccaugaggaaguaa

SEQ ID NO: 1758105 - RNA, 19 nt, Artificial Sequence
  Description of Artificial Sequence: Synthetic oligonucleotide
gcucuuucgaagaaauuua

SEQ ID NO: 1758106 - RNA, 19 nt, Artificial Sequence
  Description of Artificial Sequence: Synthetic oligonucleotide
caggugcugucucagguua

SEQ ID NO: 1758107 - RNA, 19 nt, Artificial Sequence
  Description of Artificial Sequence: Synthetic oligonucleotide
cuggacagcagcucgguuu

SEQ ID NO: 1758108 - RNA, 19 nt, Artificial Sequence
  Description of Artificial Sequence: Synthetic oligonucleotide
ggucauuacuuuccaaaau

SEQ ID NO: 1758109 - RNA, 19 nt, Artificial Sequence
  Description of Artificial Sequence: Synthetic oligonucleotide
gaaacgcuccccgcaguaa

SEQ ID NO: 1758110 - RNA, 19 nt, Artificial Sequence
  Description of Artificial Sequence: Synthetic oligonucleotide
cuuguuugacagcugcuuu

SEQ ID NO: 1758111 - RNA, 19 nt, Artificial Sequence
  Description of Artificial Sequence: Synthetic oligonucleotide
cugguugagaacacuugau

SEQ ID NO: 1758112 - RNA, 19 nt, Artificial Sequence
  Description of Artificial Sequence: Synthetic oligonucleotide
cuaagccuccugcauucaa

SEQ ID NO: 1758113 - RNA, 19 nt, Artificial Sequence
  Description of Artificial Sequence: Synthetic oligonucleotide
cacagaugguacaacugau

SEQ ID NO: 1758114 - RNA, 19 nt, Artificial Sequence
  Description of Artificial Sequence: Synthetic oligonucleotide
gauuugaggucugcacagu

SEQ ID NO: 1758115 - RNA, 19 nt, Artificial Sequence
  Description of Artificial Sequence: Synthetic oligonucleotide
cugcacagucucugguuga

SEQ ID NO: 1758116 - RNA, 19 nt, Artificial Sequence
  Description of Artificial Sequence: Synthetic oligonucleotide
gagcuaagccuccugcauu

SEQ ID NO: 1758117 - RNA, 19 nt, Artificial Sequence
  Description of Artificial Sequence: Synthetic oligonucleotide
gagugcucaggcggcgcug

SEQ ID NO: 1758118 - RNA, 19 nt, Artificial Sequence
  Description of Artificial Sequence: Synthetic oligonucleotide
ccaaguggaugaacuucac

SEQ ID NO: 1758119 - RNA, 19 nt, Artificial Sequence
  Description of Artificial Sequence: Synthetic oligonucleotide
cucgguuuccacuguuacu

SEQ ID NO: 1758120 - RNA, 19 nt, Artificial Sequence
  Description of Artificial Sequence: Synthetic oligonucleotide
gaacaccaaacgggagaga

SEQ ID NO: 1758121 - RNA, 19 nt, Artificial Sequence
  Description of Artificial Sequence: Synthetic oligonucleotide
cuugacaaugaaggagcua

SEQ ID NO: 1758122 - RNA, 19 nt, Artificial Sequence
  Description of Artificial Sequence: Synthetic oligonucleotide
gaugggcccucugcuguuc

SEQ ID NO: 1758123 - RNA, 19 nt, Artificial Sequence
  Description of Artificial Sequence: Synthetic oligonucleotide
acuacucgacaaggauggu

SEQ ID NO: 1758124 - RNA, 19 nt, Artificial Sequence
  Description of Artificial Sequence: Synthetic oligonucleotide
cacuuccuugugugagcuc

SEQ ID NO: 1758125 - RNA, 19 nt, Artificial Sequence
  Description of Artificial Sequence: Synthetic oligonucleotide
uccaaaccuuuggcaucug

SEQ ID NO: 1758126 - RNA, 19 nt, Artificial Sequence
  Description of Artificial Sequence: Synthetic oligonucleotide
cagcccuuguuugacagcu

SEQ ID NO: 1758127 - RNA, 19 nt, Artificial Sequence
  Description of Artificial Sequence: Synthetic oligonucleotide
ggcauaaguggacuuugau

SEQ ID NO: 1758128 - RNA, 19 nt, Artificial Sequence
  Description of Artificial Sequence: Synthetic oligonucleotide
cugggccaaugaauuucca

SEQ ID NO: 1758129 - RNA, 19 nt, Artificial Sequence
  Description of Artificial Sequence: Synthetic oligonucleotide
cagcauggagaaaucggau

SEQ ID NO: 1758130 - RNA, 19 nt, Artificial Sequence
  Description of Artificial Sequence: Synthetic oligonucleotide
agguuacugcgggacucga

SEQ ID NO: 1758131 - RNA, 19 nt, Artificial Sequence
  Description of Artificial Sequence: Synthetic oligonucleotide
gucugcacagucucugguu

SEQ ID NO: 1758132 - RNA, 19 nt, Artificial Sequence
  Description of Artificial Sequence: Synthetic oligonucleotide
ccaugaggaaguaaauaau

SEQ ID NO: 1758133 - RNA, 19 nt, Artificial Sequence
  Description of Artificial Sequence: Synthetic oligonucleotide
cgguuuccacuguuacugg

SEQ ID NO: 1758134 - RNA, 19 nt, Artificial Sequence
  Description of Artificial Sequence: Synthetic oligonucleotide
cuguuguaucuguaagauu

SEQ ID NO: 1758135 - RNA, 19 nt, Artificial Sequence
  Description of Artificial Sequence: Synthetic oligonucleotide
gcgggacucgaaacgcucc

SEQ ID NO: 1758136 - RNA, 19 nt, Artificial Sequence
  Description of Artificial Sequence: Synthetic oligonucleotide
ucggaccagcugucacaau

SEQ ID NO: 1758137 - RNA, 19 nt, Artificial Sequence
  Description of Artificial Sequence: Synthetic oligonucleotide
ccuugggagaucacagucu

SEQ ID NO: 1758138 - RNA, 19 nt, Artificial Sequence
  Description of Artificial Sequence: Synthetic oligonucleotide
gggcccucugcuguucagc

SEQ ID NO: 1758139 - RNA, 19 nt, Artificial Sequence
  Description of Artificial Sequence: Synthetic oligonucleotide
cagcagcucgguuuccacu

SEQ ID NO: 1758140 - RNA, 19 nt, Artificial Sequence
  Description of Artificial Sequence: Synthetic oligonucleotide
uccccgcaguaauggcaua

SEQ ID NO: 1758141 - RNA, 19 nt, Artificial Sequence
  Description of Artificial Sequence: Synthetic oligonucleotide
cggcuagagugcucaggcg

SEQ ID NO: 1758142 - RNA, 19 nt, Artificial Sequence
  Description of Artificial Sequence: Synthetic oligonucleotide
ggacaucggaccagcuguc

SEQ ID NO: 1758143 - RNA, 19 nt, Artificial Sequence
  Description of Artificial Sequence: Synthetic oligonucleotide
gggagagauccagacacau

SEQ ID NO: 1758144 - RNA, 19 nt, Artificial Sequence
  Description of Artificial Sequence: Synthetic oligonucleotide
cugcgggacucgaaacgcu

SEQ ID NO: 1758145 - RNA, 19 nt, Artificial Sequence
  Description of Artificial Sequence: Synthetic oligonucleotide
cugucaccaaguggaugaa

SEQ ID NO: 1758146 - RNA, 19 nt, Artificial Sequence
  Description of Artificial Sequence: Synthetic oligonucleotide
gguuacugcgggacucgaa

SEQ ID NO: 1758147 - RNA, 19 nt, Artificial Sequence
  Description of Artificial Sequence: Synthetic oligonucleotide
cgacuaugauccacaaucu

SEQ ID NO: 1758148 - RNA, 19 nt, Artificial Sequence
  Description of Artificial Sequence: Synthetic oligonucleotide
cugugucuuuggagaucaa

SEQ ID NO: 1758149 - RNA, 19 nt, Artificial Sequence
  Description of Artificial Sequence: Synthetic oligonucleotide
gcuaagccuccugcauuca

SEQ ID NO: 1758150 - RNA, 19 nt, Artificial Sequence
  Description of Artificial Sequence: Synthetic oligonucleotide
cacaucgcuccuguuugau

SEQ ID NO: 1758151 - RNA, 19 nt, Artificial Sequence
  Description of Artificial Sequence: Synthetic oligonucleotide
cccuuccuccaaacgacua

SEQ ID NO: 1758152 - RNA, 19 nt, Artificial Sequence
  Description of Artificial Sequence: Synthetic oligonucleotide
ccuuccuccaaacgacuau

SEQ ID NO: 1758153 - RNA, 19 nt, Artificial Sequence
  Description of Artificial Sequence: Synthetic oligonucleotide
cgcuccuguuugauggaca

SEQ ID NO: 1758154 - RNA, 19 nt, Artificial Sequence
  Description of Artificial Sequence: Synthetic oligonucleotide
ccgcaguaauggcauaagu

SEQ ID NO: 1758155 - RNA, 19 nt, Artificial Sequence
  Description of Artificial Sequence: Synthetic oligonucleotide
cgcuggcugcugcucauuc

SEQ ID NO: 1758156 - RNA, 19 nt, Artificial Sequence
  Description of Artificial Sequence: Synthetic oligonucleotide
ccucaaaacgagggacaaa

SEQ ID NO: 1758157 - RNA, 19 nt, Artificial Sequence
  Description of Artificial Sequence: Synthetic oligonucleotide
ccuuuggcaucuguuguau

SEQ ID NO: 1758158 - RNA, 19 nt, Artificial Sequence
  Description of Artificial Sequence: Synthetic oligonucleotide
cgaaacgcuccccgcagua

SEQ ID NO: 1758159 - RNA, 19 nt, Artificial Sequence
  Description of Artificial Sequence: Synthetic oligonucleotide
cuccugcauucaagagccu

SEQ ID NO: 1758160 - RNA, 19 nt, Artificial Sequence
  Description of Artificial Sequence: Synthetic oligonucleotide
ccccgcaguaauggcauaa

SEQ ID NO: 1758161 - RNA, 19 nt, Artificial Sequence
  Description of Artificial Sequence: Synthetic oligonucleotide
cuguuacugggaggaguuu

SEQ ID NO: 1758162 - RNA, 19 nt, Artificial Sequence
  Description of Artificial Sequence: Synthetic oligonucleotide
cagcucgguuuccacuguu

SEQ ID NO: 1758163 - RNA, 19 nt, Artificial Sequence
  Description of Artificial Sequence: Synthetic oligonucleotide
ggaucacaucgcuccuguu

SEQ ID NO: 1758164 - RNA, 19 nt, Artificial Sequence
  Description of Artificial Sequence: Synthetic oligonucleotide
ggaugggcccucugcuguu

SEQ ID NO: 1758165 - RNA, 19 nt, Artificial Sequence
  Description of Artificial Sequence: Synthetic oligonucleotide
cugaaaccucugggccaau

SEQ ID NO: 1758166 - RNA, 19 nt, Artificial Sequence
  Description of Artificial Sequence: Synthetic oligonucleotide
aaauaaugugccuuuaucc

SEQ ID NO: 1758167 - RNA, 19 nt, Artificial Sequence
  Description of Artificial Sequence: Synthetic oligonucleotide
aauauauagaacuuuuagg

SEQ ID NO: 1758168 - RNA, 19 nt, Artificial Sequence
  Description of Artificial Sequence: Synthetic oligonucleotide
ucuuauuuggaaaauauag

SEQ ID NO: 1758169 - RNA, 19 nt, Artificial Sequence
  Description of Artificial Sequence: Synthetic oligonucleotide
uaucauaacaaauugagcu

SEQ ID NO: 1758170 - RNA, 19 nt, Artificial Sequence
  Description of Artificial Sequence: Synthetic oligonucleotide
  modified_base (2)..(2): a, c, u, g, unknown or other
gnaauuucaauacuguucc

SEQ ID NO: 1758171 - RNA, 19 nt, Artificial Sequence
  Description of Artificial Sequence: Synthetic oligonucleotide
aaauugagcucuuauuugg

SEQ ID NO: 1758172 - RNA, 19 nt, Artificial Sequence
  Description of Artificial Sequence: Synthetic oligonucleotide
aaauauagaagguacaaau

SEQ ID NO: 1758173 - RNA, 19 nt, Artificial Sequence
  Description of Artificial Sequence: Synthetic oligonucleotide
aaaaugacgacaccaguuc

SEQ ID NO: 1758174 - RNA, 19 nt, Artificial Sequence
  Description of Artificial Sequence: Synthetic oligonucleotide
uaugacgucgaacagacug

SEQ ID NO: 1758175 - RNA, 19 nt, Artificial Sequence
  Description of Artificial Sequence: Synthetic oligonucleotide
uucacauuaacucaguauc

SEQ ID NO: 1758176 - RNA, 19 nt, Artificial Sequence
  Description of Artificial Sequence: Synthetic oligonucleotide
aaacacuucacaugauugg

SEQ ID NO: 1758177 - RNA, 19 nt, Artificial Sequence
  Description of Artificial Sequence: Synthetic oligonucleotide
uggugaauaaaccacuuag

SEQ ID NO: 1758178 - RNA, 19 nt, Artificial Sequence
  Description of Artificial Sequence: Synthetic oligonucleotide
ucuauguuucaaaauaaca

SEQ ID NO: 1758179 - RNA, 19 nt, Artificial Sequence
  Description of Artificial Sequence: Synthetic oligonucleotide
ucaguaucauaacaaauug

SEQ ID NO: 1758180 - RNA, 19 nt, Artificial Sequence
  Description of Artificial Sequence: Synthetic oligonucleotide
aaauaguuacucaagaacu

SEQ ID NO: 1758181 - RNA, 19 nt, Artificial Sequence
  Description of Artificial Sequence: Synthetic oligonucleotide
uguacuguuuguaugacgu

SEQ ID NO: 1758182 - RNA, 19 nt, Artificial Sequence
  Description of Artificial Sequence: Synthetic oligonucleotide
uuacucaagaacuacucag

SEQ ID NO: 1758183 - RNA, 19 nt, Artificial Sequence
  Description of Artificial Sequence: Synthetic oligonucleotide
aauguauacuggccaagcg

SEQ ID NO: 1758184 - RNA, 19 nt, Artificial Sequence
  Description of Artificial Sequence: Synthetic oligonucleotide
aguaucauaacaaauugag

SEQ ID NO: 1758185 - RNA, 19 nt, Artificial Sequence
  Description of Artificial Sequence: Synthetic oligonucleotide
aauuucaauacuguuccuc

SEQ ID NO: 1758186 - RNA, 19 nt, Artificial Sequence
  Description of Artificial Sequence: Synthetic oligonucleotide
uuggauuuggugaauaaac

SEQ ID NO: 1758187 - RNA, 19 nt, Artificial Sequence
  Description of Artificial Sequence: Synthetic oligonucleotide
aucauaacaaauugagcuc

SEQ ID NO: 1758188 - RNA, 19 nt, Artificial Sequence
  Description of Artificial Sequence: Synthetic oligonucleotide
ucugacaaaaugacgacac

SEQ ID NO: 1758189 - RNA, 19 nt, Artificial Sequence
  Description of Artificial Sequence: Synthetic oligonucleotide
auauagaagguacaaauau

SEQ ID NO: 1758190 - RNA, 19 nt, Artificial Sequence
  Description of Artificial Sequence: Synthetic oligonucleotide
ucuuuguugucuuagcaug

SEQ ID NO: 1758191 - RNA, 19 nt, Artificial Sequence
  Description of Artificial Sequence: Synthetic oligonucleotide
uguaugacgucgaacagac

SEQ ID NO: 1758192 - RNA, 19 nt, Artificial Sequence
  Description of Artificial Sequence: Synthetic oligonucleotide
guuuguaugacgucgaaca

SEQ ID NO: 1758193 - RNA, 19 nt, Artificial Sequence
  Description of Artificial Sequence: Synthetic oligonucleotide
uguuagaugggcaugccga

SEQ ID NO: 1758194 - RNA, 19 nt, Artificial Sequence
  Description of Artificial Sequence: Synthetic oligonucleotide
auuaacucaguaucauaac

SEQ ID NO: 1758195 - RNA, 19 nt, Artificial Sequence
  Description of Artificial Sequence: Synthetic oligonucleotide
ugaauaaaccacuuaguuc

SEQ ID NO: 1758196 - RNA, 19 nt, Artificial Sequence
  Description of Artificial Sequence: Synthetic oligonucleotide
uguacacgaauguauacug

SEQ ID NO: 1758197 - RNA, 19 nt, Artificial Sequence
  Description of Artificial Sequence: Synthetic oligonucleotide
aacacuucacaugauuggg

SEQ ID NO: 1758198 - RNA, 19 nt, Artificial Sequence
  Description of Artificial Sequence: Synthetic oligonucleotide
uuaaauaguuacucaagaa

SEQ ID NO: 1758199 - RNA, 19 nt, Artificial Sequence
  Description of Artificial Sequence: Synthetic oligonucleotide
agaugugggagcuuaaaug

SEQ ID NO: 1758200 - RNA, 19 nt, Artificial Sequence
  Description of Artificial Sequence: Synthetic oligonucleotide
uacuguuuguaugacgucg

SEQ ID NO: 1758201 - RNA, 19 nt, Artificial Sequence
  Description of Artificial Sequence: Synthetic oligonucleotide
uuucuauguuucaaaauaa

SEQ ID NO: 1758202 - RNA, 19 nt, Artificial Sequence
  Description of Artificial Sequence: Synthetic oligonucleotide
auauagaacuuuuaggaua

SEQ ID NO: 1758203 - RNA, 19 nt, Artificial Sequence
  Description of Artificial Sequence: Synthetic oligonucleotide
uaacucaguaucauaacaa

SEQ ID NO: 1758204 - RNA, 19 nt, Artificial Sequence
  Description of Artificial Sequence: Synthetic oligonucleotide
uacacgaauguauacuggc

SEQ ID NO: 1758205 - RNA, 19 nt, Artificial Sequence
  Description of Artificial Sequence: Synthetic oligonucleotide
aacaaauugagcucuuauu

SEQ ID NO: 1758206 - RNA, 19 nt, Artificial Sequence
  Description of Artificial Sequence: Synthetic oligonucleotide
uuuauccccaacuucacau

SEQ ID NO: 1758207 - RNA, 19 nt, Artificial Sequence
  Description of Artificial Sequence: Synthetic oligonucleotide
agaaagggacuucuugugg

SEQ ID NO: 1758208 - RNA, 19 nt, Artificial Sequence
  Description of Artificial Sequence: Synthetic oligonucleotide
ucagaaagggacuucuugu

SEQ ID NO: 1758209 - RNA, 19 nt, Artificial Sequence
  Description of Artificial Sequence: Synthetic oligonucleotide
ugugccuuuauccccaacu

SEQ ID NO: 1758210 - RNA, 19 nt, Artificial Sequence
  Description of Artificial Sequence: Synthetic oligonucleotide
ugucuuagcauguccagca

SEQ ID NO: 1758211 - RNA, 19 nt, Artificial Sequence
  Description of Artificial Sequence: Synthetic oligonucleotide
gauuuggugaauaaaccac

SEQ ID NO: 1758212 - RNA, 19 nt, Artificial Sequence
  Description of Artificial Sequence: Synthetic oligonucleotide
auaguuacucaagaacuac

SEQ ID NO: 1758213 - RNA, 19 nt, Artificial Sequence
  Description of Artificial Sequence: Synthetic oligonucleotide
uucuauguuucaaaauaac

SEQ ID NO: 1758214 - RNA, 19 nt, Artificial Sequence
  Description of Artificial Sequence: Synthetic oligonucleotide
cucguugugcuccagacag

SEQ ID NO: 1758215 - RNA, 19 nt, Artificial Sequence
  Description of Artificial Sequence: Synthetic oligonucleotide
ucucuucaagguaugauaa

SEQ ID NO: 1758216 - RNA, 19 nt, Artificial Sequence
  Description of Artificial Sequence: Synthetic oligonucleotide
cuuauuuggaaaauauaga

SEQ ID NO: 1758217 - RNA, 19 nt, Artificial Sequence
  Description of Artificial Sequence: Synthetic oligonucleotide
aaguucagcuucuagcuaa

SEQ ID NO: 1758218 - RNA, 19 nt, Artificial Sequence
  Description of Artificial Sequence: Synthetic oligonucleotide
  modified_base (8)..(8): a, c, u, g, unknown or other
agccccgnaauuucaauac

SEQ ID NO: 1758219 - RNA, 19 nt, Artificial Sequence
  Description of Artificial Sequence: Synthetic oligonucleotide
uuuuaaauaaugugccuuu

SEQ ID NO: 1758220 - RNA, 19 nt, Artificial Sequence
  Description of Artificial Sequence: Synthetic oligonucleotide
uggucaccgaagcacaggg

SEQ ID NO: 1758221 - RNA, 19 nt, Artificial Sequence
  Description of Artificial Sequence: Synthetic oligonucleotide
aacucaguaucauaacaaa

SEQ ID NO: 1758222 - RNA, 19 nt, Artificial Sequence
  Description of Artificial Sequence: Synthetic oligonucleotide
cuuuugaggaacuggauga

SEQ ID NO: 1758223 - RNA, 19 nt, Artificial Sequence
  Description of Artificial Sequence: Synthetic oligonucleotide
caaauugagcucuuauuug

SEQ ID NO: 1758224 - RNA, 19 nt, Artificial Sequence
  Description of Artificial Sequence: Synthetic oligonucleotide
aaaauauagaagguacaaa

SEQ ID NO: 1758225 - RNA, 19 nt, Artificial Sequence
  Description of Artificial Sequence: Synthetic oligonucleotide
uuaaauaaugugccuuuau

SEQ ID NO: 1758226 - RNA, 19 nt, Artificial Sequence
  Description of Artificial Sequence: Synthetic oligonucleotide
cuuucuauguuucaaaaua

SEQ ID NO: 1758227 - RNA, 19 nt, Artificial Sequence
  Description of Artificial Sequence: Synthetic oligonucleotide
cucaggcuccguaaaaugg

SEQ ID NO: 1758228 - RNA, 19 nt, Artificial Sequence
  Description of Artificial Sequence: Synthetic oligonucleotide
ucuuuaguuuuggauuugg

SEQ ID NO: 1758229 - RNA, 19 nt, Artificial Sequence
  Description of Artificial Sequence: Synthetic oligonucleotide
uucaauacuguuccucuuc

SEQ ID NO: 1758230 - RNA, 19 nt, Artificial Sequence
  Description of Artificial Sequence: Synthetic oligonucleotide
uuguacuguuuguaugacg

SEQ ID NO: 1758231 - RNA, 19 nt, Artificial Sequence
  Description of Artificial Sequence: Synthetic oligonucleotide
uaaugugccuuuaucccca

SEQ ID NO: 1758232 - RNA, 19 nt, Artificial Sequence
  Description of Artificial Sequence: Synthetic oligonucleotide
ucaaggauaugcagagggc

SEQ ID NO: 1758233 - RNA, 19 nt, Artificial Sequence
  Description of Artificial Sequence: Synthetic oligonucleotide
acaccaguucuuccuacgc

SEQ ID NO: 1758234 - RNA, 19 nt, Artificial Sequence
  Description of Artificial Sequence: Synthetic oligonucleotide
acuguccuguucuucacuc

SEQ ID NO: 1758235 - RNA, 19 nt, Artificial Sequence
  Description of Artificial Sequence: Synthetic oligonucleotide
uacucaagaacuacucagu

SEQ ID NO: 1758236 - RNA, 19 nt, Artificial Sequence
  Description of Artificial Sequence: Synthetic oligonucleotide
auguauacuggccaagcgu

SEQ ID NO: 1758237 - RNA, 19 nt, Artificial Sequence
  Description of Artificial Sequence: Synthetic oligonucleotide
agaaaguccguggagccac

SEQ ID NO: 1758238 - RNA, 19 nt, Artificial Sequence
  Description of Artificial Sequence: Synthetic oligonucleotide
uuugcgguucacuuguacu

SEQ ID NO: 1758239 - RNA, 19 nt, Artificial Sequence
  Description of Artificial Sequence: Synthetic oligonucleotide
aagaugugggagcuuaaau

SEQ ID NO: 1758240 - RNA, 19 nt, Artificial Sequence
  Description of Artificial Sequence: Synthetic oligonucleotide
aaaccuguaguggcauagc

SEQ ID NO: 1758241 - RNA, 19 nt, Artificial Sequence
  Description of Artificial Sequence: Synthetic oligonucleotide
gaggguuggggcuuugcgg

SEQ ID NO: 1758242 - RNA, 19 nt, Artificial Sequence
  Description of Artificial Sequence: Synthetic oligonucleotide
agacaggcaaucaugaucu

SEQ ID NO: 1758243 - RNA, 19 nt, Artificial Sequence
  Description of Artificial Sequence: Synthetic oligonucleotide
uaguuacucaagaacuacu

SEQ ID NO: 1758244 - RNA, 19 nt, Artificial Sequence
  Description of Artificial Sequence: Synthetic oligonucleotide
acagggguagcucagcugu

SEQ ID NO: 1758245 - RNA, 19 nt, Artificial Sequence
  Description of Artificial Sequence: Synthetic oligonucleotide
uaaguggcggucaggcggg

SEQ ID NO: 1758246 - RNA, 19 nt, Artificial Sequence
  Description of Artificial Sequence: Synthetic oligonucleotide
uugcgguucacuuguacug

SEQ ID NO: 1758247 - RNA, 19 nt, Artificial Sequence
  Description of Artificial Sequence: Synthetic oligonucleotide
uaaaccacuuaguucccug

SEQ ID NO: 1758248 - RNA, 19 nt, Artificial Sequence
  Description of Artificial Sequence: Synthetic oligonucleotide
cuuagcauguccagcacuc

SEQ ID NO: 1758249 - RNA, 19 nt, Artificial Sequence
  Description of Artificial Sequence: Synthetic oligonucleotide
cuggaugagaacucuguac

SEQ ID NO: 1758250 - RNA, 19 nt, Artificial Sequence
  Description of Artificial Sequence: Synthetic oligonucleotide
gaauguauacuggccaagc

SEQ ID NO: 1758251 - RNA, 19 nt, Artificial Sequence
  Description of Artificial Sequence: Synthetic oligonucleotide
guaaaaugggacuugggcu

SEQ ID NO: 1758252 - RNA, 19 nt, Artificial Sequence
  Description of Artificial Sequence: Synthetic oligonucleotide
acaaaaugacgacaccagu

SEQ ID NO: 1758253 - RNA, 19 nt, Artificial Sequence
  Description of Artificial Sequence: Synthetic oligonucleotide
auaacacuuuuagauuuuc

SEQ ID NO: 1758254 - RNA, 19 nt, Artificial Sequence
  Description of Artificial Sequence: Synthetic oligonucleotide
acacgaauguauacuggcc

SEQ ID NO: 1758255 - RNA, 19 nt, Artificial Sequence
  Description of Artificial Sequence: Synthetic oligonucleotide
uccgcuguaaacacuucac

SEQ ID NO: 1758256 - RNA, 19 nt, Artificial Sequence
  Description of Artificial Sequence: Synthetic oligonucleotide
agcaucauucuuuguuguc

SEQ ID NO: 1758257 - RNA, 19 nt, Artificial Sequence
  Description of Artificial Sequence: Synthetic oligonucleotide
ugugagaaggugcuucauc

SEQ ID NO: 1758258 - RNA, 19 nt, Artificial Sequence
  Description of Artificial Sequence: Synthetic oligonucleotide
guaucauaacaaauugagc

SEQ ID NO: 1758259 - RNA, 19 nt, Artificial Sequence
  Description of Artificial Sequence: Synthetic oligonucleotide
uguaucagcaugguggcau

SEQ ID NO: 1758260 - RNA, 19 nt, Artificial Sequence
  Description of Artificial Sequence: Synthetic oligonucleotide
uuuggauuuggugaauaaa

SEQ ID NO: 1758261 - RNA, 19 nt, Artificial Sequence
  Description of Artificial Sequence: Synthetic oligonucleotide
aucucuucaagguaugaua

SEQ ID NO: 1758262 - RNA, 19 nt, Artificial Sequence
  Description of Artificial Sequence: Synthetic oligonucleotide
guaguggcauagcagcccg

SEQ ID NO: 1758263 - RNA, 19 nt, Artificial Sequence
  Description of Artificial Sequence: Synthetic oligonucleotide
aagaacuacucagucugug

SEQ ID NO: 1758264 - RNA, 19 nt, Artificial Sequence
  Description of Artificial Sequence: Synthetic oligonucleotide
gauauccagcaccucguug

SEQ ID NO: 1758265 - RNA, 19 nt, Artificial Sequence
  Description of Artificial Sequence: Synthetic oligonucleotide
ugauuggguccccauaaaa

SEQ ID NO: 1758266 - RNA, 19 nt, Artificial Sequence
  Description of Artificial Sequence: Synthetic oligonucleotide
ucucaggcuccguaaaaug

SEQ ID NO: 1758267 - RNA, 19 nt, Artificial Sequence
  Description of Artificial Sequence: Synthetic oligonucleotide
uugagcucuuauuuggaaa

SEQ ID NO: 1758268 - RNA, 19 nt, Artificial Sequence
  Description of Artificial Sequence: Synthetic oligonucleotide
gaguaaguggcggucaggc

SEQ ID NO: 1758269 - RNA, 19 nt, Artificial Sequence
  Description of Artificial Sequence: Synthetic oligonucleotide
accacuuaguucccuguag

SEQ ID NO: 1758270 - RNA, 19 nt, Artificial Sequence
  Description of Artificial Sequence: Synthetic oligonucleotide
uguacuggagaugccaaac

SEQ ID NO: 1758271 - RNA, 19 nt, Artificial Sequence
  Description of Artificial Sequence: Synthetic oligonucleotide
uuuggugaauaaaccacuu

SEQ ID NO: 1758272 - RNA, 19 nt, Artificial Sequence
  Description of Artificial Sequence: Synthetic oligonucleotide
ucucugacaaaaugacgac

SEQ ID NO: 1758273 - RNA, 19 nt, Artificial Sequence
  Description of Artificial Sequence: Synthetic oligonucleotide
gguggcaucagaaagggac

SEQ ID NO: 1758274 - RNA, 19 nt, Artificial Sequence
  Description of Artificial Sequence: Synthetic oligonucleotide
ggggauauccagcaccucg

SEQ ID NO: 1758275 - RNA, 19 nt, Artificial Sequence
  Description of Artificial Sequence: Synthetic oligonucleotide
uguugcuccugagaguaag

SEQ ID NO: 1758276 - RNA, 19 nt, Artificial Sequence
  Description of Artificial Sequence: Synthetic oligonucleotide
caguguaccagcaguggag

SEQ ID NO: 1758277 - RNA, 19 nt, Artificial Sequence
  Description of Artificial Sequence: Synthetic oligonucleotide
cccaacuucacauuaacuc

SEQ ID NO: 1758278 - RNA, 19 nt, Artificial Sequence
  Description of Artificial Sequence: Synthetic oligonucleotide
uuguaugacgucgaacaga

SEQ ID NO: 1758279 - RNA, 19 nt, Artificial Sequence
  Description of Artificial Sequence: Synthetic oligonucleotide
aguccguggagccacgucu

SEQ ID NO: 1758280 - RNA, 19 nt, Artificial Sequence
  Description of Artificial Sequence: Synthetic oligonucleotide
uccuacgccagcacugcag

SEQ ID NO: 1758281 - RNA, 19 nt, Artificial Sequence
  Description of Artificial Sequence: Synthetic oligonucleotide
guuacucaagaacuacuca

SEQ ID NO: 1758282 - RNA, 19 nt, Artificial Sequence
  Description of Artificial Sequence: Synthetic oligonucleotide
guuagaugggcaugccgag

SEQ ID NO: 1758283 - RNA, 19 nt, Artificial Sequence
  Description of Artificial Sequence: Synthetic oligonucleotide
  modified_base (12)..(12): a, c, u, g, unknown or other
ugugagccccgnaauuuca

SEQ ID NO: 1758284 - RNA, 19 nt, Artificial Sequence
  Description of Artificial Sequence: Synthetic oligonucleotide
uucuuuccgcuguaaacac

SEQ ID NO: 1758285 - RNA, 19 nt, Artificial Sequence
  Description of Artificial Sequence: Synthetic oligonucleotide
ggauuuggugaauaaacca

SEQ ID NO: 1758286 - RNA, 19 nt, Artificial Sequence
  Description of Artificial Sequence: Synthetic oligonucleotide
uugcuuuguucugucagag

SEQ ID NO: 1758287 - RNA, 19 nt, Artificial Sequence
  Description of Artificial Sequence: Synthetic oligonucleotide
gaagcacagggguagcuca

SEQ ID NO: 1758288 - RNA, 19 nt, Artificial Sequence
  Description of Artificial Sequence: Synthetic oligonucleotide
auaaugguuuuaaauaguu

SEQ ID NO: 1758289 - RNA, 19 nt, Artificial Sequence
  Description of Artificial Sequence: Synthetic oligonucleotide
gaagccgugugugagcccc

SEQ ID NO: 1758290 - RNA, 19 nt, Artificial Sequence
  Description of Artificial Sequence: Synthetic oligonucleotide
  modified_base (14)..(14): a, c, u, g, unknown or other
ugugugagccccgnaauuu

SEQ ID NO: 1758291 - RNA, 19 nt, Artificial Sequence
  Description of Artificial Sequence: Synthetic oligonucleotide
  modified_base (3)..(3): a, c, u, g, unknown or other
cgnaauuucaauacuguuc

SEQ ID NO: 1758292 - RNA, 19 nt, Artificial Sequence
  Description of Artificial Sequence: Synthetic oligonucleotide
cuguuagaugggcaugccg

SEQ ID NO: 1758293 - RNA, 19 nt, Artificial Sequence
  Description of Artificial Sequence: Synthetic oligonucleotide
ugggagcccgcugagaaag

SEQ ID NO: 1758294 - RNA, 19 nt, Artificial Sequence
  Description of Artificial Sequence: Synthetic oligonucleotide
aauugagcucuuauuugga

SEQ ID NO: 1758295 - RNA, 19 nt, Artificial Sequence
  Description of Artificial Sequence: Synthetic oligonucleotide
uccugagaguaaguggcgg

SEQ ID NO: 1758296 - RNA, 19 nt, Artificial Sequence
  Description of Artificial Sequence: Synthetic oligonucleotide
gcuuuugaggaacuggaug

SEQ ID NO: 1758297 - RNA, 19 nt, Artificial Sequence
  Description of Artificial Sequence: Synthetic oligonucleotide
aaguccguggagccacguc

SEQ ID NO: 1758298 - RNA, 19 nt, Artificial Sequence
  Description of Artificial Sequence: Synthetic oligonucleotide
cacucuggggauauccagc

SEQ ID NO: 1758299 - RNA, 19 nt, Artificial Sequence
  Description of Artificial Sequence: Synthetic oligonucleotide
aggguuggggcuuugcggu

SEQ ID NO: 1758300 - RNA, 19 nt, Artificial Sequence
  Description of Artificial Sequence: Synthetic oligonucleotide
uauccccaacuucacauua

SEQ ID NO: 1758301 - RNA, 19 nt, Artificial Sequence
  Description of Artificial Sequence: Synthetic oligonucleotide
uguuuguaugacgucgaac

SEQ ID NO: 1758302 - RNA, 19 nt, Artificial Sequence
  Description of Artificial Sequence: Synthetic oligonucleotide
uuuaaauaaugugccuuua

SEQ ID NO: 1758303 - RNA, 19 nt, Artificial Sequence
  Description of Artificial Sequence: Synthetic oligonucleotide
uuggugaauaaaccacuua

SEQ ID NO: 1758304 - RNA, 19 nt, Artificial Sequence
  Description of Artificial Sequence: Synthetic oligonucleotide
augacgacaccaguucuuc

SEQ ID NO: 1758305 - RNA, 19 nt, Artificial Sequence
  Description of Artificial Sequence: Synthetic oligonucleotide
guacacgaauguauacugg

SEQ ID NO: 1758306 - RNA, 19 nt, Artificial Sequence
  Description of Artificial Sequence: Synthetic oligonucleotide
cucgcugcuguguaucagc

SEQ ID NO: 1758307 - RNA, 19 nt, Artificial Sequence
  Description of Artificial Sequence: Synthetic oligonucleotide
uugucuuagcauguccagc

SEQ ID NO: 1758308 - RNA, 19 nt, Artificial Sequence
  Description of Artificial Sequence: Synthetic oligonucleotide
aaagaugugggagcuuaaa

SEQ ID NO: 1758309 - RNA, 19 nt, Artificial Sequence
  Description of Artificial Sequence: Synthetic oligonucleotide
gcaugguggcaucagaaag

SEQ ID NO: 1758310 - RNA, 19 nt, Artificial Sequence
  Description of Artificial Sequence: Synthetic oligonucleotide
augacgucgaacagacugg

SEQ ID NO: 1758311 - RNA, 19 nt, Artificial Sequence
  Description of Artificial Sequence: Synthetic oligonucleotide
caguaucauaacaaauuga

SEQ ID NO: 1758312 - RNA, 19 nt, Artificial Sequence
  Description of Artificial Sequence: Synthetic oligonucleotide
ugagccucaggccuucgaa

SEQ ID NO: 1758313 - RNA, 19 nt, Artificial Sequence
  Description of Artificial Sequence: Synthetic oligonucleotide
cacgaauguauacuggcca

SEQ ID NO: 1758314 - RNA, 19 nt, Artificial Sequence
  Description of Artificial Sequence: Synthetic oligonucleotide
ugccuuuauccccaacuuc

SEQ ID NO: 1758315 - RNA, 19 nt, Artificial Sequence
  Description of Artificial Sequence: Synthetic oligonucleotide
uguaccagcaguggagggu

SEQ ID NO: 1758316 - RNA, 19 nt, Artificial Sequence
  Description of Artificial Sequence: Synthetic oligonucleotide
uggaucucuucaagguaug

SEQ ID NO: 1758317 - RNA, 19 nt, Artificial Sequence
  Description of Artificial Sequence: Synthetic oligonucleotide
cuguaguggcauagcagcc

SEQ ID NO: 1758318 - RNA, 19 nt, Artificial Sequence
  Description of Artificial Sequence: Synthetic oligonucleotide
gugggagcuuaaaugagcc

SEQ ID NO: 1758319 - RNA, 19 nt, Artificial Sequence
  Description of Artificial Sequence: Synthetic oligonucleotide
ugagaguaaguggcgguca

SEQ ID NO: 1758320 - RNA, 19 nt, Artificial Sequence
  Description of Artificial Sequence: Synthetic oligonucleotide
uucgaagccgugugugagc

SEQ ID NO: 1758321 - RNA, 19 nt, Artificial Sequence
  Description of Artificial Sequence: Synthetic oligonucleotide
cuucuuguggcuguaccug

SEQ ID NO: 1758322 - RNA, 19 nt, Artificial Sequence
  Description of Artificial Sequence: Synthetic oligonucleotide
aacucuguacacgaaugua

SEQ ID NO: 1758323 - RNA, 19 nt, Artificial Sequence
  Description of Artificial Sequence: Synthetic oligonucleotide
ucuuuccgcuguaaacacu

SEQ ID NO: 1758324 - RNA, 19 nt, Artificial Sequence
  Description of Artificial Sequence: Synthetic oligonucleotide
gugaauaaaccacuuaguu

SEQ ID NO: 1758325 - RNA, 19 nt, Artificial Sequence
  Description of Artificial Sequence: Synthetic oligonucleotide
uggccaagcgucugcacca

SEQ ID NO: 1758326 - RNA, 19 nt, Artificial Sequence
  Description of Artificial Sequence: Synthetic oligonucleotide
gggagcuuaaaugagccug

SEQ ID NO: 1758327 - RNA, 19 nt, Artificial Sequence
  Description of Artificial Sequence: Synthetic oligonucleotide
gugagaaggugcuucaucu

SEQ ID NO: 1758328 - RNA, 19 nt, Artificial Sequence
  Description of Artificial Sequence: Synthetic oligonucleotide
ucgaagccgugugugagcc

SEQ ID NO: 1758329 - RNA, 19 nt, Artificial Sequence
  Description of Artificial Sequence: Synthetic oligonucleotide
gacuggaucucuucaaggu

SEQ ID NO: 1758330 - RNA, 19 nt, Artificial Sequence
  Description of Artificial Sequence: Synthetic oligonucleotide
  modified_base (10)..(10): a, c, u, g, unknown or other
ugagccccgnaauuucaau

SEQ ID NO: 1758331 - RNA, 19 nt, Artificial Sequence
  Description of Artificial Sequence: Synthetic oligonucleotide
cuccugagaguaaguggcg

SEQ ID NO: 1758332 - RNA, 19 nt, Artificial Sequence
  Description of Artificial Sequence: Synthetic oligonucleotide
acaugguccucuccuugag

SEQ ID NO: 1758333 - RNA, 19 nt, Artificial Sequence
  Description of Artificial Sequence: Synthetic oligonucleotide
ucguugugcuccagacagg

SEQ ID NO: 1758334 - RNA, 19 nt, Artificial Sequence
  Description of Artificial Sequence: Synthetic oligonucleotide
aaccacuuaguucccugua

SEQ ID NO: 1758335 - RNA, 19 nt, Artificial Sequence
  Description of Artificial Sequence: Synthetic oligonucleotide
ucagucuguggcucacccc

SEQ ID NO: 1758336 - RNA, 19 nt, Artificial Sequence
  Description of Artificial Sequence: Synthetic oligonucleotide
uuucaauacuguuccucuu

SEQ ID NO: 1758337 - RNA, 19 nt, Artificial Sequence
  Description of Artificial Sequence: Synthetic oligonucleotide
ggagcuuaaaugagccugg

SEQ ID NO: 1758338 - RNA, 19 nt, Artificial Sequence
  Description of Artificial Sequence: Synthetic oligonucleotide
acucuguacacgaauguau

SEQ ID NO: 1758339 - RNA, 19 nt, Artificial Sequence
  Description of Artificial Sequence: Synthetic oligonucleotide
auaugcagagggccgggga

SEQ ID NO: 1758340 - RNA, 19 nt, Artificial Sequence
  Description of Artificial Sequence: Synthetic oligonucleotide
cuucgaagccgugugugag

SEQ ID NO: 1758341 - RNA, 19 nt, Artificial Sequence
  Description of Artificial Sequence: Synthetic oligonucleotide
ugagaacucuguacacgaa

SEQ ID NO: 1758342 - RNA, 19 nt, Artificial Sequence
  Description of Artificial Sequence: Synthetic oligonucleotide
cuuugcgguucacuuguac

SEQ ID NO: 1758343 - RNA, 19 nt, Artificial Sequence
  Description of Artificial Sequence: Synthetic oligonucleotide
aguggcauagcagcccgag

SEQ ID NO: 1758344 - RNA, 19 nt, Artificial Sequence
  Description of Artificial Sequence: Synthetic oligonucleotide
cucuuauuuggaaaauaua

SEQ ID NO: 1758345 - RNA, 19 nt, Artificial Sequence
  Description of Artificial Sequence: Synthetic oligonucleotide
acucaguaucauaacaaau

SEQ ID NO: 1758346 - RNA, 19 nt, Artificial Sequence
  Description of Artificial Sequence: Synthetic oligonucleotide
aacuucacauuaacucagu

SEQ ID NO: 1758347 - RNA, 19 nt, Artificial Sequence
  Description of Artificial Sequence: Synthetic oligonucleotide
ccaacuucacauuaacuca

SEQ ID NO: 1758348 - RNA, 19 nt, Artificial Sequence
  Description of Artificial Sequence: Synthetic oligonucleotide
acaggcaaucaugaucucu

SEQ ID NO: 1758349 - RNA, 19 nt, Artificial Sequence
  Description of Artificial Sequence: Synthetic oligonucleotide
ucuguuagaugggcaugcc

SEQ ID NO: 1758350 - RNA, 19 nt, Artificial Sequence
  Description of Artificial Sequence: Synthetic oligonucleotide
ggaaaauauagaagguaca

SEQ ID NO: 1758351 - RNA, 19 nt, Artificial Sequence
  Description of Artificial Sequence: Synthetic oligonucleotide
gacgacaccaguucuuccu

SEQ ID NO: 1758352 - RNA, 19 nt, Artificial Sequence
  Description of Artificial Sequence: Synthetic oligonucleotide
ugacgacaccaguucuucc

SEQ ID NO: 1758353 - RNA, 19 nt, Artificial Sequence
  Description of Artificial Sequence: Synthetic oligonucleotide
agcccgcugagaaaguccg

SEQ ID NO: 1758354 - RNA, 19 nt, Artificial Sequence
  Description of Artificial Sequence: Synthetic oligonucleotide
uucucaggcuccguaaaau

SEQ ID NO: 1758355 - RNA, 19 nt, Artificial Sequence
  Description of Artificial Sequence: Synthetic oligonucleotide
ugugcuccagacaggcaau

SEQ ID NO: 1758356 - RNA, 19 nt, Artificial Sequence
  Description of Artificial Sequence: Synthetic oligonucleotide
agaguaaguggcggucagg

SEQ ID NO: 1758357 - RNA, 19 nt, Artificial Sequence
  Description of Artificial Sequence: Synthetic oligonucleotide
uuauccccaacuucacauu

SEQ ID NO: 1758358 - RNA, 19 nt, Artificial Sequence
  Description of Artificial Sequence: Synthetic oligonucleotide
aggccuucgaagccgugug

SEQ ID NO: 1758359 - RNA, 19 nt, Artificial Sequence
  Description of Artificial Sequence: Synthetic oligonucleotide
cuucacauuaacucaguau

SEQ ID NO: 1758360 - RNA, 19 nt, Artificial Sequence
  Description of Artificial Sequence: Synthetic oligonucleotide
ggagaugccaaacuguccu

SEQ ID NO: 1758361 - RNA, 19 nt, Artificial Sequence
  Description of Artificial Sequence: Synthetic oligonucleotide
ugacgucgaacagacugga

SEQ ID NO: 1758362 - RNA, 19 nt, Artificial Sequence
  Description of Artificial Sequence: Synthetic oligonucleotide
acuguuuguaugacgucga

SEQ ID NO: 1758363 - RNA, 19 nt, Artificial Sequence
  Description of Artificial Sequence: Synthetic oligonucleotide
cuuccuacgccagcacugc

SEQ ID NO: 1758364 - RNA, 19 nt, Artificial Sequence
  Description of Artificial Sequence: Synthetic oligonucleotide
ugggagcuuaaaugagccu

SEQ ID NO: 1758365 - RNA, 19 nt, Artificial Sequence
  Description of Artificial Sequence: Synthetic oligonucleotide
gucaccgaagcacaggggu

SEQ ID NO: 1758366 - RNA, 19 nt, Artificial Sequence
  Description of Artificial Sequence: Synthetic oligonucleotide
auagcagcccgagucgaug

SEQ ID NO: 1758367 - RNA, 19 nt, Artificial Sequence
  Description of Artificial Sequence: Synthetic oligonucleotide
agcgucugcaccagcauca

SEQ ID NO: 1758368 - RNA, 19 nt, Artificial Sequence
  Description of Artificial Sequence: Synthetic oligonucleotide
caccgaagcacagggguag

SEQ ID NO: 1758369 - RNA, 19 nt, Artificial Sequence
  Description of Artificial Sequence: Synthetic oligonucleotide
cuuuauccccaacuucaca

SEQ ID NO: 1758370 - RNA, 19 nt, Artificial Sequence
  Description of Artificial Sequence: Synthetic oligonucleotide
uugagccucaggccuucga

SEQ ID NO: 1758371 - RNA, 19 nt, Artificial Sequence
  Description of Artificial Sequence: Synthetic oligonucleotide
aaugagccuggagcuuuug

SEQ ID NO: 1758372 - RNA, 19 nt, Artificial Sequence
  Description of Artificial Sequence: Synthetic oligonucleotide
auaaaccacuuaguucccu

SEQ ID NO: 1758373 - RNA, 19 nt, Artificial Sequence
  Description of Artificial Sequence: Synthetic oligonucleotide
aaaagaugugggagcuuaa

SEQ ID NO: 1758374 - RNA, 19 nt, Artificial Sequence
  Description of Artificial Sequence: Synthetic oligonucleotide
uggagcuuuugaggaacug

SEQ ID NO: 1758375 - RNA, 19 nt, Artificial Sequence
  Description of Artificial Sequence: Synthetic oligonucleotide
  modified_base (9)..(9): a, c, u, g, unknown or other
gagccccgnaauuucaaua

SEQ ID NO: 1758376 - RNA, 19 nt, Artificial Sequence
  Description of Artificial Sequence: Synthetic oligonucleotide
  modified_base (6)..(6): a, c, u, g, unknown or other
ccccgnaauuucaauacug

SEQ ID NO: 1758377 - RNA, 19 nt, Artificial Sequence
  Description of Artificial Sequence: Synthetic oligonucleotide
aggcaaucaugaucucuga

SEQ ID NO: 1758378 - RNA, 19 nt, Artificial Sequence
  Description of Artificial Sequence: Synthetic oligonucleotide
gccuuuauccccaacuuca

SEQ ID NO: 1758379 - RNA, 19 nt, Artificial Sequence
  Description of Artificial Sequence: Synthetic oligonucleotide
cugagaguaaguggcgguc

SEQ ID NO: 1758380 - RNA, 19 nt, Artificial Sequence
  Description of Artificial Sequence: Synthetic oligonucleotide
acucagucuguggcucacc

SEQ ID NO: 1758381 - RNA, 19 nt, Artificial Sequence
  Description of Artificial Sequence: Synthetic oligonucleotide
uuuccgcuguaaacacuuc

SEQ ID NO: 1758382 - RNA, 19 nt, Artificial Sequence
  Description of Artificial Sequence: Synthetic oligonucleotide
gagcccgcugagaaagucc

SEQ ID NO: 1758383 - RNA, 19 nt, Artificial Sequence
  Description of Artificial Sequence: Synthetic oligonucleotide
agcagcccgagucgauguc

SEQ ID NO: 1758384 - RNA, 19 nt, Artificial Sequence
  Description of Artificial Sequence: Synthetic oligonucleotide
guacuguuuguaugacguc

SEQ ID NO: 1758385 - RNA, 19 nt, Artificial Sequence
  Description of Artificial Sequence: Synthetic oligonucleotide
aggcuccguaaaaugggac

SEQ ID NO: 1758386 - RNA, 19 nt, Artificial Sequence
  Description of Artificial Sequence: Synthetic oligonucleotide
augugccuuuauccccaac

SEQ ID NO: 1758387 - RNA, 19 nt, Artificial Sequence
  Description of Artificial Sequence: Synthetic oligonucleotide
augauuggguccccauaaa

SEQ ID NO: 1758388 - RNA, 19 nt, Artificial Sequence
  Description of Artificial Sequence: Synthetic oligonucleotide
uaucagcaugguggcauca

SEQ ID NO: 1758389 - RNA, 19 nt, Artificial Sequence
  Description of Artificial Sequence: Synthetic oligonucleotide
gaaaguccguggagccacg

SEQ ID NO: 1758390 - RNA, 19 nt, Artificial Sequence
  Description of Artificial Sequence: Synthetic oligonucleotide
ggacuguggucaccgaagc

SEQ ID NO: 1758391 - RNA, 19 nt, Artificial Sequence
  Description of Artificial Sequence: Synthetic oligonucleotide
ugcuccagacaggcaauca

SEQ ID NO: 1758392 - RNA, 19 nt, Artificial Sequence
  Description of Artificial Sequence: Synthetic oligonucleotide
agcucuuauuuggaaaaua

SEQ ID NO: 1758393 - RNA, 19 nt, Artificial Sequence
  Description of Artificial Sequence: Synthetic oligonucleotide
gacuguggucaccgaagca

SEQ ID NO: 1758394 - RNA, 19 nt, Artificial Sequence
  Description of Artificial Sequence: Synthetic oligonucleotide
uccguggagccacgucugc

SEQ ID NO: 1758395 - RNA, 19 nt, Artificial Sequence
  Description of Artificial Sequence: Synthetic oligonucleotide
agucgauguccuucacccu

SEQ ID NO: 1758396 - RNA, 19 nt, Artificial Sequence
  Description of Artificial Sequence: Synthetic oligonucleotide
ugcucugcugugguccuca

SEQ ID NO: 1758397 - RNA, 19 nt, Artificial Sequence
  Description of Artificial Sequence: Synthetic oligonucleotide
gucuuagcauguccagcac

SEQ ID NO: 1758398 - RNA, 19 nt, Artificial Sequence
  Description of Artificial Sequence: Synthetic oligonucleotide
cucagacacagcugagaca

SEQ ID NO: 1758399 - RNA, 19 nt, Artificial Sequence
  Description of Artificial Sequence: Synthetic oligonucleotide
agggccggggacugugguc

SEQ ID NO: 1758400 - RNA, 19 nt, Artificial Sequence
  Description of Artificial Sequence: Synthetic oligonucleotide
accgaagcacagggguagc

SEQ ID NO: 1758401 - RNA, 19 nt, Artificial Sequence
  Description of Artificial Sequence: Synthetic oligonucleotide
gagaaaguccguggagcca

SEQ ID NO: 1758402 - RNA, 19 nt, Artificial Sequence
  Description of Artificial Sequence: Synthetic oligonucleotide
guaucagcaugguggcauc

SEQ ID NO: 1758403 - RNA, 19 nt, Artificial Sequence
  Description of Artificial Sequence: Synthetic oligonucleotide
uucacaugauugggucccc

SEQ ID NO: 1758404 - RNA, 19 nt, Artificial Sequence
  Description of Artificial Sequence: Synthetic oligonucleotide
aaaguccguggagccacgu

SEQ ID NO: 1758405 - RNA, 19 nt, Artificial Sequence
  Description of Artificial Sequence: Synthetic oligonucleotide
uuccuacgccagcacugca

SEQ ID NO: 1758406 - RNA, 19 nt, Artificial Sequence
  Description of Artificial Sequence: Synthetic oligonucleotide
cuccguaaaaugggacuug

SEQ ID NO: 1758407 - RNA, 19 nt, Artificial Sequence
  Description of Artificial Sequence: Synthetic oligonucleotide
gccgacgcagacauggucc

SEQ ID NO: 1758408 - RNA, 19 nt, Artificial Sequence
  Description of Artificial Sequence: Synthetic oligonucleotide
agggguagcucagcuguug

SEQ ID NO: 1758409 - RNA, 19 nt, Artificial Sequence
  Description of Artificial Sequence: Synthetic oligonucleotide
acgacaccaguucuuccua

SEQ ID NO: 1758410 - RNA, 19 nt, Artificial Sequence
  Description of Artificial Sequence: Synthetic oligonucleotide
caggcuccguaaaauggga

SEQ ID NO: 1758411 - RNA, 19 nt, Artificial Sequence
  Description of Artificial Sequence: Synthetic oligonucleotide
cuguacacgaauguauacu

SEQ ID NO: 1758412 - RNA, 19 nt, Artificial Sequence
  Description of Artificial Sequence: Synthetic oligonucleotide
cucuucucaggcuccguaa

SEQ ID NO: 1758413 - RNA, 19 nt, Artificial Sequence
  Description of Artificial Sequence: Synthetic oligonucleotide
uccagcacucuggggauau

SEQ ID NO: 1758414 - RNA, 19 nt, Artificial Sequence
  Description of Artificial Sequence: Synthetic oligonucleotide
ccguaaaaugggacuuggg

SEQ ID NO: 1758415 - RNA, 19 nt, Artificial Sequence
  Description of Artificial Sequence: Synthetic oligonucleotide
uaguggcauagcagcccga

SEQ ID NO: 1758416 - RNA, 19 nt, Artificial Sequence
  Description of Artificial Sequence: Synthetic oligonucleotide
ggucaggcggggcucagac

SEQ ID NO: 1758417 - RNA, 19 nt, Artificial Sequence
  Description of Artificial Sequence: Synthetic oligonucleotide
uggcaucagaaagggacuu

SEQ ID NO: 1758418 - RNA, 19 nt, Artificial Sequence
  Description of Artificial Sequence: Synthetic oligonucleotide
uaccagcaguggaggguug

SEQ ID NO: 1758419 - RNA, 19 nt, Artificial Sequence
  Description of Artificial Sequence: Synthetic oligonucleotide
uggggcuuugcgguucacu

SEQ ID NO: 1758420 - RNA, 19 nt, Artificial Sequence
  Description of Artificial Sequence: Synthetic oligonucleotide
gcucaccccacauaaaagu

SEQ ID NO: 1758421 - RNA, 19 nt, Artificial Sequence
  Description of Artificial Sequence: Synthetic oligonucleotide
cuacgccagcacugcagug

SEQ ID NO: 1758422 - RNA, 19 nt, Artificial Sequence
  Description of Artificial Sequence: Synthetic oligonucleotide
  modified_base (13)..(13): a, c, u, g, unknown or other
gugugagccccgnaauuuc

SEQ ID NO: 1758423 - RNA, 19 nt, Artificial Sequence
  Description of Artificial Sequence: Synthetic oligonucleotide
gacgcagacaugguccucu

SEQ ID NO: 1758424 - RNA, 19 nt, Artificial Sequence
  Description of Artificial Sequence: Synthetic oligonucleotide
cuucucaggcuccguaaaa

SEQ ID NO: 1758425 - RNA, 19 nt, Artificial Sequence
  Description of Artificial Sequence: Synthetic oligonucleotide
gagcuuaaaugagccugga

SEQ ID NO: 1758426 - RNA, 19 nt, Artificial Sequence
  Description of Artificial Sequence: Synthetic oligonucleotide
gcuguugcuccugagagua

SEQ ID NO: 1758427 - RNA, 19 nt, Artificial Sequence
  Description of Artificial Sequence: Synthetic oligonucleotide
ggcuuugcgguucacuugu

SEQ ID NO: 1758428 - RNA, 19 nt, Artificial Sequence
  Description of Artificial Sequence: Synthetic oligonucleotide
cacuggacugggagcccgc

SEQ ID NO: 1758429 - RNA, 19 nt, Artificial Sequence
  Description of Artificial Sequence: Synthetic oligonucleotide
aagccgugugugagccccg

SEQ ID NO: 1758430 - RNA, 19 nt, Artificial Sequence
  Description of Artificial Sequence: Synthetic oligonucleotide
ggcuccguaaaaugggacu

SEQ ID NO: 1758431 - RNA, 19 nt, Artificial Sequence
  Description of Artificial Sequence: Synthetic oligonucleotide
cuccucgcugcuguguauc

SEQ ID NO: 1758432 - RNA, 19 nt, Artificial Sequence
  Description of Artificial Sequence: Synthetic oligonucleotide
gcucuuauuuggaaaauau

SEQ ID NO: 1758433 - RNA, 19 nt, Artificial Sequence
  Description of Artificial Sequence: Synthetic oligonucleotide
cuggacugggagcccgcug

SEQ ID NO: 1758434 - RNA, 19 nt, Artificial Sequence
  Description of Artificial Sequence: Synthetic oligonucleotide
guccguggagccacgucug

SEQ ID NO: 1758435 - RNA, 19 nt, Artificial Sequence
  Description of Artificial Sequence: Synthetic oligonucleotide
gcucaaggauaugcagagg

SEQ ID NO: 1758436 - RNA, 19 nt, Artificial Sequence
  Description of Artificial Sequence: Synthetic oligonucleotide
ggucaccgaagcacagggg

SEQ ID NO: 1758437 - RNA, 19 nt, Artificial Sequence
  Description of Artificial Sequence: Synthetic oligonucleotide
aaaugggacuugggcucaa

SEQ ID NO: 1758438 - RNA, 19 nt, Artificial Sequence
  Description of Artificial Sequence: Synthetic oligonucleotide
cucaccccacauaaaaguu

SEQ ID NO: 1758439 - RNA, 19 nt, Artificial Sequence
  Description of Artificial Sequence: Synthetic oligonucleotide
ccucaggccuucgaagccg

SEQ ID NO: 1758440 - RNA, 19 nt, Artificial Sequence
  Description of Artificial Sequence: Synthetic oligonucleotide
ccaagcgucugcaccagca

SEQ ID NO: 1758441 - RNA, 19 nt, Artificial Sequence
  Description of Artificial Sequence: Synthetic oligonucleotide
gacacagcugagacagugu

SEQ ID NO: 1758442 - RNA, 19 nt, Artificial Sequence
  Description of Artificial Sequence: Synthetic oligonucleotide
cuugagccucaggccuucg

SEQ ID NO: 1758443 - RNA, 19 nt, Artificial Sequence
  Description of Artificial Sequence: Synthetic oligonucleotide
gccuucgaagccgugugug

SEQ ID NO: 1758444 - RNA, 19 nt, Artificial Sequence
  Description of Artificial Sequence: Synthetic oligonucleotide
cgagucgauguccuucacc

SEQ ID NO: 1758445 - RNA, 19 nt, Artificial Sequence
  Description of Artificial Sequence: Synthetic oligonucleotide
gucuguggcucaccccaca

SEQ ID NO: 1758446 - RNA, 19 nt, Artificial Sequence
  Description of Artificial Sequence: Synthetic oligonucleotide
guggcaucagaaagggacu

SEQ ID NO: 1758447 - RNA, 19 nt, Artificial Sequence
  Description of Artificial Sequence: Synthetic oligonucleotide
gcuguaccugucacugucc

SEQ ID NO: 1758448 - RNA, 19 nt, Artificial Sequence
  Description of Artificial Sequence: Synthetic oligonucleotide
gugccuuuauccccaacuu

SEQ ID NO: 1758449 - RNA, 19 nt, Artificial Sequence
  Description of Artificial Sequence: Synthetic oligonucleotide
gguccucuccuugagccuc

SEQ ID NO: 1758450 - RNA, 19 nt, Artificial Sequence
  Description of Artificial Sequence: Synthetic oligonucleotide
  modified_base (5)..(5): a, c, u, g, unknown or other
cccgnaauuucaauacugu

SEQ ID NO: 1758451 - RNA, 19 nt, Artificial Sequence
  Description of Artificial Sequence: Synthetic oligonucleotide
cacagcugagacagugugu

SEQ ID NO: 1758452 - RNA, 19 nt, Artificial Sequence
  Description of Artificial Sequence: Synthetic oligonucleotide
acuggacugggagcccgcu

SEQ ID NO: 1758453 - RNA, 19 nt, Artificial Sequence
  Description of Artificial Sequence: Synthetic oligonucleotide
gcagcccgagucgaugucc

SEQ ID NO: 1758454 - RNA, 19 nt, Artificial Sequence
  Description of Artificial Sequence: Synthetic oligonucleotide
cccgcugagaaaguccgug

SEQ ID NO: 1758455 - RNA, 19 nt, Artificial Sequence
  Description of Artificial Sequence: Synthetic oligonucleotide
ggacuugggcucaaggaua

SEQ ID NO: 1758456 - RNA, 19 nt, Artificial Sequence
  Description of Artificial Sequence: Synthetic oligonucleotide
ggaucucuucaagguauga

SEQ ID NO: 1758457 - RNA, 19 nt, Artificial Sequence
  Description of Artificial Sequence: Synthetic oligonucleotide
gucaggcggggcucagaca

SEQ ID NO: 1758458 - RNA, 19 nt, Artificial Sequence
  Description of Artificial Sequence: Synthetic oligonucleotide
gcuucuagcuaaaacuuuu

SEQ ID NO: 1758459 - RNA, 19 nt, Artificial Sequence
  Description of Artificial Sequence: Synthetic oligonucleotide
caccucguugugcuccaga

SEQ ID NO: 1758460 - RNA, 19 nt, Artificial Sequence
  Description of Artificial Sequence: Synthetic oligonucleotide
  modified_base (11)..(11): a, c, u, g, unknown or other
gugagccccgnaauuucaa

SEQ ID NO: 1758461 - RNA, 19 nt, Artificial Sequence
  Description of Artificial Sequence: Synthetic oligonucleotide
gggccggggacugugguca

SEQ ID NO: 1758462 - RNA, 19 nt, Artificial Sequence
  Description of Artificial Sequence: Synthetic oligonucleotide
ccgcuguaaacacuucaca

SEQ ID NO: 1758463 - RNA, 19 nt, Artificial Sequence
  Description of Artificial Sequence: Synthetic oligonucleotide
ccacgucugccgccgacgc

SEQ ID NO: 1758464 - RNA, 19 nt, Artificial Sequence
  Description of Artificial Sequence: Synthetic oligonucleotide
  modified_base (15)..(15): a, c, u, g, unknown or other
gugugugagccccgnaauu

SEQ ID NO: 1758465 - RNA, 19 nt, Artificial Sequence
  Description of Artificial Sequence: Synthetic oligonucleotide
guaccagcaguggaggguu

SEQ ID NO: 1758466 - RNA, 19 nt, Artificial Sequence
  Description of Artificial Sequence: Synthetic oligonucleotide
gcggggcucagacacagcu

SEQ ID NO: 1758467 - RNA, 19 nt, Artificial Sequence
  Description of Artificial Sequence: Synthetic oligonucleotide
gugcuccagacaggcaauc

SEQ ID NO: 1758468 - RNA, 19 nt, Artificial Sequence
  Description of Artificial Sequence: Synthetic oligonucleotide
  modified_base (7)..(7): a, c, u, g, unknown or other
gccccgnaauuucaauacu

SEQ ID NO: 1758469 - RNA, 19 nt, Artificial Sequence
  Description of Artificial Sequence: Synthetic oligonucleotide
ccuucgaagccguguguga

SEQ ID NO: 1758470 - RNA, 19 nt, Artificial Sequence
  Description of Artificial Sequence: Synthetic oligonucleotide
ggagcccgcugagaaaguc

SEQ ID NO: 1758471 - RNA, 19 nt, Artificial Sequence
  Description of Artificial Sequence: Synthetic oligonucleotide
  modified_base (4)..(4): a, c, u, g, unknown or other
ccgnaauuucaauacuguu

SEQ ID NO: 1758472 - RNA, 19 nt, Artificial Sequence
  Description of Artificial Sequence: Synthetic oligonucleotide
caucagaaagggacuucuu

SEQ ID NO: 1758473 - RNA, 19 nt, Artificial Sequence
  Description of Artificial Sequence: Synthetic oligonucleotide
gcuccagacaggcaaucau

SEQ ID NO: 1758474 - RNA, 19 nt, Artificial Sequence
  Description of Artificial Sequence: Synthetic oligonucleotide
  modified_base (19)..(19): a, c, u, g, unknown or other
agccgugugugagccccgn

SEQ ID NO: 1758475 - RNA, 19 nt, Artificial Sequence
  Description of Artificial Sequence: Synthetic oligonucleotide
gagggccggggacuguggu

SEQ ID NO: 1758476 - RNA, 19 nt, Artificial Sequence
  Description of Artificial Sequence: Synthetic oligonucleotide
gucugccgccgacgcagac

SEQ ID NO: 1758477 - RNA, 19 nt, Artificial Sequence
  Description of Artificial Sequence: Synthetic oligonucleotide
ggacuucuuguggcuguac

SEQ ID NO: 1758478 - RNA, 19 nt, Artificial Sequence
  Description of Artificial Sequence: Synthetic oligonucleotide
cuguugcuccugagaguaa

SEQ ID NO: 1758479 - RNA, 19 nt, Artificial Sequence
  Description of Artificial Sequence: Synthetic oligonucleotide
caagcgucugcaccagcau

SEQ ID NO: 1758480 - RNA, 19 nt, Artificial Sequence
  Description of Artificial Sequence: Synthetic oligonucleotide
cgacaccaguucuuccuac

SEQ ID NO: 1758481 - RNA, 19 nt, Artificial Sequence
  Description of Artificial Sequence: Synthetic oligonucleotide
ccacuuaguucccuguagu

SEQ ID NO: 1758482 - RNA, 19 nt, Artificial Sequence
  Description of Artificial Sequence: Synthetic oligonucleotide
ggccaagcgucugcaccag

SEQ ID NO: 1758483 - RNA, 19 nt, Artificial Sequence
  Description of Artificial Sequence: Synthetic oligonucleotide
gccaagcgucugcaccagc

SEQ ID NO: 1758484 - RNA, 19 nt, Artificial Sequence
  Description of Artificial Sequence: Synthetic oligonucleotide
ccugagaguaaguggcggu

SEQ ID NO: 1758485 - RNA, 19 nt, Artificial Sequence
  Description of Artificial Sequence: Synthetic oligonucleotide
ggguagcucagcuguugcu

SEQ ID NO: 1758486 - RNA, 19 nt, Artificial Sequence
  Description of Artificial Sequence: Synthetic oligonucleotide
cgaagcacagggguagcuc

SEQ ID NO: 1758487 - RNA, 19 nt, Artificial Sequence
  Description of Artificial Sequence: Synthetic oligonucleotide
  modified_base (17)..(17): a, c, u, g, unknown or other
ccgugugugagccccgnaa

SEQ ID NO: 1758488 - RNA, 19 nt, Artificial Sequence
  Description of Artificial Sequence: Synthetic oligonucleotide
cagcccgagucgauguccu

SEQ ID NO: 1758489 - RNA, 19 nt, Artificial Sequence
  Description of Artificial Sequence: Synthetic oligonucleotide
uuggggcuuugcgguucac

SEQ ID NO: 1758490 - RNA, 19 nt, Artificial Sequence
  Description of Artificial Sequence: Synthetic oligonucleotide
cacgucugccgccgacgca

SEQ ID NO: 1758491 - RNA, 19 nt, Artificial Sequence
  Description of Artificial Sequence: Synthetic oligonucleotide
guggcucaccccacauaaa

SEQ ID NO: 1758492 - RNA, 19 nt, Artificial Sequence
  Description of Artificial Sequence: Synthetic oligonucleotide
ccucgcugcuguguaucag

SEQ ID NO: 1758493 - RNA, 19 nt, Artificial Sequence
  Description of Artificial Sequence: Synthetic oligonucleotide
gacgucgaacagacuggau

SEQ ID NO: 1758494 - RNA, 19 nt, Artificial Sequence
  Description of Artificial Sequence: Synthetic oligonucleotide
ccuacgccagcacugcagu

SEQ ID NO: 1758495 - RNA, 19 nt, Artificial Sequence
  Description of Artificial Sequence: Synthetic oligonucleotide
gagccacgucugccgccga

SEQ ID NO: 1758496 - RNA, 19 nt, Artificial Sequence
  Description of Artificial Sequence: Synthetic oligonucleotide
guaugacgucgaacagacu

SEQ ID NO: 1758497 - RNA, 19 nt, Artificial Sequence
  Description of Artificial Sequence: Synthetic oligonucleotide
ccuugagccucaggccuuc

SEQ ID NO: 1758498 - RNA, 19 nt, Artificial Sequence
  Description of Artificial Sequence: Synthetic oligonucleotide
  modified_base (16)..(16): a, c, u, g, unknown or other
cgugugugagccccgnaau

SEQ ID NO: 1758499 - RNA, 19 nt, Artificial Sequence
  Description of Artificial Sequence: Synthetic oligonucleotide
ccgagucgauguccuucac

SEQ ID NO: 1758500 - RNA, 19 nt, Artificial Sequence
  Description of Artificial Sequence: Synthetic oligonucleotide
cgaagccgugugugagccc

SEQ ID NO: 1758501 - RNA, 19 nt, Artificial Sequence
  Description of Artificial Sequence: Synthetic oligonucleotide
cugugagaaggugcuucau

SEQ ID NO: 1758502 - RNA, 19 nt, Artificial Sequence
  Description of Artificial Sequence: Synthetic oligonucleotide
gggacuucuuguggcugua

SEQ ID NO: 1758503 - RNA, 19 nt, Artificial Sequence
  Description of Artificial Sequence: Synthetic oligonucleotide
ccucuccugcccugugaga

SEQ ID NO: 1758504 - RNA, 19 nt, Artificial Sequence
  Description of Artificial Sequence: Synthetic oligonucleotide
ccgacgcagacaugguccu

SEQ ID NO: 1758505 - RNA, 19 nt, Artificial Sequence
  Description of Artificial Sequence: Synthetic oligonucleotide
gccggggacuguggucacc

SEQ ID NO: 1758506 - RNA, 19 nt, Artificial Sequence
  Description of Artificial Sequence: Synthetic oligonucleotide
gcgguucacuuguacuguu

SEQ ID NO: 1758507 - RNA, 19 nt, Artificial Sequence
  Description of Artificial Sequence: Synthetic oligonucleotide
ggcggucaggcggggcuca

SEQ ID NO: 1758508 - RNA, 19 nt, Artificial Sequence
  Description of Artificial Sequence: Synthetic oligonucleotide
  modified_base (18)..(18): a, c, u, g, unknown or other
gccgugugugagccccgna

SEQ ID NO: 1758509 - RNA, 19 nt, Artificial Sequence
  Description of Artificial Sequence: Synthetic oligonucleotide
gcggucaggcggggcucag

SEQ ID NO: 1758510 - RNA, 19 nt, Artificial Sequence
  Description of Artificial Sequence: Synthetic oligonucleotide
ccagcacucuggggauauc

SEQ ID NO: 1758511 - RNA, 19 nt, Artificial Sequence
  Description of Artificial Sequence: Synthetic oligonucleotide
gcuuugcgguucacuugua

SEQ ID NO: 1758512 - RNA, 19 nt, Artificial Sequence
  Description of Artificial Sequence: Synthetic oligonucleotide
ggguuggggcuuugcgguu

SEQ ID NO: 1758513 - RNA, 19 nt, Artificial Sequence
  Description of Artificial Sequence: Synthetic oligonucleotide
ccgaagcacagggguagcu

SEQ ID NO: 1758514 - RNA, 19 nt, Artificial Sequence
  Description of Artificial Sequence: Synthetic oligonucleotide
ccuccucgcugcuguguau

SEQ ID NO: 1758515 - RNA, 19 nt, Artificial Sequence
  Description of Artificial Sequence: Synthetic oligonucleotide
gcccgcugagaaaguccgu

SEQ ID NO: 1758516 - RNA, 19 nt, Artificial Sequence
  Description of Artificial Sequence: Synthetic oligonucleotide
cggggacuguggucaccga

SEQ ID NO: 1758517 - RNA, 19 nt, Artificial Sequence
  Description of Artificial Sequence: Synthetic oligonucleotide
gcccugugagaaggugcuu

SEQ ID NO: 1758518 - RNA, 19 nt, Artificial Sequence
  Description of Artificial Sequence: Synthetic oligonucleotide
uuagcaauaaauaaucccg

SEQ ID NO: 1758519 - RNA, 19 nt, Artificial Sequence
  Description of Artificial Sequence: Synthetic oligonucleotide
aaaauauguacacggagcg

SEQ ID NO: 1758520 - RNA, 19 nt, Artificial Sequence
  Description of Artificial Sequence: Synthetic oligonucleotide
aauauuuggugucuaguac

SEQ ID NO: 1758521 - RNA, 19 nt, Artificial Sequence
  Description of Artificial Sequence: Synthetic oligonucleotide
uacuaaaauauguacacgg

SEQ ID NO: 1758522 - RNA, 19 nt, Artificial Sequence
  Description of Artificial Sequence: Synthetic oligonucleotide
aauauguacacggagcggc

SEQ ID NO: 1758523 - RNA, 19 nt, Artificial Sequence
  Description of Artificial Sequence: Synthetic oligonucleotide
agagauuccacauuuguac

SEQ ID NO: 1758524 - RNA, 19 nt, Artificial Sequence
  Description of Artificial Sequence: Synthetic oligonucleotide
uuaugugcuguucaaaggg

SEQ ID NO: 1758525 - RNA, 19 nt, Artificial Sequence
  Description of Artificial Sequence: Synthetic oligonucleotide
uaaaauauguacacggagc

SEQ ID NO: 1758526 - RNA, 19 nt, Artificial Sequence
  Description of Artificial Sequence: Synthetic oligonucleotide
aauaaauaaucccgggauc

SEQ ID NO: 1758527 - RNA, 19 nt, Artificial Sequence
  Description of Artificial Sequence: Synthetic oligonucleotide
auauuuggugucuaguacc

SEQ ID NO: 1758528 - RNA, 19 nt, Artificial Sequence
  Description of Artificial Sequence: Synthetic oligonucleotide
uuacccauugaauauaugc

SEQ ID NO: 1758529 - RNA, 19 nt, Artificial Sequence
  Description of Artificial Sequence: Synthetic oligonucleotide
ugugaaauauuuuauuucu

SEQ ID NO: 1758530 - RNA, 19 nt, Artificial Sequence
  Description of Artificial Sequence: Synthetic oligonucleotide
aaaauacugcgacagccac

SEQ ID NO: 1758531 - RNA, 19 nt, Artificial Sequence
  Description of Artificial Sequence: Synthetic oligonucleotide
aaugaauggugccacaucu

SEQ ID NO: 1758532 - RNA, 19 nt, Artificial Sequence
  Description of Artificial Sequence: Synthetic oligonucleotide
uguacgaucacauuacaca

SEQ ID NO: 1758533 - RNA, 19 nt, Artificial Sequence
  Description of Artificial Sequence: Synthetic oligonucleotide
cagauauuuauacagagac

SEQ ID NO: 1758534 - RNA, 19 nt, Artificial Sequence
  Description of Artificial Sequence: Synthetic oligonucleotide
aaaucaguguccuauacaa

SEQ ID NO: 1758535 - RNA, 19 nt, Artificial Sequence
  Description of Artificial Sequence: Synthetic oligonucleotide
aaacucaaugaauggugcc

SEQ ID NO: 1758536 - RNA, 19 nt, Artificial Sequence
  Description of Artificial Sequence: Synthetic oligonucleotide
ucuuguauagucuucagaa

SEQ ID NO: 1758537 - RNA, 19 nt, Artificial Sequence
  Description of Artificial Sequence: Synthetic oligonucleotide
aauagauuuccuaagcuug

SEQ ID NO: 1758538 - RNA, 19 nt, Artificial Sequence
  Description of Artificial Sequence: Synthetic oligonucleotide
caaaacauugucuucuagg

SEQ ID NO: 1758539 - RNA, 19 nt, Artificial Sequence
  Description of Artificial Sequence: Synthetic oligonucleotide
guuagcaauaaauaauccc

SEQ ID NO: 1758540 - RNA, 19 nt, Artificial Sequence
  Description of Artificial Sequence: Synthetic oligonucleotide
ugcuuuuagaauaaaagua

SEQ ID NO: 1758541 - RNA, 19 nt, Artificial Sequence
  Description of Artificial Sequence: Synthetic oligonucleotide
auaaagacuaugaaaagag

SEQ ID NO: 1758542 - RNA, 19 nt, Artificial Sequence
  Description of Artificial Sequence: Synthetic oligonucleotide
aacauuguacuuuuaggga

SEQ ID NO: 1758543 - RNA, 19 nt, Artificial Sequence
  Description of Artificial Sequence: Synthetic oligonucleotide
uuauguuagcaauaaauaa

SEQ ID NO: 1758544 - RNA, 19 nt, Artificial Sequence
  Description of Artificial Sequence: Synthetic oligonucleotide
uacauuauugccacugaag

SEQ ID NO: 1758545 - RNA, 19 nt, Artificial Sequence
  Description of Artificial Sequence: Synthetic oligonucleotide
aaaggcauguuuuccauga

SEQ ID NO: 1758546 - RNA, 19 nt, Artificial Sequence
  Description of Artificial Sequence: Synthetic oligonucleotide
uguacuuuuagggaaaugu

SEQ ID NO: 1758547 - RNA, 19 nt, Artificial Sequence
  Description of Artificial Sequence: Synthetic oligonucleotide
ugaagucuaaacauuguac

SEQ ID NO: 1758548 - RNA, 19 nt, Artificial Sequence
  Description of Artificial Sequence: Synthetic oligonucleotide
uucuuaacaccacucauca

SEQ ID NO: 1758549 - RNA, 19 nt, Artificial Sequence
  Description of Artificial Sequence: Synthetic oligonucleotide
uccuucagaaucaaagugc

SEQ ID NO: 1758550 - RNA, 19 nt, Artificial Sequence
  Description of Artificial Sequence: Synthetic oligonucleotide
uacacauacaacuagccaa

SEQ ID NO: 1758551 - RNA, 19 nt, Artificial Sequence
  Description of Artificial Sequence: Synthetic oligonucleotide
uugaauauaugcuuuuaga

SEQ ID NO: 1758552 - RNA, 19 nt, Artificial Sequence
  Description of Artificial Sequence: Synthetic oligonucleotide
aaaggauacugucagcaca

SEQ ID NO: 1758553 - RNA, 19 nt, Artificial Sequence
  Description of Artificial Sequence: Synthetic oligonucleotide
aaauagauuuccuaagcuu

SEQ ID NO: 1758554 - RNA, 19 nt, Artificial Sequence
  Description of Artificial Sequence: Synthetic oligonucleotide
cuaaaauauguacacggag

SEQ ID NO: 1758555 - RNA, 19 nt, Artificial Sequence
  Description of Artificial Sequence: Synthetic oligonucleotide
aaauauuuggugucuagua

SEQ ID NO: 1758556 - RNA, 19 nt, Artificial Sequence
  Description of Artificial Sequence: Synthetic oligonucleotide
ugauuuguucaguacgagg

SEQ ID NO: 1758557 - RNA, 19 nt, Artificial Sequence
  Description of Artificial Sequence: Synthetic oligonucleotide
ucguauguugccauuagca

SEQ ID NO: 1758558 - RNA, 19 nt, Artificial Sequence
  Description of Artificial Sequence: Synthetic oligonucleotide
acauuauugccacugaagu

SEQ ID NO: 1758559 - RNA, 19 nt, Artificial Sequence
  Description of Artificial Sequence: Synthetic oligonucleotide
agacuaugaaaagagguac

SEQ ID NO: 1758560 - RNA, 19 nt, Artificial Sequence
  Description of Artificial Sequence: Synthetic oligonucleotide
uccuauacaaccuucuggu

SEQ ID NO: 1758561 - RNA, 19 nt, Artificial Sequence
  Description of Artificial Sequence: Synthetic oligonucleotide
uccuuauuguucuuuaugu

SEQ ID NO: 1758562 - RNA, 19 nt, Artificial Sequence
  Description of Artificial Sequence: Synthetic oligonucleotide
auguuagcaauaaauaauc

SEQ ID NO: 1758563 - RNA, 19 nt, Artificial Sequence
  Description of Artificial Sequence: Synthetic oligonucleotide
cauuacacauacaacuagc

SEQ ID NO: 1758564 - RNA, 19 nt, Artificial Sequence
  Description of Artificial Sequence: Synthetic oligonucleotide
uauacaaccuucugguuac

SEQ ID NO: 1758565 - RNA, 19 nt, Artificial Sequence
  Description of Artificial Sequence: Synthetic oligonucleotide
agcaaauagauuuccuaag

SEQ ID NO: 1758566 - RNA, 19 nt, Artificial Sequence
  Description of Artificial Sequence: Synthetic oligonucleotide
acuaugaaaagagguacac

SEQ ID NO: 1758567 - RNA, 19 nt, Artificial Sequence
  Description of Artificial Sequence: Synthetic oligonucleotide
gacccaguuaucucgaaag

SEQ ID NO: 1758568 - RNA, 19 nt, Artificial Sequence
  Description of Artificial Sequence: Synthetic oligonucleotide
agaccgagcaaauagauuu

SEQ ID NO: 1758569 - RNA, 19 nt, Artificial Sequence
  Description of Artificial Sequence: Synthetic oligonucleotide
aaucccgggaucaacagag

SEQ ID NO: 1758570 - RNA, 19 nt, Artificial Sequence
  Description of Artificial Sequence: Synthetic oligonucleotide
acauuacacauacaacuag

SEQ ID NO: 1758571 - RNA, 19 nt, Artificial Sequence
  Description of Artificial Sequence: Synthetic oligonucleotide
uuacacauacaacuagcca

SEQ ID NO: 1758572 - RNA, 19 nt, Artificial Sequence
  Description of Artificial Sequence: Synthetic oligonucleotide
uaucucgaaagccaagugu

SEQ ID NO: 1758573 - RNA, 19 nt, Artificial Sequence
  Description of Artificial Sequence: Synthetic oligonucleotide
aaauaaucccgggaucaac

SEQ ID NO: 1758574 - RNA, 19 nt, Artificial Sequence
  Description of Artificial Sequence: Synthetic oligonucleotide
uacagagacauguaugaac

SEQ ID NO: 1758575 - RNA, 19 nt, Artificial Sequence
  Description of Artificial Sequence: Synthetic oligonucleotide
auaaauaaucccgggauca

SEQ ID NO: 1758576 - RNA, 19 nt, Artificial Sequence
  Description of Artificial Sequence: Synthetic oligonucleotide
aaauauguacacggagcgg

SEQ ID NO: 1758577 - RNA, 19 nt, Artificial Sequence
  Description of Artificial Sequence: Synthetic oligonucleotide
guaugaacaaaauuuccuc

SEQ ID NO: 1758578 - RNA, 19 nt, Artificial Sequence
  Description of Artificial Sequence: Synthetic oligonucleotide
uagaguuucacagcaacca

SEQ ID NO: 1758579 - RNA, 19 nt, Artificial Sequence
  Description of Artificial Sequence: Synthetic oligonucleotide
guccuauacaaccuucugg

SEQ ID NO: 1758580 - RNA, 19 nt, Artificial Sequence
  Description of Artificial Sequence: Synthetic oligonucleotide
acugcgacagccacuaacc

SEQ ID NO: 1758581 - RNA, 19 nt, Artificial Sequence
  Description of Artificial Sequence: Synthetic oligonucleotide
auagauuuccuaagcuugc

SEQ ID NO: 1758582 - RNA, 19 nt, Artificial Sequence
  Description of Artificial Sequence: Synthetic oligonucleotide
aucguauguugccauuagc

SEQ ID NO: 1758583 - RNA, 19 nt, Artificial Sequence
  Description of Artificial Sequence: Synthetic oligonucleotide
uauuuggugucuaguaccu

SEQ ID NO: 1758584 - RNA, 19 nt, Artificial Sequence
  Description of Artificial Sequence: Synthetic oligonucleotide
aauaaucccgggaucaaca

SEQ ID NO: 1758585 - RNA, 19 nt, Artificial Sequence
  Description of Artificial Sequence: Synthetic oligonucleotide
gauuuccuaagcuugcauc

SEQ ID NO: 1758586 - RNA, 19 nt, Artificial Sequence
  Description of Artificial Sequence: Synthetic oligonucleotide
cacuaaccaacuuugcagc

SEQ ID NO: 1758587 - RNA, 19 nt, Artificial Sequence
  Description of Artificial Sequence: Synthetic oligonucleotide
ugccacugaagucuaaaca

SEQ ID NO: 1758588 - RNA, 19 nt, Artificial Sequence
  Description of Artificial Sequence: Synthetic oligonucleotide
gaaacucaaugaauggugc

SEQ ID NO: 1758589 - RNA, 19 nt, Artificial Sequence
  Description of Artificial Sequence: Synthetic oligonucleotide
gagauuccacauuuguacc

SEQ ID NO: 1758590 - RNA, 19 nt, Artificial Sequence
  Description of Artificial Sequence: Synthetic oligonucleotide
auagaguuucacagcaacc

SEQ ID NO: 1758591 - RNA, 19 nt, Artificial Sequence
  Description of Artificial Sequence: Synthetic oligonucleotide
aagucuaaacauuguacuu

SEQ ID NO: 1758592 - RNA, 19 nt, Artificial Sequence
  Description of Artificial Sequence: Synthetic oligonucleotide
acauuguacuuuuagggaa

SEQ ID NO: 1758593 - RNA, 19 nt, Artificial Sequence
  Description of Artificial Sequence: Synthetic oligonucleotide
agaaacucaaugaauggug

SEQ ID NO: 1758594 - RNA, 19 nt, Artificial Sequence
  Description of Artificial Sequence: Synthetic oligonucleotide
aauacugcgacagccacua

SEQ ID NO: 1758595 - RNA, 19 nt, Artificial Sequence
  Description of Artificial Sequence: Synthetic oligonucleotide
agcaguugaguccagugca

SEQ ID NO: 1758596 - RNA, 19 nt, Artificial Sequence
  Description of Artificial Sequence: Synthetic oligonucleotide
acccaguuaucucgaaagc

SEQ ID NO: 1758597 - RNA, 19 nt, Artificial Sequence
  Description of Artificial Sequence: Synthetic oligonucleotide
uuuacaaagguagccauuu

SEQ ID NO: 1758598 - RNA, 19 nt, Artificial Sequence
  Description of Artificial Sequence: Synthetic oligonucleotide
cacugaagucuaaacauug

SEQ ID NO: 1758599 - RNA, 19 nt, Artificial Sequence
  Description of Artificial Sequence: Synthetic oligonucleotide
auguacacggagcggcugc

SEQ ID NO: 1758600 - RNA, 19 nt, Artificial Sequence
  Description of Artificial Sequence: Synthetic oligonucleotide
ucguagagcgagcaguuga

SEQ ID NO: 1758601 - RNA, 19 nt, Artificial Sequence
  Description of Artificial Sequence: Synthetic oligonucleotide
gagcaaauagauuuccuaa

SEQ ID NO: 1758602 - RNA, 19 nt, Artificial Sequence
  Description of Artificial Sequence: Synthetic oligonucleotide
agcaaugagccgccgugcc

SEQ ID NO: 1758603 - RNA, 19 nt, Artificial Sequence
  Description of Artificial Sequence: Synthetic oligonucleotide
guugccauuagcacuacug

SEQ ID NO: 1758604 - RNA, 19 nt, Artificial Sequence
  Description of Artificial Sequence: Synthetic oligonucleotide
ucaguguccuauacaaccu

SEQ ID NO: 1758605 - RNA, 19 nt, Artificial Sequence
  Description of Artificial Sequence: Synthetic oligonucleotide
ugccagauauuuauacaga

SEQ ID NO: 1758606 - RNA, 19 nt, Artificial Sequence
  Description of Artificial Sequence: Synthetic oligonucleotide
auaaucccgggaucaacag

SEQ ID NO: 1758607 - RNA, 19 nt, Artificial Sequence
  Description of Artificial Sequence: Synthetic oligonucleotide
auacugucagcacaugcca

SEQ ID NO: 1758608 - RNA, 19 nt, Artificial Sequence
  Description of Artificial Sequence: Synthetic oligonucleotide
gcaaauagauuuccuaagc

SEQ ID NO: 1758609 - RNA, 19 nt, Artificial Sequence
  Description of Artificial Sequence: Synthetic oligonucleotide
uccacauuuguaccuggga

SEQ ID NO: 1758610 - RNA, 19 nt, Artificial Sequence
  Description of Artificial Sequence: Synthetic oligonucleotide
ugcagaccgagcaaauaga

SEQ ID NO: 1758611 - RNA, 19 nt, Artificial Sequence
  Description of Artificial Sequence: Synthetic oligonucleotide
accgagcaaauagauuucc

SEQ ID NO: 1758612 - RNA, 19 nt, Artificial Sequence
  Description of Artificial Sequence: Synthetic oligonucleotide
uagagauuccacauuugua

SEQ ID NO: 1758613 - RNA, 19 nt, Artificial Sequence
  Description of Artificial Sequence: Synthetic oligonucleotide
gagcaguugaguccagugc

SEQ ID NO: 1758614 - RNA, 19 nt, Artificial Sequence
  Description of Artificial Sequence: Synthetic oligonucleotide
uacugcgacagccacuaac

SEQ ID NO: 1758615 - RNA, 19 nt, Artificial Sequence
  Description of Artificial Sequence: Synthetic oligonucleotide
agauuccacauuuguaccu

SEQ ID NO: 1758616 - RNA, 19 nt, Artificial Sequence
  Description of Artificial Sequence: Synthetic oligonucleotide
acaaagguagccauuuaug

SEQ ID NO: 1758617 - RNA, 19 nt, Artificial Sequence
  Description of Artificial Sequence: Synthetic oligonucleotide
cuaugaaaagagguacacc

SEQ ID NO: 1758618 - RNA, 19 nt, Artificial Sequence
  Description of Artificial Sequence: Synthetic oligonucleotide
ucccuaaaaggcauguuuu

SEQ ID NO: 1758619 - RNA, 19 nt, Artificial Sequence
  Description of Artificial Sequence: Synthetic oligonucleotide
aguacauuauugccacuga

SEQ ID NO: 1758620 - RNA, 19 nt, Artificial Sequence
  Description of Artificial Sequence: Synthetic oligonucleotide
agugcgugcguccucucuc

SEQ ID NO: 1758621 - RNA, 19 nt, Artificial Sequence
  Description of Artificial Sequence: Synthetic oligonucleotide
gacuguacgaucacauuac

SEQ ID NO: 1758622 - RNA, 19 nt, Artificial Sequence
  Description of Artificial Sequence: Synthetic oligonucleotide
gccagauauuuauacagag

SEQ ID NO: 1758623 - RNA, 19 nt, Artificial Sequence
  Description of Artificial Sequence: Synthetic oligonucleotide
gcuauuuacaaagguagcc

SEQ ID NO: 1758624 - RNA, 19 nt, Artificial Sequence
  Description of Artificial Sequence: Synthetic oligonucleotide
uagccauuuauguuagcaa

SEQ ID NO: 1758625 - RNA, 19 nt, Artificial Sequence
  Description of Artificial Sequence: Synthetic oligonucleotide
gagacauguaugaacaaaa

SEQ ID NO: 1758626 - RNA, 19 nt, Artificial Sequence
  Description of Artificial Sequence: Synthetic oligonucleotide
caguacgagggcuauuuac

SEQ ID NO: 1758627 - RNA, 19 nt, Artificial Sequence
  Description of Artificial Sequence: Synthetic oligonucleotide
gaaucaaagugcgugcguc

SEQ ID NO: 1758628 - RNA, 19 nt, Artificial Sequence
  Description of Artificial Sequence: Synthetic oligonucleotide
cuuaaugcccuucccacca

SEQ ID NO: 1758629 - RNA, 19 nt, Artificial Sequence
  Description of Artificial Sequence: Synthetic oligonucleotide
cuguacgaucacauuacac

SEQ ID NO: 1758630 - RNA, 19 nt, Artificial Sequence
  Description of Artificial Sequence: Synthetic oligonucleotide
auuagcacuacuguuccau

SEQ ID NO: 1758631 - RNA, 19 nt, Artificial Sequence
  Description of Artificial Sequence: Synthetic oligonucleotide
guagccauuuauguuagca

SEQ ID NO: 1758632 - RNA, 19 nt, Artificial Sequence
  Description of Artificial Sequence: Synthetic oligonucleotide
aguacgagggcuauuuaca

SEQ ID NO: 1758633 - RNA, 19 nt, Artificial Sequence
  Description of Artificial Sequence: Synthetic oligonucleotide
cuuuacagcucuccuucag

SEQ ID NO: 1758634 - RNA, 19 nt, Artificial Sequence
  Description of Artificial Sequence: Synthetic oligonucleotide
ugcuucugcgggaugcacc

SEQ ID NO: 1758635 - RNA, 19 nt, Artificial Sequence
  Description of Artificial Sequence: Synthetic oligonucleotide
aaugagccgccgugccucg

SEQ ID NO: 1758636 - RNA, 19 nt, Artificial Sequence
  Description of Artificial Sequence: Synthetic oligonucleotide
uaaucccgggaucaacaga

SEQ ID NO: 1758637 - RNA, 19 nt, Artificial Sequence
  Description of Artificial Sequence: Synthetic oligonucleotide
uagcacuacuguuccaucu

SEQ ID NO: 1758638 - RNA, 19 nt, Artificial Sequence
  Description of Artificial Sequence: Synthetic oligonucleotide
agucuaaacauuguacuuu

SEQ ID NO: 1758639 - RNA, 19 nt, Artificial Sequence
  Description of Artificial Sequence: Synthetic oligonucleotide
acuaaccaacuuugcagcu

SEQ ID NO: 1758640 - RNA, 19 nt, Artificial Sequence
  Description of Artificial Sequence: Synthetic oligonucleotide
cagaaucaaagugcgugcg

SEQ ID NO: 1758641 - RNA, 19 nt, Artificial Sequence
  Description of Artificial Sequence: Synthetic oligonucleotide
caauaaauaaucccgggau

SEQ ID NO: 1758642 - RNA, 19 nt, Artificial Sequence
  Description of Artificial Sequence: Synthetic oligonucleotide
ugucuaguaccuccccugu

SEQ ID NO: 1758643 - RNA, 19 nt, Artificial Sequence
  Description of Artificial Sequence: Synthetic oligonucleotide
uucaguacgagggcuauuu

SEQ ID NO: 1758644 - RNA, 19 nt, Artificial Sequence
  Description of Artificial Sequence: Synthetic oligonucleotide
guucuuaacaccacucauc

SEQ ID NO: 1758645 - RNA, 19 nt, Artificial Sequence
  Description of Artificial Sequence: Synthetic oligonucleotide
agagacauguaugaacaaa

SEQ ID NO: 1758646 - RNA, 19 nt, Artificial Sequence
  Description of Artificial Sequence: Synthetic oligonucleotide
ugauagaguuucacagcaa

SEQ ID NO: 1758647 - RNA, 19 nt, Artificial Sequence
  Description of Artificial Sequence: Synthetic oligonucleotide
ugauggacgugcuccccag

SEQ ID NO: 1758648 - RNA, 19 nt, Artificial Sequence
  Description of Artificial Sequence: Synthetic oligonucleotide
guauguugccauuagcacu

SEQ ID NO: 1758649 - RNA, 19 nt, Artificial Sequence
  Description of Artificial Sequence: Synthetic oligonucleotide
caucguauguugccauuag

SEQ ID NO: 1758650 - RNA, 19 nt, Artificial Sequence
  Description of Artificial Sequence: Synthetic oligonucleotide
uugccacugaagucuaaac

SEQ ID NO: 1758651 - RNA, 19 nt, Artificial Sequence
  Description of Artificial Sequence: Synthetic oligonucleotide
gcaacauugauuccucuuc

SEQ ID NO: 1758652 - RNA, 19 nt, Artificial Sequence
  Description of Artificial Sequence: Synthetic oligonucleotide
ugcgacagccacuaaccaa

SEQ ID NO: 1758653 - RNA, 19 nt, Artificial Sequence
  Description of Artificial Sequence: Synthetic oligonucleotide
gacuaugaaaagagguaca

SEQ ID NO: 1758654 - RNA, 19 nt, Artificial Sequence
  Description of Artificial Sequence: Synthetic oligonucleotide
ggccccacaacauuggcug

SEQ ID NO: 1758655 - RNA, 19 nt, Artificial Sequence
  Description of Artificial Sequence: Synthetic oligonucleotide
uuuccuaagcuugcaucca

SEQ ID NO: 1758656 - RNA, 19 nt, Artificial Sequence
  Description of Artificial Sequence: Synthetic oligonucleotide
aaauacugcgacagccacu

SEQ ID NO: 1758657 - RNA, 19 nt, Artificial Sequence
  Description of Artificial Sequence: Synthetic oligonucleotide
acuguacgaucacauuaca

SEQ ID NO: 1758658 - RNA, 19 nt, Artificial Sequence
  Description of Artificial Sequence: Synthetic oligonucleotide
uuccaugauagaguuucac

SEQ ID NO: 1758659 - RNA, 19 nt, Artificial Sequence
  Description of Artificial Sequence: Synthetic oligonucleotide
agauuuccuaagcuugcau

SEQ ID NO: 1758660 - RNA, 19 nt, Artificial Sequence
  Description of Artificial Sequence: Synthetic oligonucleotide
ccacauuuguaccugggag

SEQ ID NO: 1758661 - RNA, 19 nt, Artificial Sequence
  Description of Artificial Sequence: Synthetic oligonucleotide
guugcuccaucaucguaug

SEQ ID NO: 1758662 - RNA, 19 nt, Artificial Sequence
  Description of Artificial Sequence: Synthetic oligonucleotide
auauaugcuuuuagaauaa

SEQ ID NO: 1758663 - RNA, 19 nt, Artificial Sequence
  Description of Artificial Sequence: Synthetic oligonucleotide
caaauagauuuccuaagcu

SEQ ID NO: 1758664 - RNA, 19 nt, Artificial Sequence
  Description of Artificial Sequence: Synthetic oligonucleotide
ucuaaacauuguacuuuua

SEQ ID NO: 1758665 - RNA, 19 nt, Artificial Sequence
  Description of Artificial Sequence: Synthetic oligonucleotide
ugcuccaucaucguauguu

SEQ ID NO: 1758666 - RNA, 19 nt, Artificial Sequence
  Description of Artificial Sequence: Synthetic oligonucleotide
uuagcacuacuguuccauc

SEQ ID NO: 1758667 - RNA, 19 nt, Artificial Sequence
  Description of Artificial Sequence: Synthetic oligonucleotide
cuuguauagucuucagaaa

SEQ ID NO: 1758668 - RNA, 19 nt, Artificial Sequence
  Description of Artificial Sequence: Synthetic oligonucleotide
uuguucaguacgagggcua

SEQ ID NO: 1758669 - RNA, 19 nt, Artificial Sequence
  Description of Artificial Sequence: Synthetic oligonucleotide
uacaaccuucugguuaccc

SEQ ID NO: 1758670 - RNA, 19 nt, Artificial Sequence
  Description of Artificial Sequence: Synthetic oligonucleotide
aagugcgugcguccucucu

SEQ ID NO: 1758671 - RNA, 19 nt, Artificial Sequence
  Description of Artificial Sequence: Synthetic oligonucleotide
auuuguaccugggaggcuu

SEQ ID NO: 1758672 - RNA, 19 nt, Artificial Sequence
  Description of Artificial Sequence: Synthetic oligonucleotide
auggacgugcuccccagcu

SEQ ID NO: 1758673 - RNA, 19 nt, Artificial Sequence
  Description of Artificial Sequence: Synthetic oligonucleotide
ugauuccucuuccaacauu

SEQ ID NO: 1758674 - RNA, 19 nt, Artificial Sequence
  Description of Artificial Sequence: Synthetic oligonucleotide
uacgagggcuauuuacaaa

SEQ ID NO: 1758675 - RNA, 19 nt, Artificial Sequence
  Description of Artificial Sequence: Synthetic oligonucleotide
uuccuaagcuugcauccau

SEQ ID NO: 1758676 - RNA, 19 nt, Artificial Sequence
  Description of Artificial Sequence: Synthetic oligonucleotide
uggugauggacgugcuccc

SEQ ID NO: 1758677 - RNA, 19 nt, Artificial Sequence
  Description of Artificial Sequence: Synthetic oligonucleotide
augguccggugauuuguuc

SEQ ID NO: 1758678 - RNA, 19 nt, Artificial Sequence
  Description of Artificial Sequence: Synthetic oligonucleotide
uauguacacggagcggcug

SEQ ID NO: 1758679 - RNA, 19 nt, Artificial Sequence
  Description of Artificial Sequence: Synthetic oligonucleotide
ccgggaucaacagagacgc

SEQ ID NO: 1758680 - RNA, 19 nt, Artificial Sequence
  Description of Artificial Sequence: Synthetic oligonucleotide
augaauggugccacaucuc

SEQ ID NO: 1758681 - RNA, 19 nt, Artificial Sequence
  Description of Artificial Sequence: Synthetic oligonucleotide
ucaucguauguugccauua

SEQ ID NO: 1758682 - RNA, 19 nt, Artificial Sequence
  Description of Artificial Sequence: Synthetic oligonucleotide
guacauuauugccacugaa

SEQ ID NO: 1758683 - RNA, 19 nt, Artificial Sequence
  Description of Artificial Sequence: Synthetic oligonucleotide
uccggugauuuguucagua

SEQ ID NO: 1758684 - RNA, 19 nt, Artificial Sequence
  Description of Artificial Sequence: Synthetic oligonucleotide
acugaagucuaaacauugu

SEQ ID NO: 1758685 - RNA, 19 nt, Artificial Sequence
  Description of Artificial Sequence: Synthetic oligonucleotide
cugaagucuaaacauugua

SEQ ID NO: 1758686 - RNA, 19 nt, Artificial Sequence
  Description of Artificial Sequence: Synthetic oligonucleotide
uuaaugcccuucccaccac

SEQ ID NO: 1758687 - RNA, 19 nt, Artificial Sequence
  Description of Artificial Sequence: Synthetic oligonucleotide
auccuucauacuuguuugu

SEQ ID NO: 1758688 - RNA, 19 nt, Artificial Sequence
  Description of Artificial Sequence: Synthetic oligonucleotide
guacgaucacauuacacau

SEQ ID NO: 1758689 - RNA, 19 nt, Artificial Sequence
  Description of Artificial Sequence: Synthetic oligonucleotide
cuaaccaacuuugcagcuc

SEQ ID NO: 1758690 - RNA, 19 nt, Artificial Sequence
  Description of Artificial Sequence: Synthetic oligonucleotide
agcacuacuguuccaucuu

SEQ ID NO: 1758691 - RNA, 19 nt, Artificial Sequence
  Description of Artificial Sequence: Synthetic oligonucleotide
agccacuaaccaacuuugc

SEQ ID NO: 1758692 - RNA, 19 nt, Artificial Sequence
  Description of Artificial Sequence: Synthetic oligonucleotide
auuuggugucuaguaccuc

SEQ ID NO: 1758693 - RNA, 19 nt, Artificial Sequence
  Description of Artificial Sequence: Synthetic oligonucleotide
cuuggauucuuuggaagga

SEQ ID NO: 1758694 - RNA, 19 nt, Artificial Sequence
  Description of Artificial Sequence: Synthetic oligonucleotide
aucaaagugcgugcguccu

SEQ ID NO: 1758695 - RNA, 19 nt, Artificial Sequence
  Description of Artificial Sequence: Synthetic oligonucleotide
gcuucugcgggaugcaccc

SEQ ID NO: 1758696 - RNA, 19 nt, Artificial Sequence
  Description of Artificial Sequence: Synthetic oligonucleotide
ucaaagugcgugcguccuc

SEQ ID NO: 1758697 - RNA, 19 nt, Artificial Sequence
  Description of Artificial Sequence: Synthetic oligonucleotide
cggugauuuguucaguacg

SEQ ID NO: 1758698 - RNA, 19 nt, Artificial Sequence
  Description of Artificial Sequence: Synthetic oligonucleotide
uuuguaccugggaggcuuc

SEQ ID NO: 1758699 - RNA, 19 nt, Artificial Sequence
  Description of Artificial Sequence: Synthetic oligonucleotide
agacauguaugaacaaaau

SEQ ID NO: 1758700 - RNA, 19 nt, Artificial Sequence
  Description of Artificial Sequence: Synthetic oligonucleotide
uguugccauuagcacuacu

SEQ ID NO: 1758701 - RNA, 19 nt, Artificial Sequence
  Description of Artificial Sequence: Synthetic oligonucleotide
agacccaguuaucucgaaa

SEQ ID NO: 1758702 - RNA, 19 nt, Artificial Sequence
  Description of Artificial Sequence: Synthetic oligonucleotide
gaagacccaguuaucucga

SEQ ID NO: 1758703 - RNA, 19 nt, Artificial Sequence
  Description of Artificial Sequence: Synthetic oligonucleotide
guacgagggcuauuuacaa

SEQ ID NO: 1758704 - RNA, 19 nt, Artificial Sequence
  Description of Artificial Sequence: Synthetic oligonucleotide
caaugagccgccgugccuc

SEQ ID NO: 1758705 - RNA, 19 nt, Artificial Sequence
  Description of Artificial Sequence: Synthetic oligonucleotide
auacaaccuucugguuacc

SEQ ID NO: 1758706 - RNA, 19 nt, Artificial Sequence
  Description of Artificial Sequence: Synthetic oligonucleotide
ugguuacccauugaauaua

SEQ ID NO: 1758707 - RNA, 19 nt, Artificial Sequence
  Description of Artificial Sequence: Synthetic oligonucleotide
uccuaagcuugcauccauu

SEQ ID NO: 1758708 - RNA, 19 nt, Artificial Sequence
  Description of Artificial Sequence: Synthetic oligonucleotide
gauggacgugcuccccagc

SEQ ID NO: 1758709 - RNA, 19 nt, Artificial Sequence
  Description of Artificial Sequence: Synthetic oligonucleotide
ucaguacgagggcuauuua

SEQ ID NO: 1758710 - RNA, 19 nt, Artificial Sequence
  Description of Artificial Sequence: Synthetic oligonucleotide
uguucaguacgagggcuau

SEQ ID NO: 1758711 - RNA, 19 nt, Artificial Sequence
  Description of Artificial Sequence: Synthetic oligonucleotide
ggcuauuuacaaagguagc

SEQ ID NO: 1758712 - RNA, 19 nt, Artificial Sequence
  Description of Artificial Sequence: Synthetic oligonucleotide
cccaguuaucucgaaagcc

SEQ ID NO: 1758713 - RNA, 19 nt, Artificial Sequence
  Description of Artificial Sequence: Synthetic oligonucleotide
uucguagagcgagcaguug

SEQ ID NO: 1758714 - RNA, 19 nt, Artificial Sequence
  Description of Artificial Sequence: Synthetic oligonucleotide
ugguugcuccaucaucgua

SEQ ID NO: 1758715 - RNA, 19 nt, Artificial Sequence
  Description of Artificial Sequence: Synthetic oligonucleotide
uucugcgggaugcacccuu

SEQ ID NO: 1758716 - RNA, 19 nt, Artificial Sequence
  Description of Artificial Sequence: Synthetic oligonucleotide
gagcgagcaguugagucca

SEQ ID NO: 1758717 - RNA, 19 nt, Artificial Sequence
  Description of Artificial Sequence: Synthetic oligonucleotide
caguuaucucgaaagccaa

SEQ ID NO: 1758718 - RNA, 19 nt, Artificial Sequence
  Description of Artificial Sequence: Synthetic oligonucleotide
guuacccauugaauauaug

SEQ ID NO: 1758719 - RNA, 19 nt, Artificial Sequence
  Description of Artificial Sequence: Synthetic oligonucleotide
gcgacagccacuaaccaac

SEQ ID NO: 1758720 - RNA, 19 nt, Artificial Sequence
  Description of Artificial Sequence: Synthetic oligonucleotide
auacagagacauguaugaa

SEQ ID NO: 1758721 - RNA, 19 nt, Artificial Sequence
  Description of Artificial Sequence: Synthetic oligonucleotide
cauuuauguuagcaauaaa

SEQ ID NO: 1758722 - RNA, 19 nt, Artificial Sequence
  Description of Artificial Sequence: Synthetic oligonucleotide
aaguguggugauggacgug

SEQ ID NO: 1758723 - RNA, 19 nt, Artificial Sequence
  Description of Artificial Sequence: Synthetic oligonucleotide
aaugguccggugauuuguu

SEQ ID NO: 1758724 - RNA, 19 nt, Artificial Sequence
  Description of Artificial Sequence: Synthetic oligonucleotide
gaccgagcaaauagauuuc

SEQ ID NO: 1758725 - RNA, 19 nt, Artificial Sequence
  Description of Artificial Sequence: Synthetic oligonucleotide
ucugcgggaugcacccuuc

SEQ ID NO: 1758726 - RNA, 19 nt, Artificial Sequence
  Description of Artificial Sequence: Synthetic oligonucleotide
cugguuacccauugaauau

SEQ ID NO: 1758727 - RNA, 19 nt, Artificial Sequence
  Description of Artificial Sequence: Synthetic oligonucleotide
auauguacacggagcggcu

SEQ ID NO: 1758728 - RNA, 19 nt, Artificial Sequence
  Description of Artificial Sequence: Synthetic oligonucleotide
cauuguucuuaacaccacu

SEQ ID NO: 1758729 - RNA, 19 nt, Artificial Sequence
  Description of Artificial Sequence: Synthetic oligonucleotide
ggagccagacuguacgauc

SEQ ID NO: 1758730 - RNA, 19 nt, Artificial Sequence
  Description of Artificial Sequence: Synthetic oligonucleotide
uugcuccaucaucguaugu

SEQ ID NO: 1758731 - RNA, 19 nt, Artificial Sequence
  Description of Artificial Sequence: Synthetic oligonucleotide
cucaaugaauggugccaca

SEQ ID NO: 1758732 - RNA, 19 nt, Artificial Sequence
  Description of Artificial Sequence: Synthetic oligonucleotide
cagaaacucaaugaauggu

SEQ ID NO: 1758733 - RNA, 19 nt, Artificial Sequence
  Description of Artificial Sequence: Synthetic oligonucleotide
gcacuacuguuccaucuug

SEQ ID NO: 1758734 - RNA, 19 nt, Artificial Sequence
  Description of Artificial Sequence: Synthetic oligonucleotide
cccuaaaaggcauguuuuc

SEQ ID NO: 1758735 - RNA, 19 nt, Artificial Sequence
  Description of Artificial Sequence: Synthetic oligonucleotide
cagcaaugagccgccgugc

SEQ ID NO: 1758736 - RNA, 19 nt, Artificial Sequence
  Description of Artificial Sequence: Synthetic oligonucleotide
ugagccgccgugccucguc

SEQ ID NO: 1758737 - RNA, 19 nt, Artificial Sequence
  Description of Artificial Sequence: Synthetic oligonucleotide
cucccuaaaaggcauguuu

SEQ ID NO: 1758738 - RNA, 19 nt, Artificial Sequence
  Description of Artificial Sequence: Synthetic oligonucleotide
gcacaugccagauauuuau

SEQ ID NO: 1758739 - RNA, 19 nt, Artificial Sequence
  Description of Artificial Sequence: Synthetic oligonucleotide
ugcgugcguccucucucug

SEQ ID NO: 1758740 - RNA, 19 nt, Artificial Sequence
  Description of Artificial Sequence: Synthetic oligonucleotide
acgugcuccccagcucagc

SEQ ID NO: 1758741 - RNA, 19 nt, Artificial Sequence
  Description of Artificial Sequence: Synthetic oligonucleotide
gccgcaugcuacuaaaaua

SEQ ID NO: 1758742 - RNA, 19 nt, Artificial Sequence
  Description of Artificial Sequence: Synthetic oligonucleotide
agcuugcauccauuuuaau

SEQ ID NO: 1758743 - RNA, 19 nt, Artificial Sequence
  Description of Artificial Sequence: Synthetic oligonucleotide
gcaugcuacuaaaauaugu

SEQ ID NO: 1758744 - RNA, 19 nt, Artificial Sequence
  Description of Artificial Sequence: Synthetic oligonucleotide
guaccugggaggcuucgua

SEQ ID NO: 1758745 - RNA, 19 nt, Artificial Sequence
  Description of Artificial Sequence: Synthetic oligonucleotide
agcggcugcuuuacagcuc

SEQ ID NO: 1758746 - RNA, 19 nt, Artificial Sequence
  Description of Artificial Sequence: Synthetic oligonucleotide
cugcgggaugcacccuucc

SEQ ID NO: 1758747 - RNA, 19 nt, Artificial Sequence
  Description of Artificial Sequence: Synthetic oligonucleotide
gcaguugaguccagugcag

SEQ ID NO: 1758748 - RNA, 19 nt, Artificial Sequence
  Description of Artificial Sequence: Synthetic oligonucleotide
ccggugauuuguucaguac

SEQ ID NO: 1758749 - RNA, 19 nt, Artificial Sequence
  Description of Artificial Sequence: Synthetic oligonucleotide
aggcuucguagagcgagca

SEQ ID NO: 1758750 - RNA, 19 nt, Artificial Sequence
  Description of Artificial Sequence: Synthetic oligonucleotide
gcgugcguccucucucugg

SEQ ID NO: 1758751 - RNA, 19 nt, Artificial Sequence
  Description of Artificial Sequence: Synthetic oligonucleotide
cacggagcggcugcuuuac

SEQ ID NO: 1758752 - RNA, 19 nt, Artificial Sequence
  Description of Artificial Sequence: Synthetic oligonucleotide
ggcuucguagagcgagcag

SEQ ID NO: 1758753 - RNA, 19 nt, Artificial Sequence
  Description of Artificial Sequence: Synthetic oligonucleotide
cacguucccuucaguccug

SEQ ID NO: 1758754 - RNA, 19 nt, Artificial Sequence
  Description of Artificial Sequence: Synthetic oligonucleotide
caggagccagacuguacga

SEQ ID NO: 1758755 - RNA, 19 nt, Artificial Sequence
  Description of Artificial Sequence: Synthetic oligonucleotide
acacggagcggcugcuuua

SEQ ID NO: 1758756 - RNA, 19 nt, Artificial Sequence
  Description of Artificial Sequence: Synthetic oligonucleotide
gacgugcuccccagcucag

SEQ ID NO: 1758757 - RNA, 19 nt, Artificial Sequence
  Description of Artificial Sequence: Synthetic oligonucleotide
gguugcuccaucaucguau

SEQ ID NO: 1758758 - RNA, 19 nt, Artificial Sequence
  Description of Artificial Sequence: Synthetic oligonucleotide
aaccaacuuugcagcuccu

SEQ ID NO: 1758759 - RNA, 19 nt, Artificial Sequence
  Description of Artificial Sequence: Synthetic oligonucleotide
cugcgacagccacuaacca

SEQ ID NO: 1758760 - RNA, 19 nt, Artificial Sequence
  Description of Artificial Sequence: Synthetic oligonucleotide
ccgcaugcuacuaaaauau

SEQ ID NO: 1758761 - RNA, 19 nt, Artificial Sequence
  Description of Artificial Sequence: Synthetic oligonucleotide
cucgaaagccaaguguggu

SEQ ID NO: 1758762 - RNA, 19 nt, Artificial Sequence
  Description of Artificial Sequence: Synthetic oligonucleotide
ggaucaacagagacgcucu

SEQ ID NO: 1758763 - RNA, 19 nt, Artificial Sequence
  Description of Artificial Sequence: Synthetic oligonucleotide
ccgugccucgucauugagc

SEQ ID NO: 1758764 - RNA, 19 nt, Artificial Sequence
  Description of Artificial Sequence: Synthetic oligonucleotide
gcuucguagagcgagcagu

SEQ ID NO: 1758765 - RNA, 19 nt, Artificial Sequence
  Description of Artificial Sequence: Synthetic oligonucleotide
caguugaguccagugcaga

SEQ ID NO: 1758766 - RNA, 19 nt, Artificial Sequence
  Description of Artificial Sequence: Synthetic oligonucleotide
cuucguagagcgagcaguu

SEQ ID NO: 1758767 - RNA, 19 nt, Artificial Sequence
  Description of Artificial Sequence: Synthetic oligonucleotide
cuaagcuugcauccauuuu

SEQ ID NO: 1758768 - RNA, 19 nt, Artificial Sequence
  Description of Artificial Sequence: Synthetic oligonucleotide
ggugauggacgugcucccc

SEQ ID NO: 1758769 - RNA, 19 nt, Artificial Sequence
  Description of Artificial Sequence: Synthetic oligonucleotide
caaagugcgugcguccucu

SEQ ID NO: 1758770 - RNA, 19 nt, Artificial Sequence
  Description of Artificial Sequence: Synthetic oligonucleotide
gagccgccgugccucguca

SEQ ID NO: 1758771 - RNA, 19 nt, Artificial Sequence
  Description of Artificial Sequence: Synthetic oligonucleotide
ccuucccaccacagaagac

SEQ ID NO: 1758772 - RNA, 19 nt, Artificial Sequence
  Description of Artificial Sequence: Synthetic oligonucleotide
cgcaugcuacuaaaauaug

SEQ ID NO: 1758773 - RNA, 19 nt, Artificial Sequence
  Description of Artificial Sequence: Synthetic oligonucleotide
caacagagacgcucuugcu

SEQ ID NO: 1758774 - RNA, 19 nt, Artificial Sequence
  Description of Artificial Sequence: Synthetic oligonucleotide
cgugccucgucauugagcu

SEQ ID NO: 1758775 - RNA, 19 nt, Artificial Sequence
  Description of Artificial Sequence: Synthetic oligonucleotide
acggagcggcugcuuuaca

SEQ ID NO: 1758776 - RNA, 19 nt, Artificial Sequence
  Description of Artificial Sequence: Synthetic oligonucleotide
cgaaagccaagugugguga

SEQ ID NO: 1758777 - RNA, 19 nt, Artificial Sequence
  Description of Artificial Sequence: Synthetic oligonucleotide
cagaccgagcaaauagauu

SEQ ID NO: 1758778 - RNA, 19 nt, Artificial Sequence
  Description of Artificial Sequence: Synthetic oligonucleotide
gguuacccauugaauauau

SEQ ID NO: 1758779 - RNA, 19 nt, Artificial Sequence
  Description of Artificial Sequence: Synthetic oligonucleotide
guagagcgagcaguugagu

SEQ ID NO: 1758780 - RNA, 19 nt, Artificial Sequence
  Description of Artificial Sequence: Synthetic oligonucleotide
gacagccacuaaccaacuu

SEQ ID NO: 1758781 - RNA, 19 nt, Artificial Sequence
  Description of Artificial Sequence: Synthetic oligonucleotide
agggcaugcuuuagagauu

SEQ ID NO: 1758782 - RNA, 19 nt, Artificial Sequence
  Description of Artificial Sequence: Synthetic oligonucleotide
gccgugccucgucauugag

SEQ ID NO: 1758783 - RNA, 19 nt, Artificial Sequence
  Description of Artificial Sequence: Synthetic oligonucleotide
auacugcgacagccacuaa

SEQ ID NO: 1758784 - RNA, 19 nt, Artificial Sequence
  Description of Artificial Sequence: Synthetic oligonucleotide
gugcgugcguccucucucu

SEQ ID NO: 1758785 - RNA, 19 nt, Artificial Sequence
  Description of Artificial Sequence: Synthetic oligonucleotide
ggcaugcuuuagagauucc

SEQ ID NO: 1758786 - RNA, 19 nt, Artificial Sequence
  Description of Artificial Sequence: Synthetic oligonucleotide
ccuaagcuugcauccauuu

SEQ ID NO: 1758787 - RNA, 19 nt, Artificial Sequence
  Description of Artificial Sequence: Synthetic oligonucleotide
gucuaguaccuccccuguu

SEQ ID NO: 1758788 - RNA, 19 nt, Artificial Sequence
  Description of Artificial Sequence: Synthetic oligonucleotide
gcaaugagccgccgugccu

SEQ ID NO: 1758789 - RNA, 19 nt, Artificial Sequence
  Description of Artificial Sequence: Synthetic oligonucleotide
gcgggaugcacccuuccau

SEQ ID NO: 1758790 - RNA, 19 nt, Artificial Sequence
  Description of Artificial Sequence: Synthetic oligonucleotide
ccgagcaaauagauuuccu

SEQ ID NO: 1758791 - RNA, 19 nt, Artificial Sequence
  Description of Artificial Sequence: Synthetic oligonucleotide
ccgccgugccucgucauug

SEQ ID NO: 1758792 - RNA, 19 nt, Artificial Sequence
  Description of Artificial Sequence: Synthetic oligonucleotide
augagccgccgugccucgu

SEQ ID NO: 1758793 - RNA, 19 nt, Artificial Sequence
  Description of Artificial Sequence: Synthetic oligonucleotide
ccuauacaaccuucugguu

SEQ ID NO: 1758794 - RNA, 19 nt, Artificial Sequence
  Description of Artificial Sequence: Synthetic oligonucleotide
guucaguacgagggcuauu

SEQ ID NO: 1758795 - RNA, 19 nt, Artificial Sequence
  Description of Artificial Sequence: Synthetic oligonucleotide
cucuuccaacauuguucuu

SEQ ID NO: 1758796 - RNA, 19 nt, Artificial Sequence
  Description of Artificial Sequence: Synthetic oligonucleotide
cgugcguccucucucuggu

SEQ ID NO: 1758797 - RNA, 19 nt, Artificial Sequence
  Description of Artificial Sequence: Synthetic oligonucleotide
cuucugcgggaugcacccu

SEQ ID NO: 1758798 - RNA, 19 nt, Artificial Sequence
  Description of Artificial Sequence: Synthetic oligonucleotide
guacacggagcggcugcuu

SEQ ID NO: 1758799 - RNA, 19 nt, Artificial Sequence
  Description of Artificial Sequence: Synthetic oligonucleotide
gugccucgucauugagcuu

SEQ ID NO: 1758800 - RNA, 19 nt, Artificial Sequence
  Description of Artificial Sequence: Synthetic oligonucleotide
cgccgugccucgucauuga

SEQ ID NO: 1758801 - RNA, 19 nt, Artificial Sequence
  Description of Artificial Sequence: Synthetic oligonucleotide
ggccagccgcaugcuacua

SEQ ID NO: 1758802 - RNA, 19 nt, Artificial Sequence
  Description of Artificial Sequence: Synthetic oligonucleotide
gccauccuucauacuuguu

SEQ ID NO: 1758803 - RNA, 19 nt, Artificial Sequence
  Description of Artificial Sequence: Synthetic oligonucleotide
cgggaucaacagagacgcu

SEQ ID NO: 1758804 - RNA, 19 nt, Artificial Sequence
  Description of Artificial Sequence: Synthetic oligonucleotide
auugaugaaaccuugaggg

SEQ ID NO: 1758805 - RNA, 19 nt, Artificial Sequence
  Description of Artificial Sequence: Synthetic oligonucleotide
ucaacagagacacugcagg

SEQ ID NO: 1758806 - RNA, 19 nt, Artificial Sequence
  Description of Artificial Sequence: Synthetic oligonucleotide
uauccuugaaccaacagca

SEQ ID NO: 1758807 - RNA, 19 nt, Artificial Sequence
  Description of Artificial Sequence: Synthetic oligonucleotide
aguucugugaguucagagc

SEQ ID NO: 1758808 - RNA, 19 nt, Artificial Sequence
  Description of Artificial Sequence: Synthetic oligonucleotide
aacuccaggcgguaaaacc

SEQ ID NO: 1758809 - RNA, 19 nt, Artificial Sequence
  Description of Artificial Sequence: Synthetic oligonucleotide
uccaauacugacauggacc

SEQ ID NO: 1758810 - RNA, 19 nt, Artificial Sequence
  Description of Artificial Sequence: Synthetic oligonucleotide
gaaguaucggcacacagcc

SEQ ID NO: 1758811 - RNA, 19 nt, Artificial Sequence
  Description of Artificial Sequence: Synthetic oligonucleotide
acacaaacccauuucagac

SEQ ID NO: 1758812 - RNA, 19 nt, Artificial Sequence
  Description of Artificial Sequence: Synthetic oligonucleotide
ggaaguagaacucagcacg

SEQ ID NO: 1758813 - RNA, 19 nt, Artificial Sequence
  Description of Artificial Sequence: Synthetic oligonucleotide
aaacccacaauucaguuaa

SEQ ID NO: 1758814 - RNA, 19 nt, Artificial Sequence
  Description of Artificial Sequence: Synthetic oligonucleotide
ugugaaacagaaaugugac

SEQ ID NO: 1758815 - RNA, 19 nt, Artificial Sequence
  Description of Artificial Sequence: Synthetic oligonucleotide
acccguuugauuuuaggcc

SEQ ID NO: 1758816 - RNA, 19 nt, Artificial Sequence
  Description of Artificial Sequence: Synthetic oligonucleotide
uguuucuccauuuaaggga

SEQ ID NO: 1758817 - RNA, 19 nt, Artificial Sequence
  Description of Artificial Sequence: Synthetic oligonucleotide
auggccuagggcuauaccc

SEQ ID NO: 1758818 - RNA, 19 nt, Artificial Sequence
  Description of Artificial Sequence: Synthetic oligonucleotide
acggagagaacacugcugc

SEQ ID NO: 1758819 - RNA, 19 nt, Artificial Sequence
  Description of Artificial Sequence: Synthetic oligonucleotide
cugaguuuccucaugacgc

SEQ ID NO: 1758820 - RNA, 19 nt, Artificial Sequence
  Description of Artificial Sequence: Synthetic oligonucleotide
ucaaaacacacuccaauac

SEQ ID NO: 1758821 - RNA, 19 nt, Artificial Sequence
  Description of Artificial Sequence: Synthetic oligonucleotide
aguaucggcacacagccuc

SEQ ID NO: 1758822 - RNA, 19 nt, Artificial Sequence
  Description of Artificial Sequence: Synthetic oligonucleotide
aguuaauaaacagucauca

SEQ ID NO: 1758823 - RNA, 19 nt, Artificial Sequence
  Description of Artificial Sequence: Synthetic oligonucleotide
uugauuuuaggccuguuuc

SEQ ID NO: 1758824 - RNA, 19 nt, Artificial Sequence
  Description of Artificial Sequence: Synthetic oligonucleotide
aacggaauuccccggugcc

SEQ ID NO: 1758825 - RNA, 19 nt, Artificial Sequence
  Description of Artificial Sequence: Synthetic oligonucleotide
ugaaccaacagcaucuccu

SEQ ID NO: 1758826 - RNA, 19 nt, Artificial Sequence
  Description of Artificial Sequence: Synthetic oligonucleotide
uggaguagaaguaucggca

SEQ ID NO: 1758827 - RNA, 19 nt, Artificial Sequence
  Description of Artificial Sequence: Synthetic oligonucleotide
cuugcucuaacucuugccg

SEQ ID NO: 1758828 - RNA, 19 nt, Artificial Sequence
  Description of Artificial Sequence: Synthetic oligonucleotide
caggauaccaccuuccugc

SEQ ID NO: 1758829 - RNA, 19 nt, Artificial Sequence
  Description of Artificial Sequence: Synthetic oligonucleotide
uuaccuaccacaucaguca

SEQ ID NO: 1758830 - RNA, 19 nt, Artificial Sequence
  Description of Artificial Sequence: Synthetic oligonucleotide
uauucuccagcccuaggcg

SEQ ID NO: 1758831 - RNA, 19 nt, Artificial Sequence
  Description of Artificial Sequence: Synthetic oligonucleotide
aagauacuguuccaaggag

SEQ ID NO: 1758832 - RNA, 19 nt, Artificial Sequence
  Description of Artificial Sequence: Synthetic oligonucleotide
auuuuaggccuguuucucc

SEQ ID NO: 1758833 - RNA, 19 nt, Artificial Sequence
  Description of Artificial Sequence: Synthetic oligonucleotide
cauugaugaaaccuugagg

SEQ ID NO: 1758834 - RNA, 19 nt, Artificial Sequence
  Description of Artificial Sequence: Synthetic oligonucleotide
acagaaaugugacacccuc

SEQ ID NO: 1758835 - RNA, 19 nt, Artificial Sequence
  Description of Artificial Sequence: Synthetic oligonucleotide
caaagauacuguuccaagg

SEQ ID NO: 1758836 - RNA, 19 nt, Artificial Sequence
  Description of Artificial Sequence: Synthetic oligonucleotide
ugcaccuuggaguagaagu

SEQ ID NO: 1758837 - RNA, 19 nt, Artificial Sequence
  Description of Artificial Sequence: Synthetic oligonucleotide
uccaacagcaggaaggaac

SEQ ID NO: 1758838 - RNA, 19 nt, Artificial Sequence
  Description of Artificial Sequence: Synthetic oligonucleotide
cacuccaauacugacaugg

SEQ ID NO: 1758839 - RNA, 19 nt, Artificial Sequence
  Description of Artificial Sequence: Synthetic oligonucleotide
auagucuugaggucccggc

SEQ ID NO: 1758840 - RNA, 19 nt, Artificial Sequence
  Description of Artificial Sequence: Synthetic oligonucleotide
aaaaccagcacagguaugu

SEQ ID NO: 1758841 - RNA, 19 nt, Artificial Sequence
  Description of Artificial Sequence: Synthetic oligonucleotide
gacauggacccacuaaggg

SEQ ID NO: 1758842 - RNA, 19 nt, Artificial Sequence
  Description of Artificial Sequence: Synthetic oligonucleotide
ugcucaacggaauuccccg

SEQ ID NO: 1758843 - RNA, 19 nt, Artificial Sequence
  Description of Artificial Sequence: Synthetic oligonucleotide
gaagcaggggcuuugucag

SEQ ID NO: 1758844 - RNA, 19 nt, Artificial Sequence
  Description of Artificial Sequence: Synthetic oligonucleotide
acauggacccacuaagggg

SEQ ID NO: 1758845 - RNA, 19 nt, Artificial Sequence
  Description of Artificial Sequence: Synthetic oligonucleotide
ugaagccaaucauugauga

SEQ ID NO: 1758846 - RNA, 19 nt, Artificial Sequence
  Description of Artificial Sequence: Synthetic oligonucleotide
cuguuucuccauuuaaggg

SEQ ID NO: 1758847 - RNA, 19 nt, Artificial Sequence
  Description of Artificial Sequence: Synthetic oligonucleotide
agaacaggcagggaaaggg

SEQ ID NO: 1758848 - RNA, 19 nt, Artificial Sequence
  Description of Artificial Sequence: Synthetic oligonucleotide
agaaguaucggcacacagc

SEQ ID NO: 1758849 - RNA, 19 nt, Artificial Sequence
  Description of Artificial Sequence: Synthetic oligonucleotide
uuggaguagaaguaucggc

SEQ ID NO: 1758850 - RNA, 19 nt, Artificial Sequence
  Description of Artificial Sequence: Synthetic oligonucleotide
uacccguuugauuuuaggc

SEQ ID NO: 1758851 - RNA, 19 nt, Artificial Sequence
  Description of Artificial Sequence: Synthetic oligonucleotide
guaugcuaacuccaggcgg

SEQ ID NO: 1758852 - RNA, 19 nt, Artificial Sequence
  Description of Artificial Sequence: Synthetic oligonucleotide
ugacauggacccacuaagg

SEQ ID NO: 1758853 - RNA, 19 nt, Artificial Sequence
  Description of Artificial Sequence: Synthetic oligonucleotide
gguaaaaccuggaagaacc

SEQ ID NO: 1758854 - RNA, 19 nt, Artificial Sequence
  Description of Artificial Sequence: Synthetic oligonucleotide
uagaaguaucggcacacag

SEQ ID NO: 1758855 - RNA, 19 nt, Artificial Sequence
  Description of Artificial Sequence: Synthetic oligonucleotide
uguauuccggauuccuagg

SEQ ID NO: 1758856 - RNA, 19 nt, Artificial Sequence
  Description of Artificial Sequence: Synthetic oligonucleotide
uucaguuaauaaacaguca

SEQ ID NO: 1758857 - RNA, 19 nt, Artificial Sequence
  Description of Artificial Sequence: Synthetic oligonucleotide
gaaaccuugagggucucgg

SEQ ID NO: 1758858 - RNA, 19 nt, Artificial Sequence
  Description of Artificial Sequence: Synthetic oligonucleotide
uaugcuaacuccaggcggu

SEQ ID NO: 1758859 - RNA, 19 nt, Artificial Sequence
  Description of Artificial Sequence: Synthetic oligonucleotide
gugaugcuauccuugaacc

SEQ ID NO: 1758860 - RNA, 19 nt, Artificial Sequence
  Description of Artificial Sequence: Synthetic oligonucleotide
auaaacagucaucaacaga

SEQ ID NO: 1758861 - RNA, 19 nt, Artificial Sequence
  Description of Artificial Sequence: Synthetic oligonucleotide
uucuggguuaccuaccaca

SEQ ID NO: 1758862 - RNA, 19 nt, Artificial Sequence
  Description of Artificial Sequence: Synthetic oligonucleotide
acuaaggggucacacagca

SEQ ID NO: 1758863 - RNA, 19 nt, Artificial Sequence
  Description of Artificial Sequence: Synthetic oligonucleotide
cuggguuucaacugggcag

SEQ ID NO: 1758864 - RNA, 19 nt, Artificial Sequence
  Description of Artificial Sequence: Synthetic oligonucleotide
aacugggcagacaugggac

SEQ ID NO: 1758865 - RNA, 19 nt, Artificial Sequence
  Description of Artificial Sequence: Synthetic oligonucleotide
uuugauuuuaggccuguuu

SEQ ID NO: 1758866 - RNA, 19 nt, Artificial Sequence
  Description of Artificial Sequence: Synthetic oligonucleotide
ugauuuuaggccuguuucu

SEQ ID NO: 1758867 - RNA, 19 nt, Artificial Sequence
  Description of Artificial Sequence: Synthetic oligonucleotide
uggagugaaugaacaagcc

SEQ ID NO: 1758868 - RNA, 19 nt, Artificial Sequence
  Description of Artificial Sequence: Synthetic oligonucleotide
agaccuauucuccagcccu

SEQ ID NO: 1758869 - RNA, 19 nt, Artificial Sequence
  Description of Artificial Sequence: Synthetic oligonucleotide
uucuccauuuaagggaggg

SEQ ID NO: 1758870 - RNA, 19 nt, Artificial Sequence
  Description of Artificial Sequence: Synthetic oligonucleotide
gauagguagaggacagggg

SEQ ID NO: 1758871 - RNA, 19 nt, Artificial Sequence
  Description of Artificial Sequence: Synthetic oligonucleotide
uuucagaccuauucuccag

SEQ ID NO: 1758872 - RNA, 19 nt, Artificial Sequence
  Description of Artificial Sequence: Synthetic oligonucleotide
ggagcaacaguucaaaaca

SEQ ID NO: 1758873 - RNA, 19 nt, Artificial Sequence
  Description of Artificial Sequence: Synthetic oligonucleotide
gagacacaaacccauuuca

SEQ ID NO: 1758874 - RNA, 19 nt, Artificial Sequence
  Description of Artificial Sequence: Synthetic oligonucleotide
gaaguagaacucagcacgg

SEQ ID NO: 1758875 - RNA, 19 nt, Artificial Sequence
  Description of Artificial Sequence: Synthetic oligonucleotide
uauuccggauuccuagggc

SEQ ID NO: 1758876 - RNA, 19 nt, Artificial Sequence
  Description of Artificial Sequence: Synthetic oligonucleotide
ugaugaaaccuugaggguc

SEQ ID NO: 1758877 - RNA, 19 nt, Artificial Sequence
  Description of Artificial Sequence: Synthetic oligonucleotide
uucagaccuauucuccagc

SEQ ID NO: 1758878 - RNA, 19 nt, Artificial Sequence
  Description of Artificial Sequence: Synthetic oligonucleotide
uggaaguagaacucagcac

SEQ ID NO: 1758879 - RNA, 19 nt, Artificial Sequence
  Description of Artificial Sequence: Synthetic oligonucleotide
gauacuguuccaaggaguc

SEQ ID NO: 1758880 - RNA, 19 nt, Artificial Sequence
  Description of Artificial Sequence: Synthetic oligonucleotide
uggggagaacuuuccaagg

SEQ ID NO: 1758881 - RNA, 19 nt, Artificial Sequence
  Description of Artificial Sequence: Synthetic oligonucleotide
caugacgcuuccaaccagg

SEQ ID NO: 1758882 - RNA, 19 nt, Artificial Sequence
  Description of Artificial Sequence: Synthetic oligonucleotide
gagagaacacugcugcccc

SEQ ID NO: 1758883 - RNA, 19 nt, Artificial Sequence
  Description of Artificial Sequence: Synthetic oligonucleotide
uuccaaggagucaggauac

SEQ ID NO: 1758884 - RNA, 19 nt, Artificial Sequence
  Description of Artificial Sequence: Synthetic oligonucleotide
cacaaacccauuucagacc

SEQ ID NO: 1758885 - RNA, 19 nt, Artificial Sequence
  Description of Artificial Sequence: Synthetic oligonucleotide
ugcccuagaagccaccacu

SEQ ID NO: 1758886 - RNA, 19 nt, Artificial Sequence
  Description of Artificial Sequence: Synthetic oligonucleotide
guuucuccauuuaagggag

SEQ ID NO: 1758887 - RNA, 19 nt, Artificial Sequence
  Description of Artificial Sequence: Synthetic oligonucleotide
guauuccggauuccuaggg

SEQ ID NO: 1758888 - RNA, 19 nt, Artificial Sequence
  Description of Artificial Sequence: Synthetic oligonucleotide
caauaggugccugugaaac

SEQ ID NO: 1758889 - RNA, 19 nt, Artificial Sequence
  Description of Artificial Sequence: Synthetic oligonucleotide
aggcgguaaaaccuggaag

SEQ ID NO: 1758890 - RNA, 19 nt, Artificial Sequence
  Description of Artificial Sequence: Synthetic oligonucleotide
auacccguuugauuuuagg

SEQ ID NO: 1758891 - RNA, 19 nt, Artificial Sequence
  Description of Artificial Sequence: Synthetic oligonucleotide
ucuucuggguuaccuacca

SEQ ID NO: 1758892 - RNA, 19 nt, Artificial Sequence
  Description of Artificial Sequence: Synthetic oligonucleotide
ucagaccuauucuccagcc

SEQ ID NO: 1758893 - RNA, 19 nt, Artificial Sequence
  Description of Artificial Sequence: Synthetic oligonucleotide
uccagugucgcugugggga

SEQ ID NO: 1758894 - RNA, 19 nt, Artificial Sequence
  Description of Artificial Sequence: Synthetic oligonucleotide
cuuggaguagaaguaucgg

SEQ ID NO: 1758895 - RNA, 19 nt, Artificial Sequence
  Description of Artificial Sequence: Synthetic oligonucleotide
gacgcuuccaaccaggagu

SEQ ID NO: 1758896 - RNA, 19 nt, Artificial Sequence
  Description of Artificial Sequence: Synthetic oligonucleotide
ugagccugggguaugcuaa

SEQ ID NO: 1758897 - RNA, 19 nt, Artificial Sequence
  Description of Artificial Sequence: Synthetic oligonucleotide
auuccggauuccuagggcu

SEQ ID NO: 1758898 - RNA, 19 nt, Artificial Sequence
  Description of Artificial Sequence: Synthetic oligonucleotide
caaggagucaggauaccac

SEQ ID NO: 1758899 - RNA, 19 nt, Artificial Sequence
  Description of Artificial Sequence: Synthetic oligonucleotide
ccaauacugacauggaccc

SEQ ID NO: 1758900 - RNA, 19 nt, Artificial Sequence
  Description of Artificial Sequence: Synthetic oligonucleotide
uaaaaccuggaagaaccug

SEQ ID NO: 1758901 - RNA, 19 nt, Artificial Sequence
  Description of Artificial Sequence: Synthetic oligonucleotide
gacaauaggugccugugaa

SEQ ID NO: 1758902 - RNA, 19 nt, Artificial Sequence
  Description of Artificial Sequence: Synthetic oligonucleotide
ugcucuaacucuugccgcc

SEQ ID NO: 1758903 - RNA, 19 nt, Artificial Sequence
  Description of Artificial Sequence: Synthetic oligonucleotide
gguaugcuaacuccaggcg

SEQ ID NO: 1758904 - RNA, 19 nt, Artificial Sequence
  Description of Artificial Sequence: Synthetic oligonucleotide
gguuaugggaguguguggg

SEQ ID NO: 1758905 - RNA, 19 nt, Artificial Sequence
  Description of Artificial Sequence: Synthetic oligonucleotide
guggagugaaugaacaagc

SEQ ID NO: 1758906 - RNA, 19 nt, Artificial Sequence
  Description of Artificial Sequence: Synthetic oligonucleotide
caaggggauagguagagga

SEQ ID NO: 1758907 - RNA, 19 nt, Artificial Sequence
  Description of Artificial Sequence: Synthetic oligonucleotide
uugaugaaaccuugagggu

SEQ ID NO: 1758908 - RNA, 19 nt, Artificial Sequence
  Description of Artificial Sequence: Synthetic oligonucleotide
uuaugggagugugugggag

SEQ ID NO: 1758909 - RNA, 19 nt, Artificial Sequence
  Description of Artificial Sequence: Synthetic oligonucleotide
uuugucaguucugugaguu

SEQ ID NO: 1758910 - RNA, 19 nt, Artificial Sequence
  Description of Artificial Sequence: Synthetic oligonucleotide
ugggguaugcuaacuccag

SEQ ID NO: 1758911 - RNA, 19 nt, Artificial Sequence
  Description of Artificial Sequence: Synthetic oligonucleotide
ugccugugaaacagaaaug

SEQ ID NO: 1758912 - RNA, 19 nt, Artificial Sequence
  Description of Artificial Sequence: Synthetic oligonucleotide
gagggcggacaauaggugc

SEQ ID NO: 1758913 - RNA, 19 nt, Artificial Sequence
  Description of Artificial Sequence: Synthetic oligonucleotide
uauguauuccggauuccua

SEQ ID NO: 1758914 - RNA, 19 nt, Artificial Sequence
  Description of Artificial Sequence: Synthetic oligonucleotide
cugaagccaaucauugaug

SEQ ID NO: 1758915 - RNA, 19 nt, Artificial Sequence
  Description of Artificial Sequence: Synthetic oligonucleotide
ucuggguuaccuaccacau

SEQ ID NO: 1758916 - RNA, 19 nt, Artificial Sequence
  Description of Artificial Sequence: Synthetic oligonucleotide
agucaggauaccaccuucc

SEQ ID NO: 1758917 - RNA, 19 nt, Artificial Sequence
  Description of Artificial Sequence: Synthetic oligonucleotide
guuccaaggagucaggaua

SEQ ID NO: 1758918 - RNA, 19 nt, Artificial Sequence
  Description of Artificial Sequence: Synthetic oligonucleotide
ugaugcuauccuugaacca

SEQ ID NO: 1758919 - RNA, 19 nt, Artificial Sequence
  Description of Artificial Sequence: Synthetic oligonucleotide
gauuccuagggcuugcucu

SEQ ID NO: 1758920 - RNA, 19 nt, Artificial Sequence
  Description of Artificial Sequence: Synthetic oligonucleotide
uggaaugccucaagcaaaa

SEQ ID NO: 1758921 - RNA, 19 nt, Artificial Sequence
  Description of Artificial Sequence: Synthetic oligonucleotide
acuggguuucaacugggca

SEQ ID NO: 1758922 - RNA, 19 nt, Artificial Sequence
  Description of Artificial Sequence: Synthetic oligonucleotide
guuaccuaccacaucaguc

SEQ ID NO: 1758923 - RNA, 19 nt, Artificial Sequence
  Description of Artificial Sequence: Synthetic oligonucleotide
gaggucaguccagagggcg

SEQ ID NO: 1758924 - RNA, 19 nt, Artificial Sequence
  Description of Artificial Sequence: Synthetic oligonucleotide
caucgugaugcuauccuug

SEQ ID NO: 1758925 - RNA, 19 nt, Artificial Sequence
  Description of Artificial Sequence: Synthetic oligonucleotide
ggauagguagaggacaggg

SEQ ID NO: 1758926 - RNA, 19 nt, Artificial Sequence
  Description of Artificial Sequence: Synthetic oligonucleotide
aaaccuggaagaaccugag

SEQ ID NO: 1758927 - RNA, 19 nt, Artificial Sequence
  Description of Artificial Sequence: Synthetic oligonucleotide
uggggagacacaaacccau

SEQ ID NO: 1758928 - RNA, 19 nt, Artificial Sequence
  Description of Artificial Sequence: Synthetic oligonucleotide
uauacccguuugauuuuag

SEQ ID NO: 1758929 - RNA, 19 nt, Artificial Sequence
  Description of Artificial Sequence: Synthetic oligonucleotide
ucuccauuuaagggagggg

SEQ ID NO: 1758930 - RNA, 19 nt, Artificial Sequence
  Description of Artificial Sequence: Synthetic oligonucleotide
aaacacacuccaauacuga

SEQ ID NO: 1758931 - RNA, 19 nt, Artificial Sequence
  Description of Artificial Sequence: Synthetic oligonucleotide
ucaacggaauuccccggug

SEQ ID NO: 1758932 - RNA, 19 nt, Artificial Sequence
  Description of Artificial Sequence: Synthetic oligonucleotide
aggagugcugaguuuccuc

SEQ ID NO: 1758933 - RNA, 19 nt, Artificial Sequence
  Description of Artificial Sequence: Synthetic oligonucleotide
augcucaacggaauucccc

SEQ ID NO: 1758934 - RNA, 19 nt, Artificial Sequence
  Description of Artificial Sequence: Synthetic oligonucleotide
aaacccauuucagaccuau

SEQ ID NO: 1758935 - RNA, 19 nt, Artificial Sequence
  Description of Artificial Sequence: Synthetic oligonucleotide
gcaaagauacuguuccaag

SEQ ID NO: 1758936 - RNA, 19 nt, Artificial Sequence
  Description of Artificial Sequence: Synthetic oligonucleotide
acugacauggacccacuaa

SEQ ID NO: 1758937 - RNA, 19 nt, Artificial Sequence
  Description of Artificial Sequence: Synthetic oligonucleotide
uuucuccauuuaagggagg

SEQ ID NO: 1758938 - RNA, 19 nt, Artificial Sequence
  Description of Artificial Sequence: Synthetic oligonucleotide
ucaugacgcuuccaaccag

SEQ ID NO: 1758939 - RNA, 19 nt, Artificial Sequence
  Description of Artificial Sequence: Synthetic oligonucleotide
ugggacugaagccaaucau

SEQ ID NO: 1758940 - RNA, 19 nt, Artificial Sequence
  Description of Artificial Sequence: Synthetic oligonucleotide
uagucuugaggucccggca

SEQ ID NO: 1758941 - RNA, 19 nt, Artificial Sequence
  Description of Artificial Sequence: Synthetic oligonucleotide
gggagcaacaguucaaaac

SEQ ID NO: 1758942 - RNA, 19 nt, Artificial Sequence
  Description of Artificial Sequence: Synthetic oligonucleotide
uccaggcgguaaaaccugg

SEQ ID NO: 1758943 - RNA, 19 nt, Artificial Sequence
  Description of Artificial Sequence: Synthetic oligonucleotide
aggaaggaacagccucugc

SEQ ID NO: 1758944 - RNA, 19 nt, Artificial Sequence
  Description of Artificial Sequence: Synthetic oligonucleotide
gaagccaccacuggguuuc

SEQ ID NO: 1758945 - RNA, 19 nt, Artificial Sequence
  Description of Artificial Sequence: Synthetic oligonucleotide
acagucaucaacagagaca

SEQ ID NO: 1758946 - RNA, 19 nt, Artificial Sequence
  Description of Artificial Sequence: Synthetic oligonucleotide
uugucugcgagcugagccu

SEQ ID NO: 1758947 - RNA, 19 nt, Artificial Sequence
  Description of Artificial Sequence: Synthetic oligonucleotide
ggguaugcuaacuccaggc

SEQ ID NO: 1758948 - RNA, 19 nt, Artificial Sequence
  Description of Artificial Sequence: Synthetic oligonucleotide
cacagguauguugaggcag

SEQ ID NO: 1758949 - RNA, 19 nt, Artificial Sequence
  Description of Artificial Sequence: Synthetic oligonucleotide
cucaagcaaaaccagcaca

SEQ ID NO: 1758950 - RNA, 19 nt, Artificial Sequence
  Description of Artificial Sequence: Synthetic oligonucleotide
aauuccccggugcccagcu

SEQ ID NO: 1758951 - RNA, 19 nt, Artificial Sequence
  Description of Artificial Sequence: Synthetic oligonucleotide
ugacgcuuccaaccaggag

SEQ ID NO: 1758952 - RNA, 19 nt, Artificial Sequence
  Description of Artificial Sequence: Synthetic oligonucleotide
uuucaacugggcagacaug

SEQ ID NO: 1758953 - RNA, 19 nt, Artificial Sequence
  Description of Artificial Sequence: Synthetic oligonucleotide
ccaaccaggagucaggcug

SEQ ID NO: 1758954 - RNA, 19 nt, Artificial Sequence
  Description of Artificial Sequence: Synthetic oligonucleotide
agggcggacaauaggugcc

SEQ ID NO: 1758955 - RNA, 19 nt, Artificial Sequence
  Description of Artificial Sequence: Synthetic oligonucleotide
cuccaauacugacauggac

SEQ ID NO: 1758956 - RNA, 19 nt, Artificial Sequence
  Description of Artificial Sequence: Synthetic oligonucleotide
caacagaauuggugcagcc

SEQ ID NO: 1758957 - RNA, 19 nt, Artificial Sequence
  Description of Artificial Sequence: Synthetic oligonucleotide
caugcucaacggaauuccc

SEQ ID NO: 1758958 - RNA, 19 nt, Artificial Sequence
  Description of Artificial Sequence: Synthetic oligonucleotide
ccuuggaguagaaguaucg

SEQ ID NO: 1758959 - RNA, 19 nt, Artificial Sequence
  Description of Artificial Sequence: Synthetic oligonucleotide
ucuaacucuugccgccucu

SEQ ID NO: 1758960 - RNA, 19 nt, Artificial Sequence
  Description of Artificial Sequence: Synthetic oligonucleotide
ggggagaacuuuccaaggg

SEQ ID NO: 1758961 - RNA, 19 nt, Artificial Sequence
  Description of Artificial Sequence: Synthetic oligonucleotide
aucaacagagacacugcag

SEQ ID NO: 1758962 - RNA, 19 nt, Artificial Sequence
  Description of Artificial Sequence: Synthetic oligonucleotide
agauacuguuccaaggagu

SEQ ID NO: 1758963 - RNA, 19 nt, Artificial Sequence
  Description of Artificial Sequence: Synthetic oligonucleotide
uagggcuauacccguuuga

SEQ ID NO: 1758964 - RNA, 19 nt, Artificial Sequence
  Description of Artificial Sequence: Synthetic oligonucleotide
uggguuucaacugggcaga

SEQ ID NO: 1758965 - RNA, 19 nt, Artificial Sequence
  Description of Artificial Sequence: Synthetic oligonucleotide
ugugugggagggagcaaca

SEQ ID NO: 1758966 - RNA, 19 nt, Artificial Sequence
  Description of Artificial Sequence: Synthetic oligonucleotide
uuccaaggggauagguaga

SEQ ID NO: 1758967 - RNA, 19 nt, Artificial Sequence
  Description of Artificial Sequence: Synthetic oligonucleotide
gaaaugugacacccucuuc

SEQ ID NO: 1758968 - RNA, 19 nt, Artificial Sequence
  Description of Artificial Sequence: Synthetic oligonucleotide
gauggccuagggcuauacc

SEQ ID NO: 1758969 - RNA, 19 nt, Artificial Sequence
  Description of Artificial Sequence: Synthetic oligonucleotide
gccccaacagaauuggugc

SEQ ID NO: 1758970 - RNA, 19 nt, Artificial Sequence
  Description of Artificial Sequence: Synthetic oligonucleotide
guucaaaacacacuccaau

SEQ ID NO: 1758971 - RNA, 19 nt, Artificial Sequence
  Description of Artificial Sequence: Synthetic oligonucleotide
ccucaugacgcuuccaacc

SEQ ID NO: 1758972 - RNA, 19 nt, Artificial Sequence
  Description of Artificial Sequence: Synthetic oligonucleotide
aacagaaaugugacacccu

SEQ ID NO: 1758973 - RNA, 19 nt, Artificial Sequence
  Description of Artificial Sequence: Synthetic oligonucleotide
caacggaauuccccggugc

SEQ ID NO: 1758974 - RNA, 19 nt, Artificial Sequence
  Description of Artificial Sequence: Synthetic oligonucleotide
aggggauagguagaggaca

SEQ ID NO: 1758975 - RNA, 19 nt, Artificial Sequence
  Description of Artificial Sequence: Synthetic oligonucleotide
acggaauuccccggugccc

SEQ ID NO: 1758976 - RNA, 19 nt, Artificial Sequence
  Description of Artificial Sequence: Synthetic oligonucleotide
ccacuaaggggucacacag

SEQ ID NO: 1758977 - RNA, 19 nt, Artificial Sequence
  Description of Artificial Sequence: Synthetic oligonucleotide
uccucaugacgcuuccaac

SEQ ID NO: 1758978 - RNA, 19 nt, Artificial Sequence
  Description of Artificial Sequence: Synthetic oligonucleotide
ggaguagaaguaucggcac

SEQ ID NO: 1758979 - RNA, 19 nt, Artificial Sequence
  Description of Artificial Sequence: Synthetic oligonucleotide
acaauaggugccugugaaa

SEQ ID NO: 1758980 - RNA, 19 nt, Artificial Sequence
  Description of Artificial Sequence: Synthetic oligonucleotide
gacugaagccaaucauuga

SEQ ID NO: 1758981 - RNA, 19 nt, Artificial Sequence
  Description of Artificial Sequence: Synthetic oligonucleotide
ggagacacaaacccauuuc

SEQ ID NO: 1758982 - RNA, 19 nt, Artificial Sequence
  Description of Artificial Sequence: Synthetic oligonucleotide
cauggacccacuaaggggu

SEQ ID NO: 1758983 - RNA, 19 nt, Artificial Sequence
  Description of Artificial Sequence: Synthetic oligonucleotide
ugaaaccuugagggucucg

SEQ ID NO: 1758984 - RNA, 19 nt, Artificial Sequence
  Description of Artificial Sequence: Synthetic oligonucleotide
cacuaaggggucacacagc

SEQ ID NO: 1758985 - RNA, 19 nt, Artificial Sequence
  Description of Artificial Sequence: Synthetic oligonucleotide
cuucaucgugaugcuaucc

SEQ ID NO: 1758986 - RNA, 19 nt, Artificial Sequence
  Description of Artificial Sequence: Synthetic oligonucleotide
ucaucgugaugcuauccuu

SEQ ID NO: 1758987 - RNA, 19 nt, Artificial Sequence
  Description of Artificial Sequence: Synthetic oligonucleotide
augcuauccuugaaccaac

SEQ ID NO: 1758988 - RNA, 19 nt, Artificial Sequence
  Description of Artificial Sequence: Synthetic oligonucleotide
aagcgguuaugggagugug

SEQ ID NO: 1758989 - RNA, 19 nt, Artificial Sequence
  Description of Artificial Sequence: Synthetic oligonucleotide
agcacagggccccaacaga

SEQ ID NO: 1758990 - RNA, 19 nt, Artificial Sequence
  Description of Artificial Sequence: Synthetic oligonucleotide
cuggaagaaccugaggcuc

SEQ ID NO: 1758991 - RNA, 19 nt, Artificial Sequence
  Description of Artificial Sequence: Synthetic oligonucleotide
ucuucaucgugaugcuauc

SEQ ID NO: 1758992 - RNA, 19 nt, Artificial Sequence
  Description of Artificial Sequence: Synthetic oligonucleotide
agggccccaacagaauugg

SEQ ID NO: 1758993 - RNA, 19 nt, Artificial Sequence
  Description of Artificial Sequence: Synthetic oligonucleotide
acccacuaaggggucacac

SEQ ID NO: 1758994 - RNA, 19 nt, Artificial Sequence
  Description of Artificial Sequence: Synthetic oligonucleotide
agggucucgggcaaagcuc

SEQ ID NO: 1758995 - RNA, 19 nt, Artificial Sequence
  Description of Artificial Sequence: Synthetic oligonucleotide
ucucccacccugcaguguu

SEQ ID NO: 1758996 - RNA, 19 nt, Artificial Sequence
  Description of Artificial Sequence: Synthetic oligonucleotide
cugagcccaaggcuggaag

SEQ ID NO: 1758997 - RNA, 19 nt, Artificial Sequence
  Description of Artificial Sequence: Synthetic oligonucleotide
cucaugacgcuuccaacca

SEQ ID NO: 1758998 - RNA, 19 nt, Artificial Sequence
  Description of Artificial Sequence: Synthetic oligonucleotide
cagaccuauucuccagccc

SEQ ID NO: 1758999 - RNA, 19 nt, Artificial Sequence
  Description of Artificial Sequence: Synthetic oligonucleotide
caucagucauagucuugag

SEQ ID NO: 1759000 - RNA, 19 nt, Artificial Sequence
  Description of Artificial Sequence: Synthetic oligonucleotide
agcaaaaccagcacaggua

SEQ ID NO: 1759001 - RNA, 19 nt, Artificial Sequence
  Description of Artificial Sequence: Synthetic oligonucleotide
cuccaggcgguaaaaccug

SEQ ID NO: 1759002 - RNA, 19 nt, Artificial Sequence
  Description of Artificial Sequence: Synthetic oligonucleotide
caaaaccagcacagguaug

SEQ ID NO: 1759003 - RNA, 19 nt, Artificial Sequence
  Description of Artificial Sequence: Synthetic oligonucleotide
acgcuuccaaccaggaguc

SEQ ID NO: 1759004 - RNA, 19 nt, Artificial Sequence
  Description of Artificial Sequence: Synthetic oligonucleotide
gaagccaaucauugaugaa

SEQ ID NO: 1759005 - RNA, 19 nt, Artificial Sequence
  Description of Artificial Sequence: Synthetic oligonucleotide
cagagacacugcaggagug

SEQ ID NO: 1759006 - RNA, 19 nt, Artificial Sequence
  Description of Artificial Sequence: Synthetic oligonucleotide
cuggaaugccucaagcaaa

SEQ ID NO: 1759007 - RNA, 19 nt, Artificial Sequence
  Description of Artificial Sequence: Synthetic oligonucleotide
accuuggaguagaaguauc

SEQ ID NO: 1759008 - RNA, 19 nt, Artificial Sequence
  Description of Artificial Sequence: Synthetic oligonucleotide
aucauugaugaaaccuuga

SEQ ID NO: 1759009 - RNA, 19 nt, Artificial Sequence
  Description of Artificial Sequence: Synthetic oligonucleotide
agcccuaggcgcuuucacu

SEQ ID NO: 1759010 - RNA, 19 nt, Artificial Sequence
  Description of Artificial Sequence: Synthetic oligonucleotide
gaggcccuauguauuccgg

SEQ ID NO: 1759011 - RNA, 19 nt, Artificial Sequence
  Description of Artificial Sequence: Synthetic oligonucleotide
agaacuuuccaaggggaua

SEQ ID NO: 1759012 - RNA, 19 nt, Artificial Sequence
  Description of Artificial Sequence: Synthetic oligonucleotide
gucauagucuugagguccc

SEQ ID NO: 1759013 - RNA, 19 nt, Artificial Sequence
  Description of Artificial Sequence: Synthetic oligonucleotide
cuagaagccaccacugggu

SEQ ID NO: 1759014 - RNA, 19 nt, Artificial Sequence
  Description of Artificial Sequence: Synthetic oligonucleotide
acagggccccaacagaauu

SEQ ID NO: 1759015 - RNA, 19 nt, Artificial Sequence
  Description of Artificial Sequence: Synthetic oligonucleotide
ggcuauacccguuugauuu

SEQ ID NO: 1759016 - RNA, 19 nt, Artificial Sequence
  Description of Artificial Sequence: Synthetic oligonucleotide
agcugagccugggguaugc

SEQ ID NO: 1759017 - RNA, 19 nt, Artificial Sequence
  Description of Artificial Sequence: Synthetic oligonucleotide
cacuggguuucaacugggc

SEQ ID NO: 1759018 - RNA, 19 nt, Artificial Sequence
  Description of Artificial Sequence: Synthetic oligonucleotide
ugaggcuccccuggaaaga

SEQ ID NO: 1759019 - RNA, 19 nt, Artificial Sequence
  Description of Artificial Sequence: Synthetic oligonucleotide
uuaggccuguuucuccauu

SEQ ID NO: 1759020 - RNA, 19 nt, Artificial Sequence
  Description of Artificial Sequence: Synthetic oligonucleotide
caacugggcagacauggga

SEQ ID NO: 1759021 - RNA, 19 nt, Artificial Sequence
  Description of Artificial Sequence: Synthetic oligonucleotide
agggcuauacccguuugau

SEQ ID NO: 1759022 - RNA, 19 nt, Artificial Sequence
  Description of Artificial Sequence: Synthetic oligonucleotide
uaacuccaggcgguaaaac

SEQ ID NO: 1759023 - RNA, 19 nt, Artificial Sequence
  Description of Artificial Sequence: Synthetic oligonucleotide
cagaacaggcagggaaagg

SEQ ID NO: 1759024 - RNA, 19 nt, Artificial Sequence
  Description of Artificial Sequence: Synthetic oligonucleotide
cuagggcuauacccguuug

SEQ ID NO: 1759025 - RNA, 19 nt, Artificial Sequence
  Description of Artificial Sequence: Synthetic oligonucleotide
uuuaggccuguuucuccau

SEQ ID NO: 1759026 - RNA, 19 nt, Artificial Sequence
  Description of Artificial Sequence: Synthetic oligonucleotide
uccggauuccuagggcuug

SEQ ID NO: 1759027 - RNA, 19 nt, Artificial Sequence
  Description of Artificial Sequence: Synthetic oligonucleotide
cuaaggggucacacagcac

SEQ ID NO: 1759028 - RNA, 19 nt, Artificial Sequence
  Description of Artificial Sequence: Synthetic oligonucleotide
guuaugggaguguguggga

SEQ ID NO: 1759029 - RNA, 19 nt, Artificial Sequence
  Description of Artificial Sequence: Synthetic oligonucleotide
ggggaagacggagagaaca

SEQ ID NO: 1759030 - RNA, 19 nt, Artificial Sequence
  Description of Artificial Sequence: Synthetic oligonucleotide
aggcccuauguauuccgga

SEQ ID NO: 1759031 - RNA, 19 nt, Artificial Sequence
  Description of Artificial Sequence: Synthetic oligonucleotide
ucgugaugcuauccuugaa

SEQ ID NO: 1759032 - RNA, 19 nt, Artificial Sequence
  Description of Artificial Sequence: Synthetic oligonucleotide
ggucugaagcuuugagggc

SEQ ID NO: 1759033 - RNA, 19 nt, Artificial Sequence
  Description of Artificial Sequence: Synthetic oligonucleotide
cgugaugcuauccuugaac

SEQ ID NO: 1759034 - RNA, 19 nt, Artificial Sequence
  Description of Artificial Sequence: Synthetic oligonucleotide
gccuguuucuccauuuaag

SEQ ID NO: 1759035 - RNA, 19 nt, Artificial Sequence
  Description of Artificial Sequence: Synthetic oligonucleotide
cagagggcggacaauaggu

SEQ ID NO: 1759036 - RNA, 19 nt, Artificial Sequence
  Description of Artificial Sequence: Synthetic oligonucleotide
gcgguuaugggagugugug

SEQ ID NO: 1759037 - RNA, 19 nt, Artificial Sequence
  Description of Artificial Sequence: Synthetic oligonucleotide
uuccggauuccuagggcuu

SEQ ID NO: 1759038 - RNA, 19 nt, Artificial Sequence
  Description of Artificial Sequence: Synthetic oligonucleotide
uccaaccaggagucaggcu

SEQ ID NO: 1759039 - RNA, 19 nt, Artificial Sequence
  Description of Artificial Sequence: Synthetic oligonucleotide
acuugcucgcaggagccug

SEQ ID NO: 1759040 - RNA, 19 nt, Artificial Sequence
  Description of Artificial Sequence: Synthetic oligonucleotide
cuugaaccaacagcaucuc

SEQ ID NO: 1759041 - RNA, 19 nt, Artificial Sequence
  Description of Artificial Sequence: Synthetic oligonucleotide
cugggacugaagccaauca

SEQ ID NO: 1759042 - RNA, 19 nt, Artificial Sequence
  Description of Artificial Sequence: Synthetic oligonucleotide
ccaggguuguccagugucg

SEQ ID NO: 1759043 - RNA, 19 nt, Artificial Sequence
  Description of Artificial Sequence: Synthetic oligonucleotide
agagggcggacaauaggug

SEQ ID NO: 1759044 - RNA, 19 nt, Artificial Sequence
  Description of Artificial Sequence: Synthetic oligonucleotide
auacuguuccaaggaguca

SEQ ID NO: 1759045 - RNA, 19 nt, Artificial Sequence
  Description of Artificial Sequence: Synthetic oligonucleotide
cccuauguauuccggauuc

SEQ ID NO: 1759046 - RNA, 19 nt, Artificial Sequence
  Description of Artificial Sequence: Synthetic oligonucleotide
gagcccaugcucaacggaa

SEQ ID NO: 1759047 - RNA, 19 nt, Artificial Sequence
  Description of Artificial Sequence: Synthetic oligonucleotide
ggcacugggacugaagcca

SEQ ID NO: 1759048 - RNA, 19 nt, Artificial Sequence
  Description of Artificial Sequence: Synthetic oligonucleotide
ggggauagguagaggacag

SEQ ID NO: 1759049 - RNA, 19 nt, Artificial Sequence
  Description of Artificial Sequence: Synthetic oligonucleotide
aggagucaggauaccaccu

SEQ ID NO: 1759050 - RNA, 19 nt, Artificial Sequence
  Description of Artificial Sequence: Synthetic oligonucleotide
agggagcaacaguucaaaa

SEQ ID NO: 1759051 - RNA, 19 nt, Artificial Sequence
  Description of Artificial Sequence: Synthetic oligonucleotide
accuauucuccagcccuag

SEQ ID NO: 1759052 - RNA, 19 nt, Artificial Sequence
  Description of Artificial Sequence: Synthetic oligonucleotide
cuucuggguuaccuaccac

SEQ ID NO: 1759053 - RNA, 19 nt, Artificial Sequence
  Description of Artificial Sequence: Synthetic oligonucleotide
ccaacagcaggaaggaaca

SEQ ID NO: 1759054 - RNA, 19 nt, Artificial Sequence
  Description of Artificial Sequence: Synthetic oligonucleotide
ccagagggcggacaauagg

SEQ ID NO: 1759055 - RNA, 19 nt, Artificial Sequence
  Description of Artificial Sequence: Synthetic oligonucleotide
gcucaacggaauuccccgg

SEQ ID NO: 1759056 - RNA, 19 nt, Artificial Sequence
  Description of Artificial Sequence: Synthetic oligonucleotide
caggaacacuugcucgcag

SEQ ID NO: 1759057 - RNA, 19 nt, Artificial Sequence
  Description of Artificial Sequence: Synthetic oligonucleotide
ggccccaacagaauuggug

SEQ ID NO: 1759058 - RNA, 19 nt, Artificial Sequence
  Description of Artificial Sequence: Synthetic oligonucleotide
gccaaucauugaugaaacc

SEQ ID NO: 1759059 - RNA, 19 nt, Artificial Sequence
  Description of Artificial Sequence: Synthetic oligonucleotide
ccuugaaccaacagcaucu

SEQ ID NO: 1759060 - RNA, 19 nt, Artificial Sequence
  Description of Artificial Sequence: Synthetic oligonucleotide
ugcugcuaccugagggguc

SEQ ID NO: 1759061 - RNA, 19 nt, Artificial Sequence
  Description of Artificial Sequence: Synthetic oligonucleotide
uuuccucaugacgcuucca

SEQ ID NO: 1759062 - RNA, 19 nt, Artificial Sequence
  Description of Artificial Sequence: Synthetic oligonucleotide
aggcgcuuucacuccucag

SEQ ID NO: 1759063 - RNA, 19 nt, Artificial Sequence
  Description of Artificial Sequence: Synthetic oligonucleotide
gccucaagcaaaaccagca

SEQ ID NO: 1759064 - RNA, 19 nt, Artificial Sequence
  Description of Artificial Sequence: Synthetic oligonucleotide
ugagggucucgggcaaagc

SEQ ID NO: 1759065 - RNA, 19 nt, Artificial Sequence
  Description of Artificial Sequence: Synthetic oligonucleotide
guaucggcacacagccucc

SEQ ID NO: 1759066 - RNA, 19 nt, Artificial Sequence
  Description of Artificial Sequence: Synthetic oligonucleotide
cuggguuaccuaccacauc

SEQ ID NO: 1759067 - RNA, 19 nt, Artificial Sequence
  Description of Artificial Sequence: Synthetic oligonucleotide
gcaaaaccagcacagguau

SEQ ID NO: 1759068 - RNA, 19 nt, Artificial Sequence
  Description of Artificial Sequence: Synthetic oligonucleotide
aucggcacacagccuccug

SEQ ID NO: 1759069 - RNA, 19 nt, Artificial Sequence
  Description of Artificial Sequence: Synthetic oligonucleotide
ccaaucauugaugaaaccu

SEQ ID NO: 1759070 - RNA, 19 nt, Artificial Sequence
  Description of Artificial Sequence: Synthetic oligonucleotide
augaaaccuugagggucuc

SEQ ID NO: 1759071 - RNA, 19 nt, Artificial Sequence
  Description of Artificial Sequence: Synthetic oligonucleotide
cagguauguugaggcaggc

SEQ ID NO: 1759072 - RNA, 19 nt, Artificial Sequence
  Description of Artificial Sequence: Synthetic oligonucleotide
gccugugaaacagaaaugu

SEQ ID NO: 1759073 - RNA, 19 nt, Artificial Sequence
  Description of Artificial Sequence: Synthetic oligonucleotide
cuauguauuccggauuccu

SEQ ID NO: 1759074 - RNA, 19 nt, Artificial Sequence
  Description of Artificial Sequence: Synthetic oligonucleotide
ggcuugcucuaacucuugc

SEQ ID NO: 1759075 - RNA, 19 nt, Artificial Sequence
  Description of Artificial Sequence: Synthetic oligonucleotide
gaauuccccggugcccagc

SEQ ID NO: 1759076 - RNA, 19 nt, Artificial Sequence
  Description of Artificial Sequence: Synthetic oligonucleotide
gcccuaggcgcuuucacuc

SEQ ID NO: 1759077 - RNA, 19 nt, Artificial Sequence
  Description of Artificial Sequence: Synthetic oligonucleotide
ggacaauaggugccuguga

SEQ ID NO: 1759078 - RNA, 19 nt, Artificial Sequence
  Description of Artificial Sequence: Synthetic oligonucleotide
ccuggaaagaugcaaagau

SEQ ID NO: 1759079 - RNA, 19 nt, Artificial Sequence
  Description of Artificial Sequence: Synthetic oligonucleotide
gggaagacggagagaacac

SEQ ID NO: 1759080 - RNA, 19 nt, Artificial Sequence
  Description of Artificial Sequence: Synthetic oligonucleotide
cuugccgccucugcugcac

SEQ ID NO: 1759081 - RNA, 19 nt, Artificial Sequence
  Description of Artificial Sequence: Synthetic oligonucleotide
cagcccuaggcgcuuucac

SEQ ID NO: 1759082 - RNA, 19 nt, Artificial Sequence
  Description of Artificial Sequence: Synthetic oligonucleotide
caggcgguaaaaccuggaa

SEQ ID NO: 1759083 - RNA, 19 nt, Artificial Sequence
  Description of Artificial Sequence: Synthetic oligonucleotide
cucuaacucuugccgccuc

SEQ ID NO: 1759084 - RNA, 19 nt, Artificial Sequence
  Description of Artificial Sequence: Synthetic oligonucleotide
uggacccacuaagggguca

SEQ ID NO: 1759085 - RNA, 19 nt, Artificial Sequence
  Description of Artificial Sequence: Synthetic oligonucleotide
cagaaaugugacacccucu

SEQ ID NO: 1759086 - RNA, 19 nt, Artificial Sequence
  Description of Artificial Sequence: Synthetic oligonucleotide
agugucgcuguggggagaa

SEQ ID NO: 1759087 - RNA, 19 nt, Artificial Sequence
  Description of Artificial Sequence: Synthetic oligonucleotide
gucaggauaccaccuuccu

SEQ ID NO: 1759088 - RNA, 19 nt, Artificial Sequence
  Description of Artificial Sequence: Synthetic oligonucleotide
ugcuaacuccaggcgguaa

SEQ ID NO: 1759089 - RNA, 19 nt, Artificial Sequence
  Description of Artificial Sequence: Synthetic oligonucleotide
cuugcucgcaggagccuga

SEQ ID NO: 1759090 - RNA, 19 nt, Artificial Sequence
  Description of Artificial Sequence: Synthetic oligonucleotide
uaucggcacacagccuccu

SEQ ID NO: 1759091 - RNA, 19 nt, Artificial Sequence
  Description of Artificial Sequence: Synthetic oligonucleotide
gcuaacuccaggcgguaaa

SEQ ID NO: 1759092 - RNA, 19 nt, Artificial Sequence
  Description of Artificial Sequence: Synthetic oligonucleotide
augacgcuuccaaccagga

SEQ ID NO: 1759093 - RNA, 19 nt, Artificial Sequence
  Description of Artificial Sequence: Synthetic oligonucleotide
ccuauucuccagcccuagg

SEQ ID NO: 1759094 - RNA, 19 nt, Artificial Sequence
  Description of Artificial Sequence: Synthetic oligonucleotide
cuaacuccaggcgguaaaa

SEQ ID NO: 1759095 - RNA, 19 nt, Artificial Sequence
  Description of Artificial Sequence: Synthetic oligonucleotide
uugcucgcaggagccugag

SEQ ID NO: 1759096 - RNA, 19 nt, Artificial Sequence
  Description of Artificial Sequence: Synthetic oligonucleotide
cccaggguuguccaguguc

SEQ ID NO: 1759097 - RNA, 19 nt, Artificial Sequence
  Description of Artificial Sequence: Synthetic oligonucleotide
cccaacagaauuggugcag

SEQ ID NO: 1759098 - RNA, 19 nt, Artificial Sequence
  Description of Artificial Sequence: Synthetic oligonucleotide
ggcgcuuucacuccucagu

SEQ ID NO: 1759099 - RNA, 19 nt, Artificial Sequence
  Description of Artificial Sequence: Synthetic oligonucleotide
auggacccacuaagggguc

SEQ ID NO: 1759100 - RNA, 19 nt, Artificial Sequence
  Description of Artificial Sequence: Synthetic oligonucleotide
auacugacauggacccacu

SEQ ID NO: 1759101 - RNA, 19 nt, Artificial Sequence
  Description of Artificial Sequence: Synthetic oligonucleotide
ugcuaccugaggggucuga

SEQ ID NO: 1759102 - RNA, 19 nt, Artificial Sequence
  Description of Artificial Sequence: Synthetic oligonucleotide
gaagcgguuaugggagugu

SEQ ID NO: 1759103 - RNA, 19 nt, Artificial Sequence
  Description of Artificial Sequence: Synthetic oligonucleotide
gagacacugcaggagugcu

SEQ ID NO: 1759104 - RNA, 19 nt, Artificial Sequence
  Description of Artificial Sequence: Synthetic oligonucleotide
guguugucugcgagcugag

SEQ ID NO: 1759105 - RNA, 19 nt, Artificial Sequence
  Description of Artificial Sequence: Synthetic oligonucleotide
aggggcuuugucaguucug

SEQ ID NO: 1759106 - RNA, 19 nt, Artificial Sequence
  Description of Artificial Sequence: Synthetic oligonucleotide
guccagagggcggacaaua

SEQ ID NO: 1759107 - RNA, 19 nt, Artificial Sequence
  Description of Artificial Sequence: Synthetic oligonucleotide
cucaacggaauuccccggu

SEQ ID NO: 1759108 - RNA, 19 nt, Artificial Sequence
  Description of Artificial Sequence: Synthetic oligonucleotide
agcgguuaugggagugugu

SEQ ID NO: 1759109 - RNA, 19 nt, Artificial Sequence
  Description of Artificial Sequence: Synthetic oligonucleotide
agccagugagggcgguaga

SEQ ID NO: 1759110 - RNA, 19 nt, Artificial Sequence
  Description of Artificial Sequence: Synthetic oligonucleotide
ggaauuccccggugcccag

SEQ ID NO: 1759111 - RNA, 19 nt, Artificial Sequence
  Description of Artificial Sequence: Synthetic oligonucleotide
gggcuuugucaguucugug

SEQ ID NO: 1759112 - RNA, 19 nt, Artificial Sequence
  Description of Artificial Sequence: Synthetic oligonucleotide
ggcgguagaggcccuaugu

SEQ ID NO: 1759113 - RNA, 19 nt, Artificial Sequence
  Description of Artificial Sequence: Synthetic oligonucleotide
aacccauuucagaccuauu

SEQ ID NO: 1759114 - RNA, 19 nt, Artificial Sequence
  Description of Artificial Sequence: Synthetic oligonucleotide
auccuugaaccaacagcau

SEQ ID NO: 1759115 - RNA, 19 nt, Artificial Sequence
  Description of Artificial Sequence: Synthetic oligonucleotide
gguuaccuaccacaucagu

SEQ ID NO: 1759116 - RNA, 19 nt, Artificial Sequence
  Description of Artificial Sequence: Synthetic oligonucleotide
gggucucgggcaaagcuca

SEQ ID NO: 1759117 - RNA, 19 nt, Artificial Sequence
  Description of Artificial Sequence: Synthetic oligonucleotide
ccagugucgcuguggggag

SEQ ID NO: 1759118 - RNA, 19 nt, Artificial Sequence
  Description of Artificial Sequence: Synthetic oligonucleotide
cuauacccguuugauuuua

SEQ ID NO: 1759119 - RNA, 19 nt, Artificial Sequence
  Description of Artificial Sequence: Synthetic oligonucleotide
ggguuaccuaccacaucag

SEQ ID NO: 1759120 - RNA, 19 nt, Artificial Sequence
  Description of Artificial Sequence: Synthetic oligonucleotide
uuccuagggcuugcucuaa

SEQ ID NO: 1759121 - RNA, 19 nt, Artificial Sequence
  Description of Artificial Sequence: Synthetic oligonucleotide
ggccuguuucuccauuuaa

SEQ ID NO: 1759122 - RNA, 19 nt, Artificial Sequence
  Description of Artificial Sequence: Synthetic oligonucleotide
cccuaggcgcuuucacucc

SEQ ID NO: 1759123 - RNA, 19 nt, Artificial Sequence
  Description of Artificial Sequence: Synthetic oligonucleotide
ucgcuguggggagaacuuu

SEQ ID NO: 1759124 - RNA, 19 nt, Artificial Sequence
  Description of Artificial Sequence: Synthetic oligonucleotide
cuuugucaguucugugagu

SEQ ID NO: 1759125 - RNA, 19 nt, Artificial Sequence
  Description of Artificial Sequence: Synthetic oligonucleotide
gccugggguaugcuaacuc

SEQ ID NO: 1759126 - RNA, 19 nt, Artificial Sequence
  Description of Artificial Sequence: Synthetic oligonucleotide
caguguugucugcgagcug

SEQ ID NO: 1759127 - RNA, 19 nt, Artificial Sequence
  Description of Artificial Sequence: Synthetic oligonucleotide
agccugggguaugcuaacu

SEQ ID NO: 1759128 - RNA, 19 nt, Artificial Sequence
  Description of Artificial Sequence: Synthetic oligonucleotide
cgguuaugggagugugugg

SEQ ID NO: 1759129 - RNA, 19 nt, Artificial Sequence
  Description of Artificial Sequence: Synthetic oligonucleotide
gaccuauucuccagcccua

SEQ ID NO: 1759130 - RNA, 19 nt, Artificial Sequence
  Description of Artificial Sequence: Synthetic oligonucleotide
ggguggagugaaugaacaa

SEQ ID NO: 1759131 - RNA, 19 nt, Artificial Sequence
  Description of Artificial Sequence: Synthetic oligonucleotide
agcccaugcucaacggaau

SEQ ID NO: 1759132 - RNA, 19 nt, Artificial Sequence
  Description of Artificial Sequence: Synthetic oligonucleotide
aacccacaauucaguuaau

SEQ ID NO: 1759133 - RNA, 19 nt, Artificial Sequence
  Description of Artificial Sequence: Synthetic oligonucleotide
cugccccaggguuguccag

SEQ ID NO: 1759134 - RNA, 19 nt, Artificial Sequence
  Description of Artificial Sequence: Synthetic oligonucleotide
cccacuaaggggucacaca

SEQ ID NO: 1759135 - RNA, 19 nt, Artificial Sequence
  Description of Artificial Sequence: Synthetic oligonucleotide
agugugugggagggagcaa

SEQ ID NO: 1759136 - RNA, 19 nt, Artificial Sequence
  Description of Artificial Sequence: Synthetic oligonucleotide
gcaccuuggaguagaagua

SEQ ID NO: 1759137 - RNA, 19 nt, Artificial Sequence
  Description of Artificial Sequence: Synthetic oligonucleotide
ggaaugccucaagcaaaac

SEQ ID NO: 1759138 - RNA, 19 nt, Artificial Sequence
  Description of Artificial Sequence: Synthetic oligonucleotide
gugacacccucuucaucgu

SEQ ID NO: 1759139 - RNA, 19 nt, Artificial Sequence
  Description of Artificial Sequence: Synthetic oligonucleotide
aguccagagggcggacaau

SEQ ID NO: 1759140 - RNA, 19 nt, Artificial Sequence
  Description of Artificial Sequence: Synthetic oligonucleotide
gcugccccaggguugucca

SEQ ID NO: 1759141 - RNA, 19 nt, Artificial Sequence
  Description of Artificial Sequence: Synthetic oligonucleotide
cgguaaaaccuggaagaac

SEQ ID NO: 1759142 - RNA, 19 nt, Artificial Sequence
  Description of Artificial Sequence: Synthetic oligonucleotide
ggacccacuaaggggucac

SEQ ID NO: 1759143 - RNA, 19 nt, Artificial Sequence
  Description of Artificial Sequence: Synthetic oligonucleotide
gacccacuaaggggucaca

SEQ ID NO: 1759144 - RNA, 19 nt, Artificial Sequence
  Description of Artificial Sequence: Synthetic oligonucleotide
ggcccuauguauuccggau

SEQ ID NO: 1759145 - RNA, 19 nt, Artificial Sequence
  Description of Artificial Sequence: Synthetic oligonucleotide
gggacugaagccaaucauu

SEQ ID NO: 1759146 - RNA, 19 nt, Artificial Sequence
  Description of Artificial Sequence: Synthetic oligonucleotide
gcgguaaaaccuggaagaa

SEQ ID NO: 1759147 - RNA, 19 nt, Artificial Sequence
  Description of Artificial Sequence: Synthetic oligonucleotide
ggaagacggagagaacacu

SEQ ID NO: 1759148 - RNA, 19 nt, Artificial Sequence
  Description of Artificial Sequence: Synthetic oligonucleotide
gggagacacaaacccauuu

SEQ ID NO: 1759149 - RNA, 19 nt, Artificial Sequence
  Description of Artificial Sequence: Synthetic oligonucleotide
ccaccacuggguuucaacu

SEQ ID NO: 1759150 - RNA, 19 nt, Artificial Sequence
  Description of Artificial Sequence: Synthetic oligonucleotide
cggacaauaggugccugug

SEQ ID NO: 1759151 - RNA, 19 nt, Artificial Sequence
  Description of Artificial Sequence: Synthetic oligonucleotide
ccugcaguguugucugcga

SEQ ID NO: 1759152 - RNA, 19 nt, Artificial Sequence
  Description of Artificial Sequence: Synthetic oligonucleotide
ccccaguacagaacaggca

SEQ ID NO: 1759153 - RNA, 19 nt, Artificial Sequence
  Description of Artificial Sequence: Synthetic oligonucleotide
ggggcuuugucaguucugu

SEQ ID NO: 1759154 - RNA, 19 nt, Artificial Sequence
  Description of Artificial Sequence: Synthetic oligonucleotide
augcuaacuccaggcggua

SEQ ID NO: 1759155 - RNA, 19 nt, Artificial Sequence
  Description of Artificial Sequence: Synthetic oligonucleotide
ccggugcccagcugucucc

SEQ ID NO: 1759156 - RNA, 19 nt, Artificial Sequence
  Description of Artificial Sequence: Synthetic oligonucleotide
accuaccacaucagucaua

SEQ ID NO: 1759157 - RNA, 19 nt, Artificial Sequence
  Description of Artificial Sequence: Synthetic oligonucleotide
gggucacacagcacugaga

SEQ ID NO: 1759158 - RNA, 19 nt, Artificial Sequence
  Description of Artificial Sequence: Synthetic oligonucleotide
caccuuggaguagaaguau

SEQ ID NO: 1759159 - RNA, 19 nt, Artificial Sequence
  Description of Artificial Sequence: Synthetic oligonucleotide
agggcgguagaggcccuau

SEQ ID NO: 1759160 - RNA, 19 nt, Artificial Sequence
  Description of Artificial Sequence: Synthetic oligonucleotide
gcugcuaccugaggggucu

SEQ ID NO: 1759161 - RNA, 19 nt, Artificial Sequence
  Description of Artificial Sequence: Synthetic oligonucleotide
cccggcacugggacugaag

SEQ ID NO: 1759162 - RNA, 19 nt, Artificial Sequence
  Description of Artificial Sequence: Synthetic oligonucleotide
gcgagcugagccuggggua

SEQ ID NO: 1759163 - RNA, 19 nt, Artificial Sequence
  Description of Artificial Sequence: Synthetic oligonucleotide
cccaaggcuggaaguagaa

SEQ ID NO: 1759164 - RNA, 19 nt, Artificial Sequence
  Description of Artificial Sequence: Synthetic oligonucleotide
gcuaccugaggggucugaa

SEQ ID NO: 1759165 - RNA, 19 nt, Artificial Sequence
  Description of Artificial Sequence: Synthetic oligonucleotide
ggcggacaauaggugccug

SEQ ID NO: 1759166 - RNA, 19 nt, Artificial Sequence
  Description of Artificial Sequence: Synthetic oligonucleotide
ccaggcgguaaaaccugga

SEQ ID NO: 1759167 - RNA, 19 nt, Artificial Sequence
  Description of Artificial Sequence: Synthetic oligonucleotide
gcggacaauaggugccugu

SEQ ID NO: 1759168 - RNA, 19 nt, Artificial Sequence
  Description of Artificial Sequence: Synthetic oligonucleotide
cugcugcuaccugaggggu

SEQ ID NO: 1759169 - RNA, 19 nt, Artificial Sequence
  Description of Artificial Sequence: Synthetic oligonucleotide
ggccuagggcuauacccgu

SEQ ID NO: 1759170 - RNA, 19 nt, Artificial Sequence
  Description of Artificial Sequence: Synthetic oligonucleotide
ggguuucaacugggcagac

SEQ ID NO: 1759171 - RNA, 19 nt, Artificial Sequence
  Description of Artificial Sequence: Synthetic oligonucleotide
gggcuauacccguuugauu

SEQ ID NO: 1759172 - RNA, 19 nt, Artificial Sequence
  Description of Artificial Sequence: Synthetic oligonucleotide
ucccggcacugggacugaa

SEQ ID NO: 1759173 - RNA, 19 nt, Artificial Sequence
  Description of Artificial Sequence: Synthetic oligonucleotide
gcccuauguauuccggauu

SEQ ID NO: 1759174 - RNA, 19 nt, Artificial Sequence
  Description of Artificial Sequence: Synthetic oligonucleotide
cagugucgcuguggggaga

SEQ ID NO: 1759175 - RNA, 19 nt, Artificial Sequence
  Description of Artificial Sequence: Synthetic oligonucleotide
cggaauuccccggugccca

SEQ ID NO: 1759176 - RNA, 19 nt, Artificial Sequence
  Description of Artificial Sequence: Synthetic oligonucleotide
gugucgcuguggggagaac

SEQ ID NO: 1759177 - RNA, 19 nt, Artificial Sequence
  Description of Artificial Sequence: Synthetic oligonucleotide
gccugagguggggugggga

SEQ ID NO: 1759178 - RNA, 19 nt, Artificial Sequence
  Description of Artificial Sequence: Synthetic oligonucleotide
cugugaguucagagcccau

SEQ ID NO: 1759179 - RNA, 19 nt, Artificial Sequence
  Description of Artificial Sequence: Synthetic oligonucleotide
ccuagggcuauacccguuu

SEQ ID NO: 1759180 - RNA, 19 nt, Artificial Sequence
  Description of Artificial Sequence: Synthetic oligonucleotide
ccuaggcgcuuucacuccu

SEQ ID NO: 1759181 - RNA, 19 nt, Artificial Sequence
  Description of Artificial Sequence: Synthetic oligonucleotide
gcccaugcucaacggaauu

SEQ ID NO: 1759182 - RNA, 19 nt, Artificial Sequence
  Description of Artificial Sequence: Synthetic oligonucleotide
gucccggcacugggacuga

SEQ ID NO: 1759183 - RNA, 19 nt, Artificial Sequence
  Description of Artificial Sequence: Synthetic oligonucleotide
ggggagacacaaacccauu

SEQ ID NO: 1759184 - RNA, 19 nt, Artificial Sequence
  Description of Artificial Sequence: Synthetic oligonucleotide
cguuugauuuuaggccugu

SEQ ID NO: 1759185 - RNA, 19 nt, Artificial Sequence
  Description of Artificial Sequence: Synthetic oligonucleotide
gggccccaacagaauuggu

SEQ ID NO: 1759186 - RNA, 19 nt, Artificial Sequence
  Description of Artificial Sequence: Synthetic oligonucleotide
cgagcugagccugggguau

SEQ ID NO: 1759187 - RNA, 19 nt, Artificial Sequence
  Description of Artificial Sequence: Synthetic oligonucleotide
gccuagggcuauacccguu

SEQ ID NO: 1759188 - RNA, 19 nt, Artificial Sequence
  Description of Artificial Sequence: Synthetic oligonucleotide
cgcuuccaaccaggaguca

SEQ ID NO: 1759189 - RNA, 19 nt, Artificial Sequence
  Description of Artificial Sequence: Synthetic oligonucleotide
uuuaaaguaauggugaucc

SEQ ID NO: 1759190 - RNA, 19 nt, Artificial Sequence
  Description of Artificial Sequence: Synthetic oligonucleotide
uuaguaagcaagcuagagg

SEQ ID NO: 1759191 - RNA, 19 nt, Artificial Sequence
  Description of Artificial Sequence: Synthetic oligonucleotide
ucuaaacccaacaugaaac

SEQ ID NO: 1759192 - RNA, 19 nt, Artificial Sequence
  Description of Artificial Sequence: Synthetic oligonucleotide
uaguaagcaagcuagagga

SEQ ID NO: 1759193 - RNA, 19 nt, Artificial Sequence
  Description of Artificial Sequence: Synthetic oligonucleotide
auuucaucgauacucugcg

SEQ ID NO: 1759194 - RNA, 19 nt, Artificial Sequence
  Description of Artificial Sequence: Synthetic oligonucleotide
ugauaguuuuauuacagug

SEQ ID NO: 1759195 - RNA, 19 nt, Artificial Sequence
  Description of Artificial Sequence: Synthetic oligonucleotide
ucugguauucagaaggucc

SEQ ID NO: 1759196 - RNA, 19 nt, Artificial Sequence
  Description of Artificial Sequence: Synthetic oligonucleotide
acaugaaacucccucgucc

SEQ ID NO: 1759197 - RNA, 19 nt, Artificial Sequence
  Description of Artificial Sequence: Synthetic oligonucleotide
auuacagugcuaauaauac

SEQ ID NO: 1759198 - RNA, 19 nt, Artificial Sequence
  Description of Artificial Sequence: Synthetic oligonucleotide
uauagucugcauuaguaag

SEQ ID NO: 1759199 - RNA, 19 nt, Artificial Sequence
  Description of Artificial Sequence: Synthetic oligonucleotide
uuuauccuuaauaaccuga

SEQ ID NO: 1759200 - RNA, 19 nt, Artificial Sequence
  Description of Artificial Sequence: Synthetic oligonucleotide
aguauuuaaaguaauggug

SEQ ID NO: 1759201 - RNA, 19 nt, Artificial Sequence
  Description of Artificial Sequence: Synthetic oligonucleotide
uaaccugagacaucaaucc

SEQ ID NO: 1759202 - RNA, 19 nt, Artificial Sequence
  Description of Artificial Sequence: Synthetic oligonucleotide
acaguuuauccuuaauaac

SEQ ID NO: 1759203 - RNA, 19 nt, Artificial Sequence
  Description of Artificial Sequence: Synthetic oligonucleotide
uauuacagugcuaauaaua

SEQ ID NO: 1759204 - RNA, 19 nt, Artificial Sequence
  Description of Artificial Sequence: Synthetic oligonucleotide
ugagacaucaauccgugga

SEQ ID NO: 1759205 - RNA, 19 nt, Artificial Sequence
  Description of Artificial Sequence: Synthetic oligonucleotide
uuauccuuaauaaccugag

SEQ ID NO: 1759206 - RNA, 19 nt, Artificial Sequence
  Description of Artificial Sequence: Synthetic oligonucleotide
aaacaguuuauccuuaaua

SEQ ID NO: 1759207 - RNA, 19 nt, Artificial Sequence
  Description of Artificial Sequence: Synthetic oligonucleotide
aguaguuuacgauccaaag

SEQ ID NO: 1759208 - RNA, 19 nt, Artificial Sequence
  Description of Artificial Sequence: Synthetic oligonucleotide
cuaauaauacucaggacuc

SEQ ID NO: 1759209 - RNA, 19 nt, Artificial Sequence
  Description of Artificial Sequence: Synthetic oligonucleotide
ucugcauuaguaagcaagc

SEQ ID NO: 1759210 - RNA, 19 nt, Artificial Sequence
  Description of Artificial Sequence: Synthetic oligonucleotide
auaauauuguuugcagugc

SEQ ID NO: 1759211 - RNA, 19 nt, Artificial Sequence
  Description of Artificial Sequence: Synthetic oligonucleotide
guauuuauuccacaagagc

SEQ ID NO: 1759212 - RNA, 19 nt, Artificial Sequence
  Description of Artificial Sequence: Synthetic oligonucleotide
aggaaaaguacucaguggu

SEQ ID NO: 1759213 - RNA, 19 nt, Artificial Sequence
  Description of Artificial Sequence: Synthetic oligonucleotide
aaggcguccaaccuguuug

SEQ ID NO: 1759214 - RNA, 19 nt, Artificial Sequence
  Description of Artificial Sequence: Synthetic oligonucleotide
ugagcauuuacucgggucu

SEQ ID NO: 1759215 - RNA, 19 nt, Artificial Sequence
  Description of Artificial Sequence: Synthetic oligonucleotide
gaucguguguuucuaaacc

SEQ ID NO: 1759216 - RNA, 19 nt, Artificial Sequence
  Description of Artificial Sequence: Synthetic oligonucleotide
aauaaccugagacaucaau

SEQ ID NO: 1759217 - RNA, 19 nt, Artificial Sequence
  Description of Artificial Sequence: Synthetic oligonucleotide
auuuacucgggucucagug

SEQ ID NO: 1759218 - RNA, 19 nt, Artificial Sequence
  Description of Artificial Sequence: Synthetic oligonucleotide
cucaaguaguuuacgaucc

SEQ ID NO: 1759219 - RNA, 19 nt, Artificial Sequence
  Description of Artificial Sequence: Synthetic oligonucleotide
gacaucaauccguggaugg

SEQ ID NO: 1759220 - RNA, 19 nt, Artificial Sequence
  Description of Artificial Sequence: Synthetic oligonucleotide
ucuauuuuauuaaguggga

SEQ ID NO: 1759221 - RNA, 19 nt, Artificial Sequence
  Description of Artificial Sequence: Synthetic oligonucleotide
uauuuuauuaagugggaua

SEQ ID NO: 1759222 - RNA, 19 nt, Artificial Sequence
  Description of Artificial Sequence: Synthetic oligonucleotide
uccuuaauaaccugagaca

SEQ ID NO: 1759223 - RNA, 19 nt, Artificial Sequence
  Description of Artificial Sequence: Synthetic oligonucleotide
uucuaugguuguuuuacag

SEQ ID NO: 1759224 - RNA, 19 nt, Artificial Sequence
  Description of Artificial Sequence: Synthetic oligonucleotide
aauaauacucaggacucug

SEQ ID NO: 1759225 - RNA, 19 nt, Artificial Sequence
  Description of Artificial Sequence: Synthetic oligonucleotide
uucaucgauacucugcgcu

SEQ ID NO: 1759226 - RNA, 19 nt, Artificial Sequence
  Description of Artificial Sequence: Synthetic oligonucleotide
auagucugcauuaguaagc

SEQ ID NO: 1759227 - RNA, 19 nt, Artificial Sequence
  Description of Artificial Sequence: Synthetic oligonucleotide
ugcaguauuuaaaguaaug

SEQ ID NO: 1759228 - RNA, 19 nt, Artificial Sequence
  Description of Artificial Sequence: Synthetic oligonucleotide
uuacccaguauuuauucca

SEQ ID NO: 1759229 - RNA, 19 nt, Artificial Sequence
  Description of Artificial Sequence: Synthetic oligonucleotide
aaagcgaaacuguccauga

SEQ ID NO: 1759230 - RNA, 19 nt, Artificial Sequence
  Description of Artificial Sequence: Synthetic oligonucleotide
uguguacuaacaucaauuc

SEQ ID NO: 1759231 - RNA, 19 nt, Artificial Sequence
  Description of Artificial Sequence: Synthetic oligonucleotide
aggaacucaggguauuuac

SEQ ID NO: 1759232 - RNA, 19 nt, Artificial Sequence
  Description of Artificial Sequence: Synthetic oligonucleotide
aguuuuauuacagugcuaa

SEQ ID NO: 1759233 - RNA, 19 nt, Artificial Sequence
  Description of Artificial Sequence: Synthetic oligonucleotide
guauuuaaaguaaugguga

SEQ ID NO: 1759234 - RNA, 19 nt, Artificial Sequence
  Description of Artificial Sequence: Synthetic oligonucleotide
aacaugaaacucccucguc

SEQ ID NO: 1759235 - RNA, 19 nt, Artificial Sequence
  Description of Artificial Sequence: Synthetic oligonucleotide
auaaccugagacaucaauc

SEQ ID NO: 1759236 - RNA, 19 nt, Artificial Sequence
  Description of Artificial Sequence: Synthetic oligonucleotide
aacccaacaugaaacuccc

SEQ ID NO: 1759237 - RNA, 19 nt, Artificial Sequence
  Description of Artificial Sequence: Synthetic oligonucleotide
agcgacguuaauuugauua

SEQ ID NO: 1759238 - RNA, 19 nt, Artificial Sequence
  Description of Artificial Sequence: Synthetic oligonucleotide
ucucuaguagcuuuggcaa

SEQ ID NO: 1759239 - RNA, 19 nt, Artificial Sequence
  Description of Artificial Sequence: Synthetic oligonucleotide
uauguacgcagccauguac

SEQ ID NO: 1759240 - RNA, 19 nt, Artificial Sequence
  Description of Artificial Sequence: Synthetic oligonucleotide
gaaguugucgccuccacca

SEQ ID NO: 1759241 - RNA, 19 nt, Artificial Sequence
  Description of Artificial Sequence: Synthetic oligonucleotide
ucugauuuccgaucgugug

SEQ ID NO: 1759242 - RNA, 19 nt, Artificial Sequence
  Description of Artificial Sequence: Synthetic oligonucleotide
ucagugguaccuaagcgac

SEQ ID NO: 1759243 - RNA, 19 nt, Artificial Sequence
  Description of Artificial Sequence: Synthetic oligonucleotide
auauuguuugcagugcacg

SEQ ID NO: 1759244 - RNA, 19 nt, Artificial Sequence
  Description of Artificial Sequence: Synthetic oligonucleotide
acguuaauuugauuaaaca

SEQ ID NO: 1759245 - RNA, 19 nt, Artificial Sequence
  Description of Artificial Sequence: Synthetic oligonucleotide
agccugagcauuuacucgg

SEQ ID NO: 1759246 - RNA, 19 nt, Artificial Sequence
  Description of Artificial Sequence: Synthetic oligonucleotide
gauuucaucgauacucugc

SEQ ID NO: 1759247 - RNA, 19 nt, Artificial Sequence
  Description of Artificial Sequence: Synthetic oligonucleotide
uucuaaacccaacaugaaa

SEQ ID NO: 1759248 - RNA, 19 nt, Artificial Sequence
  Description of Artificial Sequence: Synthetic oligonucleotide
ugauccuuaguccaggguu

SEQ ID NO: 1759249 - RNA, 19 nt, Artificial Sequence
  Description of Artificial Sequence: Synthetic oligonucleotide
auuaguaagcaagcuagag

SEQ ID NO: 1759250 - RNA, 19 nt, Artificial Sequence
  Description of Artificial Sequence: Synthetic oligonucleotide
agugcuaauaauacucagg

SEQ ID NO: 1759251 - RNA, 19 nt, Artificial Sequence
  Description of Artificial Sequence: Synthetic oligonucleotide
uuuucaaggcguccaaccu

SEQ ID NO: 1759252 - RNA, 19 nt, Artificial Sequence
  Description of Artificial Sequence: Synthetic oligonucleotide
gugcuaauaauacucagga

SEQ ID NO: 1759253 - RNA, 19 nt, Artificial Sequence
  Description of Artificial Sequence: Synthetic oligonucleotide
acuucuaaggcauaauauu

SEQ ID NO: 1759254 - RNA, 19 nt, Artificial Sequence
  Description of Artificial Sequence: Synthetic oligonucleotide
ucacgugauaguuuuauua

SEQ ID NO: 1759255 - RNA, 19 nt, Artificial Sequence
  Description of Artificial Sequence: Synthetic oligonucleotide
cacgugauaguuuuauuac

SEQ ID NO: 1759256 - RNA, 19 nt, Artificial Sequence
  Description of Artificial Sequence: Synthetic oligonucleotide
acucauaugcagcagccug

SEQ ID NO: 1759257 - RNA, 19 nt, Artificial Sequence
  Description of Artificial Sequence: Synthetic oligonucleotide
cuuuggauauguccuaaag

SEQ ID NO: 1759258 - RNA, 19 nt, Artificial Sequence
  Description of Artificial Sequence: Synthetic oligonucleotide
cacauuuccgcuuucagga

SEQ ID NO: 1759259 - RNA, 19 nt, Artificial Sequence
  Description of Artificial Sequence: Synthetic oligonucleotide
uuucaaggcguccaaccug

SEQ ID NO: 1759260 - RNA, 19 nt, Artificial Sequence
  Description of Artificial Sequence: Synthetic oligonucleotide
ugguaacagguuuaaaagu

SEQ ID NO: 1759261 - RNA, 19 nt, Artificial Sequence
  Description of Artificial Sequence: Synthetic oligonucleotide
aguauuuauuccacaagag

SEQ ID NO: 1759262 - RNA, 19 nt, Artificial Sequence
  Description of Artificial Sequence: Synthetic oligonucleotide
ucuacaggcaaagcgaaac

SEQ ID NO: 1759263 - RNA, 19 nt, Artificial Sequence
  Description of Artificial Sequence: Synthetic oligonucleotide
aagagcucaaguaguuuac

SEQ ID NO: 1759264 - RNA, 19 nt, Artificial Sequence
  Description of Artificial Sequence: Synthetic oligonucleotide
agcgaaacuguccaugaug

SEQ ID NO: 1759265 - RNA, 19 nt, Artificial Sequence
  Description of Artificial Sequence: Synthetic oligonucleotide
agcgcugagauuuugcagu

SEQ ID NO: 1759266 - RNA, 19 nt, Artificial Sequence
  Description of Artificial Sequence: Synthetic oligonucleotide
ugcauuaguaagcaagcua

SEQ ID NO: 1759267 - RNA, 19 nt, Artificial Sequence
  Description of Artificial Sequence: Synthetic oligonucleotide
caugaaacucccucguccc

SEQ ID NO: 1759268 - RNA, 19 nt, Artificial Sequence
  Description of Artificial Sequence: Synthetic oligonucleotide
caggaaaaguacucagugg

SEQ ID NO: 1759269 - RNA, 19 nt, Artificial Sequence
  Description of Artificial Sequence: Synthetic oligonucleotide
cguuaauuugauuaaacag

SEQ ID NO: 1759270 - RNA, 19 nt, Artificial Sequence
  Description of Artificial Sequence: Synthetic oligonucleotide
uuacucgggucucagugcc

SEQ ID NO: 1759271 - RNA, 19 nt, Artificial Sequence
  Description of Artificial Sequence: Synthetic oligonucleotide
gcuaauaauacucaggacu

SEQ ID NO: 1759272 - RNA, 19 nt, Artificial Sequence
  Description of Artificial Sequence: Synthetic oligonucleotide
uaagcaucuguguacuaac

SEQ ID NO: 1759273 - RNA, 19 nt, Artificial Sequence
  Description of Artificial Sequence: Synthetic oligonucleotide
aauugcguuuucaaggcgu

SEQ ID NO: 1759274 - RNA, 19 nt, Artificial Sequence
  Description of Artificial Sequence: Synthetic oligonucleotide
uuuacucgggucucagugc

SEQ ID NO: 1759275 - RNA, 19 nt, Artificial Sequence
  Description of Artificial Sequence: Synthetic oligonucleotide
uuuacgauccaaagaggau

SEQ ID NO: 1759276 - RNA, 19 nt, Artificial Sequence
  Description of Artificial Sequence: Synthetic oligonucleotide
ugaucgggcaugcaucacc

SEQ ID NO: 1759277 - RNA, 19 nt, Artificial Sequence
  Description of Artificial Sequence: Synthetic oligonucleotide
acucccucgucccagcugg

SEQ ID NO: 1759278 - RNA, 19 nt, Artificial Sequence
  Description of Artificial Sequence: Synthetic oligonucleotide
ccuaaaggcgccaagauuc

SEQ ID NO: 1759279 - RNA, 19 nt, Artificial Sequence
  Description of Artificial Sequence: Synthetic oligonucleotide
uuuucaguagggccagcgc

SEQ ID NO: 1759280 - RNA, 19 nt, Artificial Sequence
  Description of Artificial Sequence: Synthetic oligonucleotide
augguuguuuuacagcugu

SEQ ID NO: 1759281 - RNA, 19 nt, Artificial Sequence
  Description of Artificial Sequence: Synthetic oligonucleotide
guaguuuacgauccaaaga

SEQ ID NO: 1759282 - RNA, 19 nt, Artificial Sequence
  Description of Artificial Sequence: Synthetic oligonucleotide
ugguuaagcaucuguguac

SEQ ID NO: 1759283 - RNA, 19 nt, Artificial Sequence
  Description of Artificial Sequence: Synthetic oligonucleotide
acucaggguauuuacccag

SEQ ID NO: 1759284 - RNA, 19 nt, Artificial Sequence
  Description of Artificial Sequence: Synthetic oligonucleotide
uucaaggcguccaaccugu

SEQ ID NO: 1759285 - RNA, 19 nt, Artificial Sequence
  Description of Artificial Sequence: Synthetic oligonucleotide
aaaguaauggugauccuua

SEQ ID NO: 1759286 - RNA, 19 nt, Artificial Sequence
  Description of Artificial Sequence: Synthetic oligonucleotide
uucugguugggucaaucac

SEQ ID NO: 1759287 - RNA, 19 nt, Artificial Sequence
  Description of Artificial Sequence: Synthetic oligonucleotide
auuuucaguagggccagcg

SEQ ID NO: 1759288 - RNA, 19 nt, Artificial Sequence
  Description of Artificial Sequence: Synthetic oligonucleotide
aguugucgccuccaccacc

SEQ ID NO: 1759289 - RNA, 19 nt, Artificial Sequence
  Description of Artificial Sequence: Synthetic oligonucleotide
uauuccacaagagcucaag

SEQ ID NO: 1759290 - RNA, 19 nt, Artificial Sequence
  Description of Artificial Sequence: Synthetic oligonucleotide
aaguugucgccuccaccac

SEQ ID NO: 1759291 - RNA, 19 nt, Artificial Sequence
  Description of Artificial Sequence: Synthetic oligonucleotide
ucuauguacgcagccaugu

SEQ ID NO: 1759292 - RNA, 19 nt, Artificial Sequence
  Description of Artificial Sequence: Synthetic oligonucleotide
uccaccaccgagaugcaac

SEQ ID NO: 1759293 - RNA, 19 nt, Artificial Sequence
  Description of Artificial Sequence: Synthetic oligonucleotide
ugcgcuuccugcauguugu

SEQ ID NO: 1759294 - RNA, 19 nt, Artificial Sequence
  Description of Artificial Sequence: Synthetic oligonucleotide
gacguuaauuugauuaaac

SEQ ID NO: 1759295 - RNA, 19 nt, Artificial Sequence
  Description of Artificial Sequence: Synthetic oligonucleotide
uuaagcaucuguguacuaa

SEQ ID NO: 1759296 - RNA, 19 nt, Artificial Sequence
  Description of Artificial Sequence: Synthetic oligonucleotide
ccaagauucacuuuuccug

SEQ ID NO: 1759297 - RNA, 19 nt, Artificial Sequence
  Description of Artificial Sequence: Synthetic oligonucleotide
cauuuucuauguacgcagc

SEQ ID NO: 1759298 - RNA, 19 nt, Artificial Sequence
  Description of Artificial Sequence: Synthetic oligonucleotide
gucucuaguagcuuuggca

SEQ ID NO: 1759299 - RNA, 19 nt, Artificial Sequence
  Description of Artificial Sequence: Synthetic oligonucleotide
ucuaaggcauaauauuguu

SEQ ID NO: 1759300 - RNA, 19 nt, Artificial Sequence
  Description of Artificial Sequence: Synthetic oligonucleotide
uaagcgacguuaauuugau

SEQ ID NO: 1759301 - RNA, 19 nt, Artificial Sequence
  Description of Artificial Sequence: Synthetic oligonucleotide
guuguuuuacagcugucuc

SEQ ID NO: 1759302 - RNA, 19 nt, Artificial Sequence
  Description of Artificial Sequence: Synthetic oligonucleotide
ucuguguacuaacaucaau

SEQ ID NO: 1759303 - RNA, 19 nt, Artificial Sequence
  Description of Artificial Sequence: Synthetic oligonucleotide
uaaaguaauggugauccuu

SEQ ID NO: 1759304 - RNA, 19 nt, Artificial Sequence
  Description of Artificial Sequence: Synthetic oligonucleotide
cagucuucuagucuggguc

SEQ ID NO: 1759305 - RNA, 19 nt, Artificial Sequence
  Description of Artificial Sequence: Synthetic oligonucleotide
cuuaauaaccugagacauc

SEQ ID NO: 1759306 - RNA, 19 nt, Artificial Sequence
  Description of Artificial Sequence: Synthetic oligonucleotide
guuuacgauccaaagagga

SEQ ID NO: 1759307 - RNA, 19 nt, Artificial Sequence
  Description of Artificial Sequence: Synthetic oligonucleotide
gauauguccuaaaggcgcc

SEQ ID NO: 1759308 - RNA, 19 nt, Artificial Sequence
  Description of Artificial Sequence: Synthetic oligonucleotide
ggauauguccuaaaggcgc

SEQ ID NO: 1759309 - RNA, 19 nt, Artificial Sequence
  Description of Artificial Sequence: Synthetic oligonucleotide
cuuaguccaggguuucgcc

SEQ ID NO: 1759310 - RNA, 19 nt, Artificial Sequence
  Description of Artificial Sequence: Synthetic oligonucleotide
uggcauuuucuauguacgc

SEQ ID NO: 1759311 - RNA, 19 nt, Artificial Sequence
  Description of Artificial Sequence: Synthetic oligonucleotide
uaacagguuuaaaaguguu

SEQ ID NO: 1759312 - RNA, 19 nt, Artificial Sequence
  Description of Artificial Sequence: Synthetic oligonucleotide
ugcuaauaauacucaggac

SEQ ID NO: 1759313 - RNA, 19 nt, Artificial Sequence
  Description of Artificial Sequence: Synthetic oligonucleotide
acgugauaguuuuauuaca

SEQ ID NO: 1759314 - RNA, 19 nt, Artificial Sequence
  Description of Artificial Sequence: Synthetic oligonucleotide
guaagcaagcuagaggaac

SEQ ID NO: 1759315 - RNA, 19 nt, Artificial Sequence
  Description of Artificial Sequence: Synthetic oligonucleotide
ucaaguaguuuacgaucca

SEQ ID NO: 1759316 - RNA, 19 nt, Artificial Sequence
  Description of Artificial Sequence: Synthetic oligonucleotide
aguaauggugauccuuagu

SEQ ID NO: 1759317 - RNA, 19 nt, Artificial Sequence
  Description of Artificial Sequence: Synthetic oligonucleotide
agacuucuaaggcauaaua

SEQ ID NO: 1759318 - RNA, 19 nt, Artificial Sequence
  Description of Artificial Sequence: Synthetic oligonucleotide
cauguacucauaugcagca

SEQ ID NO: 1759319 - RNA, 19 nt, Artificial Sequence
  Description of Artificial Sequence: Synthetic oligonucleotide
uguccuaaaggcgccaaga

SEQ ID NO: 1759320 - RNA, 19 nt, Artificial Sequence
  Description of Artificial Sequence: Synthetic oligonucleotide
guacuaacaucaauuccag

SEQ ID NO: 1759321 - RNA, 19 nt, Artificial Sequence
  Description of Artificial Sequence: Synthetic oligonucleotide
uacccaguauuuauuccac

SEQ ID NO: 1759322 - RNA, 19 nt, Artificial Sequence
  Description of Artificial Sequence: Synthetic oligonucleotide
ccaacaugaaacucccucg

SEQ ID NO: 1759323 - RNA, 19 nt, Artificial Sequence
  Description of Artificial Sequence: Synthetic oligonucleotide
ugaaacucccucgucccag

SEQ ID NO: 1759324 - RNA, 19 nt, Artificial Sequence
  Description of Artificial Sequence: Synthetic oligonucleotide
uucuauguacgcagccaug

SEQ ID NO: 1759325 - RNA, 19 nt, Artificial Sequence
  Description of Artificial Sequence: Synthetic oligonucleotide
cucagugguaccuaagcga

SEQ ID NO: 1759326 - RNA, 19 nt, Artificial Sequence
  Description of Artificial Sequence: Synthetic oligonucleotide
uuauuacagugcuaauaau

SEQ ID NO: 1759327 - RNA, 19 nt, Artificial Sequence
  Description of Artificial Sequence: Synthetic oligonucleotide
guauagucugcauuaguaa

SEQ ID NO: 1759328 - RNA, 19 nt, Artificial Sequence
  Description of Artificial Sequence: Synthetic oligonucleotide
cuaugauaccagccaauug

SEQ ID NO: 1759329 - RNA, 19 nt, Artificial Sequence
  Description of Artificial Sequence: Synthetic oligonucleotide
uaguccaggguuucgccgc

SEQ ID NO: 1759330 - RNA, 19 nt, Artificial Sequence
  Description of Artificial Sequence: Synthetic oligonucleotide
aaggcgccaagauucacuu

SEQ ID NO: 1759331 - RNA, 19 nt, Artificial Sequence
  Description of Artificial Sequence: Synthetic oligonucleotide
uuaaaguaauggugauccu

SEQ ID NO: 1759332 - RNA, 19 nt, Artificial Sequence
  Description of Artificial Sequence: Synthetic oligonucleotide
auuuccgaucguguguuuc

SEQ ID NO: 1759333 - RNA, 19 nt, Artificial Sequence
  Description of Artificial Sequence: Synthetic oligonucleotide
agauuucaucgauacucug

SEQ ID NO: 1759334 - RNA, 19 nt, Artificial Sequence
  Description of Artificial Sequence: Synthetic oligonucleotide
uccugaucgggcaugcauc

SEQ ID NO: 1759335 - RNA, 19 nt, Artificial Sequence
  Description of Artificial Sequence: Synthetic oligonucleotide
uacgcagccauguacucau

SEQ ID NO: 1759336 - RNA, 19 nt, Artificial Sequence
  Description of Artificial Sequence: Synthetic oligonucleotide
caucaccauuuucaguagg

SEQ ID NO: 1759337 - RNA, 19 nt, Artificial Sequence
  Description of Artificial Sequence: Synthetic oligonucleotide
agugguaccuaagcgacgu

SEQ ID NO: 1759338 - RNA, 19 nt, Artificial Sequence
  Description of Artificial Sequence: Synthetic oligonucleotide
agagcucaaguaguuuacg

SEQ ID NO: 1759339 - RNA, 19 nt, Artificial Sequence
  Description of Artificial Sequence: Synthetic oligonucleotide
aaguaguuuacgauccaaa

SEQ ID NO: 1759340 - RNA, 19 nt, Artificial Sequence
  Description of Artificial Sequence: Synthetic oligonucleotide
ugcuguuguuucuugucgu

SEQ ID NO: 1759341 - RNA, 19 nt, Artificial Sequence
  Description of Artificial Sequence: Synthetic oligonucleotide
aggcauaauauuguuugca

SEQ ID NO: 1759342 - RNA, 19 nt, Artificial Sequence
  Description of Artificial Sequence: Synthetic oligonucleotide
uaauaauacucaggacucu

SEQ ID NO: 1759343 - RNA, 19 nt, Artificial Sequence
  Description of Artificial Sequence: Synthetic oligonucleotide
ccaauugcguuuucaaggc

SEQ ID NO: 1759344 - RNA, 19 nt, Artificial Sequence
  Description of Artificial Sequence: Synthetic oligonucleotide
gagcucaaguaguuuacga

SEQ ID NO: 1759345 - RNA, 19 nt, Artificial Sequence
  Description of Artificial Sequence: Synthetic oligonucleotide
cgugauaguuuuauuacag

SEQ ID NO: 1759346 - RNA, 19 nt, Artificial Sequence
  Description of Artificial Sequence: Synthetic oligonucleotide
accgagaugcaacuuuccu

SEQ ID NO: 1759347 - RNA, 19 nt, Artificial Sequence
  Description of Artificial Sequence: Synthetic oligonucleotide
uguuguuucuugucguauu

SEQ ID NO: 1759348 - RNA, 19 nt, Artificial Sequence
  Description of Artificial Sequence: Synthetic oligonucleotide
caauugcguuuucaaggcg

SEQ ID NO: 1759349 - RNA, 19 nt, Artificial Sequence
  Description of Artificial Sequence: Synthetic oligonucleotide
ugaugaucauggucucacc

SEQ ID NO: 1759350 - RNA, 19 nt, Artificial Sequence
  Description of Artificial Sequence: Synthetic oligonucleotide
agcagccguaaccagggug

SEQ ID NO: 1759351 - RNA, 19 nt, Artificial Sequence
  Description of Artificial Sequence: Synthetic oligonucleotide
uccuaaaggcgccaagauu

SEQ ID NO: 1759352 - RNA, 19 nt, Artificial Sequence
  Description of Artificial Sequence: Synthetic oligonucleotide
guacucauaugcagcagcc

SEQ ID NO: 1759353 - RNA, 19 nt, Artificial Sequence
  Description of Artificial Sequence: Synthetic oligonucleotide
uuucaucgauacucugcgc

SEQ ID NO: 1759354 - RNA, 19 nt, Artificial Sequence
  Description of Artificial Sequence: Synthetic oligonucleotide
cucuaguagcuuuggcaag

SEQ ID NO: 1759355 - RNA, 19 nt, Artificial Sequence
  Description of Artificial Sequence: Synthetic oligonucleotide
agcaccgcagucuucuagu

SEQ ID NO: 1759356 - RNA, 19 nt, Artificial Sequence
  Description of Artificial Sequence: Synthetic oligonucleotide
gcucaaguaguuuacgauc

SEQ ID NO: 1759357 - RNA, 19 nt, Artificial Sequence
  Description of Artificial Sequence: Synthetic oligonucleotide
caggcaaagcgaaacuguc

SEQ ID NO: 1759358 - RNA, 19 nt, Artificial Sequence
  Description of Artificial Sequence: Synthetic oligonucleotide
auaccagccaauugcguuu

SEQ ID NO: 1759359 - RNA, 19 nt, Artificial Sequence
  Description of Artificial Sequence: Synthetic oligonucleotide
gcuucuaugguuguuuuac

SEQ ID NO: 1759360 - RNA, 19 nt, Artificial Sequence
  Description of Artificial Sequence: Synthetic oligonucleotide
cuucugauuuccgaucgug

SEQ ID NO: 1759361 - RNA, 19 nt, Artificial Sequence
  Description of Artificial Sequence: Synthetic oligonucleotide
aguccaggguuucgccgcc

SEQ ID NO: 1759362 - RNA, 19 nt, Artificial Sequence
  Description of Artificial Sequence: Synthetic oligonucleotide
aacucccucgucccagcug

SEQ ID NO: 1759363 - RNA, 19 nt, Artificial Sequence
  Description of Artificial Sequence: Synthetic oligonucleotide
uacuaacaucaauuccaga

SEQ ID NO: 1759364 - RNA, 19 nt, Artificial Sequence
  Description of Artificial Sequence: Synthetic oligonucleotide
gaccggagaaguugucgcc

SEQ ID NO: 1759365 - RNA, 19 nt, Artificial Sequence
  Description of Artificial Sequence: Synthetic oligonucleotide
guauuuacccaguauuuau

SEQ ID NO: 1759366 - RNA, 19 nt, Artificial Sequence
  Description of Artificial Sequence: Synthetic oligonucleotide
acagugcuaauaauacuca

SEQ ID NO: 1759367 - RNA, 19 nt, Artificial Sequence
  Description of Artificial Sequence: Synthetic oligonucleotide
uccguggauggcuucuaug

SEQ ID NO: 1759368 - RNA, 19 nt, Artificial Sequence
  Description of Artificial Sequence: Synthetic oligonucleotide
ugucgccuccaccaccgag

SEQ ID NO: 1759369 - RNA, 19 nt, Artificial Sequence
  Description of Artificial Sequence: Synthetic oligonucleotide
agcccuuuggauauguccu

SEQ ID NO: 1759370 - RNA, 19 nt, Artificial Sequence
  Description of Artificial Sequence: Synthetic oligonucleotide
ccacauuuccgcuuucagg

SEQ ID NO: 1759371 - RNA, 19 nt, Artificial Sequence
  Description of Artificial Sequence: Synthetic oligonucleotide
ugauuuccgaucguguguu

SEQ ID NO: 1759372 - RNA, 19 nt, Artificial Sequence
  Description of Artificial Sequence: Synthetic oligonucleotide
aaguugccuccugaucggg

SEQ ID NO: 1759373 - RNA, 19 nt, Artificial Sequence
  Description of Artificial Sequence: Synthetic oligonucleotide
uucgcugggccuccgcgug

SEQ ID NO: 1759374 - RNA, 19 nt, Artificial Sequence
  Description of Artificial Sequence: Synthetic oligonucleotide
gauaccagccaauugcguu

SEQ ID NO: 1759375 - RNA, 19 nt, Artificial Sequence
  Description of Artificial Sequence: Synthetic oligonucleotide
uaccuaagcgacguuaauu

SEQ ID NO: 1759376 - RNA, 19 nt, Artificial Sequence
  Description of Artificial Sequence: Synthetic oligonucleotide
gcucuaacuuuucagacaa

SEQ ID NO: 1759377 - RNA, 19 nt, Artificial Sequence
  Description of Artificial Sequence: Synthetic oligonucleotide
gcaugcaucaccauuuuca

SEQ ID NO: 1759378 - RNA, 19 nt, Artificial Sequence
  Description of Artificial Sequence: Synthetic oligonucleotide
aagcgaaacuguccaugau

SEQ ID NO: 1759379 - RNA, 19 nt, Artificial Sequence
  Description of Artificial Sequence: Synthetic oligonucleotide
ucaucgauacucugcgcuu

SEQ ID NO: 1759380 - RNA, 19 nt, Artificial Sequence
  Description of Artificial Sequence: Synthetic oligonucleotide
cugagacaucaauccgugg

SEQ ID NO: 1759381 - RNA, 19 nt, Artificial Sequence
  Description of Artificial Sequence: Synthetic oligonucleotide
ucaggguauuuacccagua

SEQ ID NO: 1759382 - RNA, 19 nt, Artificial Sequence
  Description of Artificial Sequence: Synthetic oligonucleotide
auguacgcagccauguacu

SEQ ID NO: 1759383 - RNA, 19 nt, Artificial Sequence
  Description of Artificial Sequence: Synthetic oligonucleotide
ucgggcaugcaucaccauu

SEQ ID NO: 1759384 - RNA, 19 nt, Artificial Sequence
  Description of Artificial Sequence: Synthetic oligonucleotide
cagcgcugagauuuugcag

SEQ ID NO: 1759385 - RNA, 19 nt, Artificial Sequence
  Description of Artificial Sequence: Synthetic oligonucleotide
accaccgagaugcaacuuu

SEQ ID NO: 1759386 - RNA, 19 nt, Artificial Sequence
  Description of Artificial Sequence: Synthetic oligonucleotide
cauuaguaagcaagcuaga

SEQ ID NO: 1759387 - RNA, 19 nt, Artificial Sequence
  Description of Artificial Sequence: Synthetic oligonucleotide
uucuacaggcaaagcgaaa

SEQ ID NO: 1759388 - RNA, 19 nt, Artificial Sequence
  Description of Artificial Sequence: Synthetic oligonucleotide
uguacgcagccauguacuc

SEQ ID NO: 1759389 - RNA, 19 nt, Artificial Sequence
  Description of Artificial Sequence: Synthetic oligonucleotide
cuguguacuaacaucaauu

SEQ ID NO: 1759390 - RNA, 19 nt, Artificial Sequence
  Description of Artificial Sequence: Synthetic oligonucleotide
auaccacucccggaagccg

SEQ ID NO: 1759391 - RNA, 19 nt, Artificial Sequence
  Description of Artificial Sequence: Synthetic oligonucleotide
aguugccuccugaucgggc

SEQ ID NO: 1759392 - RNA, 19 nt, Artificial Sequence
  Description of Artificial Sequence: Synthetic oligonucleotide
aaacucccucgucccagcu

SEQ ID NO: 1759393 - RNA, 19 nt, Artificial Sequence
  Description of Artificial Sequence: Synthetic oligonucleotide
ggaccggagaaguugucgc

SEQ ID NO: 1759394 - RNA, 19 nt, Artificial Sequence
  Description of Artificial Sequence: Synthetic oligonucleotide
ggugauccuuaguccaggg

SEQ ID NO: 1759395 - RNA, 19 nt, Artificial Sequence
  Description of Artificial Sequence: Synthetic oligonucleotide
cuucuacaggcaaagcgaa

SEQ ID NO: 1759396 - RNA, 19 nt, Artificial Sequence
  Description of Artificial Sequence: Synthetic oligonucleotide
uccaggguuucgccgccag

SEQ ID NO: 1759397 - RNA, 19 nt, Artificial Sequence
  Description of Artificial Sequence: Synthetic oligonucleotide
uuccaaguugccuccugau

SEQ ID NO: 1759398 - RNA, 19 nt, Artificial Sequence
  Description of Artificial Sequence: Synthetic oligonucleotide
gacuucuaaggcauaauau

SEQ ID NO: 1759399 - RNA, 19 nt, Artificial Sequence
  Description of Artificial Sequence: Synthetic oligonucleotide
gugccuucuacaggcaaag

SEQ ID NO: 1759400 - RNA, 19 nt, Artificial Sequence
  Description of Artificial Sequence: Synthetic oligonucleotide
ugggauagucugguauuca

SEQ ID NO: 1759401 - RNA, 19 nt, Artificial Sequence
  Description of Artificial Sequence: Synthetic oligonucleotide
cagugguaccuaagcgacg

SEQ ID NO: 1759402 - RNA, 19 nt, Artificial Sequence
  Description of Artificial Sequence: Synthetic oligonucleotide
uucacgugauaguuuuauu

SEQ ID NO: 1759403 - RNA, 19 nt, Artificial Sequence
  Description of Artificial Sequence: Synthetic oligonucleotide
ugguaccuaagcgacguua

SEQ ID NO: 1759404 - RNA, 19 nt, Artificial Sequence
  Description of Artificial Sequence: Synthetic oligonucleotide
cccaacaugaaacucccuc

SEQ ID NO: 1759405 - RNA, 19 nt, Artificial Sequence
  Description of Artificial Sequence: Synthetic oligonucleotide
caccgagaugcaacuuucc

SEQ ID NO: 1759406 - RNA, 19 nt, Artificial Sequence
  Description of Artificial Sequence: Synthetic oligonucleotide
guaaccaggguggcuauga

SEQ ID NO: 1759407 - RNA, 19 nt, Artificial Sequence
  Description of Artificial Sequence: Synthetic oligonucleotide
gaucgggcaugcaucacca

SEQ ID NO: 1759408 - RNA, 19 nt, Artificial Sequence
  Description of Artificial Sequence: Synthetic oligonucleotide
ugcagauauuguucugguu

SEQ ID NO: 1759409 - RNA, 19 nt, Artificial Sequence
  Description of Artificial Sequence: Synthetic oligonucleotide
cuaaaggcgccaagauuca

SEQ ID NO: 1759410 - RNA, 19 nt, Artificial Sequence
  Description of Artificial Sequence: Synthetic oligonucleotide
augaaacucccucguccca

SEQ ID NO: 1759411 - RNA, 19 nt, Artificial Sequence
  Description of Artificial Sequence: Synthetic oligonucleotide
acccaguauuuauuccaca

SEQ ID NO: 1759412 - RNA, 19 nt, Artificial Sequence
  Description of Artificial Sequence: Synthetic oligonucleotide
uuccgcuuucaggaaaagu

SEQ ID NO: 1759413 - RNA, 19 nt, Artificial Sequence
  Description of Artificial Sequence: Synthetic oligonucleotide
cugucucuaguagcuuugg

SEQ ID NO: 1759414 - RNA, 19 nt, Artificial Sequence
  Description of Artificial Sequence: Synthetic oligonucleotide
uucgccgccaggauuucuu

SEQ ID NO: 1759415 - RNA, 19 nt, Artificial Sequence
  Description of Artificial Sequence: Synthetic oligonucleotide
auguacucauaugcagcag

SEQ ID NO: 1759416 - RNA, 19 nt, Artificial Sequence
  Description of Artificial Sequence: Synthetic oligonucleotide
gugauaguuuuauuacagu

SEQ ID NO: 1759417 - RNA, 19 nt, Artificial Sequence
  Description of Artificial Sequence: Synthetic oligonucleotide
gagacaucaauccguggau

SEQ ID NO: 1759418 - RNA, 19 nt, Artificial Sequence
  Description of Artificial Sequence: Synthetic oligonucleotide
uuuccgcuuucaggaaaag

SEQ ID NO: 1759419 - RNA, 19 nt, Artificial Sequence
  Description of Artificial Sequence: Synthetic oligonucleotide
aucaaacccaucacuucca

SEQ ID NO: 1759420 - RNA, 19 nt, Artificial Sequence
  Description of Artificial Sequence: Synthetic oligonucleotide
cuuuggcaaguuugucuuc

SEQ ID NO: 1759421 - RNA, 19 nt, Artificial Sequence
  Description of Artificial Sequence: Synthetic oligonucleotide
ugguuguuuuacagcuguc

SEQ ID NO: 1759422 - RNA, 19 nt, Artificial Sequence
  Description of Artificial Sequence: Synthetic oligonucleotide
uccgcgugcgggcuuugca

SEQ ID NO: 1759423 - RNA, 19 nt, Artificial Sequence
  Description of Artificial Sequence: Synthetic oligonucleotide
cugguauucagaagguccu

SEQ ID NO: 1759424 - RNA, 19 nt, Artificial Sequence
  Description of Artificial Sequence: Synthetic oligonucleotide
cugcgcuuccugcauguug

SEQ ID NO: 1759425 - RNA, 19 nt, Artificial Sequence
  Description of Artificial Sequence: Synthetic oligonucleotide
acauuuccgcuuucaggaa

SEQ ID NO: 1759426 - RNA, 19 nt, Artificial Sequence
  Description of Artificial Sequence: Synthetic oligonucleotide
uguuugcagugcacgccaa

SEQ ID NO: 1759427 - RNA, 19 nt, Artificial Sequence
  Description of Artificial Sequence: Synthetic oligonucleotide
gcagccauguacucauaug

SEQ ID NO: 1759428 - RNA, 19 nt, Artificial Sequence
  Description of Artificial Sequence: Synthetic oligonucleotide
ucaauccguggauggcuuc

SEQ ID NO: 1759429 - RNA, 19 nt, Artificial Sequence
  Description of Artificial Sequence: Synthetic oligonucleotide
auggcuucuaugguuguuu

SEQ ID NO: 1759430 - RNA, 19 nt, Artificial Sequence
  Description of Artificial Sequence: Synthetic oligonucleotide
gcgaaacuguccaugauga

SEQ ID NO: 1759431 - RNA, 19 nt, Artificial Sequence
  Description of Artificial Sequence: Synthetic oligonucleotide
acuuuccuucgcugggccu

SEQ ID NO: 1759432 - RNA, 19 nt, Artificial Sequence
  Description of Artificial Sequence: Synthetic oligonucleotide
gggucaaucaccacagcca

SEQ ID NO: 1759433 - RNA, 19 nt, Artificial Sequence
  Description of Artificial Sequence: Synthetic oligonucleotide
uccgaucguguguuucuaa

SEQ ID NO: 1759434 - RNA, 19 nt, Artificial Sequence
  Description of Artificial Sequence: Synthetic oligonucleotide
uaaccaggguggcuaugau

SEQ ID NO: 1759435 - RNA, 19 nt, Artificial Sequence
  Description of Artificial Sequence: Synthetic oligonucleotide
uaguagcuuuggcaaguuu

SEQ ID NO: 1759436 - RNA, 19 nt, Artificial Sequence
  Description of Artificial Sequence: Synthetic oligonucleotide
gggaccggagaaguugucg

SEQ ID NO: 1759437 - RNA, 19 nt, Artificial Sequence
  Description of Artificial Sequence: Synthetic oligonucleotide
ccaaagaggauuugaaaua

SEQ ID NO: 1759438 - RNA, 19 nt, Artificial Sequence
  Description of Artificial Sequence: Synthetic oligonucleotide
cagcaccgcagucuucuag

SEQ ID NO: 1759439 - RNA, 19 nt, Artificial Sequence
  Description of Artificial Sequence: Synthetic oligonucleotide
ugcacgccaaaaucuucua

SEQ ID NO: 1759440 - RNA, 19 nt, Artificial Sequence
  Description of Artificial Sequence: Synthetic oligonucleotide
uaagugggauagucuggua

SEQ ID NO: 1759441 - RNA, 19 nt, Artificial Sequence
  Description of Artificial Sequence: Synthetic oligonucleotide
caucgauacucugcgcuuc

SEQ ID NO: 1759442 - RNA, 19 nt, Artificial Sequence
  Description of Artificial Sequence: Synthetic oligonucleotide
accggagaaguugucgccu

SEQ ID NO: 1759443 - RNA, 19 nt, Artificial Sequence
  Description of Artificial Sequence: Synthetic oligonucleotide
uggcuucuaugguuguuuu

SEQ ID NO: 1759444 - RNA, 19 nt, Artificial Sequence
  Description of Artificial Sequence: Synthetic oligonucleotide
gcauaauauuguuugcagu

SEQ ID NO: 1759445 - RNA, 19 nt, Artificial Sequence
  Description of Artificial Sequence: Synthetic oligonucleotide
ucgggucucagugccuucu

SEQ ID NO: 1759446 - RNA, 19 nt, Artificial Sequence
  Description of Artificial Sequence: Synthetic oligonucleotide
ccuaagcgacguuaauuug

SEQ ID NO: 1759447 - RNA, 19 nt, Artificial Sequence
  Description of Artificial Sequence: Synthetic oligonucleotide
gguauuuacccaguauuua

SEQ ID NO: 1759448 - RNA, 19 nt, Artificial Sequence
  Description of Artificial Sequence: Synthetic oligonucleotide
cugauuuccgaucgugugu

SEQ ID NO: 1759449 - RNA, 19 nt, Artificial Sequence
  Description of Artificial Sequence: Synthetic oligonucleotide
auauguccuaaaggcgcca

SEQ ID NO: 1759450 - RNA, 19 nt, Artificial Sequence
  Description of Artificial Sequence: Synthetic oligonucleotide
agcauuuacucgggucuca

SEQ ID NO: 1759451 - RNA, 19 nt, Artificial Sequence
  Description of Artificial Sequence: Synthetic oligonucleotide
gcgacguuaauuugauuaa

SEQ ID NO: 1759452 - RNA, 19 nt, Artificial Sequence
  Description of Artificial Sequence: Synthetic oligonucleotide
caaguaguuuacgauccaa

SEQ ID NO: 1759453 - RNA, 19 nt, Artificial Sequence
  Description of Artificial Sequence: Synthetic oligonucleotide
gugggauagucugguauuc

SEQ ID NO: 1759454 - RNA, 19 nt, Artificial Sequence
  Description of Artificial Sequence: Synthetic oligonucleotide
aagcgacguuaauuugauu

SEQ ID NO: 1759455 - RNA, 19 nt, Artificial Sequence
  Description of Artificial Sequence: Synthetic oligonucleotide
ugcauguuguuggccaguu

SEQ ID NO: 1759456 - RNA, 19 nt, Artificial Sequence
  Description of Artificial Sequence: Synthetic oligonucleotide
ugcgggcuuugcaccuucc

SEQ ID NO: 1759457 - RNA, 19 nt, Artificial Sequence
  Description of Artificial Sequence: Synthetic oligonucleotide
caggguuucgccgccagga

SEQ ID NO: 1759458 - RNA, 19 nt, Artificial Sequence
  Description of Artificial Sequence: Synthetic oligonucleotide
ugccuucuacaggcaaagc

SEQ ID NO: 1759459 - RNA, 19 nt, Artificial Sequence
  Description of Artificial Sequence: Synthetic oligonucleotide
cagguuuaaaaguguuacu

SEQ ID NO: 1759460 - RNA, 19 nt, Artificial Sequence
  Description of Artificial Sequence: Synthetic oligonucleotide
guuuuauuacagugcuaau

SEQ ID NO: 1759461 - RNA, 19 nt, Artificial Sequence
  Description of Artificial Sequence: Synthetic oligonucleotide
gguuguuuuacagcugucu

SEQ ID NO: 1759462 - RNA, 19 nt, Artificial Sequence
  Description of Artificial Sequence: Synthetic oligonucleotide
ccuuaguccaggguuucgc

SEQ ID NO: 1759463 - RNA, 19 nt, Artificial Sequence
  Description of Artificial Sequence: Synthetic oligonucleotide
guacgcagccauguacuca

SEQ ID NO: 1759464 - RNA, 19 nt, Artificial Sequence
  Description of Artificial Sequence: Synthetic oligonucleotide
gcugucucuaguagcuuug

SEQ ID NO: 1759465 - RNA, 19 nt, Artificial Sequence
  Description of Artificial Sequence: Synthetic oligonucleotide
aggguuucgccgccaggau

SEQ ID NO: 1759466 - RNA, 19 nt, Artificial Sequence
  Description of Artificial Sequence: Synthetic oligonucleotide
gcauuuacucgggucucag

SEQ ID NO: 1759467 - RNA, 19 nt, Artificial Sequence
  Description of Artificial Sequence: Synthetic oligonucleotide
gguaccuaagcgacguuaa

SEQ ID NO: 1759468 - RNA, 19 nt, Artificial Sequence
  Description of Artificial Sequence: Synthetic oligonucleotide
gauccuuaguccaggguuu

SEQ ID NO: 1759469 - RNA, 19 nt, Artificial Sequence
  Description of Artificial Sequence: Synthetic oligonucleotide
cgaucguguguuucuaaac

SEQ ID NO: 1759470 - RNA, 19 nt, Artificial Sequence
  Description of Artificial Sequence: Synthetic oligonucleotide
gguuaagcaucuguguacu

SEQ ID NO: 1759471 - RNA, 19 nt, Artificial Sequence
  Description of Artificial Sequence: Synthetic oligonucleotide
guuaagcaucuguguacua

SEQ ID NO: 1759472 - RNA, 19 nt, Artificial Sequence
  Description of Artificial Sequence: Synthetic oligonucleotide
aucaauccguggauggcuu

SEQ ID NO: 1759473 - RNA, 19 nt, Artificial Sequence
  Description of Artificial Sequence: Synthetic oligonucleotide
auccguggauggcuucuau

SEQ ID NO: 1759474 - RNA, 19 nt, Artificial Sequence
  Description of Artificial Sequence: Synthetic oligonucleotide
uuccgaucguguguuucua

SEQ ID NO: 1759475 - RNA, 19 nt, Artificial Sequence
  Description of Artificial Sequence: Synthetic oligonucleotide
ccaccgagaugcaacuuuc

SEQ ID NO: 1759476 - RNA, 19 nt, Artificial Sequence
  Description of Artificial Sequence: Synthetic oligonucleotide
caucaauccguggauggcu

SEQ ID NO: 1759477 - RNA, 19 nt, Artificial Sequence
  Description of Artificial Sequence: Synthetic oligonucleotide
ggcgccaagauucacuuuu

SEQ ID NO: 1759478 - RNA, 19 nt, Artificial Sequence
  Description of Artificial Sequence: Synthetic oligonucleotide
ccuucgcugggccuccgcg

SEQ ID NO: 1759479 - RNA, 19 nt, Artificial Sequence
  Description of Artificial Sequence: Synthetic oligonucleotide
cauuuucaguagggccagc

SEQ ID NO: 1759480 - RNA, 19 nt, Artificial Sequence
  Description of Artificial Sequence: Synthetic oligonucleotide
guccuaaaggcgccaagau

SEQ ID NO: 1759481 - RNA, 19 nt, Artificial Sequence
  Description of Artificial Sequence: Synthetic oligonucleotide
cauggccgagggaccggag

SEQ ID NO: 1759482 - RNA, 19 nt, Artificial Sequence
  Description of Artificial Sequence: Synthetic oligonucleotide
cuauguacgcagccaugua

SEQ ID NO: 1759483 - RNA, 19 nt, Artificial Sequence
  Description of Artificial Sequence: Synthetic oligonucleotide
ccuuaauaaccugagacau

SEQ ID NO: 1759484 - RNA, 19 nt, Artificial Sequence
  Description of Artificial Sequence: Synthetic oligonucleotide
gugcacgccaaaaucuucu

SEQ ID NO: 1759485 - RNA, 19 nt, Artificial Sequence
  Description of Artificial Sequence: Synthetic oligonucleotide
gugauccuuaguccagggu

SEQ ID NO: 1759486 - RNA, 19 nt, Artificial Sequence
  Description of Artificial Sequence: Synthetic oligonucleotide
cacaagagcucaaguaguu

SEQ ID NO: 1759487 - RNA, 19 nt, Artificial Sequence
  Description of Artificial Sequence: Synthetic oligonucleotide
uuucgccgccaggauuucu

SEQ ID NO: 1759488 - RNA, 19 nt, Artificial Sequence
  Description of Artificial Sequence: Synthetic oligonucleotide
gcguccaaccuguuuggca

SEQ ID NO: 1759489 - RNA, 19 nt, Artificial Sequence
  Description of Artificial Sequence: Synthetic oligonucleotide
ggcaugcaucaccauuuuc

SEQ ID NO: 1759490 - RNA, 19 nt, Artificial Sequence
  Description of Artificial Sequence: Synthetic oligonucleotide
uugucgccuccaccaccga

SEQ ID NO: 1759491 - RNA, 19 nt, Artificial Sequence
  Description of Artificial Sequence: Synthetic oligonucleotide
cagagagccagcagccgua

SEQ ID NO: 1759492 - RNA, 19 nt, Artificial Sequence
  Description of Artificial Sequence: Synthetic oligonucleotide
ccugaucgggcaugcauca

SEQ ID NO: 1759493 - RNA, 19 nt, Artificial Sequence
  Description of Artificial Sequence: Synthetic oligonucleotide
gagggaccggagaaguugu

SEQ ID NO: 1759494 - RNA, 19 nt, Artificial Sequence
  Description of Artificial Sequence: Synthetic oligonucleotide
gagacuucuaaggcauaau

SEQ ID NO: 1759495 - RNA, 19 nt, Artificial Sequence
  Description of Artificial Sequence: Synthetic oligonucleotide
agggaccggagaaguuguc

SEQ ID NO: 1759496 - RNA, 19 nt, Artificial Sequence
  Description of Artificial Sequence: Synthetic oligonucleotide
ccaucacuuccaaguugcc

SEQ ID NO: 1759497 - RNA, 19 nt, Artificial Sequence
  Description of Artificial Sequence: Synthetic oligonucleotide
cucaggguauuuacccagu

SEQ ID NO: 1759498 - RNA, 19 nt, Artificial Sequence
  Description of Artificial Sequence: Synthetic oligonucleotide
cucuaacuuuucagacaaa

SEQ ID NO: 1759499 - RNA, 19 nt, Artificial Sequence
  Description of Artificial Sequence: Synthetic oligonucleotide
cauuuacucgggucucagu

SEQ ID NO: 1759500 - RNA, 19 nt, Artificial Sequence
  Description of Artificial Sequence: Synthetic oligonucleotide
cugaucgggcaugcaucac

SEQ ID NO: 1759501 - RNA, 19 nt, Artificial Sequence
  Description of Artificial Sequence: Synthetic oligonucleotide
cuccugaucgggcaugcau

SEQ ID NO: 1759502 - RNA, 19 nt, Artificial Sequence
  Description of Artificial Sequence: Synthetic oligonucleotide
guaccuaagcgacguuaau

SEQ ID NO: 1759503 - RNA, 19 nt, Artificial Sequence
  Description of Artificial Sequence: Synthetic oligonucleotide
ggucuugguaacagguuua

SEQ ID NO: 1759504 - RNA, 19 nt, Artificial Sequence
  Description of Artificial Sequence: Synthetic oligonucleotide
agccguaaccaggguggcu

SEQ ID NO: 1759505 - RNA, 19 nt, Artificial Sequence
  Description of Artificial Sequence: Synthetic oligonucleotide
gccguaaccaggguggcua

SEQ ID NO: 1759506 - RNA, 19 nt, Artificial Sequence
  Description of Artificial Sequence: Synthetic oligonucleotide
gugcgggcuuugcaccuuc

SEQ ID NO: 1759507 - RNA, 19 nt, Artificial Sequence
  Description of Artificial Sequence: Synthetic oligonucleotide
ccgcgugcgggcuuugcac

SEQ ID NO: 1759508 - RNA, 19 nt, Artificial Sequence
  Description of Artificial Sequence: Synthetic oligonucleotide
gcaccgcagucuucuaguc

SEQ ID NO: 1759509 - RNA, 19 nt, Artificial Sequence
  Description of Artificial Sequence: Synthetic oligonucleotide
aggcgccaagauucacuuu

SEQ ID NO: 1759510 - RNA, 19 nt, Artificial Sequence
  Description of Artificial Sequence: Synthetic oligonucleotide
ccgaucguguguuucuaaa

SEQ ID NO: 1759511 - RNA, 19 nt, Artificial Sequence
  Description of Artificial Sequence: Synthetic oligonucleotide
gcuaugauaccagccaauu

SEQ ID NO: 1759512 - RNA, 19 nt, Artificial Sequence
  Description of Artificial Sequence: Synthetic oligonucleotide
gccgccaggauuucuugcu

SEQ ID NO: 1759513 - RNA, 19 nt, Artificial Sequence
  Description of Artificial Sequence: Synthetic oligonucleotide
cuucgcugggccuccgcgu

SEQ ID NO: 1759514 - RNA, 19 nt, Artificial Sequence
  Description of Artificial Sequence: Synthetic oligonucleotide
ccggagaaguugucgccuc

SEQ ID NO: 1759515 - RNA, 19 nt, Artificial Sequence
  Description of Artificial Sequence: Synthetic oligonucleotide
cgcgugcgggcuuugcacc

SEQ ID NO: 1759516 - RNA, 19 nt, Artificial Sequence
  Description of Artificial Sequence: Synthetic oligonucleotide
uuguucugguugggucaau

SEQ ID NO: 1759517 - RNA, 19 nt, Artificial Sequence
  Description of Artificial Sequence: Synthetic oligonucleotide
caccgcagucuucuagucu

SEQ ID NO: 1759518 - RNA, 19 nt, Artificial Sequence
  Description of Artificial Sequence: Synthetic oligonucleotide
gauuuccgaucguguguuu

SEQ ID NO: 1759519 - RNA, 19 nt, Artificial Sequence
  Description of Artificial Sequence: Synthetic oligonucleotide
ggcguccaaccuguuuggc

SEQ ID NO: 1759520 - RNA, 19 nt, Artificial Sequence
  Description of Artificial Sequence: Synthetic oligonucleotide
gcguuuucaaggcguccaa

SEQ ID NO: 1759521 - RNA, 19 nt, Artificial Sequence
  Description of Artificial Sequence: Synthetic oligonucleotide
guuucgccgccaggauuuc

SEQ ID NO: 1759522 - RNA, 19 nt, Artificial Sequence
  Description of Artificial Sequence: Synthetic oligonucleotide
cacuuuuccugcagauauu

SEQ ID NO: 1759523 - RNA, 19 nt, Artificial Sequence
  Description of Artificial Sequence: Synthetic oligonucleotide
cuccgcgugcgggcuuugc

SEQ ID NO: 1759524 - RNA, 19 nt, Artificial Sequence
  Description of Artificial Sequence: Synthetic oligonucleotide
ccgagaugcaacuuuccuu

SEQ ID NO: 1759525 - RNA, 19 nt, Artificial Sequence
  Description of Artificial Sequence: Synthetic oligonucleotide
cguccaaccuguuuggcau

SEQ ID NO: 1759526 - RNA, 19 nt, Artificial Sequence
  Description of Artificial Sequence: Synthetic oligonucleotide
gcacgccaaaaucuucuau

SEQ ID NO: 1759527 - RNA, 19 nt, Artificial Sequence
  Description of Artificial Sequence: Synthetic oligonucleotide
gcgccaagauucacuuuuc

SEQ ID NO: 1759528 - RNA, 19 nt, Artificial Sequence
  Description of Artificial Sequence: Synthetic oligonucleotide
ggccagcgcugagauuuug

SEQ ID NO: 1759529 - RNA, 19 nt, Artificial Sequence
  Description of Artificial Sequence: Synthetic oligonucleotide
cgacguuaauuugauuaaa

SEQ ID NO: 1759530 - RNA, 19 nt, Artificial Sequence
  Description of Artificial Sequence: Synthetic oligonucleotide
gccaggauuucuugcuguu

SEQ ID NO: 1759531 - RNA, 19 nt, Artificial Sequence
  Description of Artificial Sequence: Synthetic oligonucleotide
ccaccaccgagaugcaacu

SEQ ID NO: 1759532 - RNA, 19 nt, Artificial Sequence
  Description of Artificial Sequence: Synthetic oligonucleotide
guccaggguuucgccgcca

SEQ ID NO: 1759533 - RNA, 19 nt, Artificial Sequence
  Description of Artificial Sequence: Synthetic oligonucleotide
cgggcaugcaucaccauuu

SEQ ID NO: 1759534 - RNA, 19 nt, Artificial Sequence
  Description of Artificial Sequence: Synthetic oligonucleotide
caggagguuuguagcccuu

SEQ ID NO: 1759535 - RNA, 19 nt, Artificial Sequence
  Description of Artificial Sequence: Synthetic oligonucleotide
gugguaccuaagcgacguu

SEQ ID NO: 1759536 - RNA, 19 nt, Artificial Sequence
  Description of Artificial Sequence: Synthetic oligonucleotide
gcgugcgggcuuugcaccu

SEQ ID NO: 1759537 - RNA, 19 nt, Artificial Sequence
  Description of Artificial Sequence: Synthetic oligonucleotide
ccagugguauagucugcau

SEQ ID NO: 1759538 - RNA, 19 nt, Artificial Sequence
  Description of Artificial Sequence: Synthetic oligonucleotide
ccauggccgagggaccgga

SEQ ID NO: 1759539 - RNA, 19 nt, Artificial Sequence
  Description of Artificial Sequence: Synthetic oligonucleotide
cacucccggaagccgccau

SEQ ID NO: 1759540 - RNA, 19 nt, Artificial Sequence
  Description of Artificial Sequence: Synthetic oligonucleotide
caccaccgagaugcaacuu

SEQ ID NO: 1759541 - RNA, 19 nt, Artificial Sequence
  Description of Artificial Sequence: Synthetic oligonucleotide
ccuccugaucgggcaugca

SEQ ID NO: 1759542 - RNA, 19 nt, Artificial Sequence
  Description of Artificial Sequence: Synthetic oligonucleotide
ccguaaccaggguggcuau

SEQ ID NO: 1759543 - RNA, 19 nt, Artificial Sequence
  Description of Artificial Sequence: Synthetic oligonucleotide
ccacucccggaagccgcca

SEQ ID NO: 1759544 - RNA, 19 nt, Artificial Sequence
  Description of Artificial Sequence: Synthetic oligonucleotide
gccuccgcgugcgggcuuu

SEQ ID NO: 1759545 - RNA, 19 nt, Artificial Sequence
  Description of Artificial Sequence: Synthetic oligonucleotide
cgugcgggcuuugcaccuu

SEQ ID NO: 1759546 - RNA, 19 nt, Artificial Sequence
  Description of Artificial Sequence: Synthetic oligonucleotide
ucuagaauggucaugauuu

SEQ ID NO: 1759547 - RNA, 19 nt, Artificial Sequence
  Description of Artificial Sequence: Synthetic oligonucleotide
ucgagaugcccucagagag

SEQ ID NO: 1759548 - RNA, 19 nt, Artificial Sequence
  Description of Artificial Sequence: Synthetic oligonucleotide
ugacucguggauauaaaag

SEQ ID NO: 1759549 - RNA, 19 nt, Artificial Sequence
  Description of Artificial Sequence: Synthetic oligonucleotide
aguauguaaacaacguggc

SEQ ID NO: 1759550 - RNA, 19 nt, Artificial Sequence
  Description of Artificial Sequence: Synthetic oligonucleotide
uguaguggcagcuuugggc

SEQ ID NO: 1759551 - RNA, 19 nt, Artificial Sequence
  Description of Artificial Sequence: Synthetic oligonucleotide
aacgggaacuccauggccc

SEQ ID NO: 1759552 - RNA, 19 nt, Artificial Sequence
  Description of Artificial Sequence: Synthetic oligonucleotide
ugaggaaaccaauaauggc

SEQ ID NO: 1759553 - RNA, 19 nt, Artificial Sequence
  Description of Artificial Sequence: Synthetic oligonucleotide
ucgaacgggaacuccaugg

SEQ ID NO: 1759554 - RNA, 19 nt, Artificial Sequence
  Description of Artificial Sequence: Synthetic oligonucleotide
cucguugugggcuucacgg

SEQ ID NO: 1759555 - RNA, 19 nt, Artificial Sequence
  Description of Artificial Sequence: Synthetic oligonucleotide
uuccgaaugaaccuggcgu

SEQ ID NO: 1759556 - RNA, 19 nt, Artificial Sequence
  Description of Artificial Sequence: Synthetic oligonucleotide
agcgcguccacaucgaacg

SEQ ID NO: 1759557 - RNA, 19 nt, Artificial Sequence
  Description of Artificial Sequence: Synthetic oligonucleotide
uucacggucguccaguaca

SEQ ID NO: 1759558 - RNA, 19 nt, Artificial Sequence
  Description of Artificial Sequence: Synthetic oligonucleotide
gaaccuggcguucauuacg

SEQ ID NO: 1759559 - RNA, 19 nt, Artificial Sequence
  Description of Artificial Sequence: Synthetic oligonucleotide
ugacggucgaucaauggcc

SEQ ID NO: 1759560 - RNA, 19 nt, Artificial Sequence
  Description of Artificial Sequence: Synthetic oligonucleotide
auaaaaguccaggaugcac

SEQ ID NO: 1759561 - RNA, 19 nt, Artificial Sequence
  Description of Artificial Sequence: Synthetic oligonucleotide
ugucgagaugcccucagag

SEQ ID NO: 1759562 - RNA, 19 nt, Artificial Sequence
  Description of Artificial Sequence: Synthetic oligonucleotide
cucguggauauaaaagucc

SEQ ID NO: 1759563 - RNA, 19 nt, Artificial Sequence
  Description of Artificial Sequence: Synthetic oligonucleotide
gaacagcgcguccacaucg

SEQ ID NO: 1759564 - RNA, 19 nt, Artificial Sequence
  Description of Artificial Sequence: Synthetic oligonucleotide
cuugauugccucuacccag

SEQ ID NO: 1759565 - RNA, 19 nt, Artificial Sequence
  Description of Artificial Sequence: Synthetic oligonucleotide
ucuugauugccucuaccca

SEQ ID NO: 1759566 - RNA, 19 nt, Artificial Sequence
  Description of Artificial Sequence: Synthetic oligonucleotide
uugauugccucuacccagg

SEQ ID NO: 1759567 - RNA, 19 nt, Artificial Sequence
  Description of Artificial Sequence: Synthetic oligonucleotide
agugguucuaccucguugu

SEQ ID NO: 1759568 - RNA, 19 nt, Artificial Sequence
  Description of Artificial Sequence: Synthetic oligonucleotide
uauacuggaagaguucucu

SEQ ID NO: 1759569 - RNA, 19 nt, Artificial Sequence
  Description of Artificial Sequence: Synthetic oligonucleotide
gguucuaccucguuguggg

SEQ ID NO: 1759570 - RNA, 19 nt, Artificial Sequence
  Description of Artificial Sequence: Synthetic oligonucleotide
guauguaaacaacguggcg

SEQ ID NO: 1759571 - RNA, 19 nt, Artificial Sequence
  Description of Artificial Sequence: Synthetic oligonucleotide
guucauuacguccccaccc

SEQ ID NO: 1759572 - RNA, 19 nt, Artificial Sequence
  Description of Artificial Sequence: Synthetic oligonucleotide
gacccauccuguaacaagg

SEQ ID NO: 1759573 - RNA, 19 nt, Artificial Sequence
  Description of Artificial Sequence: Synthetic oligonucleotide
aguucaucuagaaugguca

SEQ ID NO: 1759574 - RNA, 19 nt, Artificial Sequence
  Description of Artificial Sequence: Synthetic oligonucleotide
ugugguuccgggucggcgg

SEQ ID NO: 1759575 - RNA, 19 nt, Artificial Sequence
  Description of Artificial Sequence: Synthetic oligonucleotide
aacugagugcgcagguucc

SEQ ID NO: 1759576 - RNA, 19 nt, Artificial Sequence
  Description of Artificial Sequence: Synthetic oligonucleotide
uucauuacguccccaccca

SEQ ID NO: 1759577 - RNA, 19 nt, Artificial Sequence
  Description of Artificial Sequence: Synthetic oligonucleotide
uaaacaacguggcgguuac

SEQ ID NO: 1759578 - RNA, 19 nt, Artificial Sequence
  Description of Artificial Sequence: Synthetic oligonucleotide
gaauggucaugauuugcug

SEQ ID NO: 1759579 - RNA, 19 nt, Artificial Sequence
  Description of Artificial Sequence: Synthetic oligonucleotide
cacgagagugucgagaugc

SEQ ID NO: 1759580 - RNA, 19 nt, Artificial Sequence
  Description of Artificial Sequence: Synthetic oligonucleotide
aucaauggccaguuggugu

SEQ ID NO: 1759581 - RNA, 19 nt, Artificial Sequence
  Description of Artificial Sequence: Synthetic oligonucleotide
ucucccguggccaugccgc

SEQ ID NO: 1759582 - RNA, 19 nt, Artificial Sequence
  Description of Artificial Sequence: Synthetic oligonucleotide
cauccuguaacaaggucug

SEQ ID NO: 1759583 - RNA, 19 nt, Artificial Sequence
  Description of Artificial Sequence: Synthetic oligonucleotide
acgaccuauccucugcuuc

SEQ ID NO: 1759584 - RNA, 19 nt, Artificial Sequence
  Description of Artificial Sequence: Synthetic oligonucleotide
cuguaacauauacuggaag

SEQ ID NO: 1759585 - RNA, 19 nt, Artificial Sequence
  Description of Artificial Sequence: Synthetic oligonucleotide
uccacaucgaacgggaacu

SEQ ID NO: 1759586 - RNA, 19 nt, Artificial Sequence
  Description of Artificial Sequence: Synthetic oligonucleotide
gugacggucgaucaauggc

SEQ ID NO: 1759587 - RNA, 19 nt, Artificial Sequence
  Description of Artificial Sequence: Synthetic oligonucleotide
gaggaaaccaauaauggcu

SEQ ID NO: 1759588 - RNA, 19 nt, Artificial Sequence
  Description of Artificial Sequence: Synthetic oligonucleotide
acggucguccaguacaaag

SEQ ID NO: 1759589 - RNA, 19 nt, Artificial Sequence
  Description of Artificial Sequence: Synthetic oligonucleotide
acucguggauauaaaaguc

SEQ ID NO: 1759590 - RNA, 19 nt, Artificial Sequence
  Description of Artificial Sequence: Synthetic oligonucleotide
uugacucguggauauaaaa

SEQ ID NO: 1759591 - RNA, 19 nt, Artificial Sequence
  Description of Artificial Sequence: Synthetic oligonucleotide
gacucguggauauaaaagu

SEQ ID NO: 1759592 - RNA, 19 nt, Artificial Sequence
  Description of Artificial Sequence: Synthetic oligonucleotide
uagaauggucaugauuugc

SEQ ID NO: 1759593 - RNA, 19 nt, Artificial Sequence
  Description of Artificial Sequence: Synthetic oligonucleotide
aggaauucucugucacugg

SEQ ID NO: 1759594 - RNA, 19 nt, Artificial Sequence
  Description of Artificial Sequence: Synthetic oligonucleotide
acauauacuggaagaguuc

SEQ ID NO: 1759595 - RNA, 19 nt, Artificial Sequence
  Description of Artificial Sequence: Synthetic oligonucleotide
gaagcgcuggugaugggcg

SEQ ID NO: 1759596 - RNA, 19 nt, Artificial Sequence
  Description of Artificial Sequence: Synthetic oligonucleotide
cacuggacgaccuauccuc

SEQ ID NO: 1759597 - RNA, 19 nt, Artificial Sequence
  Description of Artificial Sequence: Synthetic oligonucleotide
agcacggugauccgcuccg

SEQ ID NO: 1759598 - RNA, 19 nt, Artificial Sequence
  Description of Artificial Sequence: Synthetic oligonucleotide
gacccuuggagcaacugag

SEQ ID NO: 1759599 - RNA, 19 nt, Artificial Sequence
  Description of Artificial Sequence: Synthetic oligonucleotide
guuccgaaugaaccuggcg

SEQ ID NO: 1759600 - RNA, 19 nt, Artificial Sequence
  Description of Artificial Sequence: Synthetic oligonucleotide
uggacgaccuauccucugc

SEQ ID NO: 1759601 - RNA, 19 nt, Artificial Sequence
  Description of Artificial Sequence: Synthetic oligonucleotide
agaauggucaugauuugcu

SEQ ID NO: 1759602 - RNA, 19 nt, Artificial Sequence
  Description of Artificial Sequence: Synthetic oligonucleotide
uauccgacuuugaggaaac

SEQ ID NO: 1759603 - RNA, 19 nt, Artificial Sequence
  Description of Artificial Sequence: Synthetic oligonucleotide
ucugauccucacuggacga

SEQ ID NO: 1759604 - RNA, 19 nt, Artificial Sequence
  Description of Artificial Sequence: Synthetic oligonucleotide
uccgacuuugaggaaacca

SEQ ID NO: 1759605 - RNA, 19 nt, Artificial Sequence
  Description of Artificial Sequence: Synthetic oligonucleotide
caguucaucuagaaugguc

SEQ ID NO: 1759606 - RNA, 19 nt, Artificial Sequence
  Description of Artificial Sequence: Synthetic oligonucleotide
cucacuggacgaccuaucc

SEQ ID NO: 1759607 - RNA, 19 nt, Artificial Sequence
  Description of Artificial Sequence: Synthetic oligonucleotide
cauuacguccccacccacc

SEQ ID NO: 1759608 - RNA, 19 nt, Artificial Sequence
  Description of Artificial Sequence: Synthetic oligonucleotide
cuagaauggucaugauuug

SEQ ID NO: 1759609 - RNA, 19 nt, Artificial Sequence
  Description of Artificial Sequence: Synthetic oligonucleotide
ugauugccucuacccaggg

SEQ ID NO: 1759610 - RNA, 19 nt, Artificial Sequence
  Description of Artificial Sequence: Synthetic oligonucleotide
cagguuguagugcuuguug

SEQ ID NO: 1759611 - RNA, 19 nt, Artificial Sequence
  Description of Artificial Sequence: Synthetic oligonucleotide
uauaaaaguccaggaugca

SEQ ID NO: 1759612 - RNA, 19 nt, Artificial Sequence
  Description of Artificial Sequence: Synthetic oligonucleotide
uguugcggcgcuccugcag

SEQ ID NO: 1759613 - RNA, 19 nt, Artificial Sequence
  Description of Artificial Sequence: Synthetic oligonucleotide
gaggaguauggcuuaaugu

SEQ ID NO: 1759614 - RNA, 19 nt, Artificial Sequence
  Description of Artificial Sequence: Synthetic oligonucleotide
gauccggcgaguuccccag

SEQ ID NO: 1759615 - RNA, 19 nt, Artificial Sequence
  Description of Artificial Sequence: Synthetic oligonucleotide
uccagcacggugauccgcu

SEQ ID NO: 1759616 - RNA, 19 nt, Artificial Sequence
  Description of Artificial Sequence: Synthetic oligonucleotide
agugcgcagguuccucccc

SEQ ID NO: 1759617 - RNA, 19 nt, Artificial Sequence
  Description of Artificial Sequence: Synthetic oligonucleotide
ugagugcgcagguuccucc

SEQ ID NO: 1759618 - RNA, 19 nt, Artificial Sequence
  Description of Artificial Sequence: Synthetic oligonucleotide
uuguucaccugugggacug

SEQ ID NO: 1759619 - RNA, 19 nt, Artificial Sequence
  Description of Artificial Sequence: Synthetic oligonucleotide
ugaaccuggcguucauuac

SEQ ID NO: 1759620 - RNA, 19 nt, Artificial Sequence
  Description of Artificial Sequence: Synthetic oligonucleotide
gaccucagcggcacgagag

SEQ ID NO: 1759621 - RNA, 19 nt, Artificial Sequence
  Description of Artificial Sequence: Synthetic oligonucleotide
guugugggcuucacggucg

SEQ ID NO: 1759622 - RNA, 19 nt, Artificial Sequence
  Description of Artificial Sequence: Synthetic oligonucleotide
uucuaccucguugugggcu

SEQ ID NO: 1759623 - RNA, 19 nt, Artificial Sequence
  Description of Artificial Sequence: Synthetic oligonucleotide
uggcgguuacucugcaucc

SEQ ID NO: 1759624 - RNA, 19 nt, Artificial Sequence
  Description of Artificial Sequence: Synthetic oligonucleotide
caacugagugcgcagguuc

SEQ ID NO: 1759625 - RNA, 19 nt, Artificial Sequence
  Description of Artificial Sequence: Synthetic oligonucleotide
gacugucgucuccagguug

SEQ ID NO: 1759626 - RNA, 19 nt, Artificial Sequence
  Description of Artificial Sequence: Synthetic oligonucleotide
aaaccaauaauggcuccuu

SEQ ID NO: 1759627 - RNA, 19 nt, Artificial Sequence
  Description of Artificial Sequence: Synthetic oligonucleotide
cagugguucuaccucguug

SEQ ID NO: 1759628 - RNA, 19 nt, Artificial Sequence
  Description of Artificial Sequence: Synthetic oligonucleotide
ggaggaguauggcuuaaug

SEQ ID NO: 1759629 - RNA, 19 nt, Artificial Sequence
  Description of Artificial Sequence: Synthetic oligonucleotide
uggagcaacugagugcgca

SEQ ID NO: 1759630 - RNA, 19 nt, Artificial Sequence
  Description of Artificial Sequence: Synthetic oligonucleotide
uggggucgaccucagcggc

SEQ ID NO: 1759631 - RNA, 19 nt, Artificial Sequence
  Description of Artificial Sequence: Synthetic oligonucleotide
gaugggcgcggggagaugc

SEQ ID NO: 1759632 - RNA, 19 nt, Artificial Sequence
  Description of Artificial Sequence: Synthetic oligonucleotide
ggugacggucgaucaaugg

SEQ ID NO: 1759633 - RNA, 19 nt, Artificial Sequence
  Description of Artificial Sequence: Synthetic oligonucleotide
gaguauggcuuaaugucuc

SEQ ID NO: 1759634 - RNA, 19 nt, Artificial Sequence
  Description of Artificial Sequence: Synthetic oligonucleotide
uugugguuccgggucggcg

SEQ ID NO: 1759635 - RNA, 19 nt, Artificial Sequence
  Description of Artificial Sequence: Synthetic oligonucleotide
aaccuggcguucauuacgu

SEQ ID NO: 1759636 - RNA, 19 nt, Artificial Sequence
  Description of Artificial Sequence: Synthetic oligonucleotide
ucauuacguccccacccac

SEQ ID NO: 1759637 - RNA, 19 nt, Artificial Sequence
  Description of Artificial Sequence: Synthetic oligonucleotide
uggagcguggaggugggug

SEQ ID NO: 1759638 - RNA, 19 nt, Artificial Sequence
  Description of Artificial Sequence: Synthetic oligonucleotide
guauggcuuaaugucuccc

SEQ ID NO: 1759639 - RNA, 19 nt, Artificial Sequence
  Description of Artificial Sequence: Synthetic oligonucleotide
uggugacggucgaucaaug

SEQ ID NO: 1759640 - RNA, 19 nt, Artificial Sequence
  Description of Artificial Sequence: Synthetic oligonucleotide
cuuuggugacggucgauca

SEQ ID NO: 1759641 - RNA, 19 nt, Artificial Sequence
  Description of Artificial Sequence: Synthetic oligonucleotide
ccuggcguucauuacgucc

SEQ ID NO: 1759642 - RNA, 19 nt, Artificial Sequence
  Description of Artificial Sequence: Synthetic oligonucleotide
accugugggacugucgucu

SEQ ID NO: 1759643 - RNA, 19 nt, Artificial Sequence
  Description of Artificial Sequence: Synthetic oligonucleotide
uuggugacggucgaucaau

SEQ ID NO: 1759644 - RNA, 19 nt, Artificial Sequence
  Description of Artificial Sequence: Synthetic oligonucleotide
ggucaugauuugcugcugc

SEQ ID NO: 1759645 - RNA, 19 nt, Artificial Sequence
  Description of Artificial Sequence: Synthetic oligonucleotide
uccggcgaguuccccaggc

SEQ ID NO: 1759646 - RNA, 19 nt, Artificial Sequence
  Description of Artificial Sequence: Synthetic oligonucleotide
ugcgucugcgcugggcugg

SEQ ID NO: 1759647 - RNA, 19 nt, Artificial Sequence
  Description of Artificial Sequence: Synthetic oligonucleotide
aucgaacgggaacuccaug

SEQ ID NO: 1759648 - RNA, 19 nt, Artificial Sequence
  Description of Artificial Sequence: Synthetic oligonucleotide
uucccugccggccgggcug

SEQ ID NO: 1759649 - RNA, 19 nt, Artificial Sequence
  Description of Artificial Sequence: Synthetic oligonucleotide
cuguaguggcagcuuuggg

SEQ ID NO: 1759650 - RNA, 19 nt, Artificial Sequence
  Description of Artificial Sequence: Synthetic oligonucleotide
cugccggaacccuggaccc

SEQ ID NO: 1759651 - RNA, 19 nt, Artificial Sequence
  Description of Artificial Sequence: Synthetic oligonucleotide
ugcccaguucaucuagaau

SEQ ID NO: 1759652 - RNA, 19 nt, Artificial Sequence
  Description of Artificial Sequence: Synthetic oligonucleotide
gguguugcggcgcuccugc

SEQ ID NO: 1759653 - RNA, 19 nt, Artificial Sequence
  Description of Artificial Sequence: Synthetic oligonucleotide
ucacggucguccaguacaa

SEQ ID NO: 1759654 - RNA, 19 nt, Artificial Sequence
  Description of Artificial Sequence: Synthetic oligonucleotide
ggcagagacgcagggagcg

SEQ ID NO: 1759655 - RNA, 19 nt, Artificial Sequence
  Description of Artificial Sequence: Synthetic oligonucleotide
uggccaugccgcugcauug

SEQ ID NO: 1759656 - RNA, 19 nt, Artificial Sequence
  Description of Artificial Sequence: Synthetic oligonucleotide
gagugcgcagguuccuccc

SEQ ID NO: 1759657 - RNA, 19 nt, Artificial Sequence
  Description of Artificial Sequence: Synthetic oligonucleotide
gucacuggaggaguauggc

SEQ ID NO: 1759658 - RNA, 19 nt, Artificial Sequence
  Description of Artificial Sequence: Synthetic oligonucleotide
cuucaaagaucacaaaguu

SEQ ID NO: 1759659 - RNA, 19 nt, Artificial Sequence
  Description of Artificial Sequence: Synthetic oligonucleotide
gaugagguacugagucccc

SEQ ID NO: 1759660 - RNA, 19 nt, Artificial Sequence
  Description of Artificial Sequence: Synthetic oligonucleotide
uccgggaacagcgcgucca

SEQ ID NO: 1759661 - RNA, 19 nt, Artificial Sequence
  Description of Artificial Sequence: Synthetic oligonucleotide
cauggcgcggcgaggggcc

SEQ ID NO: 1759662 - RNA, 19 nt, Artificial Sequence
  Description of Artificial Sequence: Synthetic oligonucleotide
uggcucaacucgcucuuuc

SEQ ID NO: 1759663 - RNA, 19 nt, Artificial Sequence
  Description of Artificial Sequence: Synthetic oligonucleotide
acgagagugucgagaugcc

SEQ ID NO: 1759664 - RNA, 19 nt, Artificial Sequence
  Description of Artificial Sequence: Synthetic oligonucleotide
gacuuugaggaaaccaaua

SEQ ID NO: 1759665 - RNA, 19 nt, Artificial Sequence
  Description of Artificial Sequence: Synthetic oligonucleotide
ucuaccucguugugggcuu

SEQ ID NO: 1759666 - RNA, 19 nt, Artificial Sequence
  Description of Artificial Sequence: Synthetic oligonucleotide
uuacguccccacccaccag

SEQ ID NO: 1759667 - RNA, 19 nt, Artificial Sequence
  Description of Artificial Sequence: Synthetic oligonucleotide
ggauauaaaaguccaggau

SEQ ID NO: 1759668 - RNA, 19 nt, Artificial Sequence
  Description of Artificial Sequence: Synthetic oligonucleotide
agcggcacgagagugucga

SEQ ID NO: 1759669 - RNA, 19 nt, Artificial Sequence
  Description of Artificial Sequence: Synthetic oligonucleotide
guauccgacuuugaggaaa

SEQ ID NO: 1759670 - RNA, 19 nt, Artificial Sequence
  Description of Artificial Sequence: Synthetic oligonucleotide
acggugauccgcuccggga

SEQ ID NO: 1759671 - RNA, 19 nt, Artificial Sequence
  Description of Artificial Sequence: Synthetic oligonucleotide
cagguuccgaaugaaccug

SEQ ID NO: 1759672 - RNA, 19 nt, Artificial Sequence
  Description of Artificial Sequence: Synthetic oligonucleotide
aaugaaccuggcguucauu

SEQ ID NO: 1759673 - RNA, 19 nt, Artificial Sequence
  Description of Artificial Sequence: Synthetic oligonucleotide
gagagugucgagaugcccu

SEQ ID NO: 1759674 - RNA, 19 nt, Artificial Sequence
  Description of Artificial Sequence: Synthetic oligonucleotide
guaaacaacguggcgguua

SEQ ID NO: 1759675 - RNA, 19 nt, Artificial Sequence
  Description of Artificial Sequence: Synthetic oligonucleotide
uguauccgacuuugaggaa

SEQ ID NO: 1759676 - RNA, 19 nt, Artificial Sequence
  Description of Artificial Sequence: Synthetic oligonucleotide
ugcccucagagagggagug

SEQ ID NO: 1759677 - RNA, 19 nt, Artificial Sequence
  Description of Artificial Sequence: Synthetic oligonucleotide
ugccucuacccagggauga

SEQ ID NO: 1759678 - RNA, 19 nt, Artificial Sequence
  Description of Artificial Sequence: Synthetic oligonucleotide
acugucgucuccagguugu

SEQ ID NO: 1759679 - RNA, 19 nt, Artificial Sequence
  Description of Artificial Sequence: Synthetic oligonucleotide
gugguuccgggucggcggg

SEQ ID NO: 1759680 - RNA, 19 nt, Artificial Sequence
  Description of Artificial Sequence: Synthetic oligonucleotide
gauugccucuacccaggga

SEQ ID NO: 1759681 - RNA, 19 nt, Artificial Sequence
  Description of Artificial Sequence: Synthetic oligonucleotide
cacggugauccgcuccggg

SEQ ID NO: 1759682 - RNA, 19 nt, Artificial Sequence
  Description of Artificial Sequence: Synthetic oligonucleotide
acgggaacuccauggccca

SEQ ID NO: 1759683 - RNA, 19 nt, Artificial Sequence
  Description of Artificial Sequence: Synthetic oligonucleotide
uccucacuggacgaccuau

SEQ ID NO: 1759684 - RNA, 19 nt, Artificial Sequence
  Description of Artificial Sequence: Synthetic oligonucleotide
acggucgaucaauggccag

SEQ ID NO: 1759685 - RNA, 19 nt, Artificial Sequence
  Description of Artificial Sequence: Synthetic oligonucleotide
ucuacccagggaugaggua

SEQ ID NO: 1759686 - RNA, 19 nt, Artificial Sequence
  Description of Artificial Sequence: Synthetic oligonucleotide
uggccaguugguguggcuc

SEQ ID NO: 1759687 - RNA, 19 nt, Artificial Sequence
  Description of Artificial Sequence: Synthetic oligonucleotide
gucguccaguacaaagagc

SEQ ID NO: 1759688 - RNA, 19 nt, Artificial Sequence
  Description of Artificial Sequence: Synthetic oligonucleotide
cagcgcguccacaucgaac

SEQ ID NO: 1759689 - RNA, 19 nt, Artificial Sequence
  Description of Artificial Sequence: Synthetic oligonucleotide
agguguggggucgaccuca

SEQ ID NO: 1759690 - RNA, 19 nt, Artificial Sequence
  Description of Artificial Sequence: Synthetic oligonucleotide
accucagcggcacgagagu

SEQ ID NO: 1759691 - RNA, 19 nt, Artificial Sequence
  Description of Artificial Sequence: Synthetic oligonucleotide
accccgauccggcgaguuc

SEQ ID NO: 1759692 - RNA, 19 nt, Artificial Sequence
  Description of Artificial Sequence: Synthetic oligonucleotide
auugacucguggauauaaa

SEQ ID NO: 1759693 - RNA, 19 nt, Artificial Sequence
  Description of Artificial Sequence: Synthetic oligonucleotide
ggccaaggaggcuccacag

SEQ ID NO: 1759694 - RNA, 19 nt, Artificial Sequence
  Description of Artificial Sequence: Synthetic oligonucleotide
guguggcgggcagagacgc

SEQ ID NO: 1759695 - RNA, 19 nt, Artificial Sequence
  Description of Artificial Sequence: Synthetic oligonucleotide
aacagcgcguccacaucga

SEQ ID NO: 1759696 - RNA, 19 nt, Artificial Sequence
  Description of Artificial Sequence: Synthetic oligonucleotide
ccaggaugcacagugguuc

SEQ ID NO: 1759697 - RNA, 19 nt, Artificial Sequence
  Description of Artificial Sequence: Synthetic oligonucleotide
cuggacgaccuauccucug

SEQ ID NO: 1759698 - RNA, 19 nt, Artificial Sequence
  Description of Artificial Sequence: Synthetic oligonucleotide
uggacccuuggagcaacug

SEQ ID NO: 1759699 - RNA, 19 nt, Artificial Sequence
  Description of Artificial Sequence: Synthetic oligonucleotide
gacggucgaucaauggcca

SEQ ID NO: 1759700 - RNA, 19 nt, Artificial Sequence
  Description of Artificial Sequence: Synthetic oligonucleotide
ucgaccucagcggcacgag

SEQ ID NO: 1759701 - RNA, 19 nt, Artificial Sequence
  Description of Artificial Sequence: Synthetic oligonucleotide
gugguucuaccucguugug

SEQ ID NO: 1759702 - RNA, 19 nt, Artificial Sequence
  Description of Artificial Sequence: Synthetic oligonucleotide
accuggcguucauuacguc

SEQ ID NO: 1759703 - RNA, 19 nt, Artificial Sequence
  Description of Artificial Sequence: Synthetic oligonucleotide
cuugcccaguucaucuaga

SEQ ID NO: 1759704 - RNA, 19 nt, Artificial Sequence
  Description of Artificial Sequence: Synthetic oligonucleotide
gcuuccgugcuggagcagg

SEQ ID NO: 1759705 - RNA, 19 nt, Artificial Sequence
  Description of Artificial Sequence: Synthetic oligonucleotide
gggccgaugcugaugggcg

SEQ ID NO: 1759706 - RNA, 19 nt, Artificial Sequence
  Description of Artificial Sequence: Synthetic oligonucleotide
ggacccuuggagcaacuga

SEQ ID NO: 1759707 - RNA, 19 nt, Artificial Sequence
  Description of Artificial Sequence: Synthetic oligonucleotide
uuggagcaacugagugcgc

SEQ ID NO: 1759708 - RNA, 19 nt, Artificial Sequence
  Description of Artificial Sequence: Synthetic oligonucleotide
gggacugucgucuccaggu

SEQ ID NO: 1759709 - RNA, 19 nt, Artificial Sequence
  Description of Artificial Sequence: Synthetic oligonucleotide
cugauccucacuggacgac

SEQ ID NO: 1759710 - RNA, 19 nt, Artificial Sequence
  Description of Artificial Sequence: Synthetic oligonucleotide
guucuaccucguugugggc

SEQ ID NO: 1759711 - RNA, 19 nt, Artificial Sequence
  Description of Artificial Sequence: Synthetic oligonucleotide
gucgaucaauggccaguug

SEQ ID NO: 1759712 - RNA, 19 nt, Artificial Sequence
  Description of Artificial Sequence: Synthetic oligonucleotide
agagacgcagggagcgaag

SEQ ID NO: 1759713 - RNA, 19 nt, Artificial Sequence
  Description of Artificial Sequence: Synthetic oligonucleotide
cgaccuauccucugcuucc

SEQ ID NO: 1759714 - RNA, 19 nt, Artificial Sequence
  Description of Artificial Sequence: Synthetic oligonucleotide
ccgacuuugaggaaaccaa

SEQ ID NO: 1759715 - RNA, 19 nt, Artificial Sequence
  Description of Artificial Sequence: Synthetic oligonucleotide
cguggauauaaaaguccag

SEQ ID NO: 1759716 - RNA, 19 nt, Artificial Sequence
  Description of Artificial Sequence: Synthetic oligonucleotide
acuggacgaccuauccucu

SEQ ID NO: 1759717 - RNA, 19 nt, Artificial Sequence
  Description of Artificial Sequence: Synthetic oligonucleotide
cccagacccauccuguaac

SEQ ID NO: 1759718 - RNA, 19 nt, Artificial Sequence
  Description of Artificial Sequence: Synthetic oligonucleotide
gcguugugguuccgggucg

SEQ ID NO: 1759719 - RNA, 19 nt, Artificial Sequence
  Description of Artificial Sequence: Synthetic oligonucleotide
gcguucauuacguccccac

SEQ ID NO: 1759720 - RNA, 19 nt, Artificial Sequence
  Description of Artificial Sequence: Synthetic oligonucleotide
uguggcgggcagagacgca

SEQ ID NO: 1759721 - RNA, 19 nt, Artificial Sequence
  Description of Artificial Sequence: Synthetic oligonucleotide
ugguguugcggcgcuccug

SEQ ID NO: 1759722 - RNA, 19 nt, Artificial Sequence
  Description of Artificial Sequence: Synthetic oligonucleotide
acugagugcgcagguuccu

SEQ ID NO: 1759723 - RNA, 19 nt, Artificial Sequence
  Description of Artificial Sequence: Synthetic oligonucleotide
ggaggggaccccgauccgg

SEQ ID NO: 1759724 - RNA, 19 nt, Artificial Sequence
  Description of Artificial Sequence: Synthetic oligonucleotide
agggagcgaagcaacuccu

SEQ ID NO: 1759725 - RNA, 19 nt, Artificial Sequence
  Description of Artificial Sequence: Synthetic oligonucleotide
auggccaguugguguggcu

SEQ ID NO: 1759726 - RNA, 19 nt, Artificial Sequence
  Description of Artificial Sequence: Synthetic oligonucleotide
aaacaacguggcgguuacu

SEQ ID NO: 1759727 - RNA, 19 nt, Artificial Sequence
  Description of Artificial Sequence: Synthetic oligonucleotide
gauccgcuccgggaacagc

SEQ ID NO: 1759728 - RNA, 19 nt, Artificial Sequence
  Description of Artificial Sequence: Synthetic oligonucleotide
cucuacccagggaugaggu

SEQ ID NO: 1759729 - RNA, 19 nt, Artificial Sequence
  Description of Artificial Sequence: Synthetic oligonucleotide
gcagguuccgaaugaaccu

SEQ ID NO: 1759730 - RNA, 19 nt, Artificial Sequence
  Description of Artificial Sequence: Synthetic oligonucleotide
uggugcgucugcgcugggc

SEQ ID NO: 1759731 - RNA, 19 nt, Artificial Sequence
  Description of Artificial Sequence: Synthetic oligonucleotide
uggaggaguauggcuuaau

SEQ ID NO: 1759732 - RNA, 19 nt, Artificial Sequence
  Description of Artificial Sequence: Synthetic oligonucleotide
gaugggcgaagaagccuuc

SEQ ID NO: 1759733 - RNA, 19 nt, Artificial Sequence
  Description of Artificial Sequence: Synthetic oligonucleotide
cguucauuacguccccacc

SEQ ID NO: 1759734 - RNA, 19 nt, Artificial Sequence
  Description of Artificial Sequence: Synthetic oligonucleotide
ggcgcggggagaugcuggg

SEQ ID NO: 1759735 - RNA, 19 nt, Artificial Sequence
  Description of Artificial Sequence: Synthetic oligonucleotide
auccggcgaguuccccagg

SEQ ID NO: 1759736 - RNA, 19 nt, Artificial Sequence
  Description of Artificial Sequence: Synthetic oligonucleotide
gagcuucuuguauccgacu

SEQ ID NO: 1759737 - RNA, 19 nt, Artificial Sequence
  Description of Artificial Sequence: Synthetic oligonucleotide
ccucguugugggcuucacg

SEQ ID NO: 1759738 - RNA, 19 nt, Artificial Sequence
  Description of Artificial Sequence: Synthetic oligonucleotide
cagcuuccgugcuggagca

SEQ ID NO: 1759739 - RNA, 19 nt, Artificial Sequence
  Description of Artificial Sequence: Synthetic oligonucleotide
gcagguguggggucgaccu

SEQ ID NO: 1759740 - RNA, 19 nt, Artificial Sequence
  Description of Artificial Sequence: Synthetic oligonucleotide
gugucgagaugcccucaga

SEQ ID NO: 1759741 - RNA, 19 nt, Artificial Sequence
  Description of Artificial Sequence: Synthetic oligonucleotide
ugccggccgggcugcagug

SEQ ID NO: 1759742 - RNA, 19 nt, Artificial Sequence
  Description of Artificial Sequence: Synthetic oligonucleotide
cagcggcacgagagugucg

SEQ ID NO: 1759743 - RNA, 19 nt, Artificial Sequence
  Description of Artificial Sequence: Synthetic oligonucleotide
gucgaccucagcggcacga

SEQ ID NO: 1759744 - RNA, 19 nt, Artificial Sequence
  Description of Artificial Sequence: Synthetic oligonucleotide
ccucuacccagggaugagg

SEQ ID NO: 1759745 - RNA, 19 nt, Artificial Sequence
  Description of Artificial Sequence: Synthetic oligonucleotide
cugagugcgcagguuccuc

SEQ ID NO: 1759746 - RNA, 19 nt, Artificial Sequence
  Description of Artificial Sequence: Synthetic oligonucleotide
cgguuacucugcauccugg

SEQ ID NO: 1759747 - RNA, 19 nt, Artificial Sequence
  Description of Artificial Sequence: Synthetic oligonucleotide
gguuccgaaugaaccuggc

SEQ ID NO: 1759748 - RNA, 19 nt, Artificial Sequence
  Description of Artificial Sequence: Synthetic oligonucleotide
agguccacgcgggccggcg

SEQ ID NO: 1759749 - RNA, 19 nt, Artificial Sequence
  Description of Artificial Sequence: Synthetic oligonucleotide
acccuuggagcaacugagu

SEQ ID NO: 1759750 - RNA, 19 nt, Artificial Sequence
  Description of Artificial Sequence: Synthetic oligonucleotide
caguugguguggcucaacu

SEQ ID NO: 1759751 - RNA, 19 nt, Artificial Sequence
  Description of Artificial Sequence: Synthetic oligonucleotide
guugugguuccgggucggc

SEQ ID NO: 1759752 - RNA, 19 nt, Artificial Sequence
  Description of Artificial Sequence: Synthetic oligonucleotide
ggcacgagagugucgagau

SEQ ID NO: 1759753 - RNA, 19 nt, Artificial Sequence
  Description of Artificial Sequence: Synthetic oligonucleotide
cugcaggcauggcgcggcg

SEQ ID NO: 1759754 - RNA, 19 nt, Artificial Sequence
  Description of Artificial Sequence: Synthetic oligonucleotide
ggccaguugguguggcuca

SEQ ID NO: 1759755 - RNA, 19 nt, Artificial Sequence
  Description of Artificial Sequence: Synthetic oligonucleotide
uugcggcgcuccugcaggu

SEQ ID NO: 1759756 - RNA, 19 nt, Artificial Sequence
  Description of Artificial Sequence: Synthetic oligonucleotide
ccccgauccggcgaguucc

SEQ ID NO: 1759757 - RNA, 19 nt, Artificial Sequence
  Description of Artificial Sequence: Synthetic oligonucleotide
cccguggcggcuguagugg

SEQ ID NO: 1759758 - RNA, 19 nt, Artificial Sequence
  Description of Artificial Sequence: Synthetic oligonucleotide
gcugcuggagcguggaggu

SEQ ID NO: 1759759 - RNA, 19 nt, Artificial Sequence
  Description of Artificial Sequence: Synthetic oligonucleotide
gagugucgagaugcccuca

SEQ ID NO: 1759760 - RNA, 19 nt, Artificial Sequence
  Description of Artificial Sequence: Synthetic oligonucleotide
cuccgggaacagcgcgucc

SEQ ID NO: 1759761 - RNA, 19 nt, Artificial Sequence
  Description of Artificial Sequence: Synthetic oligonucleotide
augcccucagagagggagu

SEQ ID NO: 1759762 - RNA, 19 nt, Artificial Sequence
  Description of Artificial Sequence: Synthetic oligonucleotide
caggaugcacagugguucu

SEQ ID NO: 1759763 - RNA, 19 nt, Artificial Sequence
  Description of Artificial Sequence: Synthetic oligonucleotide
ugaugggcgcggggagaug

SEQ ID NO: 1759764 - RNA, 19 nt, Artificial Sequence
  Description of Artificial Sequence: Synthetic oligonucleotide
cgcggggagaugcugggcc

SEQ ID NO: 1759765 - RNA, 19 nt, Artificial Sequence
  Description of Artificial Sequence: Synthetic oligonucleotide
uccacgcgggccggcguug

SEQ ID NO: 1759766 - RNA, 19 nt, Artificial Sequence
  Description of Artificial Sequence: Synthetic oligonucleotide
auggcgcggcgaggggccc

SEQ ID NO: 1759767 - RNA, 19 nt, Artificial Sequence
  Description of Artificial Sequence: Synthetic oligonucleotide
ucccguggccaugccgcug

SEQ ID NO: 1759768 - RNA, 19 nt, Artificial Sequence
  Description of Artificial Sequence: Synthetic oligonucleotide
caucgaacgggaacuccau

SEQ ID NO: 1759769 - RNA, 19 nt, Artificial Sequence
  Description of Artificial Sequence: Synthetic oligonucleotide
gggagcgaagcaacuccug

SEQ ID NO: 1759770 - RNA, 19 nt, Artificial Sequence
  Description of Artificial Sequence: Synthetic oligonucleotide
gcacgagagugucgagaug

SEQ ID NO: 1759771 - RNA, 19 nt, Artificial Sequence
  Description of Artificial Sequence: Synthetic oligonucleotide
cagagacgcagggagcgaa

SEQ ID NO: 1759772 - RNA, 19 nt, Artificial Sequence
  Description of Artificial Sequence: Synthetic oligonucleotide
ggcgaggggcccuguucag

SEQ ID NO: 1759773 - RNA, 19 nt, Artificial Sequence
  Description of Artificial Sequence: Synthetic oligonucleotide
gcgcguccacaucgaacgg

SEQ ID NO: 1759774 - RNA, 19 nt, Artificial Sequence
  Description of Artificial Sequence: Synthetic oligonucleotide
guguggggucgaccucagc

SEQ ID NO: 1759775 - RNA, 19 nt, Artificial Sequence
  Description of Artificial Sequence: Synthetic oligonucleotide
gacgaccuauccucugcuu

SEQ ID NO: 1759776 - RNA, 19 nt, Artificial Sequence
  Description of Artificial Sequence: Synthetic oligonucleotide
cgggcaguaggguguggcg

SEQ ID NO: 1759777 - RNA, 19 nt, Artificial Sequence
  Description of Artificial Sequence: Synthetic oligonucleotide
gcguccacaucgaacggga

SEQ ID NO: 1759778 - RNA, 19 nt, Artificial Sequence
  Description of Artificial Sequence: Synthetic oligonucleotide
gaccuauccucugcuuccu

SEQ ID NO: 1759779 - RNA, 19 nt, Artificial Sequence
  Description of Artificial Sequence: Synthetic oligonucleotide
agcuuccgugcuggagcag

SEQ ID NO: 1759780 - RNA, 19 nt, Artificial Sequence
  Description of Artificial Sequence: Synthetic oligonucleotide
guaggguguggcgggcaga

SEQ ID NO: 1759781 - RNA, 19 nt, Artificial Sequence
  Description of Artificial Sequence: Synthetic oligonucleotide
ggcucaacucgcucuuucu

SEQ ID NO: 1759782 - RNA, 19 nt, Artificial Sequence
  Description of Artificial Sequence: Synthetic oligonucleotide
gggucgaccucagcggcac

SEQ ID NO: 1759783 - RNA, 19 nt, Artificial Sequence
  Description of Artificial Sequence: Synthetic oligonucleotide
acguccccacccaccagcu

SEQ ID NO: 1759784 - RNA, 19 nt, Artificial Sequence
  Description of Artificial Sequence: Synthetic oligonucleotide
ugguuccgggucggcgggc

SEQ ID NO: 1759785 - RNA, 19 nt, Artificial Sequence
  Description of Artificial Sequence: Synthetic oligonucleotide
ggucgaccucagcggcacg

SEQ ID NO: 1759786 - RNA, 19 nt, Artificial Sequence
  Description of Artificial Sequence: Synthetic oligonucleotide
cgagagugucgagaugccc

SEQ ID NO: 1759787 - RNA, 19 nt, Artificial Sequence
  Description of Artificial Sequence: Synthetic oligonucleotide
gguguggggucgaccucag

SEQ ID NO: 1759788 - RNA, 19 nt, Artificial Sequence
  Description of Artificial Sequence: Synthetic oligonucleotide
cuaccucguugugggcuuc

SEQ ID NO: 1759789 - RNA, 19 nt, Artificial Sequence
  Description of Artificial Sequence: Synthetic oligonucleotide
gguuccgggucggcgggcc

SEQ ID NO: 1759790 - RNA, 19 nt, Artificial Sequence
  Description of Artificial Sequence: Synthetic oligonucleotide
ggugaugggcgcggggaga

SEQ ID NO: 1759791 - RNA, 19 nt, Artificial Sequence
  Description of Artificial Sequence: Synthetic oligonucleotide
cuuccgugcuggagcaggu

SEQ ID NO: 1759792 - RNA, 19 nt, Artificial Sequence
  Description of Artificial Sequence: Synthetic oligonucleotide
cgcguccacaucgaacggg

SEQ ID NO: 1759793 - RNA, 19 nt, Artificial Sequence
  Description of Artificial Sequence: Synthetic oligonucleotide
ggacgaccuauccucugcu

SEQ ID NO: 1759794 - RNA, 19 nt, Artificial Sequence
  Description of Artificial Sequence: Synthetic oligonucleotide
gggccggcguugugguucc

SEQ ID NO: 1759795 - RNA, 19 nt, Artificial Sequence
  Description of Artificial Sequence: Synthetic oligonucleotide
gccucuacccagggaugag

SEQ ID NO: 1759796 - RNA, 19 nt, Artificial Sequence
  Description of Artificial Sequence: Synthetic oligonucleotide
ggccaugccgcugcauuga

SEQ ID NO: 1759797 - RNA, 19 nt, Artificial Sequence
  Description of Artificial Sequence: Synthetic oligonucleotide
cggcgaguuccccaggcug

SEQ ID NO: 1759798 - RNA, 19 nt, Artificial Sequence
  Description of Artificial Sequence: Synthetic oligonucleotide
gcggcgaggggcccuguuc

SEQ ID NO: 1759799 - RNA, 19 nt, Artificial Sequence
  Description of Artificial Sequence: Synthetic oligonucleotide
guguugcggcgcuccugca

SEQ ID NO: 1759800 - RNA, 19 nt, Artificial Sequence
  Description of Artificial Sequence: Synthetic oligonucleotide
cccgauccggcgaguuccc

SEQ ID NO: 1759801 - RNA, 19 nt, Artificial Sequence
  Description of Artificial Sequence: Synthetic oligonucleotide
cuggugcgucugcgcuggg

SEQ ID NO: 1759802 - RNA, 19 nt, Artificial Sequence
  Description of Artificial Sequence: Synthetic oligonucleotide
cuggaggaguauggcuuaa

SEQ ID NO: 1759803 - RNA, 19 nt, Artificial Sequence
  Description of Artificial Sequence: Synthetic oligonucleotide
gcacggugauccgcuccgg

SEQ ID NO: 1759804 - RNA, 19 nt, Artificial Sequence
  Description of Artificial Sequence: Synthetic oligonucleotide
gcuccgggaacagcgcguc

SEQ ID NO: 1759805 - RNA, 19 nt, Artificial Sequence
  Description of Artificial Sequence: Synthetic oligonucleotide
ccacaucgaacgggaacuc

SEQ ID NO: 1759806 - RNA, 19 nt, Artificial Sequence
  Description of Artificial Sequence: Synthetic oligonucleotide
ggcguucauuacgucccca

SEQ ID NO: 1759807 - RNA, 19 nt, Artificial Sequence
  Description of Artificial Sequence: Synthetic oligonucleotide
cgaaugaaccuggcguuca

SEQ ID NO: 1759808 - RNA, 19 nt, Artificial Sequence
  Description of Artificial Sequence: Synthetic oligonucleotide
cacgcgggccggcguugug

SEQ ID NO: 1759809 - RNA, 19 nt, Artificial Sequence
  Description of Artificial Sequence: Synthetic oligonucleotide
ggucgaucaauggccaguu

SEQ ID NO: 1759810 - RNA, 19 nt, Artificial Sequence
  Description of Artificial Sequence: Synthetic oligonucleotide
ccgaugcugaugggcgaag

SEQ ID NO: 1759811 - RNA, 19 nt, Artificial Sequence
  Description of Artificial Sequence: Synthetic oligonucleotide
cgauccggcgaguucccca

SEQ ID NO: 1759812 - RNA, 19 nt, Artificial Sequence
  Description of Artificial Sequence: Synthetic oligonucleotide
gccgaugcugaugggcgaa

SEQ ID NO: 1759813 - RNA, 19 nt, Artificial Sequence
  Description of Artificial Sequence: Synthetic oligonucleotide
cgacuuugaggaaaccaau

SEQ ID NO: 1759814 - RNA, 19 nt, Artificial Sequence
  Description of Artificial Sequence: Synthetic oligonucleotide
ggggucgaccucagcggca

SEQ ID NO: 1759815 - RNA, 19 nt, Artificial Sequence
  Description of Artificial Sequence: Synthetic oligonucleotide
ggcgguuacucugcauccu

SEQ ID NO: 1759816 - RNA, 19 nt, Artificial Sequence
  Description of Artificial Sequence: Synthetic oligonucleotide
ggacugucgucuccagguu

SEQ ID NO: 1759817 - RNA, 19 nt, Artificial Sequence
  Description of Artificial Sequence: Synthetic oligonucleotide
cgggccggcguugugguuc

SEQ ID NO: 1759818 - RNA, 19 nt, Artificial Sequence
  Description of Artificial Sequence: Synthetic oligonucleotide
gcgcagguuccuccccaga

SEQ ID NO: 1759819 - RNA, 19 nt, Artificial Sequence
  Description of Artificial Sequence: Synthetic oligonucleotide
ccggaacccuggacccuug

SEQ ID NO: 1759820 - RNA, 19 nt, Artificial Sequence
  Description of Artificial Sequence: Synthetic oligonucleotide
cacggucguccaguacaaa

SEQ ID NO: 1759821 - RNA, 19 nt, Artificial Sequence
  Description of Artificial Sequence: Synthetic oligonucleotide
ccguucuugauugccucua

SEQ ID NO: 1759822 - RNA, 19 nt, Artificial Sequence
  Description of Artificial Sequence: Synthetic oligonucleotide
gcauugacucguggauaua

SEQ ID NO: 1759823 - RNA, 19 nt, Artificial Sequence
  Description of Artificial Sequence: Synthetic oligonucleotide
gaccccgauccggcgaguu

SEQ ID NO: 1759824 - RNA, 19 nt, Artificial Sequence
  Description of Artificial Sequence: Synthetic oligonucleotide
ccgauccggcgaguucccc

SEQ ID NO: 1759825 - RNA, 19 nt, Artificial Sequence
  Description of Artificial Sequence: Synthetic oligonucleotide
guccacgcgggccggcguu

SEQ ID NO: 1759826 - RNA, 19 nt, Artificial Sequence
  Description of Artificial Sequence: Synthetic oligonucleotide
gcaacugagugcgcagguu

SEQ ID NO: 1759827 - RNA, 19 nt, Artificial Sequence
  Description of Artificial Sequence: Synthetic oligonucleotide
gcgcggggagaugcugggc

SEQ ID NO: 1759828 - RNA, 19 nt, Artificial Sequence
  Description of Artificial Sequence: Synthetic oligonucleotide
cggcacgagagugucgaga

SEQ ID NO: 1759829 - RNA, 19 nt, Artificial Sequence
  Description of Artificial Sequence: Synthetic oligonucleotide
gggaacuccauggcccauu

SEQ ID NO: 1759830 - RNA, 19 nt, Artificial Sequence
  Description of Artificial Sequence: Synthetic oligonucleotide
gcgaguuccccaggcugcu

SEQ ID NO: 1759831 - RNA, 19 nt, Artificial Sequence
  Description of Artificial Sequence: Synthetic oligonucleotide
ccccuggugcgucugcgcu

SEQ ID NO: 1759832 - RNA, 19 nt, Artificial Sequence
  Description of Artificial Sequence: Synthetic oligonucleotide
cgaccucagcggcacgaga

SEQ ID NO: 1759833 - RNA, 19 nt, Artificial Sequence
  Description of Artificial Sequence: Synthetic oligonucleotide
guggcucaacucgcucuuu

SEQ ID NO: 1759834 - RNA, 19 nt, Artificial Sequence
  Description of Artificial Sequence: Synthetic oligonucleotide
cguccacaucgaacgggaa

SEQ ID NO: 1759835 - RNA, 19 nt, Artificial Sequence
  Description of Artificial Sequence: Synthetic oligonucleotide
cggucgaucaauggccagu

SEQ ID NO: 1759836 - RNA, 19 nt, Artificial Sequence
  Description of Artificial Sequence: Synthetic oligonucleotide
gccggaacccuggacccuu

SEQ ID NO: 1759837 - RNA, 19 nt, Artificial Sequence
  Description of Artificial Sequence: Synthetic oligonucleotide
ccggcgaguuccccaggcu

SEQ ID NO: 1759838 - RNA, 19 nt, Artificial Sequence
  Description of Artificial Sequence: Synthetic oligonucleotide
cggcguugugguuccgggu

SEQ ID NO: 1759839 - RNA, 19 nt, Artificial Sequence
  Description of Artificial Sequence: Synthetic oligonucleotide
cguggcgguuacucugcau

SEQ ID NO: 1759840 - RNA, 19 nt, Artificial Sequence
  Description of Artificial Sequence: Synthetic oligonucleotide
cgcgggccggcguuguggu

SEQ ID NO: 1759841 - RNA, 19 nt, Artificial Sequence
  Description of Artificial Sequence: Synthetic oligonucleotide
gccggccgggcugcagugu

SEQ ID NO: 1759842 - RNA, 19 nt, Artificial Sequence
  Description of Artificial Sequence: Synthetic oligonucleotide
gcgggccggcguugugguu

SEQ ID NO: 1759843 - RNA, 19 nt, Artificial Sequence
  Description of Artificial Sequence: Synthetic oligonucleotide
ccacgcgggccggcguugu

SEQ ID NO: 1759844 - RNA, 19 nt, Artificial Sequence
  Description of Artificial Sequence: Synthetic oligonucleotide
cccugccggccgggcugca

SEQ ID NO: 1759845 - RNA, 19 nt, Artificial Sequence
  Description of Artificial Sequence: Synthetic oligonucleotide
gcgcggcgaggggcccugu

SEQ ID NO: 1759846 - RNA, 19 nt, Artificial Sequence
  Description of Artificial Sequence: Synthetic oligonucleotide
aaucgcaucauccugcagc

SEQ ID NO: 1759847 - RNA, 19 nt, Artificial Sequence
  Description of Artificial Sequence: Synthetic oligonucleotide
uuauagacaacuuugaggu

SEQ ID NO: 1759848 - RNA, 19 nt, Artificial Sequence
  Description of Artificial Sequence: Synthetic oligonucleotide
aauauuuacuggugguucc

SEQ ID NO: 1759849 - RNA, 19 nt, Artificial Sequence
  Description of Artificial Sequence: Synthetic oligonucleotide
uuuacagcaauaaaggaga

SEQ ID NO: 1759850 - RNA, 19 nt, Artificial Sequence
  Description of Artificial Sequence: Synthetic oligonucleotide
auaucgguggaucagcucc

SEQ ID NO: 1759851 - RNA, 19 nt, Artificial Sequence
  Description of Artificial Sequence: Synthetic oligonucleotide
ugaacaguagcaugaaucg

SEQ ID NO: 1759852 - RNA, 19 nt, Artificial Sequence
  Description of Artificial Sequence: Synthetic oligonucleotide
aaauacuugucuaagagcu

SEQ ID NO: 1759853 - RNA, 19 nt, Artificial Sequence
  Description of Artificial Sequence: Synthetic oligonucleotide
aggaaauaaaggcagccgc

SEQ ID NO: 1759854 - RNA, 19 nt, Artificial Sequence
  Description of Artificial Sequence: Synthetic oligonucleotide
auagacaacuuugaggucc

SEQ ID NO: 1759855 - RNA, 19 nt, Artificial Sequence
  Description of Artificial Sequence: Synthetic oligonucleotide
aagaaaagcagcaggcucc

SEQ ID NO: 1759856 - RNA, 19 nt, Artificial Sequence
  Description of Artificial Sequence: Synthetic oligonucleotide
aaauauuuacuggugguuc

SEQ ID NO: 1759857 - RNA, 19 nt, Artificial Sequence
  Description of Artificial Sequence: Synthetic oligonucleotide
acaacuuugaggucccucc

SEQ ID NO: 1759858 - RNA, 19 nt, Artificial Sequence
  Description of Artificial Sequence: Synthetic oligonucleotide
agaaacaguccccaagugc

SEQ ID NO: 1759859 - RNA, 19 nt, Artificial Sequence
  Description of Artificial Sequence: Synthetic oligonucleotide
uuuacugccuuuuagcucu

SEQ ID NO: 1759860 - RNA, 19 nt, Artificial Sequence
  Description of Artificial Sequence: Synthetic oligonucleotide
acuggcauaccuuuuauag

SEQ ID NO: 1759861 - RNA, 19 nt, Artificial Sequence
  Description of Artificial Sequence: Synthetic oligonucleotide
aaaagcagcaggcucccac

SEQ ID NO: 1759862 - RNA, 19 nt, Artificial Sequence
  Description of Artificial Sequence: Synthetic oligonucleotide
ucuuaaagccuccaacggg

SEQ ID NO: 1759863 - RNA, 19 nt, Artificial Sequence
  Description of Artificial Sequence: Synthetic oligonucleotide
agaaguaaaggaaauaaag

SEQ ID NO: 1759864 - RNA, 19 nt, Artificial Sequence
  Description of Artificial Sequence: Synthetic oligonucleotide
ugccuuuuagcucuuaaag

SEQ ID NO: 1759865 - RNA, 19 nt, Artificial Sequence
  Description of Artificial Sequence: Synthetic oligonucleotide
gauaaaguaggcuuucuca

SEQ ID NO: 1759866 - RNA, 19 nt, Artificial Sequence
  Description of Artificial Sequence: Synthetic oligonucleotide
aguagcaugaaucgcauca

SEQ ID NO: 1759867 - RNA, 19 nt, Artificial Sequence
  Description of Artificial Sequence: Synthetic oligonucleotide
aaagcagcaggcucccacc

SEQ ID NO: 1759868 - RNA, 19 nt, Artificial Sequence
  Description of Artificial Sequence: Synthetic oligonucleotide
guaaaggaaauaaaggcag

SEQ ID NO: 1759869 - RNA, 19 nt, Artificial Sequence
  Description of Artificial Sequence: Synthetic oligonucleotide
uacacugccaaaauacuug

SEQ ID NO: 1759870 - RNA, 19 nt, Artificial Sequence
  Description of Artificial Sequence: Synthetic oligonucleotide
cuaagagcucuacauaucg

SEQ ID NO: 1759871 - RNA, 19 nt, Artificial Sequence
  Description of Artificial Sequence: Synthetic oligonucleotide
aacgagagccacuuagcac

SEQ ID NO: 1759872 - RNA, 19 nt, Artificial Sequence
  Description of Artificial Sequence: Synthetic oligonucleotide
uuucccuuuaaccugacau

SEQ ID NO: 1759873 - RNA, 19 nt, Artificial Sequence
  Description of Artificial Sequence: Synthetic oligonucleotide
uaaccugacauauuuauau

SEQ ID NO: 1759874 - RNA, 19 nt, Artificial Sequence
  Description of Artificial Sequence: Synthetic oligonucleotide
uuuaaccugacauauuuau

SEQ ID NO: 1759875 - RNA, 19 nt, Artificial Sequence
  Description of Artificial Sequence: Synthetic oligonucleotide
aauggcgcagcagaaauag

SEQ ID NO: 1759876 - RNA, 19 nt, Artificial Sequence
  Description of Artificial Sequence: Synthetic oligonucleotide
aaggaaauaaaggcagccg

SEQ ID NO: 1759877 - RNA, 19 nt, Artificial Sequence
  Description of Artificial Sequence: Synthetic oligonucleotide
aagagcucuacauaucggu

SEQ ID NO: 1759878 - RNA, 19 nt, Artificial Sequence
  Description of Artificial Sequence: Synthetic oligonucleotide
aaacucauccaggauaaag

SEQ ID NO: 1759879 - RNA, 19 nt, Artificial Sequence
  Description of Artificial Sequence: Synthetic oligonucleotide
agcucuuaaagccuccaac

SEQ ID NO: 1759880 - RNA, 19 nt, Artificial Sequence
  Description of Artificial Sequence: Synthetic oligonucleotide
auguccagcucacauacac

SEQ ID NO: 1759881 - RNA, 19 nt, Artificial Sequence
  Description of Artificial Sequence: Synthetic oligonucleotide
uggcauaccuuuuauagac

SEQ ID NO: 1759882 - RNA, 19 nt, Artificial Sequence
  Description of Artificial Sequence: Synthetic oligonucleotide
uucccaauuccacagggcc

SEQ ID NO: 1759883 - RNA, 19 nt, Artificial Sequence
  Description of Artificial Sequence: Synthetic oligonucleotide
aauguuggaagagggaaug

SEQ ID NO: 1759884 - RNA, 19 nt, Artificial Sequence
  Description of Artificial Sequence: Synthetic oligonucleotide
gaauguuggaaugaagggc

SEQ ID NO: 1759885 - RNA, 19 nt, Artificial Sequence
  Description of Artificial Sequence: Synthetic oligonucleotide
gaagaugauguccagcuca

SEQ ID NO: 1759886 - RNA, 19 nt, Artificial Sequence
  Description of Artificial Sequence: Synthetic oligonucleotide
aguaaaggaaauaaaggca

SEQ ID NO: 1759887 - RNA, 19 nt, Artificial Sequence
  Description of Artificial Sequence: Synthetic oligonucleotide
uggcgcagcagaaauagag

SEQ ID NO: 1759888 - RNA, 19 nt, Artificial Sequence
  Description of Artificial Sequence: Synthetic oligonucleotide
auaccuuuuauagacaacu

SEQ ID NO: 1759889 - RNA, 19 nt, Artificial Sequence
  Description of Artificial Sequence: Synthetic oligonucleotide
gagcucuacauaucggugg

SEQ ID NO: 1759890 - RNA, 19 nt, Artificial Sequence
  Description of Artificial Sequence: Synthetic oligonucleotide
agcaugaaucgcaucaucc

SEQ ID NO: 1759891 - RNA, 19 nt, Artificial Sequence
  Description of Artificial Sequence: Synthetic oligonucleotide
acauuuuacugccuuuuag

SEQ ID NO: 1759892 - RNA, 19 nt, Artificial Sequence
  Description of Artificial Sequence: Synthetic oligonucleotide
gaaauagagacuggcauac

SEQ ID NO: 1759893 - RNA, 19 nt, Artificial Sequence
  Description of Artificial Sequence: Synthetic oligonucleotide
aaagguggaggguggagug

SEQ ID NO: 1759894 - RNA, 19 nt, Artificial Sequence
  Description of Artificial Sequence: Synthetic oligonucleotide
agagaaucugcccuggcug

SEQ ID NO: 1759895 - RNA, 19 nt, Artificial Sequence
  Description of Artificial Sequence: Synthetic oligonucleotide
ucuuccauggaggggaacg

SEQ ID NO: 1759896 - RNA, 19 nt, Artificial Sequence
  Description of Artificial Sequence: Synthetic oligonucleotide
aacaguagcaugaaucgca

SEQ ID NO: 1759897 - RNA, 19 nt, Artificial Sequence
  Description of Artificial Sequence: Synthetic oligonucleotide
agaaagcaggcccuucccc

SEQ ID NO: 1759898 - RNA, 19 nt, Artificial Sequence
  Description of Artificial Sequence: Synthetic oligonucleotide
uuuacuggugguuccuucc

SEQ ID NO: 1759899 - RNA, 19 nt, Artificial Sequence
  Description of Artificial Sequence: Synthetic oligonucleotide
ucuacauaucgguggauca

SEQ ID NO: 1759900 - RNA, 19 nt, Artificial Sequence
  Description of Artificial Sequence: Synthetic oligonucleotide
auaaaguaggcuuucucaa

SEQ ID NO: 1759901 - RNA, 19 nt, Artificial Sequence
  Description of Artificial Sequence: Synthetic oligonucleotide
ugucuugaccuucaauggc

SEQ ID NO: 1759902 - RNA, 19 nt, Artificial Sequence
  Description of Artificial Sequence: Synthetic oligonucleotide
uucacauugguucuuccau

SEQ ID NO: 1759903 - RNA, 19 nt, Artificial Sequence
  Description of Artificial Sequence: Synthetic oligonucleotide
auugguucuuccauggagg

SEQ ID NO: 1759904 - RNA, 19 nt, Artificial Sequence
  Description of Artificial Sequence: Synthetic oligonucleotide
uccaggucacauuuuacug

SEQ ID NO: 1759905 - RNA, 19 nt, Artificial Sequence
  Description of Artificial Sequence: Synthetic oligonucleotide
cuuaagcacacucuucuug

SEQ ID NO: 1759906 - RNA, 19 nt, Artificial Sequence
  Description of Artificial Sequence: Synthetic oligonucleotide
uuccuuuuauuuucagaag

SEQ ID NO: 1759907 - RNA, 19 nt, Artificial Sequence
  Description of Artificial Sequence: Synthetic oligonucleotide
uuugaggucccuccacucc

SEQ ID NO: 1759908 - RNA, 19 nt, Artificial Sequence
  Description of Artificial Sequence: Synthetic oligonucleotide
gcucuuaaagccuccaacg

SEQ ID NO: 1759909 - RNA, 19 nt, Artificial Sequence
  Description of Artificial Sequence: Synthetic oligonucleotide
cauugguucuuccauggag

SEQ ID NO: 1759910 - RNA, 19 nt, Artificial Sequence
  Description of Artificial Sequence: Synthetic oligonucleotide
aaauagagacuggcauacc

SEQ ID NO: 1759911 - RNA, 19 nt, Artificial Sequence
  Description of Artificial Sequence: Synthetic oligonucleotide
ucaauggcgcagcagaaau

SEQ ID NO: 1759912 - RNA, 19 nt, Artificial Sequence
  Description of Artificial Sequence: Synthetic oligonucleotide
ucccggaccauuuucuucc

SEQ ID NO: 1759913 - RNA, 19 nt, Artificial Sequence
  Description of Artificial Sequence: Synthetic oligonucleotide
uccaccaccguccacgcga

SEQ ID NO: 1759914 - RNA, 19 nt, Artificial Sequence
  Description of Artificial Sequence: Synthetic oligonucleotide
ugugaucagcucauugucu

SEQ ID NO: 1759915 - RNA, 19 nt, Artificial Sequence
  Description of Artificial Sequence: Synthetic oligonucleotide
cuuaaagccuccaacggga

SEQ ID NO: 1759916 - RNA, 19 nt, Artificial Sequence
  Description of Artificial Sequence: Synthetic oligonucleotide
uuuuacugccuuuuagcuc

SEQ ID NO: 1759917 - RNA, 19 nt, Artificial Sequence
  Description of Artificial Sequence: Synthetic oligonucleotide
cacaucuugggcuuucgag

SEQ ID NO: 1759918 - RNA, 19 nt, Artificial Sequence
  Description of Artificial Sequence: Synthetic oligonucleotide
acuggugguuccuuccugg

SEQ ID NO: 1759919 - RNA, 19 nt, Artificial Sequence
  Description of Artificial Sequence: Synthetic oligonucleotide
agaaauagagacuggcaua

SEQ ID NO: 1759920 - RNA, 19 nt, Artificial Sequence
  Description of Artificial Sequence: Synthetic oligonucleotide
uggacauccccacccauca

SEQ ID NO: 1759921 - RNA, 19 nt, Artificial Sequence
  Description of Artificial Sequence: Synthetic oligonucleotide
accugacauauuuauauau

SEQ ID NO: 1759922 - RNA, 19 nt, Artificial Sequence
  Description of Artificial Sequence: Synthetic oligonucleotide
auccaggucacauuuuacu

SEQ ID NO: 1759923 - RNA, 19 nt, Artificial Sequence
  Description of Artificial Sequence: Synthetic oligonucleotide
gucuugaccuucaauggcg

SEQ ID NO: 1759924 - RNA, 19 nt, Artificial Sequence
  Description of Artificial Sequence: Synthetic oligonucleotide
guccagcucacauacacug

SEQ ID NO: 1759925 - RNA, 19 nt, Artificial Sequence
  Description of Artificial Sequence: Synthetic oligonucleotide
ucuaagagcucuacauauc

SEQ ID NO: 1759926 - RNA, 19 nt, Artificial Sequence
  Description of Artificial Sequence: Synthetic oligonucleotide
uuaaccugacauauuuaua

SEQ ID NO: 1759927 - RNA, 19 nt, Artificial Sequence
  Description of Artificial Sequence: Synthetic oligonucleotide
ucuugaccuucaauggcgc

SEQ ID NO: 1759928 - RNA, 19 nt, Artificial Sequence
  Description of Artificial Sequence: Synthetic oligonucleotide
agaaaagcagcaggcuccc

SEQ ID NO: 1759929 - RNA, 19 nt, Artificial Sequence
  Description of Artificial Sequence: Synthetic oligonucleotide
ugucuaagagcucuacaua

SEQ ID NO: 1759930 - RNA, 19 nt, Artificial Sequence
  Description of Artificial Sequence: Synthetic oligonucleotide
agggaaaaccccucccagg

SEQ ID NO: 1759931 - RNA, 19 nt, Artificial Sequence
  Description of Artificial Sequence: Synthetic oligonucleotide
uuugcagccgaaguuuccc

SEQ ID NO: 1759932 - RNA, 19 nt, Artificial Sequence
  Description of Artificial Sequence: Synthetic oligonucleotide
gauagggccagugucccag

SEQ ID NO: 1759933 - RNA, 19 nt, Artificial Sequence
  Description of Artificial Sequence: Synthetic oligonucleotide
accaccguccacgcgaugc

SEQ ID NO: 1759934 - RNA, 19 nt, Artificial Sequence
  Description of Artificial Sequence: Synthetic oligonucleotide
ugaagaaaagcagcaggcu

SEQ ID NO: 1759935 - RNA, 19 nt, Artificial Sequence
  Description of Artificial Sequence: Synthetic oligonucleotide
gagggaaaaccccucccag

SEQ ID NO: 1759936 - RNA, 19 nt, Artificial Sequence
  Description of Artificial Sequence: Synthetic oligonucleotide
ucaauggccuuaagcacac

SEQ ID NO: 1759937 - RNA, 19 nt, Artificial Sequence
  Description of Artificial Sequence: Synthetic oligonucleotide
acugcgcggcgacucaucc

SEQ ID NO: 1759938 - RNA, 19 nt, Artificial Sequence
  Description of Artificial Sequence: Synthetic oligonucleotide
caacgggaaagguggaggg

SEQ ID NO: 1759939 - RNA, 19 nt, Artificial Sequence
  Description of Artificial Sequence: Synthetic oligonucleotide
ccuccaacgggaaaggugg

SEQ ID NO: 1759940 - RNA, 19 nt, Artificial Sequence
  Description of Artificial Sequence: Synthetic oligonucleotide
aagggccggagccacagcu

SEQ ID NO: 1759941 - RNA, 19 nt, Artificial Sequence
  Description of Artificial Sequence: Synthetic oligonucleotide
agggaauguuggaagaggg

SEQ ID NO: 1759942 - RNA, 19 nt, Artificial Sequence
  Description of Artificial Sequence: Synthetic oligonucleotide
cugcucaauggccuuaagc

SEQ ID NO: 1759943 - RNA, 19 nt, Artificial Sequence
  Description of Artificial Sequence: Synthetic oligonucleotide
uccuuccuggcucuggcug

SEQ ID NO: 1759944 - RNA, 19 nt, Artificial Sequence
  Description of Artificial Sequence: Synthetic oligonucleotide
gaaacaguccccaagugcu

SEQ ID NO: 1759945 - RNA, 19 nt, Artificial Sequence
  Description of Artificial Sequence: Synthetic oligonucleotide
gaacgagagccacuuagca

SEQ ID NO: 1759946 - RNA, 19 nt, Artificial Sequence
  Description of Artificial Sequence: Synthetic oligonucleotide
agagggaaaaccccuccca

SEQ ID NO: 1759947 - RNA, 19 nt, Artificial Sequence
  Description of Artificial Sequence: Synthetic oligonucleotide
cuuccaaaggugaggcggc

SEQ ID NO: 1759948 - RNA, 19 nt, Artificial Sequence
  Description of Artificial Sequence: Synthetic oligonucleotide
uccauggaggggaacgaga

SEQ ID NO: 1759949 - RNA, 19 nt, Artificial Sequence
  Description of Artificial Sequence: Synthetic oligonucleotide
aguugaagaugauguccag

SEQ ID NO: 1759950 - RNA, 19 nt, Artificial Sequence
  Description of Artificial Sequence: Synthetic oligonucleotide
uguuggaaugaagggccgg

SEQ ID NO: 1759951 - RNA, 19 nt, Artificial Sequence
  Description of Artificial Sequence: Synthetic oligonucleotide
cauaccuuuuauagacaac

SEQ ID NO: 1759952 - RNA, 19 nt, Artificial Sequence
  Description of Artificial Sequence: Synthetic oligonucleotide
acggggcuaugccaggccc

SEQ ID NO: 1759953 - RNA, 19 nt, Artificial Sequence
  Description of Artificial Sequence: Synthetic oligonucleotide
gggaacgagagccacuuag

SEQ ID NO: 1759954 - RNA, 19 nt, Artificial Sequence
  Description of Artificial Sequence: Synthetic oligonucleotide
gagagggaaaaccccuccc

SEQ ID NO: 1759955 - RNA, 19 nt, Artificial Sequence
  Description of Artificial Sequence: Synthetic oligonucleotide
acacugccaaaauacuugu

SEQ ID NO: 1759956 - RNA, 19 nt, Artificial Sequence
  Description of Artificial Sequence: Synthetic oligonucleotide
cuaugccaggcccaucucc

SEQ ID NO: 1759957 - RNA, 19 nt, Artificial Sequence
  Description of Artificial Sequence: Synthetic oligonucleotide
ucccuuuaaccugacauau

SEQ ID NO: 1759958 - RNA, 19 nt, Artificial Sequence
  Description of Artificial Sequence: Synthetic oligonucleotide
gaacaguagcaugaaucgc

SEQ ID NO: 1759959 - RNA, 19 nt, Artificial Sequence
  Description of Artificial Sequence: Synthetic oligonucleotide
uuacuggugguuccuuccu

SEQ ID NO: 1759960 - RNA, 19 nt, Artificial Sequence
  Description of Artificial Sequence: Synthetic oligonucleotide
uucccuuuaaccugacaua

SEQ ID NO: 1759961 - RNA, 19 nt, Artificial Sequence
  Description of Artificial Sequence: Synthetic oligonucleotide
caggcucccaccaagagaa

SEQ ID NO: 1759962 - RNA, 19 nt, Artificial Sequence
  Description of Artificial Sequence: Synthetic oligonucleotide
ucuccggccaccguaggag

SEQ ID NO: 1759963 - RNA, 19 nt, Artificial Sequence
  Description of Artificial Sequence: Synthetic oligonucleotide
uuggagguguccuggacau

SEQ ID NO: 1759964 - RNA, 19 nt, Artificial Sequence
  Description of Artificial Sequence: Synthetic oligonucleotide
cuugucuuggcuuucccaa

SEQ ID NO: 1759965 - RNA, 19 nt, Artificial Sequence
  Description of Artificial Sequence: Synthetic oligonucleotide
uucgagccagcacaaccug

SEQ ID NO: 1759966 - RNA, 19 nt, Artificial Sequence
  Description of Artificial Sequence: Synthetic oligonucleotide
ucccaggcagagaaucugc

SEQ ID NO: 1759967 - RNA, 19 nt, Artificial Sequence
  Description of Artificial Sequence: Synthetic oligonucleotide
ugacugggguucacauugg

SEQ ID NO: 1759968 - RNA, 19 nt, Artificial Sequence
  Description of Artificial Sequence: Synthetic oligonucleotide
gggccagugucccagaaag

SEQ ID NO: 1759969 - RNA, 19 nt, Artificial Sequence
  Description of Artificial Sequence: Synthetic oligonucleotide
agcucuacauaucggugga

SEQ ID NO: 1759970 - RNA, 19 nt, Artificial Sequence
  Description of Artificial Sequence: Synthetic oligonucleotide
uucagaaguaaaggaaaua

SEQ ID NO: 1759971 - RNA, 19 nt, Artificial Sequence
  Description of Artificial Sequence: Synthetic oligonucleotide
gugugaucagcucauuguc

SEQ ID NO: 1759972 - RNA, 19 nt, Artificial Sequence
  Description of Artificial Sequence: Synthetic oligonucleotide
gggaaaaccccucccaggc

SEQ ID NO: 1759973 - RNA, 19 nt, Artificial Sequence
  Description of Artificial Sequence: Synthetic oligonucleotide
ugcgcggcgacucauccuc

SEQ ID NO: 1759974 - RNA, 19 nt, Artificial Sequence
  Description of Artificial Sequence: Synthetic oligonucleotide
ugggguucacauugguucu

SEQ ID NO: 1759975 - RNA, 19 nt, Artificial Sequence
  Description of Artificial Sequence: Synthetic oligonucleotide
uguccagcucacauacacu

SEQ ID NO: 1759976 - RNA, 19 nt, Artificial Sequence
  Description of Artificial Sequence: Synthetic oligonucleotide
uaucgguggaucagcucca

SEQ ID NO: 1759977 - RNA, 19 nt, Artificial Sequence
  Description of Artificial Sequence: Synthetic oligonucleotide
uaagcacacucuucuugga

SEQ ID NO: 1759978 - RNA, 19 nt, Artificial Sequence
  Description of Artificial Sequence: Synthetic oligonucleotide
uuaaagccuccaacgggaa

SEQ ID NO: 1759979 - RNA, 19 nt, Artificial Sequence
  Description of Artificial Sequence: Synthetic oligonucleotide
cuccuuccaaaggugaggc

SEQ ID NO: 1759980 - RNA, 19 nt, Artificial Sequence
  Description of Artificial Sequence: Synthetic oligonucleotide
uuccccugccggcugaaca

SEQ ID NO: 1759981 - RNA, 19 nt, Artificial Sequence
  Description of Artificial Sequence: Synthetic oligonucleotide
uagcaugaaucgcaucauc

SEQ ID NO: 1759982 - RNA, 19 nt, Artificial Sequence
  Description of Artificial Sequence: Synthetic oligonucleotide
uuagcucuuaaagccucca

SEQ ID NO: 1759983 - RNA, 19 nt, Artificial Sequence
  Description of Artificial Sequence: Synthetic oligonucleotide
uacuggugguuccuuccug

SEQ ID NO: 1759984 - RNA, 19 nt, Artificial Sequence
  Description of Artificial Sequence: Synthetic oligonucleotide
uuggaaugaagggccggag

SEQ ID NO: 1759985 - RNA, 19 nt, Artificial Sequence
  Description of Artificial Sequence: Synthetic oligonucleotide
ccaggucacauuuuacugc

SEQ ID NO: 1759986 - RNA, 19 nt, Artificial Sequence
  Description of Artificial Sequence: Synthetic oligonucleotide
uggccuuaagcacacucuu

SEQ ID NO: 1759987 - RNA, 19 nt, Artificial Sequence
  Description of Artificial Sequence: Synthetic oligonucleotide
cucuacauaucgguggauc

SEQ ID NO: 1759988 - RNA, 19 nt, Artificial Sequence
  Description of Artificial Sequence: Synthetic oligonucleotide
uguuggaagagggaauguu

SEQ ID NO: 1759989 - RNA, 19 nt, Artificial Sequence
  Description of Artificial Sequence: Synthetic oligonucleotide
gacauccccacccaucaaa

SEQ ID NO: 1759990 - RNA, 19 nt, Artificial Sequence
  Description of Artificial Sequence: Synthetic oligonucleotide
cauccaggucacauuuuac

SEQ ID NO: 1759991 - RNA, 19 nt, Artificial Sequence
  Description of Artificial Sequence: Synthetic oligonucleotide
gagcccuggaaaccuuucc

SEQ ID NO: 1759992 - RNA, 19 nt, Artificial Sequence
  Description of Artificial Sequence: Synthetic oligonucleotide
acgggaaagguggagggug

SEQ ID NO: 1759993 - RNA, 19 nt, Artificial Sequence
  Description of Artificial Sequence: Synthetic oligonucleotide
auauuuacuggugguuccu

SEQ ID NO: 1759994 - RNA, 19 nt, Artificial Sequence
  Description of Artificial Sequence: Synthetic oligonucleotide
agagcucuacauaucggug

SEQ ID NO: 1759995 - RNA, 19 nt, Artificial Sequence
  Description of Artificial Sequence: Synthetic oligonucleotide
acuggagcccaggaggaag

SEQ ID NO: 1759996 - RNA, 19 nt, Artificial Sequence
  Description of Artificial Sequence: Synthetic oligonucleotide
ggugauagggccagugucc

SEQ ID NO: 1759997 - RNA, 19 nt, Artificial Sequence
  Description of Artificial Sequence: Synthetic oligonucleotide
cuuugaggucccuccacuc

SEQ ID NO: 1759998 - RNA, 19 nt, Artificial Sequence
  Description of Artificial Sequence: Synthetic oligonucleotide
cagcacaaccugcaugagc

SEQ ID NO: 1759999 - RNA, 19 nt, Artificial Sequence
  Description of Artificial Sequence: Synthetic oligonucleotide
gccaaaauacuugucuaag

SEQ ID NO: 1760000 - RNA, 19 nt, Artificial Sequence
  Description of Artificial Sequence: Synthetic oligonucleotide
ggagguguccuggacaucc

SEQ ID NO: 1760001 - RNA, 19 nt, Artificial Sequence
  Description of Artificial Sequence: Synthetic oligonucleotide
guagguuuuggggcagagg

SEQ ID NO: 1760002 - RNA, 19 nt, Artificial Sequence
  Description of Artificial Sequence: Synthetic oligonucleotide
guuccuuccuggcucuggc

SEQ ID NO: 1760003 - RNA, 19 nt, Artificial Sequence
  Description of Artificial Sequence: Synthetic oligonucleotide
uggcugacggggcuaugcc

SEQ ID NO: 1760004 - RNA, 19 nt, Artificial Sequence
  Description of Artificial Sequence: Synthetic oligonucleotide
uuuuggggcagaggggaga

SEQ ID NO: 1760005 - RNA, 19 nt, Artificial Sequence
  Description of Artificial Sequence: Synthetic oligonucleotide
ugccggcugaacaguagca

SEQ ID NO: 1760006 - RNA, 19 nt, Artificial Sequence
  Description of Artificial Sequence: Synthetic oligonucleotide
cuggcauaccuuuuauaga

SEQ ID NO: 1760007 - RNA, 19 nt, Artificial Sequence
  Description of Artificial Sequence: Synthetic oligonucleotide
ggauaaaguaggcuuucuc

SEQ ID NO: 1760008 - RNA, 19 nt, Artificial Sequence
  Description of Artificial Sequence: Synthetic oligonucleotide
agcucacauacacugccaa

SEQ ID NO: 1760009 - RNA, 19 nt, Artificial Sequence
  Description of Artificial Sequence: Synthetic oligonucleotide
acugccuuuuagcucuuaa

SEQ ID NO: 1760010 - RNA, 19 nt, Artificial Sequence
  Description of Artificial Sequence: Synthetic oligonucleotide
aaacaguccccaagugcug

SEQ ID NO: 1760011 - RNA, 19 nt, Artificial Sequence
  Description of Artificial Sequence: Synthetic oligonucleotide
ggaauguuggaagagggaa

SEQ ID NO: 1760012 - RNA, 19 nt, Artificial Sequence
  Description of Artificial Sequence: Synthetic oligonucleotide
uuccauggaggggaacgag

SEQ ID NO: 1760013 - RNA, 19 nt, Artificial Sequence
  Description of Artificial Sequence: Synthetic oligonucleotide
cagaaauagagacuggcau

SEQ ID NO: 1760014 - RNA, 19 nt, Artificial Sequence
  Description of Artificial Sequence: Synthetic oligonucleotide
gucccuccacuccaggaag

SEQ ID NO: 1760015 - RNA, 19 nt, Artificial Sequence
  Description of Artificial Sequence: Synthetic oligonucleotide
accccucccaggcagagaa

SEQ ID NO: 1760016 - RNA, 19 nt, Artificial Sequence
  Description of Artificial Sequence: Synthetic oligonucleotide
uagcucuuaaagccuccaa

SEQ ID NO: 1760017 - RNA, 19 nt, Artificial Sequence
  Description of Artificial Sequence: Synthetic oligonucleotide
uucaauggcgcagcagaaa

SEQ ID NO: 1760018 - RNA, 19 nt, Artificial Sequence
  Description of Artificial Sequence: Synthetic oligonucleotide
ggugguuccuuccuggcuc

SEQ ID NO: 1760019 - RNA, 19 nt, Artificial Sequence
  Description of Artificial Sequence: Synthetic oligonucleotide
cauggaggggaacgagagc

SEQ ID NO: 1760020 - RNA, 19 nt, Artificial Sequence
  Description of Artificial Sequence: Synthetic oligonucleotide
cugccggcugaacaguagc

SEQ ID NO: 1760021 - RNA, 19 nt, Artificial Sequence
  Description of Artificial Sequence: Synthetic oligonucleotide
cauaucgguggaucagcuc

SEQ ID NO: 1760022 - RNA, 19 nt, Artificial Sequence
  Description of Artificial Sequence: Synthetic oligonucleotide
uccuuguccgagguggcca

SEQ ID NO: 1760023 - RNA, 19 nt, Artificial Sequence
  Description of Artificial Sequence: Synthetic oligonucleotide
gaaucgcaucauccugcag

SEQ ID NO: 1760024 - RNA, 19 nt, Artificial Sequence
  Description of Artificial Sequence: Synthetic oligonucleotide
ucucaaaguugaagaugau

SEQ ID NO: 1760025 - RNA, 19 nt, Artificial Sequence
  Description of Artificial Sequence: Synthetic oligonucleotide
aaaccccucccaggcagag

SEQ ID NO: 1760026 - RNA, 19 nt, Artificial Sequence
  Description of Artificial Sequence: Synthetic oligonucleotide
auggccuuaagcacacucu

SEQ ID NO: 1760027 - RNA, 19 nt, Artificial Sequence
  Description of Artificial Sequence: Synthetic oligonucleotide
cucccaccaagagaagggg

SEQ ID NO: 1760028 - RNA, 19 nt, Artificial Sequence
  Description of Artificial Sequence: Synthetic oligonucleotide
ggcaggagagggaaaaccc

SEQ ID NO: 1760029 - RNA, 19 nt, Artificial Sequence
  Description of Artificial Sequence: Synthetic oligonucleotide
ucccuccacuccaggaagc

SEQ ID NO: 1760030 - RNA, 19 nt, Artificial Sequence
  Description of Artificial Sequence: Synthetic oligonucleotide
uucuuggagguguccugga

SEQ ID NO: 1760031 - RNA, 19 nt, Artificial Sequence
  Description of Artificial Sequence: Synthetic oligonucleotide
guggagugagggaauguug

SEQ ID NO: 1760032 - RNA, 19 nt, Artificial Sequence
  Description of Artificial Sequence: Synthetic oligonucleotide
cuggugguuccuuccuggc

SEQ ID NO: 1760033 - RNA, 19 nt, Artificial Sequence
  Description of Artificial Sequence: Synthetic oligonucleotide
uccacuccaggaagcugca

SEQ ID NO: 1760034 - RNA, 19 nt, Artificial Sequence
  Description of Artificial Sequence: Synthetic oligonucleotide
gacaacuuugaggucccuc

SEQ ID NO: 1760035 - RNA, 19 nt, Artificial Sequence
  Description of Artificial Sequence: Synthetic oligonucleotide
auguuggaaugaagggccg

SEQ ID NO: 1760036 - RNA, 19 nt, Artificial Sequence
  Description of Artificial Sequence: Synthetic oligonucleotide
cuuuaaccugacauauuua

SEQ ID NO: 1760037 - RNA, 19 nt, Artificial Sequence
  Description of Artificial Sequence: Synthetic oligonucleotide
uucccuccagguggcaagg

SEQ ID NO: 1760038 - RNA, 19 nt, Artificial Sequence
  Description of Artificial Sequence: Synthetic oligonucleotide
gggcuuucgagccagcaca

SEQ ID NO: 1760039 - RNA, 19 nt, Artificial Sequence
  Description of Artificial Sequence: Synthetic oligonucleotide
guccgagguggccagguac

SEQ ID NO: 1760040 - RNA, 19 nt, Artificial Sequence
  Description of Artificial Sequence: Synthetic oligonucleotide
gcauaccuuuuauagacaa

SEQ ID NO: 1760041 - RNA, 19 nt, Artificial Sequence
  Description of Artificial Sequence: Synthetic oligonucleotide
cucuugucuuggcuuuccc

SEQ ID NO: 1760042 - RNA, 19 nt, Artificial Sequence
  Description of Artificial Sequence: Synthetic oligonucleotide
ccuucaauggcgcagcaga

SEQ ID NO: 1760043 - RNA, 19 nt, Artificial Sequence
  Description of Artificial Sequence: Synthetic oligonucleotide
cuauggggagggguagagg

SEQ ID NO: 1760044 - RNA, 19 nt, Artificial Sequence
  Description of Artificial Sequence: Synthetic oligonucleotide
cacgcgaugcgggaguuug

SEQ ID NO: 1760045 - RNA, 19 nt, Artificial Sequence
  Description of Artificial Sequence: Synthetic oligonucleotide
gguuuuggggcagagggga

SEQ ID NO: 1760046 - RNA, 19 nt, Artificial Sequence
  Description of Artificial Sequence: Synthetic oligonucleotide
gaggucccuccacuccagg

SEQ ID NO: 1760047 - RNA, 19 nt, Artificial Sequence
  Description of Artificial Sequence: Synthetic oligonucleotide
caggauaaaguaggcuuuc

SEQ ID NO: 1760048 - RNA, 19 nt, Artificial Sequence
  Description of Artificial Sequence: Synthetic oligonucleotide
gaaagguggaggguggagu

SEQ ID NO: 1760049 - RNA, 19 nt, Artificial Sequence
  Description of Artificial Sequence: Synthetic oligonucleotide
ugcugucucuugucuuggc

SEQ ID NO: 1760050 - RNA, 19 nt, Artificial Sequence
  Description of Artificial Sequence: Synthetic oligonucleotide
cuuccucuccuuguccgag

SEQ ID NO: 1760051 - RNA, 19 nt, Artificial Sequence
  Description of Artificial Sequence: Synthetic oligonucleotide
ggaacgagagccacuuagc

SEQ ID NO: 1760052 - RNA, 19 nt, Artificial Sequence
  Description of Artificial Sequence: Synthetic oligonucleotide
uccaaaggugaggcggcug

SEQ ID NO: 1760053 - RNA, 19 nt, Artificial Sequence
  Description of Artificial Sequence: Synthetic oligonucleotide
agcucauugucuugaccuu

SEQ ID NO: 1760054 - RNA, 19 nt, Artificial Sequence
  Description of Artificial Sequence: Synthetic oligonucleotide
gcggcugaagaaaagcagc

SEQ ID NO: 1760055 - RNA, 19 nt, Artificial Sequence
  Description of Artificial Sequence: Synthetic oligonucleotide
gggugauagggccaguguc

SEQ ID NO: 1760056 - RNA, 19 nt, Artificial Sequence
  Description of Artificial Sequence: Synthetic oligonucleotide
cucccggaccauuuucuuc

SEQ ID NO: 1760057 - RNA, 19 nt, Artificial Sequence
  Description of Artificial Sequence: Synthetic oligonucleotide
gagggaauguuggaaugaa

SEQ ID NO: 1760058 - RNA, 19 nt, Artificial Sequence
  Description of Artificial Sequence: Synthetic oligonucleotide
uggcuauggggagggguag

SEQ ID NO: 1760059 - RNA, 19 nt, Artificial Sequence
  Description of Artificial Sequence: Synthetic oligonucleotide
acauaucgguggaucagcu

SEQ ID NO: 1760060 - RNA, 19 nt, Artificial Sequence
  Description of Artificial Sequence: Synthetic oligonucleotide
agagcccuggaaaccuuuc

SEQ ID NO: 1760061 - RNA, 19 nt, Artificial Sequence
  Description of Artificial Sequence: Synthetic oligonucleotide
agcuccuuccaaaggugag

SEQ ID NO: 1760062 - RNA, 19 nt, Artificial Sequence
  Description of Artificial Sequence: Synthetic oligonucleotide
ccaacgggaaagguggagg

SEQ ID NO: 1760063 - RNA, 19 nt, Artificial Sequence
  Description of Artificial Sequence: Synthetic oligonucleotide
ucccucuccggccaccgua

SEQ ID NO: 1760064 - RNA, 19 nt, Artificial Sequence
  Description of Artificial Sequence: Synthetic oligonucleotide
cugacggggcuaugccagg

SEQ ID NO: 1760065 - RNA, 19 nt, Artificial Sequence
  Description of Artificial Sequence: Synthetic oligonucleotide
cacugccaaaauacuuguc

SEQ ID NO: 1760066 - RNA, 19 nt, Artificial Sequence
  Description of Artificial Sequence: Synthetic oligonucleotide
cagccgaaguuuccccugc

SEQ ID NO: 1760067 - RNA, 19 nt, Artificial Sequence
  Description of Artificial Sequence: Synthetic oligonucleotide
accuucaauggcgcagcag

SEQ ID NO: 1760068 - RNA, 19 nt, Artificial Sequence
  Description of Artificial Sequence: Synthetic oligonucleotide
aaaaccccucccaggcaga

SEQ ID NO: 1760069 - RNA, 19 nt, Artificial Sequence
  Description of Artificial Sequence: Synthetic oligonucleotide
accuuucccuuuaaccuga

SEQ ID NO: 1760070 - RNA, 19 nt, Artificial Sequence
  Description of Artificial Sequence: Synthetic oligonucleotide
uuccuuccuggcucuggcu

SEQ ID NO: 1760071 - RNA, 19 nt, Artificial Sequence
  Description of Artificial Sequence: Synthetic oligonucleotide
aggcggcugaagaaaagca

SEQ ID NO: 1760072 - RNA, 19 nt, Artificial Sequence
  Description of Artificial Sequence: Synthetic oligonucleotide
gaauguuggaagagggaau

SEQ ID NO: 1760073 - RNA, 19 nt, Artificial Sequence
  Description of Artificial Sequence: Synthetic oligonucleotide
gagcucccggaccauuuuc

SEQ ID NO: 1760074 - RNA, 19 nt, Artificial Sequence
  Description of Artificial Sequence: Synthetic oligonucleotide
auguuggaagagggaaugu

SEQ ID NO: 1760075 - RNA, 19 nt, Artificial Sequence
  Description of Artificial Sequence: Synthetic oligonucleotide
gcagaaacaguccccaagu

SEQ ID NO: 1760076 - RNA, 19 nt, Artificial Sequence
  Description of Artificial Sequence: Synthetic oligonucleotide
aucuugggcuuucgagcca

SEQ ID NO: 1760077 - RNA, 19 nt, Artificial Sequence
  Description of Artificial Sequence: Synthetic oligonucleotide
cuggacacuggagcccagg

SEQ ID NO: 1760078 - RNA, 19 nt, Artificial Sequence
  Description of Artificial Sequence: Synthetic oligonucleotide
ugacggggcuaugccaggc

SEQ ID NO: 1760079 - RNA, 19 nt, Artificial Sequence
  Description of Artificial Sequence: Synthetic oligonucleotide
cuccggccaccguaggagc

SEQ ID NO: 1760080 - RNA, 19 nt, Artificial Sequence
  Description of Artificial Sequence: Synthetic oligonucleotide
guuuuggggcagaggggag

SEQ ID NO: 1760081 - RNA, 19 nt, Artificial Sequence
  Description of Artificial Sequence: Synthetic oligonucleotide
aggggaacgagagccacuu

SEQ ID NO: 1760082 - RNA, 19 nt, Artificial Sequence
  Description of Artificial Sequence: Synthetic oligonucleotide
caacuuugaggucccucca

SEQ ID NO: 1760083 - RNA, 19 nt, Artificial Sequence
  Description of Artificial Sequence: Synthetic oligonucleotide
cuggcuauggggaggggua

SEQ ID NO: 1760084 - RNA, 19 nt, Artificial Sequence
  Description of Artificial Sequence: Synthetic oligonucleotide
gccuuaagcacacucuucu

SEQ ID NO: 1760085 - RNA, 19 nt, Artificial Sequence
  Description of Artificial Sequence: Synthetic oligonucleotide
uuguccgagguggccaggu

SEQ ID NO: 1760086 - RNA, 19 nt, Artificial Sequence
  Description of Artificial Sequence: Synthetic oligonucleotide
ucgguggaucagcuccagu

SEQ ID NO: 1760087 - RNA, 19 nt, Artificial Sequence
  Description of Artificial Sequence: Synthetic oligonucleotide
cgguggaucagcuccagug

SEQ ID NO: 1760088 - RNA, 19 nt, Artificial Sequence
  Description of Artificial Sequence: Synthetic oligonucleotide
accguccacgcgaugcggg

SEQ ID NO: 1760089 - RNA, 19 nt, Artificial Sequence
  Description of Artificial Sequence: Synthetic oligonucleotide
gaaguuuccccugccggcu

SEQ ID NO: 1760090 - RNA, 19 nt, Artificial Sequence
  Description of Artificial Sequence: Synthetic oligonucleotide
ggguagagguagguuuugg

SEQ ID NO: 1760091 - RNA, 19 nt, Artificial Sequence
  Description of Artificial Sequence: Synthetic oligonucleotide
caggagagggaaaaccccu

SEQ ID NO: 1760092 - RNA, 19 nt, Artificial Sequence
  Description of Artificial Sequence: Synthetic oligonucleotide
gacacugcgcggcgacuca

SEQ ID NO: 1760093 - RNA, 19 nt, Artificial Sequence
  Description of Artificial Sequence: Synthetic oligonucleotide
gcaugaaucgcaucauccu

SEQ ID NO: 1760094 - RNA, 19 nt, Artificial Sequence
  Description of Artificial Sequence: Synthetic oligonucleotide
uuccaaaggugaggcggcu

SEQ ID NO: 1760095 - RNA, 19 nt, Artificial Sequence
  Description of Artificial Sequence: Synthetic oligonucleotide
ggcacgucccucuccggcc

SEQ ID NO: 1760096 - RNA, 19 nt, Artificial Sequence
  Description of Artificial Sequence: Synthetic oligonucleotide
aaagagcccuggaaaccuu

SEQ ID NO: 1760097 - RNA, 19 nt, Artificial Sequence
  Description of Artificial Sequence: Synthetic oligonucleotide
gguagguuuuggggcagag

SEQ ID NO: 1760098 - RNA, 19 nt, Artificial Sequence
  Description of Artificial Sequence: Synthetic oligonucleotide
gaugacugggguucacauu

SEQ ID NO: 1760099 - RNA, 19 nt, Artificial Sequence
  Description of Artificial Sequence: Synthetic oligonucleotide
agggccagugucccagaaa

SEQ ID NO: 1760100 - RNA, 19 nt, Artificial Sequence
  Description of Artificial Sequence: Synthetic oligonucleotide
cuugggcuuucgagccagc

SEQ ID NO: 1760101 - RNA, 19 nt, Artificial Sequence
  Description of Artificial Sequence: Synthetic oligonucleotide
ggaaauaaaggcagccgcu

SEQ ID NO: 1760102 - RNA, 19 nt, Artificial Sequence
  Description of Artificial Sequence: Synthetic oligonucleotide
gcuauggggagggguagag

SEQ ID NO: 1760103 - RNA, 19 nt, Artificial Sequence
  Description of Artificial Sequence: Synthetic oligonucleotide
auagggccagugucccaga

SEQ ID NO: 1760104 - RNA, 19 nt, Artificial Sequence
  Description of Artificial Sequence: Synthetic oligonucleotide
caagugcugucucuugucu

SEQ ID NO: 1760105 - RNA, 19 nt, Artificial Sequence
  Description of Artificial Sequence: Synthetic oligonucleotide
gggccggagccacagcucc

SEQ ID NO: 1760106 - RNA, 19 nt, Artificial Sequence
  Description of Artificial Sequence: Synthetic oligonucleotide
cuccuuguccgagguggcc

SEQ ID NO: 1760107 - RNA, 19 nt, Artificial Sequence
  Description of Artificial Sequence: Synthetic oligonucleotide
cuuucccuuuaaccugaca

SEQ ID NO: 1760108 - RNA, 19 nt, Artificial Sequence
  Description of Artificial Sequence: Synthetic oligonucleotide
aucgguggaucagcuccag

SEQ ID NO: 1760109 - RNA, 19 nt, Artificial Sequence
  Description of Artificial Sequence: Synthetic oligonucleotide
gccuccaacgggaaaggug

SEQ ID NO: 1760110 - RNA, 19 nt, Artificial Sequence
  Description of Artificial Sequence: Synthetic oligonucleotide
cuuccauggaggggaacga

SEQ ID NO: 1760111 - RNA, 19 nt, Artificial Sequence
  Description of Artificial Sequence: Synthetic oligonucleotide
cagccuccggcccggcacg

SEQ ID NO: 1760112 - RNA, 19 nt, Artificial Sequence
  Description of Artificial Sequence: Synthetic oligonucleotide
gagguggccagguaccauu

SEQ ID NO: 1760113 - RNA, 19 nt, Artificial Sequence
  Description of Artificial Sequence: Synthetic oligonucleotide
gaccuucaauggcgcagca

SEQ ID NO: 1760114 - RNA, 19 nt, Artificial Sequence
  Description of Artificial Sequence: Synthetic oligonucleotide
ggugaggcggcugaagaaa

SEQ ID NO: 1760115 - RNA, 19 nt, Artificial Sequence
  Description of Artificial Sequence: Synthetic oligonucleotide
ggcuaugccaggcccaucu

SEQ ID NO: 1760116 - RNA, 19 nt, Artificial Sequence
  Description of Artificial Sequence: Synthetic oligonucleotide
uggcccacuccaccaccgu

SEQ ID NO: 1760117 - RNA, 19 nt, Artificial Sequence
  Description of Artificial Sequence: Synthetic oligonucleotide
ccuuuaaccugacauauuu

SEQ ID NO: 1760118 - RNA, 19 nt, Artificial Sequence
  Description of Artificial Sequence: Synthetic oligonucleotide
ggaaaaccccucccaggca

SEQ ID NO: 1760119 - RNA, 19 nt, Artificial Sequence
  Description of Artificial Sequence: Synthetic oligonucleotide
uucuuccauggaggggaac

SEQ ID NO: 1760120 - RNA, 19 nt, Artificial Sequence
  Description of Artificial Sequence: Synthetic oligonucleotide
caauggcgcagcagaaaua

SEQ ID NO: 1760121 - RNA, 19 nt, Artificial Sequence
  Description of Artificial Sequence: Synthetic oligonucleotide
cacacucuucuuggaggug

SEQ ID NO: 1760122 - RNA, 19 nt, Artificial Sequence
  Description of Artificial Sequence: Synthetic oligonucleotide
caccguccacgcgaugcgg

SEQ ID NO: 1760123 - RNA, 19 nt, Artificial Sequence
  Description of Artificial Sequence: Synthetic oligonucleotide
gggaauguuggaagaggga

SEQ ID NO: 1760124 - RNA, 19 nt, Artificial Sequence
  Description of Artificial Sequence: Synthetic oligonucleotide
acgucccucuccggccacc

SEQ ID NO: 1760125 - RNA, 19 nt, Artificial Sequence
  Description of Artificial Sequence: Synthetic oligonucleotide
cccggcacgucccucuccg

SEQ ID NO: 1760126 - RNA, 19 nt, Artificial Sequence
  Description of Artificial Sequence: Synthetic oligonucleotide
ccuuguccgagguggccag

SEQ ID NO: 1760127 - RNA, 19 nt, Artificial Sequence
  Description of Artificial Sequence: Synthetic oligonucleotide
gagagccacuuagcacccc

SEQ ID NO: 1760128 - RNA, 19 nt, Artificial Sequence
  Description of Artificial Sequence: Synthetic oligonucleotide
cuccggcccggcacguccc

SEQ ID NO: 1760129 - RNA, 19 nt, Artificial Sequence
  Description of Artificial Sequence: Synthetic oligonucleotide
ggcauaccuuuuauagaca

SEQ ID NO: 1760130 - RNA, 19 nt, Artificial Sequence
  Description of Artificial Sequence: Synthetic oligonucleotide
gugaggcggcugaagaaaa

SEQ ID NO: 1760131 - RNA, 19 nt, Artificial Sequence
  Description of Artificial Sequence: Synthetic oligonucleotide
gguguccuggacaucccca

SEQ ID NO: 1760132 - RNA, 19 nt, Artificial Sequence
  Description of Artificial Sequence: Synthetic oligonucleotide
guagcaugaaucgcaucau

SEQ ID NO: 1760133 - RNA, 19 nt, Artificial Sequence
  Description of Artificial Sequence: Synthetic oligonucleotide
cagcaggcucccaccaaga

SEQ ID NO: 1760134 - RNA, 19 nt, Artificial Sequence
  Description of Artificial Sequence: Synthetic oligonucleotide
uuacugccuuuuagcucuu

SEQ ID NO: 1760135 - RNA, 19 nt, Artificial Sequence
  Description of Artificial Sequence: Synthetic oligonucleotide
ccugccggcugaacaguag

SEQ ID NO: 1760136 - RNA, 19 nt, Artificial Sequence
  Description of Artificial Sequence: Synthetic oligonucleotide
ggcugacggggcuaugcca

SEQ ID NO: 1760137 - RNA, 19 nt, Artificial Sequence
  Description of Artificial Sequence: Synthetic oligonucleotide
ccaccguccacgcgaugcg

SEQ ID NO: 1760138 - RNA, 19 nt, Artificial Sequence
  Description of Artificial Sequence: Synthetic oligonucleotide
gcucacauacacugccaaa

SEQ ID NO: 1760139 - RNA, 19 nt, Artificial Sequence
  Description of Artificial Sequence: Synthetic oligonucleotide
cucuccggccaccguagga

SEQ ID NO: 1760140 - RNA, 19 nt, Artificial Sequence
  Description of Artificial Sequence: Synthetic oligonucleotide
acgcgaugcgggaguuugg

SEQ ID NO: 1760141 - RNA, 19 nt, Artificial Sequence
  Description of Artificial Sequence: Synthetic oligonucleotide
aggucacauuuuacugccu

SEQ ID NO: 1760142 - RNA, 19 nt, Artificial Sequence
  Description of Artificial Sequence: Synthetic oligonucleotide
ccugacauauuuauauauu

SEQ ID NO: 1760143 - RNA, 19 nt, Artificial Sequence
  Description of Artificial Sequence: Synthetic oligonucleotide
agguagguuuuggggcaga

SEQ ID NO: 1760144 - RNA, 19 nt, Artificial Sequence
  Description of Artificial Sequence: Synthetic oligonucleotide
auggcgcagcagaaauaga

SEQ ID NO: 1760145 - RNA, 19 nt, Artificial Sequence
  Description of Artificial Sequence: Synthetic oligonucleotide
ucgcaucauccugcagccu

SEQ ID NO: 1760146 - RNA, 19 nt, Artificial Sequence
  Description of Artificial Sequence: Synthetic oligonucleotide
cgagagccacuuagcaccc

SEQ ID NO: 1760147 - RNA, 19 nt, Artificial Sequence
  Description of Artificial Sequence: Synthetic oligonucleotide
ggguucacauugguucuuc

SEQ ID NO: 1760148 - RNA, 19 nt, Artificial Sequence
  Description of Artificial Sequence: Synthetic oligonucleotide
uccggcccggcacgucccu

SEQ ID NO: 1760149 - RNA, 19 nt, Artificial Sequence
  Description of Artificial Sequence: Synthetic oligonucleotide
ccuccagguggcaagguua

SEQ ID NO: 1760150 - RNA, 19 nt, Artificial Sequence
  Description of Artificial Sequence: Synthetic oligonucleotide
agacaacuuugaggucccu

SEQ ID NO: 1760151 - RNA, 19 nt, Artificial Sequence
  Description of Artificial Sequence: Synthetic oligonucleotide
gggagagguggcagaaaca

SEQ ID NO: 1760152 - RNA, 19 nt, Artificial Sequence
  Description of Artificial Sequence: Synthetic oligonucleotide
ggacacugcgcggcgacuc

SEQ ID NO: 1760153 - RNA, 19 nt, Artificial Sequence
  Description of Artificial Sequence: Synthetic oligonucleotide
gcacaucuugggcuuucga

SEQ ID NO: 1760154 - RNA, 19 nt, Artificial Sequence
  Description of Artificial Sequence: Synthetic oligonucleotide
aggacacugcgcggcgacu

SEQ ID NO: 1760155 - RNA, 19 nt, Artificial Sequence
  Description of Artificial Sequence: Synthetic oligonucleotide
gggaugacugggguucaca

SEQ ID NO: 1760156 - RNA, 19 nt, Artificial Sequence
  Description of Artificial Sequence: Synthetic oligonucleotide
cggcgacucauccuccucc

SEQ ID NO: 1760157 - RNA, 19 nt, Artificial Sequence
  Description of Artificial Sequence: Synthetic oligonucleotide
gcccuggaaaccuuucccu

SEQ ID NO: 1760158 - RNA, 19 nt, Artificial Sequence
  Description of Artificial Sequence: Synthetic oligonucleotide
cgcgaugcgggaguuuggg

SEQ ID NO: 1760159 - RNA, 19 nt, Artificial Sequence
  Description of Artificial Sequence: Synthetic oligonucleotide
uccacgcgaugcgggaguu

SEQ ID NO: 1760160 - RNA, 19 nt, Artificial Sequence
  Description of Artificial Sequence: Synthetic oligonucleotide
auggggagggguagaggua

SEQ ID NO: 1760161 - RNA, 19 nt, Artificial Sequence
  Description of Artificial Sequence: Synthetic oligonucleotide
guccacgcgaugcgggagu

SEQ ID NO: 1760162 - RNA, 19 nt, Artificial Sequence
  Description of Artificial Sequence: Synthetic oligonucleotide
gcuaugccaggcccaucuc

SEQ ID NO: 1760163 - RNA, 19 nt, Artificial Sequence
  Description of Artificial Sequence: Synthetic oligonucleotide
ggggugauagggccagugu

SEQ ID NO: 1760164 - RNA, 19 nt, Artificial Sequence
  Description of Artificial Sequence: Synthetic oligonucleotide
gcgacucauccuccuccug

SEQ ID NO: 1760165 - RNA, 19 nt, Artificial Sequence
  Description of Artificial Sequence: Synthetic oligonucleotide
acacugcgcggcgacucau

SEQ ID NO: 1760166 - RNA, 19 nt, Artificial Sequence
  Description of Artificial Sequence: Synthetic oligonucleotide
cacgucccucuccggccac

SEQ ID NO: 1760167 - RNA, 19 nt, Artificial Sequence
  Description of Artificial Sequence: Synthetic oligonucleotide
ccugcucaauggccuuaag

SEQ ID NO: 1760168 - RNA, 19 nt, Artificial Sequence
  Description of Artificial Sequence: Synthetic oligonucleotide
ccuuucccuuuaaccugac

SEQ ID NO: 1760169 - RNA, 19 nt, Artificial Sequence
  Description of Artificial Sequence: Synthetic oligonucleotide
gcuuucgagccagcacaac

SEQ ID NO: 1760170 - RNA, 19 nt, Artificial Sequence
  Description of Artificial Sequence: Synthetic oligonucleotide
gcacgucccucuccggcca

SEQ ID NO: 1760171 - RNA, 19 nt, Artificial Sequence
  Description of Artificial Sequence: Synthetic oligonucleotide
ggcgacucauccuccuccu

SEQ ID NO: 1760172 - RNA, 19 nt, Artificial Sequence
  Description of Artificial Sequence: Synthetic oligonucleotide
aggcucccaccaagagaag

SEQ ID NO: 1760173 - RNA, 19 nt, Artificial Sequence
  Description of Artificial Sequence: Synthetic oligonucleotide
ggcuuucgagccagcacaa

SEQ ID NO: 1760174 - RNA, 19 nt, Artificial Sequence
  Description of Artificial Sequence: Synthetic oligonucleotide
cggcacgucccucuccggc

SEQ ID NO: 1760175 - RNA, 19 nt, Artificial Sequence
  Description of Artificial Sequence: Synthetic oligonucleotide
ggaucagcuccagugugau

SEQ ID NO: 1760176 - RNA, 19 nt, Artificial Sequence
  Description of Artificial Sequence: Synthetic oligonucleotide
ccuccacuccaggaagcug

SEQ ID NO: 1760177 - RNA, 19 nt, Artificial Sequence
  Description of Artificial Sequence: Synthetic oligonucleotide
ggcuauggggagggguaga

SEQ ID NO: 1760178 - RNA, 19 nt, Artificial Sequence
  Description of Artificial Sequence: Synthetic oligonucleotide
gcuggcuauggggaggggu

SEQ ID NO: 1760179 - RNA, 19 nt, Artificial Sequence
  Description of Artificial Sequence: Synthetic oligonucleotide
ccucuccggccaccguagg

SEQ ID NO: 1760180 - RNA, 19 nt, Artificial Sequence
  Description of Artificial Sequence: Synthetic oligonucleotide
ggacauccccacccaucaa

SEQ ID NO: 1760181 - RNA, 19 nt, Artificial Sequence
  Description of Artificial Sequence: Synthetic oligonucleotide
caccaccguccacgcgaug

SEQ ID NO: 1760182 - RNA, 19 nt, Artificial Sequence
  Description of Artificial Sequence: Synthetic oligonucleotide
cccaagugcugucucuugu

SEQ ID NO: 1760183 - RNA, 19 nt, Artificial Sequence
  Description of Artificial Sequence: Synthetic oligonucleotide
caguccccaagugcugucu

SEQ ID NO: 1760184 - RNA, 19 nt, Artificial Sequence
  Description of Artificial Sequence: Synthetic oligonucleotide
ggggaugacugggguucac

SEQ ID NO: 1760185 - RNA, 19 nt, Artificial Sequence
  Description of Artificial Sequence: Synthetic oligonucleotide
ccggcacgucccucuccgg

SEQ ID NO: 1760186 - RNA, 19 nt, Artificial Sequence
  Description of Artificial Sequence: Synthetic oligonucleotide
cccacuccaccaccgucca

SEQ ID NO: 1760187 - RNA, 19 nt, Artificial Sequence
  Description of Artificial Sequence: Synthetic oligonucleotide
gcccggcacgucccucucc

SEQ ID NO: 1760188 - RNA, 19 nt, Artificial Sequence
  Description of Artificial Sequence: Synthetic oligonucleotide
ggcuggcuauggggagggg

SEQ ID NO: 1760189 - RNA, 19 nt, Artificial Sequence
  Description of Artificial Sequence: Synthetic oligonucleotide
cugcgcggcgacucauccu

SEQ ID NO: 1760190 - RNA, 19 nt, Artificial Sequence
  Description of Artificial Sequence: Synthetic oligonucleotide
cgucccucuccggccaccg

SEQ ID NO: 1760191 - RNA, 19 nt, Artificial Sequence
  Description of Artificial Sequence: Synthetic oligonucleotide
gccugcucaauggccuuaa

SEQ ID NO: 1760192 - RNA, 19 nt, Artificial Sequence
  Description of Artificial Sequence: Synthetic oligonucleotide
ccucccaggcagagaaucu

SEQ ID NO: 1760193 - RNA, 19 nt, Artificial Sequence
  Description of Artificial Sequence: Synthetic oligonucleotide
ccguccacgcgaugcggga

SEQ ID NO: 1760194 - RNA, 19 nt, Artificial Sequence
  Description of Artificial Sequence: Synthetic oligonucleotide
cguccacgcgaugcgggag

SEQ ID NO: 1760195 - RNA, 19 nt, Artificial Sequence
  Description of Artificial Sequence: Synthetic oligonucleotide
gccggcugaacaguagcau

SEQ ID NO: 1760196 - RNA, 19 nt, Artificial Sequence
  Description of Artificial Sequence: Synthetic oligonucleotide
ggggaacgagagccacuua

SEQ ID NO: 1760197 - RNA, 19 nt, Artificial Sequence
  Description of Artificial Sequence: Synthetic oligonucleotide
cccuggaaaccuuucccuu

SEQ ID NO: 1760198 - RNA, 19 nt, Artificial Sequence
  Description of Artificial Sequence: Synthetic oligonucleotide
gcucccggaccauuuucuu

SEQ ID NO: 1760199 - RNA, 19 nt, Artificial Sequence
  Description of Artificial Sequence: Synthetic oligonucleotide
gguggccagguaccauuuu

SEQ ID NO: 1760200 - RNA, 19 nt, Artificial Sequence
  Description of Artificial Sequence: Synthetic oligonucleotide
ccaccaagagaaggggccu

SEQ ID NO: 1760201 - RNA, 19 nt, Artificial Sequence
  Description of Artificial Sequence: Synthetic oligonucleotide
gcgcggcgacucauccucc

SEQ ID NO: 1760202 - RNA, 19 nt, Artificial Sequence
  Description of Artificial Sequence: Synthetic oligonucleotide
cccuuuaaccugacauauu

SEQ ID NO: 1760203 - RNA, 19 nt, Artificial Sequence
  Description of Artificial Sequence: Synthetic oligonucleotide
ccgagguggccagguacca

SEQ ID NO: 1760204 - RNA, 19 nt, Artificial Sequence
  Description of Artificial Sequence: Synthetic oligonucleotide
caauggccuuaagcacacu

SEQ ID NO: 1760205 - RNA, 19 nt, Artificial Sequence
  Description of Artificial Sequence: Synthetic oligonucleotide
ccaggacacugcgcggcga

SEQ ID NO: 1760206 - RNA, 19 nt, Artificial Sequence
  Description of Artificial Sequence: Synthetic oligonucleotide
cccugccggcugaacagua

SEQ ID NO: 1760207 - RNA, 19 nt, Artificial Sequence
  Description of Artificial Sequence: Synthetic oligonucleotide
gggcuaugccaggcccauc

SEQ ID NO: 1760208 - RNA, 19 nt, Artificial Sequence
  Description of Artificial Sequence: Synthetic oligonucleotide
gggguucacauugguucuu

SEQ ID NO: 1760209 - RNA, 19 nt, Artificial Sequence
  Description of Artificial Sequence: Synthetic oligonucleotide
ccccaacugucccuucccu

SEQ ID NO: 1760210 - RNA, 19 nt, Artificial Sequence
  Description of Artificial Sequence: Synthetic oligonucleotide
cccuccacuccaggaagcu

SEQ ID NO: 1760211 - RNA, 19 nt, Artificial Sequence
  Description of Artificial Sequence: Synthetic oligonucleotide
cccggaccauuuucuuccu

SEQ ID NO: 1760212 - RNA, 19 nt, Artificial Sequence
  Description of Artificial Sequence: Synthetic oligonucleotide
cccuccagguggcaagguu

SEQ ID NO: 1760213 - RNA, 19 nt, Artificial Sequence
  Description of Artificial Sequence: Synthetic oligonucleotide
ccaccaccguccacgcgau

SEQ ID NO: 1760214 - RNA, 19 nt, Artificial Sequence
  Description of Artificial Sequence: Synthetic oligonucleotide
gcaugagcucccggaccau

SEQ ID NO: 1760215 - RNA, 19 nt, Artificial Sequence
  Description of Artificial Sequence: Synthetic oligonucleotide
cgcggcgacucauccuccu

SEQ ID NO: 1760216 - RNA, 19 nt, Artificial Sequence
  Description of Artificial Sequence: Synthetic oligonucleotide
ccggcccggcacgucccuc

SEQ ID NO: 1760217 - RNA, 19 nt, Artificial Sequence
  Description of Artificial Sequence: Synthetic oligonucleotide
ccccugccggcugaacagu

SEQ ID NO: 1760218 - RNA, 19 nt, Artificial Sequence
  Description of Artificial Sequence: Synthetic oligonucleotide
ggcagccgcuuggcccacu

SEQ ID NO: 1760219 - RNA, 19 nt, Artificial Sequence
  Description of Artificial Sequence: Synthetic oligonucleotide
ccacgcgaugcgggaguuu

SEQ ID NO: 1760220 - RNA, 19 nt, Artificial Sequence
  Description of Artificial Sequence: Synthetic oligonucleotide
aaaucuaccagguaucugc

SEQ ID NO: 1760221 - RNA, 19 nt, Artificial Sequence
  Description of Artificial Sequence: Synthetic oligonucleotide
aguaaauugacacugacag

SEQ ID NO: 1760222 - RNA, 19 nt, Artificial Sequence
  Description of Artificial Sequence: Synthetic oligonucleotide
uguaaaaugacauuccuag

SEQ ID NO: 1760223 - RNA, 19 nt, Artificial Sequence
  Description of Artificial Sequence: Synthetic oligonucleotide
auaguaguaucguagaccc

SEQ ID NO: 1760224 - RNA, 19 nt, Artificial Sequence
  Description of Artificial Sequence: Synthetic oligonucleotide
uguuaaauagaacgguugg

SEQ ID NO: 1760225 - RNA, 19 nt, Artificial Sequence
  Description of Artificial Sequence: Synthetic oligonucleotide
aaugaaaggaggccauugc

SEQ ID NO: 1760226 - RNA, 19 nt, Artificial Sequence
  Description of Artificial Sequence: Synthetic oligonucleotide
aagaaaaucuaccagguau

SEQ ID NO: 1760227 - RNA, 19 nt, Artificial Sequence
  Description of Artificial Sequence: Synthetic oligonucleotide
uuucuguuaaauagaacgg

SEQ ID NO: 1760228 - RNA, 19 nt, Artificial Sequence
  Description of Artificial Sequence: Synthetic oligonucleotide
uuaaauagaacgguuggcg

SEQ ID NO: 1760229 - RNA, 19 nt, Artificial Sequence
  Description of Artificial Sequence: Synthetic oligonucleotide
uacgauuucucucaguuag

SEQ ID NO: 1760230 - RNA, 19 nt, Artificial Sequence
  Description of Artificial Sequence: Synthetic oligonucleotide
uaaaaugacauuccuaggu

SEQ ID NO: 1760231 - RNA, 19 nt, Artificial Sequence
  Description of Artificial Sequence: Synthetic oligonucleotide
uauaagauacaauaauaug

SEQ ID NO: 1760232 - RNA, 19 nt, Artificial Sequence
  Description of Artificial Sequence: Synthetic oligonucleotide
uuauaagauacaauaauau

SEQ ID NO: 1760233 - RNA, 19 nt, Artificial Sequence
  Description of Artificial Sequence: Synthetic oligonucleotide
aagauacaauaauauguac

SEQ ID NO: 1760234 - RNA, 19 nt, Artificial Sequence
  Description of Artificial Sequence: Synthetic oligonucleotide
ugucauaguaguaucguag

SEQ ID NO: 1760235 - RNA, 19 nt, Artificial Sequence
  Description of Artificial Sequence: Synthetic oligonucleotide
auaagauacaauaauaugu

SEQ ID NO: 1760236 - RNA, 19 nt, Artificial Sequence
  Description of Artificial Sequence: Synthetic oligonucleotide
gacaggauuugucagagag

SEQ ID NO: 1760237 - RNA, 19 nt, Artificial Sequence
  Description of Artificial Sequence: Synthetic oligonucleotide
uucugugucaggcuggacg

SEQ ID NO: 1760238 - RNA, 19 nt, Artificial Sequence
  Description of Artificial Sequence: Synthetic oligonucleotide
aaaacaguauauuacgauu

SEQ ID NO: 1760239 - RNA, 19 nt, Artificial Sequence
  Description of Artificial Sequence: Synthetic oligonucleotide
uaaauagaacgguuggcgg

SEQ ID NO: 1760240 - RNA, 19 nt, Artificial Sequence
  Description of Artificial Sequence: Synthetic oligonucleotide
uaagauacaauaauaugua

SEQ ID NO: 1760241 - RNA, 19 nt, Artificial Sequence
  Description of Artificial Sequence: Synthetic oligonucleotide
aacaguauauuacgauuuc

SEQ ID NO: 1760242 - RNA, 19 nt, Artificial Sequence
  Description of Artificial Sequence: Synthetic oligonucleotide
uacaauauacaauuucugu

SEQ ID NO: 1760243 - RNA, 19 nt, Artificial Sequence
  Description of Artificial Sequence: Synthetic oligonucleotide
uguaccauucucuggagag

SEQ ID NO: 1760244 - RNA, 19 nt, Artificial Sequence
  Description of Artificial Sequence: Synthetic oligonucleotide
gacguuauaagauacaaua

SEQ ID NO: 1760245 - RNA, 19 nt, Artificial Sequence
  Description of Artificial Sequence: Synthetic oligonucleotide
uacaaaaugacuuccgaaa

SEQ ID NO: 1760246 - RNA, 19 nt, Artificial Sequence
  Description of Artificial Sequence: Synthetic oligonucleotide
aguaguaucguagaccccg

SEQ ID NO: 1760247 - RNA, 19 nt, Artificial Sequence
  Description of Artificial Sequence: Synthetic oligonucleotide
ugcacaucuaguagggacg

SEQ ID NO: 1760248 - RNA, 19 nt, Artificial Sequence
  Description of Artificial Sequence: Synthetic oligonucleotide
ugacuuccgaaauggaugg

SEQ ID NO: 1760249 - RNA, 19 nt, Artificial Sequence
  Description of Artificial Sequence: Synthetic oligonucleotide
ugaaaacaguauauuacga

SEQ ID NO: 1760250 - RNA, 19 nt, Artificial Sequence
  Description of Artificial Sequence: Synthetic oligonucleotide
aaauagaacgguuggcgga

SEQ ID NO: 1760251 - RNA, 19 nt, Artificial Sequence
  Description of Artificial Sequence: Synthetic oligonucleotide
agaggcauggaaugaaagg

SEQ ID NO: 1760252 - RNA, 19 nt, Artificial Sequence
  Description of Artificial Sequence: Synthetic oligonucleotide
aguauauuacgauuucucu

SEQ ID NO: 1760253 - RNA, 19 nt, Artificial Sequence
  Description of Artificial Sequence: Synthetic oligonucleotide
uuuugacguuauaagauac

SEQ ID NO: 1760254 - RNA, 19 nt, Artificial Sequence
  Description of Artificial Sequence: Synthetic oligonucleotide
uuggugagcaaauucaagu

SEQ ID NO: 1760255 - RNA, 19 nt, Artificial Sequence
  Description of Artificial Sequence: Synthetic oligonucleotide
acaguaaauugacacugac

SEQ ID NO: 1760256 - RNA, 19 nt, Artificial Sequence
  Description of Artificial Sequence: Synthetic oligonucleotide
ugagagauuaaaucugugu

SEQ ID NO: 1760257 - RNA, 19 nt, Artificial Sequence
  Description of Artificial Sequence: Synthetic oligonucleotide
gaacaguaaauugacacug

SEQ ID NO: 1760258 - RNA, 19 nt, Artificial Sequence
  Description of Artificial Sequence: Synthetic oligonucleotide
uguacaaaaugacuuccga

SEQ ID NO: 1760259 - RNA, 19 nt, Artificial Sequence
  Description of Artificial Sequence: Synthetic oligonucleotide
acaugguugguuuauugag

SEQ ID NO: 1760260 - RNA, 19 nt, Artificial Sequence
  Description of Artificial Sequence: Synthetic oligonucleotide
auugagccgagacuugggc

SEQ ID NO: 1760261 - RNA, 19 nt, Artificial Sequence
  Description of Artificial Sequence: Synthetic oligonucleotide
aauucaaguugcugccagg

SEQ ID NO: 1760262 - RNA, 19 nt, Artificial Sequence
  Description of Artificial Sequence: Synthetic oligonucleotide
uaaaucuguguaaaaugac

SEQ ID NO: 1760263 - RNA, 19 nt, Artificial Sequence
  Description of Artificial Sequence: Synthetic oligonucleotide
gauugacaggauuugucag

SEQ ID NO: 1760264 - RNA, 19 nt, Artificial Sequence
  Description of Artificial Sequence: Synthetic oligonucleotide
auuacgauuucucucaguu

SEQ ID NO: 1760265 - RNA, 19 nt, Artificial Sequence
  Description of Artificial Sequence: Synthetic oligonucleotide
uccugagagauuaaaucug

SEQ ID NO: 1760266 - RNA, 19 nt, Artificial Sequence
  Description of Artificial Sequence: Synthetic oligonucleotide
cauaguaguaucguagacc

SEQ ID NO: 1760267 - RNA, 19 nt, Artificial Sequence
  Description of Artificial Sequence: Synthetic oligonucleotide
gacaguauugagccgagac

SEQ ID NO: 1760268 - RNA, 19 nt, Artificial Sequence
  Description of Artificial Sequence: Synthetic oligonucleotide
cacaaaucgguacacguag

SEQ ID NO: 1760269 - RNA, 19 nt, Artificial Sequence
  Description of Artificial Sequence: Synthetic oligonucleotide
guaaaaugacauuccuagg

SEQ ID NO: 1760270 - RNA, 19 nt, Artificial Sequence
  Description of Artificial Sequence: Synthetic oligonucleotide
caugguugguuuauugagg

SEQ ID NO: 1760271 - RNA, 19 nt, Artificial Sequence
  Description of Artificial Sequence: Synthetic oligonucleotide
aacccuagcaaguucugca

SEQ ID NO: 1760272 - RNA, 19 nt, Artificial Sequence
  Description of Artificial Sequence: Synthetic oligonucleotide
aguuggauggguccgcuuc

SEQ ID NO: 1760273 - RNA, 19 nt, Artificial Sequence
  Description of Artificial Sequence: Synthetic oligonucleotide
aacacaguuauaauuacuu

SEQ ID NO: 1760274 - RNA, 19 nt, Artificial Sequence
  Description of Artificial Sequence: Synthetic oligonucleotide
aggagugaacccuagcaag

SEQ ID NO: 1760275 - RNA, 19 nt, Artificial Sequence
  Description of Artificial Sequence: Synthetic oligonucleotide
cuguuaaauagaacgguug

SEQ ID NO: 1760276 - RNA, 19 nt, Artificial Sequence
  Description of Artificial Sequence: Synthetic oligonucleotide
uuugacguuauaagauaca

SEQ ID NO: 1760277 - RNA, 19 nt, Artificial Sequence
  Description of Artificial Sequence: Synthetic oligonucleotide
agagauuaaaucuguguaa

SEQ ID NO: 1760278 - RNA, 19 nt, Artificial Sequence
  Description of Artificial Sequence: Synthetic oligonucleotide
acuuccgaaauggauggcc

SEQ ID NO: 1760279 - RNA, 19 nt, Artificial Sequence
  Description of Artificial Sequence: Synthetic oligonucleotide
agauacaauaauauguaca

SEQ ID NO: 1760280 - RNA, 19 nt, Artificial Sequence
  Description of Artificial Sequence: Synthetic oligonucleotide
uccuguuggaaaaucaaau

SEQ ID NO: 1760281 - RNA, 19 nt, Artificial Sequence
  Description of Artificial Sequence: Synthetic oligonucleotide
ucuaguagggacgacuggc

SEQ ID NO: 1760282 - RNA, 19 nt, Artificial Sequence
  Description of Artificial Sequence: Synthetic oligonucleotide
gagagauuaaaucugugua

SEQ ID NO: 1760283 - RNA, 19 nt, Artificial Sequence
  Description of Artificial Sequence: Synthetic oligonucleotide
ugcgugauggaacaguaaa

SEQ ID NO: 1760284 - RNA, 19 nt, Artificial Sequence
  Description of Artificial Sequence: Synthetic oligonucleotide
agaaaaucuaccagguauc

SEQ ID NO: 1760285 - RNA, 19 nt, Artificial Sequence
  Description of Artificial Sequence: Synthetic oligonucleotide
ucugugucaggcuggacgc

SEQ ID NO: 1760286 - RNA, 19 nt, Artificial Sequence
  Description of Artificial Sequence: Synthetic oligonucleotide
aaucuguguaaaaugacau

SEQ ID NO: 1760287 - RNA, 19 nt, Artificial Sequence
  Description of Artificial Sequence: Synthetic oligonucleotide
ucuguuaaauagaacgguu

SEQ ID NO: 1760288 - RNA, 19 nt, Artificial Sequence
  Description of Artificial Sequence: Synthetic oligonucleotide
caaaucgguacacguagcg

SEQ ID NO: 1760289 - RNA, 19 nt, Artificial Sequence
  Description of Artificial Sequence: Synthetic oligonucleotide
uccucuuuccccaccggcg

SEQ ID NO: 1760290 - RNA, 19 nt, Artificial Sequence
  Description of Artificial Sequence: Synthetic oligonucleotide
cuggcuacaguccuccucg

SEQ ID NO: 1760291 - RNA, 19 nt, Artificial Sequence
  Description of Artificial Sequence: Synthetic oligonucleotide
caguauauuacgauuucuc

SEQ ID NO: 1760292 - RNA, 19 nt, Artificial Sequence
  Description of Artificial Sequence: Synthetic oligonucleotide
ucucaaaggaagguacccg

SEQ ID NO: 1760293 - RNA, 19 nt, Artificial Sequence
  Description of Artificial Sequence: Synthetic oligonucleotide
ugcauucuugauucaaaca

SEQ ID NO: 1760294 - RNA, 19 nt, Artificial Sequence
  Description of Artificial Sequence: Synthetic oligonucleotide
ucaaggucgucccaaggac

SEQ ID NO: 1760295 - RNA, 19 nt, Artificial Sequence
  Description of Artificial Sequence: Synthetic oligonucleotide
cuacaguccuccucgaagc

SEQ ID NO: 1760296 - RNA, 19 nt, Artificial Sequence
  Description of Artificial Sequence: Synthetic oligonucleotide
acaaaaugacuuccgaaau

SEQ ID NO: 1760297 - RNA, 19 nt, Artificial Sequence
  Description of Artificial Sequence: Synthetic oligonucleotide
ucauaguaguaucguagac

SEQ ID NO: 1760298 - RNA, 19 nt, Artificial Sequence
  Description of Artificial Sequence: Synthetic oligonucleotide
auucuugauucaaacacag

SEQ ID NO: 1760299 - RNA, 19 nt, Artificial Sequence
  Description of Artificial Sequence: Synthetic oligonucleotide
ugggucacuccucucuugg

SEQ ID NO: 1760300 - RNA, 19 nt, Artificial Sequence
  Description of Artificial Sequence: Synthetic oligonucleotide
cuguuggaaaaucaaauga

SEQ ID NO: 1760301 - RNA, 19 nt, Artificial Sequence
  Description of Artificial Sequence: Synthetic oligonucleotide
gugauggaacaguaaauug

SEQ ID NO: 1760302 - RNA, 19 nt, Artificial Sequence
  Description of Artificial Sequence: Synthetic oligonucleotide
aggaauaacugguuugccu

SEQ ID NO: 1760303 - RNA, 19 nt, Artificial Sequence
  Description of Artificial Sequence: Synthetic oligonucleotide
caaaaugacuuccgaaaug

SEQ ID NO: 1760304 - RNA, 19 nt, Artificial Sequence
  Description of Artificial Sequence: Synthetic oligonucleotide
uucuguuaaauagaacggu

SEQ ID NO: 1760305 - RNA, 19 nt, Artificial Sequence
  Description of Artificial Sequence: Synthetic oligonucleotide
uugacaggauuugucagag

SEQ ID NO: 1760306 - RNA, 19 nt, Artificial Sequence
  Description of Artificial Sequence: Synthetic oligonucleotide
auuuugacguuauaagaua

SEQ ID NO: 1760307 - RNA, 19 nt, Artificial Sequence
  Description of Artificial Sequence: Synthetic oligonucleotide
ucaacugggucacuccucu

SEQ ID NO: 1760308 - RNA, 19 nt, Artificial Sequence
  Description of Artificial Sequence: Synthetic oligonucleotide
aaagauugacaggauuugu

SEQ ID NO: 1760309 - RNA, 19 nt, Artificial Sequence
  Description of Artificial Sequence: Synthetic oligonucleotide
uuccggugaagccagccag

SEQ ID NO: 1760310 - RNA, 19 nt, Artificial Sequence
  Description of Artificial Sequence: Synthetic oligonucleotide
agacuugggcaacaucugg

SEQ ID NO: 1760311 - RNA, 19 nt, Artificial Sequence
  Description of Artificial Sequence: Synthetic oligonucleotide
agaaggaacugccacaguu

SEQ ID NO: 1760312 - RNA, 19 nt, Artificial Sequence
  Description of Artificial Sequence: Synthetic oligonucleotide
aaagaaaaucuaccaggua

SEQ ID NO: 1760313 - RNA, 19 nt, Artificial Sequence
  Description of Artificial Sequence: Synthetic oligonucleotide
guuaaauagaacgguuggc

SEQ ID NO: 1760314 - RNA, 19 nt, Artificial Sequence
  Description of Artificial Sequence: Synthetic oligonucleotide
aaguccugcgugauggaac

SEQ ID NO: 1760315 - RNA, 19 nt, Artificial Sequence
  Description of Artificial Sequence: Synthetic oligonucleotide
agugaacccuagcaaguuc

SEQ ID NO: 1760316 - RNA, 19 nt, Artificial Sequence
  Description of Artificial Sequence: Synthetic oligonucleotide
uugacguuauaagauacaa

SEQ ID NO: 1760317 - RNA, 19 nt, Artificial Sequence
  Description of Artificial Sequence: Synthetic oligonucleotide
uguucaacugggucacucc

SEQ ID NO: 1760318 - RNA, 19 nt, Artificial Sequence
  Description of Artificial Sequence: Synthetic oligonucleotide
acaguauugagccgagacu

SEQ ID NO: 1760319 - RNA, 19 nt, Artificial Sequence
  Description of Artificial Sequence: Synthetic oligonucleotide
ggggucaucccucagaccc

SEQ ID NO: 1760320 - RNA, 19 nt, Artificial Sequence
  Description of Artificial Sequence: Synthetic oligonucleotide
ugguccuuggguuucccag

SEQ ID NO: 1760321 - RNA, 19 nt, Artificial Sequence
  Description of Artificial Sequence: Synthetic oligonucleotide
uacacguagcgcuugccug

SEQ ID NO: 1760322 - RNA, 19 nt, Artificial Sequence
  Description of Artificial Sequence: Synthetic oligonucleotide
ucuaccagguaucugcauu

SEQ ID NO: 1760323 - RNA, 19 nt, Artificial Sequence
  Description of Artificial Sequence: Synthetic oligonucleotide
agggacgacuggcuguucc

SEQ ID NO: 1760324 - RNA, 19 nt, Artificial Sequence
  Description of Artificial Sequence: Synthetic oligonucleotide
cugcacaucuaguagggac

SEQ ID NO: 1760325 - RNA, 19 nt, Artificial Sequence
  Description of Artificial Sequence: Synthetic oligonucleotide
aaaaucuaccagguaucug

SEQ ID NO: 1760326 - RNA, 19 nt, Artificial Sequence
  Description of Artificial Sequence: Synthetic oligonucleotide
acgguuggcggauuuugac

SEQ ID NO: 1760327 - RNA, 19 nt, Artificial Sequence
  Description of Artificial Sequence: Synthetic oligonucleotide
auugacacugacaguauug

SEQ ID NO: 1760328 - RNA, 19 nt, Artificial Sequence
  Description of Artificial Sequence: Synthetic oligonucleotide
ggauuugucagagagcagc

SEQ ID NO: 1760329 - RNA, 19 nt, Artificial Sequence
  Description of Artificial Sequence: Synthetic oligonucleotide
auggcaguuccucaggagu

SEQ ID NO: 1760330 - RNA, 19 nt, Artificial Sequence
  Description of Artificial Sequence: Synthetic oligonucleotide
acugacaguauugagccga

SEQ ID NO: 1760331 - RNA, 19 nt, Artificial Sequence
  Description of Artificial Sequence: Synthetic oligonucleotide
aauugacacugacaguauu

SEQ ID NO: 1760332 - RNA, 19 nt, Artificial Sequence
  Description of Artificial Sequence: Synthetic oligonucleotide
ucaaaggaagguacccgcu

SEQ ID NO: 1760333 - RNA, 19 nt, Artificial Sequence
  Description of Artificial Sequence: Synthetic oligonucleotide
guugcugccagggaagucc

SEQ ID NO: 1760334 - RNA, 19 nt, Artificial Sequence
  Description of Artificial Sequence: Synthetic oligonucleotide
uuccuguuggaaaaucaaa

SEQ ID NO: 1760335 - RNA, 19 nt, Artificial Sequence
  Description of Artificial Sequence: Synthetic oligonucleotide
aguaucguagaccccggcu

SEQ ID NO: 1760336 - RNA, 19 nt, Artificial Sequence
  Description of Artificial Sequence: Synthetic oligonucleotide
ucagaccccauuccuguug

SEQ ID NO: 1760337 - RNA, 19 nt, Artificial Sequence
  Description of Artificial Sequence: Synthetic oligonucleotide
caaguugcugccagggaag

SEQ ID NO: 1760338 - RNA, 19 nt, Artificial Sequence
  Description of Artificial Sequence: Synthetic oligonucleotide
ggauuuugacguuauaaga

SEQ ID NO: 1760339 - RNA, 19 nt, Artificial Sequence
  Description of Artificial Sequence: Synthetic oligonucleotide
aauagaacgguuggcggau

SEQ ID NO: 1760340 - RNA, 19 nt, Artificial Sequence
  Description of Artificial Sequence: Synthetic oligonucleotide
uaucguagaccccggcuca

SEQ ID NO: 1760341 - RNA, 19 nt, Artificial Sequence
  Description of Artificial Sequence: Synthetic oligonucleotide
gauggguccgcuuccggug

SEQ ID NO: 1760342 - RNA, 19 nt, Artificial Sequence
  Description of Artificial Sequence: Synthetic oligonucleotide
acaggauuugucagagagc

SEQ ID NO: 1760343 - RNA, 19 nt, Artificial Sequence
  Description of Artificial Sequence: Synthetic oligonucleotide
gagauuaaaucuguguaaa

SEQ ID NO: 1760344 - RNA, 19 nt, Artificial Sequence
  Description of Artificial Sequence: Synthetic oligonucleotide
ugacguuauaagauacaau

SEQ ID NO: 1760345 - RNA, 19 nt, Artificial Sequence
  Description of Artificial Sequence: Synthetic oligonucleotide
ugccgcaggaauaacuggu

SEQ ID NO: 1760346 - RNA, 19 nt, Artificial Sequence
  Description of Artificial Sequence: Synthetic oligonucleotide
auauuacgauuucucucag

SEQ ID NO: 1760347 - RNA, 19 nt, Artificial Sequence
  Description of Artificial Sequence: Synthetic oligonucleotide
gauuuugacguuauaagau

SEQ ID NO: 1760348 - RNA, 19 nt, Artificial Sequence
  Description of Artificial Sequence: Synthetic oligonucleotide
ggugagcaaauucaaguug

SEQ ID NO: 1760349 - RNA, 19 nt, Artificial Sequence
  Description of Artificial Sequence: Synthetic oligonucleotide
caggauuugucagagagca

SEQ ID NO: 1760350 - RNA, 19 nt, Artificial Sequence
  Description of Artificial Sequence: Synthetic oligonucleotide
gagucggagcucucgaagc

SEQ ID NO: 1760351 - RNA, 19 nt, Artificial Sequence
  Description of Artificial Sequence: Synthetic oligonucleotide
auguacaaaaugacuuccg

SEQ ID NO: 1760352 - RNA, 19 nt, Artificial Sequence
  Description of Artificial Sequence: Synthetic oligonucleotide
guauugagccgagacuugg

SEQ ID NO: 1760353 - RNA, 19 nt, Artificial Sequence
  Description of Artificial Sequence: Synthetic oligonucleotide
aaaccaggggucaucccuc

SEQ ID NO: 1760354 - RNA, 19 nt, Artificial Sequence
  Description of Artificial Sequence: Synthetic oligonucleotide
cucucaguuagcuccugag

SEQ ID NO: 1760355 - RNA, 19 nt, Artificial Sequence
  Description of Artificial Sequence: Synthetic oligonucleotide
caacaucuggaacuccugc

SEQ ID NO: 1760356 - RNA, 19 nt, Artificial Sequence
  Description of Artificial Sequence: Synthetic oligonucleotide
aucuaguagggacgacugg

SEQ ID NO: 1760357 - RNA, 19 nt, Artificial Sequence
  Description of Artificial Sequence: Synthetic oligonucleotide
ccuugaaggacaugguugg

SEQ ID NO: 1760358 - RNA, 19 nt, Artificial Sequence
  Description of Artificial Sequence: Synthetic oligonucleotide
aguagggacgacuggcugu

SEQ ID NO: 1760359 - RNA, 19 nt, Artificial Sequence
  Description of Artificial Sequence: Synthetic oligonucleotide
caaggucgucccaaggacc

SEQ ID NO: 1760360 - RNA, 19 nt, Artificial Sequence
  Description of Artificial Sequence: Synthetic oligonucleotide
gcacaugcuguccaggagg

SEQ ID NO: 1760361 - RNA, 19 nt, Artificial Sequence
  Description of Artificial Sequence: Synthetic oligonucleotide
cucgucagggucagcaagc

SEQ ID NO: 1760362 - RNA, 19 nt, Artificial Sequence
  Description of Artificial Sequence: Synthetic oligonucleotide
uacugccgcaggaauaacu

SEQ ID NO: 1760363 - RNA, 19 nt, Artificial Sequence
  Description of Artificial Sequence: Synthetic oligonucleotide
acaaaucgguacacguagc

SEQ ID NO: 1760364 - RNA, 19 nt, Artificial Sequence
  Description of Artificial Sequence: Synthetic oligonucleotide
uccaagggucuuuggagca

SEQ ID NO: 1760365 - RNA, 19 nt, Artificial Sequence
  Description of Artificial Sequence: Synthetic oligonucleotide
aacaguaaauugacacuga

SEQ ID NO: 1760366 - RNA, 19 nt, Artificial Sequence
  Description of Artificial Sequence: Synthetic oligonucleotide
uucaaguugcugccaggga

SEQ ID NO: 1760367 - RNA, 19 nt, Artificial Sequence
  Description of Artificial Sequence: Synthetic oligonucleotide
guaucguagaccccggcuc

SEQ ID NO: 1760368 - RNA, 19 nt, Artificial Sequence
  Description of Artificial Sequence: Synthetic oligonucleotide
cucucaaaggaagguaccc

SEQ ID NO: 1760369 - RNA, 19 nt, Artificial Sequence
  Description of Artificial Sequence: Synthetic oligonucleotide
uucuugauucaaacacagu

SEQ ID NO: 1760370 - RNA, 19 nt, Artificial Sequence
  Description of Artificial Sequence: Synthetic oligonucleotide
aguccugcgugauggaaca

SEQ ID NO: 1760371 - RNA, 19 nt, Artificial Sequence
  Description of Artificial Sequence: Synthetic oligonucleotide
uagaccccggcucagcuuc

SEQ ID NO: 1760372 - RNA, 19 nt, Artificial Sequence
  Description of Artificial Sequence: Synthetic oligonucleotide
gacgacuggcuguuccagg

SEQ ID NO: 1760373 - RNA, 19 nt, Artificial Sequence
  Description of Artificial Sequence: Synthetic oligonucleotide
cagcugauaaaagauugac

SEQ ID NO: 1760374 - RNA, 19 nt, Artificial Sequence
  Description of Artificial Sequence: Synthetic oligonucleotide
acaguauauuacgauuucu

SEQ ID NO: 1760375 - RNA, 19 nt, Artificial Sequence
  Description of Artificial Sequence: Synthetic oligonucleotide
acccuagcaaguucugcag

SEQ ID NO: 1760376 - RNA, 19 nt, Artificial Sequence
  Description of Artificial Sequence: Synthetic oligonucleotide
gguugguuuauugaggcac

SEQ ID NO: 1760377 - RNA, 19 nt, Artificial Sequence
  Description of Artificial Sequence: Synthetic oligonucleotide
uauuacgauuucucucagu

SEQ ID NO: 1760378 - RNA, 19 nt, Artificial Sequence
  Description of Artificial Sequence: Synthetic oligonucleotide
caaaggaagguacccgcug

SEQ ID NO: 1760379 - RNA, 19 nt, Artificial Sequence
  Description of Artificial Sequence: Synthetic oligonucleotide
caguaaauugacacugaca

SEQ ID NO: 1760380 - RNA, 19 nt, Artificial Sequence
  Description of Artificial Sequence: Synthetic oligonucleotide
gcuacaguccuccucgaag

SEQ ID NO: 1760381 - RNA, 19 nt, Artificial Sequence
  Description of Artificial Sequence: Synthetic oligonucleotide
cugagagauuaaaucugug

SEQ ID NO: 1760382 - RNA, 19 nt, Artificial Sequence
  Description of Artificial Sequence: Synthetic oligonucleotide
uccgcuuccggugaagcca

SEQ ID NO: 1760383 - RNA, 19 nt, Artificial Sequence
  Description of Artificial Sequence: Synthetic oligonucleotide
guacccgcugcacaucuag

SEQ ID NO: 1760384 - RNA, 19 nt, Artificial Sequence
  Description of Artificial Sequence: Synthetic oligonucleotide
ugcaggucacacacaaauc

SEQ ID NO: 1760385 - RNA, 19 nt, Artificial Sequence
  Description of Artificial Sequence: Synthetic oligonucleotide
uccuaggugcuagugaaaa

SEQ ID NO: 1760386 - RNA, 19 nt, Artificial Sequence
  Description of Artificial Sequence: Synthetic oligonucleotide
uguaguccuugaaggacau

SEQ ID NO: 1760387 - RNA, 19 nt, Artificial Sequence
  Description of Artificial Sequence: Synthetic oligonucleotide
gucaggacaggcuucccac

SEQ ID NO: 1760388 - RNA, 19 nt, Artificial Sequence
  Description of Artificial Sequence: Synthetic oligonucleotide
aaucuaccagguaucugca

SEQ ID NO: 1760389 - RNA, 19 nt, Artificial Sequence
  Description of Artificial Sequence: Synthetic oligonucleotide
gaacgguuggcggauuuug

SEQ ID NO: 1760390 - RNA, 19 nt, Artificial Sequence
  Description of Artificial Sequence: Synthetic oligonucleotide
uuacgauuucucucaguua

SEQ ID NO: 1760391 - RNA, 19 nt, Artificial Sequence
  Description of Artificial Sequence: Synthetic oligonucleotide
aguacugccgcaggaauaa

SEQ ID NO: 1760392 - RNA, 19 nt, Artificial Sequence
  Description of Artificial Sequence: Synthetic oligonucleotide
uucaacugggucacuccuc

SEQ ID NO: 1760393 - RNA, 19 nt, Artificial Sequence
  Description of Artificial Sequence: Synthetic oligonucleotide
ucucucaguuagcuccuga

SEQ ID NO: 1760394 - RNA, 19 nt, Artificial Sequence
  Description of Artificial Sequence: Synthetic oligonucleotide
aaggacaugguugguuuau

SEQ ID NO: 1760395 - RNA, 19 nt, Artificial Sequence
  Description of Artificial Sequence: Synthetic oligonucleotide
uuggguuucccagagccau

SEQ ID NO: 1760396 - RNA, 19 nt, Artificial Sequence
  Description of Artificial Sequence: Synthetic oligonucleotide
cagaccccauuccuguugg

SEQ ID NO: 1760397 - RNA, 19 nt, Artificial Sequence
  Description of Artificial Sequence: Synthetic oligonucleotide
ugugucaggcuggacgccc

SEQ ID NO: 1760398 - RNA, 19 nt, Artificial Sequence
  Description of Artificial Sequence: Synthetic oligonucleotide
uaguaguaucguagacccc

SEQ ID NO: 1760399 - RNA, 19 nt, Artificial Sequence
  Description of Artificial Sequence: Synthetic oligonucleotide
acgauuucucucaguuagc

SEQ ID NO: 1760400 - RNA, 19 nt, Artificial Sequence
  Description of Artificial Sequence: Synthetic oligonucleotide
cucaaggucgucccaagga

SEQ ID NO: 1760401 - RNA, 19 nt, Artificial Sequence
  Description of Artificial Sequence: Synthetic oligonucleotide
gagacuugggcaacaucug

SEQ ID NO: 1760402 - RNA, 19 nt, Artificial Sequence
  Description of Artificial Sequence: Synthetic oligonucleotide
cggauuuugacguuauaag

SEQ ID NO: 1760403 - RNA, 19 nt, Artificial Sequence
  Description of Artificial Sequence: Synthetic oligonucleotide
aggggucaucccucagacc

SEQ ID NO: 1760404 - RNA, 19 nt, Artificial Sequence
  Description of Artificial Sequence: Synthetic oligonucleotide
acguuauaagauacaauaa

SEQ ID NO: 1760405 - RNA, 19 nt, Artificial Sequence
  Description of Artificial Sequence: Synthetic oligonucleotide
uaguaucguagaccccggc

SEQ ID NO: 1760406 - RNA, 19 nt, Artificial Sequence
  Description of Artificial Sequence: Synthetic oligonucleotide
uuuggagcagugggucagg

SEQ ID NO: 1760407 - RNA, 19 nt, Artificial Sequence
  Description of Artificial Sequence: Synthetic oligonucleotide
uggauggguccgcuuccgg

SEQ ID NO: 1760408 - RNA, 19 nt, Artificial Sequence
  Description of Artificial Sequence: Synthetic oligonucleotide
uucccacucacgguccccg

SEQ ID NO: 1760409 - RNA, 19 nt, Artificial Sequence
  Description of Artificial Sequence: Synthetic oligonucleotide
agucggagcucucgaagcu

SEQ ID NO: 1760410 - RNA, 19 nt, Artificial Sequence
  Description of Artificial Sequence: Synthetic oligonucleotide
cagguaucugcauucuuga

SEQ ID NO: 1760411 - RNA, 19 nt, Artificial Sequence
  Description of Artificial Sequence: Synthetic oligonucleotide
gaacccuagcaaguucugc

SEQ ID NO: 1760412 - RNA, 19 nt, Artificial Sequence
  Description of Artificial Sequence: Synthetic oligonucleotide
cacaguuauaauuacuuuu

SEQ ID NO: 1760413 - RNA, 19 nt, Artificial Sequence
  Description of Artificial Sequence: Synthetic oligonucleotide
ugguugguuuauugaggca

SEQ ID NO: 1760414 - RNA, 19 nt, Artificial Sequence
  Description of Artificial Sequence: Synthetic oligonucleotide
auguaguccuugaaggaca

SEQ ID NO: 1760415 - RNA, 19 nt, Artificial Sequence
  Description of Artificial Sequence: Synthetic oligonucleotide
cauuccuaggugcuaguga

SEQ ID NO: 1760416 - RNA, 19 nt, Artificial Sequence
  Description of Artificial Sequence: Synthetic oligonucleotide
uuguucaacugggucacuc

SEQ ID NO: 1760417 - RNA, 19 nt, Artificial Sequence
  Description of Artificial Sequence: Synthetic oligonucleotide
cugacaguauugagccgag

SEQ ID NO: 1760418 - RNA, 19 nt, Artificial Sequence
  Description of Artificial Sequence: Synthetic oligonucleotide
cauuggugagcaaauucaa

SEQ ID NO: 1760419 - RNA, 19 nt, Artificial Sequence
  Description of Artificial Sequence: Synthetic oligonucleotide
uuggauggguccgcuuccg

SEQ ID NO: 1760420 - RNA, 19 nt, Artificial Sequence
  Description of Artificial Sequence: Synthetic oligonucleotide
agcucaaggucgucccaag

SEQ ID NO: 1760421 - RNA, 19 nt, Artificial Sequence
  Description of Artificial Sequence: Synthetic oligonucleotide
uucucuggagagucauggu

SEQ ID NO: 1760422 - RNA, 19 nt, Artificial Sequence
  Description of Artificial Sequence: Synthetic oligonucleotide
gaaaaucuaccagguaucu

SEQ ID NO: 1760423 - RNA, 19 nt, Artificial Sequence
  Description of Artificial Sequence: Synthetic oligonucleotide
accccauuccuguuggaaa

SEQ ID NO: 1760424 - RNA, 19 nt, Artificial Sequence
  Description of Artificial Sequence: Synthetic oligonucleotide
ggccauugcugcuuggcag

SEQ ID NO: 1760425 - RNA, 19 nt, Artificial Sequence
  Description of Artificial Sequence: Synthetic oligonucleotide
aagcucucaaaggaaggua

SEQ ID NO: 1760426 - RNA, 19 nt, Artificial Sequence
  Description of Artificial Sequence: Synthetic oligonucleotide
guaguaucguagaccccgg

SEQ ID NO: 1760427 - RNA, 19 nt, Artificial Sequence
  Description of Artificial Sequence: Synthetic oligonucleotide
gaggccauugcugcuuggc

SEQ ID NO: 1760428 - RNA, 19 nt, Artificial Sequence
  Description of Artificial Sequence: Synthetic oligonucleotide
aagguacccgcugcacauc

SEQ ID NO: 1760429 - RNA, 19 nt, Artificial Sequence
  Description of Artificial Sequence: Synthetic oligonucleotide
aaccaggggucaucccuca

SEQ ID NO: 1760430 - RNA, 19 nt, Artificial Sequence
  Description of Artificial Sequence: Synthetic oligonucleotide
gacgucuuguggaugaugu

SEQ ID NO: 1760431 - RNA, 19 nt, Artificial Sequence
  Description of Artificial Sequence: Synthetic oligonucleotide
cucaggagugaacccuagc

SEQ ID NO: 1760432 - RNA, 19 nt, Artificial Sequence
  Description of Artificial Sequence: Synthetic oligonucleotide
gagccaagaccugcaggcg

SEQ ID NO: 1760433 - RNA, 19 nt, Artificial Sequence
  Description of Artificial Sequence: Synthetic oligonucleotide
cucgaagcugucuguacca

SEQ ID NO: 1760434 - RNA, 19 nt, Artificial Sequence
  Description of Artificial Sequence: Synthetic oligonucleotide
caaguucugcaggucacac

SEQ ID NO: 1760435 - RNA, 19 nt, Artificial Sequence
  Description of Artificial Sequence: Synthetic oligonucleotide
ggaacaguaaauugacacu

SEQ ID NO: 1760436 - RNA, 19 nt, Artificial Sequence
  Description of Artificial Sequence: Synthetic oligonucleotide
acauuccuaggugcuagug

SEQ ID NO: 1760437 - RNA, 19 nt, Artificial Sequence
  Description of Artificial Sequence: Synthetic oligonucleotide
caggaauaacugguuugcc

SEQ ID NO: 1760438 - RNA, 19 nt, Artificial Sequence
  Description of Artificial Sequence: Synthetic oligonucleotide
uugccuuguucaacugggu

SEQ ID NO: 1760439 - RNA, 19 nt, Artificial Sequence
  Description of Artificial Sequence: Synthetic oligonucleotide
uccggugaagccagccagu

SEQ ID NO: 1760440 - RNA, 19 nt, Artificial Sequence
  Description of Artificial Sequence: Synthetic oligonucleotide
agguacccgcugcacaucu

SEQ ID NO: 1760441 - RNA, 19 nt, Artificial Sequence
  Description of Artificial Sequence: Synthetic oligonucleotide
aguauugagccgagacuug

SEQ ID NO: 1760442 - RNA, 19 nt, Artificial Sequence
  Description of Artificial Sequence: Synthetic oligonucleotide
aacgguuggcggauuuuga

SEQ ID NO: 1760443 - RNA, 19 nt, Artificial Sequence
  Description of Artificial Sequence: Synthetic oligonucleotide
gcagacggcgggcacaugc

SEQ ID NO: 1760444 - RNA, 19 nt, Artificial Sequence
  Description of Artificial Sequence: Synthetic oligonucleotide
ugacgucuuguggaugaug

SEQ ID NO: 1760445 - RNA, 19 nt, Artificial Sequence
  Description of Artificial Sequence: Synthetic oligonucleotide
gaagguacccgcugcacau

SEQ ID NO: 1760446 - RNA, 19 nt, Artificial Sequence
  Description of Artificial Sequence: Synthetic oligonucleotide
uuagcuccugagagauuaa

SEQ ID NO: 1760447 - RNA, 19 nt, Artificial Sequence
  Description of Artificial Sequence: Synthetic oligonucleotide
gcaagcuugaacucccauc

SEQ ID NO: 1760448 - RNA, 19 nt, Artificial Sequence
  Description of Artificial Sequence: Synthetic oligonucleotide
gagcgagucggagcucucg

SEQ ID NO: 1760449 - RNA, 19 nt, Artificial Sequence
  Description of Artificial Sequence: Synthetic oligonucleotide
guugguuuauugaggcaca

SEQ ID NO: 1760450 - RNA, 19 nt, Artificial Sequence
  Description of Artificial Sequence: Synthetic oligonucleotide
uuccuaggugcuagugaaa

SEQ ID NO: 1760451 - RNA, 19 nt, Artificial Sequence
  Description of Artificial Sequence: Synthetic oligonucleotide
agcgagucggagcucucga

SEQ ID NO: 1760452 - RNA, 19 nt, Artificial Sequence
  Description of Artificial Sequence: Synthetic oligonucleotide
ugacaggauuugucagaga

SEQ ID NO: 1760453 - RNA, 19 nt, Artificial Sequence
  Description of Artificial Sequence: Synthetic oligonucleotide
cucgaagcucucaaaggaa

SEQ ID NO: 1760454 - RNA, 19 nt, Artificial Sequence
  Description of Artificial Sequence: Synthetic oligonucleotide
uagaacgguuggcggauuu

SEQ ID NO: 1760455 - RNA, 19 nt, Artificial Sequence
  Description of Artificial Sequence: Synthetic oligonucleotide
agcaagcuugaacucccau

SEQ ID NO: 1760456 - RNA, 19 nt, Artificial Sequence
  Description of Artificial Sequence: Synthetic oligonucleotide
ucuuuccccaccggcgggc

SEQ ID NO: 1760457 - RNA, 19 nt, Artificial Sequence
  Description of Artificial Sequence: Synthetic oligonucleotide
ucaucccucagaccccauu

SEQ ID NO: 1760458 - RNA, 19 nt, Artificial Sequence
  Description of Artificial Sequence: Synthetic oligonucleotide
agguaucugcauucuugau

SEQ ID NO: 1760459 - RNA, 19 nt, Artificial Sequence
  Description of Artificial Sequence: Synthetic oligonucleotide
uuccgaaauggauggccuu

SEQ ID NO: 1760460 - RNA, 19 nt, Artificial Sequence
  Description of Artificial Sequence: Synthetic oligonucleotide
aguugcugccagggaaguc

SEQ ID NO: 1760461 - RNA, 19 nt, Artificial Sequence
  Description of Artificial Sequence: Synthetic oligonucleotide
cuuggauguaguccuugaa

SEQ ID NO: 1760462 - RNA, 19 nt, Artificial Sequence
  Description of Artificial Sequence: Synthetic oligonucleotide
guucaacugggucacuccu

SEQ ID NO: 1760463 - RNA, 19 nt, Artificial Sequence
  Description of Artificial Sequence: Synthetic oligonucleotide
agccaguacugccgcagga

SEQ ID NO: 1760464 - RNA, 19 nt, Artificial Sequence
  Description of Artificial Sequence: Synthetic oligonucleotide
gguuggcggauuuugacgu

SEQ ID NO: 1760465 - RNA, 19 nt, Artificial Sequence
  Description of Artificial Sequence: Synthetic oligonucleotide
uuggcggauuuugacguua

SEQ ID NO: 1760466 - RNA, 19 nt, Artificial Sequence
  Description of Artificial Sequence: Synthetic oligonucleotide
uaccagguaucugcauucu

SEQ ID NO: 1760467 - RNA, 19 nt, Artificial Sequence
  Description of Artificial Sequence: Synthetic oligonucleotide
uacccgcugcacaucuagu

SEQ ID NO: 1760468 - RNA, 19 nt, Artificial Sequence
  Description of Artificial Sequence: Synthetic oligonucleotide
uggcggauuuugacguuau

SEQ ID NO: 1760469 - RNA, 19 nt, Artificial Sequence
  Description of Artificial Sequence: Synthetic oligonucleotide
auggguccgcuuccgguga

SEQ ID NO: 1760470 - RNA, 19 nt, Artificial Sequence
  Description of Artificial Sequence: Synthetic oligonucleotide
caaauucaaguugcugcca

SEQ ID NO: 1760471 - RNA, 19 nt, Artificial Sequence
  Description of Artificial Sequence: Synthetic oligonucleotide
cagccaguacugccgcagg

SEQ ID NO: 1760472 - RNA, 19 nt, Artificial Sequence
  Description of Artificial Sequence: Synthetic oligonucleotide
cucacgguccccgggcccg

SEQ ID NO: 1760473 - RNA, 19 nt, Artificial Sequence
  Description of Artificial Sequence: Synthetic oligonucleotide
ugccugacgucuuguggau

SEQ ID NO: 1760474 - RNA, 19 nt, Artificial Sequence
  Description of Artificial Sequence: Synthetic oligonucleotide
cuuccgaaauggauggccu

SEQ ID NO: 1760475 - RNA, 19 nt, Artificial Sequence
  Description of Artificial Sequence: Synthetic oligonucleotide
ucccacucacgguccccgg

SEQ ID NO: 1760476 - RNA, 19 nt, Artificial Sequence
  Description of Artificial Sequence: Synthetic oligonucleotide
cacaguuggauggguccgc

SEQ ID NO: 1760477 - RNA, 19 nt, Artificial Sequence
  Description of Artificial Sequence: Synthetic oligonucleotide
aucuaccagguaucugcau

SEQ ID NO: 1760478 - RNA, 19 nt, Artificial Sequence
  Description of Artificial Sequence: Synthetic oligonucleotide
gcggauuuugacguuauaa

SEQ ID NO: 1760479 - RNA, 19 nt, Artificial Sequence
  Description of Artificial Sequence: Synthetic oligonucleotide
ccucgaagcucucaaagga

SEQ ID NO: 1760480 - RNA, 19 nt, Artificial Sequence
  Description of Artificial Sequence: Synthetic oligonucleotide
gugaacccuagcaaguucu

SEQ ID NO: 1760481 - RNA, 19 nt, Artificial Sequence
  Description of Artificial Sequence: Synthetic oligonucleotide
cuuccggugaagccagcca

SEQ ID NO: 1760482 - RNA, 19 nt, Artificial Sequence
  Description of Artificial Sequence: Synthetic oligonucleotide
guacacguagcgcuugccu

SEQ ID NO: 1760483 - RNA, 19 nt, Artificial Sequence
  Description of Artificial Sequence: Synthetic oligonucleotide
ccucuuuccccaccggcgg

SEQ ID NO: 1760484 - RNA, 19 nt, Artificial Sequence
  Description of Artificial Sequence: Synthetic oligonucleotide
gguuucccagagccauugg

SEQ ID NO: 1760485 - RNA, 19 nt, Artificial Sequence
  Description of Artificial Sequence: Synthetic oligonucleotide
cuaguagggacgacuggcu

SEQ ID NO: 1760486 - RNA, 19 nt, Artificial Sequence
  Description of Artificial Sequence: Synthetic oligonucleotide
uuggagcagugggucagga

SEQ ID NO: 1760487 - RNA, 19 nt, Artificial Sequence
  Description of Artificial Sequence: Synthetic oligonucleotide
cuguaccauucucuggaga

SEQ ID NO: 1760488 - RNA, 19 nt, Artificial Sequence
  Description of Artificial Sequence: Synthetic oligonucleotide
gacuuccgaaauggauggc

SEQ ID NO: 1760489 - RNA, 19 nt, Artificial Sequence
  Description of Artificial Sequence: Synthetic oligonucleotide
ugacaguauugagccgaga

SEQ ID NO: 1760490 - RNA, 19 nt, Artificial Sequence
  Description of Artificial Sequence: Synthetic oligonucleotide
cgcaggaauaacugguuug

SEQ ID NO: 1760491 - RNA, 19 nt, Artificial Sequence
  Description of Artificial Sequence: Synthetic oligonucleotide
caguauugagccgagacuu

SEQ ID NO: 1760492 - RNA, 19 nt, Artificial Sequence
  Description of Artificial Sequence: Synthetic oligonucleotide
cacucacgguccccgggcc

SEQ ID NO: 1760493 - RNA, 19 nt, Artificial Sequence
  Description of Artificial Sequence: Synthetic oligonucleotide
gucaugguccuuggguuuc

SEQ ID NO: 1760494 - RNA, 19 nt, Artificial Sequence
  Description of Artificial Sequence: Synthetic oligonucleotide
gucggagcucucgaagcug

SEQ ID NO: 1760495 - RNA, 19 nt, Artificial Sequence
  Description of Artificial Sequence: Synthetic oligonucleotide
ucgaagcugucuguaccau

SEQ ID NO: 1760496 - RNA, 19 nt, Artificial Sequence
  Description of Artificial Sequence: Synthetic oligonucleotide
gcucucaaaggaagguacc

SEQ ID NO: 1760497 - RNA, 19 nt, Artificial Sequence
  Description of Artificial Sequence: Synthetic oligonucleotide
accagguaucugcauucuu

SEQ ID NO: 1760498 - RNA, 19 nt, Artificial Sequence
  Description of Artificial Sequence: Synthetic oligonucleotide
acgcccaggauggcaguuc

SEQ ID NO: 1760499 - RNA, 19 nt, Artificial Sequence
  Description of Artificial Sequence: Synthetic oligonucleotide
guugcagacggcgggcaca

SEQ ID NO: 1760500 - RNA, 19 nt, Artificial Sequence
  Description of Artificial Sequence: Synthetic oligonucleotide
acaguuggauggguccgcu

SEQ ID NO: 1760501 - RNA, 19 nt, Artificial Sequence
  Description of Artificial Sequence: Synthetic oligonucleotide
cgcugcacaucuaguaggg

SEQ ID NO: 1760502 - RNA, 19 nt, Artificial Sequence
  Description of Artificial Sequence: Synthetic oligonucleotide
uucucucaguuagcuccug

SEQ ID NO: 1760503 - RNA, 19 nt, Artificial Sequence
  Description of Artificial Sequence: Synthetic oligonucleotide
aucguagaccccggcucag

SEQ ID NO: 1760504 - RNA, 19 nt, Artificial Sequence
  Description of Artificial Sequence: Synthetic oligonucleotide
ggucaggacaggcuuccca

SEQ ID NO: 1760505 - RNA, 19 nt, Artificial Sequence
  Description of Artificial Sequence: Synthetic oligonucleotide
ccugacgucuuguggauga

SEQ ID NO: 1760506 - RNA, 19 nt, Artificial Sequence
  Description of Artificial Sequence: Synthetic oligonucleotide
ccucgucagggucagcaag

SEQ ID NO: 1760507 - RNA, 19 nt, Artificial Sequence
  Description of Artificial Sequence: Synthetic oligonucleotide
ucguagaccccggcucagc

SEQ ID NO: 1760508 - RNA, 19 nt, Artificial Sequence
  Description of Artificial Sequence: Synthetic oligonucleotide
acguagcgcuugccugacg

SEQ ID NO: 1760509 - RNA, 19 nt, Artificial Sequence
  Description of Artificial Sequence: Synthetic oligonucleotide
ggguuucccagagccauug

SEQ ID NO: 1760510 - RNA, 19 nt, Artificial Sequence
  Description of Artificial Sequence: Synthetic oligonucleotide
uggcuacaguccuccucga

SEQ ID NO: 1760511 - RNA, 19 nt, Artificial Sequence
  Description of Artificial Sequence: Synthetic oligonucleotide
ucgucccaaggaccucagu

SEQ ID NO: 1760512 - RNA, 19 nt, Artificial Sequence
  Description of Artificial Sequence: Synthetic oligonucleotide
cuucccacucacggucccc

SEQ ID NO: 1760513 - RNA, 19 nt, Artificial Sequence
  Description of Artificial Sequence: Synthetic oligonucleotide
aggcugucuuugggguagc

SEQ ID NO: 1760514 - RNA, 19 nt, Artificial Sequence
  Description of Artificial Sequence: Synthetic oligonucleotide
gcuggcuacaguccuccuc

SEQ ID NO: 1760515 - RNA, 19 nt, Artificial Sequence
  Description of Artificial Sequence: Synthetic oligonucleotide
ccaccggcgggccaccucg

SEQ ID NO: 1760516 - RNA, 19 nt, Artificial Sequence
  Description of Artificial Sequence: Synthetic oligonucleotide
agaacgguuggcggauuuu

SEQ ID NO: 1760517 - RNA, 19 nt, Artificial Sequence
  Description of Artificial Sequence: Synthetic oligonucleotide
uuccccaccggcgggccac

SEQ ID NO: 1760518 - RNA, 19 nt, Artificial Sequence
  Description of Artificial Sequence: Synthetic oligonucleotide
cuuuccccaccggcgggcc

SEQ ID NO: 1760519 - RNA, 19 nt, Artificial Sequence
  Description of Artificial Sequence: Synthetic oligonucleotide
caguuagcuccugagagau

SEQ ID NO: 1760520 - RNA, 19 nt, Artificial Sequence
  Description of Artificial Sequence: Synthetic oligonucleotide
cgagucggagcucucgaag

SEQ ID NO: 1760521 - RNA, 19 nt, Artificial Sequence
  Description of Artificial Sequence: Synthetic oligonucleotide
accggcgggccaccucguc

SEQ ID NO: 1760522 - RNA, 19 nt, Artificial Sequence
  Description of Artificial Sequence: Synthetic oligonucleotide
cccucagaccccauuccug

SEQ ID NO: 1760523 - RNA, 19 nt, Artificial Sequence
  Description of Artificial Sequence: Synthetic oligonucleotide
ccugagagauuaaaucugu

SEQ ID NO: 1760524 - RNA, 19 nt, Artificial Sequence
  Description of Artificial Sequence: Synthetic oligonucleotide
caacugggucacuccucuc

SEQ ID NO: 1760525 - RNA, 19 nt, Artificial Sequence
  Description of Artificial Sequence: Synthetic oligonucleotide
agaccccauuccuguugga

SEQ ID NO: 1760526 - RNA, 19 nt, Artificial Sequence
  Description of Artificial Sequence: Synthetic oligonucleotide
aggucgucccaaggaccuc

SEQ ID NO: 1760527 - RNA, 19 nt, Artificial Sequence
  Description of Artificial Sequence: Synthetic oligonucleotide
cacaucuaguagggacgac

SEQ ID NO: 1760528 - RNA, 19 nt, Artificial Sequence
  Description of Artificial Sequence: Synthetic oligonucleotide
aggacaugguugguuuauu

SEQ ID NO: 1760529 - RNA, 19 nt, Artificial Sequence
  Description of Artificial Sequence: Synthetic oligonucleotide
gggacgacuggcuguucca

SEQ ID NO: 1760530 - RNA, 19 nt, Artificial Sequence
  Description of Artificial Sequence: Synthetic oligonucleotide
aucgguacacguagcgcuu

SEQ ID NO: 1760531 - RNA, 19 nt, Artificial Sequence
  Description of Artificial Sequence: Synthetic oligonucleotide
cacguagcgcuugccugac

SEQ ID NO: 1760532 - RNA, 19 nt, Artificial Sequence
  Description of Artificial Sequence: Synthetic oligonucleotide
cccagagccauuggugagc

SEQ ID NO: 1760533 - RNA, 19 nt, Artificial Sequence
  Description of Artificial Sequence: Synthetic oligonucleotide
gcuuccggugaagccagcc

SEQ ID NO: 1760534 - RNA, 19 nt, Artificial Sequence
  Description of Artificial Sequence: Synthetic oligonucleotide
ggucacacacaaaucggua

SEQ ID NO: 1760535 - RNA, 19 nt, Artificial Sequence
  Description of Artificial Sequence: Synthetic oligonucleotide
gcagugggucaggacaggc

SEQ ID NO: 1760536 - RNA, 19 nt, Artificial Sequence
  Description of Artificial Sequence: Synthetic oligonucleotide
ggagugaacccuagcaagu

SEQ ID NO: 1760537 - RNA, 19 nt, Artificial Sequence
  Description of Artificial Sequence: Synthetic oligonucleotide
gcacaucuaguagggacga

SEQ ID NO: 1760538 - RNA, 19 nt, Artificial Sequence
  Description of Artificial Sequence: Synthetic oligonucleotide
guaccauucucuggagagu

SEQ ID NO: 1760539 - RNA, 19 nt, Artificial Sequence
  Description of Artificial Sequence: Synthetic oligonucleotide
ccucaggagugaacccuag

SEQ ID NO: 1760540 - RNA, 19 nt, Artificial Sequence
  Description of Artificial Sequence: Synthetic oligonucleotide
gagugaacccuagcaaguu

SEQ ID NO: 1760541 - RNA, 19 nt, Artificial Sequence
  Description of Artificial Sequence: Synthetic oligonucleotide
ucacgguccccgggcccgg

SEQ ID NO: 1760542 - RNA, 19 nt, Artificial Sequence
  Description of Artificial Sequence: Synthetic oligonucleotide
uggguccgcuuccggugaa

SEQ ID NO: 1760543 - RNA, 19 nt, Artificial Sequence
  Description of Artificial Sequence: Synthetic oligonucleotide
ggucgucccaaggaccuca

SEQ ID NO: 1760544 - RNA, 19 nt, Artificial Sequence
  Description of Artificial Sequence: Synthetic oligonucleotide
ccgcuuccggugaagccag

SEQ ID NO: 1760545 - RNA, 19 nt, Artificial Sequence
  Description of Artificial Sequence: Synthetic oligonucleotide
cagugggucaggacaggcu

SEQ ID NO: 1760546 - RNA, 19 nt, Artificial Sequence
  Description of Artificial Sequence: Synthetic oligonucleotide
ggaaguccugcgugaugga

SEQ ID NO: 1760547 - RNA, 19 nt, Artificial Sequence
  Description of Artificial Sequence: Synthetic oligonucleotide
ggcguugcagacggcgggc

SEQ ID NO: 1760548 - RNA, 19 nt, Artificial Sequence
  Description of Artificial Sequence: Synthetic oligonucleotide
ggcgggcacaugcugucca

SEQ ID NO: 1760549 - RNA, 19 nt, Artificial Sequence
  Description of Artificial Sequence: Synthetic oligonucleotide
gcgggcacaugcuguccag

SEQ ID NO: 1760550 - RNA, 19 nt, Artificial Sequence
  Description of Artificial Sequence: Synthetic oligonucleotide
ggauggguccgcuuccggu

SEQ ID NO: 1760551 - RNA, 19 nt, Artificial Sequence
  Description of Artificial Sequence: Synthetic oligonucleotide
auagaacgguuggcggauu

SEQ ID NO: 1760552 - RNA, 19 nt, Artificial Sequence
  Description of Artificial Sequence: Synthetic oligonucleotide
agccgagacuugggcaaca

SEQ ID NO: 1760553 - RNA, 19 nt, Artificial Sequence
  Description of Artificial Sequence: Synthetic oligonucleotide
guacugccgcaggaauaac

SEQ ID NO: 1760554 - RNA, 19 nt, Artificial Sequence
  Description of Artificial Sequence: Synthetic oligonucleotide
ccaggggucaucccucaga

SEQ ID NO: 1760555 - RNA, 19 nt, Artificial Sequence
  Description of Artificial Sequence: Synthetic oligonucleotide
gggucacuccucucuugga

SEQ ID NO: 1760556 - RNA, 19 nt, Artificial Sequence
  Description of Artificial Sequence: Synthetic oligonucleotide
accucaggagcgagucgga

SEQ ID NO: 1760557 - RNA, 19 nt, Artificial Sequence
  Description of Artificial Sequence: Synthetic oligonucleotide
cuccucucuuggauguagu

SEQ ID NO: 1760558 - RNA, 19 nt, Artificial Sequence
  Description of Artificial Sequence: Synthetic oligonucleotide
guagggacgacuggcuguu

SEQ ID NO: 1760559 - RNA, 19 nt, Artificial Sequence
  Description of Artificial Sequence: Synthetic oligonucleotide
ggccuuguggaagaggcau

SEQ ID NO: 1760560 - RNA, 19 nt, Artificial Sequence
  Description of Artificial Sequence: Synthetic oligonucleotide
aguuagcuccugagagauu

SEQ ID NO: 1760561 - RNA, 19 nt, Artificial Sequence
  Description of Artificial Sequence: Synthetic oligonucleotide
cgaaauggauggccuugug

SEQ ID NO: 1760562 - RNA, 19 nt, Artificial Sequence
  Description of Artificial Sequence: Synthetic oligonucleotide
ggaccucagucuucugugu

SEQ ID NO: 1760563 - RNA, 19 nt, Artificial Sequence
  Description of Artificial Sequence: Synthetic oligonucleotide
ccucagaccccauuccugu

SEQ ID NO: 1760564 - RNA, 19 nt, Artificial Sequence
  Description of Artificial Sequence: Synthetic oligonucleotide
cuugaaggacaugguuggu

SEQ ID NO: 1760565 - RNA, 19 nt, Artificial Sequence
  Description of Artificial Sequence: Synthetic oligonucleotide
ccucaggagcgagucggag

SEQ ID NO: 1760566 - RNA, 19 nt, Artificial Sequence
  Description of Artificial Sequence: Synthetic oligonucleotide
agcgcuugccugacgucuu

SEQ ID NO: 1760567 - RNA, 19 nt, Artificial Sequence
  Description of Artificial Sequence: Synthetic oligonucleotide
ggcuacaguccuccucgaa

SEQ ID NO: 1760568 - RNA, 19 nt, Artificial Sequence
  Description of Artificial Sequence: Synthetic oligonucleotide
ccgagacuugggcaacauc

SEQ ID NO: 1760569 - RNA, 19 nt, Artificial Sequence
  Description of Artificial Sequence: Synthetic oligonucleotide
ggagcucucgaagcugucu

SEQ ID NO: 1760570 - RNA, 19 nt, Artificial Sequence
  Description of Artificial Sequence: Synthetic oligonucleotide
guagaccccggcucagcuu

SEQ ID NO: 1760571 - RNA, 19 nt, Artificial Sequence
  Description of Artificial Sequence: Synthetic oligonucleotide
guuggcggauuuugacguu

SEQ ID NO: 1760572 - RNA, 19 nt, Artificial Sequence
  Description of Artificial Sequence: Synthetic oligonucleotide
ugcagacggcgggcacaug

SEQ ID NO: 1760573 - RNA, 19 nt, Artificial Sequence
  Description of Artificial Sequence: Synthetic oligonucleotide
uagggacgacuggcuguuc

SEQ ID NO: 1760574 - RNA, 19 nt, Artificial Sequence
  Description of Artificial Sequence: Synthetic oligonucleotide
gcugcacaucuaguaggga

SEQ ID NO: 1760575 - RNA, 19 nt, Artificial Sequence
  Description of Artificial Sequence: Synthetic oligonucleotide
gcgagucggagcucucgaa

SEQ ID NO: 1760576 - RNA, 19 nt, Artificial Sequence
  Description of Artificial Sequence: Synthetic oligonucleotide
gccugacgucuuguggaug

SEQ ID NO: 1760577 - RNA, 19 nt, Artificial Sequence
  Description of Artificial Sequence: Synthetic oligonucleotide
gcucucgaagcugucugua

SEQ ID NO: 1760578 - RNA, 19 nt, Artificial Sequence
  Description of Artificial Sequence: Synthetic oligonucleotide
ggcggauuuugacguuaua

SEQ ID NO: 1760579 - RNA, 19 nt, Artificial Sequence
  Description of Artificial Sequence: Synthetic oligonucleotide
uccccaccggcgggccacc

SEQ ID NO: 1760580 - RNA, 19 nt, Artificial Sequence
  Description of Artificial Sequence: Synthetic oligonucleotide
ggguccgcuuccggugaag

SEQ ID NO: 1760581 - RNA, 19 nt, Artificial Sequence
  Description of Artificial Sequence: Synthetic oligonucleotide
cguagcgcuugccugacgu

SEQ ID NO: 1760582 - RNA, 19 nt, Artificial Sequence
  Description of Artificial Sequence: Synthetic oligonucleotide
cgauuucucucaguuagcu

SEQ ID NO: 1760583 - RNA, 19 nt, Artificial Sequence
  Description of Artificial Sequence: Synthetic oligonucleotide
ggaaugaaaggaggccauu

SEQ ID NO: 1760584 - RNA, 19 nt, Artificial Sequence
  Description of Artificial Sequence: Synthetic oligonucleotide
cacgguccccgggcccggg

SEQ ID NO: 1760585 - RNA, 19 nt, Artificial Sequence
  Description of Artificial Sequence: Synthetic oligonucleotide
cggugaagccagccaguac

SEQ ID NO: 1760586 - RNA, 19 nt, Artificial Sequence
  Description of Artificial Sequence: Synthetic oligonucleotide
cucagaccccauuccuguu

SEQ ID NO: 1760587 - RNA, 19 nt, Artificial Sequence
  Description of Artificial Sequence: Synthetic oligonucleotide
cguugcagacggcgggcac

SEQ ID NO: 1760588 - RNA, 19 nt, Artificial Sequence
  Description of Artificial Sequence: Synthetic oligonucleotide
ccagcucaaggucguccca

SEQ ID NO: 1760589 - RNA, 19 nt, Artificial Sequence
  Description of Artificial Sequence: Synthetic oligonucleotide
cagagccauuggugagcaa

SEQ ID NO: 1760590 - RNA, 19 nt, Artificial Sequence
  Description of Artificial Sequence: Synthetic oligonucleotide
cacuccucucuuggaugua

SEQ ID NO: 1760591 - RNA, 19 nt, Artificial Sequence
  Description of Artificial Sequence: Synthetic oligonucleotide
caguuggauggguccgcuu

SEQ ID NO: 1760592 - RNA, 19 nt, Artificial Sequence
  Description of Artificial Sequence: Synthetic oligonucleotide
ccgaaauggauggccuugu

SEQ ID NO: 1760593 - RNA, 19 nt, Artificial Sequence
  Description of Artificial Sequence: Synthetic oligonucleotide
cugacgucuuguggaugau

SEQ ID NO: 1760594 - RNA, 19 nt, Artificial Sequence
  Description of Artificial Sequence: Synthetic oligonucleotide
gccgcaggaauaacugguu

SEQ ID NO: 1760595 - RNA, 19 nt, Artificial Sequence
  Description of Artificial Sequence: Synthetic oligonucleotide
gguacccgcugcacaucua

SEQ ID NO: 1760596 - RNA, 19 nt, Artificial Sequence
  Description of Artificial Sequence: Synthetic oligonucleotide
ccaggagggguuccauccu

SEQ ID NO: 1760597 - RNA, 19 nt, Artificial Sequence
  Description of Artificial Sequence: Synthetic oligonucleotide
cguagaccccggcucagcu

SEQ ID NO: 1760598 - RNA, 19 nt, Artificial Sequence
  Description of Artificial Sequence: Synthetic oligonucleotide
cggagcucucgaagcuguc

SEQ ID NO: 1760599 - RNA, 19 nt, Artificial Sequence
  Description of Artificial Sequence: Synthetic oligonucleotide
ccggugaagccagccagua

SEQ ID NO: 1760600 - RNA, 19 nt, Artificial Sequence
  Description of Artificial Sequence: Synthetic oligonucleotide
ccgcaggaauaacugguuu

SEQ ID NO: 1760601 - RNA, 19 nt, Artificial Sequence
  Description of Artificial Sequence: Synthetic oligonucleotide
cuggagagucaugguccuu

SEQ ID NO: 1760602 - RNA, 19 nt, Artificial Sequence
  Description of Artificial Sequence: Synthetic oligonucleotide
cggcgggcacaugcugucc

SEQ ID NO: 1760603 - RNA, 19 nt, Artificial Sequence
  Description of Artificial Sequence: Synthetic oligonucleotide
gucaucccucagaccccau

SEQ ID NO: 1760604 - RNA, 19 nt, Artificial Sequence
  Description of Artificial Sequence: Synthetic oligonucleotide
caccggcgggccaccucgu

SEQ ID NO: 1760605 - RNA, 19 nt, Artificial Sequence
  Description of Artificial Sequence: Synthetic oligonucleotide
ccaccucgucagggucagc

SEQ ID NO: 1760606 - RNA, 19 nt, Artificial Sequence
  Description of Artificial Sequence: Synthetic oligonucleotide
gcccaggauggcaguuccu

SEQ ID NO: 1760607 - RNA, 19 nt, Artificial Sequence
  Description of Artificial Sequence: Synthetic oligonucleotide
cgucagggucagcaagcuu

SEQ ID NO: 1760608 - RNA, 19 nt, Artificial Sequence
  Description of Artificial Sequence: Synthetic oligonucleotide
uguaguaauacacugacca

SEQ ID NO: 1760609 - RNA, 19 nt, Artificial Sequence
  Description of Artificial Sequence: Synthetic oligonucleotide
ugaccagagagccugaugg

SEQ ID NO: 1760610 - RNA, 19 nt, Artificial Sequence
  Description of Artificial Sequence: Synthetic oligonucleotide
ugccuucugauucagaugg

SEQ ID NO: 1760611 - RNA, 19 nt, Artificial Sequence
  Description of Artificial Sequence: Synthetic oligonucleotide
caaugaauggaucaggcgg

SEQ ID NO: 1760612 - RNA, 19 nt, Artificial Sequence
  Description of Artificial Sequence: Synthetic oligonucleotide
ugaccagccaauaaugcgg

SEQ ID NO: 1760613 - RNA, 19 nt, Artificial Sequence
  Description of Artificial Sequence: Synthetic oligonucleotide
guugcugguaacuagcagg

SEQ ID NO: 1760614 - RNA, 19 nt, Artificial Sequence
  Description of Artificial Sequence: Synthetic oligonucleotide
aaaaggaccaguccuaaaa

SEQ ID NO: 1760615 - RNA, 19 nt, Artificial Sequence
  Description of Artificial Sequence: Synthetic oligonucleotide
guaacuagcaggcugggcc

SEQ ID NO: 1760616 - RNA, 19 nt, Artificial Sequence
  Description of Artificial Sequence: Synthetic oligonucleotide
guugcagacgaagagaacg

SEQ ID NO: 1760617 - RNA, 19 nt, Artificial Sequence
  Description of Artificial Sequence: Synthetic oligonucleotide
aauaaugcggcaggcuacc

SEQ ID NO: 1760618 - RNA, 19 nt, Artificial Sequence
  Description of Artificial Sequence: Synthetic oligonucleotide
uccuaaaauguucauuccc

SEQ ID NO: 1760619 - RNA, 19 nt, Artificial Sequence
  Description of Artificial Sequence: Synthetic oligonucleotide
aaagucaacgcagcgccgc

SEQ ID NO: 1760620 - RNA, 19 nt, Artificial Sequence
  Description of Artificial Sequence: Synthetic oligonucleotide
aaaagaccggcuuccaaug

SEQ ID NO: 1760621 - RNA, 19 nt, Artificial Sequence
  Description of Artificial Sequence: Synthetic oligonucleotide
ucagauuugcaauugggaa

SEQ ID NO: 1760622 - RNA, 19 nt, Artificial Sequence
  Description of Artificial Sequence: Synthetic oligonucleotide
uguguaauugguugcagac

SEQ ID NO: 1760623 - RNA, 19 nt, Artificial Sequence
  Description of Artificial Sequence: Synthetic oligonucleotide
acgaagagaacgcugcaac

SEQ ID NO: 1760624 - RNA, 19 nt, Artificial Sequence
  Description of Artificial Sequence: Synthetic oligonucleotide
aagauuggaaggaaacagg

SEQ ID NO: 1760625 - RNA, 19 nt, Artificial Sequence
  Description of Artificial Sequence: Synthetic oligonucleotide
uaauacacugaccagccaa

SEQ ID NO: 1760626 - RNA, 19 nt, Artificial Sequence
  Description of Artificial Sequence: Synthetic oligonucleotide
uccaaugaauggaucaggc

SEQ ID NO: 1760627 - RNA, 19 nt, Artificial Sequence
  Description of Artificial Sequence: Synthetic oligonucleotide
auugguugcagacgaagag

SEQ ID NO: 1760628 - RNA, 19 nt, Artificial Sequence
  Description of Artificial Sequence: Synthetic oligonucleotide
ugggcgaugaacacugcgg

SEQ ID NO: 1760629 - RNA, 19 nt, Artificial Sequence
  Description of Artificial Sequence: Synthetic oligonucleotide
ugauucagaugguugagga

SEQ ID NO: 1760630 - RNA, 19 nt, Artificial Sequence
  Description of Artificial Sequence: Synthetic oligonucleotide
uaguaauacacugaccagc

SEQ ID NO: 1760631 - RNA, 19 nt, Artificial Sequence
  Description of Artificial Sequence: Synthetic oligonucleotide
aagagaacgcugcaaccag

SEQ ID NO: 1760632 - RNA, 19 nt, Artificial Sequence
  Description of Artificial Sequence: Synthetic oligonucleotide
aaggaccaguccuaaaaug

SEQ ID NO: 1760633 - RNA, 19 nt, Artificial Sequence
  Description of Artificial Sequence: Synthetic oligonucleotide
gaauggaucaggcggagac

SEQ ID NO: 1760634 - RNA, 19 nt, Artificial Sequence
  Description of Artificial Sequence: Synthetic oligonucleotide
uaguaagucgaggaaagag

SEQ ID NO: 1760635 - RNA, 19 nt, Artificial Sequence
  Description of Artificial Sequence: Synthetic oligonucleotide
ucguaggucacguuucccg

SEQ ID NO: 1760636 - RNA, 19 nt, Artificial Sequence
  Description of Artificial Sequence: Synthetic oligonucleotide
aaccggaugagcucuucuc

SEQ ID NO: 1760637 - RNA, 19 nt, Artificial Sequence
  Description of Artificial Sequence: Synthetic oligonucleotide
cacauuguugagcugggcg

SEQ ID NO: 1760638 - RNA, 19 nt, Artificial Sequence
  Description of Artificial Sequence: Synthetic oligonucleotide
uggauucggagaaaagacc

SEQ ID NO: 1760639 - RNA, 19 nt, Artificial Sequence
  Description of Artificial Sequence: Synthetic oligonucleotide
auucggagaaaagaccggc

SEQ ID NO: 1760640 - RNA, 19 nt, Artificial Sequence
  Description of Artificial Sequence: Synthetic oligonucleotide
augaacgccaaagcgaccg

SEQ ID NO: 1760641 - RNA, 19 nt, Artificial Sequence
  Description of Artificial Sequence: Synthetic oligonucleotide
cagaagauuggaaggaaac

SEQ ID NO: 1760642 - RNA, 19 nt, Artificial Sequence
  Description of Artificial Sequence: Synthetic oligonucleotide
agauuugcaauugggaaug

SEQ ID NO: 1760643 - RNA, 19 nt, Artificial Sequence
  Description of Artificial Sequence: Synthetic oligonucleotide
uaauugguugcagacgaag

SEQ ID NO: 1760644 - RNA, 19 nt, Artificial Sequence
  Description of Artificial Sequence: Synthetic oligonucleotide
cagguuucuuaguaagucg

SEQ ID NO: 1760645 - RNA, 19 nt, Artificial Sequence
  Description of Artificial Sequence: Synthetic oligonucleotide
aagucgaggaaagagucca

SEQ ID NO: 1760646 - RNA, 19 nt, Artificial Sequence
  Description of Artificial Sequence: Synthetic oligonucleotide
aaugaauggaucaggcgga

SEQ ID NO: 1760647 - RNA, 19 nt, Artificial Sequence
  Description of Artificial Sequence: Synthetic oligonucleotide
cuguggacaauccaauggc

SEQ ID NO: 1760648 - RNA, 19 nt, Artificial Sequence
  Description of Artificial Sequence: Synthetic oligonucleotide
uucauucccucaauaucag

SEQ ID NO: 1760649 - RNA, 19 nt, Artificial Sequence
  Description of Artificial Sequence: Synthetic oligonucleotide
ucuacggaucccuauggga

SEQ ID NO: 1760650 - RNA, 19 nt, Artificial Sequence
  Description of Artificial Sequence: Synthetic oligonucleotide
aauguucauucccucaaua

SEQ ID NO: 1760651 - RNA, 19 nt, Artificial Sequence
  Description of Artificial Sequence: Synthetic oligonucleotide
uaagucgaggaaagagucc

SEQ ID NO: 1760652 - RNA, 19 nt, Artificial Sequence
  Description of Artificial Sequence: Synthetic oligonucleotide
guaguaauacacugaccag

SEQ ID NO: 1760653 - RNA, 19 nt, Artificial Sequence
  Description of Artificial Sequence: Synthetic oligonucleotide
uccucagauuugcaauugg

SEQ ID NO: 1760654 - RNA, 19 nt, Artificial Sequence
  Description of Artificial Sequence: Synthetic oligonucleotide
uuuccuagccgccgucucg

SEQ ID NO: 1760655 - RNA, 19 nt, Artificial Sequence
  Description of Artificial Sequence: Synthetic oligonucleotide
aggaacuuggauucggaga

SEQ ID NO: 1760656 - RNA, 19 nt, Artificial Sequence
  Description of Artificial Sequence: Synthetic oligonucleotide
cugcccugcauucaggucc

SEQ ID NO: 1760657 - RNA, 19 nt, Artificial Sequence
  Description of Artificial Sequence: Synthetic oligonucleotide
ggauucggagaaaagaccg

SEQ ID NO: 1760658 - RNA, 19 nt, Artificial Sequence
  Description of Artificial Sequence: Synthetic oligonucleotide
ucccuaugggaacaauucc

SEQ ID NO: 1760659 - RNA, 19 nt, Artificial Sequence
  Description of Artificial Sequence: Synthetic oligonucleotide
uugcagacgaagagaacgc

SEQ ID NO: 1760660 - RNA, 19 nt, Artificial Sequence
  Description of Artificial Sequence: Synthetic oligonucleotide
acugaccagccaauaaugc

SEQ ID NO: 1760661 - RNA, 19 nt, Artificial Sequence
  Description of Artificial Sequence: Synthetic oligonucleotide
guucauucccucaauauca

SEQ ID NO: 1760662 - RNA, 19 nt, Artificial Sequence
  Description of Artificial Sequence: Synthetic oligonucleotide
ugguugcagacgaagagaa

SEQ ID NO: 1760663 - RNA, 19 nt, Artificial Sequence
  Description of Artificial Sequence: Synthetic oligonucleotide
aucccuaugggaacaauuc

SEQ ID NO: 1760664 - RNA, 19 nt, Artificial Sequence
  Description of Artificial Sequence: Synthetic oligonucleotide
agcgccgcgauuuccuagc

SEQ ID NO: 1760665 - RNA, 19 nt, Artificial Sequence
  Description of Artificial Sequence: Synthetic oligonucleotide
aauugguugcagacgaaga

SEQ ID NO: 1760666 - RNA, 19 nt, Artificial Sequence
  Description of Artificial Sequence: Synthetic oligonucleotide
uaaugcggcaggcuaccag

SEQ ID NO: 1760667 - RNA, 19 nt, Artificial Sequence
  Description of Artificial Sequence: Synthetic oligonucleotide
aguaagucgaggaaagagu

SEQ ID NO: 1760668 - RNA, 19 nt, Artificial Sequence
  Description of Artificial Sequence: Synthetic oligonucleotide
gauucggagaaaagaccgg

SEQ ID NO: 1760669 - RNA, 19 nt, Artificial Sequence
  Description of Artificial Sequence: Synthetic oligonucleotide
ugaggauuccggcucccag

SEQ ID NO: 1760670 - RNA, 19 nt, Artificial Sequence
  Description of Artificial Sequence: Synthetic oligonucleotide
cuagccgccgucucgggcg

SEQ ID NO: 1760671 - RNA, 19 nt, Artificial Sequence
  Description of Artificial Sequence: Synthetic oligonucleotide
caauaaugcggcaggcuac

SEQ ID NO: 1760672 - RNA, 19 nt, Artificial Sequence
  Description of Artificial Sequence: Synthetic oligonucleotide
ugcaauugggaauggcuuc

SEQ ID NO: 1760673 - RNA, 19 nt, Artificial Sequence
  Description of Artificial Sequence: Synthetic oligonucleotide
augaugaacgccaaagcga

SEQ ID NO: 1760674 - RNA, 19 nt, Artificial Sequence
  Description of Artificial Sequence: Synthetic oligonucleotide
agaugguugaggauuccgg

SEQ ID NO: 1760675 - RNA, 19 nt, Artificial Sequence
  Description of Artificial Sequence: Synthetic oligonucleotide
aaagaccggcuuccaauga

SEQ ID NO: 1760676 - RNA, 19 nt, Artificial Sequence
  Description of Artificial Sequence: Synthetic oligonucleotide
gauuccggcucccagggca

SEQ ID NO: 1760677 - RNA, 19 nt, Artificial Sequence
  Description of Artificial Sequence: Synthetic oligonucleotide
cacugaccagccaauaaug

SEQ ID NO: 1760678 - RNA, 19 nt, Artificial Sequence
  Description of Artificial Sequence: Synthetic oligonucleotide
guguaauugguugcagacg

SEQ ID NO: 1760679 - RNA, 19 nt, Artificial Sequence
  Description of Artificial Sequence: Synthetic oligonucleotide
acacugaccagccaauaau

SEQ ID NO: 1760680 - RNA, 19 nt, Artificial Sequence
  Description of Artificial Sequence: Synthetic oligonucleotide
guaagucgaggaaagaguc

SEQ ID NO: 1760681 - RNA, 19 nt, Artificial Sequence
  Description of Artificial Sequence: Synthetic oligonucleotide
cuaggauggugaaaaucug

SEQ ID NO: 1760682 - RNA, 19 nt, Artificial Sequence
  Description of Artificial Sequence: Synthetic oligonucleotide
gaggccgaaguagacacag

SEQ ID NO: 1760683 - RNA, 19 nt, Artificial Sequence
  Description of Artificial Sequence: Synthetic oligonucleotide
uaacuagcaggcugggcca

SEQ ID NO: 1760684 - RNA, 19 nt, Artificial Sequence
  Description of Artificial Sequence: Synthetic oligonucleotide
uucccucaauaucagugac

SEQ ID NO: 1760685 - RNA, 19 nt, Artificial Sequence
  Description of Artificial Sequence: Synthetic oligonucleotide
ucucguaggucacguuucc

SEQ ID NO: 1760686 - RNA, 19 nt, Artificial Sequence
  Description of Artificial Sequence: Synthetic oligonucleotide
cagcacgcaaggaacuugg

SEQ ID NO: 1760687 - RNA, 19 nt, Artificial Sequence
  Description of Artificial Sequence: Synthetic oligonucleotide
cuguaguaauacacugacc

SEQ ID NO: 1760688 - RNA, 19 nt, Artificial Sequence
  Description of Artificial Sequence: Synthetic oligonucleotide
auggaucaggcggagacag

SEQ ID NO: 1760689 - RNA, 19 nt, Artificial Sequence
  Description of Artificial Sequence: Synthetic oligonucleotide
aaaagucaacgcagcgccg

SEQ ID NO: 1760690 - RNA, 19 nt, Artificial Sequence
  Description of Artificial Sequence: Synthetic oligonucleotide
uucucguaggucacguuuc

SEQ ID NO: 1760691 - RNA, 19 nt, Artificial Sequence
  Description of Artificial Sequence: Synthetic oligonucleotide
cucgccuuucuucauugcc

SEQ ID NO: 1760692 - RNA, 19 nt, Artificial Sequence
  Description of Artificial Sequence: Synthetic oligonucleotide
uucggagaaaagaccggcu

SEQ ID NO: 1760693 - RNA, 19 nt, Artificial Sequence
  Description of Artificial Sequence: Synthetic oligonucleotide
auuuccuagccgccgucuc

SEQ ID NO: 1760694 - RNA, 19 nt, Artificial Sequence
  Description of Artificial Sequence: Synthetic oligonucleotide
aagaccggcuuccaaugaa

SEQ ID NO: 1760695 - RNA, 19 nt, Artificial Sequence
  Description of Artificial Sequence: Synthetic oligonucleotide
uagccguuggucucgcugc

SEQ ID NO: 1760696 - RNA, 19 nt, Artificial Sequence
  Description of Artificial Sequence: Synthetic oligonucleotide
agcucuacggaucccuaug

SEQ ID NO: 1760697 - RNA, 19 nt, Artificial Sequence
  Description of Artificial Sequence: Synthetic oligonucleotide
uaggucacguuucccgagc

SEQ ID NO: 1760698 - RNA, 19 nt, Artificial Sequence
  Description of Artificial Sequence: Synthetic oligonucleotide
gaaaagaccggcuuccaau

SEQ ID NO: 1760699 - RNA, 19 nt, Artificial Sequence
  Description of Artificial Sequence: Synthetic oligonucleotide
ucccgagcugguguuaugg

SEQ ID NO: 1760700 - RNA, 19 nt, Artificial Sequence
  Description of Artificial Sequence: Synthetic oligonucleotide
ugcaaccagaagauuggaa

SEQ ID NO: 1760701 - RNA, 19 nt, Artificial Sequence
  Description of Artificial Sequence: Synthetic oligonucleotide
ggaacuuggauucggagaa

SEQ ID NO: 1760702 - RNA, 19 nt, Artificial Sequence
  Description of Artificial Sequence: Synthetic oligonucleotide
gauggauucugguguguca

SEQ ID NO: 1760703 - RNA, 19 nt, Artificial Sequence
  Description of Artificial Sequence: Synthetic oligonucleotide
aggaccaguccuaaaaugu

SEQ ID NO: 1760704 - RNA, 19 nt, Artificial Sequence
  Description of Artificial Sequence: Synthetic oligonucleotide
ucggagaaaagaccggcuu

SEQ ID NO: 1760705 - RNA, 19 nt, Artificial Sequence
  Description of Artificial Sequence: Synthetic oligonucleotide
guuaugggucaccacugug

SEQ ID NO: 1760706 - RNA, 19 nt, Artificial Sequence
  Description of Artificial Sequence: Synthetic oligonucleotide
cugcccgccgcucuaaggg

SEQ ID NO: 1760707 - RNA, 19 nt, Artificial Sequence
  Description of Artificial Sequence: Synthetic oligonucleotide
ccgaaguagacacagugag

SEQ ID NO: 1760708 - RNA, 19 nt, Artificial Sequence
  Description of Artificial Sequence: Synthetic oligonucleotide
ucuaaggggcagcacgcaa

SEQ ID NO: 1760709 - RNA, 19 nt, Artificial Sequence
  Description of Artificial Sequence: Synthetic oligonucleotide
guagccguuggucucgcug

SEQ ID NO: 1760710 - RNA, 19 nt, Artificial Sequence
  Description of Artificial Sequence: Synthetic oligonucleotide
gggccuagcuucuuuagag

SEQ ID NO: 1760711 - RNA, 19 nt, Artificial Sequence
  Description of Artificial Sequence: Synthetic oligonucleotide
agcguggugaggccgaagu

SEQ ID NO: 1760712 - RNA, 19 nt, Artificial Sequence
  Description of Artificial Sequence: Synthetic oligonucleotide
uggagaccggaggagaccc

SEQ ID NO: 1760713 - RNA, 19 nt, Artificial Sequence
  Description of Artificial Sequence: Synthetic oligonucleotide
gccaaagcgaccgcgagcg

SEQ ID NO: 1760714 - RNA, 19 nt, Artificial Sequence
  Description of Artificial Sequence: Synthetic oligonucleotide
agguuucuuaguaagucga

SEQ ID NO: 1760715 - RNA, 19 nt, Artificial Sequence
  Description of Artificial Sequence: Synthetic oligonucleotide
cucuacggaucccuauggg

SEQ ID NO: 1760716 - RNA, 19 nt, Artificial Sequence
  Description of Artificial Sequence: Synthetic oligonucleotide
agccaauaaugcggcaggc

SEQ ID NO: 1760717 - RNA, 19 nt, Artificial Sequence
  Description of Artificial Sequence: Synthetic oligonucleotide
uuccuagccgccgucucgg

SEQ ID NO: 1760718 - RNA, 19 nt, Artificial Sequence
  Description of Artificial Sequence: Synthetic oligonucleotide
ccaaugaauggaucaggcg

SEQ ID NO: 1760719 - RNA, 19 nt, Artificial Sequence
  Description of Artificial Sequence: Synthetic oligonucleotide
auucaccacagugguaguc

SEQ ID NO: 1760720 - RNA, 19 nt, Artificial Sequence
  Description of Artificial Sequence: Synthetic oligonucleotide
gaacgccaaagcgaccgcg

SEQ ID NO: 1760721 - RNA, 19 nt, Artificial Sequence
  Description of Artificial Sequence: Synthetic oligonucleotide
ccuaugggaacaauuccag

SEQ ID NO: 1760722 - RNA, 19 nt, Artificial Sequence
  Description of Artificial Sequence: Synthetic oligonucleotide
uacggaucccuaugggaac

SEQ ID NO: 1760723 - RNA, 19 nt, Artificial Sequence
  Description of Artificial Sequence: Synthetic oligonucleotide
aaucugcccugcauucagg

SEQ ID NO: 1760724 - RNA, 19 nt, Artificial Sequence
  Description of Artificial Sequence: Synthetic oligonucleotide
guaggucacguuucccgag

SEQ ID NO: 1760725 - RNA, 19 nt, Artificial Sequence
  Description of Artificial Sequence: Synthetic oligonucleotide
gguaguccgguccacaauc

SEQ ID NO: 1760726 - RNA, 19 nt, Artificial Sequence
  Description of Artificial Sequence: Synthetic oligonucleotide
cucaggagcucuacggauc

SEQ ID NO: 1760727 - RNA, 19 nt, Artificial Sequence
  Description of Artificial Sequence: Synthetic oligonucleotide
agaaaagaccggcuuccaa

SEQ ID NO: 1760728 - RNA, 19 nt, Artificial Sequence
  Description of Artificial Sequence: Synthetic oligonucleotide
uacgccugcugcuccaaca

SEQ ID NO: 1760729 - RNA, 19 nt, Artificial Sequence
  Description of Artificial Sequence: Synthetic oligonucleotide
gccuagcuucuuuagagcc

SEQ ID NO: 1760730 - RNA, 19 nt, Artificial Sequence
  Description of Artificial Sequence: Synthetic oligonucleotide
gagaccggaggagaccccg

SEQ ID NO: 1760731 - RNA, 19 nt, Artificial Sequence
  Description of Artificial Sequence: Synthetic oligonucleotide
cagaugguugaggauuccg

SEQ ID NO: 1760732 - RNA, 19 nt, Artificial Sequence
  Description of Artificial Sequence: Synthetic oligonucleotide
gaccccgaguccuccaacc

SEQ ID NO: 1760733 - RNA, 19 nt, Artificial Sequence
  Description of Artificial Sequence: Synthetic oligonucleotide
gguguuaugggucaccacu

SEQ ID NO: 1760734 - RNA, 19 nt, Artificial Sequence
  Description of Artificial Sequence: Synthetic oligonucleotide
acuggagggucugcgcgcc

SEQ ID NO: 1760735 - RNA, 19 nt, Artificial Sequence
  Description of Artificial Sequence: Synthetic oligonucleotide
gagguagccguuggucucg

SEQ ID NO: 1760736 - RNA, 19 nt, Artificial Sequence
  Description of Artificial Sequence: Synthetic oligonucleotide
gaccagccaauaaugcggc

SEQ ID NO: 1760737 - RNA, 19 nt, Artificial Sequence
  Description of Artificial Sequence: Synthetic oligonucleotide
accaguccuaaaauguuca

SEQ ID NO: 1760738 - RNA, 19 nt, Artificial Sequence
  Description of Artificial Sequence: Synthetic oligonucleotide
ggacuggagggucugcgcg

SEQ ID NO: 1760739 - RNA, 19 nt, Artificial Sequence
  Description of Artificial Sequence: Synthetic oligonucleotide
ugaacgccaaagcgaccgc

SEQ ID NO: 1760740 - RNA, 19 nt, Artificial Sequence
  Description of Artificial Sequence: Synthetic oligonucleotide
ucauucccucaauaucagu

SEQ ID NO: 1760741 - RNA, 19 nt, Artificial Sequence
  Description of Artificial Sequence: Synthetic oligonucleotide
gacuggagggucugcgcgc

SEQ ID NO: 1760742 - RNA, 19 nt, Artificial Sequence
  Description of Artificial Sequence: Synthetic oligonucleotide
agcugggcgaugaacacug

SEQ ID NO: 1760743 - RNA, 19 nt, Artificial Sequence
  Description of Artificial Sequence: Synthetic oligonucleotide
uaguccgguccacaaucca

SEQ ID NO: 1760744 - RNA, 19 nt, Artificial Sequence
  Description of Artificial Sequence: Synthetic oligonucleotide
acguuucccgagcuggugu

SEQ ID NO: 1760745 - RNA, 19 nt, Artificial Sequence
  Description of Artificial Sequence: Synthetic oligonucleotide
guguuaugggucaccacug

SEQ ID NO: 1760746 - RNA, 19 nt, Artificial Sequence
  Description of Artificial Sequence: Synthetic oligonucleotide
ucccucggggccuagcuuc

SEQ ID NO: 1760747 - RNA, 19 nt, Artificial Sequence
  Description of Artificial Sequence: Synthetic oligonucleotide
cuguguaauugguugcaga

SEQ ID NO: 1760748 - RNA, 19 nt, Artificial Sequence
  Description of Artificial Sequence: Synthetic oligonucleotide
gccgcgauuuccuagccgc

SEQ ID NO: 1760749 - RNA, 19 nt, Artificial Sequence
  Description of Artificial Sequence: Synthetic oligonucleotide
aguccgguccacaauccag

SEQ ID NO: 1760750 - RNA, 19 nt, Artificial Sequence
  Description of Artificial Sequence: Synthetic oligonucleotide
gcagugaccagagagccug

SEQ ID NO: 1760751 - RNA, 19 nt, Artificial Sequence
  Description of Artificial Sequence: Synthetic oligonucleotide
agaccccgaguccuccaac

SEQ ID NO: 1760752 - RNA, 19 nt, Artificial Sequence
  Description of Artificial Sequence: Synthetic oligonucleotide
agacgaagagaacgcugca

SEQ ID NO: 1760753 - RNA, 19 nt, Artificial Sequence
  Description of Artificial Sequence: Synthetic oligonucleotide
ugguaacuagcaggcuggg

SEQ ID NO: 1760754 - RNA, 19 nt, Artificial Sequence
  Description of Artificial Sequence: Synthetic oligonucleotide
cugcuccaacacuggaugc

SEQ ID NO: 1760755 - RNA, 19 nt, Artificial Sequence
  Description of Artificial Sequence: Synthetic oligonucleotide
ugcagacgaagagaacgcu

SEQ ID NO: 1760756 - RNA, 19 nt, Artificial Sequence
  Description of Artificial Sequence: Synthetic oligonucleotide
ucacguuucccgagcuggu

SEQ ID NO: 1760757 - RNA, 19 nt, Artificial Sequence
  Description of Artificial Sequence: Synthetic oligonucleotide
gguugcugguaacuagcag

SEQ ID NO: 1760758 - RNA, 19 nt, Artificial Sequence
  Description of Artificial Sequence: Synthetic oligonucleotide
cuaugggaacaauuccaga

SEQ ID NO: 1760759 - RNA, 19 nt, Artificial Sequence
  Description of Artificial Sequence: Synthetic oligonucleotide
aacgccaaagcgaccgcga

SEQ ID NO: 1760760 - RNA, 19 nt, Artificial Sequence
  Description of Artificial Sequence: Synthetic oligonucleotide
ugaggccgaaguagacaca

SEQ ID NO: 1760761 - RNA, 19 nt, Artificial Sequence
  Description of Artificial Sequence: Synthetic oligonucleotide
augaauggaucaggcggag

SEQ ID NO: 1760762 - RNA, 19 nt, Artificial Sequence
  Description of Artificial Sequence: Synthetic oligonucleotide
gguuucuuaguaagucgag

SEQ ID NO: 1760763 - RNA, 19 nt, Artificial Sequence
  Description of Artificial Sequence: Synthetic oligonucleotide
gaccggaggagaccccgag

SEQ ID NO: 1760764 - RNA, 19 nt, Artificial Sequence
  Description of Artificial Sequence: Synthetic oligonucleotide
acgccaaagcgaccgcgag

SEQ ID NO: 1760765 - RNA, 19 nt, Artificial Sequence
  Description of Artificial Sequence: Synthetic oligonucleotide
auccauguuaggaacugaa

SEQ ID NO: 1760766 - RNA, 19 nt, Artificial Sequence
  Description of Artificial Sequence: Synthetic oligonucleotide
gaccggcuuccaaugaaug

SEQ ID NO: 1760767 - RNA, 19 nt, Artificial Sequence
  Description of Artificial Sequence: Synthetic oligonucleotide
aggagaccccgaguccucc

SEQ ID NO: 1760768 - RNA, 19 nt, Artificial Sequence
  Description of Artificial Sequence: Synthetic oligonucleotide
cagauuugcaauugggaau

SEQ ID NO: 1760769 - RNA, 19 nt, Artificial Sequence
  Description of Artificial Sequence: Synthetic oligonucleotide
caaggaacuuggauucgga

SEQ ID NO: 1760770 - RNA, 19 nt, Artificial Sequence
  Description of Artificial Sequence: Synthetic oligonucleotide
uccuuggauuccaguucug

SEQ ID NO: 1760771 - RNA, 19 nt, Artificial Sequence
  Description of Artificial Sequence: Synthetic oligonucleotide
aguccaccgucucuuugga

SEQ ID NO: 1760772 - RNA, 19 nt, Artificial Sequence
  Description of Artificial Sequence: Synthetic oligonucleotide
cucgcugcucuucuccaug

SEQ ID NO: 1760773 - RNA, 19 nt, Artificial Sequence
  Description of Artificial Sequence: Synthetic oligonucleotide
aggaaagaguccaccgucu

SEQ ID NO: 1760774 - RNA, 19 nt, Artificial Sequence
  Description of Artificial Sequence: Synthetic oligonucleotide
gaugaacgccaaagcgacc

SEQ ID NO: 1760775 - RNA, 19 nt, Artificial Sequence
  Description of Artificial Sequence: Synthetic oligonucleotide
cacgcaaggaacuuggauu

SEQ ID NO: 1760776 - RNA, 19 nt, Artificial Sequence
  Description of Artificial Sequence: Synthetic oligonucleotide
gaccagagagccugaugga

SEQ ID NO: 1760777 - RNA, 19 nt, Artificial Sequence
  Description of Artificial Sequence: Synthetic oligonucleotide
ugaauggaucaggcggaga

SEQ ID NO: 1760778 - RNA, 19 nt, Artificial Sequence
  Description of Artificial Sequence: Synthetic oligonucleotide
guaauacacugaccagcca

SEQ ID NO: 1760779 - RNA, 19 nt, Artificial Sequence
  Description of Artificial Sequence: Synthetic oligonucleotide
guaguccgguccacaaucc

SEQ ID NO: 1760780 - RNA, 19 nt, Artificial Sequence
  Description of Artificial Sequence: Synthetic oligonucleotide
agucgaggaaagaguccac

SEQ ID NO: 1760781 - RNA, 19 nt, Artificial Sequence
  Description of Artificial Sequence: Synthetic oligonucleotide
ggugccgucgagguagccg

SEQ ID NO: 1760782 - RNA, 19 nt, Artificial Sequence
  Description of Artificial Sequence: Synthetic oligonucleotide
ucacuaggauggugaaaau

SEQ ID NO: 1760783 - RNA, 19 nt, Artificial Sequence
  Description of Artificial Sequence: Synthetic oligonucleotide
gauucagaugguugaggau

SEQ ID NO: 1760784 - RNA, 19 nt, Artificial Sequence
  Description of Artificial Sequence: Synthetic oligonucleotide
cuccucagauuugcaauug

SEQ ID NO: 1760785 - RNA, 19 nt, Artificial Sequence
  Description of Artificial Sequence: Synthetic oligonucleotide
gacgaagagaacgcugcaa

SEQ ID NO: 1760786 - RNA, 19 nt, Artificial Sequence
  Description of Artificial Sequence: Synthetic oligonucleotide
caguaccagcgccuggcgc

SEQ ID NO: 1760787 - RNA, 19 nt, Artificial Sequence
  Description of Artificial Sequence: Synthetic oligonucleotide
gcagucacuaggaugguga

SEQ ID NO: 1760788 - RNA, 19 nt, Artificial Sequence
  Description of Artificial Sequence: Synthetic oligonucleotide
ggugugucaccagagguga

SEQ ID NO: 1760789 - RNA, 19 nt, Artificial Sequence
  Description of Artificial Sequence: Synthetic oligonucleotide
gucgagguagccguugguc

SEQ ID NO: 1760790 - RNA, 19 nt, Artificial Sequence
  Description of Artificial Sequence: Synthetic oligonucleotide
ggccuagcuucuuuagagc

SEQ ID NO: 1760791 - RNA, 19 nt, Artificial Sequence
  Description of Artificial Sequence: Synthetic oligonucleotide
cgcugcaaccagaagauug

SEQ ID NO: 1760792 - RNA, 19 nt, Artificial Sequence
  Description of Artificial Sequence: Synthetic oligonucleotide
aggucacguuucccgagcu

SEQ ID NO: 1760793 - RNA, 19 nt, Artificial Sequence
  Description of Artificial Sequence: Synthetic oligonucleotide
ccacaauccaguccacagc

SEQ ID NO: 1760794 - RNA, 19 nt, Artificial Sequence
  Description of Artificial Sequence: Synthetic oligonucleotide
ggcgaugaacacugcggcc

SEQ ID NO: 1760795 - RNA, 19 nt, Artificial Sequence
  Description of Artificial Sequence: Synthetic oligonucleotide
uuucccgagcugguguuau

SEQ ID NO: 1760796 - RNA, 19 nt, Artificial Sequence
  Description of Artificial Sequence: Synthetic oligonucleotide
cccuaugggaacaauucca

SEQ ID NO: 1760797 - RNA, 19 nt, Artificial Sequence
  Description of Artificial Sequence: Synthetic oligonucleotide
ugucgcugcccgccgcucu

SEQ ID NO: 1760798 - RNA, 19 nt, Artificial Sequence
  Description of Artificial Sequence: Synthetic oligonucleotide
aggcgcucagcguggugag

SEQ ID NO: 1760799 - RNA, 19 nt, Artificial Sequence
  Description of Artificial Sequence: Synthetic oligonucleotide
cucguaggucacguuuccc

SEQ ID NO: 1760800 - RNA, 19 nt, Artificial Sequence
  Description of Artificial Sequence: Synthetic oligonucleotide
caaagcgaccgcgagcgca

SEQ ID NO: 1760801 - RNA, 19 nt, Artificial Sequence
  Description of Artificial Sequence: Synthetic oligonucleotide
gacaguggccugcgccagc

SEQ ID NO: 1760802 - RNA, 19 nt, Artificial Sequence
  Description of Artificial Sequence: Synthetic oligonucleotide
gcagacgaagagaacgcug

SEQ ID NO: 1760803 - RNA, 19 nt, Artificial Sequence
  Description of Artificial Sequence: Synthetic oligonucleotide
uccuagccgccgucucggg

SEQ ID NO: 1760804 - RNA, 19 nt, Artificial Sequence
  Description of Artificial Sequence: Synthetic oligonucleotide
acggaucccuaugggaaca

SEQ ID NO: 1760805 - RNA, 19 nt, Artificial Sequence
  Description of Artificial Sequence: Synthetic oligonucleotide
ugggaauggcuuccaccuu

SEQ ID NO: 1760806 - RNA, 19 nt, Artificial Sequence
  Description of Artificial Sequence: Synthetic oligonucleotide
uucccgagcugguguuaug

SEQ ID NO: 1760807 - RNA, 19 nt, Artificial Sequence
  Description of Artificial Sequence: Synthetic oligonucleotide
cugguguuaugggucacca

SEQ ID NO: 1760808 - RNA, 19 nt, Artificial Sequence
  Description of Artificial Sequence: Synthetic oligonucleotide
ucggggccuagcuucuuua

SEQ ID NO: 1760809 - RNA, 19 nt, Artificial Sequence
  Description of Artificial Sequence: Synthetic oligonucleotide
accggaggagaccccgagu

SEQ ID NO: 1760810 - RNA, 19 nt, Artificial Sequence
  Description of Artificial Sequence: Synthetic oligonucleotide
ccaauaaugcggcaggcua

SEQ ID NO: 1760811 - RNA, 19 nt, Artificial Sequence
  Description of Artificial Sequence: Synthetic oligonucleotide
gccugauggauucuggugu

SEQ ID NO: 1760812 - RNA, 19 nt, Artificial Sequence
  Description of Artificial Sequence: Synthetic oligonucleotide
agcugguguuaugggucac

SEQ ID NO: 1760813 - RNA, 19 nt, Artificial Sequence
  Description of Artificial Sequence: Synthetic oligonucleotide
guaccagcgccuggcgccg

SEQ ID NO: 1760814 - RNA, 19 nt, Artificial Sequence
  Description of Artificial Sequence: Synthetic oligonucleotide
agcgaccgcgagcgcagag

SEQ ID NO: 1760815 - RNA, 19 nt, Artificial Sequence
  Description of Artificial Sequence: Synthetic oligonucleotide
cagcgccgcgauuuccuag

SEQ ID NO: 1760816 - RNA, 19 nt, Artificial Sequence
  Description of Artificial Sequence: Synthetic oligonucleotide
gcucuaaggggcagcacgc

SEQ ID NO: 1760817 - RNA, 19 nt, Artificial Sequence
  Description of Artificial Sequence: Synthetic oligonucleotide
cgagcugguguuauggguc

SEQ ID NO: 1760818 - RNA, 19 nt, Artificial Sequence
  Description of Artificial Sequence: Synthetic oligonucleotide
accgacuccuuggauucca

SEQ ID NO: 1760819 - RNA, 19 nt, Artificial Sequence
  Description of Artificial Sequence: Synthetic oligonucleotide
gaucccuaugggaacaauu

SEQ ID NO: 1760820 - RNA, 19 nt, Artificial Sequence
  Description of Artificial Sequence: Synthetic oligonucleotide
acgcagcgccgcgauuucc

SEQ ID NO: 1760821 - RNA, 19 nt, Artificial Sequence
  Description of Artificial Sequence: Synthetic oligonucleotide
gguaacuagcaggcugggc

SEQ ID NO: 1760822 - RNA, 19 nt, Artificial Sequence
  Description of Artificial Sequence: Synthetic oligonucleotide
cucagcguggugaggccga

SEQ ID NO: 1760823 - RNA, 19 nt, Artificial Sequence
  Description of Artificial Sequence: Synthetic oligonucleotide
ccggaggagaccccgaguc

SEQ ID NO: 1760824 - RNA, 19 nt, Artificial Sequence
  Description of Artificial Sequence: Synthetic oligonucleotide
ggcugcgccauccauguua

SEQ ID NO: 1760825 - RNA, 19 nt, Artificial Sequence
  Description of Artificial Sequence: Synthetic oligonucleotide
ugcggggcccggccucagg

SEQ ID NO: 1760826 - RNA, 19 nt, Artificial Sequence
  Description of Artificial Sequence: Synthetic oligonucleotide
ggcucaggagcucuacgga

SEQ ID NO: 1760827 - RNA, 19 nt, Artificial Sequence
  Description of Artificial Sequence: Synthetic oligonucleotide
cacguuucccgagcuggug

SEQ ID NO: 1760828 - RNA, 19 nt, Artificial Sequence
  Description of Artificial Sequence: Synthetic oligonucleotide
agaccggcuuccaaugaau

SEQ ID NO: 1760829 - RNA, 19 nt, Artificial Sequence
  Description of Artificial Sequence: Synthetic oligonucleotide
ugggugccgucgagguagc

SEQ ID NO: 1760830 - RNA, 19 nt, Artificial Sequence
  Description of Artificial Sequence: Synthetic oligonucleotide
auaaugcggcaggcuacca

SEQ ID NO: 1760831 - RNA, 19 nt, Artificial Sequence
  Description of Artificial Sequence: Synthetic oligonucleotide
agccguuggucucgcugcu

SEQ ID NO: 1760832 - RNA, 19 nt, Artificial Sequence
  Description of Artificial Sequence: Synthetic oligonucleotide
gagaccccgaguccuccaa

SEQ ID NO: 1760833 - RNA, 19 nt, Artificial Sequence
  Description of Artificial Sequence: Synthetic oligonucleotide
caggcuaccaggguggggu

SEQ ID NO: 1760834 - RNA, 19 nt, Artificial Sequence
  Description of Artificial Sequence: Synthetic oligonucleotide
gagccacucccaacaccag

SEQ ID NO: 1760835 - RNA, 19 nt, Artificial Sequence
  Description of Artificial Sequence: Synthetic oligonucleotide
gaccgcgagcgcagaggcg

SEQ ID NO: 1760836 - RNA, 19 nt, Artificial Sequence
  Description of Artificial Sequence: Synthetic oligonucleotide
gcggcucaggagcucuacg

SEQ ID NO: 1760837 - RNA, 19 nt, Artificial Sequence
  Description of Artificial Sequence: Synthetic oligonucleotide
cccgagcugguguuauggg

SEQ ID NO: 1760838 - RNA, 19 nt, Artificial Sequence
  Description of Artificial Sequence: Synthetic oligonucleotide
cauccauguuaggaacuga

SEQ ID NO: 1760839 - RNA, 19 nt, Artificial Sequence
  Description of Artificial Sequence: Synthetic oligonucleotide
cagucacuaggauggugaa

SEQ ID NO: 1760840 - RNA, 19 nt, Artificial Sequence
  Description of Artificial Sequence: Synthetic oligonucleotide
guaauugguugcagacgaa

SEQ ID NO: 1760841 - RNA, 19 nt, Artificial Sequence
  Description of Artificial Sequence: Synthetic oligonucleotide
gccgucucgggcgugcggg

SEQ ID NO: 1760842 - RNA, 19 nt, Artificial Sequence
  Description of Artificial Sequence: Synthetic oligonucleotide
gcugguguuaugggucacc

SEQ ID NO: 1760843 - RNA, 19 nt, Artificial Sequence
  Description of Artificial Sequence: Synthetic oligonucleotide
agucaacgcagcgccgcga

SEQ ID NO: 1760844 - RNA, 19 nt, Artificial Sequence
  Description of Artificial Sequence: Synthetic oligonucleotide
ucaacgcagcgccgcgauu

SEQ ID NO: 1760845 - RNA, 19 nt, Artificial Sequence
  Description of Artificial Sequence: Synthetic oligonucleotide
aggcggagacaguggccug

SEQ ID NO: 1760846 - RNA, 19 nt, Artificial Sequence
  Description of Artificial Sequence: Synthetic oligonucleotide
gcagcacgcaaggaacuug

SEQ ID NO: 1760847 - RNA, 19 nt, Artificial Sequence
  Description of Artificial Sequence: Synthetic oligonucleotide
ucucgggcgugcggggccc

SEQ ID NO: 1760848 - RNA, 19 nt, Artificial Sequence
  Description of Artificial Sequence: Synthetic oligonucleotide
ggggccuagcuucuuuaga

SEQ ID NO: 1760849 - RNA, 19 nt, Artificial Sequence
  Description of Artificial Sequence: Synthetic oligonucleotide
caauugggaauggcuucca

SEQ ID NO: 1760850 - RNA, 19 nt, Artificial Sequence
  Description of Artificial Sequence: Synthetic oligonucleotide
ugccggacuggagggucug

SEQ ID NO: 1760851 - RNA, 19 nt, Artificial Sequence
  Description of Artificial Sequence: Synthetic oligonucleotide
uagccgccgucucgggcgu

SEQ ID NO: 1760852 - RNA, 19 nt, Artificial Sequence
  Description of Artificial Sequence: Synthetic oligonucleotide
uucucccucggggccuagc

SEQ ID NO: 1760853 - RNA, 19 nt, Artificial Sequence
  Description of Artificial Sequence: Synthetic oligonucleotide
gaggagaccccgaguccuc

SEQ ID NO: 1760854 - RNA, 19 nt, Artificial Sequence
  Description of Artificial Sequence: Synthetic oligonucleotide
augucgcugcccgccgcuc

SEQ ID NO: 1760855 - RNA, 19 nt, Artificial Sequence
  Description of Artificial Sequence: Synthetic oligonucleotide
gcgaccgcgagcgcagagg

SEQ ID NO: 1760856 - RNA, 19 nt, Artificial Sequence
  Description of Artificial Sequence: Synthetic oligonucleotide
ccccgaguccuccaacccc

SEQ ID NO: 1760857 - RNA, 19 nt, Artificial Sequence
  Description of Artificial Sequence: Synthetic oligonucleotide
gagcucuacggaucccuau

SEQ ID NO: 1760858 - RNA, 19 nt, Artificial Sequence
  Description of Artificial Sequence: Synthetic oligonucleotide
cugcgccauccauguuagg

SEQ ID NO: 1760859 - RNA, 19 nt, Artificial Sequence
  Description of Artificial Sequence: Synthetic oligonucleotide
gguugcagacgaagagaac

SEQ ID NO: 1760860 - RNA, 19 nt, Artificial Sequence
  Description of Artificial Sequence: Synthetic oligonucleotide
ccugcauucagguccacau

SEQ ID NO: 1760861 - RNA, 19 nt, Artificial Sequence
  Description of Artificial Sequence: Synthetic oligonucleotide
caggcggagacaguggccu

SEQ ID NO: 1760862 - RNA, 19 nt, Artificial Sequence
  Description of Artificial Sequence: Synthetic oligonucleotide
gagggucugcgcgcccgcc

SEQ ID NO: 1760863 - RNA, 19 nt, Artificial Sequence
  Description of Artificial Sequence: Synthetic oligonucleotide
guccgguccacaauccagu

SEQ ID NO: 1760864 - RNA, 19 nt, Artificial Sequence
  Description of Artificial Sequence: Synthetic oligonucleotide
ccgucgagguagccguugg

SEQ ID NO: 1760865 - RNA, 19 nt, Artificial Sequence
  Description of Artificial Sequence: Synthetic oligonucleotide
caauggggaccuucucgua

SEQ ID NO: 1760866 - RNA, 19 nt, Artificial Sequence
  Description of Artificial Sequence: Synthetic oligonucleotide
ggguugcugguaacuagca

SEQ ID NO: 1760867 - RNA, 19 nt, Artificial Sequence
  Description of Artificial Sequence: Synthetic oligonucleotide
ggacaauccaauggccucu

SEQ ID NO: 1760868 - RNA, 19 nt, Artificial Sequence
  Description of Artificial Sequence: Synthetic oligonucleotide
cccgaguccuccaacccca

SEQ ID NO: 1760869 - RNA, 19 nt, Artificial Sequence
  Description of Artificial Sequence: Synthetic oligonucleotide
auuccggcucccagggcau

SEQ ID NO: 1760870 - RNA, 19 nt, Artificial Sequence
  Description of Artificial Sequence: Synthetic oligonucleotide
ccggacuggagggucugcg

SEQ ID NO: 1760871 - RNA, 19 nt, Artificial Sequence
  Description of Artificial Sequence: Synthetic oligonucleotide
gucaacgcagcgccgcgau

SEQ ID NO: 1760872 - RNA, 19 nt, Artificial Sequence
  Description of Artificial Sequence: Synthetic oligonucleotide
ccuagccgccgucucgggc

SEQ ID NO: 1760873 - RNA, 19 nt, Artificial Sequence
  Description of Artificial Sequence: Synthetic oligonucleotide
cgagguagccguuggucuc

SEQ ID NO: 1760874 - RNA, 19 nt, Artificial Sequence
  Description of Artificial Sequence: Synthetic oligonucleotide
cauuguugagcugggcgau

SEQ ID NO: 1760875 - RNA, 19 nt, Artificial Sequence
  Description of Artificial Sequence: Synthetic oligonucleotide
cgaccgcgagcgcagaggc

SEQ ID NO: 1760876 - RNA, 19 nt, Artificial Sequence
  Description of Artificial Sequence: Synthetic oligonucleotide
cgcgauuuccuagccgccg

SEQ ID NO: 1760877 - RNA, 19 nt, Artificial Sequence
  Description of Artificial Sequence: Synthetic oligonucleotide
gccccaucacagcaccgac

SEQ ID NO: 1760878 - RNA, 19 nt, Artificial Sequence
  Description of Artificial Sequence: Synthetic oligonucleotide
aagcgaccgcgagcgcaga

SEQ ID NO: 1760879 - RNA, 19 nt, Artificial Sequence
  Description of Artificial Sequence: Synthetic oligonucleotide
cguaggucacguuucccga

SEQ ID NO: 1760880 - RNA, 19 nt, Artificial Sequence
  Description of Artificial Sequence: Synthetic oligonucleotide
cauucaccacagugguagu

SEQ ID NO: 1760881 - RNA, 19 nt, Artificial Sequence
  Description of Artificial Sequence: Synthetic oligonucleotide
ccgcgauuuccuagccgcc

SEQ ID NO: 1760882 - RNA, 19 nt, Artificial Sequence
  Description of Artificial Sequence: Synthetic oligonucleotide
agaccggaggagaccccga

SEQ ID NO: 1760883 - RNA, 19 nt, Artificial Sequence
  Description of Artificial Sequence: Synthetic oligonucleotide
gcacgcaaggaacuuggau

SEQ ID NO: 1760884 - RNA, 19 nt, Artificial Sequence
  Description of Artificial Sequence: Synthetic oligonucleotide
aggccgaaguagacacagu

SEQ ID NO: 1760885 - RNA, 19 nt, Artificial Sequence
  Description of Artificial Sequence: Synthetic oligonucleotide
cucccaacaccagggcaaa

SEQ ID NO: 1760886 - RNA, 19 nt, Artificial Sequence
  Description of Artificial Sequence: Synthetic oligonucleotide
cggaggagaccccgagucc

SEQ ID NO: 1760887 - RNA, 19 nt, Artificial Sequence
  Description of Artificial Sequence: Synthetic oligonucleotide
gcugccggacuggaggguc

SEQ ID NO: 1760888 - RNA, 19 nt, Artificial Sequence
  Description of Artificial Sequence: Synthetic oligonucleotide
gccaauaaugcggcaggcu

SEQ ID NO: 1760889 - RNA, 19 nt, Artificial Sequence
  Description of Artificial Sequence: Synthetic oligonucleotide
ggagaccggaggagacccc

SEQ ID NO: 1760890 - RNA, 19 nt, Artificial Sequence
  Description of Artificial Sequence: Synthetic oligonucleotide
cggggccuagcuucuuuag

SEQ ID NO: 1760891 - RNA, 19 nt, Artificial Sequence
  Description of Artificial Sequence: Synthetic oligonucleotide
cagcgccuggcgccgaaaa

SEQ ID NO: 1760892 - RNA, 19 nt, Artificial Sequence
  Description of Artificial Sequence: Synthetic oligonucleotide
gcgauuuccuagccgccgu

SEQ ID NO: 1760893 - RNA, 19 nt, Artificial Sequence
  Description of Artificial Sequence: Synthetic oligonucleotide
ccacagugguaguccgguc

SEQ ID NO: 1760894 - RNA, 19 nt, Artificial Sequence
  Description of Artificial Sequence: Synthetic oligonucleotide
gccgcucuaaggggcagca

SEQ ID NO: 1760895 - RNA, 19 nt, Artificial Sequence
  Description of Artificial Sequence: Synthetic oligonucleotide
uggcugcgccauccauguu

SEQ ID NO: 1760896 - RNA, 19 nt, Artificial Sequence
  Description of Artificial Sequence: Synthetic oligonucleotide
ccgucucgggcgugcgggg

SEQ ID NO: 1760897 - RNA, 19 nt, Artificial Sequence
  Description of Artificial Sequence: Synthetic oligonucleotide
ccgaguccuccaaccccag

SEQ ID NO: 1760898 - RNA, 19 nt, Artificial Sequence
  Description of Artificial Sequence: Synthetic oligonucleotide
gcccgccgcucuaaggggc

SEQ ID NO: 1760899 - RNA, 19 nt, Artificial Sequence
  Description of Artificial Sequence: Synthetic oligonucleotide
cgccgcgauuuccuagccg

SEQ ID NO: 1760900 - RNA, 19 nt, Artificial Sequence
  Description of Artificial Sequence: Synthetic oligonucleotide
ccaaagcgaccgcgagcgc

SEQ ID NO: 1760901 - RNA, 19 nt, Artificial Sequence
  Description of Artificial Sequence: Synthetic oligonucleotide
cgauuuccuagccgccguc

SEQ ID NO: 1760902 - RNA, 19 nt, Artificial Sequence
  Description of Artificial Sequence: Synthetic oligonucleotide
ggagcucuacggaucccua

SEQ ID NO: 1760903 - RNA, 19 nt, Artificial Sequence
  Description of Artificial Sequence: Synthetic oligonucleotide
cgcucagcguggugaggcc

SEQ ID NO: 1760904 - RNA, 19 nt, Artificial Sequence
  Description of Artificial Sequence: Synthetic oligonucleotide
cucgggcgugcggggcccg

SEQ ID NO: 1760905 - RNA, 19 nt, Artificial Sequence
  Description of Artificial Sequence: Synthetic oligonucleotide
uaccagcgccuggcgccga

SEQ ID NO: 1760906 - RNA, 19 nt, Artificial Sequence
  Description of Artificial Sequence: Synthetic oligonucleotide
cugccggacuggagggucu

SEQ ID NO: 1760907 - RNA, 19 nt, Artificial Sequence
  Description of Artificial Sequence: Synthetic oligonucleotide
cuucucccucggggccuag

SEQ ID NO: 1760908 - RNA, 19 nt, Artificial Sequence
  Description of Artificial Sequence: Synthetic oligonucleotide
gcguggugaggccgaagua

SEQ ID NO: 1760909 - RNA, 19 nt, Artificial Sequence
  Description of Artificial Sequence: Synthetic oligonucleotide
gcgagcgcagaggcgcuca

SEQ ID NO: 1760910 - RNA, 19 nt, Artificial Sequence
  Description of Artificial Sequence: Synthetic oligonucleotide
cugcggccacacacuggaa

SEQ ID NO: 1760911 - RNA, 19 nt, Artificial Sequence
  Description of Artificial Sequence: Synthetic oligonucleotide
gggcagcacgcaaggaacu

SEQ ID NO: 1760912 - RNA, 19 nt, Artificial Sequence
  Description of Artificial Sequence: Synthetic oligonucleotide
gccggacuggagggucugc

SEQ ID NO: 1760913 - RNA, 19 nt, Artificial Sequence
  Description of Artificial Sequence: Synthetic oligonucleotide
gcucccagggcauccccuu

SEQ ID NO: 1760914 - RNA, 19 nt, Artificial Sequence
  Description of Artificial Sequence: Synthetic oligonucleotide
gccguuggucucgcugcuc

SEQ ID NO: 1760915 - RNA, 19 nt, Artificial Sequence
  Description of Artificial Sequence: Synthetic oligonucleotide
ggcagcacgcaaggaacuu

SEQ ID NO: 1760916 - RNA, 19 nt, Artificial Sequence
  Description of Artificial Sequence: Synthetic oligonucleotide
cucccucggggccuagcuu

SEQ ID NO: 1760917 - RNA, 19 nt, Artificial Sequence
  Description of Artificial Sequence: Synthetic oligonucleotide
ggaucccuaugggaacaau

SEQ ID NO: 1760918 - RNA, 19 nt, Artificial Sequence
  Description of Artificial Sequence: Synthetic oligonucleotide
ccgcucuaaggggcagcac

SEQ ID NO: 1760919 - RNA, 19 nt, Artificial Sequence
  Description of Artificial Sequence: Synthetic oligonucleotide
cgccgcucuaaggggcagc

SEQ ID NO: 1760920 - RNA, 19 nt, Artificial Sequence
  Description of Artificial Sequence: Synthetic oligonucleotide
ccgccgcucuaaggggcag

SEQ ID NO: 1760921 - RNA, 19 nt, Artificial Sequence
  Description of Artificial Sequence: Synthetic oligonucleotide
ccgccgucucgggcgugcg

SEQ ID NO: 1760922 - RNA, 19 nt, Artificial Sequence
  Description of Artificial Sequence: Synthetic oligonucleotide
cguuucccgagcugguguu

SEQ ID NO: 1760923 - RNA, 19 nt, Artificial Sequence
  Description of Artificial Sequence: Synthetic oligonucleotide
cgucgagguagccguuggu

SEQ ID NO: 1760924 - RNA, 19 nt, Artificial Sequence
  Description of Artificial Sequence: Synthetic oligonucleotide
ccgcgagcgcagaggcgcu

SEQ ID NO: 1760925 - RNA, 19 nt, Artificial Sequence
  Description of Artificial Sequence: Synthetic oligonucleotide
cgcgcccgcccuggcuuga

SEQ ID NO: 1760926 - RNA, 19 nt, Artificial Sequence
  Description of Artificial Sequence: Synthetic oligonucleotide
aaaucagccagcuaguugg

SEQ ID NO: 1760927 - RNA, 19 nt, Artificial Sequence
  Description of Artificial Sequence: Synthetic oligonucleotide
aaaguaaagguguagugcg

SEQ ID NO: 1760928 - RNA, 19 nt, Artificial Sequence
  Description of Artificial Sequence: Synthetic oligonucleotide
aaauaauacagauccuucg

SEQ ID NO: 1760929 - RNA, 19 nt, Artificial Sequence
  Description of Artificial Sequence: Synthetic oligonucleotide
ucuauuagggcauaacugg

SEQ ID NO: 1760930 - RNA, 19 nt, Artificial Sequence
  Description of Artificial Sequence: Synthetic oligonucleotide
uauauuaccaugcagacua

SEQ ID NO: 1760931 - RNA, 19 nt, Artificial Sequence
  Description of Artificial Sequence: Synthetic oligonucleotide
aauagcucacaguuaauac

SEQ ID NO: 1760932 - RNA, 19 nt, Artificial Sequence
  Description of Artificial Sequence: Synthetic oligonucleotide
ugaaauccuaguaagauca

SEQ ID NO: 1760933 - RNA, 19 nt, Artificial Sequence
  Description of Artificial Sequence: Synthetic oligonucleotide
aagaucagaguccaugggc

SEQ ID NO: 1760934 - RNA, 19 nt, Artificial Sequence
  Description of Artificial Sequence: Synthetic oligonucleotide
uccucuugaaauaauacag

SEQ ID NO: 1760935 - RNA, 19 nt, Artificial Sequence
  Description of Artificial Sequence: Synthetic oligonucleotide
acucaaaggaccuucaggg

SEQ ID NO: 1760936 - RNA, 19 nt, Artificial Sequence
  Description of Artificial Sequence: Synthetic oligonucleotide
uguucaaaccuucagauaa

SEQ ID NO: 1760937 - RNA, 19 nt, Artificial Sequence
  Description of Artificial Sequence: Synthetic oligonucleotide
aauacugcacugcacacag

SEQ ID NO: 1760938 - RNA, 19 nt, Artificial Sequence
  Description of Artificial Sequence: Synthetic oligonucleotide
gacauuuccacccuagacg

SEQ ID NO: 1760939 - RNA, 19 nt, Artificial Sequence
  Description of Artificial Sequence: Synthetic oligonucleotide
gaaauuugaaccuuggguc

SEQ ID NO: 1760940 - RNA, 19 nt, Artificial Sequence
  Description of Artificial Sequence: Synthetic oligonucleotide
agaaauuugaaccuugggu

SEQ ID NO: 1760941 - RNA, 19 nt, Artificial Sequence
  Description of Artificial Sequence: Synthetic oligonucleotide
uccucaguuaccaagacca

SEQ ID NO: 1760942 - RNA, 19 nt, Artificial Sequence
  Description of Artificial Sequence: Synthetic oligonucleotide
uuuagagccaagauuuuag

SEQ ID NO: 1760943 - RNA, 19 nt, Artificial Sequence
  Description of Artificial Sequence: Synthetic oligonucleotide
uaucagauaaauugaauac

SEQ ID NO: 1760944 - RNA, 19 nt, Artificial Sequence
  Description of Artificial Sequence: Synthetic oligonucleotide
aaucaauccucagagagag

SEQ ID NO: 1760945 - RNA, 19 nt, Artificial Sequence
  Description of Artificial Sequence: Synthetic oligonucleotide
cauucuuacucaaaggacc

SEQ ID NO: 1760946 - RNA, 19 nt, Artificial Sequence
  Description of Artificial Sequence: Synthetic oligonucleotide
uucuauuagggcauaacug

SEQ ID NO: 1760947 - RNA, 19 nt, Artificial Sequence
  Description of Artificial Sequence: Synthetic oligonucleotide
uuuaguuacggagagaccu

SEQ ID NO: 1760948 - RNA, 19 nt, Artificial Sequence
  Description of Artificial Sequence: Synthetic oligonucleotide
aagacaacccuaaaauagc

SEQ ID NO: 1760949 - RNA, 19 nt, Artificial Sequence
  Description of Artificial Sequence: Synthetic oligonucleotide
gaaccuaucagcugcaagc

SEQ ID NO: 1760950 - RNA, 19 nt, Artificial Sequence
  Description of Artificial Sequence: Synthetic oligonucleotide
agagccaagauuuuagaag

SEQ ID NO: 1760951 - RNA, 19 nt, Artificial Sequence
  Description of Artificial Sequence: Synthetic oligonucleotide
uauacugagaggaaacaca

SEQ ID NO: 1760952 - RNA, 19 nt, Artificial Sequence
  Description of Artificial Sequence: Synthetic oligonucleotide
aguguaauagcuuuggaau

SEQ ID NO: 1760953 - RNA, 19 nt, Artificial Sequence
  Description of Artificial Sequence: Synthetic oligonucleotide
aaccuugggucuuagguuc

SEQ ID NO: 1760954 - RNA, 19 nt, Artificial Sequence
  Description of Artificial Sequence: Synthetic oligonucleotide
ucagauaaauugaauacuc

SEQ ID NO: 1760955 - RNA, 19 nt, Artificial Sequence
  Description of Artificial Sequence: Synthetic oligonucleotide
ucuuuauauuaccaugcag

SEQ ID NO: 1760956 - RNA, 19 nt, Artificial Sequence
  Description of Artificial Sequence: Synthetic oligonucleotide
acuggauuaaugcagaaau

SEQ ID NO: 1760957 - RNA, 19 nt, Artificial Sequence
  Description of Artificial Sequence: Synthetic oligonucleotide
ugagaggaaacacagccug

SEQ ID NO: 1760958 - RNA, 19 nt, Artificial Sequence
  Description of Artificial Sequence: Synthetic oligonucleotide
uacucaaaggaccuucagg

SEQ ID NO: 1760959 - RNA, 19 nt, Artificial Sequence
  Description of Artificial Sequence: Synthetic oligonucleotide
uaaucugccugcaagacaa

SEQ ID NO: 1760960 - RNA, 19 nt, Artificial Sequence
  Description of Artificial Sequence: Synthetic oligonucleotide
uggauuaaugcagaaauca

SEQ ID NO: 1760961 - RNA, 19 nt, Artificial Sequence
  Description of Artificial Sequence: Synthetic oligonucleotide
agagaccuuauacugagag

SEQ ID NO: 1760962 - RNA, 19 nt, Artificial Sequence
  Description of Artificial Sequence: Synthetic oligonucleotide
aaguguaauagcuuuggaa

SEQ ID NO: 1760963 - RNA, 19 nt, Artificial Sequence
  Description of Artificial Sequence: Synthetic oligonucleotide
aguuaccaagaccagcagc

SEQ ID NO: 1760964 - RNA, 19 nt, Artificial Sequence
  Description of Artificial Sequence: Synthetic oligonucleotide
guaagaucagaguccaugg

SEQ ID NO: 1760965 - RNA, 19 nt, Artificial Sequence
  Description of Artificial Sequence: Synthetic oligonucleotide
uugguuauccugagaaagg

SEQ ID NO: 1760966 - RNA, 19 nt, Artificial Sequence
  Description of Artificial Sequence: Synthetic oligonucleotide
agaacuaccuguuugugga

SEQ ID NO: 1760967 - RNA, 19 nt, Artificial Sequence
  Description of Artificial Sequence: Synthetic oligonucleotide
agugcauuuggccaucagg

SEQ ID NO: 1760968 - RNA, 19 nt, Artificial Sequence
  Description of Artificial Sequence: Synthetic oligonucleotide
gaugagaccagauaucaga

SEQ ID NO: 1760969 - RNA, 19 nt, Artificial Sequence
  Description of Artificial Sequence: Synthetic oligonucleotide
uuuccuggaaguguaauag

SEQ ID NO: 1760970 - RNA, 19 nt, Artificial Sequence
  Description of Artificial Sequence: Synthetic oligonucleotide
uggaauucuuuauauuacc

SEQ ID NO: 1760971 - RNA, 19 nt, Artificial Sequence
  Description of Artificial Sequence: Synthetic oligonucleotide
aguguauccauguuugcug

SEQ ID NO: 1760972 - RNA, 19 nt, Artificial Sequence
  Description of Artificial Sequence: Synthetic oligonucleotide
ucauucuuacucaaaggac

SEQ ID NO: 1760973 - RNA, 19 nt, Artificial Sequence
  Description of Artificial Sequence: Synthetic oligonucleotide
ucuguucaaaccuucagau

SEQ ID NO: 1760974 - RNA, 19 nt, Artificial Sequence
  Description of Artificial Sequence: Synthetic oligonucleotide
cuucacuggauuaaugcag

SEQ ID NO: 1760975 - RNA, 19 nt, Artificial Sequence
  Description of Artificial Sequence: Synthetic oligonucleotide
caaaguaaagguguagugc

SEQ ID NO: 1760976 - RNA, 19 nt, Artificial Sequence
  Description of Artificial Sequence: Synthetic oligonucleotide
uuacggagagaccuuauac

SEQ ID NO: 1760977 - RNA, 19 nt, Artificial Sequence
  Description of Artificial Sequence: Synthetic oligonucleotide
uuccucuugaaauaauaca

SEQ ID NO: 1760978 - RNA, 19 nt, Artificial Sequence
  Description of Artificial Sequence: Synthetic oligonucleotide
acaaaguaaagguguagug

SEQ ID NO: 1760979 - RNA, 19 nt, Artificial Sequence
  Description of Artificial Sequence: Synthetic oligonucleotide
aacuaccuguuuguggacc

SEQ ID NO: 1760980 - RNA, 19 nt, Artificial Sequence
  Description of Artificial Sequence: Synthetic oligonucleotide
uggauaaggccuucgguag

SEQ ID NO: 1760981 - RNA, 19 nt, Artificial Sequence
  Description of Artificial Sequence: Synthetic oligonucleotide
acuaccuguuuguggaccc

SEQ ID NO: 1760982 - RNA, 19 nt, Artificial Sequence
  Description of Artificial Sequence: Synthetic oligonucleotide
auagcucacaguuaauacu

SEQ ID NO: 1760983 - RNA, 19 nt, Artificial Sequence
  Description of Artificial Sequence: Synthetic oligonucleotide
auaaauugaauacuccauu

SEQ ID NO: 1760984 - RNA, 19 nt, Artificial Sequence
  Description of Artificial Sequence: Synthetic oligonucleotide
gagaccagauaucagauaa

SEQ ID NO: 1760985 - RNA, 19 nt, Artificial Sequence
  Description of Artificial Sequence: Synthetic oligonucleotide
uuaccaugcagacuaggga

SEQ ID NO: 1760986 - RNA, 19 nt, Artificial Sequence
  Description of Artificial Sequence: Synthetic oligonucleotide
gagccaagauuuuagaaga

SEQ ID NO: 1760987 - RNA, 19 nt, Artificial Sequence
  Description of Artificial Sequence: Synthetic oligonucleotide
acagugagcacauauuuau

SEQ ID NO: 1760988 - RNA, 19 nt, Artificial Sequence
  Description of Artificial Sequence: Synthetic oligonucleotide
uucuuuauauuaccaugca

SEQ ID NO: 1760989 - RNA, 19 nt, Artificial Sequence
  Description of Artificial Sequence: Synthetic oligonucleotide
cagauaaucugccugcaag

SEQ ID NO: 1760990 - RNA, 19 nt, Artificial Sequence
  Description of Artificial Sequence: Synthetic oligonucleotide
guucauauggcuccaagca

SEQ ID NO: 1760991 - RNA, 19 nt, Artificial Sequence
  Description of Artificial Sequence: Synthetic oligonucleotide
guuauccugagaaaggggc

SEQ ID NO: 1760992 - RNA, 19 nt, Artificial Sequence
  Description of Artificial Sequence: Synthetic oligonucleotide
auugggguagcuguguugg

SEQ ID NO: 1760993 - RNA, 19 nt, Artificial Sequence
  Description of Artificial Sequence: Synthetic oligonucleotide
ugguuauccugagaaaggg

SEQ ID NO: 1760994 - RNA, 19 nt, Artificial Sequence
  Description of Artificial Sequence: Synthetic oligonucleotide
ugacauuuccacccuagac

SEQ ID NO: 1760995 - RNA, 19 nt, Artificial Sequence
  Description of Artificial Sequence: Synthetic oligonucleotide
ucugaaauccuaguaagau

SEQ ID NO: 1760996 - RNA, 19 nt, Artificial Sequence
  Description of Artificial Sequence: Synthetic oligonucleotide
gaaaagccagaaccgcucg

SEQ ID NO: 1760997 - RNA, 19 nt, Artificial Sequence
  Description of Artificial Sequence: Synthetic oligonucleotide
ugagcacauauuuaucugu

SEQ ID NO: 1760998 - RNA, 19 nt, Artificial Sequence
  Description of Artificial Sequence: Synthetic oligonucleotide
gacaguguauccauguuug

SEQ ID NO: 1760999 - RNA, 19 nt, Artificial Sequence
  Description of Artificial Sequence: Synthetic oligonucleotide
uuauccugagaaaggggcc

SEQ ID NO: 1761000 - RNA, 19 nt, Artificial Sequence
  Description of Artificial Sequence: Synthetic oligonucleotide
uccuaggaccuguuuaagg

SEQ ID NO: 1761001 - RNA, 19 nt, Artificial Sequence
  Description of Artificial Sequence: Synthetic oligonucleotide
auuaccaugcagacuaggg

SEQ ID NO: 1761002 - RNA, 19 nt, Artificial Sequence
  Description of Artificial Sequence: Synthetic oligonucleotide
uuaagguuucuucuccaac

SEQ ID NO: 1761003 - RNA, 19 nt, Artificial Sequence
  Description of Artificial Sequence: Synthetic oligonucleotide
agugcgacagcucugacuu

SEQ ID NO: 1761004 - RNA, 19 nt, Artificial Sequence
  Description of Artificial Sequence: Synthetic oligonucleotide
acggagagaccuuauacug

SEQ ID NO: 1761005 - RNA, 19 nt, Artificial Sequence
  Description of Artificial Sequence: Synthetic oligonucleotide
aguaaagguguagugcgac

SEQ ID NO: 1761006 - RNA, 19 nt, Artificial Sequence
  Description of Artificial Sequence: Synthetic oligonucleotide
gaagaaaagccagaaccgc

SEQ ID NO: 1761007 - RNA, 19 nt, Artificial Sequence
  Description of Artificial Sequence: Synthetic oligonucleotide
ucaaaccuucagauaaucu

SEQ ID NO: 1761008 - RNA, 19 nt, Artificial Sequence
  Description of Artificial Sequence: Synthetic oligonucleotide
cuaucagcugcaagcaccg

SEQ ID NO: 1761009 - RNA, 19 nt, Artificial Sequence
  Description of Artificial Sequence: Synthetic oligonucleotide
uuuguggaccccagauugg

SEQ ID NO: 1761010 - RNA, 19 nt, Artificial Sequence
  Description of Artificial Sequence: Synthetic oligonucleotide
auagccaaccacagaaagc

SEQ ID NO: 1761011 - RNA, 19 nt, Artificial Sequence
  Description of Artificial Sequence: Synthetic oligonucleotide
agacaaacuagaagguccc

SEQ ID NO: 1761012 - RNA, 19 nt, Artificial Sequence
  Description of Artificial Sequence: Synthetic oligonucleotide
aggugccucauucuuacuc

SEQ ID NO: 1761013 - RNA, 19 nt, Artificial Sequence
  Description of Artificial Sequence: Synthetic oligonucleotide
gaauacuccauucugucua

SEQ ID NO: 1761014 - RNA, 19 nt, Artificial Sequence
  Description of Artificial Sequence: Synthetic oligonucleotide
aucagauaaauugaauacu

SEQ ID NO: 1761015 - RNA, 19 nt, Artificial Sequence
  Description of Artificial Sequence: Synthetic oligonucleotide
uacggagagaccuuauacu

SEQ ID NO: 1761016 - RNA, 19 nt, Artificial Sequence
  Description of Artificial Sequence: Synthetic oligonucleotide
ucgguagcgauacuuggca

SEQ ID NO: 1761017 - RNA, 19 nt, Artificial Sequence
  Description of Artificial Sequence: Synthetic oligonucleotide
uuuuaguuacggagagacc

SEQ ID NO: 1761018 - RNA, 19 nt, Artificial Sequence
  Description of Artificial Sequence: Synthetic oligonucleotide
uuaauacugcacugcacac

SEQ ID NO: 1761019 - RNA, 19 nt, Artificial Sequence
  Description of Artificial Sequence: Synthetic oligonucleotide
gauaaggccuucgguagcg

SEQ ID NO: 1761020 - RNA, 19 nt, Artificial Sequence
  Description of Artificial Sequence: Synthetic oligonucleotide
uuagagccaagauuuuaga

SEQ ID NO: 1761021 - RNA, 19 nt, Artificial Sequence
  Description of Artificial Sequence: Synthetic oligonucleotide
uggaugagaccagauauca

SEQ ID NO: 1761022 - RNA, 19 nt, Artificial Sequence
  Description of Artificial Sequence: Synthetic oligonucleotide
aaacagugcauuuggccau

SEQ ID NO: 1761023 - RNA, 19 nt, Artificial Sequence
  Description of Artificial Sequence: Synthetic oligonucleotide
ugcacagagcaauauuaca

SEQ ID NO: 1761024 - RNA, 19 nt, Artificial Sequence
  Description of Artificial Sequence: Synthetic oligonucleotide
uuacucaaaggaccuucag

SEQ ID NO: 1761025 - RNA, 19 nt, Artificial Sequence
  Description of Artificial Sequence: Synthetic oligonucleotide
uuuagaagagucuguucaa

SEQ ID NO: 1761026 - RNA, 19 nt, Artificial Sequence
  Description of Artificial Sequence: Synthetic oligonucleotide
cugccauacugguagacgc

SEQ ID NO: 1761027 - RNA, 19 nt, Artificial Sequence
  Description of Artificial Sequence: Synthetic oligonucleotide
acaguguauccauguuugc

SEQ ID NO: 1761028 - RNA, 19 nt, Artificial Sequence
  Description of Artificial Sequence: Synthetic oligonucleotide
guguauccauguuugcugg

SEQ ID NO: 1761029 - RNA, 19 nt, Artificial Sequence
  Description of Artificial Sequence: Synthetic oligonucleotide
acugguagacgcugacccc

SEQ ID NO: 1761030 - RNA, 19 nt, Artificial Sequence
  Description of Artificial Sequence: Synthetic oligonucleotide
agcgauacuuggcauagca

SEQ ID NO: 1761031 - RNA, 19 nt, Artificial Sequence
  Description of Artificial Sequence: Synthetic oligonucleotide
ucauauggcuccaagcauu

SEQ ID NO: 1761032 - RNA, 19 nt, Artificial Sequence
  Description of Artificial Sequence: Synthetic oligonucleotide
agucuguucaaaccuucag

SEQ ID NO: 1761033 - RNA, 19 nt, Artificial Sequence
  Description of Artificial Sequence: Synthetic oligonucleotide
cagauaucagauaaauuga

SEQ ID NO: 1761034 - RNA, 19 nt, Artificial Sequence
  Description of Artificial Sequence: Synthetic oligonucleotide
ugaauacuccauucugucu

SEQ ID NO: 1761035 - RNA, 19 nt, Artificial Sequence
  Description of Artificial Sequence: Synthetic oligonucleotide
uagacgcugaccccgacgu

SEQ ID NO: 1761036 - RNA, 19 nt, Artificial Sequence
  Description of Artificial Sequence: Synthetic oligonucleotide
aaaggggccagugucucag

SEQ ID NO: 1761037 - RNA, 19 nt, Artificial Sequence
  Description of Artificial Sequence: Synthetic oligonucleotide
guuaccaagaccagcagca

SEQ ID NO: 1761038 - RNA, 19 nt, Artificial Sequence
  Description of Artificial Sequence: Synthetic oligonucleotide
uugaaauaauacagauccu

SEQ ID NO: 1761039 - RNA, 19 nt, Artificial Sequence
  Description of Artificial Sequence: Synthetic oligonucleotide
acccuaaaauagcucacag

SEQ ID NO: 1761040 - RNA, 19 nt, Artificial Sequence
  Description of Artificial Sequence: Synthetic oligonucleotide
uuagguuccucuugaaaua

SEQ ID NO: 1761041 - RNA, 19 nt, Artificial Sequence
  Description of Artificial Sequence: Synthetic oligonucleotide
agaaccuaucagcugcaag

SEQ ID NO: 1761042 - RNA, 19 nt, Artificial Sequence
  Description of Artificial Sequence: Synthetic oligonucleotide
uucauauggcuccaagcau

SEQ ID NO: 1761043 - RNA, 19 nt, Artificial Sequence
  Description of Artificial Sequence: Synthetic oligonucleotide
uauuaccaugcagacuagg

SEQ ID NO: 1761044 - RNA, 19 nt, Artificial Sequence
  Description of Artificial Sequence: Synthetic oligonucleotide
aggguuucaauggaucuuc

SEQ ID NO: 1761045 - RNA, 19 nt, Artificial Sequence
  Description of Artificial Sequence: Synthetic oligonucleotide
uuagggcauaacuggauaa

SEQ ID NO: 1761046 - RNA, 19 nt, Artificial Sequence
  Description of Artificial Sequence: Synthetic oligonucleotide
uuuaagguuucuucuccaa

SEQ ID NO: 1761047 - RNA, 19 nt, Artificial Sequence
  Description of Artificial Sequence: Synthetic oligonucleotide
uauuagggcauaacuggau

SEQ ID NO: 1761048 - RNA, 19 nt, Artificial Sequence
  Description of Artificial Sequence: Synthetic oligonucleotide
agcaccgcccaucucacag

SEQ ID NO: 1761049 - RNA, 19 nt, Artificial Sequence
  Description of Artificial Sequence: Synthetic oligonucleotide
uuauauuaccaugcagacu

SEQ ID NO: 1761050 - RNA, 19 nt, Artificial Sequence
  Description of Artificial Sequence: Synthetic oligonucleotide
ucuuacucaaaggaccuuc

SEQ ID NO: 1761051 - RNA, 19 nt, Artificial Sequence
  Description of Artificial Sequence: Synthetic oligonucleotide
aaccgcucguaccaggccu

SEQ ID NO: 1761052 - RNA, 19 nt, Artificial Sequence
  Description of Artificial Sequence: Synthetic oligonucleotide
gugagcacauauuuaucug

SEQ ID NO: 1761053 - RNA, 19 nt, Artificial Sequence
  Description of Artificial Sequence: Synthetic oligonucleotide
auguucauauggcuccaag

SEQ ID NO: 1761054 - RNA, 19 nt, Artificial Sequence
  Description of Artificial Sequence: Synthetic oligonucleotide
cacaggauagccaaccaca

SEQ ID NO: 1761055 - RNA, 19 nt, Artificial Sequence
  Description of Artificial Sequence: Synthetic oligonucleotide
uguagugcgacagcucuga

SEQ ID NO: 1761056 - RNA, 19 nt, Artificial Sequence
  Description of Artificial Sequence: Synthetic oligonucleotide
uguggaccccagauugggg

SEQ ID NO: 1761057 - RNA, 19 nt, Artificial Sequence
  Description of Artificial Sequence: Synthetic oligonucleotide
acuggauaaggccuucggu

SEQ ID NO: 1761058 - RNA, 19 nt, Artificial Sequence
  Description of Artificial Sequence: Synthetic oligonucleotide
agggcauaacuggauaagg

SEQ ID NO: 1761059 - RNA, 19 nt, Artificial Sequence
  Description of Artificial Sequence: Synthetic oligonucleotide
auacugguagacgcugacc

SEQ ID NO: 1761060 - RNA, 19 nt, Artificial Sequence
  Description of Artificial Sequence: Synthetic oligonucleotide
guagcgauacuuggcauag

SEQ ID NO: 1761061 - RNA, 19 nt, Artificial Sequence
  Description of Artificial Sequence: Synthetic oligonucleotide
uacagauccuucgagcaac

SEQ ID NO: 1761062 - RNA, 19 nt, Artificial Sequence
  Description of Artificial Sequence: Synthetic oligonucleotide
uguucuauuagggcauaac

SEQ ID NO: 1761063 - RNA, 19 nt, Artificial Sequence
  Description of Artificial Sequence: Synthetic oligonucleotide
aaccuaucagcugcaagca

SEQ ID NO: 1761064 - RNA, 19 nt, Artificial Sequence
  Description of Artificial Sequence: Synthetic oligonucleotide
aaaagugagccagcgcgcu

SEQ ID NO: 1761065 - RNA, 19 nt, Artificial Sequence
  Description of Artificial Sequence: Synthetic oligonucleotide
aaaagccagaaccgcucgu

SEQ ID NO: 1761066 - RNA, 19 nt, Artificial Sequence
  Description of Artificial Sequence: Synthetic oligonucleotide
gauugggguagcuguguug

SEQ ID NO: 1761067 - RNA, 19 nt, Artificial Sequence
  Description of Artificial Sequence: Synthetic oligonucleotide
auuagggcauaacuggaua

SEQ ID NO: 1761068 - RNA, 19 nt, Artificial Sequence
  Description of Artificial Sequence: Synthetic oligonucleotide
cuuagguuccucuugaaau

SEQ ID NO: 1761069 - RNA, 19 nt, Artificial Sequence
  Description of Artificial Sequence: Synthetic oligonucleotide
gccagaaccuaucagcugc

SEQ ID NO: 1761070 - RNA, 19 nt, Artificial Sequence
  Description of Artificial Sequence: Synthetic oligonucleotide
aggccuucgguagcgauac

SEQ ID NO: 1761071 - RNA, 19 nt, Artificial Sequence
  Description of Artificial Sequence: Synthetic oligonucleotide
ccuaucagcugcaagcacc

SEQ ID NO: 1761072 - RNA, 19 nt, Artificial Sequence
  Description of Artificial Sequence: Synthetic oligonucleotide
cuggauuaaugcagaaauc

SEQ ID NO: 1761073 - RNA, 19 nt, Artificial Sequence
  Description of Artificial Sequence: Synthetic oligonucleotide
ggaauaguacuucaggcaa

SEQ ID NO: 1761074 - RNA, 19 nt, Artificial Sequence
  Description of Artificial Sequence: Synthetic oligonucleotide
gacgcugaccccgacguag

SEQ ID NO: 1761075 - RNA, 19 nt, Artificial Sequence
  Description of Artificial Sequence: Synthetic oligonucleotide
gauccuucgagcaacuuua

SEQ ID NO: 1761076 - RNA, 19 nt, Artificial Sequence
  Description of Artificial Sequence: Synthetic oligonucleotide
agauccuucgagcaacuuu

SEQ ID NO: 1761077 - RNA, 19 nt, Artificial Sequence
  Description of Artificial Sequence: Synthetic oligonucleotide
gcaucuaacagaaauuuga

SEQ ID NO: 1761078 - RNA, 19 nt, Artificial Sequence
  Description of Artificial Sequence: Synthetic oligonucleotide
gccucauucuuacucaaag

SEQ ID NO: 1761079 - RNA, 19 nt, Artificial Sequence
  Description of Artificial Sequence: Synthetic oligonucleotide
cuuggcauagcaacagcca

SEQ ID NO: 1761080 - RNA, 19 nt, Artificial Sequence
  Description of Artificial Sequence: Synthetic oligonucleotide
guagacgcugaccccgacg

SEQ ID NO: 1761081 - RNA, 19 nt, Artificial Sequence
  Description of Artificial Sequence: Synthetic oligonucleotide
guccccaugggcaaaagac

SEQ ID NO: 1761082 - RNA, 19 nt, Artificial Sequence
  Description of Artificial Sequence: Synthetic oligonucleotide
agcaacuuuagagccaaga

SEQ ID NO: 1761083 - RNA, 19 nt, Artificial Sequence
  Description of Artificial Sequence: Synthetic oligonucleotide
gaaguguaauagcuuugga

SEQ ID NO: 1761084 - RNA, 19 nt, Artificial Sequence
  Description of Artificial Sequence: Synthetic oligonucleotide
uguauccauguuugcuggc

SEQ ID NO: 1761085 - RNA, 19 nt, Artificial Sequence
  Description of Artificial Sequence: Synthetic oligonucleotide
aacagugcauuuggccauc

SEQ ID NO: 1761086 - RNA, 19 nt, Artificial Sequence
  Description of Artificial Sequence: Synthetic oligonucleotide
uugaaccuugggucuuagg

SEQ ID NO: 1761087 - RNA, 19 nt, Artificial Sequence
  Description of Artificial Sequence: Synthetic oligonucleotide
uuaguuacggagagaccuu

SEQ ID NO: 1761088 - RNA, 19 nt, Artificial Sequence
  Description of Artificial Sequence: Synthetic oligonucleotide
ugucucaguggaugagacc

SEQ ID NO: 1761089 - RNA, 19 nt, Artificial Sequence
  Description of Artificial Sequence: Synthetic oligonucleotide
guuuaagguuucuucucca

SEQ ID NO: 1761090 - RNA, 19 nt, Artificial Sequence
  Description of Artificial Sequence: Synthetic oligonucleotide
cuauuagggcauaacugga

SEQ ID NO: 1761091 - RNA, 19 nt, Artificial Sequence
  Description of Artificial Sequence: Synthetic oligonucleotide
caacccuaaaauagcucac

SEQ ID NO: 1761092 - RNA, 19 nt, Artificial Sequence
  Description of Artificial Sequence: Synthetic oligonucleotide
cagcuaguugguuauccug

SEQ ID NO: 1761093 - RNA, 19 nt, Artificial Sequence
  Description of Artificial Sequence: Synthetic oligonucleotide
ccuuauacugagaggaaac

SEQ ID NO: 1761094 - RNA, 19 nt, Artificial Sequence
  Description of Artificial Sequence: Synthetic oligonucleotide
uaacuggauaaggccuucg

SEQ ID NO: 1761095 - RNA, 19 nt, Artificial Sequence
  Description of Artificial Sequence: Synthetic oligonucleotide
uagugcgacagcucugacu

SEQ ID NO: 1761096 - RNA, 19 nt, Artificial Sequence
  Description of Artificial Sequence: Synthetic oligonucleotide
acguaguccacaaaguaaa

SEQ ID NO: 1761097 - RNA, 19 nt, Artificial Sequence
  Description of Artificial Sequence: Synthetic oligonucleotide
auaacuggauaaggccuuc

SEQ ID NO: 1761098 - RNA, 19 nt, Artificial Sequence
  Description of Artificial Sequence: Synthetic oligonucleotide
aggugcgccaaaaggcugc

SEQ ID NO: 1761099 - RNA, 19 nt, Artificial Sequence
  Description of Artificial Sequence: Synthetic oligonucleotide
uccuucgagcaacuuuaga

SEQ ID NO: 1761100 - RNA, 19 nt, Artificial Sequence
  Description of Artificial Sequence: Synthetic oligonucleotide
agcuaguugguuauccuga

SEQ ID NO: 1761101 - RNA, 19 nt, Artificial Sequence
  Description of Artificial Sequence: Synthetic oligonucleotide
cuuacucaaaggaccuuca

SEQ ID NO: 1761102 - RNA, 19 nt, Artificial Sequence
  Description of Artificial Sequence: Synthetic oligonucleotide
agcucacaguuaauacugc

SEQ ID NO: 1761103 - RNA, 19 nt, Artificial Sequence
  Description of Artificial Sequence: Synthetic oligonucleotide
ccucauucuuacucaaagg

SEQ ID NO: 1761104 - RNA, 19 nt, Artificial Sequence
  Description of Artificial Sequence: Synthetic oligonucleotide
uucagauaaucugccugca

SEQ ID NO: 1761105 - RNA, 19 nt, Artificial Sequence
  Description of Artificial Sequence: Synthetic oligonucleotide
ugccauacugguagacgcu

SEQ ID NO: 1761106 - RNA, 19 nt, Artificial Sequence
  Description of Artificial Sequence: Synthetic oligonucleotide
aaagccagaaccgcucgua

SEQ ID NO: 1761107 - RNA, 19 nt, Artificial Sequence
  Description of Artificial Sequence: Synthetic oligonucleotide
agacaacccuaaaauagcu

SEQ ID NO: 1761108 - RNA, 19 nt, Artificial Sequence
  Description of Artificial Sequence: Synthetic oligonucleotide
aaguaaagguguagugcga

SEQ ID NO: 1761109 - RNA, 19 nt, Artificial Sequence
  Description of Artificial Sequence: Synthetic oligonucleotide
uaacagaaauuugaaccuu

SEQ ID NO: 1761110 - RNA, 19 nt, Artificial Sequence
  Description of Artificial Sequence: Synthetic oligonucleotide
aaggguuucaauggaucuu

SEQ ID NO: 1761111 - RNA, 19 nt, Artificial Sequence
  Description of Artificial Sequence: Synthetic oligonucleotide
agacuagggaugggaauag

SEQ ID NO: 1761112 - RNA, 19 nt, Artificial Sequence
  Description of Artificial Sequence: Synthetic oligonucleotide
agugucucaguggaugaga

SEQ ID NO: 1761113 - RNA, 19 nt, Artificial Sequence
  Description of Artificial Sequence: Synthetic oligonucleotide
uuugaaccuugggucuuag

SEQ ID NO: 1761114 - RNA, 19 nt, Artificial Sequence
  Description of Artificial Sequence: Synthetic oligonucleotide
gucuaaggguuucaaugga

SEQ ID NO: 1761115 - RNA, 19 nt, Artificial Sequence
  Description of Artificial Sequence: Synthetic oligonucleotide
cauucugucuaaggguuuc

SEQ ID NO: 1761116 - RNA, 19 nt, Artificial Sequence
  Description of Artificial Sequence: Synthetic oligonucleotide
cagaaccgcucguaccagg

SEQ ID NO: 1761117 - RNA, 19 nt, Artificial Sequence
  Description of Artificial Sequence: Synthetic oligonucleotide
agcacaggauagccaacca

SEQ ID NO: 1761118 - RNA, 19 nt, Artificial Sequence
  Description of Artificial Sequence: Synthetic oligonucleotide
accuuauacugagaggaaa

SEQ ID NO: 1761119 - RNA, 19 nt, Artificial Sequence
  Description of Artificial Sequence: Synthetic oligonucleotide
guuucuguaugaccugaaa

SEQ ID NO: 1761120 - RNA, 19 nt, Artificial Sequence
  Description of Artificial Sequence: Synthetic oligonucleotide
uagacgcucugaaauccua

SEQ ID NO: 1761121 - RNA, 19 nt, Artificial Sequence
  Description of Artificial Sequence: Synthetic oligonucleotide
gaacuaccuguuuguggac

SEQ ID NO: 1761122 - RNA, 19 nt, Artificial Sequence
  Description of Artificial Sequence: Synthetic oligonucleotide
augagaccagauaucagau

SEQ ID NO: 1761123 - RNA, 19 nt, Artificial Sequence
  Description of Artificial Sequence: Synthetic oligonucleotide
aaggugcgccaaaaggcug

SEQ ID NO: 1761124 - RNA, 19 nt, Artificial Sequence
  Description of Artificial Sequence: Synthetic oligonucleotide
cacauauuuaucuguccua

SEQ ID NO: 1761125 - RNA, 19 nt, Artificial Sequence
  Description of Artificial Sequence: Synthetic oligonucleotide
caccgcccaucucacaggg

SEQ ID NO: 1761126 - RNA, 19 nt, Artificial Sequence
  Description of Artificial Sequence: Synthetic oligonucleotide
cugaccccgacguagucca

SEQ ID NO: 1761127 - RNA, 19 nt, Artificial Sequence
  Description of Artificial Sequence: Synthetic oligonucleotide
gggccaaccacagugagca

SEQ ID NO: 1761128 - RNA, 19 nt, Artificial Sequence
  Description of Artificial Sequence: Synthetic oligonucleotide
gugcauuuggccaucaggu

SEQ ID NO: 1761129 - RNA, 19 nt, Artificial Sequence
  Description of Artificial Sequence: Synthetic oligonucleotide
agacgcucugaaauccuag

SEQ ID NO: 1761130 - RNA, 19 nt, Artificial Sequence
  Description of Artificial Sequence: Synthetic oligonucleotide
cagcgcgcugccauacugg

SEQ ID NO: 1761131 - RNA, 19 nt, Artificial Sequence
  Description of Artificial Sequence: Synthetic oligonucleotide
caagcaccgcccaucucac

SEQ ID NO: 1761132 - RNA, 19 nt, Artificial Sequence
  Description of Artificial Sequence: Synthetic oligonucleotide
caguuaccaagaccagcag

SEQ ID NO: 1761133 - RNA, 19 nt, Artificial Sequence
  Description of Artificial Sequence: Synthetic oligonucleotide
gggcauaacuggauaaggc

SEQ ID NO: 1761134 - RNA, 19 nt, Artificial Sequence
  Description of Artificial Sequence: Synthetic oligonucleotide
ccccaugggcaaaagacag

SEQ ID NO: 1761135 - RNA, 19 nt, Artificial Sequence
  Description of Artificial Sequence: Synthetic oligonucleotide
gaccagauaucagauaaau

SEQ ID NO: 1761136 - RNA, 19 nt, Artificial Sequence
  Description of Artificial Sequence: Synthetic oligonucleotide
cagagagagcuguguggcc

SEQ ID NO: 1761137 - RNA, 19 nt, Artificial Sequence
  Description of Artificial Sequence: Synthetic oligonucleotide
ucuguccuaggaccuguuu

SEQ ID NO: 1761138 - RNA, 19 nt, Artificial Sequence
  Description of Artificial Sequence: Synthetic oligonucleotide
uaaggccuucgguagcgau

SEQ ID NO: 1761139 - RNA, 19 nt, Artificial Sequence
  Description of Artificial Sequence: Synthetic oligonucleotide
uucugucuaaggguuucaa

SEQ ID NO: 1761140 - RNA, 19 nt, Artificial Sequence
  Description of Artificial Sequence: Synthetic oligonucleotide
ggucuuagguuccucuuga

SEQ ID NO: 1761141 - RNA, 19 nt, Artificial Sequence
  Description of Artificial Sequence: Synthetic oligonucleotide
gacagcucugacuuggauu

SEQ ID NO: 1761142 - RNA, 19 nt, Artificial Sequence
  Description of Artificial Sequence: Synthetic oligonucleotide
agccaagauuuuagaagag

SEQ ID NO: 1761143 - RNA, 19 nt, Artificial Sequence
  Description of Artificial Sequence: Synthetic oligonucleotide
acgcucugaaauccuagua

SEQ ID NO: 1761144 - RNA, 19 nt, Artificial Sequence
  Description of Artificial Sequence: Synthetic oligonucleotide
agcucuuggcacuguugca

SEQ ID NO: 1761145 - RNA, 19 nt, Artificial Sequence
  Description of Artificial Sequence: Synthetic oligonucleotide
ccuagacgcucugaaaucc

SEQ ID NO: 1761146 - RNA, 19 nt, Artificial Sequence
  Description of Artificial Sequence: Synthetic oligonucleotide
guuacggagagaccuuaua

SEQ ID NO: 1761147 - RNA, 19 nt, Artificial Sequence
  Description of Artificial Sequence: Synthetic oligonucleotide
gcacagagcaauauuacaa

SEQ ID NO: 1761148 - RNA, 19 nt, Artificial Sequence
  Description of Artificial Sequence: Synthetic oligonucleotide
gggucuuagguuccucuug

SEQ ID NO: 1761149 - RNA, 19 nt, Artificial Sequence
  Description of Artificial Sequence: Synthetic oligonucleotide
uaccuguuuguggacccca

SEQ ID NO: 1761150 - RNA, 19 nt, Artificial Sequence
  Description of Artificial Sequence: Synthetic oligonucleotide
ugggucuuagguuccucuu

SEQ ID NO: 1761151 - RNA, 19 nt, Artificial Sequence
  Description of Artificial Sequence: Synthetic oligonucleotide
ugggguagcuguguugguc

SEQ ID NO: 1761152 - RNA, 19 nt, Artificial Sequence
  Description of Artificial Sequence: Synthetic oligonucleotide
ggauaaggccuucgguagc

SEQ ID NO: 1761153 - RNA, 19 nt, Artificial Sequence
  Description of Artificial Sequence: Synthetic oligonucleotide
ugguagacgcugaccccga

SEQ ID NO: 1761154 - RNA, 19 nt, Artificial Sequence
  Description of Artificial Sequence: Synthetic oligonucleotide
guggaugagaccagauauc

SEQ ID NO: 1761155 - RNA, 19 nt, Artificial Sequence
  Description of Artificial Sequence: Synthetic oligonucleotide
auauuaccaugcagacuag

SEQ ID NO: 1761156 - RNA, 19 nt, Artificial Sequence
  Description of Artificial Sequence: Synthetic oligonucleotide
gcagaaggugcgccaaaag

SEQ ID NO: 1761157 - RNA, 19 nt, Artificial Sequence
  Description of Artificial Sequence: Synthetic oligonucleotide
gacgcucugaaauccuagu

SEQ ID NO: 1761158 - RNA, 19 nt, Artificial Sequence
  Description of Artificial Sequence: Synthetic oligonucleotide
aaucagccagcuaguuggu

SEQ ID NO: 1761159 - RNA, 19 nt, Artificial Sequence
  Description of Artificial Sequence: Synthetic oligonucleotide
uaguuacggagagaccuua

SEQ ID NO: 1761160 - RNA, 19 nt, Artificial Sequence
  Description of Artificial Sequence: Synthetic oligonucleotide
cuguccuaggaccuguuua

SEQ ID NO: 1761161 - RNA, 19 nt, Artificial Sequence
  Description of Artificial Sequence: Synthetic oligonucleotide
cuaguugguuauccugaga

SEQ ID NO: 1761162 - RNA, 19 nt, Artificial Sequence
  Description of Artificial Sequence: Synthetic oligonucleotide
guguaauagcuuuggaauu

SEQ ID NO: 1761163 - RNA, 19 nt, Artificial Sequence
  Description of Artificial Sequence: Synthetic oligonucleotide
uuaccaagaccagcagcau

SEQ ID NO: 1761164 - RNA, 19 nt, Artificial Sequence
  Description of Artificial Sequence: Synthetic oligonucleotide
ccgcccaucucacaggggc

SEQ ID NO: 1761165 - RNA, 19 nt, Artificial Sequence
  Description of Artificial Sequence: Synthetic oligonucleotide
accagauaucagauaaauu

SEQ ID NO: 1761166 - RNA, 19 nt, Artificial Sequence
  Description of Artificial Sequence: Synthetic oligonucleotide
aaggccuucgguagcgaua

SEQ ID NO: 1761167 - RNA, 19 nt, Artificial Sequence
  Description of Artificial Sequence: Synthetic oligonucleotide
gcucacaguuaauacugca

SEQ ID NO: 1761168 - RNA, 19 nt, Artificial Sequence
  Description of Artificial Sequence: Synthetic oligonucleotide
gcugcacagagcaauauua

SEQ ID NO: 1761169 - RNA, 19 nt, Artificial Sequence
  Description of Artificial Sequence: Synthetic oligonucleotide
gguagcgauacuuggcaua

SEQ ID NO: 1761170 - RNA, 19 nt, Artificial Sequence
  Description of Artificial Sequence: Synthetic oligonucleotide
guccuaggaccuguuuaag

SEQ ID NO: 1761171 - RNA, 19 nt, Artificial Sequence
  Description of Artificial Sequence: Synthetic oligonucleotide
cauaacuggauaaggccuu

SEQ ID NO: 1761172 - RNA, 19 nt, Artificial Sequence
  Description of Artificial Sequence: Synthetic oligonucleotide
uccacccuagacgcucuga

SEQ ID NO: 1761173 - RNA, 19 nt, Artificial Sequence
  Description of Artificial Sequence: Synthetic oligonucleotide
uuccacccuagacgcucug

SEQ ID NO: 1761174 - RNA, 19 nt, Artificial Sequence
  Description of Artificial Sequence: Synthetic oligonucleotide
gccagcuaguugguuaucc

SEQ ID NO: 1761175 - RNA, 19 nt, Artificial Sequence
  Description of Artificial Sequence: Synthetic oligonucleotide
aagcaccgcccaucucaca

SEQ ID NO: 1761176 - RNA, 19 nt, Artificial Sequence
  Description of Artificial Sequence: Synthetic oligonucleotide
gaccuucaggggccaacca

SEQ ID NO: 1761177 - RNA, 19 nt, Artificial Sequence
  Description of Artificial Sequence: Synthetic oligonucleotide
ccuaggaccuguuuaaggu

SEQ ID NO: 1761178 - RNA, 19 nt, Artificial Sequence
  Description of Artificial Sequence: Synthetic oligonucleotide
uugggguagcuguguuggu

SEQ ID NO: 1761179 - RNA, 19 nt, Artificial Sequence
  Description of Artificial Sequence: Synthetic oligonucleotide
gcauaacuggauaaggccu

SEQ ID NO: 1761180 - RNA, 19 nt, Artificial Sequence
  Description of Artificial Sequence: Synthetic oligonucleotide
uucuuacucaaaggaccuu

SEQ ID NO: 1761181 - RNA, 19 nt, Artificial Sequence
  Description of Artificial Sequence: Synthetic oligonucleotide
guauccauguuugcuggcu

SEQ ID NO: 1761182 - RNA, 19 nt, Artificial Sequence
  Description of Artificial Sequence: Synthetic oligonucleotide
auccuucgagcaacuuuag

SEQ ID NO: 1761183 - RNA, 19 nt, Artificial Sequence
  Description of Artificial Sequence: Synthetic oligonucleotide
agaccagauaucagauaaa

SEQ ID NO: 1761184 - RNA, 19 nt, Artificial Sequence
  Description of Artificial Sequence: Synthetic oligonucleotide
cacuggauuaaugcagaaa

SEQ ID NO: 1761185 - RNA, 19 nt, Artificial Sequence
  Description of Artificial Sequence: Synthetic oligonucleotide
ccagauugggguagcugug

SEQ ID NO: 1761186 - RNA, 19 nt, Artificial Sequence
  Description of Artificial Sequence: Synthetic oligonucleotide
accccgacguaguccacaa

SEQ ID NO: 1761187 - RNA, 19 nt, Artificial Sequence
  Description of Artificial Sequence: Synthetic oligonucleotide
accuguuuguggaccccag

SEQ ID NO: 1761188 - RNA, 19 nt, Artificial Sequence
  Description of Artificial Sequence: Synthetic oligonucleotide
guguagugcgacagcucug

SEQ ID NO: 1761189 - RNA, 19 nt, Artificial Sequence
  Description of Artificial Sequence: Synthetic oligonucleotide
caucucacaggggcugcac

SEQ ID NO: 1761190 - RNA, 19 nt, Artificial Sequence
  Description of Artificial Sequence: Synthetic oligonucleotide
ggaccuucaggggccaacc

SEQ ID NO: 1761191 - RNA, 19 nt, Artificial Sequence
  Description of Artificial Sequence: Synthetic oligonucleotide
acagauccuucgagcaacu

SEQ ID NO: 1761192 - RNA, 19 nt, Artificial Sequence
  Description of Artificial Sequence: Synthetic oligonucleotide
uagcgauacuuggcauagc

SEQ ID NO: 1761193 - RNA, 19 nt, Artificial Sequence
  Description of Artificial Sequence: Synthetic oligonucleotide
cugccugcaagacaacccu

SEQ ID NO: 1761194 - RNA, 19 nt, Artificial Sequence
  Description of Artificial Sequence: Synthetic oligonucleotide
guaccaggccuggucugag

SEQ ID NO: 1761195 - RNA, 19 nt, Artificial Sequence
  Description of Artificial Sequence: Synthetic oligonucleotide
caguguauccauguuugcu

SEQ ID NO: 1761196 - RNA, 19 nt, Artificial Sequence
  Description of Artificial Sequence: Synthetic oligonucleotide
gggaugggaauaguacuuc

SEQ ID NO: 1761197 - RNA, 19 nt, Artificial Sequence
  Description of Artificial Sequence: Synthetic oligonucleotide
cuagacgcucugaaauccu

SEQ ID NO: 1761198 - RNA, 19 nt, Artificial Sequence
  Description of Artificial Sequence: Synthetic oligonucleotide
guagugcgacagcucugac

SEQ ID NO: 1761199 - RNA, 19 nt, Artificial Sequence
  Description of Artificial Sequence: Synthetic oligonucleotide
gcaccgcccaucucacagg

SEQ ID NO: 1761200 - RNA, 19 nt, Artificial Sequence
  Description of Artificial Sequence: Synthetic oligonucleotide
ccucaguuaccaagaccag

SEQ ID NO: 1761201 - RNA, 19 nt, Artificial Sequence
  Description of Artificial Sequence: Synthetic oligonucleotide
aguuacggagagaccuuau

SEQ ID NO: 1761202 - RNA, 19 nt, Artificial Sequence
  Description of Artificial Sequence: Synthetic oligonucleotide
gugccucauucuuacucaa

SEQ ID NO: 1761203 - RNA, 19 nt, Artificial Sequence
  Description of Artificial Sequence: Synthetic oligonucleotide
cucguaccaggccuggucu

SEQ ID NO: 1761204 - RNA, 19 nt, Artificial Sequence
  Description of Artificial Sequence: Synthetic oligonucleotide
gcucguaccaggccugguc

SEQ ID NO: 1761205 - RNA, 19 nt, Artificial Sequence
  Description of Artificial Sequence: Synthetic oligonucleotide
cccuagacgcucugaaauc

SEQ ID NO: 1761206 - RNA, 19 nt, Artificial Sequence
  Description of Artificial Sequence: Synthetic oligonucleotide
gcugaccccgacguagucc

SEQ ID NO: 1761207 - RNA, 19 nt, Artificial Sequence
  Description of Artificial Sequence: Synthetic oligonucleotide
gaccccgacguaguccaca

SEQ ID NO: 1761208 - RNA, 19 nt, Artificial Sequence
  Description of Artificial Sequence: Synthetic oligonucleotide
cuggucugagcuguagaaa

SEQ ID NO: 1761209 - RNA, 19 nt, Artificial Sequence
  Description of Artificial Sequence: Synthetic oligonucleotide
agccagcuaguugguuauc

SEQ ID NO: 1761210 - RNA, 19 nt, Artificial Sequence
  Description of Artificial Sequence: Synthetic oligonucleotide
ccugaauguucauauggcu

SEQ ID NO: 1761211 - RNA, 19 nt, Artificial Sequence
  Description of Artificial Sequence: Synthetic oligonucleotide
gagaggaaacacagccugu

SEQ ID NO: 1761212 - RNA, 19 nt, Artificial Sequence
  Description of Artificial Sequence: Synthetic oligonucleotide
gaccccagauugggguagc

SEQ ID NO: 1761213 - RNA, 19 nt, Artificial Sequence
  Description of Artificial Sequence: Synthetic oligonucleotide
cacccuagacgcucugaaa

SEQ ID NO: 1761214 - RNA, 19 nt, Artificial Sequence
  Description of Artificial Sequence: Synthetic oligonucleotide
gagcaacuuuagagccaag

SEQ ID NO: 1761215 - RNA, 19 nt, Artificial Sequence
  Description of Artificial Sequence: Synthetic oligonucleotide
gacuuggauugcagaaggu

SEQ ID NO: 1761216 - RNA, 19 nt, Artificial Sequence
  Description of Artificial Sequence: Synthetic oligonucleotide
auuuggccaucaggugccu

SEQ ID NO: 1761217 - RNA, 19 nt, Artificial Sequence
  Description of Artificial Sequence: Synthetic oligonucleotide
ugaccccgacguaguccac

SEQ ID NO: 1761218 - RNA, 19 nt, Artificial Sequence
  Description of Artificial Sequence: Synthetic oligonucleotide
gugcgacagcucugacuug

SEQ ID NO: 1761219 - RNA, 19 nt, Artificial Sequence
  Description of Artificial Sequence: Synthetic oligonucleotide
ggauagccaaccacagaaa

SEQ ID NO: 1761220 - RNA, 19 nt, Artificial Sequence
  Description of Artificial Sequence: Synthetic oligonucleotide
ccagcgcgcugccauacug

SEQ ID NO: 1761221 - RNA, 19 nt, Artificial Sequence
  Description of Artificial Sequence: Synthetic oligonucleotide
gguuucaauggaucuucuu

SEQ ID NO: 1761222 - RNA, 19 nt, Artificial Sequence
  Description of Artificial Sequence: Synthetic oligonucleotide
gguagacgcugaccccgac

SEQ ID NO: 1761223 - RNA, 19 nt, Artificial Sequence
  Description of Artificial Sequence: Synthetic oligonucleotide
auacugcacugcacacaga

SEQ ID NO: 1761224 - RNA, 19 nt, Artificial Sequence
  Description of Artificial Sequence: Synthetic oligonucleotide
agacgcugaccccgacgua

SEQ ID NO: 1761225 - RNA, 19 nt, Artificial Sequence
  Description of Artificial Sequence: Synthetic oligonucleotide
cuguucuauuagggcauaa

SEQ ID NO: 1761226 - RNA, 19 nt, Artificial Sequence
  Description of Artificial Sequence: Synthetic oligonucleotide
gccugcaagacaacccuaa

SEQ ID NO: 1761227 - RNA, 19 nt, Artificial Sequence
  Description of Artificial Sequence: Synthetic oligonucleotide
acgcugaccccgacguagu

SEQ ID NO: 1761228 - RNA, 19 nt, Artificial Sequence
  Description of Artificial Sequence: Synthetic oligonucleotide
ccagaaccuaucagcugca

SEQ ID NO: 1761229 - RNA, 19 nt, Artificial Sequence
  Description of Artificial Sequence: Synthetic oligonucleotide
cggagagaccuuauacuga

SEQ ID NO: 1761230 - RNA, 19 nt, Artificial Sequence
  Description of Artificial Sequence: Synthetic oligonucleotide
ggcaaaucagccagcuagu

SEQ ID NO: 1761231 - RNA, 19 nt, Artificial Sequence
  Description of Artificial Sequence: Synthetic oligonucleotide
cagauugggguagcugugu

SEQ ID NO: 1761232 - RNA, 19 nt, Artificial Sequence
  Description of Artificial Sequence: Synthetic oligonucleotide
gugcgccaaaaggcugcag

SEQ ID NO: 1761233 - RNA, 19 nt, Artificial Sequence
  Description of Artificial Sequence: Synthetic oligonucleotide
ccugguagcucuuggcacu

SEQ ID NO: 1761234 - RNA, 19 nt, Artificial Sequence
  Description of Artificial Sequence: Synthetic oligonucleotide
gcgauacuuggcauagcaa

SEQ ID NO: 1761235 - RNA, 19 nt, Artificial Sequence
  Description of Artificial Sequence: Synthetic oligonucleotide
ccagaaccgcucguaccag

SEQ ID NO: 1761236 - RNA, 19 nt, Artificial Sequence
  Description of Artificial Sequence: Synthetic oligonucleotide
cagaaccuaucagcugcaa

SEQ ID NO: 1761237 - RNA, 19 nt, Artificial Sequence
  Description of Artificial Sequence: Synthetic oligonucleotide
ccacccuagacgcucugaa

SEQ ID NO: 1761238 - RNA, 19 nt, Artificial Sequence
  Description of Artificial Sequence: Synthetic oligonucleotide
ccagcuaguugguuauccu

SEQ ID NO: 1761239 - RNA, 19 nt, Artificial Sequence
  Description of Artificial Sequence: Synthetic oligonucleotide
ggugcgccaaaaggcugca

SEQ ID NO: 1761240 - RNA, 19 nt, Artificial Sequence
  Description of Artificial Sequence: Synthetic oligonucleotide
aagcggcugcuggcaggaa

SEQ ID NO: 1761241 - RNA, 19 nt, Artificial Sequence
  Description of Artificial Sequence: Synthetic oligonucleotide
gcaaaucagccagcuaguu

SEQ ID NO: 1761242 - RNA, 19 nt, Artificial Sequence
  Description of Artificial Sequence: Synthetic oligonucleotide
caggugccucauucuuacu

SEQ ID NO: 1761243 - RNA, 19 nt, Artificial Sequence
  Description of Artificial Sequence: Synthetic oligonucleotide
ggggcugcacagagcaaua

SEQ ID NO: 1761244 - RNA, 19 nt, Artificial Sequence
  Description of Artificial Sequence: Synthetic oligonucleotide
gcgacagcucugacuugga

SEQ ID NO: 1761245 - RNA, 19 nt, Artificial Sequence
  Description of Artificial Sequence: Synthetic oligonucleotide
cagauccuucgagcaacuu

SEQ ID NO: 1761246 - RNA, 19 nt, Artificial Sequence
  Description of Artificial Sequence: Synthetic oligonucleotide
aggccuggucugagcugua

SEQ ID NO: 1761247 - RNA, 19 nt, Artificial Sequence
  Description of Artificial Sequence: Synthetic oligonucleotide
gccagcgcgcugccauacu

SEQ ID NO: 1761248 - RNA, 19 nt, Artificial Sequence
  Description of Artificial Sequence: Synthetic oligonucleotide
cgguagcgauacuuggcau

SEQ ID NO: 1761249 - RNA, 19 nt, Artificial Sequence
  Description of Artificial Sequence: Synthetic oligonucleotide
ggccuucgguagcgauacu

SEQ ID NO: 1761250 - RNA, 19 nt, Artificial Sequence
  Description of Artificial Sequence: Synthetic oligonucleotide
ccccgacguaguccacaaa

SEQ ID NO: 1761251 - RNA, 19 nt, Artificial Sequence
  Description of Artificial Sequence: Synthetic oligonucleotide
cgcucguaccaggccuggu

SEQ ID NO: 1761252 - RNA, 19 nt, Artificial Sequence
  Description of Artificial Sequence: Synthetic oligonucleotide
aaaccuuggacccuuaggg

SEQ ID NO: 1761253 - RNA, 19 nt, Artificial Sequence
  Description of Artificial Sequence: Synthetic oligonucleotide
uacaaguugaauuugagga

SEQ ID NO: 1761254 - RNA, 19 nt, Artificial Sequence
  Description of Artificial Sequence: Synthetic oligonucleotide
gauaaugucguuuaaucug

SEQ ID NO: 1761255 - RNA, 19 nt, Artificial Sequence
  Description of Artificial Sequence: Synthetic oligonucleotide
uuuaaucugccaaauauac

SEQ ID NO: 1761256 - RNA, 19 nt, Artificial Sequence
  Description of Artificial Sequence: Synthetic oligonucleotide
ugugccaagaugaagagga

SEQ ID NO: 1761257 - RNA, 19 nt, Artificial Sequence
  Description of Artificial Sequence: Synthetic oligonucleotide
aguugugugaccuucuugg

SEQ ID NO: 1761258 - RNA, 19 nt, Artificial Sequence
  Description of Artificial Sequence: Synthetic oligonucleotide
aaaacauucaaauggcuau

SEQ ID NO: 1761259 - RNA, 19 nt, Artificial Sequence
  Description of Artificial Sequence: Synthetic oligonucleotide
cuuucuaccuccuuuaggc

SEQ ID NO: 1761260 - RNA, 19 nt, Artificial Sequence
  Description of Artificial Sequence: Synthetic oligonucleotide
auggcuauguaugaaaugc

SEQ ID NO: 1761261 - RNA, 19 nt, Artificial Sequence
  Description of Artificial Sequence: Synthetic oligonucleotide
caaucuacuggacaaaugg

SEQ ID NO: 1761262 - RNA, 19 nt, Artificial Sequence
  Description of Artificial Sequence: Synthetic oligonucleotide
aagguauuaugauaauguc

SEQ ID NO: 1761263 - RNA, 19 nt, Artificial Sequence
  Description of Artificial Sequence: Synthetic oligonucleotide
acaaauggaaucucuuuac

SEQ ID NO: 1761264 - RNA, 19 nt, Artificial Sequence
  Description of Artificial Sequence: Synthetic oligonucleotide
gaaaugaucaauggguagg

SEQ ID NO: 1761265 - RNA, 19 nt, Artificial Sequence
  Description of Artificial Sequence: Synthetic oligonucleotide
auacaaguugaauuugagg

SEQ ID NO: 1761266 - RNA, 19 nt, Artificial Sequence
  Description of Artificial Sequence: Synthetic oligonucleotide
acaacgugcaaucuacugg

SEQ ID NO: 1761267 - RNA, 19 nt, Artificial Sequence
  Description of Artificial Sequence: Synthetic oligonucleotide
uacuuauucagggagagug

SEQ ID NO: 1761268 - RNA, 19 nt, Artificial Sequence
  Description of Artificial Sequence: Synthetic oligonucleotide
aagugcaucuucauguagc

SEQ ID NO: 1761269 - RNA, 19 nt, Artificial Sequence
  Description of Artificial Sequence: Synthetic oligonucleotide
ugccaaauauacaaguuga

SEQ ID NO: 1761270 - RNA, 19 nt, Artificial Sequence
  Description of Artificial Sequence: Synthetic oligonucleotide
auaaugucguuuaaucugc

SEQ ID NO: 1761271 - RNA, 19 nt, Artificial Sequence
  Description of Artificial Sequence: Synthetic oligonucleotide
ugugugaccuucuugguug

SEQ ID NO: 1761272 - RNA, 19 nt, Artificial Sequence
  Description of Artificial Sequence: Synthetic oligonucleotide
uguauacugccucacccgg

SEQ ID NO: 1761273 - RNA, 19 nt, Artificial Sequence
  Description of Artificial Sequence: Synthetic oligonucleotide
aaagauagcagcugccccu

SEQ ID NO: 1761274 - RNA, 19 nt, Artificial Sequence
  Description of Artificial Sequence: Synthetic oligonucleotide
aaaugaucaauggguaggg

SEQ ID NO: 1761275 - RNA, 19 nt, Artificial Sequence
  Description of Artificial Sequence: Synthetic oligonucleotide
uguucaucuucuucguugg

SEQ ID NO: 1761276 - RNA, 19 nt, Artificial Sequence
  Description of Artificial Sequence: Synthetic oligonucleotide
aauauacaaguugaauuug

SEQ ID NO: 1761277 - RNA, 19 nt, Artificial Sequence
  Description of Artificial Sequence: Synthetic oligonucleotide
ugaaaugaucaauggguag

SEQ ID NO: 1761278 - RNA, 19 nt, Artificial Sequence
  Description of Artificial Sequence: Synthetic oligonucleotide
ugauaaugucguuuaaucu

SEQ ID NO: 1761279 - RNA, 19 nt, Artificial Sequence
  Description of Artificial Sequence: Synthetic oligonucleotide
aauggcuauguaugaaaug

SEQ ID NO: 1761280 - RNA, 19 nt, Artificial Sequence
  Description of Artificial Sequence: Synthetic oligonucleotide
agaaggucaggggagaggc

SEQ ID NO: 1761281 - RNA, 19 nt, Artificial Sequence
  Description of Artificial Sequence: Synthetic oligonucleotide
accuuggacccuuaggggc

SEQ ID NO: 1761282 - RNA, 19 nt, Artificial Sequence
  Description of Artificial Sequence: Synthetic oligonucleotide
auuaugauaaugucguuua

SEQ ID NO: 1761283 - RNA, 19 nt, Artificial Sequence
  Description of Artificial Sequence: Synthetic oligonucleotide
agcuuacuuauucagggag

SEQ ID NO: 1761284 - RNA, 19 nt, Artificial Sequence
  Description of Artificial Sequence: Synthetic oligonucleotide
uuguauacugccucacccg

SEQ ID NO: 1761285 - RNA, 19 nt, Artificial Sequence
  Description of Artificial Sequence: Synthetic oligonucleotide
uuuggggucacccgaagca

SEQ ID NO: 1761286 - RNA, 19 nt, Artificial Sequence
  Description of Artificial Sequence: Synthetic oligonucleotide
auucaaauggcuauguaug

SEQ ID NO: 1761287 - RNA, 19 nt, Artificial Sequence
  Description of Artificial Sequence: Synthetic oligonucleotide
agguauuaugauaaugucg

SEQ ID NO: 1761288 - RNA, 19 nt, Artificial Sequence
  Description of Artificial Sequence: Synthetic oligonucleotide
aaugaguccuuccaccccu

SEQ ID NO: 1761289 - RNA, 19 nt, Artificial Sequence
  Description of Artificial Sequence: Synthetic oligonucleotide
aggcacaaaccuuggaccc

SEQ ID NO: 1761290 - RNA, 19 nt, Artificial Sequence
  Description of Artificial Sequence: Synthetic oligonucleotide
gauggaacuggccaggcac

SEQ ID NO: 1761291 - RNA, 19 nt, Artificial Sequence
  Description of Artificial Sequence: Synthetic oligonucleotide
gauuucugugccaagauga

SEQ ID NO: 1761292 - RNA, 19 nt, Artificial Sequence
  Description of Artificial Sequence: Synthetic oligonucleotide
acagcagagguccuggcgg

SEQ ID NO: 1761293 - RNA, 19 nt, Artificial Sequence
  Description of Artificial Sequence: Synthetic oligonucleotide
uccuugaaagcuccuuugg

SEQ ID NO: 1761294 - RNA, 19 nt, Artificial Sequence
  Description of Artificial Sequence: Synthetic oligonucleotide
ucaaugaguccuuccaccc

SEQ ID NO: 1761295 - RNA, 19 nt, Artificial Sequence
  Description of Artificial Sequence: Synthetic oligonucleotide
ugaucaauggguaggguua

SEQ ID NO: 1761296 - RNA, 19 nt, Artificial Sequence
  Description of Artificial Sequence: Synthetic oligonucleotide
auuggauggaacuggccag

SEQ ID NO: 1761297 - RNA, 19 nt, Artificial Sequence
  Description of Artificial Sequence: Synthetic oligonucleotide
cuauguaugaaaugcuguc

SEQ ID NO: 1761298 - RNA, 19 nt, Artificial Sequence
  Description of Artificial Sequence: Synthetic oligonucleotide
cacccagacaacaaucugg

SEQ ID NO: 1761299 - RNA, 19 nt, Artificial Sequence
  Description of Artificial Sequence: Synthetic oligonucleotide
aacaaucugggcugguugu

SEQ ID NO: 1761300 - RNA, 19 nt, Artificial Sequence
  Description of Artificial Sequence: Synthetic oligonucleotide
cugucucaaagauagcagc

SEQ ID NO: 1761301 - RNA, 19 nt, Artificial Sequence
  Description of Artificial Sequence: Synthetic oligonucleotide
agucuagagacuucuucuc

SEQ ID NO: 1761302 - RNA, 19 nt, Artificial Sequence
  Description of Artificial Sequence: Synthetic oligonucleotide
auucguuuuccugacaaag

SEQ ID NO: 1761303 - RNA, 19 nt, Artificial Sequence
  Description of Artificial Sequence: Synthetic oligonucleotide
ucuucguuggccuucugcu

SEQ ID NO: 1761304 - RNA, 19 nt, Artificial Sequence
  Description of Artificial Sequence: Synthetic oligonucleotide
ucuacuggacaaauggaau

SEQ ID NO: 1761305 - RNA, 19 nt, Artificial Sequence
  Description of Artificial Sequence: Synthetic oligonucleotide
uucaaauggcuauguauga

SEQ ID NO: 1761306 - RNA, 19 nt, Artificial Sequence
  Description of Artificial Sequence: Synthetic oligonucleotide
cagacaacaaucugggcug

SEQ ID NO: 1761307 - RNA, 19 nt, Artificial Sequence
  Description of Artificial Sequence: Synthetic oligonucleotide
ucaaagauagcagcugccc

SEQ ID NO: 1761308 - RNA, 19 nt, Artificial Sequence
  Description of Artificial Sequence: Synthetic oligonucleotide
agugacugcauucguuuuc

SEQ ID NO: 1761309 - RNA, 19 nt, Artificial Sequence
  Description of Artificial Sequence: Synthetic oligonucleotide
aaugucguuuaaucugcca

SEQ ID NO: 1761310 - RNA, 19 nt, Artificial Sequence
  Description of Artificial Sequence: Synthetic oligonucleotide
auggccacuagcccugacc

SEQ ID NO: 1761311 - RNA, 19 nt, Artificial Sequence
  Description of Artificial Sequence: Synthetic oligonucleotide
gucaucaacucccacagca

SEQ ID NO: 1761312 - RNA, 19 nt, Artificial Sequence
  Description of Artificial Sequence: Synthetic oligonucleotide
uauuaugauaaugucguuu

SEQ ID NO: 1761313 - RNA, 19 nt, Artificial Sequence
  Description of Artificial Sequence: Synthetic oligonucleotide
cugccaaauauacaaguug

SEQ ID NO: 1761314 - RNA, 19 nt, Artificial Sequence
  Description of Artificial Sequence: Synthetic oligonucleotide
cuuacuuauucagggagag

SEQ ID NO: 1761315 - RNA, 19 nt, Artificial Sequence
  Description of Artificial Sequence: Synthetic oligonucleotide
ggcaagaucagccuuggcc

SEQ ID NO: 1761316 - RNA, 19 nt, Artificial Sequence
  Description of Artificial Sequence: Synthetic oligonucleotide
uugggauucucaaugucaa

SEQ ID NO: 1761317 - RNA, 19 nt, Artificial Sequence
  Description of Artificial Sequence: Synthetic oligonucleotide
aguaaccagagguuucuug

SEQ ID NO: 1761318 - RNA, 19 nt, Artificial Sequence
  Description of Artificial Sequence: Synthetic oligonucleotide
auagcagcugccccucccc

SEQ ID NO: 1761319 - RNA, 19 nt, Artificial Sequence
  Description of Artificial Sequence: Synthetic oligonucleotide
caaaccuuggacccuuagg

SEQ ID NO: 1761320 - RNA, 19 nt, Artificial Sequence
  Description of Artificial Sequence: Synthetic oligonucleotide
caucauuggauggaacugg

SEQ ID NO: 1761321 - RNA, 19 nt, Artificial Sequence
  Description of Artificial Sequence: Synthetic oligonucleotide
aacgauuucugugccaaga

SEQ ID NO: 1761322 - RNA, 19 nt, Artificial Sequence
  Description of Artificial Sequence: Synthetic oligonucleotide
guaaccagagguuucuuga

SEQ ID NO: 1761323 - RNA, 19 nt, Artificial Sequence
  Description of Artificial Sequence: Synthetic oligonucleotide
gacccuuaggggcacaggc

SEQ ID NO: 1761324 - RNA, 19 nt, Artificial Sequence
  Description of Artificial Sequence: Synthetic oligonucleotide
cuacuggacaaauggaauc

SEQ ID NO: 1761325 - RNA, 19 nt, Artificial Sequence
  Description of Artificial Sequence: Synthetic oligonucleotide
aucuuucugucucaaagau

SEQ ID NO: 1761326 - RNA, 19 nt, Artificial Sequence
  Description of Artificial Sequence: Synthetic oligonucleotide
caaguugaauuugaggaac

SEQ ID NO: 1761327 - RNA, 19 nt, Artificial Sequence
  Description of Artificial Sequence: Synthetic oligonucleotide
aacauucaaauggcuaugu

SEQ ID NO: 1761328 - RNA, 19 nt, Artificial Sequence
  Description of Artificial Sequence: Synthetic oligonucleotide
ccagcuuacuuauucaggg

SEQ ID NO: 1761329 - RNA, 19 nt, Artificial Sequence
  Description of Artificial Sequence: Synthetic oligonucleotide
agggagagugacugcauuc

SEQ ID NO: 1761330 - RNA, 19 nt, Artificial Sequence
  Description of Artificial Sequence: Synthetic oligonucleotide
uuuaccccacuucccaggc

SEQ ID NO: 1761331 - RNA, 19 nt, Artificial Sequence
  Description of Artificial Sequence: Synthetic oligonucleotide
cuuuaccccacuucccagg

SEQ ID NO: 1761332 - RNA, 19 nt, Artificial Sequence
  Description of Artificial Sequence: Synthetic oligonucleotide
augucguuuaaucugccaa

SEQ ID NO: 1761333 - RNA, 19 nt, Artificial Sequence
  Description of Artificial Sequence: Synthetic oligonucleotide
ucucuuuaccccacuuccc

SEQ ID NO: 1761334 - RNA, 19 nt, Artificial Sequence
  Description of Artificial Sequence: Synthetic oligonucleotide
uuccugacaaaguugcauc

SEQ ID NO: 1761335 - RNA, 19 nt, Artificial Sequence
  Description of Artificial Sequence: Synthetic oligonucleotide
cugguagucaucaucuuca

SEQ ID NO: 1761336 - RNA, 19 nt, Artificial Sequence
  Description of Artificial Sequence: Synthetic oligonucleotide
uggccacuagcccugacca

SEQ ID NO: 1761337 - RNA, 19 nt, Artificial Sequence
  Description of Artificial Sequence: Synthetic oligonucleotide
uuccggaugauugccagcc

SEQ ID NO: 1761338 - RNA, 19 nt, Artificial Sequence
  Description of Artificial Sequence: Synthetic oligonucleotide
gguuguuugugccacccgg

SEQ ID NO: 1761339 - RNA, 19 nt, Artificial Sequence
  Description of Artificial Sequence: Synthetic oligonucleotide
ugaacgauuucugugccaa

SEQ ID NO: 1761340 - RNA, 19 nt, Artificial Sequence
  Description of Artificial Sequence: Synthetic oligonucleotide
ugucguuuaaucugccaaa

SEQ ID NO: 1761341 - RNA, 19 nt, Artificial Sequence
  Description of Artificial Sequence: Synthetic oligonucleotide
uacuggacaaauggaaucu

SEQ ID NO: 1761342 - RNA, 19 nt, Artificial Sequence
  Description of Artificial Sequence: Synthetic oligonucleotide
aaucuacuggacaaaugga

SEQ ID NO: 1761343 - RNA, 19 nt, Artificial Sequence
  Description of Artificial Sequence: Synthetic oligonucleotide
aaauggcuauguaugaaau

SEQ ID NO: 1761344 - RNA, 19 nt, Artificial Sequence
  Description of Artificial Sequence: Synthetic oligonucleotide
aucauuggauggaacuggc

SEQ ID NO: 1761345 - RNA, 19 nt, Artificial Sequence
  Description of Artificial Sequence: Synthetic oligonucleotide
uccugacaaaguugcauca

SEQ ID NO: 1761346 - RNA, 19 nt, Artificial Sequence
  Description of Artificial Sequence: Synthetic oligonucleotide
auggaaucucuuuacccca

SEQ ID NO: 1761347 - RNA, 19 nt, Artificial Sequence
  Description of Artificial Sequence: Synthetic oligonucleotide
ucuuuaccccacuucccag

SEQ ID NO: 1761348 - RNA, 19 nt, Artificial Sequence
  Description of Artificial Sequence: Synthetic oligonucleotide
cuuauucagggagagugac

SEQ ID NO: 1761349 - RNA, 19 nt, Artificial Sequence
  Description of Artificial Sequence: Synthetic oligonucleotide
gguauuaugauaaugucgu

SEQ ID NO: 1761350 - RNA, 19 nt, Artificial Sequence
  Description of Artificial Sequence: Synthetic oligonucleotide
caucaacucccacagcagc

SEQ ID NO: 1761351 - RNA, 19 nt, Artificial Sequence
  Description of Artificial Sequence: Synthetic oligonucleotide
uuaugauaaugucguuuaa

SEQ ID NO: 1761352 - RNA, 19 nt, Artificial Sequence
  Description of Artificial Sequence: Synthetic oligonucleotide
agagugacugcauucguuu

SEQ ID NO: 1761353 - RNA, 19 nt, Artificial Sequence
  Description of Artificial Sequence: Synthetic oligonucleotide
uuauucagggagagugacu

SEQ ID NO: 1761354 - RNA, 19 nt, Artificial Sequence
  Description of Artificial Sequence: Synthetic oligonucleotide
ugcacaguaaccagagguu

SEQ ID NO: 1761355 - RNA, 19 nt, Artificial Sequence
  Description of Artificial Sequence: Synthetic oligonucleotide
uaaugucguuuaaucugcc

SEQ ID NO: 1761356 - RNA, 19 nt, Artificial Sequence
  Description of Artificial Sequence: Synthetic oligonucleotide
cucucaucugagucuagag

SEQ ID NO: 1761357 - RNA, 19 nt, Artificial Sequence
  Description of Artificial Sequence: Synthetic oligonucleotide
ugggugagacacagcagag

SEQ ID NO: 1761358 - RNA, 19 nt, Artificial Sequence
  Description of Artificial Sequence: Synthetic oligonucleotide
uucauguagcgcucuuuug

SEQ ID NO: 1761359 - RNA, 19 nt, Artificial Sequence
  Description of Artificial Sequence: Synthetic oligonucleotide
cacaacgugcaaucuacug

SEQ ID NO: 1761360 - RNA, 19 nt, Artificial Sequence
  Description of Artificial Sequence: Synthetic oligonucleotide
uucuaccuccuuuaggcau

SEQ ID NO: 1761361 - RNA, 19 nt, Artificial Sequence
  Description of Artificial Sequence: Synthetic oligonucleotide
ucuaccuccuuuaggcauc

SEQ ID NO: 1761362 - RNA, 19 nt, Artificial Sequence
  Description of Artificial Sequence: Synthetic oligonucleotide
aaccagagguuucuugaaa

SEQ ID NO: 1761363 - RNA, 19 nt, Artificial Sequence
  Description of Artificial Sequence: Synthetic oligonucleotide
ucucaaugucaaugagucc

SEQ ID NO: 1761364 - RNA, 19 nt, Artificial Sequence
  Description of Artificial Sequence: Synthetic oligonucleotide
uuucuaccuccuuuaggca

SEQ ID NO: 1761365 - RNA, 19 nt, Artificial Sequence
  Description of Artificial Sequence: Synthetic oligonucleotide
gugggugagacacagcaga

SEQ ID NO: 1761366 - RNA, 19 nt, Artificial Sequence
  Description of Artificial Sequence: Synthetic oligonucleotide
aggggagaggcaucauugg

SEQ ID NO: 1761367 - RNA, 19 nt, Artificial Sequence
  Description of Artificial Sequence: Synthetic oligonucleotide
accagagguuucuugaaau

SEQ ID NO: 1761368 - RNA, 19 nt, Artificial Sequence
  Description of Artificial Sequence: Synthetic oligonucleotide
ucuuucugucucaaagaua

SEQ ID NO: 1761369 - RNA, 19 nt, Artificial Sequence
  Description of Artificial Sequence: Synthetic oligonucleotide
ugagcacccagacaacaau

SEQ ID NO: 1761370 - RNA, 19 nt, Artificial Sequence
  Description of Artificial Sequence: Synthetic oligonucleotide
caacaaucugggcugguug

SEQ ID NO: 1761371 - RNA, 19 nt, Artificial Sequence
  Description of Artificial Sequence: Synthetic oligonucleotide
caacgugcaaucuacugga

SEQ ID NO: 1761372 - RNA, 19 nt, Artificial Sequence
  Description of Artificial Sequence: Synthetic oligonucleotide
ucugggcugguugucauca

SEQ ID NO: 1761373 - RNA, 19 nt, Artificial Sequence
  Description of Artificial Sequence: Synthetic oligonucleotide
ugaaagcuccuuuggccca

SEQ ID NO: 1761374 - RNA, 19 nt, Artificial Sequence
  Description of Artificial Sequence: Synthetic oligonucleotide
caaccaggguuccaaauuc

SEQ ID NO: 1761375 - RNA, 19 nt, Artificial Sequence
  Description of Artificial Sequence: Synthetic oligonucleotide
uuaggcaucgcggcuccgg

SEQ ID NO: 1761376 - RNA, 19 nt, Artificial Sequence
  Description of Artificial Sequence: Synthetic oligonucleotide
ugguuguuugugccacccg

SEQ ID NO: 1761377 - RNA, 19 nt, Artificial Sequence
  Description of Artificial Sequence: Synthetic oligonucleotide
augauugccagccgggcaa

SEQ ID NO: 1761378 - RNA, 19 nt, Artificial Sequence
  Description of Artificial Sequence: Synthetic oligonucleotide
uguagcgcucuuuugcuuu

SEQ ID NO: 1761379 - RNA, 19 nt, Artificial Sequence
  Description of Artificial Sequence: Synthetic oligonucleotide
cugacaaaguugcaucauc

SEQ ID NO: 1761380 - RNA, 19 nt, Artificial Sequence
  Description of Artificial Sequence: Synthetic oligonucleotide
ucguucucuccuugaaagc

SEQ ID NO: 1761381 - RNA, 19 nt, Artificial Sequence
  Description of Artificial Sequence: Synthetic oligonucleotide
aaguugaauuugaggaaca

SEQ ID NO: 1761382 - RNA, 19 nt, Artificial Sequence
  Description of Artificial Sequence: Synthetic oligonucleotide
aggguuccaaauucuaaaa

SEQ ID NO: 1761383 - RNA, 19 nt, Artificial Sequence
  Description of Artificial Sequence: Synthetic oligonucleotide
caucuuucugucucaaaga

SEQ ID NO: 1761384 - RNA, 19 nt, Artificial Sequence
  Description of Artificial Sequence: Synthetic oligonucleotide
ugugccacccgguugggau

SEQ ID NO: 1761385 - RNA, 19 nt, Artificial Sequence
  Description of Artificial Sequence: Synthetic oligonucleotide
ucuugcugccuccucccgc

SEQ ID NO: 1761386 - RNA, 19 nt, Artificial Sequence
  Description of Artificial Sequence: Synthetic oligonucleotide
caggcuucccgacagcccc

SEQ ID NO: 1761387 - RNA, 19 nt, Artificial Sequence
  Description of Artificial Sequence: Synthetic oligonucleotide
ucaauggguaggguuaaaa

SEQ ID NO: 1761388 - RNA, 19 nt, Artificial Sequence
  Description of Artificial Sequence: Synthetic oligonucleotide
gaugauugccagccgggca

SEQ ID NO: 1761389 - RNA, 19 nt, Artificial Sequence
  Description of Artificial Sequence: Synthetic oligonucleotide
aacucccacagcagcugcc

SEQ ID NO: 1761390 - RNA, 19 nt, Artificial Sequence
  Description of Artificial Sequence: Synthetic oligonucleotide
gggauucucaaugucaaug

SEQ ID NO: 1761391 - RNA, 19 nt, Artificial Sequence
  Description of Artificial Sequence: Synthetic oligonucleotide
gcuccuuuggcccauccag

SEQ ID NO: 1761392 - RNA, 19 nt, Artificial Sequence
  Description of Artificial Sequence: Synthetic oligonucleotide
ucaacucccacagcagcug

SEQ ID NO: 1761393 - RNA, 19 nt, Artificial Sequence
  Description of Artificial Sequence: Synthetic oligonucleotide
caaugaguccuuccacccc

SEQ ID NO: 1761394 - RNA, 19 nt, Artificial Sequence
  Description of Artificial Sequence: Synthetic oligonucleotide
uggaaucucuuuaccccac

SEQ ID NO: 1761395 - RNA, 19 nt, Artificial Sequence
  Description of Artificial Sequence: Synthetic oligonucleotide
gccaagaugaagaggaggc

SEQ ID NO: 1761396 - RNA, 19 nt, Artificial Sequence
  Description of Artificial Sequence: Synthetic oligonucleotide
agccaagugcaucuucaug

SEQ ID NO: 1761397 - RNA, 19 nt, Artificial Sequence
  Description of Artificial Sequence: Synthetic oligonucleotide
acaguaaccagagguuucu

SEQ ID NO: 1761398 - RNA, 19 nt, Artificial Sequence
  Description of Artificial Sequence: Synthetic oligonucleotide
aucuacuggacaaauggaa

SEQ ID NO: 1761399 - RNA, 19 nt, Artificial Sequence
  Description of Artificial Sequence: Synthetic oligonucleotide
caggccagcuuacuuauuc

SEQ ID NO: 1761400 - RNA, 19 nt, Artificial Sequence
  Description of Artificial Sequence: Synthetic oligonucleotide
uaggggcacaggcuucccg

SEQ ID NO: 1761401 - RNA, 19 nt, Artificial Sequence
  Description of Artificial Sequence: Synthetic oligonucleotide
uugugugaccuucuugguu

SEQ ID NO: 1761402 - RNA, 19 nt, Artificial Sequence
  Description of Artificial Sequence: Synthetic oligonucleotide
uucucguucucuccuugaa

SEQ ID NO: 1761403 - RNA, 19 nt, Artificial Sequence
  Description of Artificial Sequence: Synthetic oligonucleotide
acgugcaaucuacuggaca

SEQ ID NO: 1761404 - RNA, 19 nt, Artificial Sequence
  Description of Artificial Sequence: Synthetic oligonucleotide
cacccgaagcaccaucucc

SEQ ID NO: 1761405 - RNA, 19 nt, Artificial Sequence
  Description of Artificial Sequence: Synthetic oligonucleotide
cacaguaaccagagguuuc

SEQ ID NO: 1761406 - RNA, 19 nt, Artificial Sequence
  Description of Artificial Sequence: Synthetic oligonucleotide
ucguuuaaucugccaaaua

SEQ ID NO: 1761407 - RNA, 19 nt, Artificial Sequence
  Description of Artificial Sequence: Synthetic oligonucleotide
cuuuaggcaucgcggcucc

SEQ ID NO: 1761408 - RNA, 19 nt, Artificial Sequence
  Description of Artificial Sequence: Synthetic oligonucleotide
uggggucacccgaagcacc

SEQ ID NO: 1761409 - RNA, 19 nt, Artificial Sequence
  Description of Artificial Sequence: Synthetic oligonucleotide
gugacugcauucguuuucc

SEQ ID NO: 1761410 - RNA, 19 nt, Artificial Sequence
  Description of Artificial Sequence: Synthetic oligonucleotide
aacgugcaaucuacuggac

SEQ ID NO: 1761411 - RNA, 19 nt, Artificial Sequence
  Description of Artificial Sequence: Synthetic oligonucleotide
guuuaaucugccaaauaua

SEQ ID NO: 1761412 - RNA, 19 nt, Artificial Sequence
  Description of Artificial Sequence: Synthetic oligonucleotide
ugcaaucuacuggacaaau

SEQ ID NO: 1761413 - RNA, 19 nt, Artificial Sequence
  Description of Artificial Sequence: Synthetic oligonucleotide
uccggaugauugccagccg

SEQ ID NO: 1761414 - RNA, 19 nt, Artificial Sequence
  Description of Artificial Sequence: Synthetic oligonucleotide
uucccgacagccccucuga

SEQ ID NO: 1761415 - RNA, 19 nt, Artificial Sequence
  Description of Artificial Sequence: Synthetic oligonucleotide
gaaaugcuguccugcaucu

SEQ ID NO: 1761416 - RNA, 19 nt, Artificial Sequence
  Description of Artificial Sequence: Synthetic oligonucleotide
agauagcagcugccccucc

SEQ ID NO: 1761417 - RNA, 19 nt, Artificial Sequence
  Description of Artificial Sequence: Synthetic oligonucleotide
gaacgauuucugugccaag

SEQ ID NO: 1761418 - RNA, 19 nt, Artificial Sequence
  Description of Artificial Sequence: Synthetic oligonucleotide
acgauuucugugccaagau

SEQ ID NO: 1761419 - RNA, 19 nt, Artificial Sequence
  Description of Artificial Sequence: Synthetic oligonucleotide
cccugaacgauuucugugc

SEQ ID NO: 1761420 - RNA, 19 nt, Artificial Sequence
  Description of Artificial Sequence: Synthetic oligonucleotide
uccaguugugugaccuucu

SEQ ID NO: 1761421 - RNA, 19 nt, Artificial Sequence
  Description of Artificial Sequence: Synthetic oligonucleotide
gggagagugacugcauucg

SEQ ID NO: 1761422 - RNA, 19 nt, Artificial Sequence
  Description of Artificial Sequence: Synthetic oligonucleotide
caggguuccaaauucuaaa

SEQ ID NO: 1761423 - RNA, 19 nt, Artificial Sequence
  Description of Artificial Sequence: Synthetic oligonucleotide
gcccugaccagguggaugg

SEQ ID NO: 1761424 - RNA, 19 nt, Artificial Sequence
  Description of Artificial Sequence: Synthetic oligonucleotide
cucuuuaccccacuuccca

SEQ ID NO: 1761425 - RNA, 19 nt, Artificial Sequence
  Description of Artificial Sequence: Synthetic oligonucleotide
cuguuuccggaugauugcc

SEQ ID NO: 1761426 - RNA, 19 nt, Artificial Sequence
  Description of Artificial Sequence: Synthetic oligonucleotide
uccuuuggcccauccagau

SEQ ID NO: 1761427 - RNA, 19 nt, Artificial Sequence
  Description of Artificial Sequence: Synthetic oligonucleotide
agugagcacccagacaaca

SEQ ID NO: 1761428 - RNA, 19 nt, Artificial Sequence
  Description of Artificial Sequence: Synthetic oligonucleotide
uuggccugcucugucuucc

SEQ ID NO: 1761429 - RNA, 19 nt, Artificial Sequence
  Description of Artificial Sequence: Synthetic oligonucleotide
agagguuucuugaaaugau

SEQ ID NO: 1761430 - RNA, 19 nt, Artificial Sequence
  Description of Artificial Sequence: Synthetic oligonucleotide
acaaucugggcugguuguc

SEQ ID NO: 1761431 - RNA, 19 nt, Artificial Sequence
  Description of Artificial Sequence: Synthetic oligonucleotide
cuugguuguuugugccacc

SEQ ID NO: 1761432 - RNA, 19 nt, Artificial Sequence
  Description of Artificial Sequence: Synthetic oligonucleotide
gacagccccucugagugag

SEQ ID NO: 1761433 - RNA, 19 nt, Artificial Sequence
  Description of Artificial Sequence: Synthetic oligonucleotide
aguuccccggcaucuccuc

SEQ ID NO: 1761434 - RNA, 19 nt, Artificial Sequence
  Description of Artificial Sequence: Synthetic oligonucleotide
cugcauucguuuuccugac

SEQ ID NO: 1761435 - RNA, 19 nt, Artificial Sequence
  Description of Artificial Sequence: Synthetic oligonucleotide
uuguuugugccacccgguu

SEQ ID NO: 1761436 - RNA, 19 nt, Artificial Sequence
  Description of Artificial Sequence: Synthetic oligonucleotide
gcuguuuccggaugauugc

SEQ ID NO: 1761437 - RNA, 19 nt, Artificial Sequence
  Description of Artificial Sequence: Synthetic oligonucleotide
aggggcacaggcuucccga

SEQ ID NO: 1761438 - RNA, 19 nt, Artificial Sequence
  Description of Artificial Sequence: Synthetic oligonucleotide
ugcauucguuuuccugaca

SEQ ID NO: 1761439 - RNA, 19 nt, Artificial Sequence
  Description of Artificial Sequence: Synthetic oligonucleotide
ucuccuccgggcuuguaua

SEQ ID NO: 1761440 - RNA, 19 nt, Artificial Sequence
  Description of Artificial Sequence: Synthetic oligonucleotide
aguugaauuugaggaacau

SEQ ID NO: 1761441 - RNA, 19 nt, Artificial Sequence
  Description of Artificial Sequence: Synthetic oligonucleotide
acuuauucagggagaguga

SEQ ID NO: 1761442 - RNA, 19 nt, Artificial Sequence
  Description of Artificial Sequence: Synthetic oligonucleotide
caguugugugaccuucuug

SEQ ID NO: 1761443 - RNA, 19 nt, Artificial Sequence
  Description of Artificial Sequence: Synthetic oligonucleotide
ccuugaaagcuccuuuggc

SEQ ID NO: 1761444 - RNA, 19 nt, Artificial Sequence
  Description of Artificial Sequence: Synthetic oligonucleotide
uuacuuauucagggagagu

SEQ ID NO: 1761445 - RNA, 19 nt, Artificial Sequence
  Description of Artificial Sequence: Synthetic oligonucleotide
ucacucucaucugagucua

SEQ ID NO: 1761446 - RNA, 19 nt, Artificial Sequence
  Description of Artificial Sequence: Synthetic oligonucleotide
agcacccagacaacaaucu

SEQ ID NO: 1761447 - RNA, 19 nt, Artificial Sequence
  Description of Artificial Sequence: Synthetic oligonucleotide
cccacaacgugcaaucuac

SEQ ID NO: 1761448 - RNA, 19 nt, Artificial Sequence
  Description of Artificial Sequence: Synthetic oligonucleotide
ggugagacacagcagaggu

SEQ ID NO: 1761449 - RNA, 19 nt, Artificial Sequence
  Description of Artificial Sequence: Synthetic oligonucleotide
aucuccuccgggcuuguau

SEQ ID NO: 1761450 - RNA, 19 nt, Artificial Sequence
  Description of Artificial Sequence: Synthetic oligonucleotide
aggccguaggggcuccugg

SEQ ID NO: 1761451 - RNA, 19 nt, Artificial Sequence
  Description of Artificial Sequence: Synthetic oligonucleotide
agacaacaaucugggcugg

SEQ ID NO: 1761452 - RNA, 19 nt, Artificial Sequence
  Description of Artificial Sequence: Synthetic oligonucleotide
ggcgccagggcacagggug

SEQ ID NO: 1761453 - RNA, 19 nt, Artificial Sequence
  Description of Artificial Sequence: Synthetic oligonucleotide
ccuuucuaccuccuuuagg

SEQ ID NO: 1761454 - RNA, 19 nt, Artificial Sequence
  Description of Artificial Sequence: Synthetic oligonucleotide
gcaagaucagccuuggccu

SEQ ID NO: 1761455 - RNA, 19 nt, Artificial Sequence
  Description of Artificial Sequence: Synthetic oligonucleotide
ccgguugggauucucaaug

SEQ ID NO: 1761456 - RNA, 19 nt, Artificial Sequence
  Description of Artificial Sequence: Synthetic oligonucleotide
cuagcccugaccaggugga

SEQ ID NO: 1761457 - RNA, 19 nt, Artificial Sequence
  Description of Artificial Sequence: Synthetic oligonucleotide
gccacuagcccugaccagg

SEQ ID NO: 1761458 - RNA, 19 nt, Artificial Sequence
  Description of Artificial Sequence: Synthetic oligonucleotide
uuuggcccauccagaucca

SEQ ID NO: 1761459 - RNA, 19 nt, Artificial Sequence
  Description of Artificial Sequence: Synthetic oligonucleotide
gcaucauuggauggaacug

SEQ ID NO: 1761460 - RNA, 19 nt, Artificial Sequence
  Description of Artificial Sequence: Synthetic oligonucleotide
caacucccacagcagcugc

SEQ ID NO: 1761461 - RNA, 19 nt, Artificial Sequence
  Description of Artificial Sequence: Synthetic oligonucleotide
gcuuguauacugccucacc

SEQ ID NO: 1761462 - RNA, 19 nt, Artificial Sequence
  Description of Artificial Sequence: Synthetic oligonucleotide
uuggggucacccgaagcac

SEQ ID NO: 1761463 - RNA, 19 nt, Artificial Sequence
  Description of Artificial Sequence: Synthetic oligonucleotide
cagggugggugagacacag

SEQ ID NO: 1761464 - RNA, 19 nt, Artificial Sequence
  Description of Artificial Sequence: Synthetic oligonucleotide
gcagagaaggucaggggag

SEQ ID NO: 1761465 - RNA, 19 nt, Artificial Sequence
  Description of Artificial Sequence: Synthetic oligonucleotide
ccgacagccccucugagug

SEQ ID NO: 1761466 - RNA, 19 nt, Artificial Sequence
  Description of Artificial Sequence: Synthetic oligonucleotide
ggcaucauuggauggaacu

SEQ ID NO: 1761467 - RNA, 19 nt, Artificial Sequence
  Description of Artificial Sequence: Synthetic oligonucleotide
ucacccggccuuuguggcc

SEQ ID NO: 1761468 - RNA, 19 nt, Artificial Sequence
  Description of Artificial Sequence: Synthetic oligonucleotide
uggauggaacuggccaggc

SEQ ID NO: 1761469 - RNA, 19 nt, Artificial Sequence
  Description of Artificial Sequence: Synthetic oligonucleotide
aaagcuccuuuggcccauc

SEQ ID NO: 1761470 - RNA, 19 nt, Artificial Sequence
  Description of Artificial Sequence: Synthetic oligonucleotide
uccuuccaccccuuuucgu

SEQ ID NO: 1761471 - RNA, 19 nt, Artificial Sequence
  Description of Artificial Sequence: Synthetic oligonucleotide
agcuccuuuggcccaucca

SEQ ID NO: 1761472 - RNA, 19 nt, Artificial Sequence
  Description of Artificial Sequence: Synthetic oligonucleotide
cuaccuccuuuaggcaucg

SEQ ID NO: 1761473 - RNA, 19 nt, Artificial Sequence
  Description of Artificial Sequence: Synthetic oligonucleotide
cuccgggcuuguauacugc

SEQ ID NO: 1761474 - RNA, 19 nt, Artificial Sequence
  Description of Artificial Sequence: Synthetic oligonucleotide
ugggauucucaaugucaau

SEQ ID NO: 1761475 - RNA, 19 nt, Artificial Sequence
  Description of Artificial Sequence: Synthetic oligonucleotide
gaucaauggguaggguuaa

SEQ ID NO: 1761476 - RNA, 19 nt, Artificial Sequence
  Description of Artificial Sequence: Synthetic oligonucleotide
ccagagguuucuugaaaug

SEQ ID NO: 1761477 - RNA, 19 nt, Artificial Sequence
  Description of Artificial Sequence: Synthetic oligonucleotide
ucccgacagccccucugag

SEQ ID NO: 1761478 - RNA, 19 nt, Artificial Sequence
  Description of Artificial Sequence: Synthetic oligonucleotide
agcgcucuuuugcuuucug

SEQ ID NO: 1761479 - RNA, 19 nt, Artificial Sequence
  Description of Artificial Sequence: Synthetic oligonucleotide
guauacugccucacccggc

SEQ ID NO: 1761480 - RNA, 19 nt, Artificial Sequence
  Description of Artificial Sequence: Synthetic oligonucleotide
ucguuggccuucugcuucu

SEQ ID NO: 1761481 - RNA, 19 nt, Artificial Sequence
  Description of Artificial Sequence: Synthetic oligonucleotide
ggugcacaguaaccagagg

SEQ ID NO: 1761482 - RNA, 19 nt, Artificial Sequence
  Description of Artificial Sequence: Synthetic oligonucleotide
ccagacaacaaucugggcu

SEQ ID NO: 1761483 - RNA, 19 nt, Artificial Sequence
  Description of Artificial Sequence: Synthetic oligonucleotide
uuguggccucccuuucuac

SEQ ID NO: 1761484 - RNA, 19 nt, Artificial Sequence
  Description of Artificial Sequence: Synthetic oligonucleotide
cagcuuacuuauucaggga

SEQ ID NO: 1761485 - RNA, 19 nt, Artificial Sequence
  Description of Artificial Sequence: Synthetic oligonucleotide
cauguagcgcucuuuugcu

SEQ ID NO: 1761486 - RNA, 19 nt, Artificial Sequence
  Description of Artificial Sequence: Synthetic oligonucleotide
aggcaucauuggauggaac

SEQ ID NO: 1761487 - RNA, 19 nt, Artificial Sequence
  Description of Artificial Sequence: Synthetic oligonucleotide
agagguccuggcggcacgg

SEQ ID NO: 1761488 - RNA, 19 nt, Artificial Sequence
  Description of Artificial Sequence: Synthetic oligonucleotide
ccggaugauugccagccgg

SEQ ID NO: 1761489 - RNA, 19 nt, Artificial Sequence
  Description of Artificial Sequence: Synthetic oligonucleotide
cuggacaaauggaaucucu

SEQ ID NO: 1761490 - RNA, 19 nt, Artificial Sequence
  Description of Artificial Sequence: Synthetic oligonucleotide
uuuaggcaucgcggcuccg

SEQ ID NO: 1761491 - RNA, 19 nt, Artificial Sequence
  Description of Artificial Sequence: Synthetic oligonucleotide
acaacaaucugggcugguu

SEQ ID NO: 1761492 - RNA, 19 nt, Artificial Sequence
  Description of Artificial Sequence: Synthetic oligonucleotide
gggugagacacagcagagg

SEQ ID NO: 1761493 - RNA, 19 nt, Artificial Sequence
  Description of Artificial Sequence: Synthetic oligonucleotide
acccgguugggauucucaa

SEQ ID NO: 1761494 - RNA, 19 nt, Artificial Sequence
  Description of Artificial Sequence: Synthetic oligonucleotide
uacugccucacccggccuu

SEQ ID NO: 1761495 - RNA, 19 nt, Artificial Sequence
  Description of Artificial Sequence: Synthetic oligonucleotide
cuccuccgggcuuguauac

SEQ ID NO: 1761496 - RNA, 19 nt, Artificial Sequence
  Description of Artificial Sequence: Synthetic oligonucleotide
guagcgcucuuuugcuuuc

SEQ ID NO: 1761497 - RNA, 19 nt, Artificial Sequence
  Description of Artificial Sequence: Synthetic oligonucleotide
cuucucguucucuccuuga

SEQ ID NO: 1761498 - RNA, 19 nt, Artificial Sequence
  Description of Artificial Sequence: Synthetic oligonucleotide
gaggcaucauuggauggaa

SEQ ID NO: 1761499 - RNA, 19 nt, Artificial Sequence
  Description of Artificial Sequence: Synthetic oligonucleotide
cugaacgauuucugugcca

SEQ ID NO: 1761500 - RNA, 19 nt, Artificial Sequence
  Description of Artificial Sequence: Synthetic oligonucleotide
ggcugguugucaucaacuc

SEQ ID NO: 1761501 - RNA, 19 nt, Artificial Sequence
  Description of Artificial Sequence: Synthetic oligonucleotide
cuccuuuggcccauccaga

SEQ ID NO: 1761502 - RNA, 19 nt, Artificial Sequence
  Description of Artificial Sequence: Synthetic oligonucleotide
cucugucuucccagccaag

SEQ ID NO: 1761503 - RNA, 19 nt, Artificial Sequence
  Description of Artificial Sequence: Synthetic oligonucleotide
auguagcgcucuuuugcuu

SEQ ID NO: 1761504 - RNA, 19 nt, Artificial Sequence
  Description of Artificial Sequence: Synthetic oligonucleotide
guuccccggcaucuccucc

SEQ ID NO: 1761505 - RNA, 19 nt, Artificial Sequence
  Description of Artificial Sequence: Synthetic oligonucleotide
uuggcccauccagauccag

SEQ ID NO: 1761506 - RNA, 19 nt, Artificial Sequence
  Description of Artificial Sequence: Synthetic oligonucleotide
guggugcacaguaaccaga

SEQ ID NO: 1761507 - RNA, 19 nt, Artificial Sequence
  Description of Artificial Sequence: Synthetic oligonucleotide
auggaacuggccaggcaca

SEQ ID NO: 1761508 - RNA, 19 nt, Artificial Sequence
  Description of Artificial Sequence: Synthetic oligonucleotide
uggaacuggccaggcacaa

SEQ ID NO: 1761509 - RNA, 19 nt, Artificial Sequence
  Description of Artificial Sequence: Synthetic oligonucleotide
ucuucccagccaagugcau

SEQ ID NO: 1761510 - RNA, 19 nt, Artificial Sequence
  Description of Artificial Sequence: Synthetic oligonucleotide
agcccugaccagguggaug

SEQ ID NO: 1761511 - RNA, 19 nt, Artificial Sequence
  Description of Artificial Sequence: Synthetic oligonucleotide
ccaagaugaagaggaggcc

SEQ ID NO: 1761512 - RNA, 19 nt, Artificial Sequence
  Description of Artificial Sequence: Synthetic oligonucleotide
gcuauguaugaaaugcugu

SEQ ID NO: 1761513 - RNA, 19 nt, Artificial Sequence
  Description of Artificial Sequence: Synthetic oligonucleotide
gcuuacuuauucagggaga

SEQ ID NO: 1761514 - RNA, 19 nt, Artificial Sequence
  Description of Artificial Sequence: Synthetic oligonucleotide
cgugcaaucuacuggacaa

SEQ ID NO: 1761515 - RNA, 19 nt, Artificial Sequence
  Description of Artificial Sequence: Synthetic oligonucleotide
ggaugauugccagccgggc

SEQ ID NO: 1761516 - RNA, 19 nt, Artificial Sequence
  Description of Artificial Sequence: Synthetic oligonucleotide
uuaggggcacaggcuuccc

SEQ ID NO: 1761517 - RNA, 19 nt, Artificial Sequence
  Description of Artificial Sequence: Synthetic oligonucleotide
guugugugaccuucuuggu

SEQ ID NO: 1761518 - RNA, 19 nt, Artificial Sequence
  Description of Artificial Sequence: Synthetic oligonucleotide
caaucugggcugguuguca

SEQ ID NO: 1761519 - RNA, 19 nt, Artificial Sequence
  Description of Artificial Sequence: Synthetic oligonucleotide
uccuccgggcuuguauacu

SEQ ID NO: 1761520 - RNA, 19 nt, Artificial Sequence
  Description of Artificial Sequence: Synthetic oligonucleotide
cacucucaucugagucuag

SEQ ID NO: 1761521 - RNA, 19 nt, Artificial Sequence
  Description of Artificial Sequence: Synthetic oligonucleotide
agggugggugagacacagc

SEQ ID NO: 1761522 - RNA, 19 nt, Artificial Sequence
  Description of Artificial Sequence: Synthetic oligonucleotide
ccuccgggcuuguauacug

SEQ ID NO: 1761523 - RNA, 19 nt, Artificial Sequence
  Description of Artificial Sequence: Synthetic oligonucleotide
aggggcuccuggccaugag

SEQ ID NO: 1761524 - RNA, 19 nt, Artificial Sequence
  Description of Artificial Sequence: Synthetic oligonucleotide
cuuggacccuuaggggcac

SEQ ID NO: 1761525 - RNA, 19 nt, Artificial Sequence
  Description of Artificial Sequence: Synthetic oligonucleotide
ugccacccgguugggauuc

SEQ ID NO: 1761526 - RNA, 19 nt, Artificial Sequence
  Description of Artificial Sequence: Synthetic oligonucleotide
cacccgguugggauucuca

SEQ ID NO: 1761527 - RNA, 19 nt, Artificial Sequence
  Description of Artificial Sequence: Synthetic oligonucleotide
gugagcacccagacaacaa

SEQ ID NO: 1761528 - RNA, 19 nt, Artificial Sequence
  Description of Artificial Sequence: Synthetic oligonucleotide
gucguuuaaucugccaaau

SEQ ID NO: 1761529 - RNA, 19 nt, Artificial Sequence
  Description of Artificial Sequence: Synthetic oligonucleotide
guuguuugugccacccggu

SEQ ID NO: 1761530 - RNA, 19 nt, Artificial Sequence
  Description of Artificial Sequence: Synthetic oligonucleotide
gggcaucaaucuccuccgg

SEQ ID NO: 1761531 - RNA, 19 nt, Artificial Sequence
  Description of Artificial Sequence: Synthetic oligonucleotide
guauuaugauaaugucguu

SEQ ID NO: 1761532 - RNA, 19 nt, Artificial Sequence
  Description of Artificial Sequence: Synthetic oligonucleotide
ccgggcaagaucagccuug

SEQ ID NO: 1761533 - RNA, 19 nt, Artificial Sequence
  Description of Artificial Sequence: Synthetic oligonucleotide
ggccguaggggcuccuggc

SEQ ID NO: 1761534 - RNA, 19 nt, Artificial Sequence
  Description of Artificial Sequence: Synthetic oligonucleotide
ggucacccgaagcaccauc

SEQ ID NO: 1761535 - RNA, 19 nt, Artificial Sequence
  Description of Artificial Sequence: Synthetic oligonucleotide
gccguaggggcuccuggcc

SEQ ID NO: 1761536 - RNA, 19 nt, Artificial Sequence
  Description of Artificial Sequence: Synthetic oligonucleotide
ccuuuaggcaucgcggcuc

SEQ ID NO: 1761537 - RNA, 19 nt, Artificial Sequence
  Description of Artificial Sequence: Synthetic oligonucleotide
cauccccugaacgauuucu

SEQ ID NO: 1761538 - RNA, 19 nt, Artificial Sequence
  Description of Artificial Sequence: Synthetic oligonucleotide
gggcuuguauacugccuca

SEQ ID NO: 1761539 - RNA, 19 nt, Artificial Sequence
  Description of Artificial Sequence: Synthetic oligonucleotide
gagagugacugcauucguu

SEQ ID NO: 1761540 - RNA, 19 nt, Artificial Sequence
  Description of Artificial Sequence: Synthetic oligonucleotide
cacaggccagcuuacuuau

SEQ ID NO: 1761541 - RNA, 19 nt, Artificial Sequence
  Description of Artificial Sequence: Synthetic oligonucleotide
agaggaggccccaggccgu

SEQ ID NO: 1761542 - RNA, 19 nt, Artificial Sequence
  Description of Artificial Sequence: Synthetic oligonucleotide
ggcuuguauacugccucac

SEQ ID NO: 1761543 - RNA, 19 nt, Artificial Sequence
  Description of Artificial Sequence: Synthetic oligonucleotide
ucccacaggccagcuuacu

SEQ ID NO: 1761544 - RNA, 19 nt, Artificial Sequence
  Description of Artificial Sequence: Synthetic oligonucleotide
ccggcaucuccucccacag

SEQ ID NO: 1761545 - RNA, 19 nt, Artificial Sequence
  Description of Artificial Sequence: Synthetic oligonucleotide
ggacccuuaggggcacagg

SEQ ID NO: 1761546 - RNA, 19 nt, Artificial Sequence
  Description of Artificial Sequence: Synthetic oligonucleotide
aucaauggguaggguuaaa

SEQ ID NO: 1761547 - RNA, 19 nt, Artificial Sequence
  Description of Artificial Sequence: Synthetic oligonucleotide
cccagacaacaaucugggc

SEQ ID NO: 1761548 - RNA, 19 nt, Artificial Sequence
  Description of Artificial Sequence: Synthetic oligonucleotide
gugcaaucuacuggacaaa

SEQ ID NO: 1761549 - RNA, 19 nt, Artificial Sequence
  Description of Artificial Sequence: Synthetic oligonucleotide
ccgaagcaccaucuccacc

SEQ ID NO: 1761550 - RNA, 19 nt, Artificial Sequence
  Description of Artificial Sequence: Synthetic oligonucleotide
cgggcuuguauacugccuc

SEQ ID NO: 1761551 - RNA, 19 nt, Artificial Sequence
  Description of Artificial Sequence: Synthetic oligonucleotide
ccuccucccgcuguuuccg

SEQ ID NO: 1761552 - RNA, 19 nt, Artificial Sequence
  Description of Artificial Sequence: Synthetic oligonucleotide
gcaucuucauguagcgcuc

SEQ ID NO: 1761553 - RNA, 19 nt, Artificial Sequence
  Description of Artificial Sequence: Synthetic oligonucleotide
gauugccagccgggcaaga

SEQ ID NO: 1761554 - RNA, 19 nt, Artificial Sequence
  Description of Artificial Sequence: Synthetic oligonucleotide
ccuuaggggcacaggcuuc

SEQ ID NO: 1761555 - RNA, 19 nt, Artificial Sequence
  Description of Artificial Sequence: Synthetic oligonucleotide
ugugaccuucuugguuguu

SEQ ID NO: 1761556 - RNA, 19 nt, Artificial Sequence
  Description of Artificial Sequence: Synthetic oligonucleotide
ggagagugacugcauucgu

SEQ ID NO: 1761557 - RNA, 19 nt, Artificial Sequence
  Description of Artificial Sequence: Synthetic oligonucleotide
acggcccaguuccccggca

SEQ ID NO: 1761558 - RNA, 19 nt, Artificial Sequence
  Description of Artificial Sequence: Synthetic oligonucleotide
ccacaggccagcuuacuua

SEQ ID NO: 1761559 - RNA, 19 nt, Artificial Sequence
  Description of Artificial Sequence: Synthetic oligonucleotide
ccccacauccccugaacga

SEQ ID NO: 1761560 - RNA, 19 nt, Artificial Sequence
  Description of Artificial Sequence: Synthetic oligonucleotide
cuccggcggcugcagcggc

SEQ ID NO: 1761561 - RNA, 19 nt, Artificial Sequence
  Description of Artificial Sequence: Synthetic oligonucleotide
ccuuuggcccauccagauc

SEQ ID NO: 1761562 - RNA, 19 nt, Artificial Sequence
  Description of Artificial Sequence: Synthetic oligonucleotide
guaggggcuccuggccaug

SEQ ID NO: 1761563 - RNA, 19 nt, Artificial Sequence
  Description of Artificial Sequence: Synthetic oligonucleotide
gaaagcuccuuuggcccau

SEQ ID NO: 1761564 - RNA, 19 nt, Artificial Sequence
  Description of Artificial Sequence: Synthetic oligonucleotide
gugugaccuucuugguugu

SEQ ID NO: 1761565 - RNA, 19 nt, Artificial Sequence
  Description of Artificial Sequence: Synthetic oligonucleotide
gugaccuucuugguuguuu

SEQ ID NO: 1761566 - RNA, 19 nt, Artificial Sequence
  Description of Artificial Sequence: Synthetic oligonucleotide
aaucuccuccgggcuugua

SEQ ID NO: 1761567 - RNA, 19 nt, Artificial Sequence
  Description of Artificial Sequence: Synthetic oligonucleotide
gacaacaaucugggcuggu

SEQ ID NO: 1761568 - RNA, 19 nt, Artificial Sequence
  Description of Artificial Sequence: Synthetic oligonucleotide
uuggacccuuaggggcaca

SEQ ID NO: 1761569 - RNA, 19 nt, Artificial Sequence
  Description of Artificial Sequence: Synthetic oligonucleotide
cuucguuggccuucugcuu

SEQ ID NO: 1761570 - RNA, 19 nt, Artificial Sequence
  Description of Artificial Sequence: Synthetic oligonucleotide
gggcugguugucaucaacu

SEQ ID NO: 1761571 - RNA, 19 nt, Artificial Sequence
  Description of Artificial Sequence: Synthetic oligonucleotide
uaccuccuuuaggcaucgc

SEQ ID NO: 1761572 - RNA, 19 nt, Artificial Sequence
  Description of Artificial Sequence: Synthetic oligonucleotide
ggcggcggcgccucgaacu

SEQ ID NO: 1761573 - RNA, 19 nt, Artificial Sequence
  Description of Artificial Sequence: Synthetic oligonucleotide
gcggcggcgccucgaacug

SEQ ID NO: 1761574 - RNA, 19 nt, Artificial Sequence
  Description of Artificial Sequence: Synthetic oligonucleotide
caggccguaggggcuccug

SEQ ID NO: 1761575 - RNA, 19 nt, Artificial Sequence
  Description of Artificial Sequence: Synthetic oligonucleotide
aggaggccccaggccguag

SEQ ID NO: 1761576 - RNA, 19 nt, Artificial Sequence
  Description of Artificial Sequence: Synthetic oligonucleotide
uagcccugaccagguggau

SEQ ID NO: 1761577 - RNA, 19 nt, Artificial Sequence
  Description of Artificial Sequence: Synthetic oligonucleotide
caguuccccggcaucuccu

SEQ ID NO: 1761578 - RNA, 19 nt, Artificial Sequence
  Description of Artificial Sequence: Synthetic oligonucleotide
cccggcaucuccucccaca

SEQ ID NO: 1761579 - RNA, 19 nt, Artificial Sequence
  Description of Artificial Sequence: Synthetic oligonucleotide
ggcggcgccucgaacugac

SEQ ID NO: 1761580 - RNA, 19 nt, Artificial Sequence
  Description of Artificial Sequence: Synthetic oligonucleotide
cagccaagugcaucuucau

SEQ ID NO: 1761581 - RNA, 19 nt, Artificial Sequence
  Description of Artificial Sequence: Synthetic oligonucleotide
cagggagagugacugcauu

SEQ ID NO: 1761582 - RNA, 19 nt, Artificial Sequence
  Description of Artificial Sequence: Synthetic oligonucleotide
gccuuuguggccucccuuu

SEQ ID NO: 1761583 - RNA, 19 nt, Artificial Sequence
  Description of Artificial Sequence: Synthetic oligonucleotide
ccaaccaggguuccaaauu

SEQ ID NO: 1761584 - RNA, 19 nt, Artificial Sequence
  Description of Artificial Sequence: Synthetic oligonucleotide
ggcacaaaccuuggacccu

SEQ ID NO: 1761585 - RNA, 19 nt, Artificial Sequence
  Description of Artificial Sequence: Synthetic oligonucleotide
ccguaggggcuccuggcca

SEQ ID NO: 1761586 - RNA, 19 nt, Artificial Sequence
  Description of Artificial Sequence: Synthetic oligonucleotide
acaggccagcuuacuuauu

SEQ ID NO: 1761587 - RNA, 19 nt, Artificial Sequence
  Description of Artificial Sequence: Synthetic oligonucleotide
cugccucacccggccuuug

SEQ ID NO: 1761588 - RNA, 19 nt, Artificial Sequence
  Description of Artificial Sequence: Synthetic oligonucleotide
uccuggcggcacggcccag

SEQ ID NO: 1761589 - RNA, 19 nt, Artificial Sequence
  Description of Artificial Sequence: Synthetic oligonucleotide
ccccacaacgugcaaucua

SEQ ID NO: 1761590 - RNA, 19 nt, Artificial Sequence
  Description of Artificial Sequence: Synthetic oligonucleotide
gaggaggccccaggccgua

SEQ ID NO: 1761591 - RNA, 19 nt, Artificial Sequence
  Description of Artificial Sequence: Synthetic oligonucleotide
gugccacccgguugggauu

SEQ ID NO: 1761592 - RNA, 19 nt, Artificial Sequence
  Description of Artificial Sequence: Synthetic oligonucleotide
ccggccuuuguggccuccc

SEQ ID NO: 1761593 - RNA, 19 nt, Artificial Sequence
  Description of Artificial Sequence: Synthetic oligonucleotide
cccugaccagguggauggg

SEQ ID NO: 1761594 - RNA, 19 nt, Artificial Sequence
  Description of Artificial Sequence: Synthetic oligonucleotide
gccagccgggcaagaucag

SEQ ID NO: 1761595 - RNA, 19 nt, Artificial Sequence
  Description of Artificial Sequence: Synthetic oligonucleotide
ccacaacgugcaaucuacu

SEQ ID NO: 1761596 - RNA, 19 nt, Artificial Sequence
  Description of Artificial Sequence: Synthetic oligonucleotide
gcacaaaccuuggacccuu

SEQ ID NO: 1761597 - RNA, 19 nt, Artificial Sequence
  Description of Artificial Sequence: Synthetic oligonucleotide
ccacuagcccugaccaggu

SEQ ID NO: 1761598 - RNA, 19 nt, Artificial Sequence
  Description of Artificial Sequence: Synthetic oligonucleotide
ggccuuuguggccucccuu

SEQ ID NO: 1761599 - RNA, 19 nt, Artificial Sequence
  Description of Artificial Sequence: Synthetic oligonucleotide
cagccuuggccugcucugu

SEQ ID NO: 1761600 - RNA, 19 nt, Artificial Sequence
  Description of Artificial Sequence: Synthetic oligonucleotide
cccgacagccccucugagu

SEQ ID NO: 1761601 - RNA, 19 nt, Artificial Sequence
  Description of Artificial Sequence: Synthetic oligonucleotide
cccacauccccugaacgau

SEQ ID NO: 1761602 - RNA, 19 nt, Artificial Sequence
  Description of Artificial Sequence: Synthetic oligonucleotide
caguaaccagagguuucuu

SEQ ID NO: 1761603 - RNA, 19 nt, Artificial Sequence
  Description of Artificial Sequence: Synthetic oligonucleotide
cgguugggauucucaaugu

SEQ ID NO: 1761604 - RNA, 19 nt, Artificial Sequence
  Description of Artificial Sequence: Synthetic oligonucleotide
cccgguugggauucucaau

SEQ ID NO: 1761605 - RNA, 19 nt, Artificial Sequence
  Description of Artificial Sequence: Synthetic oligonucleotide
ccccaaccaggguuccaaa

SEQ ID NO: 1761606 - RNA, 19 nt, Artificial Sequence
  Description of Artificial Sequence: Synthetic oligonucleotide
ccaguugugugaccuucuu

SEQ ID NO: 1761607 - RNA, 19 nt, Artificial Sequence
  Description of Artificial Sequence: Synthetic oligonucleotide
gcggcacggcccaguuccc

SEQ ID NO: 1761608 - RNA, 19 nt, Artificial Sequence
  Description of Artificial Sequence: Synthetic oligonucleotide
caaucuccuccgggcuugu

SEQ ID NO: 1761609 - RNA, 19 nt, Artificial Sequence
  Description of Artificial Sequence: Synthetic oligonucleotide
cccucugagugagcaccca

SEQ ID NO: 1761610 - RNA, 19 nt, Artificial Sequence
  Description of Artificial Sequence: Synthetic oligonucleotide
cggcacggcccaguucccc

SEQ ID NO: 1761611 - RNA, 19 nt, Artificial Sequence
  Description of Artificial Sequence: Synthetic oligonucleotide
cgacagccccucugaguga

SEQ ID NO: 1761612 - RNA, 19 nt, Artificial Sequence
  Description of Artificial Sequence: Synthetic oligonucleotide
cccggccuuuguggccucc

SEQ ID NO: 1761613 - RNA, 19 nt, Artificial Sequence
  Description of Artificial Sequence: Synthetic oligonucleotide
ccccggcaucuccucccac

SEQ ID NO: 1761614 - RNA, 19 nt, Artificial Sequence
  Description of Artificial Sequence: Synthetic oligonucleotide
gccccaggccguaggggcu

SEQ ID NO: 1761615 - RNA, 19 nt, Artificial Sequence
  Description of Artificial Sequence: Synthetic oligonucleotide
gcggcgccucgaacugaca

SEQ ID NO: 1761616 - RNA, 19 nt, Artificial Sequence
  Description of Artificial Sequence: Synthetic oligonucleotide
cccgcuguuuccggaugau

SEQ ID NO: 1761617 - RNA, 19 nt, Artificial Sequence
  Description of Artificial Sequence: Synthetic oligonucleotide
ccgcuguuuccggaugauu

SEQ ID NO: 1761618 - RNA, 19 nt, Artificial Sequence
  Description of Artificial Sequence: Synthetic oligonucleotide
gccacccgguugggauucu

SEQ ID NO: 1761619 - RNA, 19 nt, Artificial Sequence
  Description of Artificial Sequence: Synthetic oligonucleotide
ccaggccguaggggcuccu

SEQ ID NO: 1761620 - RNA, 19 nt, Artificial Sequence
  Description of Artificial Sequence: Synthetic oligonucleotide
gaaaauaucaucacgaacc

SEQ ID NO: 1761621 - RNA, 19 nt, Artificial Sequence
  Description of Artificial Sequence: Synthetic oligonucleotide
gaaaccaauacucucaggg

SEQ ID NO: 1761622 - RNA, 19 nt, Artificial Sequence
  Description of Artificial Sequence: Synthetic oligonucleotide
aaagcucuuggacauaccc

SEQ ID NO: 1761623 - RNA, 19 nt, Artificial Sequence
  Description of Artificial Sequence: Synthetic oligonucleotide
aagucugagaaccuguaag

SEQ ID NO: 1761624 - RNA, 19 nt, Artificial Sequence
  Description of Artificial Sequence: Synthetic oligonucleotide
ucagugucggauaaaacag

SEQ ID NO: 1761625 - RNA, 19 nt, Artificial Sequence
  Description of Artificial Sequence: Synthetic oligonucleotide
aaaacucuuguuaagagcu

SEQ ID NO: 1761626 - RNA, 19 nt, Artificial Sequence
  Description of Artificial Sequence: Synthetic oligonucleotide
uuuucguagagcuugcgag

SEQ ID NO: 1761627 - RNA, 19 nt, Artificial Sequence
  Description of Artificial Sequence: Synthetic oligonucleotide
uuuauuguguccacaaaac

SEQ ID NO: 1761628 - RNA, 19 nt, Artificial Sequence
  Description of Artificial Sequence: Synthetic oligonucleotide
ugcaugacaacuaccauca

SEQ ID NO: 1761629 - RNA, 19 nt, Artificial Sequence
  Description of Artificial Sequence: Synthetic oligonucleotide
gaggauguaggauaauagg

SEQ ID NO: 1761630 - RNA, 19 nt, Artificial Sequence
  Description of Artificial Sequence: Synthetic oligonucleotide
uacauaugggcccaauggg

SEQ ID NO: 1761631 - RNA, 19 nt, Artificial Sequence
  Description of Artificial Sequence: Synthetic oligonucleotide
uaauaggacaagcccaggg

SEQ ID NO: 1761632 - RNA, 19 nt, Artificial Sequence
  Description of Artificial Sequence: Synthetic oligonucleotide
aaaaggggugacaacaaac

SEQ ID NO: 1761633 - RNA, 19 nt, Artificial Sequence
  Description of Artificial Sequence: Synthetic oligonucleotide
aauaggacuaggaggcucc

SEQ ID NO: 1761634 - RNA, 19 nt, Artificial Sequence
  Description of Artificial Sequence: Synthetic oligonucleotide
agagcuugcgaguggagcc

SEQ ID NO: 1761635 - RNA, 19 nt, Artificial Sequence
  Description of Artificial Sequence: Synthetic oligonucleotide
uaggauaauaggacaagcc

SEQ ID NO: 1761636 - RNA, 19 nt, Artificial Sequence
  Description of Artificial Sequence: Synthetic oligonucleotide
cagaggaagguacauaugg

SEQ ID NO: 1761637 - RNA, 19 nt, Artificial Sequence
  Description of Artificial Sequence: Synthetic oligonucleotide
acaaaacaaagccagggug

SEQ ID NO: 1761638 - RNA, 19 nt, Artificial Sequence
  Description of Artificial Sequence: Synthetic oligonucleotide
ugcucagaaaccaauacuc

SEQ ID NO: 1761639 - RNA, 19 nt, Artificial Sequence
  Description of Artificial Sequence: Synthetic oligonucleotide
aguagucgucauuauauuc

SEQ ID NO: 1761640 - RNA, 19 nt, Artificial Sequence
  Description of Artificial Sequence: Synthetic oligonucleotide
ugauaaggcaaucagccaa

SEQ ID NO: 1761641 - RNA, 19 nt, Artificial Sequence
  Description of Artificial Sequence: Synthetic oligonucleotide
ggauaaaacagcauagucg

SEQ ID NO: 1761642 - RNA, 19 nt, Artificial Sequence
  Description of Artificial Sequence: Synthetic oligonucleotide
augcaugacaacuaccauc

SEQ ID NO: 1761643 - RNA, 19 nt, Artificial Sequence
  Description of Artificial Sequence: Synthetic oligonucleotide
uggccuuugguuaauacac

SEQ ID NO: 1761644 - RNA, 19 nt, Artificial Sequence
  Description of Artificial Sequence: Synthetic oligonucleotide
ucagccaaaacucuuguua

SEQ ID NO: 1761645 - RNA, 19 nt, Artificial Sequence
  Description of Artificial Sequence: Synthetic oligonucleotide
ucauuauauuccuugcucu

SEQ ID NO: 1761646 - RNA, 19 nt, Artificial Sequence
  Description of Artificial Sequence: Synthetic oligonucleotide
uggacauacccacagacuc

SEQ ID NO: 1761647 - RNA, 19 nt, Artificial Sequence
  Description of Artificial Sequence: Synthetic oligonucleotide
uaagagaaugaagaggaug

SEQ ID NO: 1761648 - RNA, 19 nt, Artificial Sequence
  Description of Artificial Sequence: Synthetic oligonucleotide
ugucggauaaaacagcaua

SEQ ID NO: 1761649 - RNA, 19 nt, Artificial Sequence
  Description of Artificial Sequence: Synthetic oligonucleotide
aaccaauacucucagggau

SEQ ID NO: 1761650 - RNA, 19 nt, Artificial Sequence
  Description of Artificial Sequence: Synthetic oligonucleotide
aaggggugacaacaaacag

SEQ ID NO: 1761651 - RNA, 19 nt, Artificial Sequence
  Description of Artificial Sequence: Synthetic oligonucleotide
gacaacuaccaucaccucc

SEQ ID NO: 1761652 - RNA, 19 nt, Artificial Sequence
  Description of Artificial Sequence: Synthetic oligonucleotide
cuuguauggaguaguaaac

SEQ ID NO: 1761653 - RNA, 19 nt, Artificial Sequence
  Description of Artificial Sequence: Synthetic oligonucleotide
agacguuggaaaugggacg

SEQ ID NO: 1761654 - RNA, 19 nt, Artificial Sequence
  Description of Artificial Sequence: Synthetic oligonucleotide
ugggagauaagcacugccc

SEQ ID NO: 1761655 - RNA, 19 nt, Artificial Sequence
  Description of Artificial Sequence: Synthetic oligonucleotide
acacugauaaggcaaucag

SEQ ID NO: 1761656 - RNA, 19 nt, Artificial Sequence
  Description of Artificial Sequence: Synthetic oligonucleotide
aauaggagccugcuuuucu

SEQ ID NO: 1761657 - RNA, 19 nt, Artificial Sequence
  Description of Artificial Sequence: Synthetic oligonucleotide
auaggacaagcccagggag

SEQ ID NO: 1761658 - RNA, 19 nt, Artificial Sequence
  Description of Artificial Sequence: Synthetic oligonucleotide
auuauauuccuugcucugg

SEQ ID NO: 1761659 - RNA, 19 nt, Artificial Sequence
  Description of Artificial Sequence: Synthetic oligonucleotide
gucgucauuauauuccuug

SEQ ID NO: 1761660 - RNA, 19 nt, Artificial Sequence
  Description of Artificial Sequence: Synthetic oligonucleotide
uguguccacaaaacaaagc

SEQ ID NO: 1761661 - RNA, 19 nt, Artificial Sequence
  Description of Artificial Sequence: Synthetic oligonucleotide
guagucgucauuauauucc

SEQ ID NO: 1761662 - RNA, 19 nt, Artificial Sequence
  Description of Artificial Sequence: Synthetic oligonucleotide
aguggagcccacgauaggc

SEQ ID NO: 1761663 - RNA, 19 nt, Artificial Sequence
  Description of Artificial Sequence: Synthetic oligonucleotide
cucagugucggauaaaaca

SEQ ID NO: 1761664 - RNA, 19 nt, Artificial Sequence
  Description of Artificial Sequence: Synthetic oligonucleotide
cugucucggccauagaugg

SEQ ID NO: 1761665 - RNA, 19 nt, Artificial Sequence
  Description of Artificial Sequence: Synthetic oligonucleotide
agucguccauggcagaccc

SEQ ID NO: 1761666 - RNA, 19 nt, Artificial Sequence
  Description of Artificial Sequence: Synthetic oligonucleotide
gaccugacgauccuggccc

SEQ ID NO: 1761667 - RNA, 19 nt, Artificial Sequence
  Description of Artificial Sequence: Synthetic oligonucleotide
aaaggggugacaacaaaca

SEQ ID NO: 1761668 - RNA, 19 nt, Artificial Sequence
  Description of Artificial Sequence: Synthetic oligonucleotide
aaaugggacgguagugugc

SEQ ID NO: 1761669 - RNA, 19 nt, Artificial Sequence
  Description of Artificial Sequence: Synthetic oligonucleotide
uuauauuccuugcucuggu

SEQ ID NO: 1761670 - RNA, 19 nt, Artificial Sequence
  Description of Artificial Sequence: Synthetic oligonucleotide
gacguuggaaaugggacgg

SEQ ID NO: 1761671 - RNA, 19 nt, Artificial Sequence
  Description of Artificial Sequence: Synthetic oligonucleotide
uguaggauaauaggacaag

SEQ ID NO: 1761672 - RNA, 19 nt, Artificial Sequence
  Description of Artificial Sequence: Synthetic oligonucleotide
agcaauaggagccugcuuu

SEQ ID NO: 1761673 - RNA, 19 nt, Artificial Sequence
  Description of Artificial Sequence: Synthetic oligonucleotide
cacgauaggcccaugcggg

SEQ ID NO: 1761674 - RNA, 19 nt, Artificial Sequence
  Description of Artificial Sequence: Synthetic oligonucleotide
ggucuuaucuccuggagcc

SEQ ID NO: 1761675 - RNA, 19 nt, Artificial Sequence
  Description of Artificial Sequence: Synthetic oligonucleotide
gucauuauauuccuugcuc

SEQ ID NO: 1761676 - RNA, 19 nt, Artificial Sequence
  Description of Artificial Sequence: Synthetic oligonucleotide
uuccucuaaagaagugggg

SEQ ID NO: 1761677 - RNA, 19 nt, Artificial Sequence
  Description of Artificial Sequence: Synthetic oligonucleotide
uaacucuccucauaguagu

SEQ ID NO: 1761678 - RNA, 19 nt, Artificial Sequence
  Description of Artificial Sequence: Synthetic oligonucleotide
auggacacggccuaggaaa

SEQ ID NO: 1761679 - RNA, 19 nt, Artificial Sequence
  Description of Artificial Sequence: Synthetic oligonucleotide
aaguaaggcauccucuuuu

SEQ ID NO: 1761680 - RNA, 19 nt, Artificial Sequence
  Description of Artificial Sequence: Synthetic oligonucleotide
aaugggacgguagugugca

SEQ ID NO: 1761681 - RNA, 19 nt, Artificial Sequence
  Description of Artificial Sequence: Synthetic oligonucleotide
uguugaacguaaggggugg

SEQ ID NO: 1761682 - RNA, 19 nt, Artificial Sequence
  Description of Artificial Sequence: Synthetic oligonucleotide
cauuauauuccuugcucug

SEQ ID NO: 1761683 - RNA, 19 nt, Artificial Sequence
  Description of Artificial Sequence: Synthetic oligonucleotide
ggucaaauaacucuccuca

SEQ ID NO: 1761684 - RNA, 19 nt, Artificial Sequence
  Description of Artificial Sequence: Synthetic oligonucleotide
gaaaugggacgguagugug

SEQ ID NO: 1761685 - RNA, 19 nt, Artificial Sequence
  Description of Artificial Sequence: Synthetic oligonucleotide
ucgaagauuuucuuuucgu

SEQ ID NO: 1761686 - RNA, 19 nt, Artificial Sequence
  Description of Artificial Sequence: Synthetic oligonucleotide
gagauaagcacugcccuag

SEQ ID NO: 1761687 - RNA, 19 nt, Artificial Sequence
  Description of Artificial Sequence: Synthetic oligonucleotide
ucggguaagccaugaagag

SEQ ID NO: 1761688 - RNA, 19 nt, Artificial Sequence
  Description of Artificial Sequence: Synthetic oligonucleotide
gacauacccacagacucgg

SEQ ID NO: 1761689 - RNA, 19 nt, Artificial Sequence
  Description of Artificial Sequence: Synthetic oligonucleotide
ucguacucgaagauuuucu

SEQ ID NO: 1761690 - RNA, 19 nt, Artificial Sequence
  Description of Artificial Sequence: Synthetic oligonucleotide
agaucauacaugucugagu

SEQ ID NO: 1761691 - RNA, 19 nt, Artificial Sequence
  Description of Artificial Sequence: Synthetic oligonucleotide
gagacguuggaaaugggac

SEQ ID NO: 1761692 - RNA, 19 nt, Artificial Sequence
  Description of Artificial Sequence: Synthetic oligonucleotide
ucgucauuauauuccuugc

SEQ ID NO: 1761693 - RNA, 19 nt, Artificial Sequence
  Description of Artificial Sequence: Synthetic oligonucleotide
aggcaaucagccaaaacuc

SEQ ID NO: 1761694 - RNA, 19 nt, Artificial Sequence
  Description of Artificial Sequence: Synthetic oligonucleotide
acuggcguagcacggcggc

SEQ ID NO: 1761695 - RNA, 19 nt, Artificial Sequence
  Description of Artificial Sequence: Synthetic oligonucleotide
auaacucuccucauaguag

SEQ ID NO: 1761696 - RNA, 19 nt, Artificial Sequence
  Description of Artificial Sequence: Synthetic oligonucleotide
uccucuaaagaaguggggu

SEQ ID NO: 1761697 - RNA, 19 nt, Artificial Sequence
  Description of Artificial Sequence: Synthetic oligonucleotide
aauacucucagggauccau

SEQ ID NO: 1761698 - RNA, 19 nt, Artificial Sequence
  Description of Artificial Sequence: Synthetic oligonucleotide
uuguacuggcguagcacgg

SEQ ID NO: 1761699 - RNA, 19 nt, Artificial Sequence
  Description of Artificial Sequence: Synthetic oligonucleotide
agcgguguugaacguaagg

SEQ ID NO: 1761700 - RNA, 19 nt, Artificial Sequence
  Description of Artificial Sequence: Synthetic oligonucleotide
ugguggucaaauaacucuc

SEQ ID NO: 1761701 - RNA, 19 nt, Artificial Sequence
  Description of Artificial Sequence: Synthetic oligonucleotide
aaagcccucacccacccua

SEQ ID NO: 1761702 - RNA, 19 nt, Artificial Sequence
  Description of Artificial Sequence: Synthetic oligonucleotide
gucggauaaaacagcauag

SEQ ID NO: 1761703 - RNA, 19 nt, Artificial Sequence
  Description of Artificial Sequence: Synthetic oligonucleotide
aaccccuuaaagaacacau

SEQ ID NO: 1761704 - RNA, 19 nt, Artificial Sequence
  Description of Artificial Sequence: Synthetic oligonucleotide
acucgaagauuuucuuuuc

SEQ ID NO: 1761705 - RNA, 19 nt, Artificial Sequence
  Description of Artificial Sequence: Synthetic oligonucleotide
gauaagcacugcccuaggc

SEQ ID NO: 1761706 - RNA, 19 nt, Artificial Sequence
  Description of Artificial Sequence: Synthetic oligonucleotide
uacucucagggauccaucc

SEQ ID NO: 1761707 - RNA, 19 nt, Artificial Sequence
  Description of Artificial Sequence: Synthetic oligonucleotide
ugaacguaagggguggccc

SEQ ID NO: 1761708 - RNA, 19 nt, Artificial Sequence
  Description of Artificial Sequence: Synthetic oligonucleotide
auauuccuugcucugguaa

SEQ ID NO: 1761709 - RNA, 19 nt, Artificial Sequence
  Description of Artificial Sequence: Synthetic oligonucleotide
auacccacagacucgggcu

SEQ ID NO: 1761710 - RNA, 19 nt, Artificial Sequence
  Description of Artificial Sequence: Synthetic oligonucleotide
gauggggcguucccuaucc

SEQ ID NO: 1761711 - RNA, 19 nt, Artificial Sequence
  Description of Artificial Sequence: Synthetic oligonucleotide
guaggauaauaggacaagc

SEQ ID NO: 1761712 - RNA, 19 nt, Artificial Sequence
  Description of Artificial Sequence: Synthetic oligonucleotide
agaaaccaauacucucagg

SEQ ID NO: 1761713 - RNA, 19 nt, Artificial Sequence
  Description of Artificial Sequence: Synthetic oligonucleotide
uggcgaaagcucuuggaca

SEQ ID NO: 1761714 - RNA, 19 nt, Artificial Sequence
  Description of Artificial Sequence: Synthetic oligonucleotide
cugaauccaagucugagaa

SEQ ID NO: 1761715 - RNA, 19 nt, Artificial Sequence
  Description of Artificial Sequence: Synthetic oligonucleotide
uugcucugguaaaguaagg

SEQ ID NO: 1761716 - RNA, 19 nt, Artificial Sequence
  Description of Artificial Sequence: Synthetic oligonucleotide
gguaaaguaaggcauccuc

SEQ ID NO: 1761717 - RNA, 19 nt, Artificial Sequence
  Description of Artificial Sequence: Synthetic oligonucleotide
uagugugcaaugcucuggu

SEQ ID NO: 1761718 - RNA, 19 nt, Artificial Sequence
  Description of Artificial Sequence: Synthetic oligonucleotide
acaacuaccaucaccucca

SEQ ID NO: 1761719 - RNA, 19 nt, Artificial Sequence
  Description of Artificial Sequence: Synthetic oligonucleotide
cucucagggauccauccag

SEQ ID NO: 1761720 - RNA, 19 nt, Artificial Sequence
  Description of Artificial Sequence: Synthetic oligonucleotide
aguaguaaacaaagagcag

SEQ ID NO: 1761721 - RNA, 19 nt, Artificial Sequence
  Description of Artificial Sequence: Synthetic oligonucleotide
gugacaacaaacaggcaug

SEQ ID NO: 1761722 - RNA, 19 nt, Artificial Sequence
  Description of Artificial Sequence: Synthetic oligonucleotide
ugcgggauguuguacuggc

SEQ ID NO: 1761723 - RNA, 19 nt, Artificial Sequence
  Description of Artificial Sequence: Synthetic oligonucleotide
uagucgucauuauauuccu

SEQ ID NO: 1761724 - RNA, 19 nt, Artificial Sequence
  Description of Artificial Sequence: Synthetic oligonucleotide
uaucaucacgaaccuggug

SEQ ID NO: 1761725 - RNA, 19 nt, Artificial Sequence
  Description of Artificial Sequence: Synthetic oligonucleotide
uguuguacuggcguagcac

SEQ ID NO: 1761726 - RNA, 19 nt, Artificial Sequence
  Description of Artificial Sequence: Synthetic oligonucleotide
aaccuggugauggaaggug

SEQ ID NO: 1761727 - RNA, 19 nt, Artificial Sequence
  Description of Artificial Sequence: Synthetic oligonucleotide
ugggucucguacucgaaga

SEQ ID NO: 1761728 - RNA, 19 nt, Artificial Sequence
  Description of Artificial Sequence: Synthetic oligonucleotide
cuggcgaaagcucuuggac

SEQ ID NO: 1761729 - RNA, 19 nt, Artificial Sequence
  Description of Artificial Sequence: Synthetic oligonucleotide
uucuuuucguagagcuugc

SEQ ID NO: 1761730 - RNA, 19 nt, Artificial Sequence
  Description of Artificial Sequence: Synthetic oligonucleotide
ugacaacaaacaggcaugc

SEQ ID NO: 1761731 - RNA, 19 nt, Artificial Sequence
  Description of Artificial Sequence: Synthetic oligonucleotide
ucggauaaaacagcauagu

SEQ ID NO: 1761732 - RNA, 19 nt, Artificial Sequence
  Description of Artificial Sequence: Synthetic oligonucleotide
guagugugcaaugcucugg

SEQ ID NO: 1761733 - RNA, 19 nt, Artificial Sequence
  Description of Artificial Sequence: Synthetic oligonucleotide
gucucggccauagaugggg

SEQ ID NO: 1761734 - RNA, 19 nt, Artificial Sequence
  Description of Artificial Sequence: Synthetic oligonucleotide
cagugucggauaaaacagc

SEQ ID NO: 1761735 - RNA, 19 nt, Artificial Sequence
  Description of Artificial Sequence: Synthetic oligonucleotide
cugaaccccuuaaagaaca

SEQ ID NO: 1761736 - RNA, 19 nt, Artificial Sequence
  Description of Artificial Sequence: Synthetic oligonucleotide
cugcaagugaggucccugg

SEQ ID NO: 1761737 - RNA, 19 nt, Artificial Sequence
  Description of Artificial Sequence: Synthetic oligonucleotide
uauggacacggccuaggaa

SEQ ID NO: 1761738 - RNA, 19 nt, Artificial Sequence
  Description of Artificial Sequence: Synthetic oligonucleotide
gaaccuguaagagaaugaa

SEQ ID NO: 1761739 - RNA, 19 nt, Artificial Sequence
  Description of Artificial Sequence: Synthetic oligonucleotide
auaugggcccaauggguug

SEQ ID NO: 1761740 - RNA, 19 nt, Artificial Sequence
  Description of Artificial Sequence: Synthetic oligonucleotide
acaaacaggcaugcaugac

SEQ ID NO: 1761741 - RNA, 19 nt, Artificial Sequence
  Description of Artificial Sequence: Synthetic oligonucleotide
ugacgauccuggcccagag

SEQ ID NO: 1761742 - RNA, 19 nt, Artificial Sequence
  Description of Artificial Sequence: Synthetic oligonucleotide
ugauggaagguguggguau

SEQ ID NO: 1761743 - RNA, 19 nt, Artificial Sequence
  Description of Artificial Sequence: Synthetic oligonucleotide
agaagcaauaggacuagga

SEQ ID NO: 1761744 - RNA, 19 nt, Artificial Sequence
  Description of Artificial Sequence: Synthetic oligonucleotide
aacguaagggguggcccgg

SEQ ID NO: 1761745 - RNA, 19 nt, Artificial Sequence
  Description of Artificial Sequence: Synthetic oligonucleotide
agugucggauaaaacagca

SEQ ID NO: 1761746 - RNA, 19 nt, Artificial Sequence
  Description of Artificial Sequence: Synthetic oligonucleotide
ggauaauaggacaagccca

SEQ ID NO: 1761747 - RNA, 19 nt, Artificial Sequence
  Description of Artificial Sequence: Synthetic oligonucleotide
ucuuuucguagagcuugcg

SEQ ID NO: 1761748 - RNA, 19 nt, Artificial Sequence
  Description of Artificial Sequence: Synthetic oligonucleotide
ugaauccaagucugagaac

SEQ ID NO: 1761749 - RNA, 19 nt, Artificial Sequence
  Description of Artificial Sequence: Synthetic oligonucleotide
ucuuaucuccuggagcccu

SEQ ID NO: 1761750 - RNA, 19 nt, Artificial Sequence
  Description of Artificial Sequence: Synthetic oligonucleotide
guacuggcguagcacggcg

SEQ ID NO: 1761751 - RNA, 19 nt, Artificial Sequence
  Description of Artificial Sequence: Synthetic oligonucleotide
aaacucuuguuaagagcug

SEQ ID NO: 1761752 - RNA, 19 nt, Artificial Sequence
  Description of Artificial Sequence: Synthetic oligonucleotide
acucgggcuccccauaugu

SEQ ID NO: 1761753 - RNA, 19 nt, Artificial Sequence
  Description of Artificial Sequence: Synthetic oligonucleotide
gucggguaagccaugaaga

SEQ ID NO: 1761754 - RNA, 19 nt, Artificial Sequence
  Description of Artificial Sequence: Synthetic oligonucleotide
ugucucggccauagauggg

SEQ ID NO: 1761755 - RNA, 19 nt, Artificial Sequence
  Description of Artificial Sequence: Synthetic oligonucleotide
acgguagugugcaaugcuc

SEQ ID NO: 1761756 - RNA, 19 nt, Artificial Sequence
  Description of Artificial Sequence: Synthetic oligonucleotide
uguacuggcguagcacggc

SEQ ID NO: 1761757 - RNA, 19 nt, Artificial Sequence
  Description of Artificial Sequence: Synthetic oligonucleotide
uggagacguuggaaauggg

SEQ ID NO: 1761758 - RNA, 19 nt, Artificial Sequence
  Description of Artificial Sequence: Synthetic oligonucleotide
uggcacgucggguaagcca

SEQ ID NO: 1761759 - RNA, 19 nt, Artificial Sequence
  Description of Artificial Sequence: Synthetic oligonucleotide
uccacggaggcugaaucca

SEQ ID NO: 1761760 - RNA, 19 nt, Artificial Sequence
  Description of Artificial Sequence: Synthetic oligonucleotide
agaaccuguaagagaauga

SEQ ID NO: 1761761 - RNA, 19 nt, Artificial Sequence
  Description of Artificial Sequence: Synthetic oligonucleotide
agagugggaccugacgauc

SEQ ID NO: 1761762 - RNA, 19 nt, Artificial Sequence
  Description of Artificial Sequence: Synthetic oligonucleotide
ucaucacgaaccuggugau

SEQ ID NO: 1761763 - RNA, 19 nt, Artificial Sequence
  Description of Artificial Sequence: Synthetic oligonucleotide
uggacacggccuaggaaac

SEQ ID NO: 1761764 - RNA, 19 nt, Artificial Sequence
  Description of Artificial Sequence: Synthetic oligonucleotide
cuuuucguagagcuugcga

SEQ ID NO: 1761765 - RNA, 19 nt, Artificial Sequence
  Description of Artificial Sequence: Synthetic oligonucleotide
auagauggggcguucccua

SEQ ID NO: 1761766 - RNA, 19 nt, Artificial Sequence
  Description of Artificial Sequence: Synthetic oligonucleotide
cugggucucguacucgaag

SEQ ID NO: 1761767 - RNA, 19 nt, Artificial Sequence
  Description of Artificial Sequence: Synthetic oligonucleotide
caauggguuguggaaggcc

SEQ ID NO: 1761768 - RNA, 19 nt, Artificial Sequence
  Description of Artificial Sequence: Synthetic oligonucleotide
cugguggucaaauaacucu

SEQ ID NO: 1761769 - RNA, 19 nt, Artificial Sequence
  Description of Artificial Sequence: Synthetic oligonucleotide
uugcgaguggagcccacga

SEQ ID NO: 1761770 - RNA, 19 nt, Artificial Sequence
  Description of Artificial Sequence: Synthetic oligonucleotide
agauggggcguucccuauc

SEQ ID NO: 1761771 - RNA, 19 nt, Artificial Sequence
  Description of Artificial Sequence: Synthetic oligonucleotide
uaguagucgucauuauauu

SEQ ID NO: 1761772 - RNA, 19 nt, Artificial Sequence
  Description of Artificial Sequence: Synthetic oligonucleotide
gcaaugcucugguagacac

SEQ ID NO: 1761773 - RNA, 19 nt, Artificial Sequence
  Description of Artificial Sequence: Synthetic oligonucleotide
cuggccugauggcacgucg

SEQ ID NO: 1761774 - RNA, 19 nt, Artificial Sequence
  Description of Artificial Sequence: Synthetic oligonucleotide
agagcaauagcuggcccca

SEQ ID NO: 1761775 - RNA, 19 nt, Artificial Sequence
  Description of Artificial Sequence: Synthetic oligonucleotide
caugcgggauguuguacug

SEQ ID NO: 1761776 - RNA, 19 nt, Artificial Sequence
  Description of Artificial Sequence: Synthetic oligonucleotide
uauauuccuugcucuggua

SEQ ID NO: 1761777 - RNA, 19 nt, Artificial Sequence
  Description of Artificial Sequence: Synthetic oligonucleotide
gcaauagcuggccccagag

SEQ ID NO: 1761778 - RNA, 19 nt, Artificial Sequence
  Description of Artificial Sequence: Synthetic oligonucleotide
gauggcacgucggguaagc

SEQ ID NO: 1761779 - RNA, 19 nt, Artificial Sequence
  Description of Artificial Sequence: Synthetic oligonucleotide
uggggucuuaucuccugga

SEQ ID NO: 1761780 - RNA, 19 nt, Artificial Sequence
  Description of Artificial Sequence: Synthetic oligonucleotide
guguugaacguaaggggug

SEQ ID NO: 1761781 - RNA, 19 nt, Artificial Sequence
  Description of Artificial Sequence: Synthetic oligonucleotide
gaguggagcccacgauagg

SEQ ID NO: 1761782 - RNA, 19 nt, Artificial Sequence
  Description of Artificial Sequence: Synthetic oligonucleotide
guaagggguggcccgggcc

SEQ ID NO: 1761783 - RNA, 19 nt, Artificial Sequence
  Description of Artificial Sequence: Synthetic oligonucleotide
uccuugcucugguaaagua

SEQ ID NO: 1761784 - RNA, 19 nt, Artificial Sequence
  Description of Artificial Sequence: Synthetic oligonucleotide
acucucagggauccaucca

SEQ ID NO: 1761785 - RNA, 19 nt, Artificial Sequence
  Description of Artificial Sequence: Synthetic oligonucleotide
caauaggacuaggaggcuc

SEQ ID NO: 1761786 - RNA, 19 nt, Artificial Sequence
  Description of Artificial Sequence: Synthetic oligonucleotide
aagcacugcccuaggcuag

SEQ ID NO: 1761787 - RNA, 19 nt, Artificial Sequence
  Description of Artificial Sequence: Synthetic oligonucleotide
gagcccuaagggucagaag

SEQ ID NO: 1761788 - RNA, 19 nt, Artificial Sequence
  Description of Artificial Sequence: Synthetic oligonucleotide
ggacauacccacagacucg

SEQ ID NO: 1761789 - RNA, 19 nt, Artificial Sequence
  Description of Artificial Sequence: Synthetic oligonucleotide
auguuguacuggcguagca

SEQ ID NO: 1761790 - RNA, 19 nt, Artificial Sequence
  Description of Artificial Sequence: Synthetic oligonucleotide
ucggccauagauggggcgu

SEQ ID NO: 1761791 - RNA, 19 nt, Artificial Sequence
  Description of Artificial Sequence: Synthetic oligonucleotide
ccacgauaggcccaugcgg

SEQ ID NO: 1761792 - RNA, 19 nt, Artificial Sequence
  Description of Artificial Sequence: Synthetic oligonucleotide
uaggcccugaaccccuuaa

SEQ ID NO: 1761793 - RNA, 19 nt, Artificial Sequence
  Description of Artificial Sequence: Synthetic oligonucleotide
cucguacucgaagauuuuc

SEQ ID NO: 1761794 - RNA, 19 nt, Artificial Sequence
  Description of Artificial Sequence: Synthetic oligonucleotide
gaaccccuuaaagaacaca

SEQ ID NO: 1761795 - RNA, 19 nt, Artificial Sequence
  Description of Artificial Sequence: Synthetic oligonucleotide
gcugaauccaagucugaga

SEQ ID NO: 1761796 - RNA, 19 nt, Artificial Sequence
  Description of Artificial Sequence: Synthetic oligonucleotide
ggcagaucauacaugucug

SEQ ID NO: 1761797 - RNA, 19 nt, Artificial Sequence
  Description of Artificial Sequence: Synthetic oligonucleotide
gacgauccuggcccagagc

SEQ ID NO: 1761798 - RNA, 19 nt, Artificial Sequence
  Description of Artificial Sequence: Synthetic oligonucleotide
gggcagaucauacaugucu

SEQ ID NO: 1761799 - RNA, 19 nt, Artificial Sequence
  Description of Artificial Sequence: Synthetic oligonucleotide
cacggaggcugaauccaag

SEQ ID NO: 1761800 - RNA, 19 nt, Artificial Sequence
  Description of Artificial Sequence: Synthetic oligonucleotide
ucuaaagaaguggggucuu

SEQ ID NO: 1761801 - RNA, 19 nt, Artificial Sequence
  Description of Artificial Sequence: Synthetic oligonucleotide
ucacgaaccuggugaugga

SEQ ID NO: 1761802 - RNA, 19 nt, Artificial Sequence
  Description of Artificial Sequence: Synthetic oligonucleotide
ggauguuguacuggcguag

SEQ ID NO: 1761803 - RNA, 19 nt, Artificial Sequence
  Description of Artificial Sequence: Synthetic oligonucleotide
ggaccugacgauccuggcc

SEQ ID NO: 1761804 - RNA, 19 nt, Artificial Sequence
  Description of Artificial Sequence: Synthetic oligonucleotide
ugcgaguggagcccacgau

SEQ ID NO: 1761805 - RNA, 19 nt, Artificial Sequence
  Description of Artificial Sequence: Synthetic oligonucleotide
cuugcgaguggagcccacg

SEQ ID NO: 1761806 - RNA, 19 nt, Artificial Sequence
  Description of Artificial Sequence: Synthetic oligonucleotide
gacgguagugugcaaugcu

SEQ ID NO: 1761807 - RNA, 19 nt, Artificial Sequence
  Description of Artificial Sequence: Synthetic oligonucleotide
uuccuugcucugguaaagu

SEQ ID NO: 1761808 - RNA, 19 nt, Artificial Sequence
  Description of Artificial Sequence: Synthetic oligonucleotide
ccucuaaagaagugggguc

SEQ ID NO: 1761809 - RNA, 19 nt, Artificial Sequence
  Description of Artificial Sequence: Synthetic oligonucleotide
gagcuugcgaguggagccc

SEQ ID NO: 1761810 - RNA, 19 nt, Artificial Sequence
  Description of Artificial Sequence: Synthetic oligonucleotide
ucucguacucgaagauuuu

SEQ ID NO: 1761811 - RNA, 19 nt, Artificial Sequence
  Description of Artificial Sequence: Synthetic oligonucleotide
auggcacgucggguaagcc

SEQ ID NO: 1761812 - RNA, 19 nt, Artificial Sequence
  Description of Artificial Sequence: Synthetic oligonucleotide
gguggucaaauaacucucc

SEQ ID NO: 1761813 - RNA, 19 nt, Artificial Sequence
  Description of Artificial Sequence: Synthetic oligonucleotide
ccaauacucucagggaucc

SEQ ID NO: 1761814 - RNA, 19 nt, Artificial Sequence
  Description of Artificial Sequence: Synthetic oligonucleotide
ggcugaauccaagucugag

SEQ ID NO: 1761815 - RNA, 19 nt, Artificial Sequence
  Description of Artificial Sequence: Synthetic oligonucleotide
gggacgguagugugcaaug

SEQ ID NO: 1761816 - RNA, 19 nt, Artificial Sequence
  Description of Artificial Sequence: Synthetic oligonucleotide
ugggcagaucauacauguc

SEQ ID NO: 1761817 - RNA, 19 nt, Artificial Sequence
  Description of Artificial Sequence: Synthetic oligonucleotide
ggaggcugaauccaagucu

SEQ ID NO: 1761818 - RNA, 19 nt, Artificial Sequence
  Description of Artificial Sequence: Synthetic oligonucleotide
ggggucuuaucuccuggag

SEQ ID NO: 1761819 - RNA, 19 nt, Artificial Sequence
  Description of Artificial Sequence: Synthetic oligonucleotide
uggcguagcacggcggcca

SEQ ID NO: 1761820 - RNA, 19 nt, Artificial Sequence
  Description of Artificial Sequence: Synthetic oligonucleotide
acgauaggcccaugcggga

SEQ ID NO: 1761821 - RNA, 19 nt, Artificial Sequence
  Description of Artificial Sequence: Synthetic oligonucleotide
cagcauagucguccauggc

SEQ ID NO: 1761822 - RNA, 19 nt, Artificial Sequence
  Description of Artificial Sequence: Synthetic oligonucleotide
gcagacccggccgacaccg

SEQ ID NO: 1761823 - RNA, 19 nt, Artificial Sequence
  Description of Artificial Sequence: Synthetic oligonucleotide
ugggacgguagugugcaau

SEQ ID NO: 1761824 - RNA, 19 nt, Artificial Sequence
  Description of Artificial Sequence: Synthetic oligonucleotide
cuauggacacggccuagga

SEQ ID NO: 1761825 - RNA, 19 nt, Artificial Sequence
  Description of Artificial Sequence: Synthetic oligonucleotide
ggagacguuggaaauggga

SEQ ID NO: 1761826 - RNA, 19 nt, Artificial Sequence
  Description of Artificial Sequence: Synthetic oligonucleotide
ugauggcacgucggguaag

SEQ ID NO: 1761827 - RNA, 19 nt, Artificial Sequence
  Description of Artificial Sequence: Synthetic oligonucleotide
agcacugcccuaggcuagg

SEQ ID NO: 1761828 - RNA, 19 nt, Artificial Sequence
  Description of Artificial Sequence: Synthetic oligonucleotide
cccacgauaggcccaugcg

SEQ ID NO: 1761829 - RNA, 19 nt, Artificial Sequence
  Description of Artificial Sequence: Synthetic oligonucleotide
cggggagcgguguugaacg

SEQ ID NO: 1761830 - RNA, 19 nt, Artificial Sequence
  Description of Artificial Sequence: Synthetic oligonucleotide
uagauggggcguucccuau

SEQ ID NO: 1761831 - RNA, 19 nt, Artificial Sequence
  Description of Artificial Sequence: Synthetic oligonucleotide
gacucgggcuccccauaug

SEQ ID NO: 1761832 - RNA, 19 nt, Artificial Sequence
  Description of Artificial Sequence: Synthetic oligonucleotide
cugcucagaaaccaauacu

SEQ ID NO: 1761833 - RNA, 19 nt, Artificial Sequence
  Description of Artificial Sequence: Synthetic oligonucleotide
uggggcguucccuauccuu

SEQ ID NO: 1761834 - RNA, 19 nt, Artificial Sequence
  Description of Artificial Sequence: Synthetic oligonucleotide
agacucgggcuccccauau

SEQ ID NO: 1761835 - RNA, 19 nt, Artificial Sequence
  Description of Artificial Sequence: Synthetic oligonucleotide
guugaacguaagggguggc

SEQ ID NO: 1761836 - RNA, 19 nt, Artificial Sequence
  Description of Artificial Sequence: Synthetic oligonucleotide
gagccugcuuuucuggccu

SEQ ID NO: 1761837 - RNA, 19 nt, Artificial Sequence
  Description of Artificial Sequence: Synthetic oligonucleotide
cacugcccuaggcuaggcc

SEQ ID NO: 1761838 - RNA, 19 nt, Artificial Sequence
  Description of Artificial Sequence: Synthetic oligonucleotide
cgaguggagcccacgauag

SEQ ID NO: 1761839 - RNA, 19 nt, Artificial Sequence
  Description of Artificial Sequence: Synthetic oligonucleotide
caggcaugcaugacaacua

SEQ ID NO: 1761840 - RNA, 19 nt, Artificial Sequence
  Description of Artificial Sequence: Synthetic oligonucleotide
cauauguccugguggucaa

SEQ ID NO: 1761841 - RNA, 19 nt, Artificial Sequence
  Description of Artificial Sequence: Synthetic oligonucleotide
cgucggguaagccaugaag

SEQ ID NO: 1761842 - RNA, 19 nt, Artificial Sequence
  Description of Artificial Sequence: Synthetic oligonucleotide
ugggcccaauggguugugg

SEQ ID NO: 1761843 - RNA, 19 nt, Artificial Sequence
  Description of Artificial Sequence: Synthetic oligonucleotide
gucuuaucuccuggagccc

SEQ ID NO: 1761844 - RNA, 19 nt, Artificial Sequence
  Description of Artificial Sequence: Synthetic oligonucleotide
ucccuauccuugcccuccu

SEQ ID NO: 1761845 - RNA, 19 nt, Artificial Sequence
  Description of Artificial Sequence: Synthetic oligonucleotide
uggcuggcgaaagcucuug

SEQ ID NO: 1761846 - RNA, 19 nt, Artificial Sequence
  Description of Artificial Sequence: Synthetic oligonucleotide
cuggccccagagugggacc

SEQ ID NO: 1761847 - RNA, 19 nt, Artificial Sequence
  Description of Artificial Sequence: Synthetic oligonucleotide
cucgggcuccccauauguc

SEQ ID NO: 1761848 - RNA, 19 nt, Artificial Sequence
  Description of Artificial Sequence: Synthetic oligonucleotide
uuaucuccuggagcccuaa

SEQ ID NO: 1761849 - RNA, 19 nt, Artificial Sequence
  Description of Artificial Sequence: Synthetic oligonucleotide
ggaaaugggacgguagugu

SEQ ID NO: 1761850 - RNA, 19 nt, Artificial Sequence
  Description of Artificial Sequence: Synthetic oligonucleotide
gcccaauggguuguggaag

SEQ ID NO: 1761851 - RNA, 19 nt, Artificial Sequence
  Description of Artificial Sequence: Synthetic oligonucleotide
gucucguacucgaagauuu

SEQ ID NO: 1761852 - RNA, 19 nt, Artificial Sequence
  Description of Artificial Sequence: Synthetic oligonucleotide
cauaugggcccaauggguu

SEQ ID NO: 1761853 - RNA, 19 nt, Artificial Sequence
  Description of Artificial Sequence: Synthetic oligonucleotide
auaggcccaugcgggaugu

SEQ ID NO: 1761854 - RNA, 19 nt, Artificial Sequence
  Description of Artificial Sequence: Synthetic oligonucleotide
cauagucguccauggcaga

SEQ ID NO: 1761855 - RNA, 19 nt, Artificial Sequence
  Description of Artificial Sequence: Synthetic oligonucleotide
ggggcguucccuauccuug

SEQ ID NO: 1761856 - RNA, 19 nt, Artificial Sequence
  Description of Artificial Sequence: Synthetic oligonucleotide
cacugucucggccauagau

SEQ ID NO: 1761857 - RNA, 19 nt, Artificial Sequence
  Description of Artificial Sequence: Synthetic oligonucleotide
ccuauggacacggccuagg

SEQ ID NO: 1761858 - RNA, 19 nt, Artificial Sequence
  Description of Artificial Sequence: Synthetic oligonucleotide
caacuaccaucaccuccac

SEQ ID NO: 1761859 - RNA, 19 nt, Artificial Sequence
  Description of Artificial Sequence: Synthetic oligonucleotide
gcuggcgaaagcucuugga

SEQ ID NO: 1761860 - RNA, 19 nt, Artificial Sequence
  Description of Artificial Sequence: Synthetic oligonucleotide
auaggacuaggaggcucca

SEQ ID NO: 1761861 - RNA, 19 nt, Artificial Sequence
  Description of Artificial Sequence: Synthetic oligonucleotide
ggcgaaagcucuuggacau

SEQ ID NO: 1761862 - RNA, 19 nt, Artificial Sequence
  Description of Artificial Sequence: Synthetic oligonucleotide
ggacgguagugugcaaugc

SEQ ID NO: 1761863 - RNA, 19 nt, Artificial Sequence
  Description of Artificial Sequence: Synthetic oligonucleotide
gcguucccuauccuugccc

SEQ ID NO: 1761864 - RNA, 19 nt, Artificial Sequence
  Description of Artificial Sequence: Synthetic oligonucleotide
gagcgguguugaacguaag

SEQ ID NO: 1761865 - RNA, 19 nt, Artificial Sequence
  Description of Artificial Sequence: Synthetic oligonucleotide
acguaagggguggcccggg

SEQ ID NO: 1761866 - RNA, 19 nt, Artificial Sequence
  Description of Artificial Sequence: Synthetic oligonucleotide
accugacgauccuggccca

SEQ ID NO: 1761867 - RNA, 19 nt, Artificial Sequence
  Description of Artificial Sequence: Synthetic oligonucleotide
ccauauguccuggugguca

SEQ ID NO: 1761868 - RNA, 19 nt, Artificial Sequence
  Description of Artificial Sequence: Synthetic oligonucleotide
agccugcuuuucuggccug

SEQ ID NO: 1761869 - RNA, 19 nt, Artificial Sequence
  Description of Artificial Sequence: Synthetic oligonucleotide
cugauggcacgucggguaa

SEQ ID NO: 1761870 - RNA, 19 nt, Artificial Sequence
  Description of Artificial Sequence: Synthetic oligonucleotide
gggcguucccuauccuugc

SEQ ID NO: 1761871 - RNA, 19 nt, Artificial Sequence
  Description of Artificial Sequence: Synthetic oligonucleotide
ccgucucugggucucguac

SEQ ID NO: 1761872 - RNA, 19 nt, Artificial Sequence
  Description of Artificial Sequence: Synthetic oligonucleotide
gcccacgauaggcccaugc

SEQ ID NO: 1761873 - RNA, 19 nt, Artificial Sequence
  Description of Artificial Sequence: Synthetic oligonucleotide
cggguaagccaugaagagg

SEQ ID NO: 1761874 - RNA, 19 nt, Artificial Sequence
  Description of Artificial Sequence: Synthetic oligonucleotide
cacagacucgggcucccca

SEQ ID NO: 1761875 - RNA, 19 nt, Artificial Sequence
  Description of Artificial Sequence: Synthetic oligonucleotide
uccgucucugggucucgua

SEQ ID NO: 1761876 - RNA, 19 nt, Artificial Sequence
  Description of Artificial Sequence: Synthetic oligonucleotide
gggaccugacgauccuggc

SEQ ID NO: 1761877 - RNA, 19 nt, Artificial Sequence
  Description of Artificial Sequence: Synthetic oligonucleotide
aagguacauaugggcccaa

SEQ ID NO: 1761878 - RNA, 19 nt, Artificial Sequence
  Description of Artificial Sequence: Synthetic oligonucleotide
caugcaugacaacuaccau

SEQ ID NO: 1761879 - RNA, 19 nt, Artificial Sequence
  Description of Artificial Sequence: Synthetic oligonucleotide
ggagcgguguugaacguaa

SEQ ID NO: 1761880 - RNA, 19 nt, Artificial Sequence
  Description of Artificial Sequence: Synthetic oligonucleotide
auggggcguucccuauccu

SEQ ID NO: 1761881 - RNA, 19 nt, Artificial Sequence
  Description of Artificial Sequence: Synthetic oligonucleotide
cuuaucuccuggagcccua

SEQ ID NO: 1761882 - RNA, 19 nt, Artificial Sequence
  Description of Artificial Sequence: Synthetic oligonucleotide
cuggcguagcacggcggcc

SEQ ID NO: 1761883 - RNA, 19 nt, Artificial Sequence
  Description of Artificial Sequence: Synthetic oligonucleotide
aucugcaagugaggucccu

SEQ ID NO: 1761884 - RNA, 19 nt, Artificial Sequence
  Description of Artificial Sequence: Synthetic oligonucleotide
ggcguucccuauccuugcc

SEQ ID NO: 1761885 - RNA, 19 nt, Artificial Sequence
  Description of Artificial Sequence: Synthetic oligonucleotide
cagcuuguauggaguagua

SEQ ID NO: 1761886 - RNA, 19 nt, Artificial Sequence
  Description of Artificial Sequence: Synthetic oligonucleotide
ugcccuaggcuaggcccug

SEQ ID NO: 1761887 - RNA, 19 nt, Artificial Sequence
  Description of Artificial Sequence: Synthetic oligonucleotide
agcuugcgaguggagccca

SEQ ID NO: 1761888 - RNA, 19 nt, Artificial Sequence
  Description of Artificial Sequence: Synthetic oligonucleotide
acgucggguaagccaugaa

SEQ ID NO: 1761889 - RNA, 19 nt, Artificial Sequence
  Description of Artificial Sequence: Synthetic oligonucleotide
acguuggaaaugggacggu

SEQ ID NO: 1761890 - RNA, 19 nt, Artificial Sequence
  Description of Artificial Sequence: Synthetic oligonucleotide
gcgaguggagcccacgaua

SEQ ID NO: 1761891 - RNA, 19 nt, Artificial Sequence
  Description of Artificial Sequence: Synthetic oligonucleotide
agguacauaugggcccaau

SEQ ID NO: 1761892 - RNA, 19 nt, Artificial Sequence
  Description of Artificial Sequence: Synthetic oligonucleotide
ggguggcccgggccuaugg

SEQ ID NO: 1761893 - RNA, 19 nt, Artificial Sequence
  Description of Artificial Sequence: Synthetic oligonucleotide
gccauagauggggcguucc

SEQ ID NO: 1761894 - RNA, 19 nt, Artificial Sequence
  Description of Artificial Sequence: Synthetic oligonucleotide
caaugcucugguagacacu

SEQ ID NO: 1761895 - RNA, 19 nt, Artificial Sequence
  Description of Artificial Sequence: Synthetic oligonucleotide
gcucagugucggauaaaac

SEQ ID NO: 1761896 - RNA, 19 nt, Artificial Sequence
  Description of Artificial Sequence: Synthetic oligonucleotide
agucgucauuauauuccuu

SEQ ID NO: 1761897 - RNA, 19 nt, Artificial Sequence
  Description of Artificial Sequence: Synthetic oligonucleotide
ccuaggcuaggcccugaac

SEQ ID NO: 1761898 - RNA, 19 nt, Artificial Sequence
  Description of Artificial Sequence: Synthetic oligonucleotide
gcuggccccagagugggac

SEQ ID NO: 1761899 - RNA, 19 nt, Artificial Sequence
  Description of Artificial Sequence: Synthetic oligonucleotide
ugaguccacggaggcugaa

SEQ ID NO: 1761900 - RNA, 19 nt, Artificial Sequence
  Description of Artificial Sequence: Synthetic oligonucleotide
cacgaaccuggugauggaa

SEQ ID NO: 1761901 - RNA, 19 nt, Artificial Sequence
  Description of Artificial Sequence: Synthetic oligonucleotide
cgggccuauggacacggcc

SEQ ID NO: 1761902 - RNA, 19 nt, Artificial Sequence
  Description of Artificial Sequence: Synthetic oligonucleotide
ccaggguggccuuugguua

SEQ ID NO: 1761903 - RNA, 19 nt, Artificial Sequence
  Description of Artificial Sequence: Synthetic oligonucleotide
cacgucggguaagccauga

SEQ ID NO: 1761904 - RNA, 19 nt, Artificial Sequence
  Description of Artificial Sequence: Synthetic oligonucleotide
gcaugacaacuaccaucac

SEQ ID NO: 1761905 - RNA, 19 nt, Artificial Sequence
  Description of Artificial Sequence: Synthetic oligonucleotide
gguggcccgggccuaugga

SEQ ID NO: 1761906 - RNA, 19 nt, Artificial Sequence
  Description of Artificial Sequence: Synthetic oligonucleotide
ggcacgucggguaagccau

SEQ ID NO: 1761907 - RNA, 19 nt, Artificial Sequence
  Description of Artificial Sequence: Synthetic oligonucleotide
cugcccuaggcuaggcccu

SEQ ID NO: 1761908 - RNA, 19 nt, Artificial Sequence
  Description of Artificial Sequence: Synthetic oligonucleotide
cccgggccuauggacacgg

SEQ ID NO: 1761909 - RNA, 19 nt, Artificial Sequence
  Description of Artificial Sequence: Synthetic oligonucleotide
augggacgguagugugcaa

SEQ ID NO: 1761910 - RNA, 19 nt, Artificial Sequence
  Description of Artificial Sequence: Synthetic oligonucleotide
augggcccaauggguugug

SEQ ID NO: 1761911 - RNA, 19 nt, Artificial Sequence
  Description of Artificial Sequence: Synthetic oligonucleotide
caauacucucagggaucca

SEQ ID NO: 1761912 - RNA, 19 nt, Artificial Sequence
  Description of Artificial Sequence: Synthetic oligonucleotide
gugucggauaaaacagcau

SEQ ID NO: 1761913 - RNA, 19 nt, Artificial Sequence
  Description of Artificial Sequence: Synthetic oligonucleotide
ccaugcgggauguuguacu

SEQ ID NO: 1761914 - RNA, 19 nt, Artificial Sequence
  Description of Artificial Sequence: Synthetic oligonucleotide
ccggccgacaccggggagc

SEQ ID NO: 1761915 - RNA, 19 nt, Artificial Sequence
  Description of Artificial Sequence: Synthetic oligonucleotide
gcaaucagccaaaacucuu

SEQ ID NO: 1761916 - RNA, 19 nt, Artificial Sequence
  Description of Artificial Sequence: Synthetic oligonucleotide
cccaugcgggauguuguac

SEQ ID NO: 1761917 - RNA, 19 nt, Artificial Sequence
  Description of Artificial Sequence: Synthetic oligonucleotide
aggguggccuuugguuaau

SEQ ID NO: 1761918 - RNA, 19 nt, Artificial Sequence
  Description of Artificial Sequence: Synthetic oligonucleotide
aggucccuggcuggcgaaa

SEQ ID NO: 1761919 - RNA, 19 nt, Artificial Sequence
  Description of Artificial Sequence: Synthetic oligonucleotide
accggggagcgguguugaa

SEQ ID NO: 1761920 - RNA, 19 nt, Artificial Sequence
  Description of Artificial Sequence: Synthetic oligonucleotide
ccggggagcgguguugaac

SEQ ID NO: 1761921 - RNA, 19 nt, Artificial Sequence
  Description of Artificial Sequence: Synthetic oligonucleotide
cagacucgggcuccccaua

SEQ ID NO: 1761922 - RNA, 19 nt, Artificial Sequence
  Description of Artificial Sequence: Synthetic oligonucleotide
gggucucguacucgaagau

SEQ ID NO: 1761923 - RNA, 19 nt, Artificial Sequence
  Description of Artificial Sequence: Synthetic oligonucleotide
cuaggcccugaaccccuua

SEQ ID NO: 1761924 - RNA, 19 nt, Artificial Sequence
  Description of Artificial Sequence: Synthetic oligonucleotide
cguaagggguggcccgggc

SEQ ID NO: 1761925 - RNA, 19 nt, Artificial Sequence
  Description of Artificial Sequence: Synthetic oligonucleotide
ccuaagggucagaagcaau

SEQ ID NO: 1761926 - RNA, 19 nt, Artificial Sequence
  Description of Artificial Sequence: Synthetic oligonucleotide
ggucucguacucgaagauu

SEQ ID NO: 1761927 - RNA, 19 nt, Artificial Sequence
  Description of Artificial Sequence: Synthetic oligonucleotide
ggcccaugcgggauguugu

SEQ ID NO: 1761928 - RNA, 19 nt, Artificial Sequence
  Description of Artificial Sequence: Synthetic oligonucleotide
gggagcgguguugaacgua

SEQ ID NO: 1761929 - RNA, 19 nt, Artificial Sequence
  Description of Artificial Sequence: Synthetic oligonucleotide
ggccauagauggggcguuc

SEQ ID NO: 1761930 - RNA, 19 nt, Artificial Sequence
  Description of Artificial Sequence: Synthetic oligonucleotide
cuggcuggcgaaagcucuu

SEQ ID NO: 1761931 - RNA, 19 nt, Artificial Sequence
  Description of Artificial Sequence: Synthetic oligonucleotide
cguucccuauccuugcccu

SEQ ID NO: 1761932 - RNA, 19 nt, Artificial Sequence
  Description of Artificial Sequence: Synthetic oligonucleotide
cagcaauaggagccugcuu

SEQ ID NO: 1761933 - RNA, 19 nt, Artificial Sequence
  Description of Artificial Sequence: Synthetic oligonucleotide
cguacucgaagauuuucuu

SEQ ID NO: 1761934 - RNA, 19 nt, Artificial Sequence
  Description of Artificial Sequence: Synthetic oligonucleotide
cccuaagggucagaagcaa

SEQ ID NO: 1761935 - RNA, 19 nt, Artificial Sequence
  Description of Artificial Sequence: Synthetic oligonucleotide
gcacugcccuaggcuaggc

SEQ ID NO: 1761936 - RNA, 19 nt, Artificial Sequence
  Description of Artificial Sequence: Synthetic oligonucleotide
gcccaugcgggauguugua

SEQ ID NO: 1761937 - RNA, 19 nt, Artificial Sequence
  Description of Artificial Sequence: Synthetic oligonucleotide
ccgacaccggggagcggug

SEQ ID NO: 1761938 - RNA, 19 nt, Artificial Sequence
  Description of Artificial Sequence: Synthetic oligonucleotide
cggccgacaccggggagcg

SEQ ID NO: 1761939 - RNA, 19 nt, Artificial Sequence
  Description of Artificial Sequence: Synthetic oligonucleotide
gcacgucggguaagccaug

SEQ ID NO: 1761940 - RNA, 19 nt, Artificial Sequence
  Description of Artificial Sequence: Synthetic oligonucleotide
gcuugcgaguggagcccac

SEQ ID NO: 1761941 - RNA, 19 nt, Artificial Sequence
  Description of Artificial Sequence: Synthetic oligonucleotide
ggggagcgguguugaacgu

SEQ ID NO: 1761942 - RNA, 19 nt, Artificial Sequence
  Description of Artificial Sequence: Synthetic oligonucleotide
ccgggccuauggacacggc

SEQ ID NO: 1761943 - RNA, 19 nt, Artificial Sequence
  Description of Artificial Sequence: Synthetic oligonucleotide
ggccccagagugggaccug

SEQ ID NO: 1761944 - RNA, 19 nt, Artificial Sequence
  Description of Artificial Sequence: Synthetic oligonucleotide
gcuccccauauguccuggu

SEQ ID NO: 1761945 - RNA, 19 nt, Artificial Sequence
  Description of Artificial Sequence: Synthetic oligonucleotide
cccggccgacaccggggag

SEQ ID NO: 1761946 - RNA, 19 nt, Artificial Sequence
  Description of Artificial Sequence: Synthetic oligonucleotide
cccuaggcuaggcccugaa

SEQ ID NO: 1761947 - RNA, 19 nt, Artificial Sequence
  Description of Artificial Sequence: Synthetic oligonucleotide
ggccgacaccggggagcgg

SEQ ID NO: 1761948 - RNA, 19 nt, Artificial Sequence
  Description of Artificial Sequence: Synthetic oligonucleotide
cgauaggcccaugcgggau

SEQ ID NO: 1761949 - RNA, 19 nt, Artificial Sequence
  Description of Artificial Sequence: Synthetic oligonucleotide
cggccauagauggggcguu

SEQ ID NO: 1761950 - RNA, 19 nt, Artificial Sequence
  Description of Artificial Sequence: Synthetic oligonucleotide
aucaaaaccauauacauuc

SEQ ID NO: 1761951 - RNA, 19 nt, Artificial Sequence
  Description of Artificial Sequence: Synthetic oligonucleotide
aaaccauauacauucuccc

SEQ ID NO: 1761952 - RNA, 19 nt, Artificial Sequence
  Description of Artificial Sequence: Synthetic oligonucleotide
acauaucaaaaccauauac

SEQ ID NO: 1761953 - RNA, 19 nt, Artificial Sequence
  Description of Artificial Sequence: Synthetic oligonucleotide
uucacuuguaggcagaagg

SEQ ID NO: 1761954 - RNA, 19 nt, Artificial Sequence
  Description of Artificial Sequence: Synthetic oligonucleotide
aauggugccaaagaucucc

SEQ ID NO: 1761955 - RNA, 19 nt, Artificial Sequence
  Description of Artificial Sequence: Synthetic oligonucleotide
uuugaugcaggacauauca

SEQ ID NO: 1761956 - RNA, 19 nt, Artificial Sequence
  Description of Artificial Sequence: Synthetic oligonucleotide
gauuuauuggcgcaaacgc

SEQ ID NO: 1761957 - RNA, 19 nt, Artificial Sequence
  Description of Artificial Sequence: Synthetic oligonucleotide
gauggugaaguccaagucg

SEQ ID NO: 1761958 - RNA, 19 nt, Artificial Sequence
  Description of Artificial Sequence: Synthetic oligonucleotide
ucacauaaaggguagcccg

SEQ ID NO: 1761959 - RNA, 19 nt, Artificial Sequence
  Description of Artificial Sequence: Synthetic oligonucleotide
gaucuuguagucuuuauac

SEQ ID NO: 1761960 - RNA, 19 nt, Artificial Sequence
  Description of Artificial Sequence: Synthetic oligonucleotide
aaucagauaugcucgaaca

SEQ ID NO: 1761961 - RNA, 19 nt, Artificial Sequence
  Description of Artificial Sequence: Synthetic oligonucleotide
ugcauaaucagauaugcuc

SEQ ID NO: 1761962 - RNA, 19 nt, Artificial Sequence
  Description of Artificial Sequence: Synthetic oligonucleotide
acugcauaaucagauaugc

SEQ ID NO: 1761963 - RNA, 19 nt, Artificial Sequence
  Description of Artificial Sequence: Synthetic oligonucleotide
cuugacuguauaaaugucc

SEQ ID NO: 1761964 - RNA, 19 nt, Artificial Sequence
  Description of Artificial Sequence: Synthetic oligonucleotide
uguauggggacucaggacu

SEQ ID NO: 1761965 - RNA, 19 nt, Artificial Sequence
  Description of Artificial Sequence: Synthetic oligonucleotide
accauauacauucucccac

SEQ ID NO: 1761966 - RNA, 19 nt, Artificial Sequence
  Description of Artificial Sequence: Synthetic oligonucleotide
uauacauucucccaccagu

SEQ ID NO: 1761967 - RNA, 19 nt, Artificial Sequence
  Description of Artificial Sequence: Synthetic oligonucleotide
ugcaggacauaucaaaacc

SEQ ID NO: 1761968 - RNA, 19 nt, Artificial Sequence
  Description of Artificial Sequence: Synthetic oligonucleotide
uuagugaccagcugcuucg

SEQ ID NO: 1761969 - RNA, 19 nt, Artificial Sequence
  Description of Artificial Sequence: Synthetic oligonucleotide
accaagggcucuuugaugg

SEQ ID NO: 1761970 - RNA, 19 nt, Artificial Sequence
  Description of Artificial Sequence: Synthetic oligonucleotide
ugccgauugugaaacaugg

SEQ ID NO: 1761971 - RNA, 19 nt, Artificial Sequence
  Description of Artificial Sequence: Synthetic oligonucleotide
uaugaggcaggcauuagug

SEQ ID NO: 1761972 - RNA, 19 nt, Artificial Sequence
  Description of Artificial Sequence: Synthetic oligonucleotide
ucgauguugaaguaggcca

SEQ ID NO: 1761973 - RNA, 19 nt, Artificial Sequence
  Description of Artificial Sequence: Synthetic oligonucleotide
uucacugugagguaguccu

SEQ ID NO: 1761974 - RNA, 19 nt, Artificial Sequence
  Description of Artificial Sequence: Synthetic oligonucleotide
ugcucgaacacucaauccc

SEQ ID NO: 1761975 - RNA, 19 nt, Artificial Sequence
  Description of Artificial Sequence: Synthetic oligonucleotide
uaacuuguuggcuuuaaca

SEQ ID NO: 1761976 - RNA, 19 nt, Artificial Sequence
  Description of Artificial Sequence: Synthetic oligonucleotide
uuuauuggcgcaaacgcaa

SEQ ID NO: 1761977 - RNA, 19 nt, Artificial Sequence
  Description of Artificial Sequence: Synthetic oligonucleotide
aaaauucuccaugaugcag

SEQ ID NO: 1761978 - RNA, 19 nt, Artificial Sequence
  Description of Artificial Sequence: Synthetic oligonucleotide
aaugcgugcacguagucau

SEQ ID NO: 1761979 - RNA, 19 nt, Artificial Sequence
  Description of Artificial Sequence: Synthetic oligonucleotide
aagccgguccucuuguggc

SEQ ID NO: 1761980 - RNA, 19 nt, Artificial Sequence
  Description of Artificial Sequence: Synthetic oligonucleotide
uccuuuaugaggcaggcau

SEQ ID NO: 1761981 - RNA, 19 nt, Artificial Sequence
  Description of Artificial Sequence: Synthetic oligonucleotide
uccuccauguagaacacag

SEQ ID NO: 1761982 - RNA, 19 nt, Artificial Sequence
  Description of Artificial Sequence: Synthetic oligonucleotide
uguagucuuuauacugucg

SEQ ID NO: 1761983 - RNA, 19 nt, Artificial Sequence
  Description of Artificial Sequence: Synthetic oligonucleotide
gcuuuaacaaucuucacug

SEQ ID NO: 1761984 - RNA, 19 nt, Artificial Sequence
  Description of Artificial Sequence: Synthetic oligonucleotide
cauaucaaaaccauauaca

SEQ ID NO: 1761985 - RNA, 19 nt, Artificial Sequence
  Description of Artificial Sequence: Synthetic oligonucleotide
acagucacgauguacccuc

SEQ ID NO: 1761986 - RNA, 19 nt, Artificial Sequence
  Description of Artificial Sequence: Synthetic oligonucleotide
gacuguauaaauguccacc

SEQ ID NO: 1761987 - RNA, 19 nt, Artificial Sequence
  Description of Artificial Sequence: Synthetic oligonucleotide
cuugaugauggucaccacg

SEQ ID NO: 1761988 - RNA, 19 nt, Artificial Sequence
  Description of Artificial Sequence: Synthetic oligonucleotide
uggaguugcgguauguaag

SEQ ID NO: 1761989 - RNA, 19 nt, Artificial Sequence
  Description of Artificial Sequence: Synthetic oligonucleotide
uguguauggggacucagga

SEQ ID NO: 1761990 - RNA, 19 nt, Artificial Sequence
  Description of Artificial Sequence: Synthetic oligonucleotide
uggaaagaugagcccaucg

SEQ ID NO: 1761991 - RNA, 19 nt, Artificial Sequence
  Description of Artificial Sequence: Synthetic oligonucleotide
aguaguagucuuuggaugu

SEQ ID NO: 1761992 - RNA, 19 nt, Artificial Sequence
  Description of Artificial Sequence: Synthetic oligonucleotide
aaagccgguccucuugugg

SEQ ID NO: 1761993 - RNA, 19 nt, Artificial Sequence
  Description of Artificial Sequence: Synthetic oligonucleotide
aucagauaugcucgaacac

SEQ ID NO: 1761994 - RNA, 19 nt, Artificial Sequence
  Description of Artificial Sequence: Synthetic oligonucleotide
aacuucuucaagaggcggc

SEQ ID NO: 1761995 - RNA, 19 nt, Artificial Sequence
  Description of Artificial Sequence: Synthetic oligonucleotide
gaaguaggccaccaaugcg

SEQ ID NO: 1761996 - RNA, 19 nt, Artificial Sequence
  Description of Artificial Sequence: Synthetic oligonucleotide
auaggagucaaaguaguag

SEQ ID NO: 1761997 - RNA, 19 nt, Artificial Sequence
  Description of Artificial Sequence: Synthetic oligonucleotide
acguggucuaacuuguugg

SEQ ID NO: 1761998 - RNA, 19 nt, Artificial Sequence
  Description of Artificial Sequence: Synthetic oligonucleotide
acuguauaaauguccaccu

SEQ ID NO: 1761999 - RNA, 19 nt, Artificial Sequence
  Description of Artificial Sequence: Synthetic oligonucleotide
ggaaacuucuucaagaggc

SEQ ID NO: 1762000 - RNA, 19 nt, Artificial Sequence
  Description of Artificial Sequence: Synthetic oligonucleotide
uaugcucgaacacucaauc

SEQ ID NO: 1762001 - RNA, 19 nt, Artificial Sequence
  Description of Artificial Sequence: Synthetic oligonucleotide
uccaugaugcaguucgcgg

SEQ ID NO: 1762002 - RNA, 19 nt, Artificial Sequence
  Description of Artificial Sequence: Synthetic oligonucleotide
uguaaggguacgcaccuca

SEQ ID NO: 1762003 - RNA, 19 nt, Artificial Sequence
  Description of Artificial Sequence: Synthetic oligonucleotide
acgucuuugaugcaggaca

SEQ ID NO: 1762004 - RNA, 19 nt, Artificial Sequence
  Description of Artificial Sequence: Synthetic oligonucleotide
augcaggacauaucaaaac

SEQ ID NO: 1762005 - RNA, 19 nt, Artificial Sequence
  Description of Artificial Sequence: Synthetic oligonucleotide
uauguaaggguacgcaccu

SEQ ID NO: 1762006 - RNA, 19 nt, Artificial Sequence
  Description of Artificial Sequence: Synthetic oligonucleotide
uaaucagauaugcucgaac

SEQ ID NO: 1762007 - RNA, 19 nt, Artificial Sequence
  Description of Artificial Sequence: Synthetic oligonucleotide
uagucuuuggaugucaugu

SEQ ID NO: 1762008 - RNA, 19 nt, Artificial Sequence
  Description of Artificial Sequence: Synthetic oligonucleotide
aaccauauacauucuccca

SEQ ID NO: 1762009 - RNA, 19 nt, Artificial Sequence
  Description of Artificial Sequence: Synthetic oligonucleotide
auggacucguagaagaggc

SEQ ID NO: 1762010 - RNA, 19 nt, Artificial Sequence
  Description of Artificial Sequence: Synthetic oligonucleotide
ucacugcauaaucagauau

SEQ ID NO: 1762011 - RNA, 19 nt, Artificial Sequence
  Description of Artificial Sequence: Synthetic oligonucleotide
aaauucuccaugaugcagu

SEQ ID NO: 1762012 - RNA, 19 nt, Artificial Sequence
  Description of Artificial Sequence: Synthetic oligonucleotide
auggugaaguccaagucgc

SEQ ID NO: 1762013 - RNA, 19 nt, Artificial Sequence
  Description of Artificial Sequence: Synthetic oligonucleotide
agaugagcccaucgggugc

SEQ ID NO: 1762014 - RNA, 19 nt, Artificial Sequence
  Description of Artificial Sequence: Synthetic oligonucleotide
agucuuuauacugucgguc

SEQ ID NO: 1762015 - RNA, 19 nt, Artificial Sequence
  Description of Artificial Sequence: Synthetic oligonucleotide
auagcuggcccuugaaguc

SEQ ID NO: 1762016 - RNA, 19 nt, Artificial Sequence
  Description of Artificial Sequence: Synthetic oligonucleotide
aggaaacuucuucaagagg

SEQ ID NO: 1762017 - RNA, 19 nt, Artificial Sequence
  Description of Artificial Sequence: Synthetic oligonucleotide
ugagcauggacucguagaa

SEQ ID NO: 1762018 - RNA, 19 nt, Artificial Sequence
  Description of Artificial Sequence: Synthetic oligonucleotide
gaaacuucuucaagaggcg

SEQ ID NO: 1762019 - RNA, 19 nt, Artificial Sequence
  Description of Artificial Sequence: Synthetic oligonucleotide
caagguggcuacaaaauuc

SEQ ID NO: 1762020 - RNA, 19 nt, Artificial Sequence
  Description of Artificial Sequence: Synthetic oligonucleotide
ucuaccuugacuguauaaa

SEQ ID NO: 1762021 - RNA, 19 nt, Artificial Sequence
  Description of Artificial Sequence: Synthetic oligonucleotide
auacugucgguccucaaug

SEQ ID NO: 1762022 - RNA, 19 nt, Artificial Sequence
  Description of Artificial Sequence: Synthetic oligonucleotide
agcauggacucguagaaga

SEQ ID NO: 1762023 - RNA, 19 nt, Artificial Sequence
  Description of Artificial Sequence: Synthetic oligonucleotide
ggaaagaugagcccaucgg

SEQ ID NO: 1762024 - RNA, 19 nt, Artificial Sequence
  Description of Artificial Sequence: Synthetic oligonucleotide
caucccauuagccaaggug

SEQ ID NO: 1762025 - RNA, 19 nt, Artificial Sequence
  Description of Artificial Sequence: Synthetic oligonucleotide
cuucggauccaccacgucc

SEQ ID NO: 1762026 - RNA, 19 nt, Artificial Sequence
  Description of Artificial Sequence: Synthetic oligonucleotide
uuaugaggcaggcauuagu

SEQ ID NO: 1762027 - RNA, 19 nt, Artificial Sequence
  Description of Artificial Sequence: Synthetic oligonucleotide
uaaaggguagcccggucug

SEQ ID NO: 1762028 - RNA, 19 nt, Artificial Sequence
  Description of Artificial Sequence: Synthetic oligonucleotide
acugucgguccucaauggc

SEQ ID NO: 1762029 - RNA, 19 nt, Artificial Sequence
  Description of Artificial Sequence: Synthetic oligonucleotide
gcauaaucagauaugcucg

SEQ ID NO: 1762030 - RNA, 19 nt, Artificial Sequence
  Description of Artificial Sequence: Synthetic oligonucleotide
auaaaggguagcccggucu

SEQ ID NO: 1762031 - RNA, 19 nt, Artificial Sequence
  Description of Artificial Sequence: Synthetic oligonucleotide
uauacugucgguccucaau

SEQ ID NO: 1762032 - RNA, 19 nt, Artificial Sequence
  Description of Artificial Sequence: Synthetic oligonucleotide
acacucaaucccaaugacc

SEQ ID NO: 1762033 - RNA, 19 nt, Artificial Sequence
  Description of Artificial Sequence: Synthetic oligonucleotide
aaguaggccaccaaugcgu

SEQ ID NO: 1762034 - RNA, 19 nt, Artificial Sequence
  Description of Artificial Sequence: Synthetic oligonucleotide
auauacauucucccaccag

SEQ ID NO: 1762035 - RNA, 19 nt, Artificial Sequence
  Description of Artificial Sequence: Synthetic oligonucleotide
cacauaaaggguagcccgg

SEQ ID NO: 1762036 - RNA, 19 nt, Artificial Sequence
  Description of Artificial Sequence: Synthetic oligonucleotide
gucaaccuuguccacaggc

SEQ ID NO: 1762037 - RNA, 19 nt, Artificial Sequence
  Description of Artificial Sequence: Synthetic oligonucleotide
ggcauuagugaccagcugc

SEQ ID NO: 1762038 - RNA, 19 nt, Artificial Sequence
  Description of Artificial Sequence: Synthetic oligonucleotide
cuugucgcgggcaugcagc

SEQ ID NO: 1762039 - RNA, 19 nt, Artificial Sequence
  Description of Artificial Sequence: Synthetic oligonucleotide
ucuuugaugcaggacauau

SEQ ID NO: 1762040 - RNA, 19 nt, Artificial Sequence
  Description of Artificial Sequence: Synthetic oligonucleotide
ucuuuauacugucgguccu

SEQ ID NO: 1762041 - RNA, 19 nt, Artificial Sequence
  Description of Artificial Sequence: Synthetic oligonucleotide
ucgauggugaaguccaagu

SEQ ID NO: 1762042 - RNA, 19 nt, Artificial Sequence
  Description of Artificial Sequence: Synthetic oligonucleotide
accaguggaucuuguaguc

SEQ ID NO: 1762043 - RNA, 19 nt, Artificial Sequence
  Description of Artificial Sequence: Synthetic oligonucleotide
guagaacacagucugcuuc

SEQ ID NO: 1762044 - RNA, 19 nt, Artificial Sequence
  Description of Artificial Sequence: Synthetic oligonucleotide
ucuuugauggccacgucuu

SEQ ID NO: 1762045 - RNA, 19 nt, Artificial Sequence
  Description of Artificial Sequence: Synthetic oligonucleotide
cuuuaacaaucuucacugc

SEQ ID NO: 1762046 - RNA, 19 nt, Artificial Sequence
  Description of Artificial Sequence: Synthetic oligonucleotide
ggauuuauuggcgcaaacg

SEQ ID NO: 1762047 - RNA, 19 nt, Artificial Sequence
  Description of Artificial Sequence: Synthetic oligonucleotide
aggauuuauuggcgcaaac

SEQ ID NO: 1762048 - RNA, 19 nt, Artificial Sequence
  Description of Artificial Sequence: Synthetic oligonucleotide
agucauuccucuucacuug

SEQ ID NO: 1762049 - RNA, 19 nt, Artificial Sequence
  Description of Artificial Sequence: Synthetic oligonucleotide
ugucgguccucaauggcug

SEQ ID NO: 1762050 - RNA, 19 nt, Artificial Sequence
  Description of Artificial Sequence: Synthetic oligonucleotide
gucuuuggaugucaugucc

SEQ ID NO: 1762051 - RNA, 19 nt, Artificial Sequence
  Description of Artificial Sequence: Synthetic oligonucleotide
acauagcuggcccuugaag

SEQ ID NO: 1762052 - RNA, 19 nt, Artificial Sequence
  Description of Artificial Sequence: Synthetic oligonucleotide
acagucugcuuccagugug

SEQ ID NO: 1762053 - RNA, 19 nt, Artificial Sequence
  Description of Artificial Sequence: Synthetic oligonucleotide
uauuggcgcaaacgcaacc

SEQ ID NO: 1762054 - RNA, 19 nt, Artificial Sequence
  Description of Artificial Sequence: Synthetic oligonucleotide
gauguacccucccaucccc

SEQ ID NO: 1762055 - RNA, 19 nt, Artificial Sequence
  Description of Artificial Sequence: Synthetic oligonucleotide
uacugucgguccucaaugg

SEQ ID NO: 1762056 - RNA, 19 nt, Artificial Sequence
  Description of Artificial Sequence: Synthetic oligonucleotide
ggaguugcgguauguaagg

SEQ ID NO: 1762057 - RNA, 19 nt, Artificial Sequence
  Description of Artificial Sequence: Synthetic oligonucleotide
ucgcugaugaugaugucaa

SEQ ID NO: 1762058 - RNA, 19 nt, Artificial Sequence
  Description of Artificial Sequence: Synthetic oligonucleotide
gaggcaguagcccauccac

SEQ ID NO: 1762059 - RNA, 19 nt, Artificial Sequence
  Description of Artificial Sequence: Synthetic oligonucleotide
cagauaugcucgaacacuc

SEQ ID NO: 1762060 - RNA, 19 nt, Artificial Sequence
  Description of Artificial Sequence: Synthetic oligonucleotide
auggaugccaaagugggca

SEQ ID NO: 1762061 - RNA, 19 nt, Artificial Sequence
  Description of Artificial Sequence: Synthetic oligonucleotide
caugaugcaguucgcggcc

SEQ ID NO: 1762062 - RNA, 19 nt, Artificial Sequence
  Description of Artificial Sequence: Synthetic oligonucleotide
agagcucacauagcuggcc

SEQ ID NO: 1762063 - RNA, 19 nt, Artificial Sequence
  Description of Artificial Sequence: Synthetic oligonucleotide
caaagugggcauaggaguc

SEQ ID NO: 1762064 - RNA, 19 nt, Artificial Sequence
  Description of Artificial Sequence: Synthetic oligonucleotide
ugcgguauguaaggguacg

SEQ ID NO: 1762065 - RNA, 19 nt, Artificial Sequence
  Description of Artificial Sequence: Synthetic oligonucleotide
aagaggugccgauugugaa

SEQ ID NO: 1762066 - RNA, 19 nt, Artificial Sequence
  Description of Artificial Sequence: Synthetic oligonucleotide
ugcaaacaugcagaggaug

SEQ ID NO: 1762067 - RNA, 19 nt, Artificial Sequence
  Description of Artificial Sequence: Synthetic oligonucleotide
aguugcgguauguaagggu

SEQ ID NO: 1762068 - RNA, 19 nt, Artificial Sequence
  Description of Artificial Sequence: Synthetic oligonucleotide
agucacgauguacccuccc

SEQ ID NO: 1762069 - RNA, 19 nt, Artificial Sequence
  Description of Artificial Sequence: Synthetic oligonucleotide
caaaaccauauacauucuc

SEQ ID NO: 1762070 - RNA, 19 nt, Artificial Sequence
  Description of Artificial Sequence: Synthetic oligonucleotide
cucaaucccaaugaccuug

SEQ ID NO: 1762071 - RNA, 19 nt, Artificial Sequence
  Description of Artificial Sequence: Synthetic oligonucleotide
caaccuuguccacaggcag

SEQ ID NO: 1762072 - RNA, 19 nt, Artificial Sequence
  Description of Artificial Sequence: Synthetic oligonucleotide
uccaccaagggcucuuuga

SEQ ID NO: 1762073 - RNA, 19 nt, Artificial Sequence
  Description of Artificial Sequence: Synthetic oligonucleotide
ccgauugugaaacauggag

SEQ ID NO: 1762074 - RNA, 19 nt, Artificial Sequence
  Description of Artificial Sequence: Synthetic oligonucleotide
uggaggcucaucccauuag

SEQ ID NO: 1762075 - RNA, 19 nt, Artificial Sequence
  Description of Artificial Sequence: Synthetic oligonucleotide
cucgauguugaaguaggcc

SEQ ID NO: 1762076 - RNA, 19 nt, Artificial Sequence
  Description of Artificial Sequence: Synthetic oligonucleotide
cauggacucguagaagagg

SEQ ID NO: 1762077 - RNA, 19 nt, Artificial Sequence
  Description of Artificial Sequence: Synthetic oligonucleotide
gucgcgggcaugcagcacg

SEQ ID NO: 1762078 - RNA, 19 nt, Artificial Sequence
  Description of Artificial Sequence: Synthetic oligonucleotide
gauaugcucgaacacucaa

SEQ ID NO: 1762079 - RNA, 19 nt, Artificial Sequence
  Description of Artificial Sequence: Synthetic oligonucleotide
cuugagcacaggaaacuuc

SEQ ID NO: 1762080 - RNA, 19 nt, Artificial Sequence
  Description of Artificial Sequence: Synthetic oligonucleotide
auuuauuggcgcaaacgca

SEQ ID NO: 1762081 - RNA, 19 nt, Artificial Sequence
  Description of Artificial Sequence: Synthetic oligonucleotide
cacucaaucccaaugaccu

SEQ ID NO: 1762082 - RNA, 19 nt, Artificial Sequence
  Description of Artificial Sequence: Synthetic oligonucleotide
uuauuggcgcaaacgcaac

SEQ ID NO: 1762083 - RNA, 19 nt, Artificial Sequence
  Description of Artificial Sequence: Synthetic oligonucleotide
uuuauacugucgguccuca

SEQ ID NO: 1762084 - RNA, 19 nt, Artificial Sequence
  Description of Artificial Sequence: Synthetic oligonucleotide
ugccaauggugccaaagau

SEQ ID NO: 1762085 - RNA, 19 nt, Artificial Sequence
  Description of Artificial Sequence: Synthetic oligonucleotide
uggucuaacuuguuggcuu

SEQ ID NO: 1762086 - RNA, 19 nt, Artificial Sequence
  Description of Artificial Sequence: Synthetic oligonucleotide
guggcaucgggugaacucg

SEQ ID NO: 1762087 - RNA, 19 nt, Artificial Sequence
  Description of Artificial Sequence: Synthetic oligonucleotide
aggacugguggaaaagccg

SEQ ID NO: 1762088 - RNA, 19 nt, Artificial Sequence
  Description of Artificial Sequence: Synthetic oligonucleotide
uuuaugaggcaggcauuag

SEQ ID NO: 1762089 - RNA, 19 nt, Artificial Sequence
  Description of Artificial Sequence: Synthetic oligonucleotide
gguauguaaggguacgcac

SEQ ID NO: 1762090 - RNA, 19 nt, Artificial Sequence
  Description of Artificial Sequence: Synthetic oligonucleotide
cugguggaaaagccggucc

SEQ ID NO: 1762091 - RNA, 19 nt, Artificial Sequence
  Description of Artificial Sequence: Synthetic oligonucleotide
gaaguccaagucgcgauug

SEQ ID NO: 1762092 - RNA, 19 nt, Artificial Sequence
  Description of Artificial Sequence: Synthetic oligonucleotide
ucccauuagccaagguggc

SEQ ID NO: 1762093 - RNA, 19 nt, Artificial Sequence
  Description of Artificial Sequence: Synthetic oligonucleotide
uggucagccuggcagcgcc

SEQ ID NO: 1762094 - RNA, 19 nt, Artificial Sequence
  Description of Artificial Sequence: Synthetic oligonucleotide
uggugaaguccaagucgcg

SEQ ID NO: 1762095 - RNA, 19 nt, Artificial Sequence
  Description of Artificial Sequence: Synthetic oligonucleotide
uccucgccagucuucacug

SEQ ID NO: 1762096 - RNA, 19 nt, Artificial Sequence
  Description of Artificial Sequence: Synthetic oligonucleotide
guugagcauggacucguag

SEQ ID NO: 1762097 - RNA, 19 nt, Artificial Sequence
  Description of Artificial Sequence: Synthetic oligonucleotide
ggggacucaggacuggugg

SEQ ID NO: 1762098 - RNA, 19 nt, Artificial Sequence
  Description of Artificial Sequence: Synthetic oligonucleotide
gaugcaggacauaucaaaa

SEQ ID NO: 1762099 - RNA, 19 nt, Artificial Sequence
  Description of Artificial Sequence: Synthetic oligonucleotide
aggagucaaaguaguaguc

SEQ ID NO: 1762100 - RNA, 19 nt, Artificial Sequence
  Description of Artificial Sequence: Synthetic oligonucleotide
uuuggaugucauguccuca

SEQ ID NO: 1762101 - RNA, 19 nt, Artificial Sequence
  Description of Artificial Sequence: Synthetic oligonucleotide
cuaacuuguuggcuuuaac

SEQ ID NO: 1762102 - RNA, 19 nt, Artificial Sequence
  Description of Artificial Sequence: Synthetic oligonucleotide
uaggccaccaaugcgugca

SEQ ID NO: 1762103 - RNA, 19 nt, Artificial Sequence
  Description of Artificial Sequence: Synthetic oligonucleotide
gaggugccgauugugaaac

SEQ ID NO: 1762104 - RNA, 19 nt, Artificial Sequence
  Description of Artificial Sequence: Synthetic oligonucleotide
acgguguugagcauggacu

SEQ ID NO: 1762105 - RNA, 19 nt, Artificial Sequence
  Description of Artificial Sequence: Synthetic oligonucleotide
uccaagucgcgauuguuuu

SEQ ID NO: 1762106 - RNA, 19 nt, Artificial Sequence
  Description of Artificial Sequence: Synthetic oligonucleotide
cacguagucauuccucuuc

SEQ ID NO: 1762107 - RNA, 19 nt, Artificial Sequence
  Description of Artificial Sequence: Synthetic oligonucleotide
auccgguagucaguggagc

SEQ ID NO: 1762108 - RNA, 19 nt, Artificial Sequence
  Description of Artificial Sequence: Synthetic oligonucleotide
uguguguauggggacucag

SEQ ID NO: 1762109 - RNA, 19 nt, Artificial Sequence
  Description of Artificial Sequence: Synthetic oligonucleotide
gcugaugaugaugucaacc

SEQ ID NO: 1762110 - RNA, 19 nt, Artificial Sequence
  Description of Artificial Sequence: Synthetic oligonucleotide
uccgguagucaguggagca

SEQ ID NO: 1762111 - RNA, 19 nt, Artificial Sequence
  Description of Artificial Sequence: Synthetic oligonucleotide
ucacgauguacccucccau

SEQ ID NO: 1762112 - RNA, 19 nt, Artificial Sequence
  Description of Artificial Sequence: Synthetic oligonucleotide
ggcauaggagucaaaguag

SEQ ID NO: 1762113 - RNA, 19 nt, Artificial Sequence
  Description of Artificial Sequence: Synthetic oligonucleotide
caccaaugcgugcacguag

SEQ ID NO: 1762114 - RNA, 19 nt, Artificial Sequence
  Description of Artificial Sequence: Synthetic oligonucleotide
cugcuucggauccaccacg

SEQ ID NO: 1762115 - RNA, 19 nt, Artificial Sequence
  Description of Artificial Sequence: Synthetic oligonucleotide
caaacgcaaccauauaaaa

SEQ ID NO: 1762116 - RNA, 19 nt, Artificial Sequence
  Description of Artificial Sequence: Synthetic oligonucleotide
auuggcgcaaacgcaacca

SEQ ID NO: 1762117 - RNA, 19 nt, Artificial Sequence
  Description of Artificial Sequence: Synthetic oligonucleotide
aaguccaagucgcgauugu

SEQ ID NO: 1762118 - RNA, 19 nt, Artificial Sequence
  Description of Artificial Sequence: Synthetic oligonucleotide
uaaggguacgcaccucauc

SEQ ID NO: 1762119 - RNA, 19 nt, Artificial Sequence
  Description of Artificial Sequence: Synthetic oligonucleotide
agccaagguggcuacaaaa

SEQ ID NO: 1762120 - RNA, 19 nt, Artificial Sequence
  Description of Artificial Sequence: Synthetic oligonucleotide
acguagucauuccucuuca

SEQ ID NO: 1762121 - RNA, 19 nt, Artificial Sequence
  Description of Artificial Sequence: Synthetic oligonucleotide
cacguggucuaacuuguug

SEQ ID NO: 1762122 - RNA, 19 nt, Artificial Sequence
  Description of Artificial Sequence: Synthetic oligonucleotide
ucacauagcuggcccuuga

SEQ ID NO: 1762123 - RNA, 19 nt, Artificial Sequence
  Description of Artificial Sequence: Synthetic oligonucleotide
ugaggauuuauuggcgcaa

SEQ ID NO: 1762124 - RNA, 19 nt, Artificial Sequence
  Description of Artificial Sequence: Synthetic oligonucleotide
acuugucgcgggcaugcag

SEQ ID NO: 1762125 - RNA, 19 nt, Artificial Sequence
  Description of Artificial Sequence: Synthetic oligonucleotide
ggacugguggaaaagccgg

SEQ ID NO: 1762126 - RNA, 19 nt, Artificial Sequence
  Description of Artificial Sequence: Synthetic oligonucleotide
cauccgguagucaguggag

SEQ ID NO: 1762127 - RNA, 19 nt, Artificial Sequence
  Description of Artificial Sequence: Synthetic oligonucleotide
ggugccagccacuugucgc

SEQ ID NO: 1762128 - RNA, 19 nt, Artificial Sequence
  Description of Artificial Sequence: Synthetic oligonucleotide
cacgguguugagcauggac

SEQ ID NO: 1762129 - RNA, 19 nt, Artificial Sequence
  Description of Artificial Sequence: Synthetic oligonucleotide
uuagccaagguggcuacaa

SEQ ID NO: 1762130 - RNA, 19 nt, Artificial Sequence
  Description of Artificial Sequence: Synthetic oligonucleotide
uccucuaccuugacuguau

SEQ ID NO: 1762131 - RNA, 19 nt, Artificial Sequence
  Description of Artificial Sequence: Synthetic oligonucleotide
caagagagcucacauagcu

SEQ ID NO: 1762132 - RNA, 19 nt, Artificial Sequence
  Description of Artificial Sequence: Synthetic oligonucleotide
ugucaaccuuguccacagg

SEQ ID NO: 1762133 - RNA, 19 nt, Artificial Sequence
  Description of Artificial Sequence: Synthetic oligonucleotide
aguucgcggccucggcugc

SEQ ID NO: 1762134 - RNA, 19 nt, Artificial Sequence
  Description of Artificial Sequence: Synthetic oligonucleotide
gaugcaguucgcggccucg

SEQ ID NO: 1762135 - RNA, 19 nt, Artificial Sequence
  Description of Artificial Sequence: Synthetic oligonucleotide
ccauauacauucucccacc

SEQ ID NO: 1762136 - RNA, 19 nt, Artificial Sequence
  Description of Artificial Sequence: Synthetic oligonucleotide
caccacguccaccaagggc

SEQ ID NO: 1762137 - RNA, 19 nt, Artificial Sequence
  Description of Artificial Sequence: Synthetic oligonucleotide
cuguauaaauguccaccuc

SEQ ID NO: 1762138 - RNA, 19 nt, Artificial Sequence
  Description of Artificial Sequence: Synthetic oligonucleotide
ugaaguccaggucgauggu

SEQ ID NO: 1762139 - RNA, 19 nt, Artificial Sequence
  Description of Artificial Sequence: Synthetic oligonucleotide
ugaaguccaagucgcgauu

SEQ ID NO: 1762140 - RNA, 19 nt, Artificial Sequence
  Description of Artificial Sequence: Synthetic oligonucleotide
cuccaugaugcaguucgcg

SEQ ID NO: 1762141 - RNA, 19 nt, Artificial Sequence
  Description of Artificial Sequence: Synthetic oligonucleotide
uugcgguauguaaggguac

SEQ ID NO: 1762142 - RNA, 19 nt, Artificial Sequence
  Description of Artificial Sequence: Synthetic oligonucleotide
uggacucguagaagaggca

SEQ ID NO: 1762143 - RNA, 19 nt, Artificial Sequence
  Description of Artificial Sequence: Synthetic oligonucleotide
caucgggugaacucgaugu

SEQ ID NO: 1762144 - RNA, 19 nt, Artificial Sequence
  Description of Artificial Sequence: Synthetic oligonucleotide
ugcuucggauccaccacgu

SEQ ID NO: 1762145 - RNA, 19 nt, Artificial Sequence
  Description of Artificial Sequence: Synthetic oligonucleotide
guguauggggacucaggac

SEQ ID NO: 1762146 - RNA, 19 nt, Artificial Sequence
  Description of Artificial Sequence: Synthetic oligonucleotide
ucuaacuuguuggcuuuaa

SEQ ID NO: 1762147 - RNA, 19 nt, Artificial Sequence
  Description of Artificial Sequence: Synthetic oligonucleotide
gguagcccggucuggaaag

SEQ ID NO: 1762148 - RNA, 19 nt, Artificial Sequence
  Description of Artificial Sequence: Synthetic oligonucleotide
ggcuuuaacaaucuucacu

SEQ ID NO: 1762149 - RNA, 19 nt, Artificial Sequence
  Description of Artificial Sequence: Synthetic oligonucleotide
gggcauaggagucaaagua

SEQ ID NO: 1762150 - RNA, 19 nt, Artificial Sequence
  Description of Artificial Sequence: Synthetic oligonucleotide
caucccgagccccuucugc

SEQ ID NO: 1762151 - RNA, 19 nt, Artificial Sequence
  Description of Artificial Sequence: Synthetic oligonucleotide
ggacucguagaagaggcag

SEQ ID NO: 1762152 - RNA, 19 nt, Artificial Sequence
  Description of Artificial Sequence: Synthetic oligonucleotide
cuuuauacugucgguccuc

SEQ ID NO: 1762153 - RNA, 19 nt, Artificial Sequence
  Description of Artificial Sequence: Synthetic oligonucleotide
agggcucuuugauggccac

SEQ ID NO: 1762154 - RNA, 19 nt, Artificial Sequence
  Description of Artificial Sequence: Synthetic oligonucleotide
guagucauuccucuucacu

SEQ ID NO: 1762155 - RNA, 19 nt, Artificial Sequence
  Description of Artificial Sequence: Synthetic oligonucleotide
accuccuuuaugaggcagg

SEQ ID NO: 1762156 - RNA, 19 nt, Artificial Sequence
  Description of Artificial Sequence: Synthetic oligonucleotide
cacgauguacccucccauc

SEQ ID NO: 1762157 - RNA, 19 nt, Artificial Sequence
  Description of Artificial Sequence: Synthetic oligonucleotide
uucucccaccaguggaucu

SEQ ID NO: 1762158 - RNA, 19 nt, Artificial Sequence
  Description of Artificial Sequence: Synthetic oligonucleotide
guugcgguauguaagggua

SEQ ID NO: 1762159 - RNA, 19 nt, Artificial Sequence
  Description of Artificial Sequence: Synthetic oligonucleotide
auggucaccacguggucua

SEQ ID NO: 1762160 - RNA, 19 nt, Artificial Sequence
  Description of Artificial Sequence: Synthetic oligonucleotide
uuggcgcaaacgcaaccau

SEQ ID NO: 1762161 - RNA, 19 nt, Artificial Sequence
  Description of Artificial Sequence: Synthetic oligonucleotide
ugaugucaaccuuguccac

SEQ ID NO: 1762162 - RNA, 19 nt, Artificial Sequence
  Description of Artificial Sequence: Synthetic oligonucleotide
ggaugccagugccugaacc

SEQ ID NO: 1762163 - RNA, 19 nt, Artificial Sequence
  Description of Artificial Sequence: Synthetic oligonucleotide
caccaagggcucuuugaug

SEQ ID NO: 1762164 - RNA, 19 nt, Artificial Sequence
  Description of Artificial Sequence: Synthetic oligonucleotide
aagggcucuuugauggcca

SEQ ID NO: 1762165 - RNA, 19 nt, Artificial Sequence
  Description of Artificial Sequence: Synthetic oligonucleotide
ugauggucaccacgugguc

SEQ ID NO: 1762166 - RNA, 19 nt, Artificial Sequence
  Description of Artificial Sequence: Synthetic oligonucleotide
ggacauaucaaaaccauau

SEQ ID NO: 1762167 - RNA, 19 nt, Artificial Sequence
  Description of Artificial Sequence: Synthetic oligonucleotide
ugcaguucgcggccucggc

SEQ ID NO: 1762168 - RNA, 19 nt, Artificial Sequence
  Description of Artificial Sequence: Synthetic oligonucleotide
aaggguagcccggucugga

SEQ ID NO: 1762169 - RNA, 19 nt, Artificial Sequence
  Description of Artificial Sequence: Synthetic oligonucleotide
ucgaacacucaaucccaau

SEQ ID NO: 1762170 - RNA, 19 nt, Artificial Sequence
  Description of Artificial Sequence: Synthetic oligonucleotide
caguucgcggccucggcug

SEQ ID NO: 1762171 - RNA, 19 nt, Artificial Sequence
  Description of Artificial Sequence: Synthetic oligonucleotide
gucacgauguacccuccca

SEQ ID NO: 1762172 - RNA, 19 nt, Artificial Sequence
  Description of Artificial Sequence: Synthetic oligonucleotide
acauaaaggguagcccggu

SEQ ID NO: 1762173 - RNA, 19 nt, Artificial Sequence
  Description of Artificial Sequence: Synthetic oligonucleotide
ucgcgggcaugcagcacgg

SEQ ID NO: 1762174 - RNA, 19 nt, Artificial Sequence
  Description of Artificial Sequence: Synthetic oligonucleotide
ggucuggaaagaugagccc

SEQ ID NO: 1762175 - RNA, 19 nt, Artificial Sequence
  Description of Artificial Sequence: Synthetic oligonucleotide
auaaucagauaugcucgaa

SEQ ID NO: 1762176 - RNA, 19 nt, Artificial Sequence
  Description of Artificial Sequence: Synthetic oligonucleotide
cuugcccuugaugaugguc

SEQ ID NO: 1762177 - RNA, 19 nt, Artificial Sequence
  Description of Artificial Sequence: Synthetic oligonucleotide
cauaaaggguagcccgguc

SEQ ID NO: 1762178 - RNA, 19 nt, Artificial Sequence
  Description of Artificial Sequence: Synthetic oligonucleotide
ggcggcuggaggcucaucc

SEQ ID NO: 1762179 - RNA, 19 nt, Artificial Sequence
  Description of Artificial Sequence: Synthetic oligonucleotide
gcuucucacugcuuucugc

SEQ ID NO: 1762180 - RNA, 19 nt, Artificial Sequence
  Description of Artificial Sequence: Synthetic oligonucleotide
acucaggacugguggaaaa

SEQ ID NO: 1762181 - RNA, 19 nt, Artificial Sequence
  Description of Artificial Sequence: Synthetic oligonucleotide
gcaguagcccauccacucg

SEQ ID NO: 1762182 - RNA, 19 nt, Artificial Sequence
  Description of Artificial Sequence: Synthetic oligonucleotide
ucaccacguggucuaacuu

SEQ ID NO: 1762183 - RNA, 19 nt, Artificial Sequence
  Description of Artificial Sequence: Synthetic oligonucleotide
ggccucaugccaauggugc

SEQ ID NO: 1762184 - RNA, 19 nt, Artificial Sequence
  Description of Artificial Sequence: Synthetic oligonucleotide
gcugucacauaaaggguag

SEQ ID NO: 1762185 - RNA, 19 nt, Artificial Sequence
  Description of Artificial Sequence: Synthetic oligonucleotide
uugucgcgggcaugcagca

SEQ ID NO: 1762186 - RNA, 19 nt, Artificial Sequence
  Description of Artificial Sequence: Synthetic oligonucleotide
cuuuaugaggcaggcauua

SEQ ID NO: 1762187 - RNA, 19 nt, Artificial Sequence
  Description of Artificial Sequence: Synthetic oligonucleotide
ccucuuguggcaucgggug

SEQ ID NO: 1762188 - RNA, 19 nt, Artificial Sequence
  Description of Artificial Sequence: Synthetic oligonucleotide
guauggggacucaggacug

SEQ ID NO: 1762189 - RNA, 19 nt, Artificial Sequence
  Description of Artificial Sequence: Synthetic oligonucleotide
auaugcucgaacacucaau

SEQ ID NO: 1762190 - RNA, 19 nt, Artificial Sequence
  Description of Artificial Sequence: Synthetic oligonucleotide
aguaggccaccaaugcgug

SEQ ID NO: 1762191 - RNA, 19 nt, Artificial Sequence
  Description of Artificial Sequence: Synthetic oligonucleotide
guacgcaccucauccuuca

SEQ ID NO: 1762192 - RNA, 19 nt, Artificial Sequence
  Description of Artificial Sequence: Synthetic oligonucleotide
aggguacgcaccucauccu

SEQ ID NO: 1762193 - RNA, 19 nt, Artificial Sequence
  Description of Artificial Sequence: Synthetic oligonucleotide
uggcaucgggugaacucga

SEQ ID NO: 1762194 - RNA, 19 nt, Artificial Sequence
  Description of Artificial Sequence: Synthetic oligonucleotide
uggcgcaaacgcaaccaua

SEQ ID NO: 1762195 - RNA, 19 nt, Artificial Sequence
  Description of Artificial Sequence: Synthetic oligonucleotide
cgaacacucaaucccaaug

SEQ ID NO: 1762196 - RNA, 19 nt, Artificial Sequence
  Description of Artificial Sequence: Synthetic oligonucleotide
ugcgugcacguagucauuc

SEQ ID NO: 1762197 - RNA, 19 nt, Artificial Sequence
  Description of Artificial Sequence: Synthetic oligonucleotide
uagccaagguggcuacaaa

SEQ ID NO: 1762198 - RNA, 19 nt, Artificial Sequence
  Description of Artificial Sequence: Synthetic oligonucleotide
uggaugccaaagugggcau

SEQ ID NO: 1762199 - RNA, 19 nt, Artificial Sequence
  Description of Artificial Sequence: Synthetic oligonucleotide
cuucacuuguaggcagaag

SEQ ID NO: 1762200 - RNA, 19 nt, Artificial Sequence
  Description of Artificial Sequence: Synthetic oligonucleotide
uuauacugucgguccucaa

SEQ ID NO: 1762201 - RNA, 19 nt, Artificial Sequence
  Description of Artificial Sequence: Synthetic oligonucleotide
gcaggacauaucaaaacca

SEQ ID NO: 1762202 - RNA, 19 nt, Artificial Sequence
  Description of Artificial Sequence: Synthetic oligonucleotide
aagugggcauaggagucaa

SEQ ID NO: 1762203 - RNA, 19 nt, Artificial Sequence
  Description of Artificial Sequence: Synthetic oligonucleotide
ggcucaucccauuagccaa

SEQ ID NO: 1762204 - RNA, 19 nt, Artificial Sequence
  Description of Artificial Sequence: Synthetic oligonucleotide
cuaccuugacuguauaaau

SEQ ID NO: 1762205 - RNA, 19 nt, Artificial Sequence
  Description of Artificial Sequence: Synthetic oligonucleotide
gagcaagagagcucacaua

SEQ ID NO: 1762206 - RNA, 19 nt, Artificial Sequence
  Description of Artificial Sequence: Synthetic oligonucleotide
agauaugcucgaacacuca

SEQ ID NO: 1762207 - RNA, 19 nt, Artificial Sequence
  Description of Artificial Sequence: Synthetic oligonucleotide
gcauccgguagucagugga

SEQ ID NO: 1762208 - RNA, 19 nt, Artificial Sequence
  Description of Artificial Sequence: Synthetic oligonucleotide
ugauggccacgucuuugau

SEQ ID NO: 1762209 - RNA, 19 nt, Artificial Sequence
  Description of Artificial Sequence: Synthetic oligonucleotide
aggccaccaaugcgugcac

SEQ ID NO: 1762210 - RNA, 19 nt, Artificial Sequence
  Description of Artificial Sequence: Synthetic oligonucleotide
cugucacauaaaggguagc

SEQ ID NO: 1762211 - RNA, 19 nt, Artificial Sequence
  Description of Artificial Sequence: Synthetic oligonucleotide
accaaugcgugcacguagu

SEQ ID NO: 1762212 - RNA, 19 nt, Artificial Sequence
  Description of Artificial Sequence: Synthetic oligonucleotide
gcaaacgcaaccauauaaa

SEQ ID NO: 1762213 - RNA, 19 nt, Artificial Sequence
  Description of Artificial Sequence: Synthetic oligonucleotide
agugaccagcugcuucgga

SEQ ID NO: 1762214 - RNA, 19 nt, Artificial Sequence
  Description of Artificial Sequence: Synthetic oligonucleotide
caggacauaucaaaaccau

SEQ ID NO: 1762215 - RNA, 19 nt, Artificial Sequence
  Description of Artificial Sequence: Synthetic oligonucleotide
cuugcgggccccugccuug

SEQ ID NO: 1762216 - RNA, 19 nt, Artificial Sequence
  Description of Artificial Sequence: Synthetic oligonucleotide
cacgucuuugaugcaggac

SEQ ID NO: 1762217 - RNA, 19 nt, Artificial Sequence
  Description of Artificial Sequence: Synthetic oligonucleotide
guaggccaccaaugcgugc

SEQ ID NO: 1762218 - RNA, 19 nt, Artificial Sequence
  Description of Artificial Sequence: Synthetic oligonucleotide
guaguagucuuuggauguc

SEQ ID NO: 1762219 - RNA, 19 nt, Artificial Sequence
  Description of Artificial Sequence: Synthetic oligonucleotide
caaugcgugcacguaguca

SEQ ID NO: 1762220 - RNA, 19 nt, Artificial Sequence
  Description of Artificial Sequence: Synthetic oligonucleotide
aggacauaucaaaaccaua

SEQ ID NO: 1762221 - RNA, 19 nt, Artificial Sequence
  Description of Artificial Sequence: Synthetic oligonucleotide
cagucacgauguacccucc

SEQ ID NO: 1762222 - RNA, 19 nt, Artificial Sequence
  Description of Artificial Sequence: Synthetic oligonucleotide
augcaguucgcggccucgg

SEQ ID NO: 1762223 - RNA, 19 nt, Artificial Sequence
  Description of Artificial Sequence: Synthetic oligonucleotide
gaggaugccagugccugaa

SEQ ID NO: 1762224 - RNA, 19 nt, Artificial Sequence
  Description of Artificial Sequence: Synthetic oligonucleotide
gugaaguccaagucgcgau

SEQ ID NO: 1762225 - RNA, 19 nt, Artificial Sequence
  Description of Artificial Sequence: Synthetic oligonucleotide
gcugcuucggauccaccac

SEQ ID NO: 1762226 - RNA, 19 nt, Artificial Sequence
  Description of Artificial Sequence: Synthetic oligonucleotide
caauggugccaaagaucuc

SEQ ID NO: 1762227 - RNA, 19 nt, Artificial Sequence
  Description of Artificial Sequence: Synthetic oligonucleotide
aaugaccuugcgggccccu

SEQ ID NO: 1762228 - RNA, 19 nt, Artificial Sequence
  Description of Artificial Sequence: Synthetic oligonucleotide
ggugaaguccaagucgcga

SEQ ID NO: 1762229 - RNA, 19 nt, Artificial Sequence
  Description of Artificial Sequence: Synthetic oligonucleotide
cugucgguccucaauggcu

SEQ ID NO: 1762230 - RNA, 19 nt, Artificial Sequence
  Description of Artificial Sequence: Synthetic oligonucleotide
gucauuccucuucacuugu

SEQ ID NO: 1762231 - RNA, 19 nt, Artificial Sequence
  Description of Artificial Sequence: Synthetic oligonucleotide
gugcacguagucauuccuc

SEQ ID NO: 1762232 - RNA, 19 nt, Artificial Sequence
  Description of Artificial Sequence: Synthetic oligonucleotide
uucgcggccucggcugccg

SEQ ID NO: 1762233 - RNA, 19 nt, Artificial Sequence
  Description of Artificial Sequence: Synthetic oligonucleotide
gccucagcgcauccgguag

SEQ ID NO: 1762234 - RNA, 19 nt, Artificial Sequence
  Description of Artificial Sequence: Synthetic oligonucleotide
agccgguccucuuguggca

SEQ ID NO: 1762235 - RNA, 19 nt, Artificial Sequence
  Description of Artificial Sequence: Synthetic oligonucleotide
gcaucgggugaacucgaug

SEQ ID NO: 1762236 - RNA, 19 nt, Artificial Sequence
  Description of Artificial Sequence: Synthetic oligonucleotide
ucggauccaccacguccac

SEQ ID NO: 1762237 - RNA, 19 nt, Artificial Sequence
  Description of Artificial Sequence: Synthetic oligonucleotide
cagcacgguguugagcaug

SEQ ID NO: 1762238 - RNA, 19 nt, Artificial Sequence
  Description of Artificial Sequence: Synthetic oligonucleotide
ucagcgcauccgguaguca

SEQ ID NO: 1762239 - RNA, 19 nt, Artificial Sequence
  Description of Artificial Sequence: Synthetic oligonucleotide
auuagccaagguggcuaca

SEQ ID NO: 1762240 - RNA, 19 nt, Artificial Sequence
  Description of Artificial Sequence: Synthetic oligonucleotide
cucgaacacucaaucccaa

SEQ ID NO: 1762241 - RNA, 19 nt, Artificial Sequence
  Description of Artificial Sequence: Synthetic oligonucleotide
ucccaccaguggaucuugu

SEQ ID NO: 1762242 - RNA, 19 nt, Artificial Sequence
  Description of Artificial Sequence: Synthetic oligonucleotide
aguccaagucgcgauuguu

SEQ ID NO: 1762243 - RNA, 19 nt, Artificial Sequence
  Description of Artificial Sequence: Synthetic oligonucleotide
gugaccagcugcuucggau

SEQ ID NO: 1762244 - RNA, 19 nt, Artificial Sequence
  Description of Artificial Sequence: Synthetic oligonucleotide
ccggucuggaaagaugagc

SEQ ID NO: 1762245 - RNA, 19 nt, Artificial Sequence
  Description of Artificial Sequence: Synthetic oligonucleotide
guccaccaagggcucuuug

SEQ ID NO: 1762246 - RNA, 19 nt, Artificial Sequence
  Description of Artificial Sequence: Synthetic oligonucleotide
cucagcgcauccgguaguc

SEQ ID NO: 1762247 - RNA, 19 nt, Artificial Sequence
  Description of Artificial Sequence: Synthetic oligonucleotide
cagugccugaacccacauc

SEQ ID NO: 1762248 - RNA, 19 nt, Artificial Sequence
  Description of Artificial Sequence: Synthetic oligonucleotide
agcccggucuggaaagaug

SEQ ID NO: 1762249 - RNA, 19 nt, Artificial Sequence
  Description of Artificial Sequence: Synthetic oligonucleotide
ggcugucacauaaagggua

SEQ ID NO: 1762250 - RNA, 19 nt, Artificial Sequence
  Description of Artificial Sequence: Synthetic oligonucleotide
gcaagagagcucacauagc

SEQ ID NO: 1762251 - RNA, 19 nt, Artificial Sequence
  Description of Artificial Sequence: Synthetic oligonucleotide
gcgggcaugcagcacggug

SEQ ID NO: 1762252 - RNA, 19 nt, Artificial Sequence
  Description of Artificial Sequence: Synthetic oligonucleotide
gcucgaacacucaauccca

SEQ ID NO: 1762253 - RNA, 19 nt, Artificial Sequence
  Description of Artificial Sequence: Synthetic oligonucleotide
uccacucgcugaugaugau

SEQ ID NO: 1762254 - RNA, 19 nt, Artificial Sequence
  Description of Artificial Sequence: Synthetic oligonucleotide
cuggaaagaugagcccauc

SEQ ID NO: 1762255 - RNA, 19 nt, Artificial Sequence
  Description of Artificial Sequence: Synthetic oligonucleotide
gacucguagaagaggcagu

SEQ ID NO: 1762256 - RNA, 19 nt, Artificial Sequence
  Description of Artificial Sequence: Synthetic oligonucleotide
ccacuugucgcgggcaugc

SEQ ID NO: 1762257 - RNA, 19 nt, Artificial Sequence
  Description of Artificial Sequence: Synthetic oligonucleotide
aggguagcccggucuggaa

SEQ ID NO: 1762258 - RNA, 19 nt, Artificial Sequence
  Description of Artificial Sequence: Synthetic oligonucleotide
guguugagcauggacucgu

SEQ ID NO: 1762259 - RNA, 19 nt, Artificial Sequence
  Description of Artificial Sequence: Synthetic oligonucleotide
cgauguacccucccauccc

SEQ ID NO: 1762260 - RNA, 19 nt, Artificial Sequence
  Description of Artificial Sequence: Synthetic oligonucleotide
cacauagcuggcccuugaa

SEQ ID NO: 1762261 - RNA, 19 nt, Artificial Sequence
  Description of Artificial Sequence: Synthetic oligonucleotide
gggaggugaaggucagguc

SEQ ID NO: 1762262 - RNA, 19 nt, Artificial Sequence
  Description of Artificial Sequence: Synthetic oligonucleotide
aggugccgauugugaaaca

SEQ ID NO: 1762263 - RNA, 19 nt, Artificial Sequence
  Description of Artificial Sequence: Synthetic oligonucleotide
gguggaaaagccgguccuc

SEQ ID NO: 1762264 - RNA, 19 nt, Artificial Sequence
  Description of Artificial Sequence: Synthetic oligonucleotide
gcccggucuggaaagauga

SEQ ID NO: 1762265 - RNA, 19 nt, Artificial Sequence
  Description of Artificial Sequence: Synthetic oligonucleotide
gccugaacccacauccaac

SEQ ID NO: 1762266 - RNA, 19 nt, Artificial Sequence
  Description of Artificial Sequence: Synthetic oligonucleotide
gcgugcacguagucauucc

SEQ ID NO: 1762267 - RNA, 19 nt, Artificial Sequence
  Description of Artificial Sequence: Synthetic oligonucleotide
ccaagggcucuuugauggc

SEQ ID NO: 1762268 - RNA, 19 nt, Artificial Sequence
  Description of Artificial Sequence: Synthetic oligonucleotide
cgguguugagcauggacuc

SEQ ID NO: 1762269 - RNA, 19 nt, Artificial Sequence
  Description of Artificial Sequence: Synthetic oligonucleotide
guggaucuuguagucuuua

SEQ ID NO: 1762270 - RNA, 19 nt, Artificial Sequence
  Description of Artificial Sequence: Synthetic oligonucleotide
cgauugugaaacauggagu

SEQ ID NO: 1762271 - RNA, 19 nt, Artificial Sequence
  Description of Artificial Sequence: Synthetic oligonucleotide
caaugaccuugcgggcccc

SEQ ID NO: 1762272 - RNA, 19 nt, Artificial Sequence
  Description of Artificial Sequence: Synthetic oligonucleotide
gguacgcaccucauccuuc

SEQ ID NO: 1762273 - RNA, 19 nt, Artificial Sequence
  Description of Artificial Sequence: Synthetic oligonucleotide
uagcccggucuggaaagau

SEQ ID NO: 1762274 - RNA, 19 nt, Artificial Sequence
  Description of Artificial Sequence: Synthetic oligonucleotide
gcauaggagucaaaguagu

SEQ ID NO: 1762275 - RNA, 19 nt, Artificial Sequence
  Description of Artificial Sequence: Synthetic oligonucleotide
guggucuaacuuguuggcu

SEQ ID NO: 1762276 - RNA, 19 nt, Artificial Sequence
  Description of Artificial Sequence: Synthetic oligonucleotide
cucaugccaauggugccaa

SEQ ID NO: 1762277 - RNA, 19 nt, Artificial Sequence
  Description of Artificial Sequence: Synthetic oligonucleotide
gcgguauguaaggguacgc

SEQ ID NO: 1762278 - RNA, 19 nt, Artificial Sequence
  Description of Artificial Sequence: Synthetic oligonucleotide
ggcgcaaacgcaaccauau

SEQ ID NO: 1762279 - RNA, 19 nt, Artificial Sequence
  Description of Artificial Sequence: Synthetic oligonucleotide
cccaucgggugccagccac

SEQ ID NO: 1762280 - RNA, 19 nt, Artificial Sequence
  Description of Artificial Sequence: Synthetic oligonucleotide
ggcucuuugauggccacgu

SEQ ID NO: 1762281 - RNA, 19 nt, Artificial Sequence
  Description of Artificial Sequence: Synthetic oligonucleotide
gggcucuuugauggccacg

SEQ ID NO: 1762282 - RNA, 19 nt, Artificial Sequence
  Description of Artificial Sequence: Synthetic oligonucleotide
ccagccacuugucgcgggc

SEQ ID NO: 1762283 - RNA, 19 nt, Artificial Sequence
  Description of Artificial Sequence: Synthetic oligonucleotide
ugucgcgggcaugcagcac

SEQ ID NO: 1762284 - RNA, 19 nt, Artificial Sequence
  Description of Artificial Sequence: Synthetic oligonucleotide
cagucuucacugugaggua

SEQ ID NO: 1762285 - RNA, 19 nt, Artificial Sequence
  Description of Artificial Sequence: Synthetic oligonucleotide
cccgagccccuucugcagg

SEQ ID NO: 1762286 - RNA, 19 nt, Artificial Sequence
  Description of Artificial Sequence: Synthetic oligonucleotide
ccuugaugauggucaccac

SEQ ID NO: 1762287 - RNA, 19 nt, Artificial Sequence
  Description of Artificial Sequence: Synthetic oligonucleotide
ggggaggugaaggucaggu

SEQ ID NO: 1762288 - RNA, 19 nt, Artificial Sequence
  Description of Artificial Sequence: Synthetic oligonucleotide
cuccuuuaugaggcaggca

SEQ ID NO: 1762289 - RNA, 19 nt, Artificial Sequence
  Description of Artificial Sequence: Synthetic oligonucleotide
gcgcauccgguagucagug

SEQ ID NO: 1762290 - RNA, 19 nt, Artificial Sequence
  Description of Artificial Sequence: Synthetic oligonucleotide
gguagucaguggagcaaga

SEQ ID NO: 1762291 - RNA, 19 nt, Artificial Sequence
  Description of Artificial Sequence: Synthetic oligonucleotide
gguccucuuguggcaucgg

SEQ ID NO: 1762292 - RNA, 19 nt, Artificial Sequence
  Description of Artificial Sequence: Synthetic oligonucleotide
guagcccggucuggaaaga

SEQ ID NO: 1762293 - RNA, 19 nt, Artificial Sequence
  Description of Artificial Sequence: Synthetic oligonucleotide
cccggucuggaaagaugag

SEQ ID NO: 1762294 - RNA, 19 nt, Artificial Sequence
  Description of Artificial Sequence: Synthetic oligonucleotide
gucagccuggcagcgccuc

SEQ ID NO: 1762295 - RNA, 19 nt, Artificial Sequence
  Description of Artificial Sequence: Synthetic oligonucleotide
ggucuaacuuguuggcuuu

SEQ ID NO: 1762296 - RNA, 19 nt, Artificial Sequence
  Description of Artificial Sequence: Synthetic oligonucleotide
gccaccaaugcgugcacgu

SEQ ID NO: 1762297 - RNA, 19 nt, Artificial Sequence
  Description of Artificial Sequence: Synthetic oligonucleotide
ccauuagccaagguggcua

SEQ ID NO: 1762298 - RNA, 19 nt, Artificial Sequence
  Description of Artificial Sequence: Synthetic oligonucleotide
cacagucacgauguacccu

SEQ ID NO: 1762299 - RNA, 19 nt, Artificial Sequence
  Description of Artificial Sequence: Synthetic oligonucleotide
gucuuugaugcaggacaua

SEQ ID NO: 1762300 - RNA, 19 nt, Artificial Sequence
  Description of Artificial Sequence: Synthetic oligonucleotide
acguccaccaagggcucuu

SEQ ID NO: 1762301 - RNA, 19 nt, Artificial Sequence
  Description of Artificial Sequence: Synthetic oligonucleotide
ggugccgauugugaaacau

SEQ ID NO: 1762302 - RNA, 19 nt, Artificial Sequence
  Description of Artificial Sequence: Synthetic oligonucleotide
caguguguguauggggacu

SEQ ID NO: 1762303 - RNA, 19 nt, Artificial Sequence
  Description of Artificial Sequence: Synthetic oligonucleotide
gccgauugugaaacaugga

SEQ ID NO: 1762304 - RNA, 19 nt, Artificial Sequence
  Description of Artificial Sequence: Synthetic oligonucleotide
guaaggguacgcaccucau

SEQ ID NO: 1762305 - RNA, 19 nt, Artificial Sequence
  Description of Artificial Sequence: Synthetic oligonucleotide
gcuucggauccaccacguc

SEQ ID NO: 1762306 - RNA, 19 nt, Artificial Sequence
  Description of Artificial Sequence: Synthetic oligonucleotide
guucgcggccucggcugcc

SEQ ID NO: 1762307 - RNA, 19 nt, Artificial Sequence
  Description of Artificial Sequence: Synthetic oligonucleotide
ggucaccacguggucuaac

SEQ ID NO: 1762308 - RNA, 19 nt, Artificial Sequence
  Description of Artificial Sequence: Synthetic oligonucleotide
agugggcauaggagucaaa

SEQ ID NO: 1762309 - RNA, 19 nt, Artificial Sequence
  Description of Artificial Sequence: Synthetic oligonucleotide
gcaguucgcggccucggcu

SEQ ID NO: 1762310 - RNA, 19 nt, Artificial Sequence
  Description of Artificial Sequence: Synthetic oligonucleotide
cagccacuugucgcgggca

SEQ ID NO: 1762311 - RNA, 19 nt, Artificial Sequence
  Description of Artificial Sequence: Synthetic oligonucleotide
cgcauccgguagucagugg

SEQ ID NO: 1762312 - RNA, 19 nt, Artificial Sequence
  Description of Artificial Sequence: Synthetic oligonucleotide
ggguacgcaccucauccuu

SEQ ID NO: 1762313 - RNA, 19 nt, Artificial Sequence
  Description of Artificial Sequence: Synthetic oligonucleotide
augcgugcacguagucauu

SEQ ID NO: 1762314 - RNA, 19 nt, Artificial Sequence
  Description of Artificial Sequence: Synthetic oligonucleotide
gcuugagcacaggaaacuu

SEQ ID NO: 1762315 - RNA, 19 nt, Artificial Sequence
  Description of Artificial Sequence: Synthetic oligonucleotide
ccaucccgagccccuucug

SEQ ID NO: 1762316 - RNA, 19 nt, Artificial Sequence
  Description of Artificial Sequence: Synthetic oligonucleotide
gcgcaaacgcaaccauaua

SEQ ID NO: 1762317 - RNA, 19 nt, Artificial Sequence
  Description of Artificial Sequence: Synthetic oligonucleotide
uuuuggcguugggccucau

SEQ ID NO: 1762318 - RNA, 19 nt, Artificial Sequence
  Description of Artificial Sequence: Synthetic oligonucleotide
ggaugccaaagugggcaua

SEQ ID NO: 1762319 - RNA, 19 nt, Artificial Sequence
  Description of Artificial Sequence: Synthetic oligonucleotide
cacuugucgcgggcaugca

SEQ ID NO: 1762320 - RNA, 19 nt, Artificial Sequence
  Description of Artificial Sequence: Synthetic oligonucleotide
ccuuuaugaggcaggcauu

SEQ ID NO: 1762321 - RNA, 19 nt, Artificial Sequence
  Description of Artificial Sequence: Synthetic oligonucleotide
ccgguagucaguggagcaa

SEQ ID NO: 1762322 - RNA, 19 nt, Artificial Sequence
  Description of Artificial Sequence: Synthetic oligonucleotide
cgugcacguagucauuccu

SEQ ID NO: 1762323 - RNA, 19 nt, Artificial Sequence
  Description of Artificial Sequence: Synthetic oligonucleotide
ccgguccucuuguggcauc

SEQ ID NO: 1762324 - RNA, 19 nt, Artificial Sequence
  Description of Artificial Sequence: Synthetic oligonucleotide
gcacguagucauuccucuu

SEQ ID NO: 1762325 - RNA, 19 nt, Artificial Sequence
  Description of Artificial Sequence: Synthetic oligonucleotide
ccucuaccuugacuguaua

SEQ ID NO: 1762326 - RNA, 19 nt, Artificial Sequence
  Description of Artificial Sequence: Synthetic oligonucleotide
gcuggaggcucaucccauu

SEQ ID NO: 1762327 - RNA, 19 nt, Artificial Sequence
  Description of Artificial Sequence: Synthetic oligonucleotide
ccaccaaugcgugcacgua

SEQ ID NO: 1762328 - RNA, 19 nt, Artificial Sequence
  Description of Artificial Sequence: Synthetic oligonucleotide
gaggcggcuggaggcucau

SEQ ID NO: 1762329 - RNA, 19 nt, Artificial Sequence
  Description of Artificial Sequence: Synthetic oligonucleotide
ccucagcgcauccgguagu

SEQ ID NO: 1762330 - RNA, 19 nt, Artificial Sequence
  Description of Artificial Sequence: Synthetic oligonucleotide
gcacgguguugagcaugga

SEQ ID NO: 1762331 - RNA, 19 nt, Artificial Sequence
  Description of Artificial Sequence: Synthetic oligonucleotide
cgccucagcgcauccggua

SEQ ID NO: 1762332 - RNA, 19 nt, Artificial Sequence
  Description of Artificial Sequence: Synthetic oligonucleotide
ggcaucgggugaacucgau

SEQ ID NO: 1762333 - RNA, 19 nt, Artificial Sequence
  Description of Artificial Sequence: Synthetic oligonucleotide
ccagugccugaacccacau

SEQ ID NO: 1762334 - RNA, 19 nt, Artificial Sequence
  Description of Artificial Sequence: Synthetic oligonucleotide
gcgggccccugccuuggcu

SEQ ID NO: 1762335 - RNA, 19 nt, Artificial Sequence
  Description of Artificial Sequence: Synthetic oligonucleotide
ccuugcgggccccugccuu

SEQ ID NO: 1762336 - RNA, 19 nt, Artificial Sequence
  Description of Artificial Sequence: Synthetic oligonucleotide
ccucgccagucuucacugu

SEQ ID NO: 1762337 - RNA, 19 nt, Artificial Sequence
  Description of Artificial Sequence: Synthetic oligonucleotide
ggucagccuggcagcgccu

SEQ ID NO: 1762338 - RNA, 19 nt, Artificial Sequence
  Description of Artificial Sequence: Synthetic oligonucleotide
gccgguccucuuguggcau

SEQ ID NO: 1762339 - RNA, 19 nt, Artificial Sequence
  Description of Artificial Sequence: Synthetic oligonucleotide
cguccaccaagggcucuuu

SEQ ID NO: 1762340 - RNA, 19 nt, Artificial Sequence
  Description of Artificial Sequence: Synthetic oligonucleotide
cgcgggcaugcagcacggu

SEQ ID NO: 1762341 - RNA, 19 nt, Artificial Sequence
  Description of Artificial Sequence: Synthetic oligonucleotide
ucuauaaucaaacagccug

SEQ ID NO: 1762342 - RNA, 19 nt, Artificial Sequence
  Description of Artificial Sequence: Synthetic oligonucleotide
ucugaaaucuucaaggaca

SEQ ID NO: 1762343 - RNA, 19 nt, Artificial Sequence
  Description of Artificial Sequence: Synthetic oligonucleotide
uuuagguuuccaaugaaga

SEQ ID NO: 1762344 - RNA, 19 nt, Artificial Sequence
  Description of Artificial Sequence: Synthetic oligonucleotide
aagacccgagaauugaugg

SEQ ID NO: 1762345 - RNA, 19 nt, Artificial Sequence
  Description of Artificial Sequence: Synthetic oligonucleotide
uguagaacgggcaaagagc

SEQ ID NO: 1762346 - RNA, 19 nt, Artificial Sequence
  Description of Artificial Sequence: Synthetic oligonucleotide
aaagaugguuuccacaucu

SEQ ID NO: 1762347 - RNA, 19 nt, Artificial Sequence
  Description of Artificial Sequence: Synthetic oligonucleotide
gacacggcgaaccaaaggg

SEQ ID NO: 1762348 - RNA, 19 nt, Artificial Sequence
  Description of Artificial Sequence: Synthetic oligonucleotide
ucgauguuggacuugaucu

SEQ ID NO: 1762349 - RNA, 19 nt, Artificial Sequence
  Description of Artificial Sequence: Synthetic oligonucleotide
auugauggaacuugggguc

SEQ ID NO: 1762350 - RNA, 19 nt, Artificial Sequence
  Description of Artificial Sequence: Synthetic oligonucleotide
uuugauggucuguaguucg

SEQ ID NO: 1762351 - RNA, 19 nt, Artificial Sequence
  Description of Artificial Sequence: Synthetic oligonucleotide
aaaggcggccucuauaauc

SEQ ID NO: 1762352 - RNA, 19 nt, Artificial Sequence
  Description of Artificial Sequence: Synthetic oligonucleotide
gucagcucuguuuugaugg

SEQ ID NO: 1762353 - RNA, 19 nt, Artificial Sequence
  Description of Artificial Sequence: Synthetic oligonucleotide
gguauuguaguuuugacac

SEQ ID NO: 1762354 - RNA, 19 nt, Artificial Sequence
  Description of Artificial Sequence: Synthetic oligonucleotide
ucugguacccacuacaaac

SEQ ID NO: 1762355 - RNA, 19 nt, Artificial Sequence
  Description of Artificial Sequence: Synthetic oligonucleotide
acuugaucuuggcugagcc

SEQ ID NO: 1762356 - RNA, 19 nt, Artificial Sequence
  Description of Artificial Sequence: Synthetic oligonucleotide
agugaugcccuucuucugc

SEQ ID NO: 1762357 - RNA, 19 nt, Artificial Sequence
  Description of Artificial Sequence: Synthetic oligonucleotide
uguguuuagguuuccaaug

SEQ ID NO: 1762358 - RNA, 19 nt, Artificial Sequence
  Description of Artificial Sequence: Synthetic oligonucleotide
aauguguucugccccuugg

SEQ ID NO: 1762359 - RNA, 19 nt, Artificial Sequence
  Description of Artificial Sequence: Synthetic oligonucleotide
uguaguuuugacacggcga

SEQ ID NO: 1762360 - RNA, 19 nt, Artificial Sequence
  Description of Artificial Sequence: Synthetic oligonucleotide
aauucccuggggaagaagg

SEQ ID NO: 1762361 - RNA, 19 nt, Artificial Sequence
  Description of Artificial Sequence: Synthetic oligonucleotide
uuguaguuuugacacggcg

SEQ ID NO: 1762362 - RNA, 19 nt, Artificial Sequence
  Description of Artificial Sequence: Synthetic oligonucleotide
uuggggucuauucuuauug

SEQ ID NO: 1762363 - RNA, 19 nt, Artificial Sequence
  Description of Artificial Sequence: Synthetic oligonucleotide
uugugcacagaacauccgg

SEQ ID NO: 1762364 - RNA, 19 nt, Artificial Sequence
  Description of Artificial Sequence: Synthetic oligonucleotide
gaucuguuccaaucgaccc

SEQ ID NO: 1762365 - RNA, 19 nt, Artificial Sequence
  Description of Artificial Sequence: Synthetic oligonucleotide
uuuuccugcuuacugcaag

SEQ ID NO: 1762366 - RNA, 19 nt, Artificial Sequence
  Description of Artificial Sequence: Synthetic oligonucleotide
uguuuugauggucuguagu

SEQ ID NO: 1762367 - RNA, 19 nt, Artificial Sequence
  Description of Artificial Sequence: Synthetic oligonucleotide
uuagguuuccaaugaagac

SEQ ID NO: 1762368 - RNA, 19 nt, Artificial Sequence
  Description of Artificial Sequence: Synthetic oligonucleotide
uugguuacauugcuggucu

SEQ ID NO: 1762369 - RNA, 19 nt, Artificial Sequence
  Description of Artificial Sequence: Synthetic oligonucleotide
guuccaaucgacccaacag

SEQ ID NO: 1762370 - RNA, 19 nt, Artificial Sequence
  Description of Artificial Sequence: Synthetic oligonucleotide
aacauccggccacacggcc

SEQ ID NO: 1762371 - RNA, 19 nt, Artificial Sequence
  Description of Artificial Sequence: Synthetic oligonucleotide
aagagcuugacagguauug

SEQ ID NO: 1762372 - RNA, 19 nt, Artificial Sequence
  Description of Artificial Sequence: Synthetic oligonucleotide
ucacuauguguuaacaguc

SEQ ID NO: 1762373 - RNA, 19 nt, Artificial Sequence
  Description of Artificial Sequence: Synthetic oligonucleotide
acugcaaggccccaucuuc

SEQ ID NO: 1762374 - RNA, 19 nt, Artificial Sequence
  Description of Artificial Sequence: Synthetic oligonucleotide
agugcagacaggaagagug

SEQ ID NO: 1762375 - RNA, 19 nt, Artificial Sequence
  Description of Artificial Sequence: Synthetic oligonucleotide
guugcugcucucuuuagcc

SEQ ID NO: 1762376 - RNA, 19 nt, Artificial Sequence
  Description of Artificial Sequence: Synthetic oligonucleotide
uccauucucuccuaguaca

SEQ ID NO: 1762377 - RNA, 19 nt, Artificial Sequence
  Description of Artificial Sequence: Synthetic oligonucleotide
uuugacacggcgaaccaaa

SEQ ID NO: 1762378 - RNA, 19 nt, Artificial Sequence
  Description of Artificial Sequence: Synthetic oligonucleotide
ugugcacagaacauccggc

SEQ ID NO: 1762379 - RNA, 19 nt, Artificial Sequence
  Description of Artificial Sequence: Synthetic oligonucleotide
aaggguaggccaguaacuc

SEQ ID NO: 1762380 - RNA, 19 nt, Artificial Sequence
  Description of Artificial Sequence: Synthetic oligonucleotide
gaaccaaagggacugugac

SEQ ID NO: 1762381 - RNA, 19 nt, Artificial Sequence
  Description of Artificial Sequence: Synthetic oligonucleotide
agguauuguaguuuugaca

SEQ ID NO: 1762382 - RNA, 19 nt, Artificial Sequence
  Description of Artificial Sequence: Synthetic oligonucleotide
gagaauugauggaacuugg

SEQ ID NO: 1762383 - RNA, 19 nt, Artificial Sequence
  Description of Artificial Sequence: Synthetic oligonucleotide
uuuuguuccucagcgaucu

SEQ ID NO: 1762384 - RNA, 19 nt, Artificial Sequence
  Description of Artificial Sequence: Synthetic oligonucleotide
ucgaguuuggacuucuccu

SEQ ID NO: 1762385 - RNA, 19 nt, Artificial Sequence
  Description of Artificial Sequence: Synthetic oligonucleotide
cuguagaacgggcaaagag

SEQ ID NO: 1762386 - RNA, 19 nt, Artificial Sequence
  Description of Artificial Sequence: Synthetic oligonucleotide
aacaguccuuccucaucgc

SEQ ID NO: 1762387 - RNA, 19 nt, Artificial Sequence
  Description of Artificial Sequence: Synthetic oligonucleotide
ucucuccuaguacagcugc

SEQ ID NO: 1762388 - RNA, 19 nt, Artificial Sequence
  Description of Artificial Sequence: Synthetic oligonucleotide
uguaguucgcugcucuuca

SEQ ID NO: 1762389 - RNA, 19 nt, Artificial Sequence
  Description of Artificial Sequence: Synthetic oligonucleotide
uguguucugccccuuggcc

SEQ ID NO: 1762390 - RNA, 19 nt, Artificial Sequence
  Description of Artificial Sequence: Synthetic oligonucleotide
auccaaucucuuuauuguc

SEQ ID NO: 1762391 - RNA, 19 nt, Artificial Sequence
  Description of Artificial Sequence: Synthetic oligonucleotide
auguguuaacaguccuucc

SEQ ID NO: 1762392 - RNA, 19 nt, Artificial Sequence
  Description of Artificial Sequence: Synthetic oligonucleotide
aacuugaucuuggcugagc

SEQ ID NO: 1762393 - RNA, 19 nt, Artificial Sequence
  Description of Artificial Sequence: Synthetic oligonucleotide
ugacacggcgaaccaaagg

SEQ ID NO: 1762394 - RNA, 19 nt, Artificial Sequence
  Description of Artificial Sequence: Synthetic oligonucleotide
uaaggguaggccaguaacu

SEQ ID NO: 1762395 - RNA, 19 nt, Artificial Sequence
  Description of Artificial Sequence: Synthetic oligonucleotide
acaguccuuccucaucgcc

SEQ ID NO: 1762396 - RNA, 19 nt, Artificial Sequence
  Description of Artificial Sequence: Synthetic oligonucleotide
ucugugucagcucuguuuu

SEQ ID NO: 1762397 - RNA, 19 nt, Artificial Sequence
  Description of Artificial Sequence: Synthetic oligonucleotide
aacuggcauccagagaugg

SEQ ID NO: 1762398 - RNA, 19 nt, Artificial Sequence
  Description of Artificial Sequence: Synthetic oligonucleotide
gaagccgugucuuccuggg

SEQ ID NO: 1762399 - RNA, 19 nt, Artificial Sequence
  Description of Artificial Sequence: Synthetic oligonucleotide
auagccuuugugcacagaa

SEQ ID NO: 1762400 - RNA, 19 nt, Artificial Sequence
  Description of Artificial Sequence: Synthetic oligonucleotide
aggguaggccaguaacucc

SEQ ID NO: 1762401 - RNA, 19 nt, Artificial Sequence
  Description of Artificial Sequence: Synthetic oligonucleotide
auauuggacaaaggcauag

SEQ ID NO: 1762402 - RNA, 19 nt, Artificial Sequence
  Description of Artificial Sequence: Synthetic oligonucleotide
uggggucuauucuuauugg

SEQ ID NO: 1762403 - RNA, 19 nt, Artificial Sequence
  Description of Artificial Sequence: Synthetic oligonucleotide
gaugcacggggaaagagug

SEQ ID NO: 1762404 - RNA, 19 nt, Artificial Sequence
  Description of Artificial Sequence: Synthetic oligonucleotide
aaugaagacccgagaauug

SEQ ID NO: 1762405 - RNA, 19 nt, Artificial Sequence
  Description of Artificial Sequence: Synthetic oligonucleotide
guuuagguuuccaaugaag

SEQ ID NO: 1762406 - RNA, 19 nt, Artificial Sequence
  Description of Artificial Sequence: Synthetic oligonucleotide
ucagcgaucuguuccaauc

SEQ ID NO: 1762407 - RNA, 19 nt, Artificial Sequence
  Description of Artificial Sequence: Synthetic oligonucleotide
agaaaggcggccucuauaa

SEQ ID NO: 1762408 - RNA, 19 nt, Artificial Sequence
  Description of Artificial Sequence: Synthetic oligonucleotide
acuauguguuaacaguccu

SEQ ID NO: 1762409 - RNA, 19 nt, Artificial Sequence
  Description of Artificial Sequence: Synthetic oligonucleotide
agggcaucgauguuggacu

SEQ ID NO: 1762410 - RNA, 19 nt, Artificial Sequence
  Description of Artificial Sequence: Synthetic oligonucleotide
cacuauguguuaacagucc

SEQ ID NO: 1762411 - RNA, 19 nt, Artificial Sequence
  Description of Artificial Sequence: Synthetic oligonucleotide
cucuuuagccccuuggguc

SEQ ID NO: 1762412 - RNA, 19 nt, Artificial Sequence
  Description of Artificial Sequence: Synthetic oligonucleotide
cuguauauagcaguugcug

SEQ ID NO: 1762413 - RNA, 19 nt, Artificial Sequence
  Description of Artificial Sequence: Synthetic oligonucleotide
aacagggcaucgauguugg

SEQ ID NO: 1762414 - RNA, 19 nt, Artificial Sequence
  Description of Artificial Sequence: Synthetic oligonucleotide
gauccaaucucuuuauugu

SEQ ID NO: 1762415 - RNA, 19 nt, Artificial Sequence
  Description of Artificial Sequence: Synthetic oligonucleotide
uguuccaaucgacccaaca

SEQ ID NO: 1762416 - RNA, 19 nt, Artificial Sequence
  Description of Artificial Sequence: Synthetic oligonucleotide
agaacgggcaaagagcuug

SEQ ID NO: 1762417 - RNA, 19 nt, Artificial Sequence
  Description of Artificial Sequence: Synthetic oligonucleotide
aaccaaagggacugugaca

SEQ ID NO: 1762418 - RNA, 19 nt, Artificial Sequence
  Description of Artificial Sequence: Synthetic oligonucleotide
caaagggacugugacacgg

SEQ ID NO: 1762419 - RNA, 19 nt, Artificial Sequence
  Description of Artificial Sequence: Synthetic oligonucleotide
ucuucaacuugaucuuggc

SEQ ID NO: 1762420 - RNA, 19 nt, Artificial Sequence
  Description of Artificial Sequence: Synthetic oligonucleotide
guauuguaguuuugacacg

SEQ ID NO: 1762421 - RNA, 19 nt, Artificial Sequence
  Description of Artificial Sequence: Synthetic oligonucleotide
uuaacaguccuuccucauc

SEQ ID NO: 1762422 - RNA, 19 nt, Artificial Sequence
  Description of Artificial Sequence: Synthetic oligonucleotide
acauugcuggucugaaauc

SEQ ID NO: 1762423 - RNA, 19 nt, Artificial Sequence
  Description of Artificial Sequence: Synthetic oligonucleotide
ugggguaaggguaggccag

SEQ ID NO: 1762424 - RNA, 19 nt, Artificial Sequence
  Description of Artificial Sequence: Synthetic oligonucleotide
ucuucacugggacugcccu

SEQ ID NO: 1762425 - RNA, 19 nt, Artificial Sequence
  Description of Artificial Sequence: Synthetic oligonucleotide
auugucagguuccccucac

SEQ ID NO: 1762426 - RNA, 19 nt, Artificial Sequence
  Description of Artificial Sequence: Synthetic oligonucleotide
ccucuauaaucaaacagcc

SEQ ID NO: 1762427 - RNA, 19 nt, Artificial Sequence
  Description of Artificial Sequence: Synthetic oligonucleotide
cuugcaaaggacguagcac

SEQ ID NO: 1762428 - RNA, 19 nt, Artificial Sequence
  Description of Artificial Sequence: Synthetic oligonucleotide
uggaacuuggggucuauuc

SEQ ID NO: 1762429 - RNA, 19 nt, Artificial Sequence
  Description of Artificial Sequence: Synthetic oligonucleotide
ggccuuuuguuccucagcg

SEQ ID NO: 1762430 - RNA, 19 nt, Artificial Sequence
  Description of Artificial Sequence: Synthetic oligonucleotide
aguucgcugcucuucaacu

SEQ ID NO: 1762431 - RNA, 19 nt, Artificial Sequence
  Description of Artificial Sequence: Synthetic oligonucleotide
ugcacggggaaagagugcc

SEQ ID NO: 1762432 - RNA, 19 nt, Artificial Sequence
  Description of Artificial Sequence: Synthetic oligonucleotide
ugcacagaacauccggcca

SEQ ID NO: 1762433 - RNA, 19 nt, Artificial Sequence
  Description of Artificial Sequence: Synthetic oligonucleotide
ggccucuauaaucaaacag

SEQ ID NO: 1762434 - RNA, 19 nt, Artificial Sequence
  Description of Artificial Sequence: Synthetic oligonucleotide
aguuccuccucacuaugug

SEQ ID NO: 1762435 - RNA, 19 nt, Artificial Sequence
  Description of Artificial Sequence: Synthetic oligonucleotide
guacccacuacaaacuggc

SEQ ID NO: 1762436 - RNA, 19 nt, Artificial Sequence
  Description of Artificial Sequence: Synthetic oligonucleotide
ggacguagcacucacuggc

SEQ ID NO: 1762437 - RNA, 19 nt, Artificial Sequence
  Description of Artificial Sequence: Synthetic oligonucleotide
agcauugccacugccgccg

SEQ ID NO: 1762438 - RNA, 19 nt, Artificial Sequence
  Description of Artificial Sequence: Synthetic oligonucleotide
augggugccugacuugagg

SEQ ID NO: 1762439 - RNA, 19 nt, Artificial Sequence
  Description of Artificial Sequence: Synthetic oligonucleotide
guaguuuugacacggcgaa

SEQ ID NO: 1762440 - RNA, 19 nt, Artificial Sequence
  Description of Artificial Sequence: Synthetic oligonucleotide
gccucuauaaucaaacagc

SEQ ID NO: 1762441 - RNA, 19 nt, Artificial Sequence
  Description of Artificial Sequence: Synthetic oligonucleotide
agcuugacagguauuguag

SEQ ID NO: 1762442 - RNA, 19 nt, Artificial Sequence
  Description of Artificial Sequence: Synthetic oligonucleotide
ucuguuuugauggucugua

SEQ ID NO: 1762443 - RNA, 19 nt, Artificial Sequence
  Description of Artificial Sequence: Synthetic oligonucleotide
ugggugccugacuugaggc

SEQ ID NO: 1762444 - RNA, 19 nt, Artificial Sequence
  Description of Artificial Sequence: Synthetic oligonucleotide
agaauugauggaacuuggg

SEQ ID NO: 1762445 - RNA, 19 nt, Artificial Sequence
  Description of Artificial Sequence: Synthetic oligonucleotide
acagguauuguaguuuuga

SEQ ID NO: 1762446 - RNA, 19 nt, Artificial Sequence
  Description of Artificial Sequence: Synthetic oligonucleotide
gucugaaaucuucaaggac

SEQ ID NO: 1762447 - RNA, 19 nt, Artificial Sequence
  Description of Artificial Sequence: Synthetic oligonucleotide
ucuauucuuauugguuaca

SEQ ID NO: 1762448 - RNA, 19 nt, Artificial Sequence
  Description of Artificial Sequence: Synthetic oligonucleotide
aggacguagcacucacugg

SEQ ID NO: 1762449 - RNA, 19 nt, Artificial Sequence
  Description of Artificial Sequence: Synthetic oligonucleotide
ugugucagcucuguuuuga

SEQ ID NO: 1762450 - RNA, 19 nt, Artificial Sequence
  Description of Artificial Sequence: Synthetic oligonucleotide
ccugcuuacugcaaggccc

SEQ ID NO: 1762451 - RNA, 19 nt, Artificial Sequence
  Description of Artificial Sequence: Synthetic oligonucleotide
uaacuccacuugcaaagga

SEQ ID NO: 1762452 - RNA, 19 nt, Artificial Sequence
  Description of Artificial Sequence: Synthetic oligonucleotide
agugauggcuguagaacgg

SEQ ID NO: 1762453 - RNA, 19 nt, Artificial Sequence
  Description of Artificial Sequence: Synthetic oligonucleotide
uauuggacaaaggcauagc

SEQ ID NO: 1762454 - RNA, 19 nt, Artificial Sequence
  Description of Artificial Sequence: Synthetic oligonucleotide
gggaaagagugccugcugg

SEQ ID NO: 1762455 - RNA, 19 nt, Artificial Sequence
  Description of Artificial Sequence: Synthetic oligonucleotide
caggcacuggagaaaggcg

SEQ ID NO: 1762456 - RNA, 19 nt, Artificial Sequence
  Description of Artificial Sequence: Synthetic oligonucleotide
acuggagaaaggcggccuc

SEQ ID NO: 1762457 - RNA, 19 nt, Artificial Sequence
  Description of Artificial Sequence: Synthetic oligonucleotide
auuguaguuuugacacggc

SEQ ID NO: 1762458 - RNA, 19 nt, Artificial Sequence
  Description of Artificial Sequence: Synthetic oligonucleotide
uguugauguccagagucug

SEQ ID NO: 1762459 - RNA, 19 nt, Artificial Sequence
  Description of Artificial Sequence: Synthetic oligonucleotide
aacagccuguauauagcag

SEQ ID NO: 1762460 - RNA, 19 nt, Artificial Sequence
  Description of Artificial Sequence: Synthetic oligonucleotide
auaaucaaacagccuguau

SEQ ID NO: 1762461 - RNA, 19 nt, Artificial Sequence
  Description of Artificial Sequence: Synthetic oligonucleotide
augggguaaggguaggcca

SEQ ID NO: 1762462 - RNA, 19 nt, Artificial Sequence
  Description of Artificial Sequence: Synthetic oligonucleotide
gaagacccgagaauugaug

SEQ ID NO: 1762463 - RNA, 19 nt, Artificial Sequence
  Description of Artificial Sequence: Synthetic oligonucleotide
aaagggacugugacacggg

SEQ ID NO: 1762464 - RNA, 19 nt, Artificial Sequence
  Description of Artificial Sequence: Synthetic oligonucleotide
ucuccuaguacagcugccc

SEQ ID NO: 1762465 - RNA, 19 nt, Artificial Sequence
  Description of Artificial Sequence: Synthetic oligonucleotide
caaucgacccaacagggca

SEQ ID NO: 1762466 - RNA, 19 nt, Artificial Sequence
  Description of Artificial Sequence: Synthetic oligonucleotide
ugacagguauuguaguuuu

SEQ ID NO: 1762467 - RNA, 19 nt, Artificial Sequence
  Description of Artificial Sequence: Synthetic oligonucleotide
gugugccugccucagaagc

SEQ ID NO: 1762468 - RNA, 19 nt, Artificial Sequence
  Description of Artificial Sequence: Synthetic oligonucleotide
cagguauuguaguuuugac

SEQ ID NO: 1762469 - RNA, 19 nt, Artificial Sequence
  Description of Artificial Sequence: Synthetic oligonucleotide
cagcgaucuguuccaaucg

SEQ ID NO: 1762470 - RNA, 19 nt, Artificial Sequence
  Description of Artificial Sequence: Synthetic oligonucleotide
uauauagcaguugcugcuc

SEQ ID NO: 1762471 - RNA, 19 nt, Artificial Sequence
  Description of Artificial Sequence: Synthetic oligonucleotide
acggggaaagagugccugc

SEQ ID NO: 1762472 - RNA, 19 nt, Artificial Sequence
  Description of Artificial Sequence: Synthetic oligonucleotide
caaaggacguagcacucac

SEQ ID NO: 1762473 - RNA, 19 nt, Artificial Sequence
  Description of Artificial Sequence: Synthetic oligonucleotide
uauucuuauugguuacauu

SEQ ID NO: 1762474 - RNA, 19 nt, Artificial Sequence
  Description of Artificial Sequence: Synthetic oligonucleotide
cucacuauguguuaacagu

SEQ ID NO: 1762475 - RNA, 19 nt, Artificial Sequence
  Description of Artificial Sequence: Synthetic oligonucleotide
uugacacggcgaaccaaag

SEQ ID NO: 1762476 - RNA, 19 nt, Artificial Sequence
  Description of Artificial Sequence: Synthetic oligonucleotide
gugcacagaacauccggcc

SEQ ID NO: 1762477 - RNA, 19 nt, Artificial Sequence
  Description of Artificial Sequence: Synthetic oligonucleotide
guguuaacaguccuuccuc

SEQ ID NO: 1762478 - RNA, 19 nt, Artificial Sequence
  Description of Artificial Sequence: Synthetic oligonucleotide
cuugaggccugagacagug

SEQ ID NO: 1762479 - RNA, 19 nt, Artificial Sequence
  Description of Artificial Sequence: Synthetic oligonucleotide
guauauagcaguugcugcu

SEQ ID NO: 1762480 - RNA, 19 nt, Artificial Sequence
  Description of Artificial Sequence: Synthetic oligonucleotide
uggucuguaguucgcugcu

SEQ ID NO: 1762481 - RNA, 19 nt, Artificial Sequence
  Description of Artificial Sequence: Synthetic oligonucleotide
uuggauccaaucucuuuau

SEQ ID NO: 1762482 - RNA, 19 nt, Artificial Sequence
  Description of Artificial Sequence: Synthetic oligonucleotide
uauaaucaaacagccugua

SEQ ID NO: 1762483 - RNA, 19 nt, Artificial Sequence
  Description of Artificial Sequence: Synthetic oligonucleotide
uccucagcgaucuguucca

SEQ ID NO: 1762484 - RNA, 19 nt, Artificial Sequence
  Description of Artificial Sequence: Synthetic oligonucleotide
uuggccuuuuguuccucag

SEQ ID NO: 1762485 - RNA, 19 nt, Artificial Sequence
  Description of Artificial Sequence: Synthetic oligonucleotide
guuggacuugaucuguguc

SEQ ID NO: 1762486 - RNA, 19 nt, Artificial Sequence
  Description of Artificial Sequence: Synthetic oligonucleotide
auauagcaguugcugcucu

SEQ ID NO: 1762487 - RNA, 19 nt, Artificial Sequence
  Description of Artificial Sequence: Synthetic oligonucleotide
ugcaaaggacguagcacuc

SEQ ID NO: 1762488 - RNA, 19 nt, Artificial Sequence
  Description of Artificial Sequence: Synthetic oligonucleotide
cacggcgaaccaaagggac

SEQ ID NO: 1762489 - RNA, 19 nt, Artificial Sequence
  Description of Artificial Sequence: Synthetic oligonucleotide
uugccaucuggguuggccu

SEQ ID NO: 1762490 - RNA, 19 nt, Artificial Sequence
  Description of Artificial Sequence: Synthetic oligonucleotide
uagccuuugugcacagaac

SEQ ID NO: 1762491 - RNA, 19 nt, Artificial Sequence
  Description of Artificial Sequence: Synthetic oligonucleotide
cuuacugcaaggccccauc

SEQ ID NO: 1762492 - RNA, 19 nt, Artificial Sequence
  Description of Artificial Sequence: Synthetic oligonucleotide
ucaucucgaguuuggacuu

SEQ ID NO: 1762493 - RNA, 19 nt, Artificial Sequence
  Description of Artificial Sequence: Synthetic oligonucleotide
uugacagguauuguaguuu

SEQ ID NO: 1762494 - RNA, 19 nt, Artificial Sequence
  Description of Artificial Sequence: Synthetic oligonucleotide
gucuauugggcuugggcuc

SEQ ID NO: 1762495 - RNA, 19 nt, Artificial Sequence
  Description of Artificial Sequence: Synthetic oligonucleotide
uccucacuauguguuaaca

SEQ ID NO: 1762496 - RNA, 19 nt, Artificial Sequence
  Description of Artificial Sequence: Synthetic oligonucleotide
acaaacuggcauccagaga

SEQ ID NO: 1762497 - RNA, 19 nt, Artificial Sequence
  Description of Artificial Sequence: Synthetic oligonucleotide
gagccaguagugauggcug

SEQ ID NO: 1762498 - RNA, 19 nt, Artificial Sequence
  Description of Artificial Sequence: Synthetic oligonucleotide
aagccgugucuuccugggg

SEQ ID NO: 1762499 - RNA, 19 nt, Artificial Sequence
  Description of Artificial Sequence: Synthetic oligonucleotide
ucguuggcauauuggacaa

SEQ ID NO: 1762500 - RNA, 19 nt, Artificial Sequence
  Description of Artificial Sequence: Synthetic oligonucleotide
ggcauauuggacaaaggca

SEQ ID NO: 1762501 - RNA, 19 nt, Artificial Sequence
  Description of Artificial Sequence: Synthetic oligonucleotide
guuccccucacccaccaac

SEQ ID NO: 1762502 - RNA, 19 nt, Artificial Sequence
  Description of Artificial Sequence: Synthetic oligonucleotide
agcgaucuguuccaaucga

SEQ ID NO: 1762503 - RNA, 19 nt, Artificial Sequence
  Description of Artificial Sequence: Synthetic oligonucleotide
cagaacauccggccacacg

SEQ ID NO: 1762504 - RNA, 19 nt, Artificial Sequence
  Description of Artificial Sequence: Synthetic oligonucleotide
acggggucucuucacuggg

SEQ ID NO: 1762505 - RNA, 19 nt, Artificial Sequence
  Description of Artificial Sequence: Synthetic oligonucleotide
cuuuauugucagguucccc

SEQ ID NO: 1762506 - RNA, 19 nt, Artificial Sequence
  Description of Artificial Sequence: Synthetic oligonucleotide
uggggaauucccuggggaa

SEQ ID NO: 1762507 - RNA, 19 nt, Artificial Sequence
  Description of Artificial Sequence: Synthetic oligonucleotide
auacuuggaaaagaugguu

SEQ ID NO: 1762508 - RNA, 19 nt, Artificial Sequence
  Description of Artificial Sequence: Synthetic oligonucleotide
ucuauugggcuugggcucu

SEQ ID NO: 1762509 - RNA, 19 nt, Artificial Sequence
  Description of Artificial Sequence: Synthetic oligonucleotide
guagcacucacuggcuggg

SEQ ID NO: 1762510 - RNA, 19 nt, Artificial Sequence
  Description of Artificial Sequence: Synthetic oligonucleotide
uccaguuccuccucacuau

SEQ ID NO: 1762511 - RNA, 19 nt, Artificial Sequence
  Description of Artificial Sequence: Synthetic oligonucleotide
cacggggucucuucacugg

SEQ ID NO: 1762512 - RNA, 19 nt, Artificial Sequence
  Description of Artificial Sequence: Synthetic oligonucleotide
cagacaggaagagugcaug

SEQ ID NO: 1762513 - RNA, 19 nt, Artificial Sequence
  Description of Artificial Sequence: Synthetic oligonucleotide
gugauggcuguagaacggg

SEQ ID NO: 1762514 - RNA, 19 nt, Artificial Sequence
  Description of Artificial Sequence: Synthetic oligonucleotide
cuauaaucaaacagccugu

SEQ ID NO: 1762515 - RNA, 19 nt, Artificial Sequence
  Description of Artificial Sequence: Synthetic oligonucleotide
uucccuggggaagaagggc

SEQ ID NO: 1762516 - RNA, 19 nt, Artificial Sequence
  Description of Artificial Sequence: Synthetic oligonucleotide
guccauucucuccuaguac

SEQ ID NO: 1762517 - RNA, 19 nt, Artificial Sequence
  Description of Artificial Sequence: Synthetic oligonucleotide
agacccgagaauugaugga

SEQ ID NO: 1762518 - RNA, 19 nt, Artificial Sequence
  Description of Artificial Sequence: Synthetic oligonucleotide
ggucuauucuuauugguua

SEQ ID NO: 1762519 - RNA, 19 nt, Artificial Sequence
  Description of Artificial Sequence: Synthetic oligonucleotide
auucccuggggaagaaggg

SEQ ID NO: 1762520 - RNA, 19 nt, Artificial Sequence
  Description of Artificial Sequence: Synthetic oligonucleotide
agaggccggcugcugcugc

SEQ ID NO: 1762521 - RNA, 19 nt, Artificial Sequence
  Description of Artificial Sequence: Synthetic oligonucleotide
uuacauugcuggucugaaa

SEQ ID NO: 1762522 - RNA, 19 nt, Artificial Sequence
  Description of Artificial Sequence: Synthetic oligonucleotide
gagcuugacagguauugua

SEQ ID NO: 1762523 - RNA, 19 nt, Artificial Sequence
  Description of Artificial Sequence: Synthetic oligonucleotide
acgggcaaagagcuugaca

SEQ ID NO: 1762524 - RNA, 19 nt, Artificial Sequence
  Description of Artificial Sequence: Synthetic oligonucleotide
gauggcuguagaacgggca

SEQ ID NO: 1762525 - RNA, 19 nt, Artificial Sequence
  Description of Artificial Sequence: Synthetic oligonucleotide
aacgggcaaagagcuugac

SEQ ID NO: 1762526 - RNA, 19 nt, Artificial Sequence
  Description of Artificial Sequence: Synthetic oligonucleotide
cauucucuccuaguacagc

SEQ ID NO: 1762527 - RNA, 19 nt, Artificial Sequence
  Description of Artificial Sequence: Synthetic oligonucleotide
uuccugcuuacugcaaggc

SEQ ID NO: 1762528 - RNA, 19 nt, Artificial Sequence
  Description of Artificial Sequence: Synthetic oligonucleotide
gggucuauugggcuugggc

SEQ ID NO: 1762529 - RNA, 19 nt, Artificial Sequence
  Description of Artificial Sequence: Synthetic oligonucleotide
ggucugaaaucuucaagga

SEQ ID NO: 1762530 - RNA, 19 nt, Artificial Sequence
  Description of Artificial Sequence: Synthetic oligonucleotide
agcucuguuuugauggucu

SEQ ID NO: 1762531 - RNA, 19 nt, Artificial Sequence
  Description of Artificial Sequence: Synthetic oligonucleotide
ggaaagagugccugcuggc

SEQ ID NO: 1762532 - RNA, 19 nt, Artificial Sequence
  Description of Artificial Sequence: Synthetic oligonucleotide
uugauggaacuuggggucu

SEQ ID NO: 1762533 - RNA, 19 nt, Artificial Sequence
  Description of Artificial Sequence: Synthetic oligonucleotide
guagaacgggcaaagagcu

SEQ ID NO: 1762534 - RNA, 19 nt, Artificial Sequence
  Description of Artificial Sequence: Synthetic oligonucleotide
agagugcaugggguaaggg

SEQ ID NO: 1762535 - RNA, 19 nt, Artificial Sequence
  Description of Artificial Sequence: Synthetic oligonucleotide
acggccauacuuggaaaag

SEQ ID NO: 1762536 - RNA, 19 nt, Artificial Sequence
  Description of Artificial Sequence: Synthetic oligonucleotide
gcucucuuuagccccuugg

SEQ ID NO: 1762537 - RNA, 19 nt, Artificial Sequence
  Description of Artificial Sequence: Synthetic oligonucleotide
cugggaugcacggggaaag

SEQ ID NO: 1762538 - RNA, 19 nt, Artificial Sequence
  Description of Artificial Sequence: Synthetic oligonucleotide
uuuugacacggcgaaccaa

SEQ ID NO: 1762539 - RNA, 19 nt, Artificial Sequence
  Description of Artificial Sequence: Synthetic oligonucleotide
gcugucacccuucuucuug

SEQ ID NO: 1762540 - RNA, 19 nt, Artificial Sequence
  Description of Artificial Sequence: Synthetic oligonucleotide
aucuuggcugagccaguag

SEQ ID NO: 1762541 - RNA, 19 nt, Artificial Sequence
  Description of Artificial Sequence: Synthetic oligonucleotide
ccucacuauguguuaacag

SEQ ID NO: 1762542 - RNA, 19 nt, Artificial Sequence
  Description of Artificial Sequence: Synthetic oligonucleotide
aggaagagugcauggggua

SEQ ID NO: 1762543 - RNA, 19 nt, Artificial Sequence
  Description of Artificial Sequence: Synthetic oligonucleotide
cucuccuaguacagcugcc

SEQ ID NO: 1762544 - RNA, 19 nt, Artificial Sequence
  Description of Artificial Sequence: Synthetic oligonucleotide
guucguuggcauauuggac

SEQ ID NO: 1762545 - RNA, 19 nt, Artificial Sequence
  Description of Artificial Sequence: Synthetic oligonucleotide
acguagcacucacuggcug

SEQ ID NO: 1762546 - RNA, 19 nt, Artificial Sequence
  Description of Artificial Sequence: Synthetic oligonucleotide
gacccgagaauugauggaa

SEQ ID NO: 1762547 - RNA, 19 nt, Artificial Sequence
  Description of Artificial Sequence: Synthetic oligonucleotide
ugaaaucuucaaggacaug

SEQ ID NO: 1762548 - RNA, 19 nt, Artificial Sequence
  Description of Artificial Sequence: Synthetic oligonucleotide
aaacuggcauccagagaug

SEQ ID NO: 1762549 - RNA, 19 nt, Artificial Sequence
  Description of Artificial Sequence: Synthetic oligonucleotide
gagacagugaugcccuucu

SEQ ID NO: 1762550 - RNA, 19 nt, Artificial Sequence
  Description of Artificial Sequence: Synthetic oligonucleotide
gggcaaagagcuugacagg

SEQ ID NO: 1762551 - RNA, 19 nt, Artificial Sequence
  Description of Artificial Sequence: Synthetic oligonucleotide
ggucuauugggcuugggcu

SEQ ID NO: 1762552 - RNA, 19 nt, Artificial Sequence
  Description of Artificial Sequence: Synthetic oligonucleotide
gggacugugacacgggguc

SEQ ID NO: 1762553 - RNA, 19 nt, Artificial Sequence
  Description of Artificial Sequence: Synthetic oligonucleotide
gagaaaggcggccucuaua

SEQ ID NO: 1762554 - RNA, 19 nt, Artificial Sequence
  Description of Artificial Sequence: Synthetic oligonucleotide
acccgagaauugauggaac

SEQ ID NO: 1762555 - RNA, 19 nt, Artificial Sequence
  Description of Artificial Sequence: Synthetic oligonucleotide
aaucgacccaacagggcau

SEQ ID NO: 1762556 - RNA, 19 nt, Artificial Sequence
  Description of Artificial Sequence: Synthetic oligonucleotide
cuugaucuuggcugagcca

SEQ ID NO: 1762557 - RNA, 19 nt, Artificial Sequence
  Description of Artificial Sequence: Synthetic oligonucleotide
cccucaaaccuauagaaaa

SEQ ID NO: 1762558 - RNA, 19 nt, Artificial Sequence
  Description of Artificial Sequence: Synthetic oligonucleotide
acuggcauccagagauggg

SEQ ID NO: 1762559 - RNA, 19 nt, Artificial Sequence
  Description of Artificial Sequence: Synthetic oligonucleotide
uggcugagccaguagugau

SEQ ID NO: 1762560 - RNA, 19 nt, Artificial Sequence
  Description of Artificial Sequence: Synthetic oligonucleotide
aaaggacguagcacucacu

SEQ ID NO: 1762561 - RNA, 19 nt, Artificial Sequence
  Description of Artificial Sequence: Synthetic oligonucleotide
cuccucacuauguguuaac

SEQ ID NO: 1762562 - RNA, 19 nt, Artificial Sequence
  Description of Artificial Sequence: Synthetic oligonucleotide
gacagguauuguaguuuug

SEQ ID NO: 1762563 - RNA, 19 nt, Artificial Sequence
  Description of Artificial Sequence: Synthetic oligonucleotide
agagcuugacagguauugu

SEQ ID NO: 1762564 - RNA, 19 nt, Artificial Sequence
  Description of Artificial Sequence: Synthetic oligonucleotide
cacacggccauacuuggaa

SEQ ID NO: 1762565 - RNA, 19 nt, Artificial Sequence
  Description of Artificial Sequence: Synthetic oligonucleotide
gaacauccggccacacggc

SEQ ID NO: 1762566 - RNA, 19 nt, Artificial Sequence
  Description of Artificial Sequence: Synthetic oligonucleotide
agcacccguccauucucuc

SEQ ID NO: 1762567 - RNA, 19 nt, Artificial Sequence
  Description of Artificial Sequence: Synthetic oligonucleotide
acuuggggucuauucuuau

SEQ ID NO: 1762568 - RNA, 19 nt, Artificial Sequence
  Description of Artificial Sequence: Synthetic oligonucleotide
guuacauugcuggucugaa

SEQ ID NO: 1762569 - RNA, 19 nt, Artificial Sequence
  Description of Artificial Sequence: Synthetic oligonucleotide
uggauccaaucucuuuauu

SEQ ID NO: 1762570 - RNA, 19 nt, Artificial Sequence
  Description of Artificial Sequence: Synthetic oligonucleotide
augcacggggaaagagugc

SEQ ID NO: 1762571 - RNA, 19 nt, Artificial Sequence
  Description of Artificial Sequence: Synthetic oligonucleotide
gugcaugggguaaggguag

SEQ ID NO: 1762572 - RNA, 19 nt, Artificial Sequence
  Description of Artificial Sequence: Synthetic oligonucleotide
auggcguucguuggcauau

SEQ ID NO: 1762573 - RNA, 19 nt, Artificial Sequence
  Description of Artificial Sequence: Synthetic oligonucleotide
cuggggaauucccugggga

SEQ ID NO: 1762574 - RNA, 19 nt, Artificial Sequence
  Description of Artificial Sequence: Synthetic oligonucleotide
acagaacauccggccacac

SEQ ID NO: 1762575 - RNA, 19 nt, Artificial Sequence
  Description of Artificial Sequence: Synthetic oligonucleotide
gaagggcagaauguguucu

SEQ ID NO: 1762576 - RNA, 19 nt, Artificial Sequence
  Description of Artificial Sequence: Synthetic oligonucleotide
aacuuggggucuauucuua

SEQ ID NO: 1762577 - RNA, 19 nt, Artificial Sequence
  Description of Artificial Sequence: Synthetic oligonucleotide
uccaagccuggggaauucc

SEQ ID NO: 1762578 - RNA, 19 nt, Artificial Sequence
  Description of Artificial Sequence: Synthetic oligonucleotide
ggccaguaacuccacuugc

SEQ ID NO: 1762579 - RNA, 19 nt, Artificial Sequence
  Description of Artificial Sequence: Synthetic oligonucleotide
cagcauugccacugccgcc

SEQ ID NO: 1762580 - RNA, 19 nt, Artificial Sequence
  Description of Artificial Sequence: Synthetic oligonucleotide
ugguuacauugcuggucug

SEQ ID NO: 1762581 - RNA, 19 nt, Artificial Sequence
  Description of Artificial Sequence: Synthetic oligonucleotide
aucgacccaacagggcauc

SEQ ID NO: 1762582 - RNA, 19 nt, Artificial Sequence
  Description of Artificial Sequence: Synthetic oligonucleotide
cauauuggacaaaggcaua

SEQ ID NO: 1762583 - RNA, 19 nt, Artificial Sequence
  Description of Artificial Sequence: Synthetic oligonucleotide
gcuggcagcuuuccucugg

SEQ ID NO: 1762584 - RNA, 19 nt, Artificial Sequence
  Description of Artificial Sequence: Synthetic oligonucleotide
agccaguagugauggcugu

SEQ ID NO: 1762585 - RNA, 19 nt, Artificial Sequence
  Description of Artificial Sequence: Synthetic oligonucleotide
uugaggccugagacaguga

SEQ ID NO: 1762586 - RNA, 19 nt, Artificial Sequence
  Description of Artificial Sequence: Synthetic oligonucleotide
caaggacaugguguccacc

SEQ ID NO: 1762587 - RNA, 19 nt, Artificial Sequence
  Description of Artificial Sequence: Synthetic oligonucleotide
cgagaauugauggaacuug

SEQ ID NO: 1762588 - RNA, 19 nt, Artificial Sequence
  Description of Artificial Sequence: Synthetic oligonucleotide
agcaguugcugcucucuuu

SEQ ID NO: 1762589 - RNA, 19 nt, Artificial Sequence
  Description of Artificial Sequence: Synthetic oligonucleotide
ucgacccaacagggcaucg

SEQ ID NO: 1762590 - RNA, 19 nt, Artificial Sequence
  Description of Artificial Sequence: Synthetic oligonucleotide
caaagagcuugacagguau

SEQ ID NO: 1762591 - RNA, 19 nt, Artificial Sequence
  Description of Artificial Sequence: Synthetic oligonucleotide
uaguuuugacacggcgaac

SEQ ID NO: 1762592 - RNA, 19 nt, Artificial Sequence
  Description of Artificial Sequence: Synthetic oligonucleotide
cauugcuggucugaaaucu

SEQ ID NO: 1762593 - RNA, 19 nt, Artificial Sequence
  Description of Artificial Sequence: Synthetic oligonucleotide
gggcagaauguguucugcc

SEQ ID NO: 1762594 - RNA, 19 nt, Artificial Sequence
  Description of Artificial Sequence: Synthetic oligonucleotide
cuuggcccaggcagugcag

SEQ ID NO: 1762595 - RNA, 19 nt, Artificial Sequence
  Description of Artificial Sequence: Synthetic oligonucleotide
uccuccucacuauguguua

SEQ ID NO: 1762596 - RNA, 19 nt, Artificial Sequence
  Description of Artificial Sequence: Synthetic oligonucleotide
cugguacccacuacaaacu

SEQ ID NO: 1762597 - RNA, 19 nt, Artificial Sequence
  Description of Artificial Sequence: Synthetic oligonucleotide
acacggccauacuuggaaa

SEQ ID NO: 1762598 - RNA, 19 nt, Artificial Sequence
  Description of Artificial Sequence: Synthetic oligonucleotide
uugggucuauugggcuugg

SEQ ID NO: 1762599 - RNA, 19 nt, Artificial Sequence
  Description of Artificial Sequence: Synthetic oligonucleotide
gucuguccagccagcaccc

SEQ ID NO: 1762600 - RNA, 19 nt, Artificial Sequence
  Description of Artificial Sequence: Synthetic oligonucleotide
aucucgaguuuggacuucu

SEQ ID NO: 1762601 - RNA, 19 nt, Artificial Sequence
  Description of Artificial Sequence: Synthetic oligonucleotide
gcguucguuggcauauugg

SEQ ID NO: 1762602 - RNA, 19 nt, Artificial Sequence
  Description of Artificial Sequence: Synthetic oligonucleotide
ucuguccagccagcacccg

SEQ ID NO: 1762603 - RNA, 19 nt, Artificial Sequence
  Description of Artificial Sequence: Synthetic oligonucleotide
caaugaagacccgagaauu

SEQ ID NO: 1762604 - RNA, 19 nt, Artificial Sequence
  Description of Artificial Sequence: Synthetic oligonucleotide
cuucaacuugaucuuggcu

SEQ ID NO: 1762605 - RNA, 19 nt, Artificial Sequence
  Description of Artificial Sequence: Synthetic oligonucleotide
agagucuguccagccagca

SEQ ID NO: 1762606 - RNA, 19 nt, Artificial Sequence
  Description of Artificial Sequence: Synthetic oligonucleotide
uagcaguugcugcucucuu

SEQ ID NO: 1762607 - RNA, 19 nt, Artificial Sequence
  Description of Artificial Sequence: Synthetic oligonucleotide
gcggccucuauaaucaaac

SEQ ID NO: 1762608 - RNA, 19 nt, Artificial Sequence
  Description of Artificial Sequence: Synthetic oligonucleotide
gccaucaucucgaguuugg

SEQ ID NO: 1762609 - RNA, 19 nt, Artificial Sequence
  Description of Artificial Sequence: Synthetic oligonucleotide
ucgccaucaucucgaguuu

SEQ ID NO: 1762610 - RNA, 19 nt, Artificial Sequence
  Description of Artificial Sequence: Synthetic oligonucleotide
uagaacgggcaaagagcuu

SEQ ID NO: 1762611 - RNA, 19 nt, Artificial Sequence
  Description of Artificial Sequence: Synthetic oligonucleotide
cugugucagcucuguuuug

SEQ ID NO: 1762612 - RNA, 19 nt, Artificial Sequence
  Description of Artificial Sequence: Synthetic oligonucleotide
cagguuccccucacccacc

SEQ ID NO: 1762613 - RNA, 19 nt, Artificial Sequence
  Description of Artificial Sequence: Synthetic oligonucleotide
gguuacauugcuggucuga

SEQ ID NO: 1762614 - RNA, 19 nt, Artificial Sequence
  Description of Artificial Sequence: Synthetic oligonucleotide
ggggucucuucacugggac

SEQ ID NO: 1762615 - RNA, 19 nt, Artificial Sequence
  Description of Artificial Sequence: Synthetic oligonucleotide
cacggccauacuuggaaaa

SEQ ID NO: 1762616 - RNA, 19 nt, Artificial Sequence
  Description of Artificial Sequence: Synthetic oligonucleotide
gacacggggucucuucacu

SEQ ID NO: 1762617 - RNA, 19 nt, Artificial Sequence
  Description of Artificial Sequence: Synthetic oligonucleotide
ugggaugcacggggaaaga

SEQ ID NO: 1762618 - RNA, 19 nt, Artificial Sequence
  Description of Artificial Sequence: Synthetic oligonucleotide
acacggcgaaccaaaggga

SEQ ID NO: 1762619 - RNA, 19 nt, Artificial Sequence
  Description of Artificial Sequence: Synthetic oligonucleotide
ccaguagugauggcuguag

SEQ ID NO: 1762620 - RNA, 19 nt, Artificial Sequence
  Description of Artificial Sequence: Synthetic oligonucleotide
agguuccccucacccacca

SEQ ID NO: 1762621 - RNA, 19 nt, Artificial Sequence
  Description of Artificial Sequence: Synthetic oligonucleotide
ggcguucguuggcauauug

SEQ ID NO: 1762622 - RNA, 19 nt, Artificial Sequence
  Description of Artificial Sequence: Synthetic oligonucleotide
cguucguuggcauauugga

SEQ ID NO: 1762623 - RNA, 19 nt, Artificial Sequence
  Description of Artificial Sequence: Synthetic oligonucleotide
uggcuguagaacgggcaaa

SEQ ID NO: 1762624 - RNA, 19 nt, Artificial Sequence
  Description of Artificial Sequence: Synthetic oligonucleotide
ugggucuauugggcuuggg

SEQ ID NO: 1762625 - RNA, 19 nt, Artificial Sequence
  Description of Artificial Sequence: Synthetic oligonucleotide
ccacuacaaacuggcaucc

SEQ ID NO: 1762626 - RNA, 19 nt, Artificial Sequence
  Description of Artificial Sequence: Synthetic oligonucleotide
ugccaucuggguuggccuu

SEQ ID NO: 1762627 - RNA, 19 nt, Artificial Sequence
  Description of Artificial Sequence: Synthetic oligonucleotide
gaacgggcaaagagcuuga

SEQ ID NO: 1762628 - RNA, 19 nt, Artificial Sequence
  Description of Artificial Sequence: Synthetic oligonucleotide
gggaugcacggggaaagag

SEQ ID NO: 1762629 - RNA, 19 nt, Artificial Sequence
  Description of Artificial Sequence: Synthetic oligonucleotide
cucacccaccaaccccacc

SEQ ID NO: 1762630 - RNA, 19 nt, Artificial Sequence
  Description of Artificial Sequence: Synthetic oligonucleotide
cuauucuuauugguuacau

SEQ ID NO: 1762631 - RNA, 19 nt, Artificial Sequence
  Description of Artificial Sequence: Synthetic oligonucleotide
gcacccguccauucucucc

SEQ ID NO: 1762632 - RNA, 19 nt, Artificial Sequence
  Description of Artificial Sequence: Synthetic oligonucleotide
cuauguguuaacaguccuu

SEQ ID NO: 1762633 - RNA, 19 nt, Artificial Sequence
  Description of Artificial Sequence: Synthetic oligonucleotide
acggcgaaccaaagggacu

SEQ ID NO: 1762634 - RNA, 19 nt, Artificial Sequence
  Description of Artificial Sequence: Synthetic oligonucleotide
uggagaaaggcggccucua

SEQ ID NO: 1762635 - RNA, 19 nt, Artificial Sequence
  Description of Artificial Sequence: Synthetic oligonucleotide
uccggccacacggccauac

SEQ ID NO: 1762636 - RNA, 19 nt, Artificial Sequence
  Description of Artificial Sequence: Synthetic oligonucleotide
gcucuguuuugauggucug

SEQ ID NO: 1762637 - RNA, 19 nt, Artificial Sequence
  Description of Artificial Sequence: Synthetic oligonucleotide
cuccacuugcaaaggacgu

SEQ ID NO: 1762638 - RNA, 19 nt, Artificial Sequence
  Description of Artificial Sequence: Synthetic oligonucleotide
gcaguugcugcucucuuua

SEQ ID NO: 1762639 - RNA, 19 nt, Artificial Sequence
  Description of Artificial Sequence: Synthetic oligonucleotide
cagaauguguucugccccu

SEQ ID NO: 1762640 - RNA, 19 nt, Artificial Sequence
  Description of Artificial Sequence: Synthetic oligonucleotide
ugccugccucagaagccgu

SEQ ID NO: 1762641 - RNA, 19 nt, Artificial Sequence
  Description of Artificial Sequence: Synthetic oligonucleotide
acccaacagggcaucgaug

SEQ ID NO: 1762642 - RNA, 19 nt, Artificial Sequence
  Description of Artificial Sequence: Synthetic oligonucleotide
gguaaggguaggccaguaa

SEQ ID NO: 1762643 - RNA, 19 nt, Artificial Sequence
  Description of Artificial Sequence: Synthetic oligonucleotide
cugccucagaagccguguc

SEQ ID NO: 1762644 - RNA, 19 nt, Artificial Sequence
  Description of Artificial Sequence: Synthetic oligonucleotide
acauccggccacacggcca

SEQ ID NO: 1762645 - RNA, 19 nt, Artificial Sequence
  Description of Artificial Sequence: Synthetic oligonucleotide
cucugguacccacuacaaa

SEQ ID NO: 1762646 - RNA, 19 nt, Artificial Sequence
  Description of Artificial Sequence: Synthetic oligonucleotide
ccaaagggacugugacacg

SEQ ID NO: 1762647 - RNA, 19 nt, Artificial Sequence
  Description of Artificial Sequence: Synthetic oligonucleotide
gggugugccugccucagaa

SEQ ID NO: 1762648 - RNA, 19 nt, Artificial Sequence
  Description of Artificial Sequence: Synthetic oligonucleotide
ggaagagugcaugggguaa

SEQ ID NO: 1762649 - RNA, 19 nt, Artificial Sequence
  Description of Artificial Sequence: Synthetic oligonucleotide
cuguguccuggcugugguc

SEQ ID NO: 1762650 - RNA, 19 nt, Artificial Sequence
  Description of Artificial Sequence: Synthetic oligonucleotide
guaguucgcugcucuucaa

SEQ ID NO: 1762651 - RNA, 19 nt, Artificial Sequence
  Description of Artificial Sequence: Synthetic oligonucleotide
cuguuccaaucgacccaac

SEQ ID NO: 1762652 - RNA, 19 nt, Artificial Sequence
  Description of Artificial Sequence: Synthetic oligonucleotide
ggggucuauucuuauuggu

SEQ ID NO: 1762653 - RNA, 19 nt, Artificial Sequence
  Description of Artificial Sequence: Synthetic oligonucleotide
gaaaggcggccucuauaau

SEQ ID NO: 1762654 - RNA, 19 nt, Artificial Sequence
  Description of Artificial Sequence: Synthetic oligonucleotide
gccaguaacuccacuugca

SEQ ID NO: 1762655 - RNA, 19 nt, Artificial Sequence
  Description of Artificial Sequence: Synthetic oligonucleotide
gguuuccaaugaagacccg

SEQ ID NO: 1762656 - RNA, 19 nt, Artificial Sequence
  Description of Artificial Sequence: Synthetic oligonucleotide
ugcuuacugcaaggcccca

SEQ ID NO: 1762657 - RNA, 19 nt, Artificial Sequence
  Description of Artificial Sequence: Synthetic oligonucleotide
cauggcguucguuggcaua

SEQ ID NO: 1762658 - RNA, 19 nt, Artificial Sequence
  Description of Artificial Sequence: Synthetic oligonucleotide
cacccguccauucucuccu

SEQ ID NO: 1762659 - RNA, 19 nt, Artificial Sequence
  Description of Artificial Sequence: Synthetic oligonucleotide
ccagagaugggugccugac

SEQ ID NO: 1762660 - RNA, 19 nt, Artificial Sequence
  Description of Artificial Sequence: Synthetic oligonucleotide
uagcacucacuggcuggga

SEQ ID NO: 1762661 - RNA, 19 nt, Artificial Sequence
  Description of Artificial Sequence: Synthetic oligonucleotide
gcgaucuguuccaaucgac

SEQ ID NO: 1762662 - RNA, 19 nt, Artificial Sequence
  Description of Artificial Sequence: Synthetic oligonucleotide
caucucgaguuuggacuuc

SEQ ID NO: 1762663 - RNA, 19 nt, Artificial Sequence
  Description of Artificial Sequence: Synthetic oligonucleotide
gggcauggcguucguuggc

SEQ ID NO: 1762664 - RNA, 19 nt, Artificial Sequence
  Description of Artificial Sequence: Synthetic oligonucleotide
gcaaaggacguagcacuca

SEQ ID NO: 1762665 - RNA, 19 nt, Artificial Sequence
  Description of Artificial Sequence: Synthetic oligonucleotide
ccaguaacuccacuugcaa

SEQ ID NO: 1762666 - RNA, 19 nt, Artificial Sequence
  Description of Artificial Sequence: Synthetic oligonucleotide
gccuuuuguuccucagcga

SEQ ID NO: 1762667 - RNA, 19 nt, Artificial Sequence
  Description of Artificial Sequence: Synthetic oligonucleotide
caggcagugcagacaggaa

SEQ ID NO: 1762668 - RNA, 19 nt, Artificial Sequence
  Description of Artificial Sequence: Synthetic oligonucleotide
ugccugacuugaggccuga

SEQ ID NO: 1762669 - RNA, 19 nt, Artificial Sequence
  Description of Artificial Sequence: Synthetic oligonucleotide
cuuggggucuauucuuauu

SEQ ID NO: 1762670 - RNA, 19 nt, Artificial Sequence
  Description of Artificial Sequence: Synthetic oligonucleotide
ggcaucgauguuggacuug

SEQ ID NO: 1762671 - RNA, 19 nt, Artificial Sequence
  Description of Artificial Sequence: Synthetic oligonucleotide
gggacugcccugggcacag

SEQ ID NO: 1762672 - RNA, 19 nt, Artificial Sequence
  Description of Artificial Sequence: Synthetic oligonucleotide
ggaugcacggggaaagagu

SEQ ID NO: 1762673 - RNA, 19 nt, Artificial Sequence
  Description of Artificial Sequence: Synthetic oligonucleotide
gcacuggagaaaggcggcc

SEQ ID NO: 1762674 - RNA, 19 nt, Artificial Sequence
  Description of Artificial Sequence: Synthetic oligonucleotide
guaggccaguaacuccacu

SEQ ID NO: 1762675 - RNA, 19 nt, Artificial Sequence
  Description of Artificial Sequence: Synthetic oligonucleotide
caucuguguccuggcugug

SEQ ID NO: 1762676 - RNA, 19 nt, Artificial Sequence
  Description of Artificial Sequence: Synthetic oligonucleotide
ggcauggcguucguuggca

SEQ ID NO: 1762677 - RNA, 19 nt, Artificial Sequence
  Description of Artificial Sequence: Synthetic oligonucleotide
cacuacaaacuggcaucca

SEQ ID NO: 1762678 - RNA, 19 nt, Artificial Sequence
  Description of Artificial Sequence: Synthetic oligonucleotide
aggcggccucuauaaucaa

SEQ ID NO: 1762679 - RNA, 19 nt, Artificial Sequence
  Description of Artificial Sequence: Synthetic oligonucleotide
ccucagaagccgugucuuc

SEQ ID NO: 1762680 - RNA, 19 nt, Artificial Sequence
  Description of Artificial Sequence: Synthetic oligonucleotide
gguaggccaguaacuccac

SEQ ID NO: 1762681 - RNA, 19 nt, Artificial Sequence
  Description of Artificial Sequence: Synthetic oligonucleotide
ccaaugaagacccgagaau

SEQ ID NO: 1762682 - RNA, 19 nt, Artificial Sequence
  Description of Artificial Sequence: Synthetic oligonucleotide
ccccucaaaccuauagaaa

SEQ ID NO: 1762683 - RNA, 19 nt, Artificial Sequence
  Description of Artificial Sequence: Synthetic oligonucleotide
gcuguagaacgggcaaaga

SEQ ID NO: 1762684 - RNA, 19 nt, Artificial Sequence
  Description of Artificial Sequence: Synthetic oligonucleotide
ccucugguacccacuacaa

SEQ ID NO: 1762685 - RNA, 19 nt, Artificial Sequence
  Description of Artificial Sequence: Synthetic oligonucleotide
gaucugugucagcucuguu

SEQ ID NO: 1762686 - RNA, 19 nt, Artificial Sequence
  Description of Artificial Sequence: Synthetic oligonucleotide
ccuuggcccaggcagugca

SEQ ID NO: 1762687 - RNA, 19 nt, Artificial Sequence
  Description of Artificial Sequence: Synthetic oligonucleotide
cagaggccggcugcugcug

SEQ ID NO: 1762688 - RNA, 19 nt, Artificial Sequence
  Description of Artificial Sequence: Synthetic oligonucleotide
cggcgaaccaaagggacug

SEQ ID NO: 1762689 - RNA, 19 nt, Artificial Sequence
  Description of Artificial Sequence: Synthetic oligonucleotide
cccguccauucucuccuag

SEQ ID NO: 1762690 - RNA, 19 nt, Artificial Sequence
  Description of Artificial Sequence: Synthetic oligonucleotide
uuagccccuugggucuauu

SEQ ID NO: 1762691 - RNA, 19 nt, Artificial Sequence
  Description of Artificial Sequence: Synthetic oligonucleotide
cccgagaauugauggaacu

SEQ ID NO: 1762692 - RNA, 19 nt, Artificial Sequence
  Description of Artificial Sequence: Synthetic oligonucleotide
gguuuccacaucugacuuu

SEQ ID NO: 1762693 - RNA, 19 nt, Artificial Sequence
  Description of Artificial Sequence: Synthetic oligonucleotide
cauccggccacacggccau

SEQ ID NO: 1762694 - RNA, 19 nt, Artificial Sequence
  Description of Artificial Sequence: Synthetic oligonucleotide
ggucuguaguucgcugcuc

SEQ ID NO: 1762695 - RNA, 19 nt, Artificial Sequence
  Description of Artificial Sequence: Synthetic oligonucleotide
acccguccauucucuccua

SEQ ID NO: 1762696 - RNA, 19 nt, Artificial Sequence
  Description of Artificial Sequence: Synthetic oligonucleotide
gcaaagagcuugacaggua

SEQ ID NO: 1762697 - RNA, 19 nt, Artificial Sequence
  Description of Artificial Sequence: Synthetic oligonucleotide
cucagcgaucuguuccaau

SEQ ID NO: 1762698 - RNA, 19 nt, Artificial Sequence
  Description of Artificial Sequence: Synthetic oligonucleotide
ggaauucccuggggaagaa

SEQ ID NO: 1762699 - RNA, 19 nt, Artificial Sequence
  Description of Artificial Sequence: Synthetic oligonucleotide
ggcggccucuauaaucaaa

SEQ ID NO: 1762700 - RNA, 19 nt, Artificial Sequence
  Description of Artificial Sequence: Synthetic oligonucleotide
ggagaaaggcggccucuau

SEQ ID NO: 1762701 - RNA, 19 nt, Artificial Sequence
  Description of Artificial Sequence: Synthetic oligonucleotide
cagugcagacaggaagagu

SEQ ID NO: 1762702 - RNA, 19 nt, Artificial Sequence
  Description of Artificial Sequence: Synthetic oligonucleotide
uggcguucguuggcauauu

SEQ ID NO: 1762703 - RNA, 19 nt, Artificial Sequence
  Description of Artificial Sequence: Synthetic oligonucleotide
cuuuagccccuugggucua

SEQ ID NO: 1762704 - RNA, 19 nt, Artificial Sequence
  Description of Artificial Sequence: Synthetic oligonucleotide
gccagcacccguccauucu

SEQ ID NO: 1762705 - RNA, 19 nt, Artificial Sequence
  Description of Artificial Sequence: Synthetic oligonucleotide
cggccucuauaaucaaaca

SEQ ID NO: 1762706 - RNA, 19 nt, Artificial Sequence
  Description of Artificial Sequence: Synthetic oligonucleotide
ccucacccaccaaccccac

SEQ ID NO: 1762707 - RNA, 19 nt, Artificial Sequence
  Description of Artificial Sequence: Synthetic oligonucleotide
cugcccgggcauggcguuc

SEQ ID NO: 1762708 - RNA, 19 nt, Artificial Sequence
  Description of Artificial Sequence: Synthetic oligonucleotide
ccacacggccauacuugga

SEQ ID NO: 1762709 - RNA, 19 nt, Artificial Sequence
  Description of Artificial Sequence: Synthetic oligonucleotide
gccaguagugauggcugua

SEQ ID NO: 1762710 - RNA, 19 nt, Artificial Sequence
  Description of Artificial Sequence: Synthetic oligonucleotide
ggggugugccugccucaga

SEQ ID NO: 1762711 - RNA, 19 nt, Artificial Sequence
  Description of Artificial Sequence: Synthetic oligonucleotide
cggccauacuuggaaaaga

SEQ ID NO: 1762712 - RNA, 19 nt, Artificial Sequence
  Description of Artificial Sequence: Synthetic oligonucleotide
ggacugugacacggggucu

SEQ ID NO: 1762713 - RNA, 19 nt, Artificial Sequence
  Description of Artificial Sequence: Synthetic oligonucleotide
ggacaaaggcauagccuuu

SEQ ID NO: 1762714 - RNA, 19 nt, Artificial Sequence
  Description of Artificial Sequence: Synthetic oligonucleotide
ggguaaggguaggccagua

SEQ ID NO: 1762715 - RNA, 19 nt, Artificial Sequence
  Description of Artificial Sequence: Synthetic oligonucleotide
gguuccccucacccaccaa

SEQ ID NO: 1762716 - RNA, 19 nt, Artificial Sequence
  Description of Artificial Sequence: Synthetic oligonucleotide
gggcaucgauguuggacuu

SEQ ID NO: 1762717 - RNA, 19 nt, Artificial Sequence
  Description of Artificial Sequence: Synthetic oligonucleotide
ccgagaauugauggaacuu

SEQ ID NO: 1762718 - RNA, 19 nt, Artificial Sequence
  Description of Artificial Sequence: Synthetic oligonucleotide
ccguccauucucuccuagu

SEQ ID NO: 1762719 - RNA, 19 nt, Artificial Sequence
  Description of Artificial Sequence: Synthetic oligonucleotide
gggguaaggguaggccagu

SEQ ID NO: 1762720 - RNA, 19 nt, Artificial Sequence
  Description of Artificial Sequence: Synthetic oligonucleotide
gcuuacugcaaggccccau

SEQ ID NO: 1762721 - RNA, 19 nt, Artificial Sequence
  Description of Artificial Sequence: Synthetic oligonucleotide
gcauggcguucguuggcau

SEQ ID NO: 1762722 - RNA, 19 nt, Artificial Sequence
  Description of Artificial Sequence: Synthetic oligonucleotide
cggggucucuucacuggga

SEQ ID NO: 1762723 - RNA, 19 nt, Artificial Sequence
  Description of Artificial Sequence: Synthetic oligonucleotide
ccugccucagaagccgugu

SEQ ID NO: 1762724 - RNA, 19 nt, Artificial Sequence
  Description of Artificial Sequence: Synthetic oligonucleotide
ggcgaaccaaagggacugu

SEQ ID NO: 1762725 - RNA, 19 nt, Artificial Sequence
  Description of Artificial Sequence: Synthetic oligonucleotide
cgacccaacagggcaucga

SEQ ID NO: 1762726 - RNA, 19 nt, Artificial Sequence
  Description of Artificial Sequence: Synthetic oligonucleotide
cggggaaagagugccugcu

SEQ ID NO: 1762727 - RNA, 19 nt, Artificial Sequence
  Description of Artificial Sequence: Synthetic oligonucleotide
auccggccacacggccaua

SEQ ID NO: 1762728 - RNA, 19 nt, Artificial Sequence
  Description of Artificial Sequence: Synthetic oligonucleotide
cguuggcauauuggacaaa

SEQ ID NO: 1762729 - RNA, 19 nt, Artificial Sequence
  Description of Artificial Sequence: Synthetic oligonucleotide
cggccacacggccauacuu

SEQ ID NO: 1762730 - RNA, 19 nt, Artificial Sequence
  Description of Artificial Sequence: Synthetic oligonucleotide
ccggccacacggccauacu

SEQ ID NO: 1762731 - RNA, 19 nt, Artificial Sequence
  Description of Artificial Sequence: Synthetic oligonucleotide
cuuaaaaccaaguaaaggg

SEQ ID NO: 1762732 - RNA, 19 nt, Artificial Sequence
  Description of Artificial Sequence: Synthetic oligonucleotide
cagaaauuaaguaagacgg

SEQ ID NO: 1762733 - RNA, 19 nt, Artificial Sequence
  Description of Artificial Sequence: Synthetic oligonucleotide
aaagugauaaucuuuguca

SEQ ID NO: 1762734 - RNA, 19 nt, Artificial Sequence
  Description of Artificial Sequence: Synthetic oligonucleotide
aauuaaugaacuuggcuuc

SEQ ID NO: 1762735 - RNA, 19 nt, Artificial Sequence
  Description of Artificial Sequence: Synthetic oligonucleotide
uuagacaacacauucuugg

SEQ ID NO: 1762736 - RNA, 19 nt, Artificial Sequence
  Description of Artificial Sequence: Synthetic oligonucleotide
uucacaaccgaaaagguag

SEQ ID NO: 1762737 - RNA, 19 nt, Artificial Sequence
  Description of Artificial Sequence: Synthetic oligonucleotide
gauauaucaacuguuacag

SEQ ID NO: 1762738 - RNA, 19 nt, Artificial Sequence
  Description of Artificial Sequence: Synthetic oligonucleotide
aaacuaaccguucuuagug

SEQ ID NO: 1762739 - RNA, 19 nt, Artificial Sequence
  Description of Artificial Sequence: Synthetic oligonucleotide
uguucuaucauaacauucc

SEQ ID NO: 1762740 - RNA, 19 nt, Artificial Sequence
  Description of Artificial Sequence: Synthetic oligonucleotide
uguacggacauuuucaaug

SEQ ID NO: 1762741 - RNA, 19 nt, Artificial Sequence
  Description of Artificial Sequence: Synthetic oligonucleotide
acauuuaucaaacaaagua

SEQ ID NO: 1762742 - RNA, 19 nt, Artificial Sequence
  Description of Artificial Sequence: Synthetic oligonucleotide
acuauuacuauguucuauc

SEQ ID NO: 1762743 - RNA, 19 nt, Artificial Sequence
  Description of Artificial Sequence: Synthetic oligonucleotide
gaaacuguugguuguacgg

SEQ ID NO: 1762744 - RNA, 19 nt, Artificial Sequence
  Description of Artificial Sequence: Synthetic oligonucleotide
uguuacagaaauuaaguaa

SEQ ID NO: 1762745 - RNA, 19 nt, Artificial Sequence
  Description of Artificial Sequence: Synthetic oligonucleotide
aaguaaaggguggaguucc

SEQ ID NO: 1762746 - RNA, 19 nt, Artificial Sequence
  Description of Artificial Sequence: Synthetic oligonucleotide
aauuaaguaagacggagua

SEQ ID NO: 1762747 - RNA, 19 nt, Artificial Sequence
  Description of Artificial Sequence: Synthetic oligonucleotide
gaaaagguaguucuguggc

SEQ ID NO: 1762748 - RNA, 19 nt, Artificial Sequence
  Description of Artificial Sequence: Synthetic oligonucleotide
aauuggacugccuucauaa

SEQ ID NO: 1762749 - RNA, 19 nt, Artificial Sequence
  Description of Artificial Sequence: Synthetic oligonucleotide
aagugauaaucuuugucag

SEQ ID NO: 1762750 - RNA, 19 nt, Artificial Sequence
  Description of Artificial Sequence: Synthetic oligonucleotide
acauguaucuuuugucucc

SEQ ID NO: 1762751 - RNA, 19 nt, Artificial Sequence
  Description of Artificial Sequence: Synthetic oligonucleotide
acuauguucuaucauaaca

SEQ ID NO: 1762752 - RNA, 19 nt, Artificial Sequence
  Description of Artificial Sequence: Synthetic oligonucleotide
cucuacagcuacuagaugc

SEQ ID NO: 1762753 - RNA, 19 nt, Artificial Sequence
  Description of Artificial Sequence: Synthetic oligonucleotide
uguguaauucaucuuuugc

SEQ ID NO: 1762754 - RNA, 19 nt, Artificial Sequence
  Description of Artificial Sequence: Synthetic oligonucleotide
auaauuaaugaacuuggcu

SEQ ID NO: 1762755 - RNA, 19 nt, Artificial Sequence
  Description of Artificial Sequence: Synthetic oligonucleotide
agaacuagguccuuuuggg

SEQ ID NO: 1762756 - RNA, 19 nt, Artificial Sequence
  Description of Artificial Sequence: Synthetic oligonucleotide
uucgguaugcgagauaucg

SEQ ID NO: 1762757 - RNA, 19 nt, Artificial Sequence
  Description of Artificial Sequence: Synthetic oligonucleotide
uugaauagccuccugguca

SEQ ID NO: 1762758 - RNA, 19 nt, Artificial Sequence
  Description of Artificial Sequence: Synthetic oligonucleotide
gaaauuaaguaagacggag

SEQ ID NO: 1762759 - RNA, 19 nt, Artificial Sequence
  Description of Artificial Sequence: Synthetic oligonucleotide
uaucauaacauuccauaca

SEQ ID NO: 1762760 - RNA, 19 nt, Artificial Sequence
  Description of Artificial Sequence: Synthetic oligonucleotide
ucuaucauaacauuccaua

SEQ ID NO: 1762761 - RNA, 19 nt, Artificial Sequence
  Description of Artificial Sequence: Synthetic oligonucleotide
cuucuacagaacuaggucc

SEQ ID NO: 1762762 - RNA, 19 nt, Artificial Sequence
  Description of Artificial Sequence: Synthetic oligonucleotide
uaugcgagauaucggacgg

SEQ ID NO: 1762763 - RNA, 19 nt, Artificial Sequence
  Description of Artificial Sequence: Synthetic oligonucleotide
uggacaacauuuaucaaac

SEQ ID NO: 1762764 - RNA, 19 nt, Artificial Sequence
  Description of Artificial Sequence: Synthetic oligonucleotide
aucaucaucaucaucaucu

SEQ ID NO: 1762765 - RNA, 19 nt, Artificial Sequence
  Description of Artificial Sequence: Synthetic oligonucleotide
aaguagggaaaguuuucac

SEQ ID NO: 1762766 - RNA, 19 nt, Artificial Sequence
  Description of Artificial Sequence: Synthetic oligonucleotide
ucaaccguaacaccacagg

SEQ ID NO: 1762767 - RNA, 19 nt, Artificial Sequence
  Description of Artificial Sequence: Synthetic oligonucleotide
auaauucauugcuucugcc

SEQ ID NO: 1762768 - RNA, 19 nt, Artificial Sequence
  Description of Artificial Sequence: Synthetic oligonucleotide
uuaguucacaaccgaaaag

SEQ ID NO: 1762769 - RNA, 19 nt, Artificial Sequence
  Description of Artificial Sequence: Synthetic oligonucleotide
aacuguugguuguacggac

SEQ ID NO: 1762770 - RNA, 19 nt, Artificial Sequence
  Description of Artificial Sequence: Synthetic oligonucleotide
uuaucaaacaaaguaggga

SEQ ID NO: 1762771 - RNA, 19 nt, Artificial Sequence
  Description of Artificial Sequence: Synthetic oligonucleotide
accguaacaccacaggugg

SEQ ID NO: 1762772 - RNA, 19 nt, Artificial Sequence
  Description of Artificial Sequence: Synthetic oligonucleotide
uaaagugauaaucuuuguc

SEQ ID NO: 1762773 - RNA, 19 nt, Artificial Sequence
  Description of Artificial Sequence: Synthetic oligonucleotide
aacuguuacagaaauuaag

SEQ ID NO: 1762774 - RNA, 19 nt, Artificial Sequence
  Description of Artificial Sequence: Synthetic oligonucleotide
agagaucuugaauagccuc

SEQ ID NO: 1762775 - RNA, 19 nt, Artificial Sequence
  Description of Artificial Sequence: Synthetic oligonucleotide
ucaaacaaaguagggaaag

SEQ ID NO: 1762776 - RNA, 19 nt, Artificial Sequence
  Description of Artificial Sequence: Synthetic oligonucleotide
gaugcuguccacuaaugug

SEQ ID NO: 1762777 - RNA, 19 nt, Artificial Sequence
  Description of Artificial Sequence: Synthetic oligonucleotide
aguaagacggaguauuuca

SEQ ID NO: 1762778 - RNA, 19 nt, Artificial Sequence
  Description of Artificial Sequence: Synthetic oligonucleotide
uuuuaguucacaaccgaaa

SEQ ID NO: 1762779 - RNA, 19 nt, Artificial Sequence
  Description of Artificial Sequence: Synthetic oligonucleotide
aaacuaaacaggcauuuua

SEQ ID NO: 1762780 - RNA, 19 nt, Artificial Sequence
  Description of Artificial Sequence: Synthetic oligonucleotide
acucuugaccuuuugaucu

SEQ ID NO: 1762781 - RNA, 19 nt, Artificial Sequence
  Description of Artificial Sequence: Synthetic oligonucleotide
ucuuccaugagguggagac

SEQ ID NO: 1762782 - RNA, 19 nt, Artificial Sequence
  Description of Artificial Sequence: Synthetic oligonucleotide
ucuucuacagaacuagguc

SEQ ID NO: 1762783 - RNA, 19 nt, Artificial Sequence
  Description of Artificial Sequence: Synthetic oligonucleotide
auuuccacaucugaccacc

SEQ ID NO: 1762784 - RNA, 19 nt, Artificial Sequence
  Description of Artificial Sequence: Synthetic oligonucleotide
ucucguacagauuucuuca

SEQ ID NO: 1762785 - RNA, 19 nt, Artificial Sequence
  Description of Artificial Sequence: Synthetic oligonucleotide
aucucguacagauuucuuc

SEQ ID NO: 1762786 - RNA, 19 nt, Artificial Sequence
  Description of Artificial Sequence: Synthetic oligonucleotide
aaucaucaucaucaucauc

SEQ ID NO: 1762787 - RNA, 19 nt, Artificial Sequence
  Description of Artificial Sequence: Synthetic oligonucleotide
ucacauguaucuuuugucu

SEQ ID NO: 1762788 - RNA, 19 nt, Artificial Sequence
  Description of Artificial Sequence: Synthetic oligonucleotide
cauuauccaccuuaaagug

SEQ ID NO: 1762789 - RNA, 19 nt, Artificial Sequence
  Description of Artificial Sequence: Synthetic oligonucleotide
uuuaauuggacugccuuca

SEQ ID NO: 1762790 - RNA, 19 nt, Artificial Sequence
  Description of Artificial Sequence: Synthetic oligonucleotide
uggcaauagaaccuggaca

SEQ ID NO: 1762791 - RNA, 19 nt, Artificial Sequence
  Description of Artificial Sequence: Synthetic oligonucleotide
gacggaguauuucaaacug

SEQ ID NO: 1762792 - RNA, 19 nt, Artificial Sequence
  Description of Artificial Sequence: Synthetic oligonucleotide
uguugaugguuuuaagucu

SEQ ID NO: 1762793 - RNA, 19 nt, Artificial Sequence
  Description of Artificial Sequence: Synthetic oligonucleotide
ucuacgauguguaauucau

SEQ ID NO: 1762794 - RNA, 19 nt, Artificial Sequence
  Description of Artificial Sequence: Synthetic oligonucleotide
uugccagacauacuuaaga

SEQ ID NO: 1762795 - RNA, 19 nt, Artificial Sequence
  Description of Artificial Sequence: Synthetic oligonucleotide
cuaucauaacauuccauac

SEQ ID NO: 1762796 - RNA, 19 nt, Artificial Sequence
  Description of Artificial Sequence: Synthetic oligonucleotide
uccuuuugggguuuuagga

SEQ ID NO: 1762797 - RNA, 19 nt, Artificial Sequence
  Description of Artificial Sequence: Synthetic oligonucleotide
guaugcgagauaucggacg

SEQ ID NO: 1762798 - RNA, 19 nt, Artificial Sequence
  Description of Artificial Sequence: Synthetic oligonucleotide
acuaaccguucuuagugac

SEQ ID NO: 1762799 - RNA, 19 nt, Artificial Sequence
  Description of Artificial Sequence: Synthetic oligonucleotide
acauacuuaagaguuucac

SEQ ID NO: 1762800 - RNA, 19 nt, Artificial Sequence
  Description of Artificial Sequence: Synthetic oligonucleotide
auuuucaauguugccagcg

SEQ ID NO: 1762801 - RNA, 19 nt, Artificial Sequence
  Description of Artificial Sequence: Synthetic oligonucleotide
aguagggaaaguuuucacu

SEQ ID NO: 1762802 - RNA, 19 nt, Artificial Sequence
  Description of Artificial Sequence: Synthetic oligonucleotide
aaucuuugucagcuuuuag

SEQ ID NO: 1762803 - RNA, 19 nt, Artificial Sequence
  Description of Artificial Sequence: Synthetic oligonucleotide
ggugguguaauuucaaagc

SEQ ID NO: 1762804 - RNA, 19 nt, Artificial Sequence
  Description of Artificial Sequence: Synthetic oligonucleotide
cuaaacuaaccguucuuag

SEQ ID NO: 1762805 - RNA, 19 nt, Artificial Sequence
  Description of Artificial Sequence: Synthetic oligonucleotide
uuuucacuuugcauuauaa

SEQ ID NO: 1762806 - RNA, 19 nt, Artificial Sequence
  Description of Artificial Sequence: Synthetic oligonucleotide
aacacauucuuggcaauag

SEQ ID NO: 1762807 - RNA, 19 nt, Artificial Sequence
  Description of Artificial Sequence: Synthetic oligonucleotide
aggugguguaauuucaaag

SEQ ID NO: 1762808 - RNA, 19 nt, Artificial Sequence
  Description of Artificial Sequence: Synthetic oligonucleotide
uaaacuaaccguucuuagu

SEQ ID NO: 1762809 - RNA, 19 nt, Artificial Sequence
  Description of Artificial Sequence: Synthetic oligonucleotide
acuguuacagaaauuaagu

SEQ ID NO: 1762810 - RNA, 19 nt, Artificial Sequence
  Description of Artificial Sequence: Synthetic oligonucleotide
ugaaccacaccucaaccgu

SEQ ID NO: 1762811 - RNA, 19 nt, Artificial Sequence
  Description of Artificial Sequence: Synthetic oligonucleotide
aaaguagggaaaguuuuca

SEQ ID NO: 1762812 - RNA, 19 nt, Artificial Sequence
  Description of Artificial Sequence: Synthetic oligonucleotide
guuacuuuaauuggacugc

SEQ ID NO: 1762813 - RNA, 19 nt, Artificial Sequence
  Description of Artificial Sequence: Synthetic oligonucleotide
uaucuuuugucucccuacc

SEQ ID NO: 1762814 - RNA, 19 nt, Artificial Sequence
  Description of Artificial Sequence: Synthetic oligonucleotide
ucuuagugacaacuggugu

SEQ ID NO: 1762815 - RNA, 19 nt, Artificial Sequence
  Description of Artificial Sequence: Synthetic oligonucleotide
uggacugccuucauaauuc

SEQ ID NO: 1762816 - RNA, 19 nt, Artificial Sequence
  Description of Artificial Sequence: Synthetic oligonucleotide
ugguuuuaagucuuuucca

SEQ ID NO: 1762817 - RNA, 19 nt, Artificial Sequence
  Description of Artificial Sequence: Synthetic oligonucleotide
ucuugaauagccuccuggu

SEQ ID NO: 1762818 - RNA, 19 nt, Artificial Sequence
  Description of Artificial Sequence: Synthetic oligonucleotide
cugaaccacaccucaaccg

SEQ ID NO: 1762819 - RNA, 19 nt, Artificial Sequence
  Description of Artificial Sequence: Synthetic oligonucleotide
aaguaagacggaguauuuc

SEQ ID NO: 1762820 - RNA, 19 nt, Artificial Sequence
  Description of Artificial Sequence: Synthetic oligonucleotide
aaauuaaguaagacggagu

SEQ ID NO: 1762821 - RNA, 19 nt, Artificial Sequence
  Description of Artificial Sequence: Synthetic oligonucleotide
aguuccaucccugaaaacu

SEQ ID NO: 1762822 - RNA, 19 nt, Artificial Sequence
  Description of Artificial Sequence: Synthetic oligonucleotide
aaagguaguucuguggccu

SEQ ID NO: 1762823 - RNA, 19 nt, Artificial Sequence
  Description of Artificial Sequence: Synthetic oligonucleotide
gaacuagguccuuuugggg

SEQ ID NO: 1762824 - RNA, 19 nt, Artificial Sequence
  Description of Artificial Sequence: Synthetic oligonucleotide
ucuacagcuacuagaugcu

SEQ ID NO: 1762825 - RNA, 19 nt, Artificial Sequence
  Description of Artificial Sequence: Synthetic oligonucleotide
uaaagagacuuccuccacu

SEQ ID NO: 1762826 - RNA, 19 nt, Artificial Sequence
  Description of Artificial Sequence: Synthetic oligonucleotide
ugucuucuacagaacuagg

SEQ ID NO: 1762827 - RNA, 19 nt, Artificial Sequence
  Description of Artificial Sequence: Synthetic oligonucleotide
cagaacuagguccuuuugg

SEQ ID NO: 1762828 - RNA, 19 nt, Artificial Sequence
  Description of Artificial Sequence: Synthetic oligonucleotide
gaccuuuugaucuuggugu

SEQ ID NO: 1762829 - RNA, 19 nt, Artificial Sequence
  Description of Artificial Sequence: Synthetic oligonucleotide
uccucuacagcuacuagau

SEQ ID NO: 1762830 - RNA, 19 nt, Artificial Sequence
  Description of Artificial Sequence: Synthetic oligonucleotide
aagggaaacuguugguugu

SEQ ID NO: 1762831 - RNA, 19 nt, Artificial Sequence
  Description of Artificial Sequence: Synthetic oligonucleotide
guaauucaucuuuugcccc

SEQ ID NO: 1762832 - RNA, 19 nt, Artificial Sequence
  Description of Artificial Sequence: Synthetic oligonucleotide
cacuaaugugcacaggccc

SEQ ID NO: 1762833 - RNA, 19 nt, Artificial Sequence
  Description of Artificial Sequence: Synthetic oligonucleotide
uagacaacacauucuuggc

SEQ ID NO: 1762834 - RNA, 19 nt, Artificial Sequence
  Description of Artificial Sequence: Synthetic oligonucleotide
uauuacuauguucuaucau

SEQ ID NO: 1762835 - RNA, 19 nt, Artificial Sequence
  Description of Artificial Sequence: Synthetic oligonucleotide
caucuuuugccccugcccc

SEQ ID NO: 1762836 - RNA, 19 nt, Artificial Sequence
  Description of Artificial Sequence: Synthetic oligonucleotide
cuuaaagagacuuccucca

SEQ ID NO: 1762837 - RNA, 19 nt, Artificial Sequence
  Description of Artificial Sequence: Synthetic oligonucleotide
uuucuuaaagagacuuccu

SEQ ID NO: 1762838 - RNA, 19 nt, Artificial Sequence
  Description of Artificial Sequence: Synthetic oligonucleotide
uuaaugucuucuacagaac

SEQ ID NO: 1762839 - RNA, 19 nt, Artificial Sequence
  Description of Artificial Sequence: Synthetic oligonucleotide
aacuaaccguucuuaguga

SEQ ID NO: 1762840 - RNA, 19 nt, Artificial Sequence
  Description of Artificial Sequence: Synthetic oligonucleotide
uuccucuacagcuacuaga

SEQ ID NO: 1762841 - RNA, 19 nt, Artificial Sequence
  Description of Artificial Sequence: Synthetic oligonucleotide
gacaacacauucuuggcaa

SEQ ID NO: 1762842 - RNA, 19 nt, Artificial Sequence
  Description of Artificial Sequence: Synthetic oligonucleotide
aaaucaucaucaucaucau

SEQ ID NO: 1762843 - RNA, 19 nt, Artificial Sequence
  Description of Artificial Sequence: Synthetic oligonucleotide
caucgagucuuccaugagg

SEQ ID NO: 1762844 - RNA, 19 nt, Artificial Sequence
  Description of Artificial Sequence: Synthetic oligonucleotide
acuaaacaggcauuuuaga

SEQ ID NO: 1762845 - RNA, 19 nt, Artificial Sequence
  Description of Artificial Sequence: Synthetic oligonucleotide
aauagccuccuggucaguc

SEQ ID NO: 1762846 - RNA, 19 nt, Artificial Sequence
  Description of Artificial Sequence: Synthetic oligonucleotide
gagaucuugaauagccucc

SEQ ID NO: 1762847 - RNA, 19 nt, Artificial Sequence
  Description of Artificial Sequence: Synthetic oligonucleotide
uuaaagagacuuccuccac

SEQ ID NO: 1762848 - RNA, 19 nt, Artificial Sequence
  Description of Artificial Sequence: Synthetic oligonucleotide
ucgguaugcgagauaucgg

SEQ ID NO: 1762849 - RNA, 19 nt, Artificial Sequence
  Description of Artificial Sequence: Synthetic oligonucleotide
uccacaucugaccaccacu

SEQ ID NO: 1762850 - RNA, 19 nt, Artificial Sequence
  Description of Artificial Sequence: Synthetic oligonucleotide
cugccuucauaauucauug

SEQ ID NO: 1762851 - RNA, 19 nt, Artificial Sequence
  Description of Artificial Sequence: Synthetic oligonucleotide
acuuuaauuggacugccuu

SEQ ID NO: 1762852 - RNA, 19 nt, Artificial Sequence
  Description of Artificial Sequence: Synthetic oligonucleotide
uaauucaucuuuugccccu

SEQ ID NO: 1762853 - RNA, 19 nt, Artificial Sequence
  Description of Artificial Sequence: Synthetic oligonucleotide
ucaucauuauccaccuuaa

SEQ ID NO: 1762854 - RNA, 19 nt, Artificial Sequence
  Description of Artificial Sequence: Synthetic oligonucleotide
uccaggagcagaucgcuug

SEQ ID NO: 1762855 - RNA, 19 nt, Artificial Sequence
  Description of Artificial Sequence: Synthetic oligonucleotide
acaaccgaaaagguaguuc

SEQ ID NO: 1762856 - RNA, 19 nt, Artificial Sequence
  Description of Artificial Sequence: Synthetic oligonucleotide
caagggaaacuguugguug

SEQ ID NO: 1762857 - RNA, 19 nt, Artificial Sequence
  Description of Artificial Sequence: Synthetic oligonucleotide
uugucucccuaccauuucc

SEQ ID NO: 1762858 - RNA, 19 nt, Artificial Sequence
  Description of Artificial Sequence: Synthetic oligonucleotide
guccuuuugggguuuuagg

SEQ ID NO: 1762859 - RNA, 19 nt, Artificial Sequence
  Description of Artificial Sequence: Synthetic oligonucleotide
aaccguaacaccacaggug

SEQ ID NO: 1762860 - RNA, 19 nt, Artificial Sequence
  Description of Artificial Sequence: Synthetic oligonucleotide
agacggaguauuucaaacu

SEQ ID NO: 1762861 - RNA, 19 nt, Artificial Sequence
  Description of Artificial Sequence: Synthetic oligonucleotide
cugaccaccacuauuacua

SEQ ID NO: 1762862 - RNA, 19 nt, Artificial Sequence
  Description of Artificial Sequence: Synthetic oligonucleotide
uccaucgagucuuccauga

SEQ ID NO: 1762863 - RNA, 19 nt, Artificial Sequence
  Description of Artificial Sequence: Synthetic oligonucleotide
uucaauguugccagcguua

SEQ ID NO: 1762864 - RNA, 19 nt, Artificial Sequence
  Description of Artificial Sequence: Synthetic oligonucleotide
uucuauacuugcuugcauu

SEQ ID NO: 1762865 - RNA, 19 nt, Artificial Sequence
  Description of Artificial Sequence: Synthetic oligonucleotide
gccagcguuacuuuaauug

SEQ ID NO: 1762866 - RNA, 19 nt, Artificial Sequence
  Description of Artificial Sequence: Synthetic oligonucleotide
cagauauaucaacuguuac

SEQ ID NO: 1762867 - RNA, 19 nt, Artificial Sequence
  Description of Artificial Sequence: Synthetic oligonucleotide
ugggaagagaaccaccuuu

SEQ ID NO: 1762868 - RNA, 19 nt, Artificial Sequence
  Description of Artificial Sequence: Synthetic oligonucleotide
agauuucuucacuggaacu

SEQ ID NO: 1762869 - RNA, 19 nt, Artificial Sequence
  Description of Artificial Sequence: Synthetic oligonucleotide
ccuaagagggcucaugucc

SEQ ID NO: 1762870 - RNA, 19 nt, Artificial Sequence
  Description of Artificial Sequence: Synthetic oligonucleotide
uuacuuuaauuggacugcc

SEQ ID NO: 1762871 - RNA, 19 nt, Artificial Sequence
  Description of Artificial Sequence: Synthetic oligonucleotide
uguccaucgagucuuccau

SEQ ID NO: 1762872 - RNA, 19 nt, Artificial Sequence
  Description of Artificial Sequence: Synthetic oligonucleotide
agcguuacuuuaauuggac

SEQ ID NO: 1762873 - RNA, 19 nt, Artificial Sequence
  Description of Artificial Sequence: Synthetic oligonucleotide
aaacuguugguuguacgga

SEQ ID NO: 1762874 - RNA, 19 nt, Artificial Sequence
  Description of Artificial Sequence: Synthetic oligonucleotide
uggaguuccaucccugaaa

SEQ ID NO: 1762875 - RNA, 19 nt, Artificial Sequence
  Description of Artificial Sequence: Synthetic oligonucleotide
agcuacuagaugcugucca

SEQ ID NO: 1762876 - RNA, 19 nt, Artificial Sequence
  Description of Artificial Sequence: Synthetic oligonucleotide
gacagccagauauaucaac

SEQ ID NO: 1762877 - RNA, 19 nt, Artificial Sequence
  Description of Artificial Sequence: Synthetic oligonucleotide
ucugccucuacgaugugua

SEQ ID NO: 1762878 - RNA, 19 nt, Artificial Sequence
  Description of Artificial Sequence: Synthetic oligonucleotide
agcuuuuaguucacaaccg

SEQ ID NO: 1762879 - RNA, 19 nt, Artificial Sequence
  Description of Artificial Sequence: Synthetic oligonucleotide
uucuaucauaacauuccau

SEQ ID NO: 1762880 - RNA, 19 nt, Artificial Sequence
  Description of Artificial Sequence: Synthetic oligonucleotide
cuggacaacauuuaucaaa

SEQ ID NO: 1762881 - RNA, 19 nt, Artificial Sequence
  Description of Artificial Sequence: Synthetic oligonucleotide
aauagaaccuggacaacau

SEQ ID NO: 1762882 - RNA, 19 nt, Artificial Sequence
  Description of Artificial Sequence: Synthetic oligonucleotide
cacaccucaaccguaacac

SEQ ID NO: 1762883 - RNA, 19 nt, Artificial Sequence
  Description of Artificial Sequence: Synthetic oligonucleotide
gacucuugaccuuuugauc

SEQ ID NO: 1762884 - RNA, 19 nt, Artificial Sequence
  Description of Artificial Sequence: Synthetic oligonucleotide
uuagugacaacugguguuc

SEQ ID NO: 1762885 - RNA, 19 nt, Artificial Sequence
  Description of Artificial Sequence: Synthetic oligonucleotide
uugccuuaaugucuucuac

SEQ ID NO: 1762886 - RNA, 19 nt, Artificial Sequence
  Description of Artificial Sequence: Synthetic oligonucleotide
uaucggacggaggaaacug

SEQ ID NO: 1762887 - RNA, 19 nt, Artificial Sequence
  Description of Artificial Sequence: Synthetic oligonucleotide
gaucgcuugccagacauac

SEQ ID NO: 1762888 - RNA, 19 nt, Artificial Sequence
  Description of Artificial Sequence: Synthetic oligonucleotide
auguguaauucaucuuuug

SEQ ID NO: 1762889 - RNA, 19 nt, Artificial Sequence
  Description of Artificial Sequence: Synthetic oligonucleotide
ucgcuugccagacauacuu

SEQ ID NO: 1762890 - RNA, 19 nt, Artificial Sequence
  Description of Artificial Sequence: Synthetic oligonucleotide
uaagacggaguauuucaaa

SEQ ID NO: 1762891 - RNA, 19 nt, Artificial Sequence
  Description of Artificial Sequence: Synthetic oligonucleotide
uucaucuuuugccccugcc

SEQ ID NO: 1762892 - RNA, 19 nt, Artificial Sequence
  Description of Artificial Sequence: Synthetic oligonucleotide
uaaccguucuuagugacaa

SEQ ID NO: 1762893 - RNA, 19 nt, Artificial Sequence
  Description of Artificial Sequence: Synthetic oligonucleotide
uuggacugccuucauaauu

SEQ ID NO: 1762894 - RNA, 19 nt, Artificial Sequence
  Description of Artificial Sequence: Synthetic oligonucleotide
ggcaauagaaccuggacaa

SEQ ID NO: 1762895 - RNA, 19 nt, Artificial Sequence
  Description of Artificial Sequence: Synthetic oligonucleotide
aaaggacagccagauauau

SEQ ID NO: 1762896 - RNA, 19 nt, Artificial Sequence
  Description of Artificial Sequence: Synthetic oligonucleotide
ugcgagauaucggacggag

SEQ ID NO: 1762897 - RNA, 19 nt, Artificial Sequence
  Description of Artificial Sequence: Synthetic oligonucleotide
uuucuauacuugcuugcau

SEQ ID NO: 1762898 - RNA, 19 nt, Artificial Sequence
  Description of Artificial Sequence: Synthetic oligonucleotide
ucguacagauuucuucacu

SEQ ID NO: 1762899 - RNA, 19 nt, Artificial Sequence
  Description of Artificial Sequence: Synthetic oligonucleotide
aaaccaaguaaagggugga

SEQ ID NO: 1762900 - RNA, 19 nt, Artificial Sequence
  Description of Artificial Sequence: Synthetic oligonucleotide
gccuuaaugucuucuacag

SEQ ID NO: 1762901 - RNA, 19 nt, Artificial Sequence
  Description of Artificial Sequence: Synthetic oligonucleotide
uuucaauguugccagcguu

SEQ ID NO: 1762902 - RNA, 19 nt, Artificial Sequence
  Description of Artificial Sequence: Synthetic oligonucleotide
acuucgguaugcgagauau

SEQ ID NO: 1762903 - RNA, 19 nt, Artificial Sequence
  Description of Artificial Sequence: Synthetic oligonucleotide
acauuccauacauacuuaa

SEQ ID NO: 1762904 - RNA, 19 nt, Artificial Sequence
  Description of Artificial Sequence: Synthetic oligonucleotide
acugccagagaucuugaau

SEQ ID NO: 1762905 - RNA, 19 nt, Artificial Sequence
  Description of Artificial Sequence: Synthetic oligonucleotide
ccagcguuacuuuaauugg

SEQ ID NO: 1762906 - RNA, 19 nt, Artificial Sequence
  Description of Artificial Sequence: Synthetic oligonucleotide
ggaaacuguugguuguacg

SEQ ID NO: 1762907 - RNA, 19 nt, Artificial Sequence
  Description of Artificial Sequence: Synthetic oligonucleotide
ucucccuaccauuuccaca

SEQ ID NO: 1762908 - RNA, 19 nt, Artificial Sequence
  Description of Artificial Sequence: Synthetic oligonucleotide
aaccaaguaaaggguggag

SEQ ID NO: 1762909 - RNA, 19 nt, Artificial Sequence
  Description of Artificial Sequence: Synthetic oligonucleotide
caucccugaaaacuaaaca

SEQ ID NO: 1762910 - RNA, 19 nt, Artificial Sequence
  Description of Artificial Sequence: Synthetic oligonucleotide
ucauccggaagcaauucuu

SEQ ID NO: 1762911 - RNA, 19 nt, Artificial Sequence
  Description of Artificial Sequence: Synthetic oligonucleotide
cucaucauuauccaccuua

SEQ ID NO: 1762912 - RNA, 19 nt, Artificial Sequence
  Description of Artificial Sequence: Synthetic oligonucleotide
gguguaauuucaaagccac

SEQ ID NO: 1762913 - RNA, 19 nt, Artificial Sequence
  Description of Artificial Sequence: Synthetic oligonucleotide
cuugccagacauacuuaag

SEQ ID NO: 1762914 - RNA, 19 nt, Artificial Sequence
  Description of Artificial Sequence: Synthetic oligonucleotide
auuucacauguaucuuuug

SEQ ID NO: 1762915 - RNA, 19 nt, Artificial Sequence
  Description of Artificial Sequence: Synthetic oligonucleotide
cacauguaucuuuugucuc

SEQ ID NO: 1762916 - RNA, 19 nt, Artificial Sequence
  Description of Artificial Sequence: Synthetic oligonucleotide
aaccguucuuagugacaac

SEQ ID NO: 1762917 - RNA, 19 nt, Artificial Sequence
  Description of Artificial Sequence: Synthetic oligonucleotide
auauaucaacuguuacaga

SEQ ID NO: 1762918 - RNA, 19 nt, Artificial Sequence
  Description of Artificial Sequence: Synthetic oligonucleotide
auucuuggcaauagaaccu

SEQ ID NO: 1762919 - RNA, 19 nt, Artificial Sequence
  Description of Artificial Sequence: Synthetic oligonucleotide
uacuuuaauuggacugccu

SEQ ID NO: 1762920 - RNA, 19 nt, Artificial Sequence
  Description of Artificial Sequence: Synthetic oligonucleotide
cccugaaaacuaaacaggc

SEQ ID NO: 1762921 - RNA, 19 nt, Artificial Sequence
  Description of Artificial Sequence: Synthetic oligonucleotide
cugaaaacuaaacaggcau

SEQ ID NO: 1762922 - RNA, 19 nt, Artificial Sequence
  Description of Artificial Sequence: Synthetic oligonucleotide
caccuccaggagcagaucg

SEQ ID NO: 1762923 - RNA, 19 nt, Artificial Sequence
  Description of Artificial Sequence: Synthetic oligonucleotide
ugucucccuaccauuucca

SEQ ID NO: 1762924 - RNA, 19 nt, Artificial Sequence
  Description of Artificial Sequence: Synthetic oligonucleotide
cucaaccguaacaccacag

SEQ ID NO: 1762925 - RNA, 19 nt, Artificial Sequence
  Description of Artificial Sequence: Synthetic oligonucleotide
accguucuuagugacaacu

SEQ ID NO: 1762926 - RNA, 19 nt, Artificial Sequence
  Description of Artificial Sequence: Synthetic oligonucleotide
cacauucuuggcaauagaa

SEQ ID NO: 1762927 - RNA, 19 nt, Artificial Sequence
  Description of Artificial Sequence: Synthetic oligonucleotide
ugccccuaaacuaaccguu

SEQ ID NO: 1762928 - RNA, 19 nt, Artificial Sequence
  Description of Artificial Sequence: Synthetic oligonucleotide
uuugucucccuaccauuuc

SEQ ID NO: 1762929 - RNA, 19 nt, Artificial Sequence
  Description of Artificial Sequence: Synthetic oligonucleotide
aggacucuugaccuuuuga

SEQ ID NO: 1762930 - RNA, 19 nt, Artificial Sequence
  Description of Artificial Sequence: Synthetic oligonucleotide
agcagaucgcuugccagac

SEQ ID NO: 1762931 - RNA, 19 nt, Artificial Sequence
  Description of Artificial Sequence: Synthetic oligonucleotide
auuauccaccuuaaaguga

SEQ ID NO: 1762932 - RNA, 19 nt, Artificial Sequence
  Description of Artificial Sequence: Synthetic oligonucleotide
caucugaccaccacuauua

SEQ ID NO: 1762933 - RNA, 19 nt, Artificial Sequence
  Description of Artificial Sequence: Synthetic oligonucleotide
gauaaucuuugucagcuuu

SEQ ID NO: 1762934 - RNA, 19 nt, Artificial Sequence
  Description of Artificial Sequence: Synthetic oligonucleotide
cuuuuaguucacaaccgaa

SEQ ID NO: 1762935 - RNA, 19 nt, Artificial Sequence
  Description of Artificial Sequence: Synthetic oligonucleotide
aucuuuugucucccuacca

SEQ ID NO: 1762936 - RNA, 19 nt, Artificial Sequence
  Description of Artificial Sequence: Synthetic oligonucleotide
uacuagaugcuguccacua

SEQ ID NO: 1762937 - RNA, 19 nt, Artificial Sequence
  Description of Artificial Sequence: Synthetic oligonucleotide
acugcuccucagaacagac

SEQ ID NO: 1762938 - RNA, 19 nt, Artificial Sequence
  Description of Artificial Sequence: Synthetic oligonucleotide
ugcuguccacuaaugugca

SEQ ID NO: 1762939 - RNA, 19 nt, Artificial Sequence
  Description of Artificial Sequence: Synthetic oligonucleotide
accaaguaaaggguggagu

SEQ ID NO: 1762940 - RNA, 19 nt, Artificial Sequence
  Description of Artificial Sequence: Synthetic oligonucleotide
uaauuggacugccuucaua

SEQ ID NO: 1762941 - RNA, 19 nt, Artificial Sequence
  Description of Artificial Sequence: Synthetic oligonucleotide
gugauaaucuuugucagcu

SEQ ID NO: 1762942 - RNA, 19 nt, Artificial Sequence
  Description of Artificial Sequence: Synthetic oligonucleotide
uuaaugaacuuggcuucca

SEQ ID NO: 1762943 - RNA, 19 nt, Artificial Sequence
  Description of Artificial Sequence: Synthetic oligonucleotide
uccaccuuaaagugauaau

SEQ ID NO: 1762944 - RNA, 19 nt, Artificial Sequence
  Description of Artificial Sequence: Synthetic oligonucleotide
uuuugggguuuuaggaguu

SEQ ID NO: 1762945 - RNA, 19 nt, Artificial Sequence
  Description of Artificial Sequence: Synthetic oligonucleotide
caaccgaaaagguaguucu

SEQ ID NO: 1762946 - RNA, 19 nt, Artificial Sequence
  Description of Artificial Sequence: Synthetic oligonucleotide
aguuucacauccuccucau

SEQ ID NO: 1762947 - RNA, 19 nt, Artificial Sequence
  Description of Artificial Sequence: Synthetic oligonucleotide
accgaaaagguaguucugu

SEQ ID NO: 1762948 - RNA, 19 nt, Artificial Sequence
  Description of Artificial Sequence: Synthetic oligonucleotide
acugccuacugcuccucag

SEQ ID NO: 1762949 - RNA, 19 nt, Artificial Sequence
  Description of Artificial Sequence: Synthetic oligonucleotide
gacggaggaaacugccuac

SEQ ID NO: 1762950 - RNA, 19 nt, Artificial Sequence
  Description of Artificial Sequence: Synthetic oligonucleotide
ucauaacauuccauacaua

SEQ ID NO: 1762951 - RNA, 19 nt, Artificial Sequence
  Description of Artificial Sequence: Synthetic oligonucleotide
auccggaagcaauucuuca

SEQ ID NO: 1762952 - RNA, 19 nt, Artificial Sequence
  Description of Artificial Sequence: Synthetic oligonucleotide
caauagaaccuggacaaca

SEQ ID NO: 1762953 - RNA, 19 nt, Artificial Sequence
  Description of Artificial Sequence: Synthetic oligonucleotide
aacugguguucauucucau

SEQ ID NO: 1762954 - RNA, 19 nt, Artificial Sequence
  Description of Artificial Sequence: Synthetic oligonucleotide
acuaaugugcacaggcccu

SEQ ID NO: 1762955 - RNA, 19 nt, Artificial Sequence
  Description of Artificial Sequence: Synthetic oligonucleotide
caccucaaccguaacacca

SEQ ID NO: 1762956 - RNA, 19 nt, Artificial Sequence
  Description of Artificial Sequence: Synthetic oligonucleotide
cuguuacagaaauuaagua

SEQ ID NO: 1762957 - RNA, 19 nt, Artificial Sequence
  Description of Artificial Sequence: Synthetic oligonucleotide
aucggacggaggaaacugc

SEQ ID NO: 1762958 - RNA, 19 nt, Artificial Sequence
  Description of Artificial Sequence: Synthetic oligonucleotide
acacauucuuggcaauaga

SEQ ID NO: 1762959 - RNA, 19 nt, Artificial Sequence
  Description of Artificial Sequence: Synthetic oligonucleotide
guagggaaaguuuucacuu

SEQ ID NO: 1762960 - RNA, 19 nt, Artificial Sequence
  Description of Artificial Sequence: Synthetic oligonucleotide
uuaauuggacugccuucau

SEQ ID NO: 1762961 - RNA, 19 nt, Artificial Sequence
  Description of Artificial Sequence: Synthetic oligonucleotide
aacaccacaggugguguaa

SEQ ID NO: 1762962 - RNA, 19 nt, Artificial Sequence
  Description of Artificial Sequence: Synthetic oligonucleotide
cucguacagauuucuucac

SEQ ID NO: 1762963 - RNA, 19 nt, Artificial Sequence
  Description of Artificial Sequence: Synthetic oligonucleotide
ggaaaguuuucacuuugca

SEQ ID NO: 1762964 - RNA, 19 nt, Artificial Sequence
  Description of Artificial Sequence: Synthetic oligonucleotide
gaccaccacuauuacuaug

SEQ ID NO: 1762965 - RNA, 19 nt, Artificial Sequence
  Description of Artificial Sequence: Synthetic oligonucleotide
caccuuaaagugauaaucu

SEQ ID NO: 1762966 - RNA, 19 nt, Artificial Sequence
  Description of Artificial Sequence: Synthetic oligonucleotide
gauaucggacggaggaaac

SEQ ID NO: 1762967 - RNA, 19 nt, Artificial Sequence
  Description of Artificial Sequence: Synthetic oligonucleotide
accucaaccguaacaccac

SEQ ID NO: 1762968 - RNA, 19 nt, Artificial Sequence
  Description of Artificial Sequence: Synthetic oligonucleotide
cgaaaagguaguucugugg

SEQ ID NO: 1762969 - RNA, 19 nt, Artificial Sequence
  Description of Artificial Sequence: Synthetic oligonucleotide
caucuuccucuacagcuac

SEQ ID NO: 1762970 - RNA, 19 nt, Artificial Sequence
  Description of Artificial Sequence: Synthetic oligonucleotide
gguuguacggacauuuuca

SEQ ID NO: 1762971 - RNA, 19 nt, Artificial Sequence
  Description of Artificial Sequence: Synthetic oligonucleotide
uuccacaucugaccaccac

SEQ ID NO: 1762972 - RNA, 19 nt, Artificial Sequence
  Description of Artificial Sequence: Synthetic oligonucleotide
agaucuugaauagccuccu

SEQ ID NO: 1762973 - RNA, 19 nt, Artificial Sequence
  Description of Artificial Sequence: Synthetic oligonucleotide
aaccgaaaagguaguucug

SEQ ID NO: 1762974 - RNA, 19 nt, Artificial Sequence
  Description of Artificial Sequence: Synthetic oligonucleotide
aguucacaaccgaaaaggu

SEQ ID NO: 1762975 - RNA, 19 nt, Artificial Sequence
  Description of Artificial Sequence: Synthetic oligonucleotide
cuuccucuacagcuacuag

SEQ ID NO: 1762976 - RNA, 19 nt, Artificial Sequence
  Description of Artificial Sequence: Synthetic oligonucleotide
agauaucggacggaggaaa

SEQ ID NO: 1762977 - RNA, 19 nt, Artificial Sequence
  Description of Artificial Sequence: Synthetic oligonucleotide
ucaucaucaucaucaucuu

SEQ ID NO: 1762978 - RNA, 19 nt, Artificial Sequence
  Description of Artificial Sequence: Synthetic oligonucleotide
acuagguccuuuugggguu

SEQ ID NO: 1762979 - RNA, 19 nt, Artificial Sequence
  Description of Artificial Sequence: Synthetic oligonucleotide
ggagcagaucgcuugccag

SEQ ID NO: 1762980 - RNA, 19 nt, Artificial Sequence
  Description of Artificial Sequence: Synthetic oligonucleotide
uugccccugccccuaaacu

SEQ ID NO: 1762981 - RNA, 19 nt, Artificial Sequence
  Description of Artificial Sequence: Synthetic oligonucleotide
ugccuacugcuccucagaa

SEQ ID NO: 1762982 - RNA, 19 nt, Artificial Sequence
  Description of Artificial Sequence: Synthetic oligonucleotide
gagcagaucgcuugccaga

SEQ ID NO: 1762983 - RNA, 19 nt, Artificial Sequence
  Description of Artificial Sequence: Synthetic oligonucleotide
ccuacugcuccucagaaca

SEQ ID NO: 1762984 - RNA, 19 nt, Artificial Sequence
  Description of Artificial Sequence: Synthetic oligonucleotide
aacugccuacugcuccuca

SEQ ID NO: 1762985 - RNA, 19 nt, Artificial Sequence
  Description of Artificial Sequence: Synthetic oligonucleotide
acuagaugcuguccacuaa

SEQ ID NO: 1762986 - RNA, 19 nt, Artificial Sequence
  Description of Artificial Sequence: Synthetic oligonucleotide
uuuccacaucugaccacca

SEQ ID NO: 1762987 - RNA, 19 nt, Artificial Sequence
  Description of Artificial Sequence: Synthetic oligonucleotide
aacauuccauacauacuua

SEQ ID NO: 1762988 - RNA, 19 nt, Artificial Sequence
  Description of Artificial Sequence: Synthetic oligonucleotide
cuuuugggguuuuaggagu

SEQ ID NO: 1762989 - RNA, 19 nt, Artificial Sequence
  Description of Artificial Sequence: Synthetic oligonucleotide
ccaccuuaaagugauaauc

SEQ ID NO: 1762990 - RNA, 19 nt, Artificial Sequence
  Description of Artificial Sequence: Synthetic oligonucleotide
cguucuuagugacaacugg

SEQ ID NO: 1762991 - RNA, 19 nt, Artificial Sequence
  Description of Artificial Sequence: Synthetic oligonucleotide
caacugguguucauucuca

SEQ ID NO: 1762992 - RNA, 19 nt, Artificial Sequence
  Description of Artificial Sequence: Synthetic oligonucleotide
auagaaccuggacaacauu

SEQ ID NO: 1762993 - RNA, 19 nt, Artificial Sequence
  Description of Artificial Sequence: Synthetic oligonucleotide
cuuccaugagguggagacg

SEQ ID NO: 1762994 - RNA, 19 nt, Artificial Sequence
  Description of Artificial Sequence: Synthetic oligonucleotide
cacuuugggaagagaacca

SEQ ID NO: 1762995 - RNA, 19 nt, Artificial Sequence
  Description of Artificial Sequence: Synthetic oligonucleotide
cuggucagucauccggaag

SEQ ID NO: 1762996 - RNA, 19 nt, Artificial Sequence
  Description of Artificial Sequence: Synthetic oligonucleotide
cuaaccguucuuagugaca

SEQ ID NO: 1762997 - RNA, 19 nt, Artificial Sequence
  Description of Artificial Sequence: Synthetic oligonucleotide
aagagggcucauguccaug

SEQ ID NO: 1762998 - RNA, 19 nt, Artificial Sequence
  Description of Artificial Sequence: Synthetic oligonucleotide
aucaaacaaaguagggaaa

SEQ ID NO: 1762999 - RNA, 19 nt, Artificial Sequence
  Description of Artificial Sequence: Synthetic oligonucleotide
uguugccagcguuacuuua

SEQ ID NO: 1763000 - RNA, 19 nt, Artificial Sequence
  Description of Artificial Sequence: Synthetic oligonucleotide
cuaaugugcacaggcccug

SEQ ID NO: 1763001 - RNA, 19 nt, Artificial Sequence
  Description of Artificial Sequence: Synthetic oligonucleotide
uccuccacugccagagauc

SEQ ID NO: 1763002 - RNA, 19 nt, Artificial Sequence
  Description of Artificial Sequence: Synthetic oligonucleotide
aucuuuugccccugccccu

SEQ ID NO: 1763003 - RNA, 19 nt, Artificial Sequence
  Description of Artificial Sequence: Synthetic oligonucleotide
cagcguuacuuuaauugga

SEQ ID NO: 1763004 - RNA, 19 nt, Artificial Sequence
  Description of Artificial Sequence: Synthetic oligonucleotide
ucgagucuuccaugaggug

SEQ ID NO: 1763005 - RNA, 19 nt, Artificial Sequence
  Description of Artificial Sequence: Synthetic oligonucleotide
uggagacgcgcacuucggu

SEQ ID NO: 1763006 - RNA, 19 nt, Artificial Sequence
  Description of Artificial Sequence: Synthetic oligonucleotide
auuggacugccuucauaau

SEQ ID NO: 1763007 - RNA, 19 nt, Artificial Sequence
  Description of Artificial Sequence: Synthetic oligonucleotide
uguggccuaagagggcuca

SEQ ID NO: 1763008 - RNA, 19 nt, Artificial Sequence
  Description of Artificial Sequence: Synthetic oligonucleotide
uugaugguuuuaagucuuu

SEQ ID NO: 1763009 - RNA, 19 nt, Artificial Sequence
  Description of Artificial Sequence: Synthetic oligonucleotide
acaacacauucuuggcaau

SEQ ID NO: 1763010 - RNA, 19 nt, Artificial Sequence
  Description of Artificial Sequence: Synthetic oligonucleotide
cuuagugacaacugguguu

SEQ ID NO: 1763011 - RNA, 19 nt, Artificial Sequence
  Description of Artificial Sequence: Synthetic oligonucleotide
guacggacauuuucaaugu

SEQ ID NO: 1763012 - RNA, 19 nt, Artificial Sequence
  Description of Artificial Sequence: Synthetic oligonucleotide
uuuugaucuugguguugau

SEQ ID NO: 1763013 - RNA, 19 nt, Artificial Sequence
  Description of Artificial Sequence: Synthetic oligonucleotide
gacauacuuaagaguuuca

SEQ ID NO: 1763014 - RNA, 19 nt, Artificial Sequence
  Description of Artificial Sequence: Synthetic oligonucleotide
acgauguguaauucaucuu

SEQ ID NO: 1763015 - RNA, 19 nt, Artificial Sequence
  Description of Artificial Sequence: Synthetic oligonucleotide
uugccagcguuacuuuaau

SEQ ID NO: 1763016 - RNA, 19 nt, Artificial Sequence
  Description of Artificial Sequence: Synthetic oligonucleotide
uugguuguacggacauuuu

SEQ ID NO: 1763017 - RNA, 19 nt, Artificial Sequence
  Description of Artificial Sequence: Synthetic oligonucleotide
ccacuaaugugcacaggcc

SEQ ID NO: 1763018 - RNA, 19 nt, Artificial Sequence
  Description of Artificial Sequence: Synthetic oligonucleotide
guccaucgagucuuccaug

SEQ ID NO: 1763019 - RNA, 19 nt, Artificial Sequence
  Description of Artificial Sequence: Synthetic oligonucleotide
aaccacaccucaaccguaa

SEQ ID NO: 1763020 - RNA, 19 nt, Artificial Sequence
  Description of Artificial Sequence: Synthetic oligonucleotide
guaguucuguggccuaaga

SEQ ID NO: 1763021 - RNA, 19 nt, Artificial Sequence
  Description of Artificial Sequence: Synthetic oligonucleotide
gcugggguaucucguacag

SEQ ID NO: 1763022 - RNA, 19 nt, Artificial Sequence
  Description of Artificial Sequence: Synthetic oligonucleotide
cucccuaccauuuccacau

SEQ ID NO: 1763023 - RNA, 19 nt, Artificial Sequence
  Description of Artificial Sequence: Synthetic oligonucleotide
ccaucccugaaaacuaaac

SEQ ID NO: 1763024 - RNA, 19 nt, Artificial Sequence
  Description of Artificial Sequence: Synthetic oligonucleotide
ugccucuacgauguguaau

SEQ ID NO: 1763025 - RNA, 19 nt, Artificial Sequence
  Description of Artificial Sequence: Synthetic oligonucleotide
uacggacauuuucaauguu

SEQ ID NO: 1763026 - RNA, 19 nt, Artificial Sequence
  Description of Artificial Sequence: Synthetic oligonucleotide
acggaguauuucaaacugu

SEQ ID NO: 1763027 - RNA, 19 nt, Artificial Sequence
  Description of Artificial Sequence: Synthetic oligonucleotide
accacaggugguguaauuu

SEQ ID NO: 1763028 - RNA, 19 nt, Artificial Sequence
  Description of Artificial Sequence: Synthetic oligonucleotide
guucacaaccgaaaaggua

SEQ ID NO: 1763029 - RNA, 19 nt, Artificial Sequence
  Description of Artificial Sequence: Synthetic oligonucleotide
gguccuuuugggguuuuag

SEQ ID NO: 1763030 - RNA, 19 nt, Artificial Sequence
  Description of Artificial Sequence: Synthetic oligonucleotide
ccuaccauuuccacaucug

SEQ ID NO: 1763031 - RNA, 19 nt, Artificial Sequence
  Description of Artificial Sequence: Synthetic oligonucleotide
guaagacggaguauuucaa

SEQ ID NO: 1763032 - RNA, 19 nt, Artificial Sequence
  Description of Artificial Sequence: Synthetic oligonucleotide
uuggcugggguaucucgua

SEQ ID NO: 1763033 - RNA, 19 nt, Artificial Sequence
  Description of Artificial Sequence: Synthetic oligonucleotide
guuccaucccugaaaacua

SEQ ID NO: 1763034 - RNA, 19 nt, Artificial Sequence
  Description of Artificial Sequence: Synthetic oligonucleotide
gucucccuaccauuuccac

SEQ ID NO: 1763035 - RNA, 19 nt, Artificial Sequence
  Description of Artificial Sequence: Synthetic oligonucleotide
cuacagcuacuagaugcug

SEQ ID NO: 1763036 - RNA, 19 nt, Artificial Sequence
  Description of Artificial Sequence: Synthetic oligonucleotide
ccagacauacuuaagaguu

SEQ ID NO: 1763037 - RNA, 19 nt, Artificial Sequence
  Description of Artificial Sequence: Synthetic oligonucleotide
gucuucuacagaacuaggu

SEQ ID NO: 1763038 - RNA, 19 nt, Artificial Sequence
  Description of Artificial Sequence: Synthetic oligonucleotide
agacgcgcacuucgguaug

SEQ ID NO: 1763039 - RNA, 19 nt, Artificial Sequence
  Description of Artificial Sequence: Synthetic oligonucleotide
cuagaugcuguccacuaau

SEQ ID NO: 1763040 - RNA, 19 nt, Artificial Sequence
  Description of Artificial Sequence: Synthetic oligonucleotide
ccgaaaagguaguucugug

SEQ ID NO: 1763041 - RNA, 19 nt, Artificial Sequence
  Description of Artificial Sequence: Synthetic oligonucleotide
gagauaucggacggaggaa

SEQ ID NO: 1763042 - RNA, 19 nt, Artificial Sequence
  Description of Artificial Sequence: Synthetic oligonucleotide
cagcuacuagaugcugucc

SEQ ID NO: 1763043 - RNA, 19 nt, Artificial Sequence
  Description of Artificial Sequence: Synthetic oligonucleotide
gagacgcgcacuucgguau

SEQ ID NO: 1763044 - RNA, 19 nt, Artificial Sequence
  Description of Artificial Sequence: Synthetic oligonucleotide
guaucucguacagauuucu

SEQ ID NO: 1763045 - RNA, 19 nt, Artificial Sequence
  Description of Artificial Sequence: Synthetic oligonucleotide
ggacucuugaccuuuugau

SEQ ID NO: 1763046 - RNA, 19 nt, Artificial Sequence
  Description of Artificial Sequence: Synthetic oligonucleotide
ccagauauaucaacuguua

SEQ ID NO: 1763047 - RNA, 19 nt, Artificial Sequence
  Description of Artificial Sequence: Synthetic oligonucleotide
gcuugccagacauacuuaa

SEQ ID NO: 1763048 - RNA, 19 nt, Artificial Sequence
  Description of Artificial Sequence: Synthetic oligonucleotide
gguaugcgagauaucggac

SEQ ID NO: 1763049 - RNA, 19 nt, Artificial Sequence
  Description of Artificial Sequence: Synthetic oligonucleotide
ccauuuccacaucugacca

SEQ ID NO: 1763050 - RNA, 19 nt, Artificial Sequence
  Description of Artificial Sequence: Synthetic oligonucleotide
caggugguguaauuucaaa

SEQ ID NO: 1763051 - RNA, 19 nt, Artificial Sequence
  Description of Artificial Sequence: Synthetic oligonucleotide
gcgcacuucgguaugcgag

SEQ ID NO: 1763052 - RNA, 19 nt, Artificial Sequence
  Description of Artificial Sequence: Synthetic oligonucleotide
caggcccugaaccacaccu

SEQ ID NO: 1763053 - RNA, 19 nt, Artificial Sequence
  Description of Artificial Sequence: Synthetic oligonucleotide
guugaugguuuuaagucuu

SEQ ID NO: 1763054 - RNA, 19 nt, Artificial Sequence
  Description of Artificial Sequence: Synthetic oligonucleotide
gcaauucuucacauaauua

SEQ ID NO: 1763055 - RNA, 19 nt, Artificial Sequence
  Description of Artificial Sequence: Synthetic oligonucleotide
ccguucuuagugacaacug

SEQ ID NO: 1763056 - RNA, 19 nt, Artificial Sequence
  Description of Artificial Sequence: Synthetic oligonucleotide
cuucgguaugcgagauauc

SEQ ID NO: 1763057 - RNA, 19 nt, Artificial Sequence
  Description of Artificial Sequence: Synthetic oligonucleotide
gacgcgcacuucgguaugc

SEQ ID NO: 1763058 - RNA, 19 nt, Artificial Sequence
  Description of Artificial Sequence: Synthetic oligonucleotide
uauccaccuuaaagugaua

SEQ ID NO: 1763059 - RNA, 19 nt, Artificial Sequence
  Description of Artificial Sequence: Synthetic oligonucleotide
ucuacagaacuagguccuu

SEQ ID NO: 1763060 - RNA, 19 nt, Artificial Sequence
  Description of Artificial Sequence: Synthetic oligonucleotide
aggcccugaaccacaccuc

SEQ ID NO: 1763061 - RNA, 19 nt, Artificial Sequence
  Description of Artificial Sequence: Synthetic oligonucleotide
gucauccggaagcaauucu

SEQ ID NO: 1763062 - RNA, 19 nt, Artificial Sequence
  Description of Artificial Sequence: Synthetic oligonucleotide
cagagaucuugaauagccu

SEQ ID NO: 1763063 - RNA, 19 nt, Artificial Sequence
  Description of Artificial Sequence: Synthetic oligonucleotide
aguaaaggguggaguucca

SEQ ID NO: 1763064 - RNA, 19 nt, Artificial Sequence
  Description of Artificial Sequence: Synthetic oligonucleotide
ugccagcguuacuuuaauu

SEQ ID NO: 1763065 - RNA, 19 nt, Artificial Sequence
  Description of Artificial Sequence: Synthetic oligonucleotide
cugccuacugcuccucaga

SEQ ID NO: 1763066 - RNA, 19 nt, Artificial Sequence
  Description of Artificial Sequence: Synthetic oligonucleotide
cuuuugucucccuaccauu

SEQ ID NO: 1763067 - RNA, 19 nt, Artificial Sequence
  Description of Artificial Sequence: Synthetic oligonucleotide
cagaucgcuugccagacau

SEQ ID NO: 1763068 - RNA, 19 nt, Artificial Sequence
  Description of Artificial Sequence: Synthetic oligonucleotide
acgcgcacuucgguaugcg

SEQ ID NO: 1763069 - RNA, 19 nt, Artificial Sequence
  Description of Artificial Sequence: Synthetic oligonucleotide
cguaacaccacagguggug

SEQ ID NO: 1763070 - RNA, 19 nt, Artificial Sequence
  Description of Artificial Sequence: Synthetic oligonucleotide
gaaccacaccucaaccgua

SEQ ID NO: 1763071 - RNA, 19 nt, Artificial Sequence
  Description of Artificial Sequence: Synthetic oligonucleotide
ucccuaccauuuccacauc

SEQ ID NO: 1763072 - RNA, 19 nt, Artificial Sequence
  Description of Artificial Sequence: Synthetic oligonucleotide
cugccccuaaacuaaccgu

SEQ ID NO: 1763073 - RNA, 19 nt, Artificial Sequence
  Description of Artificial Sequence: Synthetic oligonucleotide
ggacugccuucauaauuca

SEQ ID NO: 1763074 - RNA, 19 nt, Artificial Sequence
  Description of Artificial Sequence: Synthetic oligonucleotide
cgguaugcgagauaucgga

SEQ ID NO: 1763075 - RNA, 19 nt, Artificial Sequence
  Description of Artificial Sequence: Synthetic oligonucleotide
agggaaacuguugguugua

SEQ ID NO: 1763076 - RNA, 19 nt, Artificial Sequence
  Description of Artificial Sequence: Synthetic oligonucleotide
gggaaacuguugguuguac

SEQ ID NO: 1763077 - RNA, 19 nt, Artificial Sequence
  Description of Artificial Sequence: Synthetic oligonucleotide
cuguggccuaagagggcuc

SEQ ID NO: 1763078 - RNA, 19 nt, Artificial Sequence
  Description of Artificial Sequence: Synthetic oligonucleotide
aucgcuugccagacauacu

SEQ ID NO: 1763079 - RNA, 19 nt, Artificial Sequence
  Description of Artificial Sequence: Synthetic oligonucleotide
gcgagauaucggacggagg

SEQ ID NO: 1763080 - RNA, 19 nt, Artificial Sequence
  Description of Artificial Sequence: Synthetic oligonucleotide
ggagacgcgcacuucggua

SEQ ID NO: 1763081 - RNA, 19 nt, Artificial Sequence
  Description of Artificial Sequence: Synthetic oligonucleotide
ccuaaacuaaccguucuua

SEQ ID NO: 1763082 - RNA, 19 nt, Artificial Sequence
  Description of Artificial Sequence: Synthetic oligonucleotide
ggcugggguaucucguaca

SEQ ID NO: 1763083 - RNA, 19 nt, Artificial Sequence
  Description of Artificial Sequence: Synthetic oligonucleotide
ggccuaagagggcucaugu

SEQ ID NO: 1763084 - RNA, 19 nt, Artificial Sequence
  Description of Artificial Sequence: Synthetic oligonucleotide
agguaguucuguggccuaa

SEQ ID NO: 1763085 - RNA, 19 nt, Artificial Sequence
  Description of Artificial Sequence: Synthetic oligonucleotide
gccuaagagggcucauguc

SEQ ID NO: 1763086 - RNA, 19 nt, Artificial Sequence
  Description of Artificial Sequence: Synthetic oligonucleotide
augcgagauaucggacgga

SEQ ID NO: 1763087 - RNA, 19 nt, Artificial Sequence
  Description of Artificial Sequence: Synthetic oligonucleotide
gccuacugcuccucagaac

SEQ ID NO: 1763088 - RNA, 19 nt, Artificial Sequence
  Description of Artificial Sequence: Synthetic oligonucleotide
gcaauagaaccuggacaac

SEQ ID NO: 1763089 - RNA, 19 nt, Artificial Sequence
  Description of Artificial Sequence: Synthetic oligonucleotide
ccaucgagucuuccaugag

SEQ ID NO: 1763090 - RNA, 19 nt, Artificial Sequence
  Description of Artificial Sequence: Synthetic oligonucleotide
cuacuagaugcuguccacu

SEQ ID NO: 1763091 - RNA, 19 nt, Artificial Sequence
  Description of Artificial Sequence: Synthetic oligonucleotide
cagacauacuuaagaguuu

SEQ ID NO: 1763092 - RNA, 19 nt, Artificial Sequence
  Description of Artificial Sequence: Synthetic oligonucleotide
ccacaucugaccaccacua

SEQ ID NO: 1763093 - RNA, 19 nt, Artificial Sequence
  Description of Artificial Sequence: Synthetic oligonucleotide
ccaaguaaaggguggaguu

SEQ ID NO: 1763094 - RNA, 19 nt, Artificial Sequence
  Description of Artificial Sequence: Synthetic oligonucleotide
gcguuacuuuaauuggacu

SEQ ID NO: 1763095 - RNA, 19 nt, Artificial Sequence
  Description of Artificial Sequence: Synthetic oligonucleotide
ccucuacagcuacuagaug

SEQ ID NO: 1763096 - RNA, 19 nt, Artificial Sequence
  Description of Artificial Sequence: Synthetic oligonucleotide
ggguggaguuccaucccug

SEQ ID NO: 1763097 - RNA, 19 nt, Artificial Sequence
  Description of Artificial Sequence: Synthetic oligonucleotide
cccugccccuaaacuaacc

SEQ ID NO: 1763098 - RNA, 19 nt, Artificial Sequence
  Description of Artificial Sequence: Synthetic oligonucleotide
ccuccuggucagucauccg

SEQ ID NO: 1763099 - RNA, 19 nt, Artificial Sequence
  Description of Artificial Sequence: Synthetic oligonucleotide
cugccucuacgauguguaa

SEQ ID NO: 1763100 - RNA, 19 nt, Artificial Sequence
  Description of Artificial Sequence: Synthetic oligonucleotide
cugggguaucucguacaga

SEQ ID NO: 1763101 - RNA, 19 nt, Artificial Sequence
  Description of Artificial Sequence: Synthetic oligonucleotide
gccccuaaacuaaccguuc

SEQ ID NO: 1763102 - RNA, 19 nt, Artificial Sequence
  Description of Artificial Sequence: Synthetic oligonucleotide
agaucgcuugccagacaua

SEQ ID NO: 1763103 - RNA, 19 nt, Artificial Sequence
  Description of Artificial Sequence: Synthetic oligonucleotide
caauguugccagcguuacu

SEQ ID NO: 1763104 - RNA, 19 nt, Artificial Sequence
  Description of Artificial Sequence: Synthetic oligonucleotide
cgcacuucgguaugcgaga

SEQ ID NO: 1763105 - RNA, 19 nt, Artificial Sequence
  Description of Artificial Sequence: Synthetic oligonucleotide
ccucaaccguaacaccaca

SEQ ID NO: 1763106 - RNA, 19 nt, Artificial Sequence
  Description of Artificial Sequence: Synthetic oligonucleotide
cacaucugaccaccacuau

SEQ ID NO: 1763107 - RNA, 19 nt, Artificial Sequence
  Description of Artificial Sequence: Synthetic oligonucleotide
cuacagaacuagguccuuu

SEQ ID NO: 1763108 - RNA, 19 nt, Artificial Sequence
  Description of Artificial Sequence: Synthetic oligonucleotide
cacuucgguaugcgagaua

SEQ ID NO: 1763109 - RNA, 19 nt, Artificial Sequence
  Description of Artificial Sequence: Synthetic oligonucleotide
gcagaucgcuugccagaca

SEQ ID NO: 1763110 - RNA, 19 nt, Artificial Sequence
  Description of Artificial Sequence: Synthetic oligonucleotide
gaauagccuccuggucagu

SEQ ID NO: 1763111 - RNA, 19 nt, Artificial Sequence
  Description of Artificial Sequence: Synthetic oligonucleotide
agguccuuuugggguuuua

SEQ ID NO: 1763112 - RNA, 19 nt, Artificial Sequence
  Description of Artificial Sequence: Synthetic oligonucleotide
cggaguauuucaaacuguu

SEQ ID NO: 1763113 - RNA, 19 nt, Artificial Sequence
  Description of Artificial Sequence: Synthetic oligonucleotide
ccccugccccuaaacuaac

SEQ ID NO: 1763114 - RNA, 19 nt, Artificial Sequence
  Description of Artificial Sequence: Synthetic oligonucleotide
cccuaccauuuccacaucu

SEQ ID NO: 1763115 - RNA, 19 nt, Artificial Sequence
  Description of Artificial Sequence: Synthetic oligonucleotide
cacaaccgaaaagguaguu

SEQ ID NO: 1763116 - RNA, 19 nt, Artificial Sequence
  Description of Artificial Sequence: Synthetic oligonucleotide
ccccuaaacuaaccguucu

SEQ ID NO: 1763117 - RNA, 19 nt, Artificial Sequence
  Description of Artificial Sequence: Synthetic oligonucleotide
ccuggucagucauccggaa

SEQ ID NO: 1763118 - RNA, 19 nt, Artificial Sequence
  Description of Artificial Sequence: Synthetic oligonucleotide
caccacaggugguguaauu

SEQ ID NO: 1763119 - RNA, 19 nt, Artificial Sequence
  Description of Artificial Sequence: Synthetic oligonucleotide
cccuaaacuaaccguucuu

SEQ ID NO: 1763120 - RNA, 19 nt, Artificial Sequence
  Description of Artificial Sequence: Synthetic oligonucleotide
cgcgcacuucgguaugcga

SEQ ID NO: 1763121 - RNA, 19 nt, Artificial Sequence
  Description of Artificial Sequence: Synthetic oligonucleotide
gcacuucgguaugcgagau

SEQ ID NO: 1763122 - RNA, 19 nt, Artificial Sequence
  Description of Artificial Sequence: Synthetic oligonucleotide
cgcuugccagacauacuua

SEQ ID NO: 1763123 - RNA, 19 nt, Artificial Sequence
  Description of Artificial Sequence: Synthetic oligonucleotide
guggccuaagagggcucau

SEQ ID NO: 1763124 - RNA, 19 nt, Artificial Sequence
  Description of Artificial Sequence: Synthetic oligonucleotide
ccguaacaccacagguggu

SEQ ID NO: 1763125 - RNA, 19 nt, Artificial Sequence
  Description of Artificial Sequence: Synthetic oligonucleotide
cggacggaggaaacugccu

SEQ ID NO: 1763126 - RNA, 19 nt, Artificial Sequence
  Description of Artificial Sequence: Synthetic oligonucleotide
aauauaguuauuuaaagaa

SEQ ID NO: 1763127 - RNA, 19 nt, Artificial Sequence
  Description of Artificial Sequence: Synthetic oligonucleotide
aaucaagaaagaaacaugc

SEQ ID NO: 1763128 - RNA, 19 nt, Artificial Sequence
  Description of Artificial Sequence: Synthetic oligonucleotide
aauaagauugaugaccacg

SEQ ID NO: 1763129 - RNA, 19 nt, Artificial Sequence
  Description of Artificial Sequence: Synthetic oligonucleotide
uauaguuauuuaaagaaac

SEQ ID NO: 1763130 - RNA, 19 nt, Artificial Sequence
  Description of Artificial Sequence: Synthetic oligonucleotide
cucugauuaaucaagaaag

SEQ ID NO: 1763131 - RNA, 19 nt, Artificial Sequence
  Description of Artificial Sequence: Synthetic oligonucleotide
auauguaucgcaccgauag

SEQ ID NO: 1763132 - RNA, 19 nt, Artificial Sequence
  Description of Artificial Sequence: Synthetic oligonucleotide
uuaacugcguuaauaaucc

SEQ ID NO: 1763133 - RNA, 19 nt, Artificial Sequence
  Description of Artificial Sequence: Synthetic oligonucleotide
augaaugagucucucaacc

SEQ ID NO: 1763134 - RNA, 19 nt, Artificial Sequence
  Description of Artificial Sequence: Synthetic oligonucleotide
uauuuaaagaaacuaggcu

SEQ ID NO: 1763135 - RNA, 19 nt, Artificial Sequence
  Description of Artificial Sequence: Synthetic oligonucleotide
uuaauaaucccuuuggaaa

SEQ ID NO: 1763136 - RNA, 19 nt, Artificial Sequence
  Description of Artificial Sequence: Synthetic oligonucleotide
gaugguugacaacauaucg

SEQ ID NO: 1763137 - RNA, 19 nt, Artificial Sequence
  Description of Artificial Sequence: Synthetic oligonucleotide
ucagauggccguaugaugg

SEQ ID NO: 1763138 - RNA, 19 nt, Artificial Sequence
  Description of Artificial Sequence: Synthetic oligonucleotide
uaaaccaacgaauauuugc

SEQ ID NO: 1763139 - RNA, 19 nt, Artificial Sequence
  Description of Artificial Sequence: Synthetic oligonucleotide
uuggauuucacuaauaguu

SEQ ID NO: 1763140 - RNA, 19 nt, Artificial Sequence
  Description of Artificial Sequence: Synthetic oligonucleotide
uuugcaaagugauugagga

SEQ ID NO: 1763141 - RNA, 19 nt, Artificial Sequence
  Description of Artificial Sequence: Synthetic oligonucleotide
uauuuaauagcagugaccu

SEQ ID NO: 1763142 - RNA, 19 nt, Artificial Sequence
  Description of Artificial Sequence: Synthetic oligonucleotide
uuuaacugcguuaauaauc

SEQ ID NO: 1763143 - RNA, 19 nt, Artificial Sequence
  Description of Artificial Sequence: Synthetic oligonucleotide
aacauaucgacccaggaau

SEQ ID NO: 1763144 - RNA, 19 nt, Artificial Sequence
  Description of Artificial Sequence: Synthetic oligonucleotide
guugacaacauaucgaccc

SEQ ID NO: 1763145 - RNA, 19 nt, Artificial Sequence
  Description of Artificial Sequence: Synthetic oligonucleotide
uaauauaguuauuuaaaga

SEQ ID NO: 1763146 - RNA, 19 nt, Artificial Sequence
  Description of Artificial Sequence: Synthetic oligonucleotide
aagaauuugccaauccacc

SEQ ID NO: 1763147 - RNA, 19 nt, Artificial Sequence
  Description of Artificial Sequence: Synthetic oligonucleotide
ugucauauguaucgcaccg

SEQ ID NO: 1763148 - RNA, 19 nt, Artificial Sequence
  Description of Artificial Sequence: Synthetic oligonucleotide
auagcagugaccucuaaag

SEQ ID NO: 1763149 - RNA, 19 nt, Artificial Sequence
  Description of Artificial Sequence: Synthetic oligonucleotide
aagauugaugaccacguug

SEQ ID NO: 1763150 - RNA, 19 nt, Artificial Sequence
  Description of Artificial Sequence: Synthetic oligonucleotide
ucagauauuuaauagcagu

SEQ ID NO: 1763151 - RNA, 19 nt, Artificial Sequence
  Description of Artificial Sequence: Synthetic oligonucleotide
ugccaauccaccuauaggc

SEQ ID NO: 1763152 - RNA, 19 nt, Artificial Sequence
  Description of Artificial Sequence: Synthetic oligonucleotide
aaacaaccuucucacuucc

SEQ ID NO: 1763153 - RNA, 19 nt, Artificial Sequence
  Description of Artificial Sequence: Synthetic oligonucleotide
uucucagguaccuagaaga

SEQ ID NO: 1763154 - RNA, 19 nt, Artificial Sequence
  Description of Artificial Sequence: Synthetic oligonucleotide
aaaucaaaguuucugguuu

SEQ ID NO: 1763155 - RNA, 19 nt, Artificial Sequence
  Description of Artificial Sequence: Synthetic oligonucleotide
ugagauaugcauccgcucc

SEQ ID NO: 1763156 - RNA, 19 nt, Artificial Sequence
  Description of Artificial Sequence: Synthetic oligonucleotide
ugaccucuaaagaacacag

SEQ ID NO: 1763157 - RNA, 19 nt, Artificial Sequence
  Description of Artificial Sequence: Synthetic oligonucleotide
aacgaauauuugcaaagug

SEQ ID NO: 1763158 - RNA, 19 nt, Artificial Sequence
  Description of Artificial Sequence: Synthetic oligonucleotide
auauuuaauagcagugacc

SEQ ID NO: 1763159 - RNA, 19 nt, Artificial Sequence
  Description of Artificial Sequence: Synthetic oligonucleotide
uaguugacugucuuggcgg

SEQ ID NO: 1763160 - RNA, 19 nt, Artificial Sequence
  Description of Artificial Sequence: Synthetic oligonucleotide
uuucacuaauaguugacug

SEQ ID NO: 1763161 - RNA, 19 nt, Artificial Sequence
  Description of Artificial Sequence: Synthetic oligonucleotide
uuugccaauccaccuauag

SEQ ID NO: 1763162 - RNA, 19 nt, Artificial Sequence
  Description of Artificial Sequence: Synthetic oligonucleotide
uaauaaucccuuuggaaac

SEQ ID NO: 1763163 - RNA, 19 nt, Artificial Sequence
  Description of Artificial Sequence: Synthetic oligonucleotide
aauccuguugcuccaaaca

SEQ ID NO: 1763164 - RNA, 19 nt, Artificial Sequence
  Description of Artificial Sequence: Synthetic oligonucleotide
agaaucuuugucucuugcg

SEQ ID NO: 1763165 - RNA, 19 nt, Artificial Sequence
  Description of Artificial Sequence: Synthetic oligonucleotide
accucuaaagaacacaggu

SEQ ID NO: 1763166 - RNA, 19 nt, Artificial Sequence
  Description of Artificial Sequence: Synthetic oligonucleotide
aaaccaacgaauauuugca

SEQ ID NO: 1763167 - RNA, 19 nt, Artificial Sequence
  Description of Artificial Sequence: Synthetic oligonucleotide
cuugugaccccauucgucc

SEQ ID NO: 1763168 - RNA, 19 nt, Artificial Sequence
  Description of Artificial Sequence: Synthetic oligonucleotide
auaagaggcacaccgauaa

SEQ ID NO: 1763169 - RNA, 19 nt, Artificial Sequence
  Description of Artificial Sequence: Synthetic oligonucleotide
ccuauaggcaaaaugaggc

SEQ ID NO: 1763170 - RNA, 19 nt, Artificial Sequence
  Description of Artificial Sequence: Synthetic oligonucleotide
aucugagauaugcauccgc

SEQ ID NO: 1763171 - RNA, 19 nt, Artificial Sequence
  Description of Artificial Sequence: Synthetic oligonucleotide
aaugggcucauuccaaaga

SEQ ID NO: 1763172 - RNA, 19 nt, Artificial Sequence
  Description of Artificial Sequence: Synthetic oligonucleotide
uuuccucgaucucagaaga

SEQ ID NO: 1763173 - RNA, 19 nt, Artificial Sequence
  Description of Artificial Sequence: Synthetic oligonucleotide
cauucguccaagaugguug

SEQ ID NO: 1763174 - RNA, 19 nt, Artificial Sequence
  Description of Artificial Sequence: Synthetic oligonucleotide
augccaagaucuuccaggc

SEQ ID NO: 1763175 - RNA, 19 nt, Artificial Sequence
  Description of Artificial Sequence: Synthetic oligonucleotide
ugguugacaacauaucgac

SEQ ID NO: 1763176 - RNA, 19 nt, Artificial Sequence
  Description of Artificial Sequence: Synthetic oligonucleotide
ucuaaagaacacagguggc

SEQ ID NO: 1763177 - RNA, 19 nt, Artificial Sequence
  Description of Artificial Sequence: Synthetic oligonucleotide
guaugauuacuugugaccc

SEQ ID NO: 1763178 - RNA, 19 nt, Artificial Sequence
  Description of Artificial Sequence: Synthetic oligonucleotide
ucaggugugagacaugaau

SEQ ID NO: 1763179 - RNA, 19 nt, Artificial Sequence
  Description of Artificial Sequence: Synthetic oligonucleotide
agacugaacccucagauau

SEQ ID NO: 1763180 - RNA, 19 nt, Artificial Sequence
  Description of Artificial Sequence: Synthetic oligonucleotide
ucugagauaugcauccgcu

SEQ ID NO: 1763181 - RNA, 19 nt, Artificial Sequence
  Description of Artificial Sequence: Synthetic oligonucleotide
aauuugccaauccaccuau

SEQ ID NO: 1763182 - RNA, 19 nt, Artificial Sequence
  Description of Artificial Sequence: Synthetic oligonucleotide
caggaaacaaccuucucac

SEQ ID NO: 1763183 - RNA, 19 nt, Artificial Sequence
  Description of Artificial Sequence: Synthetic oligonucleotide
cuaggcucaguucugaaug

SEQ ID NO: 1763184 - RNA, 19 nt, Artificial Sequence
  Description of Artificial Sequence: Synthetic oligonucleotide
aauagcagugaccucuaaa

SEQ ID NO: 1763185 - RNA, 19 nt, Artificial Sequence
  Description of Artificial Sequence: Synthetic oligonucleotide
gguaugauuacuugugacc

SEQ ID NO: 1763186 - RNA, 19 nt, Artificial Sequence
  Description of Artificial Sequence: Synthetic oligonucleotide
guuaauaaucccuuuggaa

SEQ ID NO: 1763187 - RNA, 19 nt, Artificial Sequence
  Description of Artificial Sequence: Synthetic oligonucleotide
agguaugacagcaugauga

SEQ ID NO: 1763188 - RNA, 19 nt, Artificial Sequence
  Description of Artificial Sequence: Synthetic oligonucleotide
ugaaagagcagguaccgau

SEQ ID NO: 1763189 - RNA, 19 nt, Artificial Sequence
  Description of Artificial Sequence: Synthetic oligonucleotide
auguaucgcaccgauaggg

SEQ ID NO: 1763190 - RNA, 19 nt, Artificial Sequence
  Description of Artificial Sequence: Synthetic oligonucleotide
auaggguaugauuacuugu

SEQ ID NO: 1763191 - RNA, 19 nt, Artificial Sequence
  Description of Artificial Sequence: Synthetic oligonucleotide
ucucagguaccuagaagag

SEQ ID NO: 1763192 - RNA, 19 nt, Artificial Sequence
  Description of Artificial Sequence: Synthetic oligonucleotide
uacuguaccaggugaaaga

SEQ ID NO: 1763193 - RNA, 19 nt, Artificial Sequence
  Description of Artificial Sequence: Synthetic oligonucleotide
acccucagauauuuaauag

SEQ ID NO: 1763194 - RNA, 19 nt, Artificial Sequence
  Description of Artificial Sequence: Synthetic oligonucleotide
ucgaucucagaagacagcc

SEQ ID NO: 1763195 - RNA, 19 nt, Artificial Sequence
  Description of Artificial Sequence: Synthetic oligonucleotide
gaaacaaccuucucacuuc

SEQ ID NO: 1763196 - RNA, 19 nt, Artificial Sequence
  Description of Artificial Sequence: Synthetic oligonucleotide
agauauuuaauagcaguga

SEQ ID NO: 1763197 - RNA, 19 nt, Artificial Sequence
  Description of Artificial Sequence: Synthetic oligonucleotide
accgauaggguaugauuac

SEQ ID NO: 1763198 - RNA, 19 nt, Artificial Sequence
  Description of Artificial Sequence: Synthetic oligonucleotide
aagugauugaggaaccugu

SEQ ID NO: 1763199 - RNA, 19 nt, Artificial Sequence
  Description of Artificial Sequence: Synthetic oligonucleotide
agcagguaccgauuggguc

SEQ ID NO: 1763200 - RNA, 19 nt, Artificial Sequence
  Description of Artificial Sequence: Synthetic oligonucleotide
gaagcuggcgaugggacgg

SEQ ID NO: 1763201 - RNA, 19 nt, Artificial Sequence
  Description of Artificial Sequence: Synthetic oligonucleotide
auaagauugaugaccacgu

SEQ ID NO: 1763202 - RNA, 19 nt, Artificial Sequence
  Description of Artificial Sequence: Synthetic oligonucleotide
acaccgauaaaccaacgaa

SEQ ID NO: 1763203 - RNA, 19 nt, Artificial Sequence
  Description of Artificial Sequence: Synthetic oligonucleotide
acagccagcgguaagugcg

SEQ ID NO: 1763204 - RNA, 19 nt, Artificial Sequence
  Description of Artificial Sequence: Synthetic oligonucleotide
ucauauguaucgcaccgau

SEQ ID NO: 1763205 - RNA, 19 nt, Artificial Sequence
  Description of Artificial Sequence: Synthetic oligonucleotide
uaugauuacuugugacccc

SEQ ID NO: 1763206 - RNA, 19 nt, Artificial Sequence
  Description of Artificial Sequence: Synthetic oligonucleotide
ucuacaacauauacugguu

SEQ ID NO: 1763207 - RNA, 19 nt, Artificial Sequence
  Description of Artificial Sequence: Synthetic oligonucleotide
cucagauauuuaauagcag

SEQ ID NO: 1763208 - RNA, 19 nt, Artificial Sequence
  Description of Artificial Sequence: Synthetic oligonucleotide
ucuccggauagaaucuuug

SEQ ID NO: 1763209 - RNA, 19 nt, Artificial Sequence
  Description of Artificial Sequence: Synthetic oligonucleotide
uauaggcaaaaugaggcaa

SEQ ID NO: 1763210 - RNA, 19 nt, Artificial Sequence
  Description of Artificial Sequence: Synthetic oligonucleotide
uccggauagaaucuuuguc

SEQ ID NO: 1763211 - RNA, 19 nt, Artificial Sequence
  Description of Artificial Sequence: Synthetic oligonucleotide
aacugcguuaauaaucccu

SEQ ID NO: 1763212 - RNA, 19 nt, Artificial Sequence
  Description of Artificial Sequence: Synthetic oligonucleotide
ugcauggugucauauguau

SEQ ID NO: 1763213 - RNA, 19 nt, Artificial Sequence
  Description of Artificial Sequence: Synthetic oligonucleotide
accuauaggcaaaaugagg

SEQ ID NO: 1763214 - RNA, 19 nt, Artificial Sequence
  Description of Artificial Sequence: Synthetic oligonucleotide
acgaauauuugcaaaguga

SEQ ID NO: 1763215 - RNA, 19 nt, Artificial Sequence
  Description of Artificial Sequence: Synthetic oligonucleotide
auaguuauuuaaagaaacu

SEQ ID NO: 1763216 - RNA, 19 nt, Artificial Sequence
  Description of Artificial Sequence: Synthetic oligonucleotide
uccucccuuccaaagaugu

SEQ ID NO: 1763217 - RNA, 19 nt, Artificial Sequence
  Description of Artificial Sequence: Synthetic oligonucleotide
caccuauaggcaaaaugag

SEQ ID NO: 1763218 - RNA, 19 nt, Artificial Sequence
  Description of Artificial Sequence: Synthetic oligonucleotide
auaggcaaaaugaggcaac

SEQ ID NO: 1763219 - RNA, 19 nt, Artificial Sequence
  Description of Artificial Sequence: Synthetic oligonucleotide
uccuguugcuccaaacaca

SEQ ID NO: 1763220 - RNA, 19 nt, Artificial Sequence
  Description of Artificial Sequence: Synthetic oligonucleotide
ucucuugcgucccacucca

SEQ ID NO: 1763221 - RNA, 19 nt, Artificial Sequence
  Description of Artificial Sequence: Synthetic oligonucleotide
aguugacugucuuggcggg

SEQ ID NO: 1763222 - RNA, 19 nt, Artificial Sequence
  Description of Artificial Sequence: Synthetic oligonucleotide
uagacguacuguaccaggu

SEQ ID NO: 1763223 - RNA, 19 nt, Artificial Sequence
  Description of Artificial Sequence: Synthetic oligonucleotide
aggacgugacauuggcagc

SEQ ID NO: 1763224 - RNA, 19 nt, Artificial Sequence
  Description of Artificial Sequence: Synthetic oligonucleotide
auuucacuaauaguugacu

SEQ ID NO: 1763225 - RNA, 19 nt, Artificial Sequence
  Description of Artificial Sequence: Synthetic oligonucleotide
uguaucgcaccgauagggu

SEQ ID NO: 1763226 - RNA, 19 nt, Artificial Sequence
  Description of Artificial Sequence: Synthetic oligonucleotide
uguuucucagguaccuaga

SEQ ID NO: 1763227 - RNA, 19 nt, Artificial Sequence
  Description of Artificial Sequence: Synthetic oligonucleotide
gacaacauaucgacccagg

SEQ ID NO: 1763228 - RNA, 19 nt, Artificial Sequence
  Description of Artificial Sequence: Synthetic oligonucleotide
cugcucuccggauagaauc

SEQ ID NO: 1763229 - RNA, 19 nt, Artificial Sequence
  Description of Artificial Sequence: Synthetic oligonucleotide
auggccguaugaugguggc

SEQ ID NO: 1763230 - RNA, 19 nt, Artificial Sequence
  Description of Artificial Sequence: Synthetic oligonucleotide
acuguaccaggugaaagag

SEQ ID NO: 1763231 - RNA, 19 nt, Artificial Sequence
  Description of Artificial Sequence: Synthetic oligonucleotide
accccauucguccaagaug

SEQ ID NO: 1763232 - RNA, 19 nt, Artificial Sequence
  Description of Artificial Sequence: Synthetic oligonucleotide
gaaucuuugucucuugcgu

SEQ ID NO: 1763233 - RNA, 19 nt, Artificial Sequence
  Description of Artificial Sequence: Synthetic oligonucleotide
ccccauucguccaagaugg

SEQ ID NO: 1763234 - RNA, 19 nt, Artificial Sequence
  Description of Artificial Sequence: Synthetic oligonucleotide
auuggcagcgaucggagaa

SEQ ID NO: 1763235 - RNA, 19 nt, Artificial Sequence
  Description of Artificial Sequence: Synthetic oligonucleotide
aaguuucugguuucccagu

SEQ ID NO: 1763236 - RNA, 19 nt, Artificial Sequence
  Description of Artificial Sequence: Synthetic oligonucleotide
uccaaagaugucagauggc

SEQ ID NO: 1763237 - RNA, 19 nt, Artificial Sequence
  Description of Artificial Sequence: Synthetic oligonucleotide
agauaagcuggcccagguc

SEQ ID NO: 1763238 - RNA, 19 nt, Artificial Sequence
  Description of Artificial Sequence: Synthetic oligonucleotide
ccaacgaauauuugcaaag

SEQ ID NO: 1763239 - RNA, 19 nt, Artificial Sequence
  Description of Artificial Sequence: Synthetic oligonucleotide
aaccaacgaauauuugcaa

SEQ ID NO: 1763240 - RNA, 19 nt, Artificial Sequence
  Description of Artificial Sequence: Synthetic oligonucleotide
caugaaugagucucucaac

SEQ ID NO: 1763241 - RNA, 19 nt, Artificial Sequence
  Description of Artificial Sequence: Synthetic oligonucleotide
uaucgcaccgauaggguau

SEQ ID NO: 1763242 - RNA, 19 nt, Artificial Sequence
  Description of Artificial Sequence: Synthetic oligonucleotide
guaagugcgaugccgccgc

SEQ ID NO: 1763243 - RNA, 19 nt, Artificial Sequence
  Description of Artificial Sequence: Synthetic oligonucleotide
gauggccguaugauggugg

SEQ ID NO: 1763244 - RNA, 19 nt, Artificial Sequence
  Description of Artificial Sequence: Synthetic oligonucleotide
acaacauaucgacccagga

SEQ ID NO: 1763245 - RNA, 19 nt, Artificial Sequence
  Description of Artificial Sequence: Synthetic oligonucleotide
ucucucaaccccagcuucc

SEQ ID NO: 1763246 - RNA, 19 nt, Artificial Sequence
  Description of Artificial Sequence: Synthetic oligonucleotide
gacguacuguaccagguga

SEQ ID NO: 1763247 - RNA, 19 nt, Artificial Sequence
  Description of Artificial Sequence: Synthetic oligonucleotide
accgccuuguuucucaggu

SEQ ID NO: 1763248 - RNA, 19 nt, Artificial Sequence
  Description of Artificial Sequence: Synthetic oligonucleotide
uggaucuuuaacugcguua

SEQ ID NO: 1763249 - RNA, 19 nt, Artificial Sequence
  Description of Artificial Sequence: Synthetic oligonucleotide
gaagauaagcuggcccagg

SEQ ID NO: 1763250 - RNA, 19 nt, Artificial Sequence
  Description of Artificial Sequence: Synthetic oligonucleotide
ucugguuucccagucccgc

SEQ ID NO: 1763251 - RNA, 19 nt, Artificial Sequence
  Description of Artificial Sequence: Synthetic oligonucleotide
ugagguaugacagcaugau

SEQ ID NO: 1763252 - RNA, 19 nt, Artificial Sequence
  Description of Artificial Sequence: Synthetic oligonucleotide
accaacgaauauuugcaaa

SEQ ID NO: 1763253 - RNA, 19 nt, Artificial Sequence
  Description of Artificial Sequence: Synthetic oligonucleotide
auauacugguuguuucacu

SEQ ID NO: 1763254 - RNA, 19 nt, Artificial Sequence
  Description of Artificial Sequence: Synthetic oligonucleotide
uaccuagaagagcucuuca

SEQ ID NO: 1763255 - RNA, 19 nt, Artificial Sequence
  Description of Artificial Sequence: Synthetic oligonucleotide
uucugguuucccagucccg

SEQ ID NO: 1763256 - RNA, 19 nt, Artificial Sequence
  Description of Artificial Sequence: Synthetic oligonucleotide
auugcuugaggaaucuuca

SEQ ID NO: 1763257 - RNA, 19 nt, Artificial Sequence
  Description of Artificial Sequence: Synthetic oligonucleotide
gugucauauguaucgcacc

SEQ ID NO: 1763258 - RNA, 19 nt, Artificial Sequence
  Description of Artificial Sequence: Synthetic oligonucleotide
ugugggccaugccauagac

SEQ ID NO: 1763259 - RNA, 19 nt, Artificial Sequence
  Description of Artificial Sequence: Synthetic oligonucleotide
gagguaugacagcaugaug

SEQ ID NO: 1763260 - RNA, 19 nt, Artificial Sequence
  Description of Artificial Sequence: Synthetic oligonucleotide
caaaguuucugguuuccca

SEQ ID NO: 1763261 - RNA, 19 nt, Artificial Sequence
  Description of Artificial Sequence: Synthetic oligonucleotide
gaauggcugagaguucucc

SEQ ID NO: 1763262 - RNA, 19 nt, Artificial Sequence
  Description of Artificial Sequence: Synthetic oligonucleotide
uacuugugaccccauucgu

SEQ ID NO: 1763263 - RNA, 19 nt, Artificial Sequence
  Description of Artificial Sequence: Synthetic oligonucleotide
gaugggacgggccacgaaa

SEQ ID NO: 1763264 - RNA, 19 nt, Artificial Sequence
  Description of Artificial Sequence: Synthetic oligonucleotide
cauaucgacccaggaaucc

SEQ ID NO: 1763265 - RNA, 19 nt, Artificial Sequence
  Description of Artificial Sequence: Synthetic oligonucleotide
ugcucuccggauagaaucu

SEQ ID NO: 1763266 - RNA, 19 nt, Artificial Sequence
  Description of Artificial Sequence: Synthetic oligonucleotide
gaagacagccagcgguaag

SEQ ID NO: 1763267 - RNA, 19 nt, Artificial Sequence
  Description of Artificial Sequence: Synthetic oligonucleotide
ccaccuauaggcaaaauga

SEQ ID NO: 1763268 - RNA, 19 nt, Artificial Sequence
  Description of Artificial Sequence: Synthetic oligonucleotide
uuaauagcagugaccucua

SEQ ID NO: 1763269 - RNA, 19 nt, Artificial Sequence
  Description of Artificial Sequence: Synthetic oligonucleotide
aauggcaggacgugacauu

SEQ ID NO: 1763270 - RNA, 19 nt, Artificial Sequence
  Description of Artificial Sequence: Synthetic oligonucleotide
uaccgauuggguccggcga

SEQ ID NO: 1763271 - RNA, 19 nt, Artificial Sequence
  Description of Artificial Sequence: Synthetic oligonucleotide
guaugaugguggcuucagg

SEQ ID NO: 1763272 - RNA, 19 nt, Artificial Sequence
  Description of Artificial Sequence: Synthetic oligonucleotide
cacgaaacacagacguggc

SEQ ID NO: 1763273 - RNA, 19 nt, Artificial Sequence
  Description of Artificial Sequence: Synthetic oligonucleotide
gucccgcccaauaagauug

SEQ ID NO: 1763274 - RNA, 19 nt, Artificial Sequence
  Description of Artificial Sequence: Synthetic oligonucleotide
guaccgauuggguccggcg

SEQ ID NO: 1763275 - RNA, 19 nt, Artificial Sequence
  Description of Artificial Sequence: Synthetic oligonucleotide
cauauacugguuguuucac

SEQ ID NO: 1763276 - RNA, 19 nt, Artificial Sequence
  Description of Artificial Sequence: Synthetic oligonucleotide
aggguaugauuacuuguga

SEQ ID NO: 1763277 - RNA, 19 nt, Artificial Sequence
  Description of Artificial Sequence: Synthetic oligonucleotide
gaauuugccaauccaccua

SEQ ID NO: 1763278 - RNA, 19 nt, Artificial Sequence
  Description of Artificial Sequence: Synthetic oligonucleotide
cuauaggcaaaaugaggca

SEQ ID NO: 1763279 - RNA, 19 nt, Artificial Sequence
  Description of Artificial Sequence: Synthetic oligonucleotide
acuugugaccccauucguc

SEQ ID NO: 1763280 - RNA, 19 nt, Artificial Sequence
  Description of Artificial Sequence: Synthetic oligonucleotide
gacauuggcagcgaucgga

SEQ ID NO: 1763281 - RNA, 19 nt, Artificial Sequence
  Description of Artificial Sequence: Synthetic oligonucleotide
uguccuccguuguccaggg

SEQ ID NO: 1763282 - RNA, 19 nt, Artificial Sequence
  Description of Artificial Sequence: Synthetic oligonucleotide
augauuacuugugacccca

SEQ ID NO: 1763283 - RNA, 19 nt, Artificial Sequence
  Description of Artificial Sequence: Synthetic oligonucleotide
agacguacuguaccaggug

SEQ ID NO: 1763284 - RNA, 19 nt, Artificial Sequence
  Description of Artificial Sequence: Synthetic oligonucleotide
gaugucagauggccguaug

SEQ ID NO: 1763285 - RNA, 19 nt, Artificial Sequence
  Description of Artificial Sequence: Synthetic oligonucleotide
gaccucuaaagaacacagg

SEQ ID NO: 1763286 - RNA, 19 nt, Artificial Sequence
  Description of Artificial Sequence: Synthetic oligonucleotide
agugauugaggaaccuguc

SEQ ID NO: 1763287 - RNA, 19 nt, Artificial Sequence
  Description of Artificial Sequence: Synthetic oligonucleotide
gagauaugcauccgcucca

SEQ ID NO: 1763288 - RNA, 19 nt, Artificial Sequence
  Description of Artificial Sequence: Synthetic oligonucleotide
auucguccaagaugguuga

SEQ ID NO: 1763289 - RNA, 19 nt, Artificial Sequence
  Description of Artificial Sequence: Synthetic oligonucleotide
guacuguaccaggugaaag

SEQ ID NO: 1763290 - RNA, 19 nt, Artificial Sequence
  Description of Artificial Sequence: Synthetic oligonucleotide
ugucucuugcgucccacuc

SEQ ID NO: 1763291 - RNA, 19 nt, Artificial Sequence
  Description of Artificial Sequence: Synthetic oligonucleotide
cugauuaaucaagaaagaa

SEQ ID NO: 1763292 - RNA, 19 nt, Artificial Sequence
  Description of Artificial Sequence: Synthetic oligonucleotide
ccucagauauuuaauagca

SEQ ID NO: 1763293 - RNA, 19 nt, Artificial Sequence
  Description of Artificial Sequence: Synthetic oligonucleotide
gauuggguccggcgaaggc

SEQ ID NO: 1763294 - RNA, 19 nt, Artificial Sequence
  Description of Artificial Sequence: Synthetic oligonucleotide
ggcacuaccacaucugaga

SEQ ID NO: 1763295 - RNA, 19 nt, Artificial Sequence
  Description of Artificial Sequence: Synthetic oligonucleotide
augucagauggccguauga

SEQ ID NO: 1763296 - RNA, 19 nt, Artificial Sequence
  Description of Artificial Sequence: Synthetic oligonucleotide
cccucagauauuuaauagc

SEQ ID NO: 1763297 - RNA, 19 nt, Artificial Sequence
  Description of Artificial Sequence: Synthetic oligonucleotide
ccacgaaacacagacgugg

SEQ ID NO: 1763298 - RNA, 19 nt, Artificial Sequence
  Description of Artificial Sequence: Synthetic oligonucleotide
augccauagacguacugua

SEQ ID NO: 1763299 - RNA, 19 nt, Artificial Sequence
  Description of Artificial Sequence: Synthetic oligonucleotide
accuagaagagcucuucau

SEQ ID NO: 1763300 - RNA, 19 nt, Artificial Sequence
  Description of Artificial Sequence: Synthetic oligonucleotide
acauaucgacccaggaauc

SEQ ID NO: 1763301 - RNA, 19 nt, Artificial Sequence
  Description of Artificial Sequence: Synthetic oligonucleotide
aacuccacugacagacgag

SEQ ID NO: 1763302 - RNA, 19 nt, Artificial Sequence
  Description of Artificial Sequence: Synthetic oligonucleotide
agacaugaaugagucucuc

SEQ ID NO: 1763303 - RNA, 19 nt, Artificial Sequence
  Description of Artificial Sequence: Synthetic oligonucleotide
cucagguaccuagaagagc

SEQ ID NO: 1763304 - RNA, 19 nt, Artificial Sequence
  Description of Artificial Sequence: Synthetic oligonucleotide
uaacugcguuaauaauccc

SEQ ID NO: 1763305 - RNA, 19 nt, Artificial Sequence
  Description of Artificial Sequence: Synthetic oligonucleotide
ggaaacaucuacaacauau

SEQ ID NO: 1763306 - RNA, 19 nt, Artificial Sequence
  Description of Artificial Sequence: Synthetic oligonucleotide
acuggcauucaggugugag

SEQ ID NO: 1763307 - RNA, 19 nt, Artificial Sequence
  Description of Artificial Sequence: Synthetic oligonucleotide
uggcaggacgugacauugg

SEQ ID NO: 1763308 - RNA, 19 nt, Artificial Sequence
  Description of Artificial Sequence: Synthetic oligonucleotide
uuggguccggcgaaggcaa

SEQ ID NO: 1763309 - RNA, 19 nt, Artificial Sequence
  Description of Artificial Sequence: Synthetic oligonucleotide
cugagauaugcauccgcuc

SEQ ID NO: 1763310 - RNA, 19 nt, Artificial Sequence
  Description of Artificial Sequence: Synthetic oligonucleotide
auaagcuggcccaggucac

SEQ ID NO: 1763311 - RNA, 19 nt, Artificial Sequence
  Description of Artificial Sequence: Synthetic oligonucleotide
aggcaaaaugaggcaacgg

SEQ ID NO: 1763312 - RNA, 19 nt, Artificial Sequence
  Description of Artificial Sequence: Synthetic oligonucleotide
aacuaggcucaguucugaa

SEQ ID NO: 1763313 - RNA, 19 nt, Artificial Sequence
  Description of Artificial Sequence: Synthetic oligonucleotide
caacauaucgacccaggaa

SEQ ID NO: 1763314 - RNA, 19 nt, Artificial Sequence
  Description of Artificial Sequence: Synthetic oligonucleotide
caccgauaggguaugauua

SEQ ID NO: 1763315 - RNA, 19 nt, Artificial Sequence
  Description of Artificial Sequence: Synthetic oligonucleotide
caauaagauugaugaccac

SEQ ID NO: 1763316 - RNA, 19 nt, Artificial Sequence
  Description of Artificial Sequence: Synthetic oligonucleotide
auggggcgaaggugcaugg

SEQ ID NO: 1763317 - RNA, 19 nt, Artificial Sequence
  Description of Artificial Sequence: Synthetic oligonucleotide
ggguaugauuacuugugac

SEQ ID NO: 1763318 - RNA, 19 nt, Artificial Sequence
  Description of Artificial Sequence: Synthetic oligonucleotide
ggugucauauguaucgcac

SEQ ID NO: 1763319 - RNA, 19 nt, Artificial Sequence
  Description of Artificial Sequence: Synthetic oligonucleotide
acugcguuaauaaucccuu

SEQ ID NO: 1763320 - RNA, 19 nt, Artificial Sequence
  Description of Artificial Sequence: Synthetic oligonucleotide
accgauaaaccaacgaaua

SEQ ID NO: 1763321 - RNA, 19 nt, Artificial Sequence
  Description of Artificial Sequence: Synthetic oligonucleotide
acgaaacacagacguggcu

SEQ ID NO: 1763322 - RNA, 19 nt, Artificial Sequence
  Description of Artificial Sequence: Synthetic oligonucleotide
ggaucuuuaacugcguuaa

SEQ ID NO: 1763323 - RNA, 19 nt, Artificial Sequence
  Description of Artificial Sequence: Synthetic oligonucleotide
gcagcgaucggagaacccg

SEQ ID NO: 1763324 - RNA, 19 nt, Artificial Sequence
  Description of Artificial Sequence: Synthetic oligonucleotide
cgcccaauaagauugauga

SEQ ID NO: 1763325 - RNA, 19 nt, Artificial Sequence
  Description of Artificial Sequence: Synthetic oligonucleotide
ugacagacgagcggccacc

SEQ ID NO: 1763326 - RNA, 19 nt, Artificial Sequence
  Description of Artificial Sequence: Synthetic oligonucleotide
ugggcucauuccaaagaau

SEQ ID NO: 1763327 - RNA, 19 nt, Artificial Sequence
  Description of Artificial Sequence: Synthetic oligonucleotide
augcagacugaacccucag

SEQ ID NO: 1763328 - RNA, 19 nt, Artificial Sequence
  Description of Artificial Sequence: Synthetic oligonucleotide
uggcuuggauuucacuaau

SEQ ID NO: 1763329 - RNA, 19 nt, Artificial Sequence
  Description of Artificial Sequence: Synthetic oligonucleotide
augcauccgcuccacuuug

SEQ ID NO: 1763330 - RNA, 19 nt, Artificial Sequence
  Description of Artificial Sequence: Synthetic oligonucleotide
uaagaggcacaccgauaaa

SEQ ID NO: 1763331 - RNA, 19 nt, Artificial Sequence
  Description of Artificial Sequence: Synthetic oligonucleotide
aggaaacaaccuucucacu

SEQ ID NO: 1763332 - RNA, 19 nt, Artificial Sequence
  Description of Artificial Sequence: Synthetic oligonucleotide
agguaccuagaagagcucu

SEQ ID NO: 1763333 - RNA, 19 nt, Artificial Sequence
  Description of Artificial Sequence: Synthetic oligonucleotide
guuucucagguaccuagaa

SEQ ID NO: 1763334 - RNA, 19 nt, Artificial Sequence
  Description of Artificial Sequence: Synthetic oligonucleotide
gauagaaucuuugucucuu

SEQ ID NO: 1763335 - RNA, 19 nt, Artificial Sequence
  Description of Artificial Sequence: Synthetic oligonucleotide
ggugugagacaugaaugag

SEQ ID NO: 1763336 - RNA, 19 nt, Artificial Sequence
  Description of Artificial Sequence: Synthetic oligonucleotide
cacaccgauaaaccaacga

SEQ ID NO: 1763337 - RNA, 19 nt, Artificial Sequence
  Description of Artificial Sequence: Synthetic oligonucleotide
augggacgggccacgaaac

SEQ ID NO: 1763338 - RNA, 19 nt, Artificial Sequence
  Description of Artificial Sequence: Synthetic oligonucleotide
uccggcgaaggcaaagguu

SEQ ID NO: 1763339 - RNA, 19 nt, Artificial Sequence
  Description of Artificial Sequence: Synthetic oligonucleotide
cagugaccucuaaagaaca

SEQ ID NO: 1763340 - RNA, 19 nt, Artificial Sequence
  Description of Artificial Sequence: Synthetic oligonucleotide
gguaagugcgaugccgccg

SEQ ID NO: 1763341 - RNA, 19 nt, Artificial Sequence
  Description of Artificial Sequence: Synthetic oligonucleotide
caucugagauaugcauccg

SEQ ID NO: 1763342 - RNA, 19 nt, Artificial Sequence
  Description of Artificial Sequence: Synthetic oligonucleotide
gacgggccacgaaacacag

SEQ ID NO: 1763343 - RNA, 19 nt, Artificial Sequence
  Description of Artificial Sequence: Synthetic oligonucleotide
ugggacgggccacgaaaca

SEQ ID NO: 1763344 - RNA, 19 nt, Artificial Sequence
  Description of Artificial Sequence: Synthetic oligonucleotide
ggugcauggugucauaugu

SEQ ID NO: 1763345 - RNA, 19 nt, Artificial Sequence
  Description of Artificial Sequence: Synthetic oligonucleotide
guaccuagaagagcucuuc

SEQ ID NO: 1763346 - RNA, 19 nt, Artificial Sequence
  Description of Artificial Sequence: Synthetic oligonucleotide
gguaugacagcaugaugaa

SEQ ID NO: 1763347 - RNA, 19 nt, Artificial Sequence
  Description of Artificial Sequence: Synthetic oligonucleotide
ugauuacuugugaccccau

SEQ ID NO: 1763348 - RNA, 19 nt, Artificial Sequence
  Description of Artificial Sequence: Synthetic oligonucleotide
caugcagacugaacccuca

SEQ ID NO: 1763349 - RNA, 19 nt, Artificial Sequence
  Description of Artificial Sequence: Synthetic oligonucleotide
cugacagacgagcggccac

SEQ ID NO: 1763350 - RNA, 19 nt, Artificial Sequence
  Description of Artificial Sequence: Synthetic oligonucleotide
uggccucaaugccaagauc

SEQ ID NO: 1763351 - RNA, 19 nt, Artificial Sequence
  Description of Artificial Sequence: Synthetic oligonucleotide
guugcugugcugcacugcu

SEQ ID NO: 1763352 - RNA, 19 nt, Artificial Sequence
  Description of Artificial Sequence: Synthetic oligonucleotide
caacggguaggggaugaag

SEQ ID NO: 1763353 - RNA, 19 nt, Artificial Sequence
  Description of Artificial Sequence: Synthetic oligonucleotide
cuugaggaaucuucacaaa

SEQ ID NO: 1763354 - RNA, 19 nt, Artificial Sequence
  Description of Artificial Sequence: Synthetic oligonucleotide
gcaaagugauugaggaacc

SEQ ID NO: 1763355 - RNA, 19 nt, Artificial Sequence
  Description of Artificial Sequence: Synthetic oligonucleotide
uucccagucccgcccaaua

SEQ ID NO: 1763356 - RNA, 19 nt, Artificial Sequence
  Description of Artificial Sequence: Synthetic oligonucleotide
aagcuggcgaugggacggg

SEQ ID NO: 1763357 - RNA, 19 nt, Artificial Sequence
  Description of Artificial Sequence: Synthetic oligonucleotide
ggccacgaaacacagacgu

SEQ ID NO: 1763358 - RNA, 19 nt, Artificial Sequence
  Description of Artificial Sequence: Synthetic oligonucleotide
uggccacaacuccacugac

SEQ ID NO: 1763359 - RNA, 19 nt, Artificial Sequence
  Description of Artificial Sequence: Synthetic oligonucleotide
cagguaccgauuggguccg

SEQ ID NO: 1763360 - RNA, 19 nt, Artificial Sequence
  Description of Artificial Sequence: Synthetic oligonucleotide
agacgagcggccaccuuuc

SEQ ID NO: 1763361 - RNA, 19 nt, Artificial Sequence
  Description of Artificial Sequence: Synthetic oligonucleotide
accgauuggguccggcgaa

SEQ ID NO: 1763362 - RNA, 19 nt, Artificial Sequence
  Description of Artificial Sequence: Synthetic oligonucleotide
cuuuguccuccguugucca

SEQ ID NO: 1763363 - RNA, 19 nt, Artificial Sequence
  Description of Artificial Sequence: Synthetic oligonucleotide
ggggcgaaggugcauggug

SEQ ID NO: 1763364 - RNA, 19 nt, Artificial Sequence
  Description of Artificial Sequence: Synthetic oligonucleotide
cuuuaacugcguuaauaau

SEQ ID NO: 1763365 - RNA, 19 nt, Artificial Sequence
  Description of Artificial Sequence: Synthetic oligonucleotide
aagaugucagauggccgua

SEQ ID NO: 1763366 - RNA, 19 nt, Artificial Sequence
  Description of Artificial Sequence: Synthetic oligonucleotide
cgggccacgaaacacagac

SEQ ID NO: 1763367 - RNA, 19 nt, Artificial Sequence
  Description of Artificial Sequence: Synthetic oligonucleotide
guaucgcaccgauagggua

SEQ ID NO: 1763368 - RNA, 19 nt, Artificial Sequence
  Description of Artificial Sequence: Synthetic oligonucleotide
ugguuguuucacugucuua

SEQ ID NO: 1763369 - RNA, 19 nt, Artificial Sequence
  Description of Artificial Sequence: Synthetic oligonucleotide
cgccgcagcaccucgaugg

SEQ ID NO: 1763370 - RNA, 19 nt, Artificial Sequence
  Description of Artificial Sequence: Synthetic oligonucleotide
caccgauaaaccaacgaau

SEQ ID NO: 1763371 - RNA, 19 nt, Artificial Sequence
  Description of Artificial Sequence: Synthetic oligonucleotide
ugcauccgcuccacuuugu

SEQ ID NO: 1763372 - RNA, 19 nt, Artificial Sequence
  Description of Artificial Sequence: Synthetic oligonucleotide
aggcacuaccacaucugag

SEQ ID NO: 1763373 - RNA, 19 nt, Artificial Sequence
  Description of Artificial Sequence: Synthetic oligonucleotide
agauggccguaugauggug

SEQ ID NO: 1763374 - RNA, 19 nt, Artificial Sequence
  Description of Artificial Sequence: Synthetic oligonucleotide
ggaaccuguccucccuucc

SEQ ID NO: 1763375 - RNA, 19 nt, Artificial Sequence
  Description of Artificial Sequence: Synthetic oligonucleotide
cgaaacacagacguggcug

SEQ ID NO: 1763376 - RNA, 19 nt, Artificial Sequence
  Description of Artificial Sequence: Synthetic oligonucleotide
ucgauggcuuugaguucca

SEQ ID NO: 1763377 - RNA, 19 nt, Artificial Sequence
  Description of Artificial Sequence: Synthetic oligonucleotide
gucauauguaucgcaccga

SEQ ID NO: 1763378 - RNA, 19 nt, Artificial Sequence
  Description of Artificial Sequence: Synthetic oligonucleotide
ugaccccauucguccaaga

SEQ ID NO: 1763379 - RNA, 19 nt, Artificial Sequence
  Description of Artificial Sequence: Synthetic oligonucleotide
gucacccauggggcgaagg

SEQ ID NO: 1763380 - RNA, 19 nt, Artificial Sequence
  Description of Artificial Sequence: Synthetic oligonucleotide
ggcacaccgauaaaccaac

SEQ ID NO: 1763381 - RNA, 19 nt, Artificial Sequence
  Description of Artificial Sequence: Synthetic oligonucleotide
ccuguccucccuuccaaag

SEQ ID NO: 1763382 - RNA, 19 nt, Artificial Sequence
  Description of Artificial Sequence: Synthetic oligonucleotide
gcagacugaacccucagau

SEQ ID NO: 1763383 - RNA, 19 nt, Artificial Sequence
  Description of Artificial Sequence: Synthetic oligonucleotide
cuggcgaugggacgggcca

SEQ ID NO: 1763384 - RNA, 19 nt, Artificial Sequence
  Description of Artificial Sequence: Synthetic oligonucleotide
ccggauagaaucuuugucu

SEQ ID NO: 1763385 - RNA, 19 nt, Artificial Sequence
  Description of Artificial Sequence: Synthetic oligonucleotide
gugugagacaugaaugagu

SEQ ID NO: 1763386 - RNA, 19 nt, Artificial Sequence
  Description of Artificial Sequence: Synthetic oligonucleotide
ucccgcccaauaagauuga

SEQ ID NO: 1763387 - RNA, 19 nt, Artificial Sequence
  Description of Artificial Sequence: Synthetic oligonucleotide
gagacaugaaugagucucu

SEQ ID NO: 1763388 - RNA, 19 nt, Artificial Sequence
  Description of Artificial Sequence: Synthetic oligonucleotide
uccuuggaugccugagcua

SEQ ID NO: 1763389 - RNA, 19 nt, Artificial Sequence
  Description of Artificial Sequence: Synthetic oligonucleotide
gguccggcgaaggcaaagg

SEQ ID NO: 1763390 - RNA, 19 nt, Artificial Sequence
  Description of Artificial Sequence: Synthetic oligonucleotide
cauauguaucgcaccgaua

SEQ ID NO: 1763391 - RNA, 19 nt, Artificial Sequence
  Description of Artificial Sequence: Synthetic oligonucleotide
aucgcaccgauaggguaug

SEQ ID NO: 1763392 - RNA, 19 nt, Artificial Sequence
  Description of Artificial Sequence: Synthetic oligonucleotide
gaacccucagauauuuaau

SEQ ID NO: 1763393 - RNA, 19 nt, Artificial Sequence
  Description of Artificial Sequence: Synthetic oligonucleotide
gacgagcggccaccuuucc

SEQ ID NO: 1763394 - RNA, 19 nt, Artificial Sequence
  Description of Artificial Sequence: Synthetic oligonucleotide
agaagacagccagcgguaa

SEQ ID NO: 1763395 - RNA, 19 nt, Artificial Sequence
  Description of Artificial Sequence: Synthetic oligonucleotide
cagguaccuagaagagcuc

SEQ ID NO: 1763396 - RNA, 19 nt, Artificial Sequence
  Description of Artificial Sequence: Synthetic oligonucleotide
caacgaauauuugcaaagu

SEQ ID NO: 1763397 - RNA, 19 nt, Artificial Sequence
  Description of Artificial Sequence: Synthetic oligonucleotide
gcccaauaagauugaugac

SEQ ID NO: 1763398 - RNA, 19 nt, Artificial Sequence
  Description of Artificial Sequence: Synthetic oligonucleotide
agaugucagauggccguau

SEQ ID NO: 1763399 - RNA, 19 nt, Artificial Sequence
  Description of Artificial Sequence: Synthetic oligonucleotide
cagcgaucggagaacccga

SEQ ID NO: 1763400 - RNA, 19 nt, Artificial Sequence
  Description of Artificial Sequence: Synthetic oligonucleotide
cgaauauuugcaaagugau

SEQ ID NO: 1763401 - RNA, 19 nt, Artificial Sequence
  Description of Artificial Sequence: Synthetic oligonucleotide
cacuaauaguugacugucu

SEQ ID NO: 1763402 - RNA, 19 nt, Artificial Sequence
  Description of Artificial Sequence: Synthetic oligonucleotide
acguacuguaccaggugaa

SEQ ID NO: 1763403 - RNA, 19 nt, Artificial Sequence
  Description of Artificial Sequence: Synthetic oligonucleotide
gaugccgccgcagcaccuc

SEQ ID NO: 1763404 - RNA, 19 nt, Artificial Sequence
  Description of Artificial Sequence: Synthetic oligonucleotide
gaaagagcagguaccgauu

SEQ ID NO: 1763405 - RNA, 19 nt, Artificial Sequence
  Description of Artificial Sequence: Synthetic oligonucleotide
cuccggauagaaucuuugu

SEQ ID NO: 1763406 - RNA, 19 nt, Artificial Sequence
  Description of Artificial Sequence: Synthetic oligonucleotide
cagggcucaaaugggcuca

SEQ ID NO: 1763407 - RNA, 19 nt, Artificial Sequence
  Description of Artificial Sequence: Synthetic oligonucleotide
gcgguaagugcgaugccgc

SEQ ID NO: 1763408 - RNA, 19 nt, Artificial Sequence
  Description of Artificial Sequence: Synthetic oligonucleotide
aucccuuuggaaacaucua

SEQ ID NO: 1763409 - RNA, 19 nt, Artificial Sequence
  Description of Artificial Sequence: Synthetic oligonucleotide
gaggcaacggguaggggau

SEQ ID NO: 1763410 - RNA, 19 nt, Artificial Sequence
  Description of Artificial Sequence: Synthetic oligonucleotide
ucgacccaggaauccuguu

SEQ ID NO: 1763411 - RNA, 19 nt, Artificial Sequence
  Description of Artificial Sequence: Synthetic oligonucleotide
cagcgguaagugcgaugcc

SEQ ID NO: 1763412 - RNA, 19 nt, Artificial Sequence
  Description of Artificial Sequence: Synthetic oligonucleotide
gacgugacauuggcagcga

SEQ ID NO: 1763413 - RNA, 19 nt, Artificial Sequence
  Description of Artificial Sequence: Synthetic oligonucleotide
gggacgggccacgaaacac

SEQ ID NO: 1763414 - RNA, 19 nt, Artificial Sequence
  Description of Artificial Sequence: Synthetic oligonucleotide
cacuaccacaucugagaua

SEQ ID NO: 1763415 - RNA, 19 nt, Artificial Sequence
  Description of Artificial Sequence: Synthetic oligonucleotide
uggccguaugaugguggcu

SEQ ID NO: 1763416 - RNA, 19 nt, Artificial Sequence
  Description of Artificial Sequence: Synthetic oligonucleotide
ccaggaagauaagcuggcc

SEQ ID NO: 1763417 - RNA, 19 nt, Artificial Sequence
  Description of Artificial Sequence: Synthetic oligonucleotide
uuucccagucccgcccaau

SEQ ID NO: 1763418 - RNA, 19 nt, Artificial Sequence
  Description of Artificial Sequence: Synthetic oligonucleotide
gccaauccaccuauaggca

SEQ ID NO: 1763419 - RNA, 19 nt, Artificial Sequence
  Description of Artificial Sequence: Synthetic oligonucleotide
cacguugcugugcugcacu

SEQ ID NO: 1763420 - RNA, 19 nt, Artificial Sequence
  Description of Artificial Sequence: Synthetic oligonucleotide
gcacaccgauaaaccaacg

SEQ ID NO: 1763421 - RNA, 19 nt, Artificial Sequence
  Description of Artificial Sequence: Synthetic oligonucleotide
cucuugcgucccacuccag

SEQ ID NO: 1763422 - RNA, 19 nt, Artificial Sequence
  Description of Artificial Sequence: Synthetic oligonucleotide
gggccacgaaacacagacg

SEQ ID NO: 1763423 - RNA, 19 nt, Artificial Sequence
  Description of Artificial Sequence: Synthetic oligonucleotide
uggggcgaaggugcauggu

SEQ ID NO: 1763424 - RNA, 19 nt, Artificial Sequence
  Description of Artificial Sequence: Synthetic oligonucleotide
gguguggccucaaugccaa

SEQ ID NO: 1763425 - RNA, 19 nt, Artificial Sequence
  Description of Artificial Sequence: Synthetic oligonucleotide
ccagucccgcccaauaaga

SEQ ID NO: 1763426 - RNA, 19 nt, Artificial Sequence
  Description of Artificial Sequence: Synthetic oligonucleotide
ggcgaugggacgggccacg

SEQ ID NO: 1763427 - RNA, 19 nt, Artificial Sequence
  Description of Artificial Sequence: Synthetic oligonucleotide
gguaccgauuggguccggc

SEQ ID NO: 1763428 - RNA, 19 nt, Artificial Sequence
  Description of Artificial Sequence: Synthetic oligonucleotide
caaagugauugaggaaccu

SEQ ID NO: 1763429 - RNA, 19 nt, Artificial Sequence
  Description of Artificial Sequence: Synthetic oligonucleotide
gugcgaugccgccgcagca

SEQ ID NO: 1763430 - RNA, 19 nt, Artificial Sequence
  Description of Artificial Sequence: Synthetic oligonucleotide
cugugggccaugccauaga

SEQ ID NO: 1763431 - RNA, 19 nt, Artificial Sequence
  Description of Artificial Sequence: Synthetic oligonucleotide
cguaugaugguggcuucag

SEQ ID NO: 1763432 - RNA, 19 nt, Artificial Sequence
  Description of Artificial Sequence: Synthetic oligonucleotide
gagcagguaccgauugggu

SEQ ID NO: 1763433 - RNA, 19 nt, Artificial Sequence
  Description of Artificial Sequence: Synthetic oligonucleotide
uggcgggcuuuguuuccuc

SEQ ID NO: 1763434 - RNA, 19 nt, Artificial Sequence
  Description of Artificial Sequence: Synthetic oligonucleotide
cagacgagcggccaccuuu

SEQ ID NO: 1763435 - RNA, 19 nt, Artificial Sequence
  Description of Artificial Sequence: Synthetic oligonucleotide
ccugugggccaugccauag

SEQ ID NO: 1763436 - RNA, 19 nt, Artificial Sequence
  Description of Artificial Sequence: Synthetic oligonucleotide
gugcauggugucauaugua

SEQ ID NO: 1763437 - RNA, 19 nt, Artificial Sequence
  Description of Artificial Sequence: Synthetic oligonucleotide
gccacgaaacacagacgug

SEQ ID NO: 1763438 - RNA, 19 nt, Artificial Sequence
  Description of Artificial Sequence: Synthetic oligonucleotide
cagauggccguaugauggu

SEQ ID NO: 1763439 - RNA, 19 nt, Artificial Sequence
  Description of Artificial Sequence: Synthetic oligonucleotide
acagacgagcggccaccuu

SEQ ID NO: 1763440 - RNA, 19 nt, Artificial Sequence
  Description of Artificial Sequence: Synthetic oligonucleotide
ccucgauggcuuugaguuc

SEQ ID NO: 1763441 - RNA, 19 nt, Artificial Sequence
  Description of Artificial Sequence: Synthetic oligonucleotide
gcaccgauaggguaugauu

SEQ ID NO: 1763442 - RNA, 19 nt, Artificial Sequence
  Description of Artificial Sequence: Synthetic oligonucleotide
guccggcgaaggcaaaggu

SEQ ID NO: 1763443 - RNA, 19 nt, Artificial Sequence
  Description of Artificial Sequence: Synthetic oligonucleotide
ggguccggcgaaggcaaag

SEQ ID NO: 1763444 - RNA, 19 nt, Artificial Sequence
  Description of Artificial Sequence: Synthetic oligonucleotide
uggguccggcgaaggcaaa

SEQ ID NO: 1763445 - RNA, 19 nt, Artificial Sequence
  Description of Artificial Sequence: Synthetic oligonucleotide
gcacuaccacaucugagau

SEQ ID NO: 1763446 - RNA, 19 nt, Artificial Sequence
  Description of Artificial Sequence: Synthetic oligonucleotide
gcuauugcuugaggaaucu

SEQ ID NO: 1763447 - RNA, 19 nt, Artificial Sequence
  Description of Artificial Sequence: Synthetic oligonucleotide
auuugccaauccaccuaua

SEQ ID NO: 1763448 - RNA, 19 nt, Artificial Sequence
  Description of Artificial Sequence: Synthetic oligonucleotide
cuggaucuuuaacugcguu

SEQ ID NO: 1763449 - RNA, 19 nt, Artificial Sequence
  Description of Artificial Sequence: Synthetic oligonucleotide
gccgcagcaccucgauggc

SEQ ID NO: 1763450 - RNA, 19 nt, Artificial Sequence
  Description of Artificial Sequence: Synthetic oligonucleotide
ccucccuuccaaagauguc

SEQ ID NO: 1763451 - RNA, 19 nt, Artificial Sequence
  Description of Artificial Sequence: Synthetic oligonucleotide
gccguaugaugguggcuuc

SEQ ID NO: 1763452 - RNA, 19 nt, Artificial Sequence
  Description of Artificial Sequence: Synthetic oligonucleotide
cgguaagugcgaugccgcc

SEQ ID NO: 1763453 - RNA, 19 nt, Artificial Sequence
  Description of Artificial Sequence: Synthetic oligonucleotide
ucgcaccgauaggguauga

SEQ ID NO: 1763454 - RNA, 19 nt, Artificial Sequence
  Description of Artificial Sequence: Synthetic oligonucleotide
gacagacgagcggccaccu

SEQ ID NO: 1763455 - RNA, 19 nt, Artificial Sequence
  Description of Artificial Sequence: Synthetic oligonucleotide
ccggcgaaggcaaagguuu

SEQ ID NO: 1763456 - RNA, 19 nt, Artificial Sequence
  Description of Artificial Sequence: Synthetic oligonucleotide
gcaggacgugacauuggca

SEQ ID NO: 1763457 - RNA, 19 nt, Artificial Sequence
  Description of Artificial Sequence: Synthetic oligonucleotide
cccaccgccuuguuucuca

SEQ ID NO: 1763458 - RNA, 19 nt, Artificial Sequence
  Description of Artificial Sequence: Synthetic oligonucleotide
ggccguaugaugguggcuu

SEQ ID NO: 1763459 - RNA, 19 nt, Artificial Sequence
  Description of Artificial Sequence: Synthetic oligonucleotide
ccaccgccuuguuucucag

SEQ ID NO: 1763460 - RNA, 19 nt, Artificial Sequence
  Description of Artificial Sequence: Synthetic oligonucleotide
cagucccgcccaauaagau

SEQ ID NO: 1763461 - RNA, 19 nt, Artificial Sequence
  Description of Artificial Sequence: Synthetic oligonucleotide
cugcguuaauaaucccuuu

SEQ ID NO: 1763462 - RNA, 19 nt, Artificial Sequence
  Description of Artificial Sequence: Synthetic oligonucleotide
ucccaccgccuuguuucuc

SEQ ID NO: 1763463 - RNA, 19 nt, Artificial Sequence
  Description of Artificial Sequence: Synthetic oligonucleotide
gggcgaaggugcauggugu

SEQ ID NO: 1763464 - RNA, 19 nt, Artificial Sequence
  Description of Artificial Sequence: Synthetic oligonucleotide
cgauuggguccggcgaagg

SEQ ID NO: 1763465 - RNA, 19 nt, Artificial Sequence
  Description of Artificial Sequence: Synthetic oligonucleotide
ggcuuggauuucacuaaua

SEQ ID NO: 1763466 - RNA, 19 nt, Artificial Sequence
  Description of Artificial Sequence: Synthetic oligonucleotide
acgggccacgaaacacaga

SEQ ID NO: 1763467 - RNA, 19 nt, Artificial Sequence
  Description of Artificial Sequence: Synthetic oligonucleotide
ccgauuggguccggcgaag

SEQ ID NO: 1763468 - RNA, 19 nt, Artificial Sequence
  Description of Artificial Sequence: Synthetic oligonucleotide
cguugcugugcugcacugc

SEQ ID NO: 1763469 - RNA, 19 nt, Artificial Sequence
  Description of Artificial Sequence: Synthetic oligonucleotide
ccacguugcugugcugcac

SEQ ID NO: 1763470 - RNA, 19 nt, Artificial Sequence
  Description of Artificial Sequence: Synthetic oligonucleotide
cgauaggguaugauuacuu

SEQ ID NO: 1763471 - RNA, 19 nt, Artificial Sequence
  Description of Artificial Sequence: Synthetic oligonucleotide
cucccaccgccuuguuucu

SEQ ID NO: 1763472 - RNA, 19 nt, Artificial Sequence
  Description of Artificial Sequence: Synthetic oligonucleotide
cguacuguaccaggugaaa

SEQ ID NO: 1763473 - RNA, 19 nt, Artificial Sequence
  Description of Artificial Sequence: Synthetic oligonucleotide
ccguaugaugguggcuuca

SEQ ID NO: 1763474 - RNA, 19 nt, Artificial Sequence
  Description of Artificial Sequence: Synthetic oligonucleotide
ccgauaggguaugauuacu

SEQ ID NO: 1763475 - RNA, 19 nt, Artificial Sequence
  Description of Artificial Sequence: Synthetic oligonucleotide
gcaacggguaggggaugaa

SEQ ID NO: 1763476 - RNA, 19 nt, Artificial Sequence
  Description of Artificial Sequence: Synthetic oligonucleotide
gcgaugggacgggccacga

SEQ ID NO: 1763477 - RNA, 19 nt, Artificial Sequence
  Description of Artificial Sequence: Synthetic oligonucleotide
cguuguccagggcucaaau

SEQ ID NO: 1763478 - RNA, 19 nt, Artificial Sequence
  Description of Artificial Sequence: Synthetic oligonucleotide
ccgccuuguuucucaggua

SEQ ID NO: 1763479 - RNA, 19 nt, Artificial Sequence
  Description of Artificial Sequence: Synthetic oligonucleotide
ccguuguccagggcucaaa

SEQ ID NO: 1763480 - RNA, 19 nt, Artificial Sequence
  Description of Artificial Sequence: Synthetic oligonucleotide
cccauucguccaagauggu

SEQ ID NO: 1763481 - RNA, 19 nt, Artificial Sequence
  Description of Artificial Sequence: Synthetic oligonucleotide
cgaugggacgggccacgaa

SEQ ID NO: 1763482 - RNA, 19 nt, Artificial Sequence
  Description of Artificial Sequence: Synthetic oligonucleotide
cgcaccgauaggguaugau

SEQ ID NO: 1763483 - RNA, 19 nt, Artificial Sequence
  Description of Artificial Sequence: Synthetic oligonucleotide
ccgcagcaccucgauggcu

SEQ ID NO: 1763484 - RNA, 19 nt, Artificial Sequence
  Description of Artificial Sequence: Synthetic oligonucleotide
cccgcccaauaagauugau

SEQ ID NO: 1763485 - RNA, 19 nt, Artificial Sequence
  Description of Artificial Sequence: Synthetic oligonucleotide
cggcgaaggcaaagguuuu

SEQ ID NO: 1763486 - RNA, 19 nt, Artificial Sequence
  Description of Artificial Sequence: Synthetic oligonucleotide
aauaaaugagcuuaggccc

SEQ ID NO: 1763487 - RNA, 19 nt, Artificial Sequence
  Description of Artificial Sequence: Synthetic oligonucleotide
aaagaaauccaucaguugg

SEQ ID NO: 1763488 - RNA, 19 nt, Artificial Sequence
  Description of Artificial Sequence: Synthetic oligonucleotide
ucuacucagacacagaacg

SEQ ID NO: 1763489 - RNA, 19 nt, Artificial Sequence
  Description of Artificial Sequence: Synthetic oligonucleotide
aaauccaucaguugguuac

SEQ ID NO: 1763490 - RNA, 19 nt, Artificial Sequence
  Description of Artificial Sequence: Synthetic oligonucleotide
gaauaaaugagcuuaggcc

SEQ ID NO: 1763491 - RNA, 19 nt, Artificial Sequence
  Description of Artificial Sequence: Synthetic oligonucleotide
auaucugcgacuuugcagc

SEQ ID NO: 1763492 - RNA, 19 nt, Artificial Sequence
  Description of Artificial Sequence: Synthetic oligonucleotide
agaauaaaugagcuuaggc

SEQ ID NO: 1763493 - RNA, 19 nt, Artificial Sequence
  Description of Artificial Sequence: Synthetic oligonucleotide
aaguagacgagauaaaaca

SEQ ID NO: 1763494 - RNA, 19 nt, Artificial Sequence
  Description of Artificial Sequence: Synthetic oligonucleotide
ugaucaagcaaacagccag

SEQ ID NO: 1763495 - RNA, 19 nt, Artificial Sequence
  Description of Artificial Sequence: Synthetic oligonucleotide
ucgauuucaaagcauacag

SEQ ID NO: 1763496 - RNA, 19 nt, Artificial Sequence
  Description of Artificial Sequence: Synthetic oligonucleotide
ucacuuaacaugaucaagc

SEQ ID NO: 1763497 - RNA, 19 nt, Artificial Sequence
  Description of Artificial Sequence: Synthetic oligonucleotide
uagacgagauaaaacaccg

SEQ ID NO: 1763498 - RNA, 19 nt, Artificial Sequence
  Description of Artificial Sequence: Synthetic oligonucleotide
cucaccggaaucuugaucg

SEQ ID NO: 1763499 - RNA, 19 nt, Artificial Sequence
  Description of Artificial Sequence: Synthetic oligonucleotide
gauacuauugcagagcacc

SEQ ID NO: 1763500 - RNA, 19 nt, Artificial Sequence
  Description of Artificial Sequence: Synthetic oligonucleotide
aagcauacaggucuuguuc

SEQ ID NO: 1763501 - RNA, 19 nt, Artificial Sequence
  Description of Artificial Sequence: Synthetic oligonucleotide
cuugucauguucuacuucg

SEQ ID NO: 1763502 - RNA, 19 nt, Artificial Sequence
  Description of Artificial Sequence: Synthetic oligonucleotide
ugagcauccagauagaaau

SEQ ID NO: 1763503 - RNA, 19 nt, Artificial Sequence
  Description of Artificial Sequence: Synthetic oligonucleotide
agcuacauacaucaagagc

SEQ ID NO: 1763504 - RNA, 19 nt, Artificial Sequence
  Description of Artificial Sequence: Synthetic oligonucleotide
agagccaauugccaaaggc

SEQ ID NO: 1763505 - RNA, 19 nt, Artificial Sequence
  Description of Artificial Sequence: Synthetic oligonucleotide
aaaguagacgagauaaaac

SEQ ID NO: 1763506 - RNA, 19 nt, Artificial Sequence
  Description of Artificial Sequence: Synthetic oligonucleotide
aaaucacuuaacaugauca

SEQ ID NO: 1763507 - RNA, 19 nt, Artificial Sequence
  Description of Artificial Sequence: Synthetic oligonucleotide
ucugacaccauccaacccc

SEQ ID NO: 1763508 - RNA, 19 nt, Artificial Sequence
  Description of Artificial Sequence: Synthetic oligonucleotide
uuugcagccauauuggaga

SEQ ID NO: 1763509 - RNA, 19 nt, Artificial Sequence
  Description of Artificial Sequence: Synthetic oligonucleotide
ucuagaauaaaugagcuua

SEQ ID NO: 1763510 - RNA, 19 nt, Artificial Sequence
  Description of Artificial Sequence: Synthetic oligonucleotide
ucuugaucgauuucaaagc

SEQ ID NO: 1763511 - RNA, 19 nt, Artificial Sequence
  Description of Artificial Sequence: Synthetic oligonucleotide
ugucauugagccauugggg

SEQ ID NO: 1763512 - RNA, 19 nt, Artificial Sequence
  Description of Artificial Sequence: Synthetic oligonucleotide
uuggauuuuaaaguagacg

SEQ ID NO: 1763513 - RNA, 19 nt, Artificial Sequence
  Description of Artificial Sequence: Synthetic oligonucleotide
aacaccggcaacacaaucc

SEQ ID NO: 1763514 - RNA, 19 nt, Artificial Sequence
  Description of Artificial Sequence: Synthetic oligonucleotide
caauucuagaauaaaugag

SEQ ID NO: 1763515 - RNA, 19 nt, Artificial Sequence
  Description of Artificial Sequence: Synthetic oligonucleotide
gacgagauaaaacaccggc

SEQ ID NO: 1763516 - RNA, 19 nt, Artificial Sequence
  Description of Artificial Sequence: Synthetic oligonucleotide
gauaucugcgacuuugcag

SEQ ID NO: 1763517 - RNA, 19 nt, Artificial Sequence
  Description of Artificial Sequence: Synthetic oligonucleotide
acucuuagcaggcaggguc

SEQ ID NO: 1763518 - RNA, 19 nt, Artificial Sequence
  Description of Artificial Sequence: Synthetic oligonucleotide
uggaauugccaaauugggg

SEQ ID NO: 1763519 - RNA, 19 nt, Artificial Sequence
  Description of Artificial Sequence: Synthetic oligonucleotide
gcuacauacaucaagagcc

SEQ ID NO: 1763520 - RNA, 19 nt, Artificial Sequence
  Description of Artificial Sequence: Synthetic oligonucleotide
ucauguucuacuucggagc

SEQ ID NO: 1763521 - RNA, 19 nt, Artificial Sequence
  Description of Artificial Sequence: Synthetic oligonucleotide
auauuggagagccagcuug

SEQ ID NO: 1763522 - RNA, 19 nt, Artificial Sequence
  Description of Artificial Sequence: Synthetic oligonucleotide
ugaccuggcugucugaagg

SEQ ID NO: 1763523 - RNA, 19 nt, Artificial Sequence
  Description of Artificial Sequence: Synthetic oligonucleotide
acuacagugacauacugau

SEQ ID NO: 1763524 - RNA, 19 nt, Artificial Sequence
  Description of Artificial Sequence: Synthetic oligonucleotide
agauagaaaucacuuaaca

SEQ ID NO: 1763525 - RNA, 19 nt, Artificial Sequence
  Description of Artificial Sequence: Synthetic oligonucleotide
auuuaagagaaacuucaca

SEQ ID NO: 1763526 - RNA, 19 nt, Artificial Sequence
  Description of Artificial Sequence: Synthetic oligonucleotide
acaucaagagccaauugcc

SEQ ID NO: 1763527 - RNA, 19 nt, Artificial Sequence
  Description of Artificial Sequence: Synthetic oligonucleotide
acugauacuauugcagagc

SEQ ID NO: 1763528 - RNA, 19 nt, Artificial Sequence
  Description of Artificial Sequence: Synthetic oligonucleotide
aacaguugcauucaagcua

SEQ ID NO: 1763529 - RNA, 19 nt, Artificial Sequence
  Description of Artificial Sequence: Synthetic oligonucleotide
gacagcuacauacaucaag

SEQ ID NO: 1763530 - RNA, 19 nt, Artificial Sequence
  Description of Artificial Sequence: Synthetic oligonucleotide
aaaugcgacauuguuuguc

SEQ ID NO: 1763531 - RNA, 19 nt, Artificial Sequence
  Description of Artificial Sequence: Synthetic oligonucleotide
aguucuaccagggucacuc

SEQ ID NO: 1763532 - RNA, 19 nt, Artificial Sequence
  Description of Artificial Sequence: Synthetic oligonucleotide
uaaagaaauccaucaguug

SEQ ID NO: 1763533 - RNA, 19 nt, Artificial Sequence
  Description of Artificial Sequence: Synthetic oligonucleotide
uacuucggagccuacacag

SEQ ID NO: 1763534 - RNA, 19 nt, Artificial Sequence
  Description of Artificial Sequence: Synthetic oligonucleotide
cacccuaacucuuagcagg

SEQ ID NO: 1763535 - RNA, 19 nt, Artificial Sequence
  Description of Artificial Sequence: Synthetic oligonucleotide
cuggaauugccaaauuggg

SEQ ID NO: 1763536 - RNA, 19 nt, Artificial Sequence
  Description of Artificial Sequence: Synthetic oligonucleotide
acaccggcaacacaauccc

SEQ ID NO: 1763537 - RNA, 19 nt, Artificial Sequence
  Description of Artificial Sequence: Synthetic oligonucleotide
uuaacaugaucaagcaaac

SEQ ID NO: 1763538 - RNA, 19 nt, Artificial Sequence
  Description of Artificial Sequence: Synthetic oligonucleotide
uggaauugggcucaguguc

SEQ ID NO: 1763539 - RNA, 19 nt, Artificial Sequence
  Description of Artificial Sequence: Synthetic oligonucleotide
uggagagccagcuuguuga

SEQ ID NO: 1763540 - RNA, 19 nt, Artificial Sequence
  Description of Artificial Sequence: Synthetic oligonucleotide
aguagacgagauaaaacac

SEQ ID NO: 1763541 - RNA, 19 nt, Artificial Sequence
  Description of Artificial Sequence: Synthetic oligonucleotide
aaucacuuaacaugaucaa

SEQ ID NO: 1763542 - RNA, 19 nt, Artificial Sequence
  Description of Artificial Sequence: Synthetic oligonucleotide
acuauugcagagcaccuug

SEQ ID NO: 1763543 - RNA, 19 nt, Artificial Sequence
  Description of Artificial Sequence: Synthetic oligonucleotide
uuucucaccggaaucuuga

SEQ ID NO: 1763544 - RNA, 19 nt, Artificial Sequence
  Description of Artificial Sequence: Synthetic oligonucleotide
acagaacgcaucucugagc

SEQ ID NO: 1763545 - RNA, 19 nt, Artificial Sequence
  Description of Artificial Sequence: Synthetic oligonucleotide
acaguugcauucaagcuac

SEQ ID NO: 1763546 - RNA, 19 nt, Artificial Sequence
  Description of Artificial Sequence: Synthetic oligonucleotide
ugagcuuaggccccuaccu

SEQ ID NO: 1763547 - RNA, 19 nt, Artificial Sequence
  Description of Artificial Sequence: Synthetic oligonucleotide
ucuacuucggagccuacac

SEQ ID NO: 1763548 - RNA, 19 nt, Artificial Sequence
  Description of Artificial Sequence: Synthetic oligonucleotide
cuagaauaaaugagcuuag

SEQ ID NO: 1763549 - RNA, 19 nt, Artificial Sequence
  Description of Artificial Sequence: Synthetic oligonucleotide
auugcagagcaccuugguc

SEQ ID NO: 1763550 - RNA, 19 nt, Artificial Sequence
  Description of Artificial Sequence: Synthetic oligonucleotide
ugcgacauuguuugucugg

SEQ ID NO: 1763551 - RNA, 19 nt, Artificial Sequence
  Description of Artificial Sequence: Synthetic oligonucleotide
ugaucgauuucaaagcaua

SEQ ID NO: 1763552 - RNA, 19 nt, Artificial Sequence
  Description of Artificial Sequence: Synthetic oligonucleotide
cuugauaucugcgacuuug

SEQ ID NO: 1763553 - RNA, 19 nt, Artificial Sequence
  Description of Artificial Sequence: Synthetic oligonucleotide
uacugauacuauugcagag

SEQ ID NO: 1763554 - RNA, 19 nt, Artificial Sequence
  Description of Artificial Sequence: Synthetic oligonucleotide
aauggucaugagcauccag

SEQ ID NO: 1763555 - RNA, 19 nt, Artificial Sequence
  Description of Artificial Sequence: Synthetic oligonucleotide
ggugacaacauuuaagaga

SEQ ID NO: 1763556 - RNA, 19 nt, Artificial Sequence
  Description of Artificial Sequence: Synthetic oligonucleotide
aguccccaacacuugagac

SEQ ID NO: 1763557 - RNA, 19 nt, Artificial Sequence
  Description of Artificial Sequence: Synthetic oligonucleotide
agauaaaacaccggcaaca

SEQ ID NO: 1763558 - RNA, 19 nt, Artificial Sequence
  Description of Artificial Sequence: Synthetic oligonucleotide
aaccacguugccugcuccc

SEQ ID NO: 1763559 - RNA, 19 nt, Artificial Sequence
  Description of Artificial Sequence: Synthetic oligonucleotide
uuaaaacuaguaacuucgu

SEQ ID NO: 1763560 - RNA, 19 nt, Artificial Sequence
  Description of Artificial Sequence: Synthetic oligonucleotide
uuaaaguagacgagauaaa

SEQ ID NO: 1763561 - RNA, 19 nt, Artificial Sequence
  Description of Artificial Sequence: Synthetic oligonucleotide
uccccaacacuugagacag

SEQ ID NO: 1763562 - RNA, 19 nt, Artificial Sequence
  Description of Artificial Sequence: Synthetic oligonucleotide
aaaacuacagugacauacu

SEQ ID NO: 1763563 - RNA, 19 nt, Artificial Sequence
  Description of Artificial Sequence: Synthetic oligonucleotide
uagaauaaaugagcuuagg

SEQ ID NO: 1763564 - RNA, 19 nt, Artificial Sequence
  Description of Artificial Sequence: Synthetic oligonucleotide
guagacgagauaaaacacc

SEQ ID NO: 1763565 - RNA, 19 nt, Artificial Sequence
  Description of Artificial Sequence: Synthetic oligonucleotide
uuuuaaaguagacgagaua

SEQ ID NO: 1763566 - RNA, 19 nt, Artificial Sequence
  Description of Artificial Sequence: Synthetic oligonucleotide
aucccauguuuucucaccg

SEQ ID NO: 1763567 - RNA, 19 nt, Artificial Sequence
  Description of Artificial Sequence: Synthetic oligonucleotide
cuuggauuuuaaaguagac

SEQ ID NO: 1763568 - RNA, 19 nt, Artificial Sequence
  Description of Artificial Sequence: Synthetic oligonucleotide
uaacucuuagcaggcaggg

SEQ ID NO: 1763569 - RNA, 19 nt, Artificial Sequence
  Description of Artificial Sequence: Synthetic oligonucleotide
gaugcugugaugcuguucu

SEQ ID NO: 1763570 - RNA, 19 nt, Artificial Sequence
  Description of Artificial Sequence: Synthetic oligonucleotide
ugccaauucuagaauaaau

SEQ ID NO: 1763571 - RNA, 19 nt, Artificial Sequence
  Description of Artificial Sequence: Synthetic oligonucleotide
uguuuucucaccggaaucu

SEQ ID NO: 1763572 - RNA, 19 nt, Artificial Sequence
  Description of Artificial Sequence: Synthetic oligonucleotide
cauguucuacuucggagcc

SEQ ID NO: 1763573 - RNA, 19 nt, Artificial Sequence
  Description of Artificial Sequence: Synthetic oligonucleotide
uuucuugauaucugcgacu

SEQ ID NO: 1763574 - RNA, 19 nt, Artificial Sequence
  Description of Artificial Sequence: Synthetic oligonucleotide
gaucccauguuuucucacc

SEQ ID NO: 1763575 - RNA, 19 nt, Artificial Sequence
  Description of Artificial Sequence: Synthetic oligonucleotide
uuggucuacucagacacag

SEQ ID NO: 1763576 - RNA, 19 nt, Artificial Sequence
  Description of Artificial Sequence: Synthetic oligonucleotide
agcuuaggccccuaccugg

SEQ ID NO: 1763577 - RNA, 19 nt, Artificial Sequence
  Description of Artificial Sequence: Synthetic oligonucleotide
uggugacaacauuuaagag

SEQ ID NO: 1763578 - RNA, 19 nt, Artificial Sequence
  Description of Artificial Sequence: Synthetic oligonucleotide
aaagcauacaggucuuguu

SEQ ID NO: 1763579 - RNA, 19 nt, Artificial Sequence
  Description of Artificial Sequence: Synthetic oligonucleotide
acauacugauacuauugca

SEQ ID NO: 1763580 - RNA, 19 nt, Artificial Sequence
  Description of Artificial Sequence: Synthetic oligonucleotide
uugauaucugcgacuuugc

SEQ ID NO: 1763581 - RNA, 19 nt, Artificial Sequence
  Description of Artificial Sequence: Synthetic oligonucleotide
acuggugacaacauuuaag

SEQ ID NO: 1763582 - RNA, 19 nt, Artificial Sequence
  Description of Artificial Sequence: Synthetic oligonucleotide
cacuuucuugauaucugcg

SEQ ID NO: 1763583 - RNA, 19 nt, Artificial Sequence
  Description of Artificial Sequence: Synthetic oligonucleotide
aucacuuaacaugaucaag

SEQ ID NO: 1763584 - RNA, 19 nt, Artificial Sequence
  Description of Artificial Sequence: Synthetic oligonucleotide
ugcaccaucggcugguggc

SEQ ID NO: 1763585 - RNA, 19 nt, Artificial Sequence
  Description of Artificial Sequence: Synthetic oligonucleotide
gacaccauccaaccccagg

SEQ ID NO: 1763586 - RNA, 19 nt, Artificial Sequence
  Description of Artificial Sequence: Synthetic oligonucleotide
auuucaaagcauacagguc

SEQ ID NO: 1763587 - RNA, 19 nt, Artificial Sequence
  Description of Artificial Sequence: Synthetic oligonucleotide
ugagccauuggggacaaca

SEQ ID NO: 1763588 - RNA, 19 nt, Artificial Sequence
  Description of Artificial Sequence: Synthetic oligonucleotide
ugcauucaagcuacuugag

SEQ ID NO: 1763589 - RNA, 19 nt, Artificial Sequence
  Description of Artificial Sequence: Synthetic oligonucleotide
uggucucagaggaugggcc

SEQ ID NO: 1763590 - RNA, 19 nt, Artificial Sequence
  Description of Artificial Sequence: Synthetic oligonucleotide
acagcuacauacaucaaga

SEQ ID NO: 1763591 - RNA, 19 nt, Artificial Sequence
  Description of Artificial Sequence: Synthetic oligonucleotide
agcauacaggucuuguucu

SEQ ID NO: 1763592 - RNA, 19 nt, Artificial Sequence
  Description of Artificial Sequence: Synthetic oligonucleotide
caguugguuacucugagca

SEQ ID NO: 1763593 - RNA, 19 nt, Artificial Sequence
  Description of Artificial Sequence: Synthetic oligonucleotide
ugauaucugcgacuuugca

SEQ ID NO: 1763594 - RNA, 19 nt, Artificial Sequence
  Description of Artificial Sequence: Synthetic oligonucleotide
gaaucccgcagucugcacc

SEQ ID NO: 1763595 - RNA, 19 nt, Artificial Sequence
  Description of Artificial Sequence: Synthetic oligonucleotide
uuagcaggcagggucacug

SEQ ID NO: 1763596 - RNA, 19 nt, Artificial Sequence
  Description of Artificial Sequence: Synthetic oligonucleotide
uugucauguucuacuucgg

SEQ ID NO: 1763597 - RNA, 19 nt, Artificial Sequence
  Description of Artificial Sequence: Synthetic oligonucleotide
agcaguggcugaucuacgg

SEQ ID NO: 1763598 - RNA, 19 nt, Artificial Sequence
  Description of Artificial Sequence: Synthetic oligonucleotide
cagauagaaaucacuuaac

SEQ ID NO: 1763599 - RNA, 19 nt, Artificial Sequence
  Description of Artificial Sequence: Synthetic oligonucleotide
ucccuuaaagaaauccauc

SEQ ID NO: 1763600 - RNA, 19 nt, Artificial Sequence
  Description of Artificial Sequence: Synthetic oligonucleotide
ugacagucaucugacacca

SEQ ID NO: 1763601 - RNA, 19 nt, Artificial Sequence
  Description of Artificial Sequence: Synthetic oligonucleotide
gcuacuugaggcuuccccg

SEQ ID NO: 1763602 - RNA, 19 nt, Artificial Sequence
  Description of Artificial Sequence: Synthetic oligonucleotide
cuacuugaggcuuccccgg

SEQ ID NO: 1763603 - RNA, 19 nt, Artificial Sequence
  Description of Artificial Sequence: Synthetic oligonucleotide
ucccuugucauguucuacu

SEQ ID NO: 1763604 - RNA, 19 nt, Artificial Sequence
  Description of Artificial Sequence: Synthetic oligonucleotide
cacuggaauugccaaauug

SEQ ID NO: 1763605 - RNA, 19 nt, Artificial Sequence
  Description of Artificial Sequence: Synthetic oligonucleotide
gucauugagccauugggga

SEQ ID NO: 1763606 - RNA, 19 nt, Artificial Sequence
  Description of Artificial Sequence: Synthetic oligonucleotide
uauuggagagccagcuugu

SEQ ID NO: 1763607 - RNA, 19 nt, Artificial Sequence
  Description of Artificial Sequence: Synthetic oligonucleotide
cauuggggacaacaguugc

SEQ ID NO: 1763608 - RNA, 19 nt, Artificial Sequence
  Description of Artificial Sequence: Synthetic oligonucleotide
agccauauuggagagccag

SEQ ID NO: 1763609 - RNA, 19 nt, Artificial Sequence
  Description of Artificial Sequence: Synthetic oligonucleotide
aucaagagccaauugccaa

SEQ ID NO: 1763610 - RNA, 19 nt, Artificial Sequence
  Description of Artificial Sequence: Synthetic oligonucleotide
cuauugcagagcaccuugg

SEQ ID NO: 1763611 - RNA, 19 nt, Artificial Sequence
  Description of Artificial Sequence: Synthetic oligonucleotide
uggcaaaagugguucuucc

SEQ ID NO: 1763612 - RNA, 19 nt, Artificial Sequence
  Description of Artificial Sequence: Synthetic oligonucleotide
aacuacagugacauacuga

SEQ ID NO: 1763613 - RNA, 19 nt, Artificial Sequence
  Description of Artificial Sequence: Synthetic oligonucleotide
aguugguuacucugagcag

SEQ ID NO: 1763614 - RNA, 19 nt, Artificial Sequence
  Description of Artificial Sequence: Synthetic oligonucleotide
uuacuggugacaacauuua

SEQ ID NO: 1763615 - RNA, 19 nt, Artificial Sequence
  Description of Artificial Sequence: Synthetic oligonucleotide
uugaucgauuucaaagcau

SEQ ID NO: 1763616 - RNA, 19 nt, Artificial Sequence
  Description of Artificial Sequence: Synthetic oligonucleotide
gguuacucugagcaggugc

SEQ ID NO: 1763617 - RNA, 19 nt, Artificial Sequence
  Description of Artificial Sequence: Synthetic oligonucleotide
cuugaucgauuucaaagca

SEQ ID NO: 1763618 - RNA, 19 nt, Artificial Sequence
  Description of Artificial Sequence: Synthetic oligonucleotide
auuuuaaaguagacgagau

SEQ ID NO: 1763619 - RNA, 19 nt, Artificial Sequence
  Description of Artificial Sequence: Synthetic oligonucleotide
ugacauugcggaucccuug

SEQ ID NO: 1763620 - RNA, 19 nt, Artificial Sequence
  Description of Artificial Sequence: Synthetic oligonucleotide
cuugaggcuuccccggugg

SEQ ID NO: 1763621 - RNA, 19 nt, Artificial Sequence
  Description of Artificial Sequence: Synthetic oligonucleotide
ucggagccuacacaggacu

SEQ ID NO: 1763622 - RNA, 19 nt, Artificial Sequence
  Description of Artificial Sequence: Synthetic oligonucleotide
aaaaugcgacauuguuugu

SEQ ID NO: 1763623 - RNA, 19 nt, Artificial Sequence
  Description of Artificial Sequence: Synthetic oligonucleotide
cuacucagacacagaacgc

SEQ ID NO: 1763624 - RNA, 19 nt, Artificial Sequence
  Description of Artificial Sequence: Synthetic oligonucleotide
ugugaggaucccauguuuu

SEQ ID NO: 1763625 - RNA, 19 nt, Artificial Sequence
  Description of Artificial Sequence: Synthetic oligonucleotide
cacugaaucccgcagucug

SEQ ID NO: 1763626 - RNA, 19 nt, Artificial Sequence
  Description of Artificial Sequence: Synthetic oligonucleotide
gccaauucuagaauaaaug

SEQ ID NO: 1763627 - RNA, 19 nt, Artificial Sequence
  Description of Artificial Sequence: Synthetic oligonucleotide
ucuacggccuccacacagc

SEQ ID NO: 1763628 - RNA, 19 nt, Artificial Sequence
  Description of Artificial Sequence: Synthetic oligonucleotide
uuaggccccuaccugggug

SEQ ID NO: 1763629 - RNA, 19 nt, Artificial Sequence
  Description of Artificial Sequence: Synthetic oligonucleotide
ccaauucuagaauaaauga

SEQ ID NO: 1763630 - RNA, 19 nt, Artificial Sequence
  Description of Artificial Sequence: Synthetic oligonucleotide
gagccaauugccaaaggca

SEQ ID NO: 1763631 - RNA, 19 nt, Artificial Sequence
  Description of Artificial Sequence: Synthetic oligonucleotide
acacuugagacagaauaca

SEQ ID NO: 1763632 - RNA, 19 nt, Artificial Sequence
  Description of Artificial Sequence: Synthetic oligonucleotide
ggcaacacaaucccaauga

SEQ ID NO: 1763633 - RNA, 19 nt, Artificial Sequence
  Description of Artificial Sequence: Synthetic oligonucleotide
cugauacuauugcagagca

SEQ ID NO: 1763634 - RNA, 19 nt, Artificial Sequence
  Description of Artificial Sequence: Synthetic oligonucleotide
uucuagaauaaaugagcuu

SEQ ID NO: 1763635 - RNA, 19 nt, Artificial Sequence
  Description of Artificial Sequence: Synthetic oligonucleotide
acacagaacgcaucucuga

SEQ ID NO: 1763636 - RNA, 19 nt, Artificial Sequence
  Description of Artificial Sequence: Synthetic oligonucleotide
cuucaggcaguucuaccag

SEQ ID NO: 1763637 - RNA, 19 nt, Artificial Sequence
  Description of Artificial Sequence: Synthetic oligonucleotide
uggaagacgucagacugca

SEQ ID NO: 1763638 - RNA, 19 nt, Artificial Sequence
  Description of Artificial Sequence: Synthetic oligonucleotide
acugaaucccgcagucugc

SEQ ID NO: 1763639 - RNA, 19 nt, Artificial Sequence
  Description of Artificial Sequence: Synthetic oligonucleotide
ucugcgacuuugcagccau

SEQ ID NO: 1763640 - RNA, 19 nt, Artificial Sequence
  Description of Artificial Sequence: Synthetic oligonucleotide
gaucgauuucaaagcauac

SEQ ID NO: 1763641 - RNA, 19 nt, Artificial Sequence
  Description of Artificial Sequence: Synthetic oligonucleotide
uucuugauaucugcgacuu

SEQ ID NO: 1763642 - RNA, 19 nt, Artificial Sequence
  Description of Artificial Sequence: Synthetic oligonucleotide
aacuaguaacuucgucuaa

SEQ ID NO: 1763643 - RNA, 19 nt, Artificial Sequence
  Description of Artificial Sequence: Synthetic oligonucleotide
ggugguugagcugaccugg

SEQ ID NO: 1763644 - RNA, 19 nt, Artificial Sequence
  Description of Artificial Sequence: Synthetic oligonucleotide
ugaggaucccauguuuucu

SEQ ID NO: 1763645 - RNA, 19 nt, Artificial Sequence
  Description of Artificial Sequence: Synthetic oligonucleotide
uggucaugagcauccagau

SEQ ID NO: 1763646 - RNA, 19 nt, Artificial Sequence
  Description of Artificial Sequence: Synthetic oligonucleotide
ugauacuauugcagagcac

SEQ ID NO: 1763647 - RNA, 19 nt, Artificial Sequence
  Description of Artificial Sequence: Synthetic oligonucleotide
acuaguaacuucgucuaaa

SEQ ID NO: 1763648 - RNA, 19 nt, Artificial Sequence
  Description of Artificial Sequence: Synthetic oligonucleotide
uacuggugacaacauuuaa

SEQ ID NO: 1763649 - RNA, 19 nt, Artificial Sequence
  Description of Artificial Sequence: Synthetic oligonucleotide
cagcuacauacaucaagag

SEQ ID NO: 1763650 - RNA, 19 nt, Artificial Sequence
  Description of Artificial Sequence: Synthetic oligonucleotide
uuguucucugaggaaguug

SEQ ID NO: 1763651 - RNA, 19 nt, Artificial Sequence
  Description of Artificial Sequence: Synthetic oligonucleotide
ucucaccggaaucuugauc

SEQ ID NO: 1763652 - RNA, 19 nt, Artificial Sequence
  Description of Artificial Sequence: Synthetic oligonucleotide
uucaaagcauacaggucuu

SEQ ID NO: 1763653 - RNA, 19 nt, Artificial Sequence
  Description of Artificial Sequence: Synthetic oligonucleotide
ucaagcuacuugaggcuuc

SEQ ID NO: 1763654 - RNA, 19 nt, Artificial Sequence
  Description of Artificial Sequence: Synthetic oligonucleotide
caucucugagccaagccca

SEQ ID NO: 1763655 - RNA, 19 nt, Artificial Sequence
  Description of Artificial Sequence: Synthetic oligonucleotide
uguucuacuucggagccua

SEQ ID NO: 1763656 - RNA, 19 nt, Artificial Sequence
  Description of Artificial Sequence: Synthetic oligonucleotide
gagcuuaggccccuaccug

SEQ ID NO: 1763657 - RNA, 19 nt, Artificial Sequence
  Description of Artificial Sequence: Synthetic oligonucleotide
gacucugagcccugccugc

SEQ ID NO: 1763658 - RNA, 19 nt, Artificial Sequence
  Description of Artificial Sequence: Synthetic oligonucleotide
caagagccaauugccaaag

SEQ ID NO: 1763659 - RNA, 19 nt, Artificial Sequence
  Description of Artificial Sequence: Synthetic oligonucleotide
agggccacugacauugcgg

SEQ ID NO: 1763660 - RNA, 19 nt, Artificial Sequence
  Description of Artificial Sequence: Synthetic oligonucleotide
auugccaauucuagaauaa

SEQ ID NO: 1763661 - RNA, 19 nt, Artificial Sequence
  Description of Artificial Sequence: Synthetic oligonucleotide
uguugaggcuguccuccug

SEQ ID NO: 1763662 - RNA, 19 nt, Artificial Sequence
  Description of Artificial Sequence: Synthetic oligonucleotide
caucaagagccaauugcca

SEQ ID NO: 1763663 - RNA, 19 nt, Artificial Sequence
  Description of Artificial Sequence: Synthetic oligonucleotide
acauugcggaucccuuguc

SEQ ID NO: 1763664 - RNA, 19 nt, Artificial Sequence
  Description of Artificial Sequence: Synthetic oligonucleotide
uaucugcgacuuugcagcc

SEQ ID NO: 1763665 - RNA, 19 nt, Artificial Sequence
  Description of Artificial Sequence: Synthetic oligonucleotide
acgagauaaaacaccggca

SEQ ID NO: 1763666 - RNA, 19 nt, Artificial Sequence
  Description of Artificial Sequence: Synthetic oligonucleotide
gaacgcaucucugagccaa

SEQ ID NO: 1763667 - RNA, 19 nt, Artificial Sequence
  Description of Artificial Sequence: Synthetic oligonucleotide
uucggagccuacacaggac

SEQ ID NO: 1763668 - RNA, 19 nt, Artificial Sequence
  Description of Artificial Sequence: Synthetic oligonucleotide
gaaccacguugccugcucc

SEQ ID NO: 1763669 - RNA, 19 nt, Artificial Sequence
  Description of Artificial Sequence: Synthetic oligonucleotide
ggcaaaagugguucuuccc

SEQ ID NO: 1763670 - RNA, 19 nt, Artificial Sequence
  Description of Artificial Sequence: Synthetic oligonucleotide
caucaguugguuacucuga

SEQ ID NO: 1763671 - RNA, 19 nt, Artificial Sequence
  Description of Artificial Sequence: Synthetic oligonucleotide
acugugcacaggcagucau

SEQ ID NO: 1763672 - RNA, 19 nt, Artificial Sequence
  Description of Artificial Sequence: Synthetic oligonucleotide
cgacuuugcagccauauug

SEQ ID NO: 1763673 - RNA, 19 nt, Artificial Sequence
  Description of Artificial Sequence: Synthetic oligonucleotide
cccuuaaagaaauccauca

SEQ ID NO: 1763674 - RNA, 19 nt, Artificial Sequence
  Description of Artificial Sequence: Synthetic oligonucleotide
gacagcauuccaccacuga

SEQ ID NO: 1763675 - RNA, 19 nt, Artificial Sequence
  Description of Artificial Sequence: Synthetic oligonucleotide
agacgagauaaaacaccgg

SEQ ID NO: 1763676 - RNA, 19 nt, Artificial Sequence
  Description of Artificial Sequence: Synthetic oligonucleotide
aguuacuggugacaacauu

SEQ ID NO: 1763677 - RNA, 19 nt, Artificial Sequence
  Description of Artificial Sequence: Synthetic oligonucleotide
cugcagcagaaccacguug

SEQ ID NO: 1763678 - RNA, 19 nt, Artificial Sequence
  Description of Artificial Sequence: Synthetic oligonucleotide
aggcauugccaauucuaga

SEQ ID NO: 1763679 - RNA, 19 nt, Artificial Sequence
  Description of Artificial Sequence: Synthetic oligonucleotide
agggugugcacuggaauug

SEQ ID NO: 1763680 - RNA, 19 nt, Artificial Sequence
  Description of Artificial Sequence: Synthetic oligonucleotide
uacucugagcaggugcccc

SEQ ID NO: 1763681 - RNA, 19 nt, Artificial Sequence
  Description of Artificial Sequence: Synthetic oligonucleotide
cucugaggaaguuguucac

SEQ ID NO: 1763682 - RNA, 19 nt, Artificial Sequence
  Description of Artificial Sequence: Synthetic oligonucleotide
uugcggaucccuugucaug

SEQ ID NO: 1763683 - RNA, 19 nt, Artificial Sequence
  Description of Artificial Sequence: Synthetic oligonucleotide
ggucuacucagacacagaa

SEQ ID NO: 1763684 - RNA, 19 nt, Artificial Sequence
  Description of Artificial Sequence: Synthetic oligonucleotide
guccccaacacuugagaca

SEQ ID NO: 1763685 - RNA, 19 nt, Artificial Sequence
  Description of Artificial Sequence: Synthetic oligonucleotide
uugccaauucuagaauaaa

SEQ ID NO: 1763686 - RNA, 19 nt, Artificial Sequence
  Description of Artificial Sequence: Synthetic oligonucleotide
cagucugcaccaucggcug

SEQ ID NO: 1763687 - RNA, 19 nt, Artificial Sequence
  Description of Artificial Sequence: Synthetic oligonucleotide
uggucuacucagacacaga

SEQ ID NO: 1763688 - RNA, 19 nt, Artificial Sequence
  Description of Artificial Sequence: Synthetic oligonucleotide
uucaagcuacuugaggcuu

SEQ ID NO: 1763689 - RNA, 19 nt, Artificial Sequence
  Description of Artificial Sequence: Synthetic oligonucleotide
ccuaacucuuagcaggcag

SEQ ID NO: 1763690 - RNA, 19 nt, Artificial Sequence
  Description of Artificial Sequence: Synthetic oligonucleotide
uccccgguggcuuggauuu

SEQ ID NO: 1763691 - RNA, 19 nt, Artificial Sequence
  Description of Artificial Sequence: Synthetic oligonucleotide
gugaggaucccauguuuuc

SEQ ID NO: 1763692 - RNA, 19 nt, Artificial Sequence
  Description of Artificial Sequence: Synthetic oligonucleotide
gagcugaccuggcugucug

SEQ ID NO: 1763693 - RNA, 19 nt, Artificial Sequence
  Description of Artificial Sequence: Synthetic oligonucleotide
ccuggaauugggcucagug

SEQ ID NO: 1763694 - RNA, 19 nt, Artificial Sequence
  Description of Artificial Sequence: Synthetic oligonucleotide
cacaauggucaugagcauc

SEQ ID NO: 1763695 - RNA, 19 nt, Artificial Sequence
  Description of Artificial Sequence: Synthetic oligonucleotide
ugcgacuuugcagccauau

SEQ ID NO: 1763696 - RNA, 19 nt, Artificial Sequence
  Description of Artificial Sequence: Synthetic oligonucleotide
agccaauugccaaaggcau

SEQ ID NO: 1763697 - RNA, 19 nt, Artificial Sequence
  Description of Artificial Sequence: Synthetic oligonucleotide
cucuuagcaggcaggguca

SEQ ID NO: 1763698 - RNA, 19 nt, Artificial Sequence
  Description of Artificial Sequence: Synthetic oligonucleotide
cuggucucagaggaugggc

SEQ ID NO: 1763699 - RNA, 19 nt, Artificial Sequence
  Description of Artificial Sequence: Synthetic oligonucleotide
aaaacaccggcaacacaau

SEQ ID NO: 1763700 - RNA, 19 nt, Artificial Sequence
  Description of Artificial Sequence: Synthetic oligonucleotide
uaaaugagcuuaggccccu

SEQ ID NO: 1763701 - RNA, 19 nt, Artificial Sequence
  Description of Artificial Sequence: Synthetic oligonucleotide
ugcugugaugcuguucuuc

SEQ ID NO: 1763702 - RNA, 19 nt, Artificial Sequence
  Description of Artificial Sequence: Synthetic oligonucleotide
agccaagcccacccuaacu

SEQ ID NO: 1763703 - RNA, 19 nt, Artificial Sequence
  Description of Artificial Sequence: Synthetic oligonucleotide
auacuauugcagagcaccu

SEQ ID NO: 1763704 - RNA, 19 nt, Artificial Sequence
  Description of Artificial Sequence: Synthetic oligonucleotide
ccaauugccaaaggcauug

SEQ ID NO: 1763705 - RNA, 19 nt, Artificial Sequence
  Description of Artificial Sequence: Synthetic oligonucleotide
auccaucaguugguuacuc

SEQ ID NO: 1763706 - RNA, 19 nt, Artificial Sequence
  Description of Artificial Sequence: Synthetic oligonucleotide
acgcaucucugagccaagc

SEQ ID NO: 1763707 - RNA, 19 nt, Artificial Sequence
  Description of Artificial Sequence: Synthetic oligonucleotide
aacucuuagcaggcagggu

SEQ ID NO: 1763708 - RNA, 19 nt, Artificial Sequence
  Description of Artificial Sequence: Synthetic oligonucleotide
gacauugcggaucccuugu

SEQ ID NO: 1763709 - RNA, 19 nt, Artificial Sequence
  Description of Artificial Sequence: Synthetic oligonucleotide
auuggggacaacaguugca

SEQ ID NO: 1763710 - RNA, 19 nt, Artificial Sequence
  Description of Artificial Sequence: Synthetic oligonucleotide
cugaaguuacuggugacaa

SEQ ID NO: 1763711 - RNA, 19 nt, Artificial Sequence
  Description of Artificial Sequence: Synthetic oligonucleotide
uacggccuccacacagcag

SEQ ID NO: 1763712 - RNA, 19 nt, Artificial Sequence
  Description of Artificial Sequence: Synthetic oligonucleotide
cauugagccauuggggaca

SEQ ID NO: 1763713 - RNA, 19 nt, Artificial Sequence
  Description of Artificial Sequence: Synthetic oligonucleotide
ucaccggaaucuugaucga

SEQ ID NO: 1763714 - RNA, 19 nt, Artificial Sequence
  Description of Artificial Sequence: Synthetic oligonucleotide
acuucggagccuacacagg

SEQ ID NO: 1763715 - RNA, 19 nt, Artificial Sequence
  Description of Artificial Sequence: Synthetic oligonucleotide
accacguugccugcucccg

SEQ ID NO: 1763716 - RNA, 19 nt, Artificial Sequence
  Description of Artificial Sequence: Synthetic oligonucleotide
ggucucagaggaugggccc

SEQ ID NO: 1763717 - RNA, 19 nt, Artificial Sequence
  Description of Artificial Sequence: Synthetic oligonucleotide
augcgacauuguuugucug

SEQ ID NO: 1763718 - RNA, 19 nt, Artificial Sequence
  Description of Artificial Sequence: Synthetic oligonucleotide
ugcagagcaccuuggucua

SEQ ID NO: 1763719 - RNA, 19 nt, Artificial Sequence
  Description of Artificial Sequence: Synthetic oligonucleotide
cauugcggaucccuuguca

SEQ ID NO: 1763720 - RNA, 19 nt, Artificial Sequence
  Description of Artificial Sequence: Synthetic oligonucleotide
cucagugucauugagccau

SEQ ID NO: 1763721 - RNA, 19 nt, Artificial Sequence
  Description of Artificial Sequence: Synthetic oligonucleotide
gguggcuucuggguugugg

SEQ ID NO: 1763722 - RNA, 19 nt, Artificial Sequence
  Description of Artificial Sequence: Synthetic oligonucleotide
agcccacccuaacucuuag

SEQ ID NO: 1763723 - RNA, 19 nt, Artificial Sequence
  Description of Artificial Sequence: Synthetic oligonucleotide
cacagcccgcucaauguuc

SEQ ID NO: 1763724 - RNA, 19 nt, Artificial Sequence
  Description of Artificial Sequence: Synthetic oligonucleotide
ucuggcaaaagugguucuu

SEQ ID NO: 1763725 - RNA, 19 nt, Artificial Sequence
  Description of Artificial Sequence: Synthetic oligonucleotide
cugaccuggcugucugaag

SEQ ID NO: 1763726 - RNA, 19 nt, Artificial Sequence
  Description of Artificial Sequence: Synthetic oligonucleotide
cugacaccauccaacccca

SEQ ID NO: 1763727 - RNA, 19 nt, Artificial Sequence
  Description of Artificial Sequence: Synthetic oligonucleotide
ugagcugaccuggcugucu

SEQ ID NO: 1763728 - RNA, 19 nt, Artificial Sequence
  Description of Artificial Sequence: Synthetic oligonucleotide
accggcaacacaaucccaa

SEQ ID NO: 1763729 - RNA, 19 nt, Artificial Sequence
  Description of Artificial Sequence: Synthetic oligonucleotide
uacuauugcagagcaccuu

SEQ ID NO: 1763730 - RNA, 19 nt, Artificial Sequence
  Description of Artificial Sequence: Synthetic oligonucleotide
aguugcauucaagcuacuu

SEQ ID NO: 1763731 - RNA, 19 nt, Artificial Sequence
  Description of Artificial Sequence: Synthetic oligonucleotide
cagggccacugacauugcg

SEQ ID NO: 1763732 - RNA, 19 nt, Artificial Sequence
  Description of Artificial Sequence: Synthetic oligonucleotide
cuacuucggagccuacaca

SEQ ID NO: 1763733 - RNA, 19 nt, Artificial Sequence
  Description of Artificial Sequence: Synthetic oligonucleotide
uucucaccggaaucuugau

SEQ ID NO: 1763734 - RNA, 19 nt, Artificial Sequence
  Description of Artificial Sequence: Synthetic oligonucleotide
ggaagacagcauuccacca

SEQ ID NO: 1763735 - RNA, 19 nt, Artificial Sequence
  Description of Artificial Sequence: Synthetic oligonucleotide
agaacgcaucucugagcca

SEQ ID NO: 1763736 - RNA, 19 nt, Artificial Sequence
  Description of Artificial Sequence: Synthetic oligonucleotide
gccaagcccacccuaacuc

SEQ ID NO: 1763737 - RNA, 19 nt, Artificial Sequence
  Description of Artificial Sequence: Synthetic oligonucleotide
gccuacacaggacugugca

SEQ ID NO: 1763738 - RNA, 19 nt, Artificial Sequence
  Description of Artificial Sequence: Synthetic oligonucleotide
gucucagaggaugggcccc

SEQ ID NO: 1763739 - RNA, 19 nt, Artificial Sequence
  Description of Artificial Sequence: Synthetic oligonucleotide
uggcugaucuacggccucc

SEQ ID NO: 1763740 - RNA, 19 nt, Artificial Sequence
  Description of Artificial Sequence: Synthetic oligonucleotide
ccacugacauugcggaucc

SEQ ID NO: 1763741 - RNA, 19 nt, Artificial Sequence
  Description of Artificial Sequence: Synthetic oligonucleotide
gcgacauuguuugucuggc

SEQ ID NO: 1763742 - RNA, 19 nt, Artificial Sequence
  Description of Artificial Sequence: Synthetic oligonucleotide
uuccccgguggcuuggauu

SEQ ID NO: 1763743 - RNA, 19 nt, Artificial Sequence
  Description of Artificial Sequence: Synthetic oligonucleotide
agaaaucacuuaacaugau

SEQ ID NO: 1763744 - RNA, 19 nt, Artificial Sequence
  Description of Artificial Sequence: Synthetic oligonucleotide
cccacccuaacucuuagca

SEQ ID NO: 1763745 - RNA, 19 nt, Artificial Sequence
  Description of Artificial Sequence: Synthetic oligonucleotide
ccacccuaacucuuagcag

SEQ ID NO: 1763746 - RNA, 19 nt, Artificial Sequence
  Description of Artificial Sequence: Synthetic oligonucleotide
caaccccagggccacugac

SEQ ID NO: 1763747 - RNA, 19 nt, Artificial Sequence
  Description of Artificial Sequence: Synthetic oligonucleotide
gggcuuguccuggaauugg

SEQ ID NO: 1763748 - RNA, 19 nt, Artificial Sequence
  Description of Artificial Sequence: Synthetic oligonucleotide
cgagauaaaacaccggcaa

SEQ ID NO: 1763749 - RNA, 19 nt, Artificial Sequence
  Description of Artificial Sequence: Synthetic oligonucleotide
gcugaaguuacuggugaca

SEQ ID NO: 1763750 - RNA, 19 nt, Artificial Sequence
  Description of Artificial Sequence: Synthetic oligonucleotide
ugguuacucugagcaggug

SEQ ID NO: 1763751 - RNA, 19 nt, Artificial Sequence
  Description of Artificial Sequence: Synthetic oligonucleotide
acagcccgcucaauguucu

SEQ ID NO: 1763752 - RNA, 19 nt, Artificial Sequence
  Description of Artificial Sequence: Synthetic oligonucleotide
cugaaucccgcagucugca

SEQ ID NO: 1763753 - RNA, 19 nt, Artificial Sequence
  Description of Artificial Sequence: Synthetic oligonucleotide
cagugacauacugauacua

SEQ ID NO: 1763754 - RNA, 19 nt, Artificial Sequence
  Description of Artificial Sequence: Synthetic oligonucleotide
gaucuacggccuccacaca

SEQ ID NO: 1763755 - RNA, 19 nt, Artificial Sequence
  Description of Artificial Sequence: Synthetic oligonucleotide
gcuuaggccccuaccuggg

SEQ ID NO: 1763756 - RNA, 19 nt, Artificial Sequence
  Description of Artificial Sequence: Synthetic oligonucleotide
cuacggccuccacacagca

SEQ ID NO: 1763757 - RNA, 19 nt, Artificial Sequence
  Description of Artificial Sequence: Synthetic oligonucleotide
caaagcauacaggucuugu

SEQ ID NO: 1763758 - RNA, 19 nt, Artificial Sequence
  Description of Artificial Sequence: Synthetic oligonucleotide
ccuacacaggacugugcac

SEQ ID NO: 1763759 - RNA, 19 nt, Artificial Sequence
  Description of Artificial Sequence: Synthetic oligonucleotide
ggucaguucuugguggguc

SEQ ID NO: 1763760 - RNA, 19 nt, Artificial Sequence
  Description of Artificial Sequence: Synthetic oligonucleotide
agacagcauuccaccacug

SEQ ID NO: 1763761 - RNA, 19 nt, Artificial Sequence
  Description of Artificial Sequence: Synthetic oligonucleotide
ggaauugggcucaguguca

SEQ ID NO: 1763762 - RNA, 19 nt, Artificial Sequence
  Description of Artificial Sequence: Synthetic oligonucleotide
cacuguggaagacgucaga

SEQ ID NO: 1763763 - RNA, 19 nt, Artificial Sequence
  Description of Artificial Sequence: Synthetic oligonucleotide
gcuuguccuggaauugggc

SEQ ID NO: 1763764 - RNA, 19 nt, Artificial Sequence
  Description of Artificial Sequence: Synthetic oligonucleotide
gugguugagcugaccuggc

SEQ ID NO: 1763765 - RNA, 19 nt, Artificial Sequence
  Description of Artificial Sequence: Synthetic oligonucleotide
auugagccauuggggacaa

SEQ ID NO: 1763766 - RNA, 19 nt, Artificial Sequence
  Description of Artificial Sequence: Synthetic oligonucleotide
ccaccacugaaucccgcag

SEQ ID NO: 1763767 - RNA, 19 nt, Artificial Sequence
  Description of Artificial Sequence: Synthetic oligonucleotide
cacguugccugcucccgga

SEQ ID NO: 1763768 - RNA, 19 nt, Artificial Sequence
  Description of Artificial Sequence: Synthetic oligonucleotide
guggcugaucuacggccuc

SEQ ID NO: 1763769 - RNA, 19 nt, Artificial Sequence
  Description of Artificial Sequence: Synthetic oligonucleotide
aucugcgacuuugcagcca

SEQ ID NO: 1763770 - RNA, 19 nt, Artificial Sequence
  Description of Artificial Sequence: Synthetic oligonucleotide
ggugugcacuggaauugcc

SEQ ID NO: 1763771 - RNA, 19 nt, Artificial Sequence
  Description of Artificial Sequence: Synthetic oligonucleotide
uugagcugaccuggcuguc

SEQ ID NO: 1763772 - RNA, 19 nt, Artificial Sequence
  Description of Artificial Sequence: Synthetic oligonucleotide
auuggagagccagcuuguu

SEQ ID NO: 1763773 - RNA, 19 nt, Artificial Sequence
  Description of Artificial Sequence: Synthetic oligonucleotide
ggcuucuggguugugggga

SEQ ID NO: 1763774 - RNA, 19 nt, Artificial Sequence
  Description of Artificial Sequence: Synthetic oligonucleotide
ggacugugcacaggcaguc

SEQ ID NO: 1763775 - RNA, 19 nt, Artificial Sequence
  Description of Artificial Sequence: Synthetic oligonucleotide
gcacaggcagucauagaca

SEQ ID NO: 1763776 - RNA, 19 nt, Artificial Sequence
  Description of Artificial Sequence: Synthetic oligonucleotide
aggcuuccccgguggcuug

SEQ ID NO: 1763777 - RNA, 19 nt, Artificial Sequence
  Description of Artificial Sequence: Synthetic oligonucleotide
cagccacaauggucaugag

SEQ ID NO: 1763778 - RNA, 19 nt, Artificial Sequence
  Description of Artificial Sequence: Synthetic oligonucleotide
ggucaugagcauccagaua

SEQ ID NO: 1763779 - RNA, 19 nt, Artificial Sequence
  Description of Artificial Sequence: Synthetic oligonucleotide
gccccuaccugggugguug

SEQ ID NO: 1763780 - RNA, 19 nt, Artificial Sequence
  Description of Artificial Sequence: Synthetic oligonucleotide
cugagccaagcccacccua

SEQ ID NO: 1763781 - RNA, 19 nt, Artificial Sequence
  Description of Artificial Sequence: Synthetic oligonucleotide
cgcagucugcaccaucggc

SEQ ID NO: 1763782 - RNA, 19 nt, Artificial Sequence
  Description of Artificial Sequence: Synthetic oligonucleotide
ccacguugccugcucccgg

SEQ ID NO: 1763783 - RNA, 19 nt, Artificial Sequence
  Description of Artificial Sequence: Synthetic oligonucleotide
cauauuggagagccagcuu

SEQ ID NO: 1763784 - RNA, 19 nt, Artificial Sequence
  Description of Artificial Sequence: Synthetic oligonucleotide
cugacauugcggaucccuu

SEQ ID NO: 1763785 - RNA, 19 nt, Artificial Sequence
  Description of Artificial Sequence: Synthetic oligonucleotide
cccugccugcugaaguuac

SEQ ID NO: 1763786 - RNA, 19 nt, Artificial Sequence
  Description of Artificial Sequence: Synthetic oligonucleotide
gagccagcuuguugaggcu

SEQ ID NO: 1763787 - RNA, 19 nt, Artificial Sequence
  Description of Artificial Sequence: Synthetic oligonucleotide
caccggcaacacaauccca

SEQ ID NO: 1763788 - RNA, 19 nt, Artificial Sequence
  Description of Artificial Sequence: Synthetic oligonucleotide
ccauguuuucucaccggaa

SEQ ID NO: 1763789 - RNA, 19 nt, Artificial Sequence
  Description of Artificial Sequence: Synthetic oligonucleotide
gccauuggggacaacaguu

SEQ ID NO: 1763790 - RNA, 19 nt, Artificial Sequence
  Description of Artificial Sequence: Synthetic oligonucleotide
ggacaacaguugcauucaa

SEQ ID NO: 1763791 - RNA, 19 nt, Artificial Sequence
  Description of Artificial Sequence: Synthetic oligonucleotide
gcugaucuacggccuccac

SEQ ID NO: 1763792 - RNA, 19 nt, Artificial Sequence
  Description of Artificial Sequence: Synthetic oligonucleotide
guucuacuucggagccuac

SEQ ID NO: 1763793 - RNA, 19 nt, Artificial Sequence
  Description of Artificial Sequence: Synthetic oligonucleotide
gcccacccuaacucuuagc

SEQ ID NO: 1763794 - RNA, 19 nt, Artificial Sequence
  Description of Artificial Sequence: Synthetic oligonucleotide
guuuucucaccggaaucuu

SEQ ID NO: 1763795 - RNA, 19 nt, Artificial Sequence
  Description of Artificial Sequence: Synthetic oligonucleotide
cagccauauuggagagcca

SEQ ID NO: 1763796 - RNA, 19 nt, Artificial Sequence
  Description of Artificial Sequence: Synthetic oligonucleotide
ccauauuggagagccagcu

SEQ ID NO: 1763797 - RNA, 19 nt, Artificial Sequence
  Description of Artificial Sequence: Synthetic oligonucleotide
cagccagugacagcuacau

SEQ ID NO: 1763798 - RNA, 19 nt, Artificial Sequence
  Description of Artificial Sequence: Synthetic oligonucleotide
ccuccuggccagcucccgc

SEQ ID NO: 1763799 - RNA, 19 nt, Artificial Sequence
  Description of Artificial Sequence: Synthetic oligonucleotide
caagcccacccuaacucuu

SEQ ID NO: 1763800 - RNA, 19 nt, Artificial Sequence
  Description of Artificial Sequence: Synthetic oligonucleotide
ggggagcaguggcugaucu

SEQ ID NO: 1763801 - RNA, 19 nt, Artificial Sequence
  Description of Artificial Sequence: Synthetic oligonucleotide
cagcccgcucaauguucuc

SEQ ID NO: 1763802 - RNA, 19 nt, Artificial Sequence
  Description of Artificial Sequence: Synthetic oligonucleotide
ggagccuacacaggacugu

SEQ ID NO: 1763803 - RNA, 19 nt, Artificial Sequence
  Description of Artificial Sequence: Synthetic oligonucleotide
cggagccuacacaggacug

SEQ ID NO: 1763804 - RNA, 19 nt, Artificial Sequence
  Description of Artificial Sequence: Synthetic oligonucleotide
gcugaccuggcugucugaa

SEQ ID NO: 1763805 - RNA, 19 nt, Artificial Sequence
  Description of Artificial Sequence: Synthetic oligonucleotide
cagcagaaccacguugccu

SEQ ID NO: 1763806 - RNA, 19 nt, Artificial Sequence
  Description of Artificial Sequence: Synthetic oligonucleotide
cuggguuguggggagcagu

SEQ ID NO: 1763807 - RNA, 19 nt, Artificial Sequence
  Description of Artificial Sequence: Synthetic oligonucleotide
cuuguucucugaggaaguu

SEQ ID NO: 1763808 - RNA, 19 nt, Artificial Sequence
  Description of Artificial Sequence: Synthetic oligonucleotide
cuuaggccccuaccugggu

SEQ ID NO: 1763809 - RNA, 19 nt, Artificial Sequence
  Description of Artificial Sequence: Synthetic oligonucleotide
caucggcugguggcuucug

SEQ ID NO: 1763810 - RNA, 19 nt, Artificial Sequence
  Description of Artificial Sequence: Synthetic oligonucleotide
ggcuuccccgguggcuugg

SEQ ID NO: 1763811 - RNA, 19 nt, Artificial Sequence
  Description of Artificial Sequence: Synthetic oligonucleotide
uugagccauuggggacaac

SEQ ID NO: 1763812 - RNA, 19 nt, Artificial Sequence
  Description of Artificial Sequence: Synthetic oligonucleotide
ccggaugcugugaugcugu

SEQ ID NO: 1763813 - RNA, 19 nt, Artificial Sequence
  Description of Artificial Sequence: Synthetic oligonucleotide
ccaagcccacccuaacucu

SEQ ID NO: 1763814 - RNA, 19 nt, Artificial Sequence
  Description of Artificial Sequence: Synthetic oligonucleotide
gggucacucuggucucaga

SEQ ID NO: 1763815 - RNA, 19 nt, Artificial Sequence
  Description of Artificial Sequence: Synthetic oligonucleotide
ccugggugguugagcugac

SEQ ID NO: 1763816 - RNA, 19 nt, Artificial Sequence
  Description of Artificial Sequence: Synthetic oligonucleotide
cggaucccuugucauguuc

SEQ ID NO: 1763817 - RNA, 19 nt, Artificial Sequence
  Description of Artificial Sequence: Synthetic oligonucleotide
ggaagacgucagacugcac

SEQ ID NO: 1763818 - RNA, 19 nt, Artificial Sequence
  Description of Artificial Sequence: Synthetic oligonucleotide
cuuagcaggcagggucacu

SEQ ID NO: 1763819 - RNA, 19 nt, Artificial Sequence
  Description of Artificial Sequence: Synthetic oligonucleotide
guucucugaggaaguuguu

SEQ ID NO: 1763820 - RNA, 19 nt, Artificial Sequence
  Description of Artificial Sequence: Synthetic oligonucleotide
gcagagcaccuuggucuac

SEQ ID NO: 1763821 - RNA, 19 nt, Artificial Sequence
  Description of Artificial Sequence: Synthetic oligonucleotide
gcacagcccgcucaauguu

SEQ ID NO: 1763822 - RNA, 19 nt, Artificial Sequence
  Description of Artificial Sequence: Synthetic oligonucleotide
aucccgcagucugcaccau

SEQ ID NO: 1763823 - RNA, 19 nt, Artificial Sequence
  Description of Artificial Sequence: Synthetic oligonucleotide
gcgacuuugcagccauauu

SEQ ID NO: 1763824 - RNA, 19 nt, Artificial Sequence
  Description of Artificial Sequence: Synthetic oligonucleotide
gcaccaucggcugguggcu

SEQ ID NO: 1763825 - RNA, 19 nt, Artificial Sequence
  Description of Artificial Sequence: Synthetic oligonucleotide
cugcgacuuugcagccaua

SEQ ID NO: 1763826 - RNA, 19 nt, Artificial Sequence
  Description of Artificial Sequence: Synthetic oligonucleotide
gccaauugccaaaggcauu

SEQ ID NO: 1763827 - RNA, 19 nt, Artificial Sequence
  Description of Artificial Sequence: Synthetic oligonucleotide
cccuaacucuuagcaggca

SEQ ID NO: 1763828 - RNA, 19 nt, Artificial Sequence
  Description of Artificial Sequence: Synthetic oligonucleotide
gcacuggaauugccaaauu

SEQ ID NO: 1763829 - RNA, 19 nt, Artificial Sequence
  Description of Artificial Sequence: Synthetic oligonucleotide
ccgguggcuuggauuuuaa

SEQ ID NO: 1763830 - RNA, 19 nt, Artificial Sequence
  Description of Artificial Sequence: Synthetic oligonucleotide
ggccacugacauugcggau

SEQ ID NO: 1763831 - RNA, 19 nt, Artificial Sequence
  Description of Artificial Sequence: Synthetic oligonucleotide
caguucuaccagggucacu

SEQ ID NO: 1763832 - RNA, 19 nt, Artificial Sequence
  Description of Artificial Sequence: Synthetic oligonucleotide
ccggcaacacaaucccaau

SEQ ID NO: 1763833 - RNA, 19 nt, Artificial Sequence
  Description of Artificial Sequence: Synthetic oligonucleotide
gcccugccugcugaaguua

SEQ ID NO: 1763834 - RNA, 19 nt, Artificial Sequence
  Description of Artificial Sequence: Synthetic oligonucleotide
gcuuccccgguggcuugga

SEQ ID NO: 1763835 - RNA, 19 nt, Artificial Sequence
  Description of Artificial Sequence: Synthetic oligonucleotide
ccacugaaucccgcagucu

SEQ ID NO: 1763836 - RNA, 19 nt, Artificial Sequence
  Description of Artificial Sequence: Synthetic oligonucleotide
ccccuaccugggugguuga

SEQ ID NO: 1763837 - RNA, 19 nt, Artificial Sequence
  Description of Artificial Sequence: Synthetic oligonucleotide
cccgguggcuuggauuuua

SEQ ID NO: 1763838 - RNA, 19 nt, Artificial Sequence
  Description of Artificial Sequence: Synthetic oligonucleotide
gcggaucccuugucauguu

SEQ ID NO: 1763839 - RNA, 19 nt, Artificial Sequence
  Description of Artificial Sequence: Synthetic oligonucleotide
ggccccuaccugggugguu

SEQ ID NO: 1763840 - RNA, 19 nt, Artificial Sequence
  Description of Artificial Sequence: Synthetic oligonucleotide
ccccgguggcuuggauuuu

SEQ ID NO: 1763841 - RNA, 19 nt, Artificial Sequence
  Description of Artificial Sequence: Synthetic oligonucleotide
acaaauuugcuauuggucc

SEQ ID NO: 1763842 - RNA, 19 nt, Artificial Sequence
  Description of Artificial Sequence: Synthetic oligonucleotide
uuuaaagauaguaaagucc

SEQ ID NO: 1763843 - RNA, 19 nt, Artificial Sequence
  Description of Artificial Sequence: Synthetic oligonucleotide
aaggucacugacuacaucg

SEQ ID NO: 1763844 - RNA, 19 nt, Artificial Sequence
  Description of Artificial Sequence: Synthetic oligonucleotide
auuaauuccaauuucuuug

SEQ ID NO: 1763845 - RNA, 19 nt, Artificial Sequence
  Description of Artificial Sequence: Synthetic oligonucleotide
ugacugauuagcaaaaugc

SEQ ID NO: 1763846 - RNA, 19 nt, Artificial Sequence
  Description of Artificial Sequence: Synthetic oligonucleotide
ugcacuuuaacuucugugg

SEQ ID NO: 1763847 - RNA, 19 nt, Artificial Sequence
  Description of Artificial Sequence: Synthetic oligonucleotide
ugaauuucuguauagguca

SEQ ID NO: 1763848 - RNA, 19 nt, Artificial Sequence
  Description of Artificial Sequence: Synthetic oligonucleotide
auuacuuauuaauaacuuc

SEQ ID NO: 1763849 - RNA, 19 nt, Artificial Sequence
  Description of Artificial Sequence: Synthetic oligonucleotide
auuugcuugaaacuaacag

SEQ ID NO: 1763850 - RNA, 19 nt, Artificial Sequence
  Description of Artificial Sequence: Synthetic oligonucleotide
aauguucuaaaccagggau

SEQ ID NO: 1763851 - RNA, 19 nt, Artificial Sequence
  Description of Artificial Sequence: Synthetic oligonucleotide
aacuucgcauuucugcucc

SEQ ID NO: 1763852 - RNA, 19 nt, Artificial Sequence
  Description of Artificial Sequence: Synthetic oligonucleotide
aguuucaggcaacagcucc

SEQ ID NO: 1763853 - RNA, 19 nt, Artificial Sequence
  Description of Artificial Sequence: Synthetic oligonucleotide
aaaacuucgcauuucugcu

SEQ ID NO: 1763854 - RNA, 19 nt, Artificial Sequence
  Description of Artificial Sequence: Synthetic oligonucleotide
ucuguauaggucaacuugc

SEQ ID NO: 1763855 - RNA, 19 nt, Artificial Sequence
  Description of Artificial Sequence: Synthetic oligonucleotide
caugaguauacacuggugg

SEQ ID NO: 1763856 - RNA, 19 nt, Artificial Sequence
  Description of Artificial Sequence: Synthetic oligonucleotide
agcaaaaugcacuuuaacu

SEQ ID NO: 1763857 - RNA, 19 nt, Artificial Sequence
  Description of Artificial Sequence: Synthetic oligonucleotide
ucauauuacuuauuaauaa

SEQ ID NO: 1763858 - RNA, 19 nt, Artificial Sequence
  Description of Artificial Sequence: Synthetic oligonucleotide
ucugguaacacaccauucc

SEQ ID NO: 1763859 - RNA, 19 nt, Artificial Sequence
  Description of Artificial Sequence: Synthetic oligonucleotide
ugagauagugcucucguug

SEQ ID NO: 1763860 - RNA, 19 nt, Artificial Sequence
  Description of Artificial Sequence: Synthetic oligonucleotide
uuuguuuaaggauuaaaua

SEQ ID NO: 1763861 - RNA, 19 nt, Artificial Sequence
  Description of Artificial Sequence: Synthetic oligonucleotide
uauccggauagcuugaagc

SEQ ID NO: 1763862 - RNA, 19 nt, Artificial Sequence
  Description of Artificial Sequence: Synthetic oligonucleotide
uccuggauuauccggauag

SEQ ID NO: 1763863 - RNA, 19 nt, Artificial Sequence
  Description of Artificial Sequence: Synthetic oligonucleotide
aguaaaguccucugcugcc

SEQ ID NO: 1763864 - RNA, 19 nt, Artificial Sequence
  Description of Artificial Sequence: Synthetic oligonucleotide
uucauauuacuuauuaaua

SEQ ID NO: 1763865 - RNA, 19 nt, Artificial Sequence
  Description of Artificial Sequence: Synthetic oligonucleotide
aaagauaguaaaguccucu

SEQ ID NO: 1763866 - RNA, 19 nt, Artificial Sequence
  Description of Artificial Sequence: Synthetic oligonucleotide
uuuucaaccagcucuuugu

SEQ ID NO: 1763867 - RNA, 19 nt, Artificial Sequence
  Description of Artificial Sequence: Synthetic oligonucleotide
uuuaguaauguuuguuucu

SEQ ID NO: 1763868 - RNA, 19 nt, Artificial Sequence
  Description of Artificial Sequence: Synthetic oligonucleotide
uggacacuaacaaaaccag

SEQ ID NO: 1763869 - RNA, 19 nt, Artificial Sequence
  Description of Artificial Sequence: Synthetic oligonucleotide
aaaauggccugugauguuc

SEQ ID NO: 1763870 - RNA, 19 nt, Artificial Sequence
  Description of Artificial Sequence: Synthetic oligonucleotide
aagauaguaaaguccucug

SEQ ID NO: 1763871 - RNA, 19 nt, Artificial Sequence
  Description of Artificial Sequence: Synthetic oligonucleotide
uauuacuuauuaauaacuu

SEQ ID NO: 1763872 - RNA, 19 nt, Artificial Sequence
  Description of Artificial Sequence: Synthetic oligonucleotide
aguuaagcagucugguaac

SEQ ID NO: 1763873 - RNA, 19 nt, Artificial Sequence
  Description of Artificial Sequence: Synthetic oligonucleotide
uaacagucuuuguuuaagg

SEQ ID NO: 1763874 - RNA, 19 nt, Artificial Sequence
  Description of Artificial Sequence: Synthetic oligonucleotide
uuuaaggauuaaauaauuu

SEQ ID NO: 1763875 - RNA, 19 nt, Artificial Sequence
  Description of Artificial Sequence: Synthetic oligonucleotide
uggggauggaccaauccgg

SEQ ID NO: 1763876 - RNA, 19 nt, Artificial Sequence
  Description of Artificial Sequence: Synthetic oligonucleotide
uuuugcagcuucaugagua

SEQ ID NO: 1763877 - RNA, 19 nt, Artificial Sequence
  Description of Artificial Sequence: Synthetic oligonucleotide
ugaagcugcaucucaaugu

SEQ ID NO: 1763878 - RNA, 19 nt, Artificial Sequence
  Description of Artificial Sequence: Synthetic oligonucleotide
uaguaaaguccucugcugc

SEQ ID NO: 1763879 - RNA, 19 nt, Artificial Sequence
  Description of Artificial Sequence: Synthetic oligonucleotide
uguucaaggucacugacua

SEQ ID NO: 1763880 - RNA, 19 nt, Artificial Sequence
  Description of Artificial Sequence: Synthetic oligonucleotide
uuugcuauugguccuucca

SEQ ID NO: 1763881 - RNA, 19 nt, Artificial Sequence
  Description of Artificial Sequence: Synthetic oligonucleotide
aaacuucgcauuucugcuc

SEQ ID NO: 1763882 - RNA, 19 nt, Artificial Sequence
  Description of Artificial Sequence: Synthetic oligonucleotide
uucaugaguauacacuggu

SEQ ID NO: 1763883 - RNA, 19 nt, Artificial Sequence
  Description of Artificial Sequence: Synthetic oligonucleotide
ugcaaaauggccugugaug

SEQ ID NO: 1763884 - RNA, 19 nt, Artificial Sequence
  Description of Artificial Sequence: Synthetic oligonucleotide
uccauuuuagccucugaug

SEQ ID NO: 1763885 - RNA, 19 nt, Artificial Sequence
  Description of Artificial Sequence: Synthetic oligonucleotide
gauagcuugaagcugcauc

SEQ ID NO: 1763886 - RNA, 19 nt, Artificial Sequence
  Description of Artificial Sequence: Synthetic oligonucleotide
auggggauggaccaauccg

SEQ ID NO: 1763887 - RNA, 19 nt, Artificial Sequence
  Description of Artificial Sequence: Synthetic oligonucleotide
ggcaccaucaguuaagcag

SEQ ID NO: 1763888 - RNA, 19 nt, Artificial Sequence
  Description of Artificial Sequence: Synthetic oligonucleotide
uuugccagaggagaggugc

SEQ ID NO: 1763889 - RNA, 19 nt, Artificial Sequence
  Description of Artificial Sequence: Synthetic oligonucleotide
aagcagucugguaacacac

SEQ ID NO: 1763890 - RNA, 19 nt, Artificial Sequence
  Description of Artificial Sequence: Synthetic oligonucleotide
ugauguucgugucuuugcc

SEQ ID NO: 1763891 - RNA, 19 nt, Artificial Sequence
  Description of Artificial Sequence: Synthetic oligonucleotide
uuuugcucaguauucugga

SEQ ID NO: 1763892 - RNA, 19 nt, Artificial Sequence
  Description of Artificial Sequence: Synthetic oligonucleotide
uguucuaaaccagggaucu

SEQ ID NO: 1763893 - RNA, 19 nt, Artificial Sequence
  Description of Artificial Sequence: Synthetic oligonucleotide
cuggacacuaacaaaacca

SEQ ID NO: 1763894 - RNA, 19 nt, Artificial Sequence
  Description of Artificial Sequence: Synthetic oligonucleotide
aaaaugugggcuucuguuu

SEQ ID NO: 1763895 - RNA, 19 nt, Artificial Sequence
  Description of Artificial Sequence: Synthetic oligonucleotide
ugcagcuucaugaguauac

SEQ ID NO: 1763896 - RNA, 19 nt, Artificial Sequence
  Description of Artificial Sequence: Synthetic oligonucleotide
uugaagcugcaucucaaug

SEQ ID NO: 1763897 - RNA, 19 nt, Artificial Sequence
  Description of Artificial Sequence: Synthetic oligonucleotide
cuugccauggguuguacug

SEQ ID NO: 1763898 - RNA, 19 nt, Artificial Sequence
  Description of Artificial Sequence: Synthetic oligonucleotide
aguacgggcugcaaaaugg

SEQ ID NO: 1763899 - RNA, 19 nt, Artificial Sequence
  Description of Artificial Sequence: Synthetic oligonucleotide
uauaggucaacuugcuuuc

SEQ ID NO: 1763900 - RNA, 19 nt, Artificial Sequence
  Description of Artificial Sequence: Synthetic oligonucleotide
ucugcaagcaaucgccucu

SEQ ID NO: 1763901 - RNA, 19 nt, Artificial Sequence
  Description of Artificial Sequence: Synthetic oligonucleotide
uugaaacuaacagucuuug

SEQ ID NO: 1763902 - RNA, 19 nt, Artificial Sequence
  Description of Artificial Sequence: Synthetic oligonucleotide
auguucgugucuuugccag

SEQ ID NO: 1763903 - RNA, 19 nt, Artificial Sequence
  Description of Artificial Sequence: Synthetic oligonucleotide
ugcucaguauucuggaucu

SEQ ID NO: 1763904 - RNA, 19 nt, Artificial Sequence
  Description of Artificial Sequence: Synthetic oligonucleotide
uaagcagucugguaacaca

SEQ ID NO: 1763905 - RNA, 19 nt, Artificial Sequence
  Description of Artificial Sequence: Synthetic oligonucleotide
ucuugaugaauuucuguau

SEQ ID NO: 1763906 - RNA, 19 nt, Artificial Sequence
  Description of Artificial Sequence: Synthetic oligonucleotide
ggauuauccggauagcuug

SEQ ID NO: 1763907 - RNA, 19 nt, Artificial Sequence
  Description of Artificial Sequence: Synthetic oligonucleotide
ggaaguuucaggcaacagc

SEQ ID NO: 1763908 - RNA, 19 nt, Artificial Sequence
  Description of Artificial Sequence: Synthetic oligonucleotide
uguacaaaagguucaccau

SEQ ID NO: 1763909 - RNA, 19 nt, Artificial Sequence
  Description of Artificial Sequence: Synthetic oligonucleotide
acagucuuuguuuaaggau

SEQ ID NO: 1763910 - RNA, 19 nt, Artificial Sequence
  Description of Artificial Sequence: Synthetic oligonucleotide
ucuccuugggaauuacuca

SEQ ID NO: 1763911 - RNA, 19 nt, Artificial Sequence
  Description of Artificial Sequence: Synthetic oligonucleotide
uccucugcugccaguacgg

SEQ ID NO: 1763912 - RNA, 19 nt, Artificial Sequence
  Description of Artificial Sequence: Synthetic oligonucleotide
ugucuuugccagaggagag

SEQ ID NO: 1763913 - RNA, 19 nt, Artificial Sequence
  Description of Artificial Sequence: Synthetic oligonucleotide
uuagcaaaaugcacuuuaa

SEQ ID NO: 1763914 - RNA, 19 nt, Artificial Sequence
  Description of Artificial Sequence: Synthetic oligonucleotide
cuucaugaguauacacugg

SEQ ID NO: 1763915 - RNA, 19 nt, Artificial Sequence
  Description of Artificial Sequence: Synthetic oligonucleotide
gacacggacgucuaggcca

SEQ ID NO: 1763916 - RNA, 19 nt, Artificial Sequence
  Description of Artificial Sequence: Synthetic oligonucleotide
ucuaaaccagggaucuuca

SEQ ID NO: 1763917 - RNA, 19 nt, Artificial Sequence
  Description of Artificial Sequence: Synthetic oligonucleotide
ugucauuucuggcuucucu

SEQ ID NO: 1763918 - RNA, 19 nt, Artificial Sequence
  Description of Artificial Sequence: Synthetic oligonucleotide
cugacaaauuugcuauugg

SEQ ID NO: 1763919 - RNA, 19 nt, Artificial Sequence
  Description of Artificial Sequence: Synthetic oligonucleotide
gauagugcucucguugccg

SEQ ID NO: 1763920 - RNA, 19 nt, Artificial Sequence
  Description of Artificial Sequence: Synthetic oligonucleotide
ucaugaguauacacuggug

SEQ ID NO: 1763921 - RNA, 19 nt, Artificial Sequence
  Description of Artificial Sequence: Synthetic oligonucleotide
agauagugcucucguugcc

SEQ ID NO: 1763922 - RNA, 19 nt, Artificial Sequence
  Description of Artificial Sequence: Synthetic oligonucleotide
aggucaacuugcuuucuuc

SEQ ID NO: 1763923 - RNA, 19 nt, Artificial Sequence
  Description of Artificial Sequence: Synthetic oligonucleotide
uuccauuuuagccucugau

SEQ ID NO: 1763924 - RNA, 19 nt, Artificial Sequence
  Description of Artificial Sequence: Synthetic oligonucleotide
augaguauacacugguggu

SEQ ID NO: 1763925 - RNA, 19 nt, Artificial Sequence
  Description of Artificial Sequence: Synthetic oligonucleotide
uuuaacuucuguggguggc

SEQ ID NO: 1763926 - RNA, 19 nt, Artificial Sequence
  Description of Artificial Sequence: Synthetic oligonucleotide
auuugcuauugguccuucc

SEQ ID NO: 1763927 - RNA, 19 nt, Artificial Sequence
  Description of Artificial Sequence: Synthetic oligonucleotide
uuguacugacugauuagca

SEQ ID NO: 1763928 - RNA, 19 nt, Artificial Sequence
  Description of Artificial Sequence: Synthetic oligonucleotide
cuguacaaaagguucacca

SEQ ID NO: 1763929 - RNA, 19 nt, Artificial Sequence
  Description of Artificial Sequence: Synthetic oligonucleotide
aucucuucauauuacuuau

SEQ ID NO: 1763930 - RNA, 19 nt, Artificial Sequence
  Description of Artificial Sequence: Synthetic oligonucleotide
cuacggagaaugcaggcag

SEQ ID NO: 1763931 - RNA, 19 nt, Artificial Sequence
  Description of Artificial Sequence: Synthetic oligonucleotide
acuuuaacuucugugggug

SEQ ID NO: 1763932 - RNA, 19 nt, Artificial Sequence
  Description of Artificial Sequence: Synthetic oligonucleotide
gcuugaauguucuaaacca

SEQ ID NO: 1763933 - RNA, 19 nt, Artificial Sequence
  Description of Artificial Sequence: Synthetic oligonucleotide
aaaaugcacuuuaacuucu

SEQ ID NO: 1763934 - RNA, 19 nt, Artificial Sequence
  Description of Artificial Sequence: Synthetic oligonucleotide
ugauuuucugaggaccucc

SEQ ID NO: 1763935 - RNA, 19 nt, Artificial Sequence
  Description of Artificial Sequence: Synthetic oligonucleotide
guacaaaagguucaccauc

SEQ ID NO: 1763936 - RNA, 19 nt, Artificial Sequence
  Description of Artificial Sequence: Synthetic oligonucleotide
uugcucaguauucuggauc

SEQ ID NO: 1763937 - RNA, 19 nt, Artificial Sequence
  Description of Artificial Sequence: Synthetic oligonucleotide
guuguacugacugauuagc

SEQ ID NO: 1763938 - RNA, 19 nt, Artificial Sequence
  Description of Artificial Sequence: Synthetic oligonucleotide
cuuucggccgcaagaagcc

SEQ ID NO: 1763939 - RNA, 19 nt, Artificial Sequence
  Description of Artificial Sequence: Synthetic oligonucleotide
cuaacagucuuuguuuaag

SEQ ID NO: 1763940 - RNA, 19 nt, Artificial Sequence
  Description of Artificial Sequence: Synthetic oligonucleotide
gcuucaugaguauacacug

SEQ ID NO: 1763941 - RNA, 19 nt, Artificial Sequence
  Description of Artificial Sequence: Synthetic oligonucleotide
uacucuugaugaauuucug

SEQ ID NO: 1763942 - RNA, 19 nt, Artificial Sequence
  Description of Artificial Sequence: Synthetic oligonucleotide
ucgugucuuugccagagga

SEQ ID NO: 1763943 - RNA, 19 nt, Artificial Sequence
  Description of Artificial Sequence: Synthetic oligonucleotide
aagccuacggagaaugcag

SEQ ID NO: 1763944 - RNA, 19 nt, Artificial Sequence
  Description of Artificial Sequence: Synthetic oligonucleotide
gaaguuucaggcaacagcu

SEQ ID NO: 1763945 - RNA, 19 nt, Artificial Sequence
  Description of Artificial Sequence: Synthetic oligonucleotide
uuauccggauagcuugaag

SEQ ID NO: 1763946 - RNA, 19 nt, Artificial Sequence
  Description of Artificial Sequence: Synthetic oligonucleotide
gaauguucuaaaccaggga

SEQ ID NO: 1763947 - RNA, 19 nt, Artificial Sequence
  Description of Artificial Sequence: Synthetic oligonucleotide
aagcaaucgccucuuuagu

SEQ ID NO: 1763948 - RNA, 19 nt, Artificial Sequence
  Description of Artificial Sequence: Synthetic oligonucleotide
ggugcaugcuucuugaaac

SEQ ID NO: 1763949 - RNA, 19 nt, Artificial Sequence
  Description of Artificial Sequence: Synthetic oligonucleotide
cuuuaacuucugugggugg

SEQ ID NO: 1763950 - RNA, 19 nt, Artificial Sequence
  Description of Artificial Sequence: Synthetic oligonucleotide
ugugauguucgugucuuug

SEQ ID NO: 1763951 - RNA, 19 nt, Artificial Sequence
  Description of Artificial Sequence: Synthetic oligonucleotide
agaaaaugugggcuucugu

SEQ ID NO: 1763952 - RNA, 19 nt, Artificial Sequence
  Description of Artificial Sequence: Synthetic oligonucleotide
ugggcuucuguuuugcuau

SEQ ID NO: 1763953 - RNA, 19 nt, Artificial Sequence
  Description of Artificial Sequence: Synthetic oligonucleotide
cugauuagcaaaaugcacu

SEQ ID NO: 1763954 - RNA, 19 nt, Artificial Sequence
  Description of Artificial Sequence: Synthetic oligonucleotide
aaauggccugugauguucg

SEQ ID NO: 1763955 - RNA, 19 nt, Artificial Sequence
  Description of Artificial Sequence: Synthetic oligonucleotide
gauggaccaauccgggccc

SEQ ID NO: 1763956 - RNA, 19 nt, Artificial Sequence
  Description of Artificial Sequence: Synthetic oligonucleotide
auccggauagcuugaagcu

SEQ ID NO: 1763957 - RNA, 19 nt, Artificial Sequence
  Description of Artificial Sequence: Synthetic oligonucleotide
aauuugcuauugguccuuc

SEQ ID NO: 1763958 - RNA, 19 nt, Artificial Sequence
  Description of Artificial Sequence: Synthetic oligonucleotide
uggauuauccggauagcuu

SEQ ID NO: 1763959 - RNA, 19 nt, Artificial Sequence
  Description of Artificial Sequence: Synthetic oligonucleotide
ugaaacuaacagucuuugu

SEQ ID NO: 1763960 - RNA, 19 nt, Artificial Sequence
  Description of Artificial Sequence: Synthetic oligonucleotide
gagaaugcaggcagagcgg

SEQ ID NO: 1763961 - RNA, 19 nt, Artificial Sequence
  Description of Artificial Sequence: Synthetic oligonucleotide
ugcuugaaacuaacagucu

SEQ ID NO: 1763962 - RNA, 19 nt, Artificial Sequence
  Description of Artificial Sequence: Synthetic oligonucleotide
uucaaccagcucuuuguac

SEQ ID NO: 1763963 - RNA, 19 nt, Artificial Sequence
  Description of Artificial Sequence: Synthetic oligonucleotide
acgucuaggccagacuccc

SEQ ID NO: 1763964 - RNA, 19 nt, Artificial Sequence
  Description of Artificial Sequence: Synthetic oligonucleotide
ugguaacacaccauuccuc

SEQ ID NO: 1763965 - RNA, 19 nt, Artificial Sequence
  Description of Artificial Sequence: Synthetic oligonucleotide
caguuaagcagucugguaa

SEQ ID NO: 1763966 - RNA, 19 nt, Artificial Sequence
  Description of Artificial Sequence: Synthetic oligonucleotide
aacccagcgaugcucucca

SEQ ID NO: 1763967 - RNA, 19 nt, Artificial Sequence
  Description of Artificial Sequence: Synthetic oligonucleotide
aagaaaaugugggcuucug

SEQ ID NO: 1763968 - RNA, 19 nt, Artificial Sequence
  Description of Artificial Sequence: Synthetic oligonucleotide
ggauggaccaauccgggcc

SEQ ID NO: 1763969 - RNA, 19 nt, Artificial Sequence
  Description of Artificial Sequence: Synthetic oligonucleotide
gaaaaugugggcuucuguu

SEQ ID NO: 1763970 - RNA, 19 nt, Artificial Sequence
  Description of Artificial Sequence: Synthetic oligonucleotide
agucugguaacacaccauu

SEQ ID NO: 1763971 - RNA, 19 nt, Artificial Sequence
  Description of Artificial Sequence: Synthetic oligonucleotide
gauguucgugucuuugcca

SEQ ID NO: 1763972 - RNA, 19 nt, Artificial Sequence
  Description of Artificial Sequence: Synthetic oligonucleotide
uugcuauugguccuuccau

SEQ ID NO: 1763973 - RNA, 19 nt, Artificial Sequence
  Description of Artificial Sequence: Synthetic oligonucleotide
uucgcauuucugcuccaca

SEQ ID NO: 1763974 - RNA, 19 nt, Artificial Sequence
  Description of Artificial Sequence: Synthetic oligonucleotide
agagcggcccggcaaucgc

SEQ ID NO: 1763975 - RNA, 19 nt, Artificial Sequence
  Description of Artificial Sequence: Synthetic oligonucleotide
uggaccaucauugcuuuaa

SEQ ID NO: 1763976 - RNA, 19 nt, Artificial Sequence
  Description of Artificial Sequence: Synthetic oligonucleotide
ucuuugagguaacuuucua

SEQ ID NO: 1763977 - RNA, 19 nt, Artificial Sequence
  Description of Artificial Sequence: Synthetic oligonucleotide
uuaagcagucugguaacac

SEQ ID NO: 1763978 - RNA, 19 nt, Artificial Sequence
  Description of Artificial Sequence: Synthetic oligonucleotide
gguuguacugacugauuag

SEQ ID NO: 1763979 - RNA, 19 nt, Artificial Sequence
  Description of Artificial Sequence: Synthetic oligonucleotide
uacgggcugcaaaauggcc

SEQ ID NO: 1763980 - RNA, 19 nt, Artificial Sequence
  Description of Artificial Sequence: Synthetic oligonucleotide
uuuagccucugaugacugc

SEQ ID NO: 1763981 - RNA, 19 nt, Artificial Sequence
  Description of Artificial Sequence: Synthetic oligonucleotide
ucuuugccagaggagaggu

SEQ ID NO: 1763982 - RNA, 19 nt, Artificial Sequence
  Description of Artificial Sequence: Synthetic oligonucleotide
ucgcauuucugcuccacaa

SEQ ID NO: 1763983 - RNA, 19 nt, Artificial Sequence
  Description of Artificial Sequence: Synthetic oligonucleotide
gcuauugguccuuccaugc

SEQ ID NO: 1763984 - RNA, 19 nt, Artificial Sequence
  Description of Artificial Sequence: Synthetic oligonucleotide
guugccguaacucuucugu

SEQ ID NO: 1763985 - RNA, 19 nt, Artificial Sequence
  Description of Artificial Sequence: Synthetic oligonucleotide
ucaguuaagcagucuggua

SEQ ID NO: 1763986 - RNA, 19 nt, Artificial Sequence
  Description of Artificial Sequence: Synthetic oligonucleotide
cauguccuuucucauggac

SEQ ID NO: 1763987 - RNA, 19 nt, Artificial Sequence
  Description of Artificial Sequence: Synthetic oligonucleotide
uucgugucuuugccagagg

SEQ ID NO: 1763988 - RNA, 19 nt, Artificial Sequence
  Description of Artificial Sequence: Synthetic oligonucleotide
uucucauggacaucagcuu

SEQ ID NO: 1763989 - RNA, 19 nt, Artificial Sequence
  Description of Artificial Sequence: Synthetic oligonucleotide
aaaugcacuuuaacuucug

SEQ ID NO: 1763990 - RNA, 19 nt, Artificial Sequence
  Description of Artificial Sequence: Synthetic oligonucleotide
uuugcagcuucaugaguau

SEQ ID NO: 1763991 - RNA, 19 nt, Artificial Sequence
  Description of Artificial Sequence: Synthetic oligonucleotide
auagugcucucguugccgu

SEQ ID NO: 1763992 - RNA, 19 nt, Artificial Sequence
  Description of Artificial Sequence: Synthetic oligonucleotide
uuugcccucauguccuuuc

SEQ ID NO: 1763993 - RNA, 19 nt, Artificial Sequence
  Description of Artificial Sequence: Synthetic oligonucleotide
uauacacuggugguucuuc

SEQ ID NO: 1763994 - RNA, 19 nt, Artificial Sequence
  Description of Artificial Sequence: Synthetic oligonucleotide
ccauuuuagccucugauga

SEQ ID NO: 1763995 - RNA, 19 nt, Artificial Sequence
  Description of Artificial Sequence: Synthetic oligonucleotide
gaagccuacggagaaugca

SEQ ID NO: 1763996 - RNA, 19 nt, Artificial Sequence
  Description of Artificial Sequence: Synthetic oligonucleotide
aguauacacuggugguucu

SEQ ID NO: 1763997 - RNA, 19 nt, Artificial Sequence
  Description of Artificial Sequence: Synthetic oligonucleotide
uuaacuucuguggguggcu

SEQ ID NO: 1763998 - RNA, 19 nt, Artificial Sequence
  Description of Artificial Sequence: Synthetic oligonucleotide
ugaguauacacuggugguu

SEQ ID NO: 1763999 - RNA, 19 nt, Artificial Sequence
  Description of Artificial Sequence: Synthetic oligonucleotide
agaagccuacggagaaugc

SEQ ID NO: 1764000 - RNA, 19 nt, Artificial Sequence
  Description of Artificial Sequence: Synthetic oligonucleotide
gcaaaaugcacuuuaacuu

SEQ ID NO: 1764001 - RNA, 19 nt, Artificial Sequence
  Description of Artificial Sequence: Synthetic oligonucleotide
gcuggacacuaacaaaacc

SEQ ID NO: 1764002 - RNA, 19 nt, Artificial Sequence
  Description of Artificial Sequence: Synthetic oligonucleotide
ucuuccauuuuagccucug

SEQ ID NO: 1764003 - RNA, 19 nt, Artificial Sequence
  Description of Artificial Sequence: Synthetic oligonucleotide
uacggagaaugcaggcaga

SEQ ID NO: 1764004 - RNA, 19 nt, Artificial Sequence
  Description of Artificial Sequence: Synthetic oligonucleotide
aaucgccucuuuaguaaug

SEQ ID NO: 1764005 - RNA, 19 nt, Artificial Sequence
  Description of Artificial Sequence: Synthetic oligonucleotide
gccguaacucuucuguucc

SEQ ID NO: 1764006 - RNA, 19 nt, Artificial Sequence
  Description of Artificial Sequence: Synthetic oligonucleotide
ucucguugccguaacucuu

SEQ ID NO: 1764007 - RNA, 19 nt, Artificial Sequence
  Description of Artificial Sequence: Synthetic oligonucleotide
aauggccugugauguucgu

SEQ ID NO: 1764008 - RNA, 19 nt, Artificial Sequence
  Description of Artificial Sequence: Synthetic oligonucleotide
ucuugccauggguuguacu

SEQ ID NO: 1764009 - RNA, 19 nt, Artificial Sequence
  Description of Artificial Sequence: Synthetic oligonucleotide
ccggauagcuugaagcugc

SEQ ID NO: 1764010 - RNA, 19 nt, Artificial Sequence
  Description of Artificial Sequence: Synthetic oligonucleotide
gucacugacuacaucggca

SEQ ID NO: 1764011 - RNA, 19 nt, Artificial Sequence
  Description of Artificial Sequence: Synthetic oligonucleotide
gacgucuaggccagacucc

SEQ ID NO: 1764012 - RNA, 19 nt, Artificial Sequence
  Description of Artificial Sequence: Synthetic oligonucleotide
gaacccagcgaugcucucc

SEQ ID NO: 1764013 - RNA, 19 nt, Artificial Sequence
  Description of Artificial Sequence: Synthetic oligonucleotide
uaacuucuguggguggcug

SEQ ID NO: 1764014 - RNA, 19 nt, Artificial Sequence
  Description of Artificial Sequence: Synthetic oligonucleotide
aucggcaccaucaguuaag

SEQ ID NO: 1764015 - RNA, 19 nt, Artificial Sequence
  Description of Artificial Sequence: Synthetic oligonucleotide
aucgccucuuuaguaaugu

SEQ ID NO: 1764016 - RNA, 19 nt, Artificial Sequence
  Description of Artificial Sequence: Synthetic oligonucleotide
cauuaauuccaauuucuuu

SEQ ID NO: 1764017 - RNA, 19 nt, Artificial Sequence
  Description of Artificial Sequence: Synthetic oligonucleotide
auggguuguacugacugau

SEQ ID NO: 1764018 - RNA, 19 nt, Artificial Sequence
  Description of Artificial Sequence: Synthetic oligonucleotide
uugccauggguuguacuga

SEQ ID NO: 1764019 - RNA, 19 nt, Artificial Sequence
  Description of Artificial Sequence: Synthetic oligonucleotide
gauuauccggauagcuuga

SEQ ID NO: 1764020 - RNA, 19 nt, Artificial Sequence
  Description of Artificial Sequence: Synthetic oligonucleotide
gcugacaaauuugcuauug

SEQ ID NO: 1764021 - RNA, 19 nt, Artificial Sequence
  Description of Artificial Sequence: Synthetic oligonucleotide
caguacgggcugcaaaaug

SEQ ID NO: 1764022 - RNA, 19 nt, Artificial Sequence
  Description of Artificial Sequence: Synthetic oligonucleotide
uaggucaacuugcuuucuu

SEQ ID NO: 1764023 - RNA, 19 nt, Artificial Sequence
  Description of Artificial Sequence: Synthetic oligonucleotide
ugccaguacgggcugcaaa

SEQ ID NO: 1764024 - RNA, 19 nt, Artificial Sequence
  Description of Artificial Sequence: Synthetic oligonucleotide
ccauggguuguacugacug

SEQ ID NO: 1764025 - RNA, 19 nt, Artificial Sequence
  Description of Artificial Sequence: Synthetic oligonucleotide
uguucgugucuuugccaga

SEQ ID NO: 1764026 - RNA, 19 nt, Artificial Sequence
  Description of Artificial Sequence: Synthetic oligonucleotide
gaagcugcaucucaauguu

SEQ ID NO: 1764027 - RNA, 19 nt, Artificial Sequence
  Description of Artificial Sequence: Synthetic oligonucleotide
caaauuugcuauugguccu

SEQ ID NO: 1764028 - RNA, 19 nt, Artificial Sequence
  Description of Artificial Sequence: Synthetic oligonucleotide
uugagauagugcucucguu

SEQ ID NO: 1764029 - RNA, 19 nt, Artificial Sequence
  Description of Artificial Sequence: Synthetic oligonucleotide
caaccagcucuuuguacuc

SEQ ID NO: 1764030 - RNA, 19 nt, Artificial Sequence
  Description of Artificial Sequence: Synthetic oligonucleotide
accaauccgggccccgcag

SEQ ID NO: 1764031 - RNA, 19 nt, Artificial Sequence
  Description of Artificial Sequence: Synthetic oligonucleotide
ggccgcaagaagccuacgg

SEQ ID NO: 1764032 - RNA, 19 nt, Artificial Sequence
  Description of Artificial Sequence: Synthetic oligonucleotide
ucauguccuuucucaugga

SEQ ID NO: 1764033 - RNA, 19 nt, Artificial Sequence
  Description of Artificial Sequence: Synthetic oligonucleotide
cucugcaagcaaucgccuc

SEQ ID NO: 1764034 - RNA, 19 nt, Artificial Sequence
  Description of Artificial Sequence: Synthetic oligonucleotide
cuugagauagugcucucgu

SEQ ID NO: 1764035 - RNA, 19 nt, Artificial Sequence
  Description of Artificial Sequence: Synthetic oligonucleotide
ucauugcuuuaaagauagu

SEQ ID NO: 1764036 - RNA, 19 nt, Artificial Sequence
  Description of Artificial Sequence: Synthetic oligonucleotide
cagucuuuguuuaaggauu

SEQ ID NO: 1764037 - RNA, 19 nt, Artificial Sequence
  Description of Artificial Sequence: Synthetic oligonucleotide
ugugggagggaggaaguuu

SEQ ID NO: 1764038 - RNA, 19 nt, Artificial Sequence
  Description of Artificial Sequence: Synthetic oligonucleotide
guacgggcugcaaaauggc

SEQ ID NO: 1764039 - RNA, 19 nt, Artificial Sequence
  Description of Artificial Sequence: Synthetic oligonucleotide
uucggccgcaagaagccua

SEQ ID NO: 1764040 - RNA, 19 nt, Artificial Sequence
  Description of Artificial Sequence: Synthetic oligonucleotide
cuugaaacuaacagucuuu

SEQ ID NO: 1764041 - RNA, 19 nt, Artificial Sequence
  Description of Artificial Sequence: Synthetic oligonucleotide
gaauuucuguauaggucaa

SEQ ID NO: 1764042 - RNA, 19 nt, Artificial Sequence
  Description of Artificial Sequence: Synthetic oligonucleotide
acggacgucuaggccagac

SEQ ID NO: 1764043 - RNA, 19 nt, Artificial Sequence
  Description of Artificial Sequence: Synthetic oligonucleotide
cauggguuguacugacuga

SEQ ID NO: 1764044 - RNA, 19 nt, Artificial Sequence
  Description of Artificial Sequence: Synthetic oligonucleotide
gcuugagauagugcucucg

SEQ ID NO: 1764045 - RNA, 19 nt, Artificial Sequence
  Description of Artificial Sequence: Synthetic oligonucleotide
ucguugccguaacucuucu

SEQ ID NO: 1764046 - RNA, 19 nt, Artificial Sequence
  Description of Artificial Sequence: Synthetic oligonucleotide
guuucaggcaacagcucca

SEQ ID NO: 1764047 - RNA, 19 nt, Artificial Sequence
  Description of Artificial Sequence: Synthetic oligonucleotide
gcaaucgccucuuuaguaa

SEQ ID NO: 1764048 - RNA, 19 nt, Artificial Sequence
  Description of Artificial Sequence: Synthetic oligonucleotide
ggcgacacggacgucuagg

SEQ ID NO: 1764049 - RNA, 19 nt, Artificial Sequence
  Description of Artificial Sequence: Synthetic oligonucleotide
gaaugcaggcagagcggcc

SEQ ID NO: 1764050 - RNA, 19 nt, Artificial Sequence
  Description of Artificial Sequence: Synthetic oligonucleotide
accauuccucuccuggauu

SEQ ID NO: 1764051 - RNA, 19 nt, Artificial Sequence
  Description of Artificial Sequence: Synthetic oligonucleotide
uugccguaacucuucuguu

SEQ ID NO: 1764052 - RNA, 19 nt, Artificial Sequence
  Description of Artificial Sequence: Synthetic oligonucleotide
guuaagcagucugguaaca

SEQ ID NO: 1764053 - RNA, 19 nt, Artificial Sequence
  Description of Artificial Sequence: Synthetic oligonucleotide
gaugcucuccaccacccau

SEQ ID NO: 1764054 - RNA, 19 nt, Artificial Sequence
  Description of Artificial Sequence: Synthetic oligonucleotide
ccggcaaucgccaggcccc

SEQ ID NO: 1764055 - RNA, 19 nt, Artificial Sequence
  Description of Artificial Sequence: Synthetic oligonucleotide
ugcugacaaauuugcuauu

SEQ ID NO: 1764056 - RNA, 19 nt, Artificial Sequence
  Description of Artificial Sequence: Synthetic oligonucleotide
auggaccaauccgggcccc

SEQ ID NO: 1764057 - RNA, 19 nt, Artificial Sequence
  Description of Artificial Sequence: Synthetic oligonucleotide
uuucuugccauggguugua

SEQ ID NO: 1764058 - RNA, 19 nt, Artificial Sequence
  Description of Artificial Sequence: Synthetic oligonucleotide
caggaacccagcgaugcuc

SEQ ID NO: 1764059 - RNA, 19 nt, Artificial Sequence
  Description of Artificial Sequence: Synthetic oligonucleotide
cugguaacacaccauuccu

SEQ ID NO: 1764060 - RNA, 19 nt, Artificial Sequence
  Description of Artificial Sequence: Synthetic oligonucleotide
cuaucucuucauauuacuu

SEQ ID NO: 1764061 - RNA, 19 nt, Artificial Sequence
  Description of Artificial Sequence: Synthetic oligonucleotide
uugguccuuccaugcuuga

SEQ ID NO: 1764062 - RNA, 19 nt, Artificial Sequence
  Description of Artificial Sequence: Synthetic oligonucleotide
aggaacccagcgaugcucu

SEQ ID NO: 1764063 - RNA, 19 nt, Artificial Sequence
  Description of Artificial Sequence: Synthetic oligonucleotide
ccaauuucuuugagguaac

SEQ ID NO: 1764064 - RNA, 19 nt, Artificial Sequence
  Description of Artificial Sequence: Synthetic oligonucleotide
uucaggcaacagcuccauc

SEQ ID NO: 1764065 - RNA, 19 nt, Artificial Sequence
  Description of Artificial Sequence: Synthetic oligonucleotide
caugcuucuugaaacugau

SEQ ID NO: 1764066 - RNA, 19 nt, Artificial Sequence
  Description of Artificial Sequence: Synthetic oligonucleotide
uggaccaauccgggccccg

SEQ ID NO: 1764067 - RNA, 19 nt, Artificial Sequence
  Description of Artificial Sequence: Synthetic oligonucleotide
cuucgcauuucugcuccac

SEQ ID NO: 1764068 - RNA, 19 nt, Artificial Sequence
  Description of Artificial Sequence: Synthetic oligonucleotide
ccaagauggggauggacca

SEQ ID NO: 1764069 - RNA, 19 nt, Artificial Sequence
  Description of Artificial Sequence: Synthetic oligonucleotide
auaggucaacuugcuuucu

SEQ ID NO: 1764070 - RNA, 19 nt, Artificial Sequence
  Description of Artificial Sequence: Synthetic oligonucleotide
acacggacgucuaggccag

SEQ ID NO: 1764071 - RNA, 19 nt, Artificial Sequence
  Description of Artificial Sequence: Synthetic oligonucleotide
caucuuucuugccaugggu

SEQ ID NO: 1764072 - RNA, 19 nt, Artificial Sequence
  Description of Artificial Sequence: Synthetic oligonucleotide
gccgcaagaagccuacgga

SEQ ID NO: 1764073 - RNA, 19 nt, Artificial Sequence
  Description of Artificial Sequence: Synthetic oligonucleotide
ggcaacagcuccaucuuuc

SEQ ID NO: 1764074 - RNA, 19 nt, Artificial Sequence
  Description of Artificial Sequence: Synthetic oligonucleotide
cuccuugggaauuacucau

SEQ ID NO: 1764075 - RNA, 19 nt, Artificial Sequence
  Description of Artificial Sequence: Synthetic oligonucleotide
ugcuugagauagugcucuc

SEQ ID NO: 1764076 - RNA, 19 nt, Artificial Sequence
  Description of Artificial Sequence: Synthetic oligonucleotide
auuauccggauagcuugaa

SEQ ID NO: 1764077 - RNA, 19 nt, Artificial Sequence
  Description of Artificial Sequence: Synthetic oligonucleotide
gccuacggagaaugcaggc

SEQ ID NO: 1764078 - RNA, 19 nt, Artificial Sequence
  Description of Artificial Sequence: Synthetic oligonucleotide
ccucauguccuuucucaug

SEQ ID NO: 1764079 - RNA, 19 nt, Artificial Sequence
  Description of Artificial Sequence: Synthetic oligonucleotide
gcuguacaaaagguucacc

SEQ ID NO: 1764080 - RNA, 19 nt, Artificial Sequence
  Description of Artificial Sequence: Synthetic oligonucleotide
gcgacacggacgucuaggc

SEQ ID NO: 1764081 - RNA, 19 nt, Artificial Sequence
  Description of Artificial Sequence: Synthetic oligonucleotide
aggaccucccucaggauuu

SEQ ID NO: 1764082 - RNA, 19 nt, Artificial Sequence
  Description of Artificial Sequence: Synthetic oligonucleotide
gccaguacgggcugcaaaa

SEQ ID NO: 1764083 - RNA, 19 nt, Artificial Sequence
  Description of Artificial Sequence: Synthetic oligonucleotide
gggauggaccaauccgggc

SEQ ID NO: 1764084 - RNA, 19 nt, Artificial Sequence
  Description of Artificial Sequence: Synthetic oligonucleotide
cuguauaggucaacuugcu

SEQ ID NO: 1764085 - RNA, 19 nt, Artificial Sequence
  Description of Artificial Sequence: Synthetic oligonucleotide
cagagcggcccggcaaucg

SEQ ID NO: 1764086 - RNA, 19 nt, Artificial Sequence
  Description of Artificial Sequence: Synthetic oligonucleotide
uuucggccgcaagaagccu

SEQ ID NO: 1764087 - RNA, 19 nt, Artificial Sequence
  Description of Artificial Sequence: Synthetic oligonucleotide
acacaccauuccucuccug

SEQ ID NO: 1764088 - RNA, 19 nt, Artificial Sequence
  Description of Artificial Sequence: Synthetic oligonucleotide
aggcagagcggcccggcaa

SEQ ID NO: 1764089 - RNA, 19 nt, Artificial Sequence
  Description of Artificial Sequence: Synthetic oligonucleotide
cuggauuauccggauagcu

SEQ ID NO: 1764090 - RNA, 19 nt, Artificial Sequence
  Description of Artificial Sequence: Synthetic oligonucleotide
ugguccuuccaugcuugaa

SEQ ID NO: 1764091 - RNA, 19 nt, Artificial Sequence
  Description of Artificial Sequence: Synthetic oligonucleotide
cucaguauucuggaucugu

SEQ ID NO: 1764092 - RNA, 19 nt, Artificial Sequence
  Description of Artificial Sequence: Synthetic oligonucleotide
ggcuguacaaaagguucac

SEQ ID NO: 1764093 - RNA, 19 nt, Artificial Sequence
  Description of Artificial Sequence: Synthetic oligonucleotide
uucuugccauggguuguac

SEQ ID NO: 1764094 - RNA, 19 nt, Artificial Sequence
  Description of Artificial Sequence: Synthetic oligonucleotide
gcuugaaacuaacagucuu

SEQ ID NO: 1764095 - RNA, 19 nt, Artificial Sequence
  Description of Artificial Sequence: Synthetic oligonucleotide
uugcagcuucaugaguaua

SEQ ID NO: 1764096 - RNA, 19 nt, Artificial Sequence
  Description of Artificial Sequence: Synthetic oligonucleotide
ucgccucuuuaguaauguu

SEQ ID NO: 1764097 - RNA, 19 nt, Artificial Sequence
  Description of Artificial Sequence: Synthetic oligonucleotide
aggcaacagcuccaucuuu

SEQ ID NO: 1764098 - RNA, 19 nt, Artificial Sequence
  Description of Artificial Sequence: Synthetic oligonucleotide
cccggcaaucgccaggccc

SEQ ID NO: 1764099 - RNA, 19 nt, Artificial Sequence
  Description of Artificial Sequence: Synthetic oligonucleotide
caucggcaccaucaguuaa

SEQ ID NO: 1764100 - RNA, 19 nt, Artificial Sequence
  Description of Artificial Sequence: Synthetic oligonucleotide
gcaugcuucuugaaacuga

SEQ ID NO: 1764101 - RNA, 19 nt, Artificial Sequence
  Description of Artificial Sequence: Synthetic oligonucleotide
ugcaagcaaucgccucuuu

SEQ ID NO: 1764102 - RNA, 19 nt, Artificial Sequence
  Description of Artificial Sequence: Synthetic oligonucleotide
acccagcgaugcucuccac

SEQ ID NO: 1764103 - RNA, 19 nt, Artificial Sequence
  Description of Artificial Sequence: Synthetic oligonucleotide
gcucucguugccguaacuc

SEQ ID NO: 1764104 - RNA, 19 nt, Artificial Sequence
  Description of Artificial Sequence: Synthetic oligonucleotide
caauccgggccccgcagga

SEQ ID NO: 1764105 - RNA, 19 nt, Artificial Sequence
  Description of Artificial Sequence: Synthetic oligonucleotide
uuccuccaccucccuggaa

SEQ ID NO: 1764106 - RNA, 19 nt, Artificial Sequence
  Description of Artificial Sequence: Synthetic oligonucleotide
gcaagcaaucgccucuuua

SEQ ID NO: 1764107 - RNA, 19 nt, Artificial Sequence
  Description of Artificial Sequence: Synthetic oligonucleotide
ccuggauuauccggauagc

SEQ ID NO: 1764108 - RNA, 19 nt, Artificial Sequence
  Description of Artificial Sequence: Synthetic oligonucleotide
gugcucucguugccguaac

SEQ ID NO: 1764109 - RNA, 19 nt, Artificial Sequence
  Description of Artificial Sequence: Synthetic oligonucleotide
gcaccgggcgacacggacg

SEQ ID NO: 1764110 - RNA, 19 nt, Artificial Sequence
  Description of Artificial Sequence: Synthetic oligonucleotide
gccuuucggccgcaagaag

SEQ ID NO: 1764111 - RNA, 19 nt, Artificial Sequence
  Description of Artificial Sequence: Synthetic oligonucleotide
ccaauccgggccccgcagg

SEQ ID NO: 1764112 - RNA, 19 nt, Artificial Sequence
  Description of Artificial Sequence: Synthetic oligonucleotide
gccgcucgggccuuucggc

SEQ ID NO: 1764113 - RNA, 19 nt, Artificial Sequence
  Description of Artificial Sequence: Synthetic oligonucleotide
gcgaugcucuccaccaccc

SEQ ID NO: 1764114 - RNA, 19 nt, Artificial Sequence
  Description of Artificial Sequence: Synthetic oligonucleotide
cugucauuucuggcuucuc

SEQ ID NO: 1764115 - RNA, 19 nt, Artificial Sequence
  Description of Artificial Sequence: Synthetic oligonucleotide
caucuccuugggaauuacu

SEQ ID NO: 1764116 - RNA, 19 nt, Artificial Sequence
  Description of Artificial Sequence: Synthetic oligonucleotide
gcuugaagcugcaucucaa

SEQ ID NO: 1764117 - RNA, 19 nt, Artificial Sequence
  Description of Artificial Sequence: Synthetic oligonucleotide
cuacaucggcaccaucagu

SEQ ID NO: 1764118 - RNA, 19 nt, Artificial Sequence
  Description of Artificial Sequence: Synthetic oligonucleotide
ccuacggagaaugcaggca

SEQ ID NO: 1764119 - RNA, 19 nt, Artificial Sequence
  Description of Artificial Sequence: Synthetic oligonucleotide
gccccgcaggaacccagcg

SEQ ID NO: 1764120 - RNA, 19 nt, Artificial Sequence
  Description of Artificial Sequence: Synthetic oligonucleotide
cccgcaccgggcgacacgg

SEQ ID NO: 1764121 - RNA, 19 nt, Artificial Sequence
  Description of Artificial Sequence: Synthetic oligonucleotide
ggacacuaacaaaaccagu

SEQ ID NO: 1764122 - RNA, 19 nt, Artificial Sequence
  Description of Artificial Sequence: Synthetic oligonucleotide
agcggcccggcaaucgcca

SEQ ID NO: 1764123 - RNA, 19 nt, Artificial Sequence
  Description of Artificial Sequence: Synthetic oligonucleotide
caauuucuuugagguaacu

SEQ ID NO: 1764124 - RNA, 19 nt, Artificial Sequence
  Description of Artificial Sequence: Synthetic oligonucleotide
ccauuccucuccuggauua

SEQ ID NO: 1764125 - RNA, 19 nt, Artificial Sequence
  Description of Artificial Sequence: Synthetic oligonucleotide
cccggcuggacacuaacaa

SEQ ID NO: 1764126 - RNA, 19 nt, Artificial Sequence
  Description of Artificial Sequence: Synthetic oligonucleotide
cagucugguaacacaccau

SEQ ID NO: 1764127 - RNA, 19 nt, Artificial Sequence
  Description of Artificial Sequence: Synthetic oligonucleotide
cgacacggacgucuaggcc

SEQ ID NO: 1764128 - RNA, 19 nt, Artificial Sequence
  Description of Artificial Sequence: Synthetic oligonucleotide
ggaccaauccgggccccgc

SEQ ID NO: 1764129 - RNA, 19 nt, Artificial Sequence
  Description of Artificial Sequence: Synthetic oligonucleotide
guccuuucucauggacauc

SEQ ID NO: 1764130 - RNA, 19 nt, Artificial Sequence
  Description of Artificial Sequence: Synthetic oligonucleotide
caccgggcgacacggacgu

SEQ ID NO: 1764131 - RNA, 19 nt, Artificial Sequence
  Description of Artificial Sequence: Synthetic oligonucleotide
ggccuuucggccgcaagaa

SEQ ID NO: 1764132 - RNA, 19 nt, Artificial Sequence
  Description of Artificial Sequence: Synthetic oligonucleotide
cuccuggauuauccggaua

SEQ ID NO: 1764133 - RNA, 19 nt, Artificial Sequence
  Description of Artificial Sequence: Synthetic oligonucleotide
cgcucgggccuuucggccg

SEQ ID NO: 1764134 - RNA, 19 nt, Artificial Sequence
  Description of Artificial Sequence: Synthetic oligonucleotide
caccauuccucuccuggau

SEQ ID NO: 1764135 - RNA, 19 nt, Artificial Sequence
  Description of Artificial Sequence: Synthetic oligonucleotide
ggaacccagcgaugcucuc

SEQ ID NO: 1764136 - RNA, 19 nt, Artificial Sequence
  Description of Artificial Sequence: Synthetic oligonucleotide
ccaucccgcccgcaccggg

SEQ ID NO: 1764137 - RNA, 19 nt, Artificial Sequence
  Description of Artificial Sequence: Synthetic oligonucleotide
ccggcuggacacuaacaaa

SEQ ID NO: 1764138 - RNA, 19 nt, Artificial Sequence
  Description of Artificial Sequence: Synthetic oligonucleotide
gggcgacacggacgucuag

SEQ ID NO: 1764139 - RNA, 19 nt, Artificial Sequence
  Description of Artificial Sequence: Synthetic oligonucleotide
gcccgcaccgggcgacacg

SEQ ID NO: 1764140 - RNA, 19 nt, Artificial Sequence
  Description of Artificial Sequence: Synthetic oligonucleotide
gcugucauuucuggcuucu

SEQ ID NO: 1764141 - RNA, 19 nt, Artificial Sequence
  Description of Artificial Sequence: Synthetic oligonucleotide
cuggaccaucauugcuuua

SEQ ID NO: 1764142 - RNA, 19 nt, Artificial Sequence
  Description of Artificial Sequence: Synthetic oligonucleotide
cguugccguaacucuucug

SEQ ID NO: 1764143 - RNA, 19 nt, Artificial Sequence
  Description of Artificial Sequence: Synthetic oligonucleotide
cccgcaggaacccagcgau

SEQ ID NO: 1764144 - RNA, 19 nt, Artificial Sequence
  Description of Artificial Sequence: Synthetic oligonucleotide
ccguaacucuucuguucca

SEQ ID NO: 1764145 - RNA, 19 nt, Artificial Sequence
  Description of Artificial Sequence: Synthetic oligonucleotide
cgcaccgggcgacacggac

SEQ ID NO: 1764146 - RNA, 19 nt, Artificial Sequence
  Description of Artificial Sequence: Synthetic oligonucleotide
cagggaucuucagacuuuu

SEQ ID NO: 1764147 - RNA, 19 nt, Artificial Sequence
  Description of Artificial Sequence: Synthetic oligonucleotide
cgcauuucugcuccacaaa

SEQ ID NO: 1764148 - RNA, 19 nt, Artificial Sequence
  Description of Artificial Sequence: Synthetic oligonucleotide
ggcagagcggcccggcaau

SEQ ID NO: 1764149 - RNA, 19 nt, Artificial Sequence
  Description of Artificial Sequence: Synthetic oligonucleotide
ccuggucauauucuucuuu

SEQ ID NO: 1764150 - RNA, 19 nt, Artificial Sequence
  Description of Artificial Sequence: Synthetic oligonucleotide
gcggcccggcaaucgccag

SEQ ID NO: 1764151 - RNA, 19 nt, Artificial Sequence
  Description of Artificial Sequence: Synthetic oligonucleotide
cgccucuuuaguaauguuu

SEQ ID NO: 1764152 - RNA, 19 nt, Artificial Sequence
  Description of Artificial Sequence: Synthetic oligonucleotide
accgggcgacacggacguc

SEQ ID NO: 1764153 - RNA, 19 nt, Artificial Sequence
  Description of Artificial Sequence: Synthetic oligonucleotide
ccuuccaugcuugaauguu

SEQ ID NO: 1764154 - RNA, 19 nt, Artificial Sequence
  Description of Artificial Sequence: Synthetic oligonucleotide
ccccggcuggacacuaaca

SEQ ID NO: 1764155 - RNA, 19 nt, Artificial Sequence
  Description of Artificial Sequence: Synthetic oligonucleotide
ucgggccuuucggccgcaa

SEQ ID NO: 1764156 - RNA, 19 nt, Artificial Sequence
  Description of Artificial Sequence: Synthetic oligonucleotide
cugugauguucgugucuuu

SEQ ID NO: 1764157 - RNA, 19 nt, Artificial Sequence
  Description of Artificial Sequence: Synthetic oligonucleotide
gccucugaugacugcuuuu

SEQ ID NO: 1764158 - RNA, 19 nt, Artificial Sequence
  Description of Artificial Sequence: Synthetic oligonucleotide
ccccgcaggaacccagcga

SEQ ID NO: 1764159 - RNA, 19 nt, Artificial Sequence
  Description of Artificial Sequence: Synthetic oligonucleotide
cugcaagcaaucgccucuu

SEQ ID NO: 1764160 - RNA, 19 nt, Artificial Sequence
  Description of Artificial Sequence: Synthetic oligonucleotide
cugccaguacgggcugcaa

SEQ ID NO: 1764161 - RNA, 19 nt, Artificial Sequence
  Description of Artificial Sequence: Synthetic oligonucleotide
cgggccuuucggccgcaag

SEQ ID NO: 1764162 - RNA, 19 nt, Artificial Sequence
  Description of Artificial Sequence: Synthetic oligonucleotide
cggauagcuugaagcugca

SEQ ID NO: 1764163 - RNA, 19 nt, Artificial Sequence
  Description of Artificial Sequence: Synthetic oligonucleotide
gcagagcggcccggcaauc

SEQ ID NO: 1764164 - RNA, 19 nt, Artificial Sequence
  Description of Artificial Sequence: Synthetic oligonucleotide
gcccggcaaucgccaggcc

SEQ ID NO: 1764165 - RNA, 19 nt, Artificial Sequence
  Description of Artificial Sequence: Synthetic oligonucleotide
cggcaccaucaguuaagca

SEQ ID NO: 1764166 - RNA, 19 nt, Artificial Sequence
  Description of Artificial Sequence: Synthetic oligonucleotide
gccauggguuguacugacu

SEQ ID NO: 1764167 - RNA, 19 nt, Artificial Sequence
  Description of Artificial Sequence: Synthetic oligonucleotide
ccgggcgacacggacgucu

SEQ ID NO: 1764168 - RNA, 19 nt, Artificial Sequence
  Description of Artificial Sequence: Synthetic oligonucleotide
cggccgcucgggccuuucg

SEQ ID NO: 1764169 - RNA, 19 nt, Artificial Sequence
  Description of Artificial Sequence: Synthetic oligonucleotide
caccucccuggaaggcuuu

SEQ ID NO: 1764170 - RNA, 19 nt, Artificial Sequence
  Description of Artificial Sequence: Synthetic oligonucleotide
cacggacgucuaggccaga

SEQ ID NO: 1764171 - RNA, 19 nt, Artificial Sequence
  Description of Artificial Sequence: Synthetic oligonucleotide
cggccgcaagaagccuacg

SEQ ID NO: 1764172 - RNA, 19 nt, Artificial Sequence
  Description of Artificial Sequence: Synthetic oligonucleotide
cgggcgacacggacgucua

SEQ ID NO: 1764173 - RNA, 19 nt, Artificial Sequence
  Description of Artificial Sequence: Synthetic oligonucleotide
ccgcaccgggcgacacgga

SEQ ID NO: 1764174 - RNA, 19 nt, Artificial Sequence
  Description of Artificial Sequence: Synthetic oligonucleotide
ccggccgcucgggccuuuc

SEQ ID NO: 1764175 - RNA, 19 nt, Artificial Sequence
  Description of Artificial Sequence: Synthetic oligonucleotide
cgcccgcaccgggcgacac

SEQ ID NO: 1764176 - RNA, 19 nt, Artificial Sequence
  Description of Artificial Sequence: Synthetic oligonucleotide
ccgcccgcaccgggcgaca

SEQ ID NO: 1764177 - RNA, 19 nt, Artificial Sequence
  Description of Artificial Sequence: Synthetic oligonucleotide
ccccggccgcucgggccuu

SEQ ID NO: 1764178 - RNA, 19 nt, Artificial Sequence
  Description of Artificial Sequence: Synthetic oligonucleotide
cccggccgcucgggccuuu

SEQ ID NO: 1764179 - RNA, 19 nt, Artificial Sequence
  Description of Artificial Sequence: Synthetic oligonucleotide
acuaguaaggcucuggucc

SEQ ID NO: 1764180 - RNA, 19 nt, Artificial Sequence
  Description of Artificial Sequence: Synthetic oligonucleotide
aacauucacacacacacac

SEQ ID NO: 1764181 - RNA, 19 nt, Artificial Sequence
  Description of Artificial Sequence: Synthetic oligonucleotide
aauaaauaggccccugggc

SEQ ID NO: 1764182 - RNA, 19 nt, Artificial Sequence
  Description of Artificial Sequence: Synthetic oligonucleotide
aaucuagcuguccaugucc

SEQ ID NO: 1764183 - RNA, 19 nt, Artificial Sequence
  Description of Artificial Sequence: Synthetic oligonucleotide
aaugcaugcaucgaucucc

SEQ ID NO: 1764184 - RNA, 19 nt, Artificial Sequence
  Description of Artificial Sequence: Synthetic oligonucleotide
aagacaauccaguacauca

SEQ ID NO: 1764185 - RNA, 19 nt, Artificial Sequence
  Description of Artificial Sequence: Synthetic oligonucleotide
cugucaaguauuuugaagg

SEQ ID NO: 1764186 - RNA, 19 nt, Artificial Sequence
  Description of Artificial Sequence: Synthetic oligonucleotide
auuuugaaggacaagaagg

SEQ ID NO: 1764187 - RNA, 19 nt, Artificial Sequence
  Description of Artificial Sequence: Synthetic oligonucleotide
gaaggcaauaaauaggccc

SEQ ID NO: 1764188 - RNA, 19 nt, Artificial Sequence
  Description of Artificial Sequence: Synthetic oligonucleotide
ugugucacuaucuugcagg

SEQ ID NO: 1764189 - RNA, 19 nt, Artificial Sequence
  Description of Artificial Sequence: Synthetic oligonucleotide
aauacgagcaccaccagac

SEQ ID NO: 1764190 - RNA, 19 nt, Artificial Sequence
  Description of Artificial Sequence: Synthetic oligonucleotide
uauuuugaaggacaagaag

SEQ ID NO: 1764191 - RNA, 19 nt, Artificial Sequence
  Description of Artificial Sequence: Synthetic oligonucleotide
aaggcaauaaauaggcccc

SEQ ID NO: 1764192 - RNA, 19 nt, Artificial Sequence
  Description of Artificial Sequence: Synthetic oligonucleotide
ucuagagggacuaguaagg

SEQ ID NO: 1764193 - RNA, 19 nt, Artificial Sequence
  Description of Artificial Sequence: Synthetic oligonucleotide
caaacuuucgguaaagcag

SEQ ID NO: 1764194 - RNA, 19 nt, Artificial Sequence
  Description of Artificial Sequence: Synthetic oligonucleotide
ugaggaaggcaauaaauag

SEQ ID NO: 1764195 - RNA, 19 nt, Artificial Sequence
  Description of Artificial Sequence: Synthetic oligonucleotide
uuugguauacuguaggugu

SEQ ID NO: 1764196 - RNA, 19 nt, Artificial Sequence
  Description of Artificial Sequence: Synthetic oligonucleotide
agcauggucucauagcugc

SEQ ID NO: 1764197 - RNA, 19 nt, Artificial Sequence
  Description of Artificial Sequence: Synthetic oligonucleotide
agcuagagcacccugacuc

SEQ ID NO: 1764198 - RNA, 19 nt, Artificial Sequence
  Description of Artificial Sequence: Synthetic oligonucleotide
ucuugcauggagaagcucc

SEQ ID NO: 1764199 - RNA, 19 nt, Artificial Sequence
  Description of Artificial Sequence: Synthetic oligonucleotide
auaugcaggauacagcauc

SEQ ID NO: 1764200 - RNA, 19 nt, Artificial Sequence
  Description of Artificial Sequence: Synthetic oligonucleotide
aguauuuugaaggacaaga

SEQ ID NO: 1764201 - RNA, 19 nt, Artificial Sequence
  Description of Artificial Sequence: Synthetic oligonucleotide
ugguguagcagcaaaaggu

SEQ ID NO: 1764202 - RNA, 19 nt, Artificial Sequence
  Description of Artificial Sequence: Synthetic oligonucleotide
uuugccugcacaaugcaug

SEQ ID NO: 1764203 - RNA, 19 nt, Artificial Sequence
  Description of Artificial Sequence: Synthetic oligonucleotide
gaaugaacacaacugguug

SEQ ID NO: 1764204 - RNA, 19 nt, Artificial Sequence
  Description of Artificial Sequence: Synthetic oligonucleotide
aaugaacacaacugguuga

SEQ ID NO: 1764205 - RNA, 19 nt, Artificial Sequence
  Description of Artificial Sequence: Synthetic oligonucleotide
uucacacacacacacacac

SEQ ID NO: 1764206 - RNA, 19 nt, Artificial Sequence
  Description of Artificial Sequence: Synthetic oligonucleotide
cacacacacacauauauac

SEQ ID NO: 1764207 - RNA, 19 nt, Artificial Sequence
  Description of Artificial Sequence: Synthetic oligonucleotide
ucauccaccggacauauuc

SEQ ID NO: 1764208 - RNA, 19 nt, Artificial Sequence
  Description of Artificial Sequence: Synthetic oligonucleotide
aacaccauuagguauuuua

SEQ ID NO: 1764209 - RNA, 19 nt, Artificial Sequence
  Description of Artificial Sequence: Synthetic oligonucleotide
aucuagagggacuaguaag

SEQ ID NO: 1764210 - RNA, 19 nt, Artificial Sequence
  Description of Artificial Sequence: Synthetic oligonucleotide
guagaggggaucuugguag

SEQ ID NO: 1764211 - RNA, 19 nt, Artificial Sequence
  Description of Artificial Sequence: Synthetic oligonucleotide
uucugcagaaucuagcugu

SEQ ID NO: 1764212 - RNA, 19 nt, Artificial Sequence
  Description of Artificial Sequence: Synthetic oligonucleotide
ugagcauggucucauagcu

SEQ ID NO: 1764213 - RNA, 19 nt, Artificial Sequence
  Description of Artificial Sequence: Synthetic oligonucleotide
auacuguagguguaucccc

SEQ ID NO: 1764214 - RNA, 19 nt, Artificial Sequence
  Description of Artificial Sequence: Synthetic oligonucleotide
uauacuguagguguauccc

SEQ ID NO: 1764215 - RNA, 19 nt, Artificial Sequence
  Description of Artificial Sequence: Synthetic oligonucleotide
uuguaggaagcauaugcag

SEQ ID NO: 1764216 - RNA, 19 nt, Artificial Sequence
  Description of Artificial Sequence: Synthetic oligonucleotide
uuaucucauugucugacca

SEQ ID NO: 1764217 - RNA, 19 nt, Artificial Sequence
  Description of Artificial Sequence: Synthetic oligonucleotide
gaggaaggcaauaaauagg

SEQ ID NO: 1764218 - RNA, 19 nt, Artificial Sequence
  Description of Artificial Sequence: Synthetic oligonucleotide
gguaaagcaggcuagcucc

SEQ ID NO: 1764219 - RNA, 19 nt, Artificial Sequence
  Description of Artificial Sequence: Synthetic oligonucleotide
cauucacacacacacacac

SEQ ID NO: 1764220 - RNA, 19 nt, Artificial Sequence
  Description of Artificial Sequence: Synthetic oligonucleotide
uuucgguaaagcaggcuag

SEQ ID NO: 1764221 - RNA, 19 nt, Artificial Sequence
  Description of Artificial Sequence: Synthetic oligonucleotide
gacaagaaggaaugaacac

SEQ ID NO: 1764222 - RNA, 19 nt, Artificial Sequence
  Description of Artificial Sequence: Synthetic oligonucleotide
aaagacaauccaguacauc

SEQ ID NO: 1764223 - RNA, 19 nt, Artificial Sequence
  Description of Artificial Sequence: Synthetic oligonucleotide
agcuccguagucuuccagc

SEQ ID NO: 1764224 - RNA, 19 nt, Artificial Sequence
  Description of Artificial Sequence: Synthetic oligonucleotide
ugcagaaucuagcugucca

SEQ ID NO: 1764225 - RNA, 19 nt, Artificial Sequence
  Description of Artificial Sequence: Synthetic oligonucleotide
aaauacgagcaccaccaga

SEQ ID NO: 1764226 - RNA, 19 nt, Artificial Sequence
  Description of Artificial Sequence: Synthetic oligonucleotide
augaagauugcaaagacaa

SEQ ID NO: 1764227 - RNA, 19 nt, Artificial Sequence
  Description of Artificial Sequence: Synthetic oligonucleotide
gaggccgcgauguugaggc

SEQ ID NO: 1764228 - RNA, 19 nt, Artificial Sequence
  Description of Artificial Sequence: Synthetic oligonucleotide
acaauccaguacaucaucc

SEQ ID NO: 1764229 - RNA, 19 nt, Artificial Sequence
  Description of Artificial Sequence: Synthetic oligonucleotide
accauuagguauuuuauuu

SEQ ID NO: 1764230 - RNA, 19 nt, Artificial Sequence
  Description of Artificial Sequence: Synthetic oligonucleotide
ugucaaguauuuugaagga

SEQ ID NO: 1764231 - RNA, 19 nt, Artificial Sequence
  Description of Artificial Sequence: Synthetic oligonucleotide
agaagcuccguagucuucc

SEQ ID NO: 1764232 - RNA, 19 nt, Artificial Sequence
  Description of Artificial Sequence: Synthetic oligonucleotide
cuggcugcggcccagaggc

SEQ ID NO: 1764233 - RNA, 19 nt, Artificial Sequence
  Description of Artificial Sequence: Synthetic oligonucleotide
uccaccggacauauucucg

SEQ ID NO: 1764234 - RNA, 19 nt, Artificial Sequence
  Description of Artificial Sequence: Synthetic oligonucleotide
cugaccaacacucauccuc

SEQ ID NO: 1764235 - RNA, 19 nt, Artificial Sequence
  Description of Artificial Sequence: Synthetic oligonucleotide
acugguugaacuuuugauu

SEQ ID NO: 1764236 - RNA, 19 nt, Artificial Sequence
  Description of Artificial Sequence: Synthetic oligonucleotide
ucuggucccauauauggaa

SEQ ID NO: 1764237 - RNA, 19 nt, Artificial Sequence
  Description of Artificial Sequence: Synthetic oligonucleotide
guauacuguagguguaucc

SEQ ID NO: 1764238 - RNA, 19 nt, Artificial Sequence
  Description of Artificial Sequence: Synthetic oligonucleotide
auauacaccagaccuuaga

SEQ ID NO: 1764239 - RNA, 19 nt, Artificial Sequence
  Description of Artificial Sequence: Synthetic oligonucleotide
ugcccucucgaaucaaugg

SEQ ID NO: 1764240 - RNA, 19 nt, Artificial Sequence
  Description of Artificial Sequence: Synthetic oligonucleotide
ugaccaacacucauccucu

SEQ ID NO: 1764241 - RNA, 19 nt, Artificial Sequence
  Description of Artificial Sequence: Synthetic oligonucleotide
cuugcauggagaagcuccg

SEQ ID NO: 1764242 - RNA, 19 nt, Artificial Sequence
  Description of Artificial Sequence: Synthetic oligonucleotide
ucucgaaucaauggcuucc

SEQ ID NO: 1764243 - RNA, 19 nt, Artificial Sequence
  Description of Artificial Sequence: Synthetic oligonucleotide
aaggugagagcagccauag

SEQ ID NO: 1764244 - RNA, 19 nt, Artificial Sequence
  Description of Artificial Sequence: Synthetic oligonucleotide
uccgcuucccgaaacugag

SEQ ID NO: 1764245 - RNA, 19 nt, Artificial Sequence
  Description of Artificial Sequence: Synthetic oligonucleotide
acaaugcaugcaucgaucu

SEQ ID NO: 1764246 - RNA, 19 nt, Artificial Sequence
  Description of Artificial Sequence: Synthetic oligonucleotide
ggugagagcagccauagca

SEQ ID NO: 1764247 - RNA, 19 nt, Artificial Sequence
  Description of Artificial Sequence: Synthetic oligonucleotide
gaagacaucugugaagguc

SEQ ID NO: 1764248 - RNA, 19 nt, Artificial Sequence
  Description of Artificial Sequence: Synthetic oligonucleotide
uacgagcaccaccagacga

SEQ ID NO: 1764249 - RNA, 19 nt, Artificial Sequence
  Description of Artificial Sequence: Synthetic oligonucleotide
uucccgaaacugagcaugg

SEQ ID NO: 1764250 - RNA, 19 nt, Artificial Sequence
  Description of Artificial Sequence: Synthetic oligonucleotide
uauauacaccagaccuuag

SEQ ID NO: 1764251 - RNA, 19 nt, Artificial Sequence
  Description of Artificial Sequence: Synthetic oligonucleotide
uacuguagguguaucccca

SEQ ID NO: 1764252 - RNA, 19 nt, Artificial Sequence
  Description of Artificial Sequence: Synthetic oligonucleotide
auggagaagcuccguaguc

SEQ ID NO: 1764253 - RNA, 19 nt, Artificial Sequence
  Description of Artificial Sequence: Synthetic oligonucleotide
ugcaggauacagcauccca

SEQ ID NO: 1764254 - RNA, 19 nt, Artificial Sequence
  Description of Artificial Sequence: Synthetic oligonucleotide
aguacaucauccaccggac

SEQ ID NO: 1764255 - RNA, 19 nt, Artificial Sequence
  Description of Artificial Sequence: Synthetic oligonucleotide
uaaauaggccccugggccu

SEQ ID NO: 1764256 - RNA, 19 nt, Artificial Sequence
  Description of Artificial Sequence: Synthetic oligonucleotide
uucucauggcgggauaggg

SEQ ID NO: 1764257 - RNA, 19 nt, Artificial Sequence
  Description of Artificial Sequence: Synthetic oligonucleotide
aggggugucagggauagag

SEQ ID NO: 1764258 - RNA, 19 nt, Artificial Sequence
  Description of Artificial Sequence: Synthetic oligonucleotide
uugaagccaaacaccauua

SEQ ID NO: 1764259 - RNA, 19 nt, Artificial Sequence
  Description of Artificial Sequence: Synthetic oligonucleotide
aacuuucgguaaagcaggc

SEQ ID NO: 1764260 - RNA, 19 nt, Artificial Sequence
  Description of Artificial Sequence: Synthetic oligonucleotide
uggggcaaagagccgagug

SEQ ID NO: 1764261 - RNA, 19 nt, Artificial Sequence
  Description of Artificial Sequence: Synthetic oligonucleotide
ucugcgucgggguaucuga

SEQ ID NO: 1764262 - RNA, 19 nt, Artificial Sequence
  Description of Artificial Sequence: Synthetic oligonucleotide
gggguuaucucauugucug

SEQ ID NO: 1764263 - RNA, 19 nt, Artificial Sequence
  Description of Artificial Sequence: Synthetic oligonucleotide
auacaccagaccuuagaga

SEQ ID NO: 1764264 - RNA, 19 nt, Artificial Sequence
  Description of Artificial Sequence: Synthetic oligonucleotide
guagguguauccccacagg

SEQ ID NO: 1764265 - RNA, 19 nt, Artificial Sequence
  Description of Artificial Sequence: Synthetic oligonucleotide
cucauugucugaccaacac

SEQ ID NO: 1764266 - RNA, 19 nt, Artificial Sequence
  Description of Artificial Sequence: Synthetic oligonucleotide
uggucccauauauggaaag

SEQ ID NO: 1764267 - RNA, 19 nt, Artificial Sequence
  Description of Artificial Sequence: Synthetic oligonucleotide
gaacacaacugguugaacu

SEQ ID NO: 1764268 - RNA, 19 nt, Artificial Sequence
  Description of Artificial Sequence: Synthetic oligonucleotide
gaucuugguaggugggagc

SEQ ID NO: 1764269 - RNA, 19 nt, Artificial Sequence
  Description of Artificial Sequence: Synthetic oligonucleotide
cauuagguauuuuauuuaa

SEQ ID NO: 1764270 - RNA, 19 nt, Artificial Sequence
  Description of Artificial Sequence: Synthetic oligonucleotide
ugaggugcccucucgaauc

SEQ ID NO: 1764271 - RNA, 19 nt, Artificial Sequence
  Description of Artificial Sequence: Synthetic oligonucleotide
cuuugguauacuguaggug

SEQ ID NO: 1764272 - RNA, 19 nt, Artificial Sequence
  Description of Artificial Sequence: Synthetic oligonucleotide
uggacaaacuuucgguaaa

SEQ ID NO: 1764273 - RNA, 19 nt, Artificial Sequence
  Description of Artificial Sequence: Synthetic oligonucleotide
uggccgguacccaaucggg

SEQ ID NO: 1764274 - RNA, 19 nt, Artificial Sequence
  Description of Artificial Sequence: Synthetic oligonucleotide
cugugaaggucucugcggc

SEQ ID NO: 1764275 - RNA, 19 nt, Artificial Sequence
  Description of Artificial Sequence: Synthetic oligonucleotide
guagucuuccagcuagagc

SEQ ID NO: 1764276 - RNA, 19 nt, Artificial Sequence
  Description of Artificial Sequence: Synthetic oligonucleotide
acaacuggagggacgcugc

SEQ ID NO: 1764277 - RNA, 19 nt, Artificial Sequence
  Description of Artificial Sequence: Synthetic oligonucleotide
agcaaaagguccccugaug

SEQ ID NO: 1764278 - RNA, 19 nt, Artificial Sequence
  Description of Artificial Sequence: Synthetic oligonucleotide
uccccugauggcuggagag

SEQ ID NO: 1764279 - RNA, 19 nt, Artificial Sequence
  Description of Artificial Sequence: Synthetic oligonucleotide
gacagaucauccaggacac

SEQ ID NO: 1764280 - RNA, 19 nt, Artificial Sequence
  Description of Artificial Sequence: Synthetic oligonucleotide
auauauacaccagaccuua

SEQ ID NO: 1764281 - RNA, 19 nt, Artificial Sequence
  Description of Artificial Sequence: Synthetic oligonucleotide
ucucauugucugaccaaca

SEQ ID NO: 1764282 - RNA, 19 nt, Artificial Sequence
  Description of Artificial Sequence: Synthetic oligonucleotide
cacaaugcaugcaucgauc

SEQ ID NO: 1764283 - RNA, 19 nt, Artificial Sequence
  Description of Artificial Sequence: Synthetic oligonucleotide
uaaggcucuggucccauau

SEQ ID NO: 1764284 - RNA, 19 nt, Artificial Sequence
  Description of Artificial Sequence: Synthetic oligonucleotide
auccaccggacauauucuc

SEQ ID NO: 1764285 - RNA, 19 nt, Artificial Sequence
  Description of Artificial Sequence: Synthetic oligonucleotide
ugaagauugcaaagacaau

SEQ ID NO: 1764286 - RNA, 19 nt, Artificial Sequence
  Description of Artificial Sequence: Synthetic oligonucleotide
uucaucuagagggacuagu

SEQ ID NO: 1764287 - RNA, 19 nt, Artificial Sequence
  Description of Artificial Sequence: Synthetic oligonucleotide
agggauagagcggaggucu

SEQ ID NO: 1764288 - RNA, 19 nt, Artificial Sequence
  Description of Artificial Sequence: Synthetic oligonucleotide
agagcacccugacucuugg

SEQ ID NO: 1764289 - RNA, 19 nt, Artificial Sequence
  Description of Artificial Sequence: Synthetic oligonucleotide
uugaccacccgaaggcucu

SEQ ID NO: 1764290 - RNA, 19 nt, Artificial Sequence
  Description of Artificial Sequence: Synthetic oligonucleotide
gacgacagaucauccagga

SEQ ID NO: 1764291 - RNA, 19 nt, Artificial Sequence
  Description of Artificial Sequence: Synthetic oligonucleotide
acgacagaucauccaggac

SEQ ID NO: 1764292 - RNA, 19 nt, Artificial Sequence
  Description of Artificial Sequence: Synthetic oligonucleotide
cucggggccggacaguugg

SEQ ID NO: 1764293 - RNA, 19 nt, Artificial Sequence
  Description of Artificial Sequence: Synthetic oligonucleotide
auacgagcaccaccagacg

SEQ ID NO: 1764294 - RNA, 19 nt, Artificial Sequence
  Description of Artificial Sequence: Synthetic oligonucleotide
cuuaggcagaagucagaag

SEQ ID NO: 1764295 - RNA, 19 nt, Artificial Sequence
  Description of Artificial Sequence: Synthetic oligonucleotide
ucacacacacacacacaca

SEQ ID NO: 1764296 - RNA, 19 nt, Artificial Sequence
  Description of Artificial Sequence: Synthetic oligonucleotide
cuagagggacuaguaaggc

SEQ ID NO: 1764297 - RNA, 19 nt, Artificial Sequence
  Description of Artificial Sequence: Synthetic oligonucleotide
ccaaauacgagcaccacca

SEQ ID NO: 1764298 - RNA, 19 nt, Artificial Sequence
  Description of Artificial Sequence: Synthetic oligonucleotide
aaacauucacacacacaca

SEQ ID NO: 1764299 - RNA, 19 nt, Artificial Sequence
  Description of Artificial Sequence: Synthetic oligonucleotide
acccgaaggcucuggcugc

SEQ ID NO: 1764300 - RNA, 19 nt, Artificial Sequence
  Description of Artificial Sequence: Synthetic oligonucleotide
cuagcuguccauguccgag

SEQ ID NO: 1764301 - RNA, 19 nt, Artificial Sequence
  Description of Artificial Sequence: Synthetic oligonucleotide
gacaacuggagggacgcug

SEQ ID NO: 1764302 - RNA, 19 nt, Artificial Sequence
  Description of Artificial Sequence: Synthetic oligonucleotide
cuuucgguaaagcaggcua

SEQ ID NO: 1764303 - RNA, 19 nt, Artificial Sequence
  Description of Artificial Sequence: Synthetic oligonucleotide
cuaucuugcaggccgccug

SEQ ID NO: 1764304 - RNA, 19 nt, Artificial Sequence
  Description of Artificial Sequence: Synthetic oligonucleotide
cuggccgguacccaaucgg

SEQ ID NO: 1764305 - RNA, 19 nt, Artificial Sequence
  Description of Artificial Sequence: Synthetic oligonucleotide
uggagaagcuccguagucu

SEQ ID NO: 1764306 - RNA, 19 nt, Artificial Sequence
  Description of Artificial Sequence: Synthetic oligonucleotide
ucgaucuccuucucauggc

SEQ ID NO: 1764307 - RNA, 19 nt, Artificial Sequence
  Description of Artificial Sequence: Synthetic oligonucleotide
guaagauggccugauucug

SEQ ID NO: 1764308 - RNA, 19 nt, Artificial Sequence
  Description of Artificial Sequence: Synthetic oligonucleotide
ugugaaggucucugcggcc

SEQ ID NO: 1764309 - RNA, 19 nt, Artificial Sequence
  Description of Artificial Sequence: Synthetic oligonucleotide
gauagggacggguggacaa

SEQ ID NO: 1764310 - RNA, 19 nt, Artificial Sequence
  Description of Artificial Sequence: Synthetic oligonucleotide
agguguauccccacagggg

SEQ ID NO: 1764311 - RNA, 19 nt, Artificial Sequence
  Description of Artificial Sequence: Synthetic oligonucleotide
accacccgaaggcucuggc

SEQ ID NO: 1764312 - RNA, 19 nt, Artificial Sequence
  Description of Artificial Sequence: Synthetic oligonucleotide
aucuagcuguccauguccg

SEQ ID NO: 1764313 - RNA, 19 nt, Artificial Sequence
  Description of Artificial Sequence: Synthetic oligonucleotide
uguccgagggcauugucuu

SEQ ID NO: 1764314 - RNA, 19 nt, Artificial Sequence
  Description of Artificial Sequence: Synthetic oligonucleotide
auuucaucuagagggacua

SEQ ID NO: 1764315 - RNA, 19 nt, Artificial Sequence
  Description of Artificial Sequence: Synthetic oligonucleotide
agggacgcugcacucagga

SEQ ID NO: 1764316 - RNA, 19 nt, Artificial Sequence
  Description of Artificial Sequence: Synthetic oligonucleotide
gaaaaggcugaggaaggca

SEQ ID NO: 1764317 - RNA, 19 nt, Artificial Sequence
  Description of Artificial Sequence: Synthetic oligonucleotide
cacccgaaggcucuggcug

SEQ ID NO: 1764318 - RNA, 19 nt, Artificial Sequence
  Description of Artificial Sequence: Synthetic oligonucleotide
uucgguaaagcaggcuagc

SEQ ID NO: 1764319 - RNA, 19 nt, Artificial Sequence
  Description of Artificial Sequence: Synthetic oligonucleotide
uugguauacuguaggugua

SEQ ID NO: 1764320 - RNA, 19 nt, Artificial Sequence
  Description of Artificial Sequence: Synthetic oligonucleotide
gcagccauagcacgaaggc

SEQ ID NO: 1764321 - RNA, 19 nt, Artificial Sequence
  Description of Artificial Sequence: Synthetic oligonucleotide
gacggguggacaaacuuuc

SEQ ID NO: 1764322 - RNA, 19 nt, Artificial Sequence
  Description of Artificial Sequence: Synthetic oligonucleotide
ugcacaaugcaugcaucga

SEQ ID NO: 1764323 - RNA, 19 nt, Artificial Sequence
  Description of Artificial Sequence: Synthetic oligonucleotide
aaauaggccccugggccug

SEQ ID NO: 1764324 - RNA, 19 nt, Artificial Sequence
  Description of Artificial Sequence: Synthetic oligonucleotide
acgagcaccaccagacgac

SEQ ID NO: 1764325 - RNA, 19 nt, Artificial Sequence
  Description of Artificial Sequence: Synthetic oligonucleotide
gucaaguauuuugaaggac

SEQ ID NO: 1764326 - RNA, 19 nt, Artificial Sequence
  Description of Artificial Sequence: Synthetic oligonucleotide
guauuuugaaggacaagaa

SEQ ID NO: 1764327 - RNA, 19 nt, Artificial Sequence
  Description of Artificial Sequence: Synthetic oligonucleotide
uccggguucggaccuucag

SEQ ID NO: 1764328 - RNA, 19 nt, Artificial Sequence
  Description of Artificial Sequence: Synthetic oligonucleotide
cuugaccacccgaaggcuc

SEQ ID NO: 1764329 - RNA, 19 nt, Artificial Sequence
  Description of Artificial Sequence: Synthetic oligonucleotide
caauccaguacaucaucca

SEQ ID NO: 1764330 - RNA, 19 nt, Artificial Sequence
  Description of Artificial Sequence: Synthetic oligonucleotide
gcauggagaagcuccguag

SEQ ID NO: 1764331 - RNA, 19 nt, Artificial Sequence
  Description of Artificial Sequence: Synthetic oligonucleotide
aggcuagcucccuuggugu

SEQ ID NO: 1764332 - RNA, 19 nt, Artificial Sequence
  Description of Artificial Sequence: Synthetic oligonucleotide
ucuugcaggccgccuggcc

SEQ ID NO: 1764333 - RNA, 19 nt, Artificial Sequence
  Description of Artificial Sequence: Synthetic oligonucleotide
gguucggaccuucagggac

SEQ ID NO: 1764334 - RNA, 19 nt, Artificial Sequence
  Description of Artificial Sequence: Synthetic oligonucleotide
aaagcaggcuagcucccuu

SEQ ID NO: 1764335 - RNA, 19 nt, Artificial Sequence
  Description of Artificial Sequence: Synthetic oligonucleotide
cagaagucagaaggggcgg

SEQ ID NO: 1764336 - RNA, 19 nt, Artificial Sequence
  Description of Artificial Sequence: Synthetic oligonucleotide
aucuugguaggugggagca

SEQ ID NO: 1764337 - RNA, 19 nt, Artificial Sequence
  Description of Artificial Sequence: Synthetic oligonucleotide
guggacaaacuuucgguaa

SEQ ID NO: 1764338 - RNA, 19 nt, Artificial Sequence
  Description of Artificial Sequence: Synthetic oligonucleotide
acaccauuagguauuuuau

SEQ ID NO: 1764339 - RNA, 19 nt, Artificial Sequence
  Description of Artificial Sequence: Synthetic oligonucleotide
uagagcggaggucuugcau

SEQ ID NO: 1764340 - RNA, 19 nt, Artificial Sequence
  Description of Artificial Sequence: Synthetic oligonucleotide
gguuaucucauugucugac

SEQ ID NO: 1764341 - RNA, 19 nt, Artificial Sequence
  Description of Artificial Sequence: Synthetic oligonucleotide
agaccuuagagaaggcugu

SEQ ID NO: 1764342 - RNA, 19 nt, Artificial Sequence
  Description of Artificial Sequence: Synthetic oligonucleotide
cagaaucuagcuguccaug

SEQ ID NO: 1764343 - RNA, 19 nt, Artificial Sequence
  Description of Artificial Sequence: Synthetic oligonucleotide
uuucaucuagagggacuag

SEQ ID NO: 1764344 - RNA, 19 nt, Artificial Sequence
  Description of Artificial Sequence: Synthetic oligonucleotide
guguagcagcaaaaggucc

SEQ ID NO: 1764345 - RNA, 19 nt, Artificial Sequence
  Description of Artificial Sequence: Synthetic oligonucleotide
accaacacucauccucugu

SEQ ID NO: 1764346 - RNA, 19 nt, Artificial Sequence
  Description of Artificial Sequence: Synthetic oligonucleotide
gucagggauagagcggagg

SEQ ID NO: 1764347 - RNA, 19 nt, Artificial Sequence
  Description of Artificial Sequence: Synthetic oligonucleotide
ggucccauauauggaaagg

SEQ ID NO: 1764348 - RNA, 19 nt, Artificial Sequence
  Description of Artificial Sequence: Synthetic oligonucleotide
cugugucacuaucuugcag

SEQ ID NO: 1764349 - RNA, 19 nt, Artificial Sequence
  Description of Artificial Sequence: Synthetic oligonucleotide
cacccugacucuugguagc

SEQ ID NO: 1764350 - RNA, 19 nt, Artificial Sequence
  Description of Artificial Sequence: Synthetic oligonucleotide
gguguaaggugagagcagc

SEQ ID NO: 1764351 - RNA, 19 nt, Artificial Sequence
  Description of Artificial Sequence: Synthetic oligonucleotide
aagagccgaguggcgcugc

SEQ ID NO: 1764352 - RNA, 19 nt, Artificial Sequence
  Description of Artificial Sequence: Synthetic oligonucleotide
ugaggccgcgauguugagg

SEQ ID NO: 1764353 - RNA, 19 nt, Artificial Sequence
  Description of Artificial Sequence: Synthetic oligonucleotide
accgugaggugcccucucg

SEQ ID NO: 1764354 - RNA, 19 nt, Artificial Sequence
  Description of Artificial Sequence: Synthetic oligonucleotide
caaauacgagcaccaccag

SEQ ID NO: 1764355 - RNA, 19 nt, Artificial Sequence
  Description of Artificial Sequence: Synthetic oligonucleotide
uuccagguagaggggaucu

SEQ ID NO: 1764356 - RNA, 19 nt, Artificial Sequence
  Description of Artificial Sequence: Synthetic oligonucleotide
agcugcgcuccuuugccug

SEQ ID NO: 1764357 - RNA, 19 nt, Artificial Sequence
  Description of Artificial Sequence: Synthetic oligonucleotide
acauauucucgaauguuuu

SEQ ID NO: 1764358 - RNA, 19 nt, Artificial Sequence
  Description of Artificial Sequence: Synthetic oligonucleotide
accgugugccccuuaggca

SEQ ID NO: 1764359 - RNA, 19 nt, Artificial Sequence
  Description of Artificial Sequence: Synthetic oligonucleotide
gcaugcaucgaucuccuuc

SEQ ID NO: 1764360 - RNA, 19 nt, Artificial Sequence
  Description of Artificial Sequence: Synthetic oligonucleotide
cacacacacacacauauau

SEQ ID NO: 1764361 - RNA, 19 nt, Artificial Sequence
  Description of Artificial Sequence: Synthetic oligonucleotide
caugcaucgaucuccuucu

SEQ ID NO: 1764362 - RNA, 19 nt, Artificial Sequence
  Description of Artificial Sequence: Synthetic oligonucleotide
cccaaauacgagcaccacc

SEQ ID NO: 1764363 - RNA, 19 nt, Artificial Sequence
  Description of Artificial Sequence: Synthetic oligonucleotide
ucuagcuguccauguccga

SEQ ID NO: 1764364 - RNA, 19 nt, Artificial Sequence
  Description of Artificial Sequence: Synthetic oligonucleotide
gggguaucugaucuuccag

SEQ ID NO: 1764365 - RNA, 19 nt, Artificial Sequence
  Description of Artificial Sequence: Synthetic oligonucleotide
cuucucauggcgggauagg

SEQ ID NO: 1764366 - RNA, 19 nt, Artificial Sequence
  Description of Artificial Sequence: Synthetic oligonucleotide
uucggaccuucagggaccg

SEQ ID NO: 1764367 - RNA, 19 nt, Artificial Sequence
  Description of Artificial Sequence: Synthetic oligonucleotide
gguguagcagcaaaagguc

SEQ ID NO: 1764368 - RNA, 19 nt, Artificial Sequence
  Description of Artificial Sequence: Synthetic oligonucleotide
ucuugguagcagccugcac

SEQ ID NO: 1764369 - RNA, 19 nt, Artificial Sequence
  Description of Artificial Sequence: Synthetic oligonucleotide
cacacacacacacacauau

SEQ ID NO: 1764370 - RNA, 19 nt, Artificial Sequence
  Description of Artificial Sequence: Synthetic oligonucleotide
gaccuucagggaccgugag

SEQ ID NO: 1764371 - RNA, 19 nt, Artificial Sequence
  Description of Artificial Sequence: Synthetic oligonucleotide
gcugguguagcagcaaaag

SEQ ID NO: 1764372 - RNA, 19 nt, Artificial Sequence
  Description of Artificial Sequence: Synthetic oligonucleotide
ccucuugaccacccgaagg

SEQ ID NO: 1764373 - RNA, 19 nt, Artificial Sequence
  Description of Artificial Sequence: Synthetic oligonucleotide
ccaacacucauccucugug

SEQ ID NO: 1764374 - RNA, 19 nt, Artificial Sequence
  Description of Artificial Sequence: Synthetic oligonucleotide
caucgaucuccuucucaug

SEQ ID NO: 1764375 - RNA, 19 nt, Artificial Sequence
  Description of Artificial Sequence: Synthetic oligonucleotide
cacgaaggccaucuugauc

SEQ ID NO: 1764376 - RNA, 19 nt, Artificial Sequence
  Description of Artificial Sequence: Synthetic oligonucleotide
ucugaccaacacucauccu

SEQ ID NO: 1764377 - RNA, 19 nt, Artificial Sequence
  Description of Artificial Sequence: Synthetic oligonucleotide
ugguauacuguagguguau

SEQ ID NO: 1764378 - RNA, 19 nt, Artificial Sequence
  Description of Artificial Sequence: Synthetic oligonucleotide
gugucagggauagagcgga

SEQ ID NO: 1764379 - RNA, 19 nt, Artificial Sequence
  Description of Artificial Sequence: Synthetic oligonucleotide
ugacucuugguagcagccu

SEQ ID NO: 1764380 - RNA, 19 nt, Artificial Sequence
  Description of Artificial Sequence: Synthetic oligonucleotide
gguugaacuuuugauuuca

SEQ ID NO: 1764381 - RNA, 19 nt, Artificial Sequence
  Description of Artificial Sequence: Synthetic oligonucleotide
guucggaccuucagggacc

SEQ ID NO: 1764382 - RNA, 19 nt, Artificial Sequence
  Description of Artificial Sequence: Synthetic oligonucleotide
gaagcauaugcaggauaca

SEQ ID NO: 1764383 - RNA, 19 nt, Artificial Sequence
  Description of Artificial Sequence: Synthetic oligonucleotide
cacaccgugugccccuuag

SEQ ID NO: 1764384 - RNA, 19 nt, Artificial Sequence
  Description of Artificial Sequence: Synthetic oligonucleotide
guaaagcaggcuagcuccc

SEQ ID NO: 1764385 - RNA, 19 nt, Artificial Sequence
  Description of Artificial Sequence: Synthetic oligonucleotide
agacaauccaguacaucau

SEQ ID NO: 1764386 - RNA, 19 nt, Artificial Sequence
  Description of Artificial Sequence: Synthetic oligonucleotide
auguccgagggcauugucu

SEQ ID NO: 1764387 - RNA, 19 nt, Artificial Sequence
  Description of Artificial Sequence: Synthetic oligonucleotide
aggcuccgcuucccgaaac

SEQ ID NO: 1764388 - RNA, 19 nt, Artificial Sequence
  Description of Artificial Sequence: Synthetic oligonucleotide
uaaagcaggcuagcucccu

SEQ ID NO: 1764389 - RNA, 19 nt, Artificial Sequence
  Description of Artificial Sequence: Synthetic oligonucleotide
cauauauacaccagaccuu

SEQ ID NO: 1764390 - RNA, 19 nt, Artificial Sequence
  Description of Artificial Sequence: Synthetic oligonucleotide
gagcauggucucauagcug

SEQ ID NO: 1764391 - RNA, 19 nt, Artificial Sequence
  Description of Artificial Sequence: Synthetic oligonucleotide
gggacuaguaaggcucugg

SEQ ID NO: 1764392 - RNA, 19 nt, Artificial Sequence
  Description of Artificial Sequence: Synthetic oligonucleotide
cuagcucccuugguguaag

SEQ ID NO: 1764393 - RNA, 19 nt, Artificial Sequence
  Description of Artificial Sequence: Synthetic oligonucleotide
ccgugugccccuuaggcag

SEQ ID NO: 1764394 - RNA, 19 nt, Artificial Sequence
  Description of Artificial Sequence: Synthetic oligonucleotide
aauaggccccugggccugg

SEQ ID NO: 1764395 - RNA, 19 nt, Artificial Sequence
  Description of Artificial Sequence: Synthetic oligonucleotide
cacacacacacacacacau

SEQ ID NO: 1764396 - RNA, 19 nt, Artificial Sequence
  Description of Artificial Sequence: Synthetic oligonucleotide
auucacacacacacacaca

SEQ ID NO: 1764397 - RNA, 19 nt, Artificial Sequence
  Description of Artificial Sequence: Synthetic oligonucleotide
accuuagagaaggcuguca

SEQ ID NO: 1764398 - RNA, 19 nt, Artificial Sequence
  Description of Artificial Sequence: Synthetic oligonucleotide
acauucacacacacacaca

SEQ ID NO: 1764399 - RNA, 19 nt, Artificial Sequence
  Description of Artificial Sequence: Synthetic oligonucleotide
gguggacaaacuuucggua

SEQ ID NO: 1764400 - RNA, 19 nt, Artificial Sequence
  Description of Artificial Sequence: Synthetic oligonucleotide
gcaaagagccgaguggcgc

SEQ ID NO: 1764401 - RNA, 19 nt, Artificial Sequence
  Description of Artificial Sequence: Synthetic oligonucleotide
gaccaacacucauccucug

SEQ ID NO: 1764402 - RNA, 19 nt, Artificial Sequence
  Description of Artificial Sequence: Synthetic oligonucleotide
auggcuggagagguaagau

SEQ ID NO: 1764403 - RNA, 19 nt, Artificial Sequence
  Description of Artificial Sequence: Synthetic oligonucleotide
ggagggacgcugcacucag

SEQ ID NO: 1764404 - RNA, 19 nt, Artificial Sequence
  Description of Artificial Sequence: Synthetic oligonucleotide
guguaaggugagagcagcc

SEQ ID NO: 1764405 - RNA, 19 nt, Artificial Sequence
  Description of Artificial Sequence: Synthetic oligonucleotide
agcagcugaggccgcgaug

SEQ ID NO: 1764406 - RNA, 19 nt, Artificial Sequence
  Description of Artificial Sequence: Synthetic oligonucleotide
uccgagggcauugucuuuu

SEQ ID NO: 1764407 - RNA, 19 nt, Artificial Sequence
  Description of Artificial Sequence: Synthetic oligonucleotide
uggagggacgcugcacuca

SEQ ID NO: 1764408 - RNA, 19 nt, Artificial Sequence
  Description of Artificial Sequence: Synthetic oligonucleotide
cauagcacgaaggccaucu

SEQ ID NO: 1764409 - RNA, 19 nt, Artificial Sequence
  Description of Artificial Sequence: Synthetic oligonucleotide
acacaacugguugaacuuu

SEQ ID NO: 1764410 - RNA, 19 nt, Artificial Sequence
  Description of Artificial Sequence: Synthetic oligonucleotide
gcgggauagggacgggugg

SEQ ID NO: 1764411 - RNA, 19 nt, Artificial Sequence
  Description of Artificial Sequence: Synthetic oligonucleotide
guaaggugagagcagccau

SEQ ID NO: 1764412 - RNA, 19 nt, Artificial Sequence
  Description of Artificial Sequence: Synthetic oligonucleotide
cccauauauggaaagggaa

SEQ ID NO: 1764413 - RNA, 19 nt, Artificial Sequence
  Description of Artificial Sequence: Synthetic oligonucleotide
agaaggggcggagcccagg

SEQ ID NO: 1764414 - RNA, 19 nt, Artificial Sequence
  Description of Artificial Sequence: Synthetic oligonucleotide
ugcgucgggguaucugauc

SEQ ID NO: 1764415 - RNA, 19 nt, Artificial Sequence
  Description of Artificial Sequence: Synthetic oligonucleotide
acaccagaccuuagagaag

SEQ ID NO: 1764416 - RNA, 19 nt, Artificial Sequence
  Description of Artificial Sequence: Synthetic oligonucleotide
gguagaggggaucuuggua

SEQ ID NO: 1764417 - RNA, 19 nt, Artificial Sequence
  Description of Artificial Sequence: Synthetic oligonucleotide
agaucauccaggacaccau

SEQ ID NO: 1764418 - RNA, 19 nt, Artificial Sequence
  Description of Artificial Sequence: Synthetic oligonucleotide
gcagcaaaagguccccuga

SEQ ID NO: 1764419 - RNA, 19 nt, Artificial Sequence
  Description of Artificial Sequence: Synthetic oligonucleotide
acggguggacaaacuuucg

SEQ ID NO: 1764420 - RNA, 19 nt, Artificial Sequence
  Description of Artificial Sequence: Synthetic oligonucleotide
guacaucauccaccggaca

SEQ ID NO: 1764421 - RNA, 19 nt, Artificial Sequence
  Description of Artificial Sequence: Synthetic oligonucleotide
aggcaauaaauaggccccu

SEQ ID NO: 1764422 - RNA, 19 nt, Artificial Sequence
  Description of Artificial Sequence: Synthetic oligonucleotide
gcggaggucuugcauggag

SEQ ID NO: 1764423 - RNA, 19 nt, Artificial Sequence
  Description of Artificial Sequence: Synthetic oligonucleotide
uaguaaggcucugguccca

SEQ ID NO: 1764424 - RNA, 19 nt, Artificial Sequence
  Description of Artificial Sequence: Synthetic oligonucleotide
gaaggccaucuugaucuca

SEQ ID NO: 1764425 - RNA, 19 nt, Artificial Sequence
  Description of Artificial Sequence: Synthetic oligonucleotide
cuccgcuucccgaaacuga

SEQ ID NO: 1764426 - RNA, 19 nt, Artificial Sequence
  Description of Artificial Sequence: Synthetic oligonucleotide
gugcccucucgaaucaaug

SEQ ID NO: 1764427 - RNA, 19 nt, Artificial Sequence
  Description of Artificial Sequence: Synthetic oligonucleotide
cugauggcuggagagguaa

SEQ ID NO: 1764428 - RNA, 19 nt, Artificial Sequence
  Description of Artificial Sequence: Synthetic oligonucleotide
uagcugcgcuccuuugccu

SEQ ID NO: 1764429 - RNA, 19 nt, Artificial Sequence
  Description of Artificial Sequence: Synthetic oligonucleotide
ccggguucggaccuucagg

SEQ ID NO: 1764430 - RNA, 19 nt, Artificial Sequence
  Description of Artificial Sequence: Synthetic oligonucleotide
cauguccgagggcauuguc

SEQ ID NO: 1764431 - RNA, 19 nt, Artificial Sequence
  Description of Artificial Sequence: Synthetic oligonucleotide
acacacacacacauauaua

SEQ ID NO: 1764432 - RNA, 19 nt, Artificial Sequence
  Description of Artificial Sequence: Synthetic oligonucleotide
ccccuuaggcagaagucag

SEQ ID NO: 1764433 - RNA, 19 nt, Artificial Sequence
  Description of Artificial Sequence: Synthetic oligonucleotide
uccugacagccuuggggau

SEQ ID NO: 1764434 - RNA, 19 nt, Artificial Sequence
  Description of Artificial Sequence: Synthetic oligonucleotide
uccuucucauggcgggaua

SEQ ID NO: 1764435 - RNA, 19 nt, Artificial Sequence
  Description of Artificial Sequence: Synthetic oligonucleotide
ggguggacaaacuuucggu

SEQ ID NO: 1764436 - RNA, 19 nt, Artificial Sequence
  Description of Artificial Sequence: Synthetic oligonucleotide
cuggucccauauauggaaa

SEQ ID NO: 1764437 - RNA, 19 nt, Artificial Sequence
  Description of Artificial Sequence: Synthetic oligonucleotide
ggcaaagagccgaguggcg

SEQ ID NO: 1764438 - RNA, 19 nt, Artificial Sequence
  Description of Artificial Sequence: Synthetic oligonucleotide
gaccuuagagaaggcuguc

SEQ ID NO: 1764439 - RNA, 19 nt, Artificial Sequence
  Description of Artificial Sequence: Synthetic oligonucleotide
ggggaucuugguagguggg

SEQ ID NO: 1764440 - RNA, 19 nt, Artificial Sequence
  Description of Artificial Sequence: Synthetic oligonucleotide
cccgaaacugagcaugguc

SEQ ID NO: 1764441 - RNA, 19 nt, Artificial Sequence
  Description of Artificial Sequence: Synthetic oligonucleotide
gguauacuguagguguauc

SEQ ID NO: 1764442 - RNA, 19 nt, Artificial Sequence
  Description of Artificial Sequence: Synthetic oligonucleotide
uuccggguucggaccuuca

SEQ ID NO: 1764443 - RNA, 19 nt, Artificial Sequence
  Description of Artificial Sequence: Synthetic oligonucleotide
gaccacccgaaggcucugg

SEQ ID NO: 1764444 - RNA, 19 nt, Artificial Sequence
  Description of Artificial Sequence: Synthetic oligonucleotide
aggccgccuggccgguacc

SEQ ID NO: 1764445 - RNA, 19 nt, Artificial Sequence
  Description of Artificial Sequence: Synthetic oligonucleotide
cagggauagagcggagguc

SEQ ID NO: 1764446 - RNA, 19 nt, Artificial Sequence
  Description of Artificial Sequence: Synthetic oligonucleotide
ucucugcggccaugaagau

SEQ ID NO: 1764447 - RNA, 19 nt, Artificial Sequence
  Description of Artificial Sequence: Synthetic oligonucleotide
auagcacgaaggccaucuu

SEQ ID NO: 1764448 - RNA, 19 nt, Artificial Sequence
  Description of Artificial Sequence: Synthetic oligonucleotide
uagcagcaaaagguccccu

SEQ ID NO: 1764449 - RNA, 19 nt, Artificial Sequence
  Description of Artificial Sequence: Synthetic oligonucleotide
gugccccuuaggcagaagu

SEQ ID NO: 1764450 - RNA, 19 nt, Artificial Sequence
  Description of Artificial Sequence: Synthetic oligonucleotide
uuuccggguucggaccuuc

SEQ ID NO: 1764451 - RNA, 19 nt, Artificial Sequence
  Description of Artificial Sequence: Synthetic oligonucleotide
cggguggacaaacuuucgg

SEQ ID NO: 1764452 - RNA, 19 nt, Artificial Sequence
  Description of Artificial Sequence: Synthetic oligonucleotide
ccgaaacugagcauggucu

SEQ ID NO: 1764453 - RNA, 19 nt, Artificial Sequence
  Description of Artificial Sequence: Synthetic oligonucleotide
caacacucauccucugugu

SEQ ID NO: 1764454 - RNA, 19 nt, Artificial Sequence
  Description of Artificial Sequence: Synthetic oligonucleotide
auagggacggguggacaaa

SEQ ID NO: 1764455 - RNA, 19 nt, Artificial Sequence
  Description of Artificial Sequence: Synthetic oligonucleotide
ccuuagagaaggcugucaa

SEQ ID NO: 1764456 - RNA, 19 nt, Artificial Sequence
  Description of Artificial Sequence: Synthetic oligonucleotide
caccauccugacagccuug

SEQ ID NO: 1764457 - RNA, 19 nt, Artificial Sequence
  Description of Artificial Sequence: Synthetic oligonucleotide
cauccaccggacauauucu

SEQ ID NO: 1764458 - RNA, 19 nt, Artificial Sequence
  Description of Artificial Sequence: Synthetic oligonucleotide
ggacuaguaaggcucuggu

SEQ ID NO: 1764459 - RNA, 19 nt, Artificial Sequence
  Description of Artificial Sequence: Synthetic oligonucleotide
gccaaacaccauuagguau

SEQ ID NO: 1764460 - RNA, 19 nt, Artificial Sequence
  Description of Artificial Sequence: Synthetic oligonucleotide
gucugcgucgggguaucug

SEQ ID NO: 1764461 - RNA, 19 nt, Artificial Sequence
  Description of Artificial Sequence: Synthetic oligonucleotide
ucccgaaacugagcauggu

SEQ ID NO: 1764462 - RNA, 19 nt, Artificial Sequence
  Description of Artificial Sequence: Synthetic oligonucleotide
agcugguguagcagcaaaa

SEQ ID NO: 1764463 - RNA, 19 nt, Artificial Sequence
  Description of Artificial Sequence: Synthetic oligonucleotide
ggaaugaacacaacugguu

SEQ ID NO: 1764464 - RNA, 19 nt, Artificial Sequence
  Description of Artificial Sequence: Synthetic oligonucleotide
gagggacgcugcacucagg

SEQ ID NO: 1764465 - RNA, 19 nt, Artificial Sequence
  Description of Artificial Sequence: Synthetic oligonucleotide
gggacgcugcacucaggag

SEQ ID NO: 1764466 - RNA, 19 nt, Artificial Sequence
  Description of Artificial Sequence: Synthetic oligonucleotide
uggcgggauagggacgggu

SEQ ID NO: 1764467 - RNA, 19 nt, Artificial Sequence
  Description of Artificial Sequence: Synthetic oligonucleotide
caccaccagacgacagauc

SEQ ID NO: 1764468 - RNA, 19 nt, Artificial Sequence
  Description of Artificial Sequence: Synthetic oligonucleotide
cgaaacugagcauggucuc

SEQ ID NO: 1764469 - RNA, 19 nt, Artificial Sequence
  Description of Artificial Sequence: Synthetic oligonucleotide
acccugacucuugguagca

SEQ ID NO: 1764470 - RNA, 19 nt, Artificial Sequence
  Description of Artificial Sequence: Synthetic oligonucleotide
ggccgguacccaaucgggg

SEQ ID NO: 1764471 - RNA, 19 nt, Artificial Sequence
  Description of Artificial Sequence: Synthetic oligonucleotide
gaccgugaggugcccucuc

SEQ ID NO: 1764472 - RNA, 19 nt, Artificial Sequence
  Description of Artificial Sequence: Synthetic oligonucleotide
ggcgggauagggacgggug

SEQ ID NO: 1764473 - RNA, 19 nt, Artificial Sequence
  Description of Artificial Sequence: Synthetic oligonucleotide
gccccuuaggcagaaguca

SEQ ID NO: 1764474 - RNA, 19 nt, Artificial Sequence
  Description of Artificial Sequence: Synthetic oligonucleotide
agggacuaguaaggcucug

SEQ ID NO: 1764475 - RNA, 19 nt, Artificial Sequence
  Description of Artificial Sequence: Synthetic oligonucleotide
cauaugcaggauacagcau

SEQ ID NO: 1764476 - RNA, 19 nt, Artificial Sequence
  Description of Artificial Sequence: Synthetic oligonucleotide
cucuugguagcagccugca

SEQ ID NO: 1764477 - RNA, 19 nt, Artificial Sequence
  Description of Artificial Sequence: Synthetic oligonucleotide
ccaccggacauauucucga

SEQ ID NO: 1764478 - RNA, 19 nt, Artificial Sequence
  Description of Artificial Sequence: Synthetic oligonucleotide
ugaccacccgaaggcucug

SEQ ID NO: 1764479 - RNA, 19 nt, Artificial Sequence
  Description of Artificial Sequence: Synthetic oligonucleotide
cagaaggggcggagcccag

SEQ ID NO: 1764480 - RNA, 19 nt, Artificial Sequence
  Description of Artificial Sequence: Synthetic oligonucleotide
acacacacacacacauaua

SEQ ID NO: 1764481 - RNA, 19 nt, Artificial Sequence
  Description of Artificial Sequence: Synthetic oligonucleotide
gagggacuaguaaggcucu

SEQ ID NO: 1764482 - RNA, 19 nt, Artificial Sequence
  Description of Artificial Sequence: Synthetic oligonucleotide
ccaaacaccauuagguauu

SEQ ID NO: 1764483 - RNA, 19 nt, Artificial Sequence
  Description of Artificial Sequence: Synthetic oligonucleotide
ccuggccgguacccaaucg

SEQ ID NO: 1764484 - RNA, 19 nt, Artificial Sequence
  Description of Artificial Sequence: Synthetic oligonucleotide
gucuugcauggagaagcuc

SEQ ID NO: 1764485 - RNA, 19 nt, Artificial Sequence
  Description of Artificial Sequence: Synthetic oligonucleotide
acacacacacacacacaua

SEQ ID NO: 1764486 - RNA, 19 nt, Artificial Sequence
  Description of Artificial Sequence: Synthetic oligonucleotide
gaccacaccgugugccccu

SEQ ID NO: 1764487 - RNA, 19 nt, Artificial Sequence
  Description of Artificial Sequence: Synthetic oligonucleotide
uggccugauucugcagaau

SEQ ID NO: 1764488 - RNA, 19 nt, Artificial Sequence
  Description of Artificial Sequence: Synthetic oligonucleotide
gugaggugcccucucgaau

SEQ ID NO: 1764489 - RNA, 19 nt, Artificial Sequence
  Description of Artificial Sequence: Synthetic oligonucleotide
aggccaucuugaucucaua

SEQ ID NO: 1764490 - RNA, 19 nt, Artificial Sequence
  Description of Artificial Sequence: Synthetic oligonucleotide
caccggacauauucucgaa

SEQ ID NO: 1764491 - RNA, 19 nt, Artificial Sequence
  Description of Artificial Sequence: Synthetic oligonucleotide
gcacaaugcaugcaucgau

SEQ ID NO: 1764492 - RNA, 19 nt, Artificial Sequence
  Description of Artificial Sequence: Synthetic oligonucleotide
gcgucgggguaucugaucu

SEQ ID NO: 1764493 - RNA, 19 nt, Artificial Sequence
  Description of Artificial Sequence: Synthetic oligonucleotide
agggacggguggacaaacu

SEQ ID NO: 1764494 - RNA, 19 nt, Artificial Sequence
  Description of Artificial Sequence: Synthetic oligonucleotide
gccgcgauguugaggcucc

SEQ ID NO: 1764495 - RNA, 19 nt, Artificial Sequence
  Description of Artificial Sequence: Synthetic oligonucleotide
gggaccgugaggugcccuc

SEQ ID NO: 1764496 - RNA, 19 nt, Artificial Sequence
  Description of Artificial Sequence: Synthetic oligonucleotide
ggagaagcuccguagucuu

SEQ ID NO: 1764497 - RNA, 19 nt, Artificial Sequence
  Description of Artificial Sequence: Synthetic oligonucleotide
uuuuccggguucggaccuu

SEQ ID NO: 1764498 - RNA, 19 nt, Artificial Sequence
  Description of Artificial Sequence: Synthetic oligonucleotide
ggaccacaccgugugcccc

SEQ ID NO: 1764499 - RNA, 19 nt, Artificial Sequence
  Description of Artificial Sequence: Synthetic oligonucleotide
gggaucuugguagguggga

SEQ ID NO: 1764500 - RNA, 19 nt, Artificial Sequence
  Description of Artificial Sequence: Synthetic oligonucleotide
gcuguccauguccgagggc

SEQ ID NO: 1764501 - RNA, 19 nt, Artificial Sequence
  Description of Artificial Sequence: Synthetic oligonucleotide
auggcgggauagggacggg

SEQ ID NO: 1764502 - RNA, 19 nt, Artificial Sequence
  Description of Artificial Sequence: Synthetic oligonucleotide
cucgaaucaauggcuuccu

SEQ ID NO: 1764503 - RNA, 19 nt, Artificial Sequence
  Description of Artificial Sequence: Synthetic oligonucleotide
ggaccuucagggaccguga

SEQ ID NO: 1764504 - RNA, 19 nt, Artificial Sequence
  Description of Artificial Sequence: Synthetic oligonucleotide
cguagucuuccagcuagag

SEQ ID NO: 1764505 - RNA, 19 nt, Artificial Sequence
  Description of Artificial Sequence: Synthetic oligonucleotide
cgcuucccgaaacugagca

SEQ ID NO: 1764506 - RNA, 19 nt, Artificial Sequence
  Description of Artificial Sequence: Synthetic oligonucleotide
ggacauauucucgaauguu

SEQ ID NO: 1764507 - RNA, 19 nt, Artificial Sequence
  Description of Artificial Sequence: Synthetic oligonucleotide
guaaggcucuggucccaua

SEQ ID NO: 1764508 - RNA, 19 nt, Artificial Sequence
  Description of Artificial Sequence: Synthetic oligonucleotide
gggauagggacggguggac

SEQ ID NO: 1764509 - RNA, 19 nt, Artificial Sequence
  Description of Artificial Sequence: Synthetic oligonucleotide
caucauccaccggacauau

SEQ ID NO: 1764510 - RNA, 19 nt, Artificial Sequence
  Description of Artificial Sequence: Synthetic oligonucleotide
ggguucggaccuucaggga

SEQ ID NO: 1764511 - RNA, 19 nt, Artificial Sequence
  Description of Artificial Sequence: Synthetic oligonucleotide
gguccccugauggcuggag

SEQ ID NO: 1764512 - RNA, 19 nt, Artificial Sequence
  Description of Artificial Sequence: Synthetic oligonucleotide
ggccggacaguuggcuggg

SEQ ID NO: 1764513 - RNA, 19 nt, Artificial Sequence
  Description of Artificial Sequence: Synthetic oligonucleotide
cggaccuucagggaccgug

SEQ ID NO: 1764514 - RNA, 19 nt, Artificial Sequence
  Description of Artificial Sequence: Synthetic oligonucleotide
cagcaaaagguccccugau

SEQ ID NO: 1764515 - RNA, 19 nt, Artificial Sequence
  Description of Artificial Sequence: Synthetic oligonucleotide
ccgcuucccgaaacugagc

SEQ ID NO: 1764516 - RNA, 19 nt, Artificial Sequence
  Description of Artificial Sequence: Synthetic oligonucleotide
agggaccgugaggugcccu

SEQ ID NO: 1764517 - RNA, 19 nt, Artificial Sequence
  Description of Artificial Sequence: Synthetic oligonucleotide
ggccgcgauguugaggcuc

SEQ ID NO: 1764518 - RNA, 19 nt, Artificial Sequence
  Description of Artificial Sequence: Synthetic oligonucleotide
aggccgcgauguugaggcu

SEQ ID NO: 1764519 - RNA, 19 nt, Artificial Sequence
  Description of Artificial Sequence: Synthetic oligonucleotide
cuccguagucuuccagcua

SEQ ID NO: 1764520 - RNA, 19 nt, Artificial Sequence
  Description of Artificial Sequence: Synthetic oligonucleotide
gggacggguggacaaacuu

SEQ ID NO: 1764521 - RNA, 19 nt, Artificial Sequence
  Description of Artificial Sequence: Synthetic oligonucleotide
cccuuaggcagaagucaga

SEQ ID NO: 1764522 - RNA, 19 nt, Artificial Sequence
  Description of Artificial Sequence: Synthetic oligonucleotide
cggccaugaagauugcaaa

SEQ ID NO: 1764523 - RNA, 19 nt, Artificial Sequence
  Description of Artificial Sequence: Synthetic oligonucleotide
cagggaccgugaggugccc

SEQ ID NO: 1764524 - RNA, 19 nt, Artificial Sequence
  Description of Artificial Sequence: Synthetic oligonucleotide
gcuagcucccuugguguaa

SEQ ID NO: 1764525 - RNA, 19 nt, Artificial Sequence
  Description of Artificial Sequence: Synthetic oligonucleotide
ggcuagcucccuuggugua

SEQ ID NO: 1764526 - RNA, 19 nt, Artificial Sequence
  Description of Artificial Sequence: Synthetic oligonucleotide
ggucuugcauggagaagcu

SEQ ID NO: 1764527 - RNA, 19 nt, Artificial Sequence
  Description of Artificial Sequence: Synthetic oligonucleotide
cccgaaggcucuggcugcg

SEQ ID NO: 1764528 - RNA, 19 nt, Artificial Sequence
  Description of Artificial Sequence: Synthetic oligonucleotide
cagcuagagcacccugacu

SEQ ID NO: 1764529 - RNA, 19 nt, Artificial Sequence
  Description of Artificial Sequence: Synthetic oligonucleotide
ggacggguggacaaacuuu

SEQ ID NO: 1764530 - RNA, 19 nt, Artificial Sequence
  Description of Artificial Sequence: Synthetic oligonucleotide
aggugcccucucgaaucaa

SEQ ID NO: 1764531 - RNA, 19 nt, Artificial Sequence
  Description of Artificial Sequence: Synthetic oligonucleotide
ugcaggccgccuggccggu

SEQ ID NO: 1764532 - RNA, 19 nt, Artificial Sequence
  Description of Artificial Sequence: Synthetic oligonucleotide
cccugacucuugguagcag

SEQ ID NO: 1764533 - RNA, 19 nt, Artificial Sequence
  Description of Artificial Sequence: Synthetic oligonucleotide
gccuggccgguacccaauc

SEQ ID NO: 1764534 - RNA, 19 nt, Artificial Sequence
  Description of Artificial Sequence: Synthetic oligonucleotide
ggcuccgcuucccgaaacu

SEQ ID NO: 1764535 - RNA, 19 nt, Artificial Sequence
  Description of Artificial Sequence: Synthetic oligonucleotide
cuagagcacccugacucuu

SEQ ID NO: 1764536 - RNA, 19 nt, Artificial Sequence
  Description of Artificial Sequence: Synthetic oligonucleotide
ucggaccuucagggaccgu

SEQ ID NO: 1764537 - RNA, 19 nt, Artificial Sequence
  Description of Artificial Sequence: Synthetic oligonucleotide
cuccuucucauggcgggau

SEQ ID NO: 1764538 - RNA, 19 nt, Artificial Sequence
  Description of Artificial Sequence: Synthetic oligonucleotide
gcgcuccuuugccugcaca

SEQ ID NO: 1764539 - RNA, 19 nt, Artificial Sequence
  Description of Artificial Sequence: Synthetic oligonucleotide
gcuucccgaaacugagcau

SEQ ID NO: 1764540 - RNA, 19 nt, Artificial Sequence
  Description of Artificial Sequence: Synthetic oligonucleotide
cgaaggccaucuugaucuc

SEQ ID NO: 1764541 - RNA, 19 nt, Artificial Sequence
  Description of Artificial Sequence: Synthetic oligonucleotide
cugcgucgggguaucugau

SEQ ID NO: 1764542 - RNA, 19 nt, Artificial Sequence
  Description of Artificial Sequence: Synthetic oligonucleotide
cgugaggugcccucucgaa

SEQ ID NO: 1764543 - RNA, 19 nt, Artificial Sequence
  Description of Artificial Sequence: Synthetic oligonucleotide
accacaccgugugccccuu

SEQ ID NO: 1764544 - RNA, 19 nt, Artificial Sequence
  Description of Artificial Sequence: Synthetic oligonucleotide
gcugcggcccagaggcuuc

SEQ ID NO: 1764545 - RNA, 19 nt, Artificial Sequence
  Description of Artificial Sequence: Synthetic oligonucleotide
ccgugaggugcccucucga

SEQ ID NO: 1764546 - RNA, 19 nt, Artificial Sequence
  Description of Artificial Sequence: Synthetic oligonucleotide
gugugccccuuaggcagaa

SEQ ID NO: 1764547 - RNA, 19 nt, Artificial Sequence
  Description of Artificial Sequence: Synthetic oligonucleotide
cgcgauguugaggcuccgc

SEQ ID NO: 1764548 - RNA, 19 nt, Artificial Sequence
  Description of Artificial Sequence: Synthetic oligonucleotide
gggucugcgucgggguauc

SEQ ID NO: 1764549 - RNA, 19 nt, Artificial Sequence
  Description of Artificial Sequence: Synthetic oligonucleotide
ccgaaggcucuggcugcgg

SEQ ID NO: 1764550 - RNA, 19 nt, Artificial Sequence
  Description of Artificial Sequence: Synthetic oligonucleotide
ggugcccucucgaaucaau

SEQ ID NO: 1764551 - RNA, 19 nt, Artificial Sequence
  Description of Artificial Sequence: Synthetic oligonucleotide
gccggacaguuggcugggg

SEQ ID NO: 1764552 - RNA, 19 nt, Artificial Sequence
  Description of Artificial Sequence: Synthetic oligonucleotide
ggcggagcccaggcagcug

SEQ ID NO: 1764553 - RNA, 19 nt, Artificial Sequence
  Description of Artificial Sequence: Synthetic oligonucleotide
cucugcggccaugaagauu

SEQ ID NO: 1764554 - RNA, 19 nt, Artificial Sequence
  Description of Artificial Sequence: Synthetic oligonucleotide
guccgagggcauugucuuu

SEQ ID NO: 1764555 - RNA, 19 nt, Artificial Sequence
  Description of Artificial Sequence: Synthetic oligonucleotide
guccauguccgagggcauu

SEQ ID NO: 1764556 - RNA, 19 nt, Artificial Sequence
  Description of Artificial Sequence: Synthetic oligonucleotide
cucucggggccggacaguu

SEQ ID NO: 1764557 - RNA, 19 nt, Artificial Sequence
  Description of Artificial Sequence: Synthetic oligonucleotide
ccauagcacgaaggccauc

SEQ ID NO: 1764558 - RNA, 19 nt, Artificial Sequence
  Description of Artificial Sequence: Synthetic oligonucleotide
cgggauagggacgggugga

SEQ ID NO: 1764559 - RNA, 19 nt, Artificial Sequence
  Description of Artificial Sequence: Synthetic oligonucleotide
ccacccgaaggcucuggcu

SEQ ID NO: 1764560 - RNA, 19 nt, Artificial Sequence
  Description of Artificial Sequence: Synthetic oligonucleotide
cuggggcaaagagccgagu

SEQ ID NO: 1764561 - RNA, 19 nt, Artificial Sequence
  Description of Artificial Sequence: Synthetic oligonucleotide
ggaccgugaggugcccucu

SEQ ID NO: 1764562 - RNA, 19 nt, Artificial Sequence
  Description of Artificial Sequence: Synthetic oligonucleotide
ccaccagacgacagaucau

SEQ ID NO: 1764563 - RNA, 19 nt, Artificial Sequence
  Description of Artificial Sequence: Synthetic oligonucleotide
ccgcgauguugaggcuccg

SEQ ID NO: 1764564 - RNA, 19 nt, Artificial Sequence
  Description of Artificial Sequence: Synthetic oligonucleotide
ccgccuggccgguacccaa

SEQ ID NO: 1764565 - RNA, 19 nt, Artificial Sequence
  Description of Artificial Sequence: Synthetic oligonucleotide
ccauguccgagggcauugu

SEQ ID NO: 1764566 - RNA, 19 nt, Artificial Sequence
  Description of Artificial Sequence: Synthetic oligonucleotide
ggucugcgucgggguaucu

SEQ ID NO: 1764567 - RNA, 19 nt, Artificial Sequence
  Description of Artificial Sequence: Synthetic oligonucleotide
ccacaccgugugccccuua

SEQ ID NO: 1764568 - RNA, 19 nt, Artificial Sequence
  Description of Artificial Sequence: Synthetic oligonucleotide
cgucgggguaucugaucuu

SEQ ID NO: 1764569 - RNA, 19 nt, Artificial Sequence
  Description of Artificial Sequence: Synthetic oligonucleotide
cggggccggacaguuggcu

SEQ ID NO: 1764570 - RNA, 19 nt, Artificial Sequence
  Description of Artificial Sequence: Synthetic oligonucleotide
cgccuggccgguacccaau

SEQ ID NO: 1764571 - RNA, 19 nt, Artificial Sequence
  Description of Artificial Sequence: Synthetic oligonucleotide
gcaggccgccuggccggua

SEQ ID NO: 1764572 - RNA, 19 nt, Artificial Sequence
  Description of Artificial Sequence: Synthetic oligonucleotide
aaugacauggucucggacc

SEQ ID NO: 1764573 - RNA, 19 nt, Artificial Sequence
  Description of Artificial Sequence: Synthetic oligonucleotide
ugauaaacacagaagaggc

SEQ ID NO: 1764574 - RNA, 19 nt, Artificial Sequence
  Description of Artificial Sequence: Synthetic oligonucleotide
ucgguaacaguuuucaugg

SEQ ID NO: 1764575 - RNA, 19 nt, Artificial Sequence
  Description of Artificial Sequence: Synthetic oligonucleotide
ucacaaaugcugcacaugg

SEQ ID NO: 1764576 - RNA, 19 nt, Artificial Sequence
  Description of Artificial Sequence: Synthetic oligonucleotide
uccagugaggcucaaaagg

SEQ ID NO: 1764577 - RNA, 19 nt, Artificial Sequence
  Description of Artificial Sequence: Synthetic oligonucleotide
aaggaaaguauguauggag

SEQ ID NO: 1764578 - RNA, 19 nt, Artificial Sequence
  Description of Artificial Sequence: Synthetic oligonucleotide
acaggcuugugacagaagc

SEQ ID NO: 1764579 - RNA, 19 nt, Artificial Sequence
  Description of Artificial Sequence: Synthetic oligonucleotide
acaaaugcugcacaugggg

SEQ ID NO: 1764580 - RNA, 19 nt, Artificial Sequence
  Description of Artificial Sequence: Synthetic oligonucleotide
ucugauagaaucucugccc

SEQ ID NO: 1764581 - RNA, 19 nt, Artificial Sequence
  Description of Artificial Sequence: Synthetic oligonucleotide
ugugucuagacacugugca

SEQ ID NO: 1764582 - RNA, 19 nt, Artificial Sequence
  Description of Artificial Sequence: Synthetic oligonucleotide
gugauaaacacagaagagg

SEQ ID NO: 1764583 - RNA, 19 nt, Artificial Sequence
  Description of Artificial Sequence: Synthetic oligonucleotide
gaggcggucauucagcggg

SEQ ID NO: 1764584 - RNA, 19 nt, Artificial Sequence
  Description of Artificial Sequence: Synthetic oligonucleotide
aaugcguugguguccagug

SEQ ID NO: 1764585 - RNA, 19 nt, Artificial Sequence
  Description of Artificial Sequence: Synthetic oligonucleotide
uauccuucccaucucgggg

SEQ ID NO: 1764586 - RNA, 19 nt, Artificial Sequence
  Description of Artificial Sequence: Synthetic oligonucleotide
aucgguaacaguuuucaug

SEQ ID NO: 1764587 - RNA, 19 nt, Artificial Sequence
  Description of Artificial Sequence: Synthetic oligonucleotide
cagaagaucccuucggugg

SEQ ID NO: 1764588 - RNA, 19 nt, Artificial Sequence
  Description of Artificial Sequence: Synthetic oligonucleotide
auagaaucucugcccagcc

SEQ ID NO: 1764589 - RNA, 19 nt, Artificial Sequence
  Description of Artificial Sequence: Synthetic oligonucleotide
uuucauggaaguuccuucc

SEQ ID NO: 1764590 - RNA, 19 nt, Artificial Sequence
  Description of Artificial Sequence: Synthetic oligonucleotide
aagaggcggucauucagcg

SEQ ID NO: 1764591 - RNA, 19 nt, Artificial Sequence
  Description of Artificial Sequence: Synthetic oligonucleotide
ucuggcuucacaagcuucc

SEQ ID NO: 1764592 - RNA, 19 nt, Artificial Sequence
  Description of Artificial Sequence: Synthetic oligonucleotide
cacugcaauccucacaucg

SEQ ID NO: 1764593 - RNA, 19 nt, Artificial Sequence
  Description of Artificial Sequence: Synthetic oligonucleotide
ugugcacugagcaaugcgu

SEQ ID NO: 1764594 - RNA, 19 nt, Artificial Sequence
  Description of Artificial Sequence: Synthetic oligonucleotide
ucaucuccgaugcaccggg

SEQ ID NO: 1764595 - RNA, 19 nt, Artificial Sequence
  Description of Artificial Sequence: Synthetic oligonucleotide
ucacagcuacaucacgucg

SEQ ID NO: 1764596 - RNA, 19 nt, Artificial Sequence
  Description of Artificial Sequence: Synthetic oligonucleotide
gaggucuagauccucauca

SEQ ID NO: 1764597 - RNA, 19 nt, Artificial Sequence
  Description of Artificial Sequence: Synthetic oligonucleotide
ugugacagaagccgcagac

SEQ ID NO: 1764598 - RNA, 19 nt, Artificial Sequence
  Description of Artificial Sequence: Synthetic oligonucleotide
ggaaaguauguauggaggg

SEQ ID NO: 1764599 - RNA, 19 nt, Artificial Sequence
  Description of Artificial Sequence: Synthetic oligonucleotide
cucucgaggagacacaggc

SEQ ID NO: 1764600 - RNA, 19 nt, Artificial Sequence
  Description of Artificial Sequence: Synthetic oligonucleotide
ucauucagcggguagcagc

SEQ ID NO: 1764601 - RNA, 19 nt, Artificial Sequence
  Description of Artificial Sequence: Synthetic oligonucleotide
aggaaaguauguauggagg

SEQ ID NO: 1764602 - RNA, 19 nt, Artificial Sequence
  Description of Artificial Sequence: Synthetic oligonucleotide
caucacucagggaaggagg

SEQ ID NO: 1764603 - RNA, 19 nt, Artificial Sequence
  Description of Artificial Sequence: Synthetic oligonucleotide
ucucuaggaaaggugacag

SEQ ID NO: 1764604 - RNA, 19 nt, Artificial Sequence
  Description of Artificial Sequence: Synthetic oligonucleotide
aguuccuucccaugcacuc

SEQ ID NO: 1764605 - RNA, 19 nt, Artificial Sequence
  Description of Artificial Sequence: Synthetic oligonucleotide
agaguguccugguagcagg

SEQ ID NO: 1764606 - RNA, 19 nt, Artificial Sequence
  Description of Artificial Sequence: Synthetic oligonucleotide
uccugcucaagccagcccc

SEQ ID NO: 1764607 - RNA, 19 nt, Artificial Sequence
  Description of Artificial Sequence: Synthetic oligonucleotide
agaagaggcggucauucag

SEQ ID NO: 1764608 - RNA, 19 nt, Artificial Sequence
  Description of Artificial Sequence: Synthetic oligonucleotide
uguccagugaggcucaaaa

SEQ ID NO: 1764609 - RNA, 19 nt, Artificial Sequence
  Description of Artificial Sequence: Synthetic oligonucleotide
ugcguugguguccagugag

SEQ ID NO: 1764610 - RNA, 19 nt, Artificial Sequence
  Description of Artificial Sequence: Synthetic oligonucleotide
guacaccugguucuggucg

SEQ ID NO: 1764611 - RNA, 19 nt, Artificial Sequence
  Description of Artificial Sequence: Synthetic oligonucleotide
aaaccaagucacgggaggg

SEQ ID NO: 1764612 - RNA, 19 nt, Artificial Sequence
  Description of Artificial Sequence: Synthetic oligonucleotide
uguaccaggggugagcccc

SEQ ID NO: 1764613 - RNA, 19 nt, Artificial Sequence
  Description of Artificial Sequence: Synthetic oligonucleotide
uccacagacaggaggacac

SEQ ID NO: 1764614 - RNA, 19 nt, Artificial Sequence
  Description of Artificial Sequence: Synthetic oligonucleotide
aaccaagucacgggagggc

SEQ ID NO: 1764615 - RNA, 19 nt, Artificial Sequence
  Description of Artificial Sequence: Synthetic oligonucleotide
aagguauccuucccaucuc

SEQ ID NO: 1764616 - RNA, 19 nt, Artificial Sequence
  Description of Artificial Sequence: Synthetic oligonucleotide
uggggaaaccaagucacgg

SEQ ID NO: 1764617 - RNA, 19 nt, Artificial Sequence
  Description of Artificial Sequence: Synthetic oligonucleotide
cauucagcggguagcagcc

SEQ ID NO: 1764618 - RNA, 19 nt, Artificial Sequence
  Description of Artificial Sequence: Synthetic oligonucleotide
agacacugugcacugagca

SEQ ID NO: 1764619 - RNA, 19 nt, Artificial Sequence
  Description of Artificial Sequence: Synthetic oligonucleotide
cagguguuagguuuccugc

SEQ ID NO: 1764620 - RNA, 19 nt, Artificial Sequence
  Description of Artificial Sequence: Synthetic oligonucleotide
ugucuagacacugugcacu

SEQ ID NO: 1764621 - RNA, 19 nt, Artificial Sequence
  Description of Artificial Sequence: Synthetic oligonucleotide
ucaaucuugaagguauccu

SEQ ID NO: 1764622 - RNA, 19 nt, Artificial Sequence
  Description of Artificial Sequence: Synthetic oligonucleotide
ucucaucuccgaugcaccg

SEQ ID NO: 1764623 - RNA, 19 nt, Artificial Sequence
  Description of Artificial Sequence: Synthetic oligonucleotide
cuugugucuagacacugug

SEQ ID NO: 1764624 - RNA, 19 nt, Artificial Sequence
  Description of Artificial Sequence: Synthetic oligonucleotide
ucauggaaguuccuuccca

SEQ ID NO: 1764625 - RNA, 19 nt, Artificial Sequence
  Description of Artificial Sequence: Synthetic oligonucleotide
uguggguuugaggugacug

SEQ ID NO: 1764626 - RNA, 19 nt, Artificial Sequence
  Description of Artificial Sequence: Synthetic oligonucleotide
aagccgcagacaucugugg

SEQ ID NO: 1764627 - RNA, 19 nt, Artificial Sequence
  Description of Artificial Sequence: Synthetic oligonucleotide
uucauggaaguuccuuccc

SEQ ID NO: 1764628 - RNA, 19 nt, Artificial Sequence
  Description of Artificial Sequence: Synthetic oligonucleotide
acagaagaucccuucggug

SEQ ID NO: 1764629 - RNA, 19 nt, Artificial Sequence
  Description of Artificial Sequence: Synthetic oligonucleotide
gaagguauccuucccaucu

SEQ ID NO: 1764630 - RNA, 19 nt, Artificial Sequence
  Description of Artificial Sequence: Synthetic oligonucleotide
aggucuagauccucaucac

SEQ ID NO: 1764631 - RNA, 19 nt, Artificial Sequence
  Description of Artificial Sequence: Synthetic oligonucleotide
cuagacacugugcacugag

SEQ ID NO: 1764632 - RNA, 19 nt, Artificial Sequence
  Description of Artificial Sequence: Synthetic oligonucleotide
guauccuucccaucucggg

SEQ ID NO: 1764633 - RNA, 19 nt, Artificial Sequence
  Description of Artificial Sequence: Synthetic oligonucleotide
ucaucacucagggaaggag

SEQ ID NO: 1764634 - RNA, 19 nt, Artificial Sequence
  Description of Artificial Sequence: Synthetic oligonucleotide
aucgaggcagaaauucugc

SEQ ID NO: 1764635 - RNA, 19 nt, Artificial Sequence
  Description of Artificial Sequence: Synthetic oligonucleotide
uauggcagggcuugcagaa

SEQ ID NO: 1764636 - RNA, 19 nt, Artificial Sequence
  Description of Artificial Sequence: Synthetic oligonucleotide
ucccaugcacucaaucuug

SEQ ID NO: 1764637 - RNA, 19 nt, Artificial Sequence
  Description of Artificial Sequence: Synthetic oligonucleotide
ugagcaaugcguugguguc

SEQ ID NO: 1764638 - RNA, 19 nt, Artificial Sequence
  Description of Artificial Sequence: Synthetic oligonucleotide
agguauccuucccaucucg

SEQ ID NO: 1764639 - RNA, 19 nt, Artificial Sequence
  Description of Artificial Sequence: Synthetic oligonucleotide
augacauggucucggacca

SEQ ID NO: 1764640 - RNA, 19 nt, Artificial Sequence
  Description of Artificial Sequence: Synthetic oligonucleotide
agaucccuucgguggagcc

SEQ ID NO: 1764641 - RNA, 19 nt, Artificial Sequence
  Description of Artificial Sequence: Synthetic oligonucleotide
ugauagaaucucugcccag

SEQ ID NO: 1764642 - RNA, 19 nt, Artificial Sequence
  Description of Artificial Sequence: Synthetic oligonucleotide
gacacugcaauccucacau

SEQ ID NO: 1764643 - RNA, 19 nt, Artificial Sequence
  Description of Artificial Sequence: Synthetic oligonucleotide
uugaagguauccuucccau

SEQ ID NO: 1764644 - RNA, 19 nt, Artificial Sequence
  Description of Artificial Sequence: Synthetic oligonucleotide
gaucgaggcagaaauucug

SEQ ID NO: 1764645 - RNA, 19 nt, Artificial Sequence
  Description of Artificial Sequence: Synthetic oligonucleotide
uguguaccaggggugagcc

SEQ ID NO: 1764646 - RNA, 19 nt, Artificial Sequence
  Description of Artificial Sequence: Synthetic oligonucleotide
gaggccacccucuucucag

SEQ ID NO: 1764647 - RNA, 19 nt, Artificial Sequence
  Description of Artificial Sequence: Synthetic oligonucleotide
ucucucaucuccgaugcac

SEQ ID NO: 1764648 - RNA, 19 nt, Artificial Sequence
  Description of Artificial Sequence: Synthetic oligonucleotide
ucgaggcagaaauucugcc

SEQ ID NO: 1764649 - RNA, 19 nt, Artificial Sequence
  Description of Artificial Sequence: Synthetic oligonucleotide
acaucgguaacaguuuuca

SEQ ID NO: 1764650 - RNA, 19 nt, Artificial Sequence
  Description of Artificial Sequence: Synthetic oligonucleotide
cacgucuggcuucacaagc

SEQ ID NO: 1764651 - RNA, 19 nt, Artificial Sequence
  Description of Artificial Sequence: Synthetic oligonucleotide
cuucgguggagccuguggc

SEQ ID NO: 1764652 - RNA, 19 nt, Artificial Sequence
  Description of Artificial Sequence: Synthetic oligonucleotide
gaagaggcggucauucagc

SEQ ID NO: 1764653 - RNA, 19 nt, Artificial Sequence
  Description of Artificial Sequence: Synthetic oligonucleotide
gguagcuccucuucugugg

SEQ ID NO: 1764654 - RNA, 19 nt, Artificial Sequence
  Description of Artificial Sequence: Synthetic oligonucleotide
cacaaaugcugcacauggg

SEQ ID NO: 1764655 - RNA, 19 nt, Artificial Sequence
  Description of Artificial Sequence: Synthetic oligonucleotide
acugcaauccucacaucgg

SEQ ID NO: 1764656 - RNA, 19 nt, Artificial Sequence
  Description of Artificial Sequence: Synthetic oligonucleotide
agggugauaaacacagaag

SEQ ID NO: 1764657 - RNA, 19 nt, Artificial Sequence
  Description of Artificial Sequence: Synthetic oligonucleotide
uaggaggucuagauccuca

SEQ ID NO: 1764658 - RNA, 19 nt, Artificial Sequence
  Description of Artificial Sequence: Synthetic oligonucleotide
uucccaugcacucaaucuu

SEQ ID NO: 1764659 - RNA, 19 nt, Artificial Sequence
  Description of Artificial Sequence: Synthetic oligonucleotide
cuucuucagucacagcuac

SEQ ID NO: 1764660 - RNA, 19 nt, Artificial Sequence
  Description of Artificial Sequence: Synthetic oligonucleotide
ucagccccagugaaggcug

SEQ ID NO: 1764661 - RNA, 19 nt, Artificial Sequence
  Description of Artificial Sequence: Synthetic oligonucleotide
gaugccucuuucucuagga

SEQ ID NO: 1764662 - RNA, 19 nt, Artificial Sequence
  Description of Artificial Sequence: Synthetic oligonucleotide
uggucggugggcuccacag

SEQ ID NO: 1764663 - RNA, 19 nt, Artificial Sequence
  Description of Artificial Sequence: Synthetic oligonucleotide
agguggggaaaccaaguca

SEQ ID NO: 1764664 - RNA, 19 nt, Artificial Sequence
  Description of Artificial Sequence: Synthetic oligonucleotide
ucguccagcgcgaaucucu

SEQ ID NO: 1764665 - RNA, 19 nt, Artificial Sequence
  Description of Artificial Sequence: Synthetic oligonucleotide
cauauggcagggcuugcag

SEQ ID NO: 1764666 - RNA, 19 nt, Artificial Sequence
  Description of Artificial Sequence: Synthetic oligonucleotide
guuagguggggaaaccaag

SEQ ID NO: 1764667 - RNA, 19 nt, Artificial Sequence
  Description of Artificial Sequence: Synthetic oligonucleotide
caggcuugugacagaagcc

SEQ ID NO: 1764668 - RNA, 19 nt, Artificial Sequence
  Description of Artificial Sequence: Synthetic oligonucleotide
uucucuaggaaaggugaca

SEQ ID NO: 1764669 - RNA, 19 nt, Artificial Sequence
  Description of Artificial Sequence: Synthetic oligonucleotide
cucucaucuccgaugcacc

SEQ ID NO: 1764670 - RNA, 19 nt, Artificial Sequence
  Description of Artificial Sequence: Synthetic oligonucleotide
aggggugcuguguaccagg

SEQ ID NO: 1764671 - RNA, 19 nt, Artificial Sequence
  Description of Artificial Sequence: Synthetic oligonucleotide
ugucucaggcccuuguguc

SEQ ID NO: 1764672 - RNA, 19 nt, Artificial Sequence
  Description of Artificial Sequence: Synthetic oligonucleotide
gaggccggacagaagaucc

SEQ ID NO: 1764673 - RNA, 19 nt, Artificial Sequence
  Description of Artificial Sequence: Synthetic oligonucleotide
cugugcacugagcaaugcg

SEQ ID NO: 1764674 - RNA, 19 nt, Artificial Sequence
  Description of Artificial Sequence: Synthetic oligonucleotide
ugacccacuucuucaguca

SEQ ID NO: 1764675 - RNA, 19 nt, Artificial Sequence
  Description of Artificial Sequence: Synthetic oligonucleotide
ugccucuuucucuaggaaa

SEQ ID NO: 1764676 - RNA, 19 nt, Artificial Sequence
  Description of Artificial Sequence: Synthetic oligonucleotide
agaagaucccuucggugga

SEQ ID NO: 1764677 - RNA, 19 nt, Artificial Sequence
  Description of Artificial Sequence: Synthetic oligonucleotide
acagcuacaucacgucgug

SEQ ID NO: 1764678 - RNA, 19 nt, Artificial Sequence
  Description of Artificial Sequence: Synthetic oligonucleotide
agaagccgcagacaucugu

SEQ ID NO: 1764679 - RNA, 19 nt, Artificial Sequence
  Description of Artificial Sequence: Synthetic oligonucleotide
uagguggggaaaccaaguc

SEQ ID NO: 1764680 - RNA, 19 nt, Artificial Sequence
  Description of Artificial Sequence: Synthetic oligonucleotide
ggacagaagaucccuucgg

SEQ ID NO: 1764681 - RNA, 19 nt, Artificial Sequence
  Description of Artificial Sequence: Synthetic oligonucleotide
ugaggcucaaaaggaaagu

SEQ ID NO: 1764682 - RNA, 19 nt, Artificial Sequence
  Description of Artificial Sequence: Synthetic oligonucleotide
cuugaagguauccuuccca

SEQ ID NO: 1764683 - RNA, 19 nt, Artificial Sequence
  Description of Artificial Sequence: Synthetic oligonucleotide
gaagccgcagacaucugug

SEQ ID NO: 1764684 - RNA, 19 nt, Artificial Sequence
  Description of Artificial Sequence: Synthetic oligonucleotide
uccagcgcgaaucucucau

SEQ ID NO: 1764685 - RNA, 19 nt, Artificial Sequence
  Description of Artificial Sequence: Synthetic oligonucleotide
ggggaaaccaagucacggg

SEQ ID NO: 1764686 - RNA, 19 nt, Artificial Sequence
  Description of Artificial Sequence: Synthetic oligonucleotide
uccugacccacuucuucag

SEQ ID NO: 1764687 - RNA, 19 nt, Artificial Sequence
  Description of Artificial Sequence: Synthetic oligonucleotide
caggcaguacaccugguuc

SEQ ID NO: 1764688 - RNA, 19 nt, Artificial Sequence
  Description of Artificial Sequence: Synthetic oligonucleotide
gaugggguucucacaaaug

SEQ ID NO: 1764689 - RNA, 19 nt, Artificial Sequence
  Description of Artificial Sequence: Synthetic oligonucleotide
agcagcacccugcagcacu

SEQ ID NO: 1764690 - RNA, 19 nt, Artificial Sequence
  Description of Artificial Sequence: Synthetic oligonucleotide
auggaaguuccuucccaug

SEQ ID NO: 1764691 - RNA, 19 nt, Artificial Sequence
  Description of Artificial Sequence: Synthetic oligonucleotide
uugaggugacuggucagag

SEQ ID NO: 1764692 - RNA, 19 nt, Artificial Sequence
  Description of Artificial Sequence: Synthetic oligonucleotide
agguguuagguuuccugcu

SEQ ID NO: 1764693 - RNA, 19 nt, Artificial Sequence
  Description of Artificial Sequence: Synthetic oligonucleotide
gcgcccauccuucugauag

SEQ ID NO: 1764694 - RNA, 19 nt, Artificial Sequence
  Description of Artificial Sequence: Synthetic oligonucleotide
uucaggggugcuguguacc

SEQ ID NO: 1764695 - RNA, 19 nt, Artificial Sequence
  Description of Artificial Sequence: Synthetic oligonucleotide
aggacacugcaauccucac

SEQ ID NO: 1764696 - RNA, 19 nt, Artificial Sequence
  Description of Artificial Sequence: Synthetic oligonucleotide
cagggugauaaacacagaa

SEQ ID NO: 1764697 - RNA, 19 nt, Artificial Sequence
  Description of Artificial Sequence: Synthetic oligonucleotide
cacagaagaggccacccuc

SEQ ID NO: 1764698 - RNA, 19 nt, Artificial Sequence
  Description of Artificial Sequence: Synthetic oligonucleotide
guccagugaggcucaaaag

SEQ ID NO: 1764699 - RNA, 19 nt, Artificial Sequence
  Description of Artificial Sequence: Synthetic oligonucleotide
agucacagcuacaucacgu

SEQ ID NO: 1764700 - RNA, 19 nt, Artificial Sequence
  Description of Artificial Sequence: Synthetic oligonucleotide
acagccagcucucgaggag

SEQ ID NO: 1764701 - RNA, 19 nt, Artificial Sequence
  Description of Artificial Sequence: Synthetic oligonucleotide
ggcccuugugucuagacac

SEQ ID NO: 1764702 - RNA, 19 nt, Artificial Sequence
  Description of Artificial Sequence: Synthetic oligonucleotide
uguccugguagcagggcuc

SEQ ID NO: 1764703 - RNA, 19 nt, Artificial Sequence
  Description of Artificial Sequence: Synthetic oligonucleotide
gacauggucucggaccacc

SEQ ID NO: 1764704 - RNA, 19 nt, Artificial Sequence
  Description of Artificial Sequence: Synthetic oligonucleotide
cugacccacuucuucaguc

SEQ ID NO: 1764705 - RNA, 19 nt, Artificial Sequence
  Description of Artificial Sequence: Synthetic oligonucleotide
ggcaaauuuccuguagaag

SEQ ID NO: 1764706 - RNA, 19 nt, Artificial Sequence
  Description of Artificial Sequence: Synthetic oligonucleotide
gucuagacacugugcacug

SEQ ID NO: 1764707 - RNA, 19 nt, Artificial Sequence
  Description of Artificial Sequence: Synthetic oligonucleotide
aguguccugguagcagggc

SEQ ID NO: 1764708 - RNA, 19 nt, Artificial Sequence
  Description of Artificial Sequence: Synthetic oligonucleotide
uguccagguguuagguuuc

SEQ ID NO: 1764709 - RNA, 19 nt, Artificial Sequence
  Description of Artificial Sequence: Synthetic oligonucleotide
ucaggggugcuguguacca

SEQ ID NO: 1764710 - RNA, 19 nt, Artificial Sequence
  Description of Artificial Sequence: Synthetic oligonucleotide
gucggugggcuccacagac

SEQ ID NO: 1764711 - RNA, 19 nt, Artificial Sequence
  Description of Artificial Sequence: Synthetic oligonucleotide
aaauucugccagagggugu

SEQ ID NO: 1764712 - RNA, 19 nt, Artificial Sequence
  Description of Artificial Sequence: Synthetic oligonucleotide
auuuccuguagaagucauc

SEQ ID NO: 1764713 - RNA, 19 nt, Artificial Sequence
  Description of Artificial Sequence: Synthetic oligonucleotide
uggguuugaggugacuggu

SEQ ID NO: 1764714 - RNA, 19 nt, Artificial Sequence
  Description of Artificial Sequence: Synthetic oligonucleotide
agcgcgaaucucucaucuc

SEQ ID NO: 1764715 - RNA, 19 nt, Artificial Sequence
  Description of Artificial Sequence: Synthetic oligonucleotide
gacaggaggacacugcaau

SEQ ID NO: 1764716 - RNA, 19 nt, Artificial Sequence
  Description of Artificial Sequence: Synthetic oligonucleotide
uguuagguuuccugcucaa

SEQ ID NO: 1764717 - RNA, 19 nt, Artificial Sequence
  Description of Artificial Sequence: Synthetic oligonucleotide
cuucgugggagcagggguc

SEQ ID NO: 1764718 - RNA, 19 nt, Artificial Sequence
  Description of Artificial Sequence: Synthetic oligonucleotide
agaggcggucauucagcgg

SEQ ID NO: 1764719 - RNA, 19 nt, Artificial Sequence
  Description of Artificial Sequence: Synthetic oligonucleotide
uucgguggagccuguggcu

SEQ ID NO: 1764720 - RNA, 19 nt, Artificial Sequence
  Description of Artificial Sequence: Synthetic oligonucleotide
cuucuguggguuugaggug

SEQ ID NO: 1764721 - RNA, 19 nt, Artificial Sequence
  Description of Artificial Sequence: Synthetic oligonucleotide
cccuccauuggccagcugg

SEQ ID NO: 1764722 - RNA, 19 nt, Artificial Sequence
  Description of Artificial Sequence: Synthetic oligonucleotide
gugccagggugauaaacac

SEQ ID NO: 1764723 - RNA, 19 nt, Artificial Sequence
  Description of Artificial Sequence: Synthetic oligonucleotide
agaggccggacagaagauc

SEQ ID NO: 1764724 - RNA, 19 nt, Artificial Sequence
  Description of Artificial Sequence: Synthetic oligonucleotide
uacaccugguucuggucgu

SEQ ID NO: 1764725 - RNA, 19 nt, Artificial Sequence
  Description of Artificial Sequence: Synthetic oligonucleotide
gacccacuucuucagucac

SEQ ID NO: 1764726 - RNA, 19 nt, Artificial Sequence
  Description of Artificial Sequence: Synthetic oligonucleotide
ugcaauccucacaucggua

SEQ ID NO: 1764727 - RNA, 19 nt, Artificial Sequence
  Description of Artificial Sequence: Synthetic oligonucleotide
cucacaaaugcugcacaug

SEQ ID NO: 1764728 - RNA, 19 nt, Artificial Sequence
  Description of Artificial Sequence: Synthetic oligonucleotide
gcuacaucacgucgugggg

SEQ ID NO: 1764729 - RNA, 19 nt, Artificial Sequence
  Description of Artificial Sequence: Synthetic oligonucleotide
uggucguccagcgcgaauc

SEQ ID NO: 1764730 - RNA, 19 nt, Artificial Sequence
  Description of Artificial Sequence: Synthetic oligonucleotide
aggugcgacaggugaagca

SEQ ID NO: 1764731 - RNA, 19 nt, Artificial Sequence
  Description of Artificial Sequence: Synthetic oligonucleotide
cacucaaucuugaagguau

SEQ ID NO: 1764732 - RNA, 19 nt, Artificial Sequence
  Description of Artificial Sequence: Synthetic oligonucleotide
gacagaagaucccuucggu

SEQ ID NO: 1764733 - RNA, 19 nt, Artificial Sequence
  Description of Artificial Sequence: Synthetic oligonucleotide
gcaggggucucccagggcc

SEQ ID NO: 1764734 - RNA, 19 nt, Artificial Sequence
  Description of Artificial Sequence: Synthetic oligonucleotide
uuccugcucaagccagccc

SEQ ID NO: 1764735 - RNA, 19 nt, Artificial Sequence
  Description of Artificial Sequence: Synthetic oligonucleotide
aucuccgaugcaccgggca

SEQ ID NO: 1764736 - RNA, 19 nt, Artificial Sequence
  Description of Artificial Sequence: Synthetic oligonucleotide
gcgcgaaucucucaucucc

SEQ ID NO: 1764737 - RNA, 19 nt, Artificial Sequence
  Description of Artificial Sequence: Synthetic oligonucleotide
cucaucuccgaugcaccgg

SEQ ID NO: 1764738 - RNA, 19 nt, Artificial Sequence
  Description of Artificial Sequence: Synthetic oligonucleotide
uugcagaagaggcggucau

SEQ ID NO: 1764739 - RNA, 19 nt, Artificial Sequence
  Description of Artificial Sequence: Synthetic oligonucleotide
gugucuagacacugugcac

SEQ ID NO: 1764740 - RNA, 19 nt, Artificial Sequence
  Description of Artificial Sequence: Synthetic oligonucleotide
cuucccaugcacucaaucu

SEQ ID NO: 1764741 - RNA, 19 nt, Artificial Sequence
  Description of Artificial Sequence: Synthetic oligonucleotide
augcaccgggcacagguca

SEQ ID NO: 1764742 - RNA, 19 nt, Artificial Sequence
  Description of Artificial Sequence: Synthetic oligonucleotide
agcagccuuggucgguggg

SEQ ID NO: 1764743 - RNA, 19 nt, Artificial Sequence
  Description of Artificial Sequence: Synthetic oligonucleotide
cacaucgguaacaguuuuc

SEQ ID NO: 1764744 - RNA, 19 nt, Artificial Sequence
  Description of Artificial Sequence: Synthetic oligonucleotide
agcacccuccauuggccag

SEQ ID NO: 1764745 - RNA, 19 nt, Artificial Sequence
  Description of Artificial Sequence: Synthetic oligonucleotide
cucaaaaggaaaguaugua

SEQ ID NO: 1764746 - RNA, 19 nt, Artificial Sequence
  Description of Artificial Sequence: Synthetic oligonucleotide
guguuagguuuccugcuca

SEQ ID NO: 1764747 - RNA, 19 nt, Artificial Sequence
  Description of Artificial Sequence: Synthetic oligonucleotide
agucacgggagggcuggcc

SEQ ID NO: 1764748 - RNA, 19 nt, Artificial Sequence
  Description of Artificial Sequence: Synthetic oligonucleotide
gugguaggaggucuagauc

SEQ ID NO: 1764749 - RNA, 19 nt, Artificial Sequence
  Description of Artificial Sequence: Synthetic oligonucleotide
uucuggucguccagcgcga

SEQ ID NO: 1764750 - RNA, 19 nt, Artificial Sequence
  Description of Artificial Sequence: Synthetic oligonucleotide
acucaaucuugaagguauc

SEQ ID NO: 1764751 - RNA, 19 nt, Artificial Sequence
  Description of Artificial Sequence: Synthetic oligonucleotide
aucacucagggaaggaggu

SEQ ID NO: 1764752 - RNA, 19 nt, Artificial Sequence
  Description of Artificial Sequence: Synthetic oligonucleotide
gggaaaccaagucacggga

SEQ ID NO: 1764753 - RNA, 19 nt, Artificial Sequence
  Description of Artificial Sequence: Synthetic oligonucleotide
gagcaaugcguuggugucc

SEQ ID NO: 1764754 - RNA, 19 nt, Artificial Sequence
  Description of Artificial Sequence: Synthetic oligonucleotide
agcaaugcguuggugucca

SEQ ID NO: 1764755 - RNA, 19 nt, Artificial Sequence
  Description of Artificial Sequence: Synthetic oligonucleotide
aggcucaaaaggaaaguau

SEQ ID NO: 1764756 - RNA, 19 nt, Artificial Sequence
  Description of Artificial Sequence: Synthetic oligonucleotide
cauccuucugauagaaucu

SEQ ID NO: 1764757 - RNA, 19 nt, Artificial Sequence
  Description of Artificial Sequence: Synthetic oligonucleotide
uggaugccucuuucucuag

SEQ ID NO: 1764758 - RNA, 19 nt, Artificial Sequence
  Description of Artificial Sequence: Synthetic oligonucleotide
ggcagaaauucugccagag

SEQ ID NO: 1764759 - RNA, 19 nt, Artificial Sequence
  Description of Artificial Sequence: Synthetic oligonucleotide
cuguguaccaggggugagc

SEQ ID NO: 1764760 - RNA, 19 nt, Artificial Sequence
  Description of Artificial Sequence: Synthetic oligonucleotide
agccgcagacaucugugga

SEQ ID NO: 1764761 - RNA, 19 nt, Artificial Sequence
  Description of Artificial Sequence: Synthetic oligonucleotide
aucccuucgguggagccug

SEQ ID NO: 1764762 - RNA, 19 nt, Artificial Sequence
  Description of Artificial Sequence: Synthetic oligonucleotide
accaagucacgggagggcu

SEQ ID NO: 1764763 - RNA, 19 nt, Artificial Sequence
  Description of Artificial Sequence: Synthetic oligonucleotide
gcaauccucacaucgguaa

SEQ ID NO: 1764764 - RNA, 19 nt, Artificial Sequence
  Description of Artificial Sequence: Synthetic oligonucleotide
cugguagcagggcucgcac

SEQ ID NO: 1764765 - RNA, 19 nt, Artificial Sequence
  Description of Artificial Sequence: Synthetic oligonucleotide
cacugugcacugagcaaug

SEQ ID NO: 1764766 - RNA, 19 nt, Artificial Sequence
  Description of Artificial Sequence: Synthetic oligonucleotide
uucagcggguagcagccuu

SEQ ID NO: 1764767 - RNA, 19 nt, Artificial Sequence
  Description of Artificial Sequence: Synthetic oligonucleotide
ggugcgacaggugaagcac

SEQ ID NO: 1764768 - RNA, 19 nt, Artificial Sequence
  Description of Artificial Sequence: Synthetic oligonucleotide
gguauccuucccaucucgg

SEQ ID NO: 1764769 - RNA, 19 nt, Artificial Sequence
  Description of Artificial Sequence: Synthetic oligonucleotide
gggaucgaggcagaaauuc

SEQ ID NO: 1764770 - RNA, 19 nt, Artificial Sequence
  Description of Artificial Sequence: Synthetic oligonucleotide
ugggcaugguacugccucu

SEQ ID NO: 1764771 - RNA, 19 nt, Artificial Sequence
  Description of Artificial Sequence: Synthetic oligonucleotide
cucuucauauggcagggcu

SEQ ID NO: 1764772 - RNA, 19 nt, Artificial Sequence
  Description of Artificial Sequence: Synthetic oligonucleotide
uucauauggcagggcuugc

SEQ ID NO: 1764773 - RNA, 19 nt, Artificial Sequence
  Description of Artificial Sequence: Synthetic oligonucleotide
uccgaugcaccgggcacag

SEQ ID NO: 1764774 - RNA, 19 nt, Artificial Sequence
  Description of Artificial Sequence: Synthetic oligonucleotide
ccagguguuagguuuccug

SEQ ID NO: 1764775 - RNA, 19 nt, Artificial Sequence
  Description of Artificial Sequence: Synthetic oligonucleotide
gguguuagguuuccugcuc

SEQ ID NO: 1764776 - RNA, 19 nt, Artificial Sequence
  Description of Artificial Sequence: Synthetic oligonucleotide
gucuucgugggagcagggg

SEQ ID NO: 1764777 - RNA, 19 nt, Artificial Sequence
  Description of Artificial Sequence: Synthetic oligonucleotide
ucuagacacugugcacuga

SEQ ID NO: 1764778 - RNA, 19 nt, Artificial Sequence
  Description of Artificial Sequence: Synthetic oligonucleotide
caggggucucccagggccg

SEQ ID NO: 1764779 - RNA, 19 nt, Artificial Sequence
  Description of Artificial Sequence: Synthetic oligonucleotide
ucggugggcuccacagaca

SEQ ID NO: 1764780 - RNA, 19 nt, Artificial Sequence
  Description of Artificial Sequence: Synthetic oligonucleotide
ggugccagggugauaaaca

SEQ ID NO: 1764781 - RNA, 19 nt, Artificial Sequence
  Description of Artificial Sequence: Synthetic oligonucleotide
aagucacgggagggcuggc

SEQ ID NO: 1764782 - RNA, 19 nt, Artificial Sequence
  Description of Artificial Sequence: Synthetic oligonucleotide
ccagugaggcucaaaagga

SEQ ID NO: 1764783 - RNA, 19 nt, Artificial Sequence
  Description of Artificial Sequence: Synthetic oligonucleotide
ugcaccgggcacaggucac

SEQ ID NO: 1764784 - RNA, 19 nt, Artificial Sequence
  Description of Artificial Sequence: Synthetic oligonucleotide
aggcagaaauucugccaga

SEQ ID NO: 1764785 - RNA, 19 nt, Artificial Sequence
  Description of Artificial Sequence: Synthetic oligonucleotide
agcacugggcaugguacug

SEQ ID NO: 1764786 - RNA, 19 nt, Artificial Sequence
  Description of Artificial Sequence: Synthetic oligonucleotide
ggggcaaauuuccuguaga

SEQ ID NO: 1764787 - RNA, 19 nt, Artificial Sequence
  Description of Artificial Sequence: Synthetic oligonucleotide
guagcagccuuggucggug

SEQ ID NO: 1764788 - RNA, 19 nt, Artificial Sequence
  Description of Artificial Sequence: Synthetic oligonucleotide
caaucuugaagguauccuu

SEQ ID NO: 1764789 - RNA, 19 nt, Artificial Sequence
  Description of Artificial Sequence: Synthetic oligonucleotide
uucugggagaggccaggua

SEQ ID NO: 1764790 - RNA, 19 nt, Artificial Sequence
  Description of Artificial Sequence: Synthetic oligonucleotide
aggccggacagaagauccc

SEQ ID NO: 1764791 - RNA, 19 nt, Artificial Sequence
  Description of Artificial Sequence: Synthetic oligonucleotide
cagggaucgaggcagaaau

SEQ ID NO: 1764792 - RNA, 19 nt, Artificial Sequence
  Description of Artificial Sequence: Synthetic oligonucleotide
uucgugggagcaggggucu

SEQ ID NO: 1764793 - RNA, 19 nt, Artificial Sequence
  Description of Artificial Sequence: Synthetic oligonucleotide
ccgaaugacauggucucgg

SEQ ID NO: 1764794 - RNA, 19 nt, Artificial Sequence
  Description of Artificial Sequence: Synthetic oligonucleotide
ggucacgcaggugaagcag

SEQ ID NO: 1764795 - RNA, 19 nt, Artificial Sequence
  Description of Artificial Sequence: Synthetic oligonucleotide
augcguugguguccaguga

SEQ ID NO: 1764796 - RNA, 19 nt, Artificial Sequence
  Description of Artificial Sequence: Synthetic oligonucleotide
gccccaggggucuucgugg

SEQ ID NO: 1764797 - RNA, 19 nt, Artificial Sequence
  Description of Artificial Sequence: Synthetic oligonucleotide
ggcacgucuggcuucacaa

SEQ ID NO: 1764798 - RNA, 19 nt, Artificial Sequence
  Description of Artificial Sequence: Synthetic oligonucleotide
gucacgggagggcuggcca

SEQ ID NO: 1764799 - RNA, 19 nt, Artificial Sequence
  Description of Artificial Sequence: Synthetic oligonucleotide
cacagcuacaucacgucgu

SEQ ID NO: 1764800 - RNA, 19 nt, Artificial Sequence
  Description of Artificial Sequence: Synthetic oligonucleotide
guucaggggugcuguguac

SEQ ID NO: 1764801 - RNA, 19 nt, Artificial Sequence
  Description of Artificial Sequence: Synthetic oligonucleotide
cacaggcuugugacagaag

SEQ ID NO: 1764802 - RNA, 19 nt, Artificial Sequence
  Description of Artificial Sequence: Synthetic oligonucleotide
guguccagguguuagguuu

SEQ ID NO: 1764803 - RNA, 19 nt, Artificial Sequence
  Description of Artificial Sequence: Synthetic oligonucleotide
cagugaggcucaaaaggaa

SEQ ID NO: 1764804 - RNA, 19 nt, Artificial Sequence
  Description of Artificial Sequence: Synthetic oligonucleotide
guagcagggcucgcacagg

SEQ ID NO: 1764805 - RNA, 19 nt, Artificial Sequence
  Description of Artificial Sequence: Synthetic oligonucleotide
caggcccuugugucuagac

SEQ ID NO: 1764806 - RNA, 19 nt, Artificial Sequence
  Description of Artificial Sequence: Synthetic oligonucleotide
gagguucaggggugcugug

SEQ ID NO: 1764807 - RNA, 19 nt, Artificial Sequence
  Description of Artificial Sequence: Synthetic oligonucleotide
cuccauuggccagcugggg

SEQ ID NO: 1764808 - RNA, 19 nt, Artificial Sequence
  Description of Artificial Sequence: Synthetic oligonucleotide
cauggucucggaccaccuc

SEQ ID NO: 1764809 - RNA, 19 nt, Artificial Sequence
  Description of Artificial Sequence: Synthetic oligonucleotide
ccagcucucgaggagacac

SEQ ID NO: 1764810 - RNA, 19 nt, Artificial Sequence
  Description of Artificial Sequence: Synthetic oligonucleotide
acgucuggcuucacaagcu

SEQ ID NO: 1764811 - RNA, 19 nt, Artificial Sequence
  Description of Artificial Sequence: Synthetic oligonucleotide
aaggagguucaggggugcu

SEQ ID NO: 1764812 - RNA, 19 nt, Artificial Sequence
  Description of Artificial Sequence: Synthetic oligonucleotide
agggccgggcacgucuggc

SEQ ID NO: 1764813 - RNA, 19 nt, Artificial Sequence
  Description of Artificial Sequence: Synthetic oligonucleotide
acaucuguggaugccucuu

SEQ ID NO: 1764814 - RNA, 19 nt, Artificial Sequence
  Description of Artificial Sequence: Synthetic oligonucleotide
gugcuguguaccaggggug

SEQ ID NO: 1764815 - RNA, 19 nt, Artificial Sequence
  Description of Artificial Sequence: Synthetic oligonucleotide
gucucggaccaccucucca

SEQ ID NO: 1764816 - RNA, 19 nt, Artificial Sequence
  Description of Artificial Sequence: Synthetic oligonucleotide
ggacacugcaauccucaca

SEQ ID NO: 1764817 - RNA, 19 nt, Artificial Sequence
  Description of Artificial Sequence: Synthetic oligonucleotide
cagaagaggcggucauuca

SEQ ID NO: 1764818 - RNA, 19 nt, Artificial Sequence
  Description of Artificial Sequence: Synthetic oligonucleotide
acaagcuuccugacccacu

SEQ ID NO: 1764819 - RNA, 19 nt, Artificial Sequence
  Description of Artificial Sequence: Synthetic oligonucleotide
caugguacugccucuucau

SEQ ID NO: 1764820 - RNA, 19 nt, Artificial Sequence
  Description of Artificial Sequence: Synthetic oligonucleotide
gugucucaggcccuugugu

SEQ ID NO: 1764821 - RNA, 19 nt, Artificial Sequence
  Description of Artificial Sequence: Synthetic oligonucleotide
gcacgucuggcuucacaag

SEQ ID NO: 1764822 - RNA, 19 nt, Artificial Sequence
  Description of Artificial Sequence: Synthetic oligonucleotide
cagcuacaucacgucgugg

SEQ ID NO: 1764823 - RNA, 19 nt, Artificial Sequence
  Description of Artificial Sequence: Synthetic oligonucleotide
ggguagcuccucuucugug

SEQ ID NO: 1764824 - RNA, 19 nt, Artificial Sequence
  Description of Artificial Sequence: Synthetic oligonucleotide
gaggaggugguaggagguc

SEQ ID NO: 1764825 - RNA, 19 nt, Artificial Sequence
  Description of Artificial Sequence: Synthetic oligonucleotide
caucuccgaugcaccgggc

SEQ ID NO: 1764826 - RNA, 19 nt, Artificial Sequence
  Description of Artificial Sequence: Synthetic oligonucleotide
cauggaaguuccuucccau

SEQ ID NO: 1764827 - RNA, 19 nt, Artificial Sequence
  Description of Artificial Sequence: Synthetic oligonucleotide
gcaugguacugccucuuca

SEQ ID NO: 1764828 - RNA, 19 nt, Artificial Sequence
  Description of Artificial Sequence: Synthetic oligonucleotide
gcagacaucuguggaugcc

SEQ ID NO: 1764829 - RNA, 19 nt, Artificial Sequence
  Description of Artificial Sequence: Synthetic oligonucleotide
gaccaccucuccacacuug

SEQ ID NO: 1764830 - RNA, 19 nt, Artificial Sequence
  Description of Artificial Sequence: Synthetic oligonucleotide
gacggcggcaggugcgaca

SEQ ID NO: 1764831 - RNA, 19 nt, Artificial Sequence
  Description of Artificial Sequence: Synthetic oligonucleotide
guaggaggucuagauccuc

SEQ ID NO: 1764832 - RNA, 19 nt, Artificial Sequence
  Description of Artificial Sequence: Synthetic oligonucleotide
gcggucauucagcggguag

SEQ ID NO: 1764833 - RNA, 19 nt, Artificial Sequence
  Description of Artificial Sequence: Synthetic oligonucleotide
uccagguguuagguuuccu

SEQ ID NO: 1764834 - RNA, 19 nt, Artificial Sequence
  Description of Artificial Sequence: Synthetic oligonucleotide
ggguagcagccuuggucgg

SEQ ID NO: 1764835 - RNA, 19 nt, Artificial Sequence
  Description of Artificial Sequence: Synthetic oligonucleotide
cagcggguagcagccuugg

SEQ ID NO: 1764836 - RNA, 19 nt, Artificial Sequence
  Description of Artificial Sequence: Synthetic oligonucleotide
ggcuugugacagaagccgc

SEQ ID NO: 1764837 - RNA, 19 nt, Artificial Sequence
  Description of Artificial Sequence: Synthetic oligonucleotide
gcucaaaaggaaaguaugu

SEQ ID NO: 1764838 - RNA, 19 nt, Artificial Sequence
  Description of Artificial Sequence: Synthetic oligonucleotide
cucacaucgguaacaguuu

SEQ ID NO: 1764839 - RNA, 19 nt, Artificial Sequence
  Description of Artificial Sequence: Synthetic oligonucleotide
cucaggcccuugugucuag

SEQ ID NO: 1764840 - RNA, 19 nt, Artificial Sequence
  Description of Artificial Sequence: Synthetic oligonucleotide
ggucauucagcggguagca

SEQ ID NO: 1764841 - RNA, 19 nt, Artificial Sequence
  Description of Artificial Sequence: Synthetic oligonucleotide
ccucacaucgguaacaguu

SEQ ID NO: 1764842 - RNA, 19 nt, Artificial Sequence
  Description of Artificial Sequence: Synthetic oligonucleotide
gguuagguggggaaaccaa

SEQ ID NO: 1764843 - RNA, 19 nt, Artificial Sequence
  Description of Artificial Sequence: Synthetic oligonucleotide
cugcaauccucacaucggu

SEQ ID NO: 1764844 - RNA, 19 nt, Artificial Sequence
  Description of Artificial Sequence: Synthetic oligonucleotide
ggcucuucuggaggagggg

SEQ ID NO: 1764845 - RNA, 19 nt, Artificial Sequence
  Description of Artificial Sequence: Synthetic oligonucleotide
ccggacagaagaucccuuc

SEQ ID NO: 1764846 - RNA, 19 nt, Artificial Sequence
  Description of Artificial Sequence: Synthetic oligonucleotide
guccagguguuagguuucc

SEQ ID NO: 1764847 - RNA, 19 nt, Artificial Sequence
  Description of Artificial Sequence: Synthetic oligonucleotide
gguucaggggugcugugua

SEQ ID NO: 1764848 - RNA, 19 nt, Artificial Sequence
  Description of Artificial Sequence: Synthetic oligonucleotide
aggggucucccagggccgg

SEQ ID NO: 1764849 - RNA, 19 nt, Artificial Sequence
  Description of Artificial Sequence: Synthetic oligonucleotide
ggcaguacaccugguucug

SEQ ID NO: 1764850 - RNA, 19 nt, Artificial Sequence
  Description of Artificial Sequence: Synthetic oligonucleotide
ucaggcccuugugucuaga

SEQ ID NO: 1764851 - RNA, 19 nt, Artificial Sequence
  Description of Artificial Sequence: Synthetic oligonucleotide
caggggugcuguguaccag

SEQ ID NO: 1764852 - RNA, 19 nt, Artificial Sequence
  Description of Artificial Sequence: Synthetic oligonucleotide
gcaguacaccugguucugg

SEQ ID NO: 1764853 - RNA, 19 nt, Artificial Sequence
  Description of Artificial Sequence: Synthetic oligonucleotide
ugcagggaucgaggcagaa

SEQ ID NO: 1764854 - RNA, 19 nt, Artificial Sequence
  Description of Artificial Sequence: Synthetic oligonucleotide
ugacauggucucggaccac

SEQ ID NO: 1764855 - RNA, 19 nt, Artificial Sequence
  Description of Artificial Sequence: Synthetic oligonucleotide
ggucucggaccaccucucc

SEQ ID NO: 1764856 - RNA, 19 nt, Artificial Sequence
  Description of Artificial Sequence: Synthetic oligonucleotide
agcggguagcagccuuggu

SEQ ID NO: 1764857 - RNA, 19 nt, Artificial Sequence
  Description of Artificial Sequence: Synthetic oligonucleotide
uccuucccaugcacucaau

SEQ ID NO: 1764858 - RNA, 19 nt, Artificial Sequence
  Description of Artificial Sequence: Synthetic oligonucleotide
gaucccuucgguggagccu

SEQ ID NO: 1764859 - RNA, 19 nt, Artificial Sequence
  Description of Artificial Sequence: Synthetic oligonucleotide
accgggcacaggucacgca

SEQ ID NO: 1764860 - RNA, 19 nt, Artificial Sequence
  Description of Artificial Sequence: Synthetic oligonucleotide
cagaagccgcagacaucug

SEQ ID NO: 1764861 - RNA, 19 nt, Artificial Sequence
  Description of Artificial Sequence: Synthetic oligonucleotide
gggguuagguggggaaacc

SEQ ID NO: 1764862 - RNA, 19 nt, Artificial Sequence
  Description of Artificial Sequence: Synthetic oligonucleotide
cucggaccaccucuccaca

SEQ ID NO: 1764863 - RNA, 19 nt, Artificial Sequence
  Description of Artificial Sequence: Synthetic oligonucleotide
gcguugguguccagugagg

SEQ ID NO: 1764864 - RNA, 19 nt, Artificial Sequence
  Description of Artificial Sequence: Synthetic oligonucleotide
gcgaaucucucaucuccga

SEQ ID NO: 1764865 - RNA, 19 nt, Artificial Sequence
  Description of Artificial Sequence: Synthetic oligonucleotide
cagcacccuccauuggcca

SEQ ID NO: 1764866 - RNA, 19 nt, Artificial Sequence
  Description of Artificial Sequence: Synthetic oligonucleotide
gggugccagggugauaaac

SEQ ID NO: 1764867 - RNA, 19 nt, Artificial Sequence
  Description of Artificial Sequence: Synthetic oligonucleotide
ccaagucacgggagggcug

SEQ ID NO: 1764868 - RNA, 19 nt, Artificial Sequence
  Description of Artificial Sequence: Synthetic oligonucleotide
ggucuucgugggagcaggg

SEQ ID NO: 1764869 - RNA, 19 nt, Artificial Sequence
  Description of Artificial Sequence: Synthetic oligonucleotide
cggugggcuccacagacag

SEQ ID NO: 1764870 - RNA, 19 nt, Artificial Sequence
  Description of Artificial Sequence: Synthetic oligonucleotide
cccugcagcacuccucuuc

SEQ ID NO: 1764871 - RNA, 19 nt, Artificial Sequence
  Description of Artificial Sequence: Synthetic oligonucleotide
ccucuucauggccucaaca

SEQ ID NO: 1764872 - RNA, 19 nt, Artificial Sequence
  Description of Artificial Sequence: Synthetic oligonucleotide
caggguggguggaaggccu

SEQ ID NO: 1764873 - RNA, 19 nt, Artificial Sequence
  Description of Artificial Sequence: Synthetic oligonucleotide
auucagcggguagcagccu

SEQ ID NO: 1764874 - RNA, 19 nt, Artificial Sequence
  Description of Artificial Sequence: Synthetic oligonucleotide
ucuggucguccagcgcgaa

SEQ ID NO: 1764875 - RNA, 19 nt, Artificial Sequence
  Description of Artificial Sequence: Synthetic oligonucleotide
cagccagcucucgaggaga

SEQ ID NO: 1764876 - RNA, 19 nt, Artificial Sequence
  Description of Artificial Sequence: Synthetic oligonucleotide
ccgcagacaucuguggaug

SEQ ID NO: 1764877 - RNA, 19 nt, Artificial Sequence
  Description of Artificial Sequence: Synthetic oligonucleotide
gcacuccucuucauauggc

SEQ ID NO: 1764878 - RNA, 19 nt, Artificial Sequence
  Description of Artificial Sequence: Synthetic oligonucleotide
ggggcgcccauccuucuga

SEQ ID NO: 1764879 - RNA, 19 nt, Artificial Sequence
  Description of Artificial Sequence: Synthetic oligonucleotide
ggcaugguacugccucuuc

SEQ ID NO: 1764880 - RNA, 19 nt, Artificial Sequence
  Description of Artificial Sequence: Synthetic oligonucleotide
guccagcgcgaaucucuca

SEQ ID NO: 1764881 - RNA, 19 nt, Artificial Sequence
  Description of Artificial Sequence: Synthetic oligonucleotide
cucagccccagugaaggcu

SEQ ID NO: 1764882 - RNA, 19 nt, Artificial Sequence
  Description of Artificial Sequence: Synthetic oligonucleotide
ggaucgaggcagaaauucu

SEQ ID NO: 1764883 - RNA, 19 nt, Artificial Sequence
  Description of Artificial Sequence: Synthetic oligonucleotide
gcccagccagcugacggcg

SEQ ID NO: 1764884 - RNA, 19 nt, Artificial Sequence
  Description of Artificial Sequence: Synthetic oligonucleotide
gggcccgaaugacaugguc

SEQ ID NO: 1764885 - RNA, 19 nt, Artificial Sequence
  Description of Artificial Sequence: Synthetic oligonucleotide
agggaucgaggcagaaauu

SEQ ID NO: 1764886 - RNA, 19 nt, Artificial Sequence
  Description of Artificial Sequence: Synthetic oligonucleotide
gcuguguaccaggggugag

SEQ ID NO: 1764887 - RNA, 19 nt, Artificial Sequence
  Description of Artificial Sequence: Synthetic oligonucleotide
ggagguucaggggugcugu

SEQ ID NO: 1764888 - RNA, 19 nt, Artificial Sequence
  Description of Artificial Sequence: Synthetic oligonucleotide
cgcagacaucuguggaugc

SEQ ID NO: 1764889 - RNA, 19 nt, Artificial Sequence
  Description of Artificial Sequence: Synthetic oligonucleotide
gcuugcagaagaggcgguc

SEQ ID NO: 1764890 - RNA, 19 nt, Artificial Sequence
  Description of Artificial Sequence: Synthetic oligonucleotide
caaugcguugguguccagu

SEQ ID NO: 1764891 - RNA, 19 nt, Artificial Sequence
  Description of Artificial Sequence: Synthetic oligonucleotide
caucgguaacaguuuucau

SEQ ID NO: 1764892 - RNA, 19 nt, Artificial Sequence
  Description of Artificial Sequence: Synthetic oligonucleotide
ucccuucgguggagccugu

SEQ ID NO: 1764893 - RNA, 19 nt, Artificial Sequence
  Description of Artificial Sequence: Synthetic oligonucleotide
ggggacagcacccuccauu

SEQ ID NO: 1764894 - RNA, 19 nt, Artificial Sequence
  Description of Artificial Sequence: Synthetic oligonucleotide
gccagcugacggcggcagg

SEQ ID NO: 1764895 - RNA, 19 nt, Artificial Sequence
  Description of Artificial Sequence: Synthetic oligonucleotide
ggucggugggcuccacaga

SEQ ID NO: 1764896 - RNA, 19 nt, Artificial Sequence
  Description of Artificial Sequence: Synthetic oligonucleotide
ggaggaggugguaggaggu

SEQ ID NO: 1764897 - RNA, 19 nt, Artificial Sequence
  Description of Artificial Sequence: Synthetic oligonucleotide
ccucagccccagugaaggc

SEQ ID NO: 1764898 - RNA, 19 nt, Artificial Sequence
  Description of Artificial Sequence: Synthetic oligonucleotide
gggguagcuccucuucugu

SEQ ID NO: 1764899 - RNA, 19 nt, Artificial Sequence
  Description of Artificial Sequence: Synthetic oligonucleotide
cccaugcacucaaucuuga

SEQ ID NO: 1764900 - RNA, 19 nt, Artificial Sequence
  Description of Artificial Sequence: Synthetic oligonucleotide
cacugagcaaugcguuggu

SEQ ID NO: 1764901 - RNA, 19 nt, Artificial Sequence
  Description of Artificial Sequence: Synthetic oligonucleotide
gucguccagcgcgaaucuc

SEQ ID NO: 1764902 - RNA, 19 nt, Artificial Sequence
  Description of Artificial Sequence: Synthetic oligonucleotide
cucaggcuuggaggccaug

SEQ ID NO: 1764903 - RNA, 19 nt, Artificial Sequence
  Description of Artificial Sequence: Synthetic oligonucleotide
cugcagggaucgaggcaga

SEQ ID NO: 1764904 - RNA, 19 nt, Artificial Sequence
  Description of Artificial Sequence: Synthetic oligonucleotide
gggcacgucuggcuucaca

SEQ ID NO: 1764905 - RNA, 19 nt, Artificial Sequence
  Description of Artificial Sequence: Synthetic oligonucleotide
gugcacugagcaaugcguu

SEQ ID NO: 1764906 - RNA, 19 nt, Artificial Sequence
  Description of Artificial Sequence: Synthetic oligonucleotide
gguaggaggucuagauccu

SEQ ID NO: 1764907 - RNA, 19 nt, Artificial Sequence
  Description of Artificial Sequence: Synthetic oligonucleotide
aggcggucauucagcgggu

SEQ ID NO: 1764908 - RNA, 19 nt, Artificial Sequence
  Description of Artificial Sequence: Synthetic oligonucleotide
aggcuguaggaaggagguu

SEQ ID NO: 1764909 - RNA, 19 nt, Artificial Sequence
  Description of Artificial Sequence: Synthetic oligonucleotide
cgaaugacauggucucgga

SEQ ID NO: 1764910 - RNA, 19 nt, Artificial Sequence
  Description of Artificial Sequence: Synthetic oligonucleotide
gccgcagacaucuguggau

SEQ ID NO: 1764911 - RNA, 19 nt, Artificial Sequence
  Description of Artificial Sequence: Synthetic oligonucleotide
cuuggucggugggcuccac

SEQ ID NO: 1764912 - RNA, 19 nt, Artificial Sequence
  Description of Artificial Sequence: Synthetic oligonucleotide
ggguggguggaaggccuug

SEQ ID NO: 1764913 - RNA, 19 nt, Artificial Sequence
  Description of Artificial Sequence: Synthetic oligonucleotide
agggcccgaaugacauggu

SEQ ID NO: 1764914 - RNA, 19 nt, Artificial Sequence
  Description of Artificial Sequence: Synthetic oligonucleotide
gcaaugcguugguguccag

SEQ ID NO: 1764915 - RNA, 19 nt, Artificial Sequence
  Description of Artificial Sequence: Synthetic oligonucleotide
ggucguccagcgcgaaucu

SEQ ID NO: 1764916 - RNA, 19 nt, Artificial Sequence
  Description of Artificial Sequence: Synthetic oligonucleotide
ggcaggugcgacaggugaa

SEQ ID NO: 1764917 - RNA, 19 nt, Artificial Sequence
  Description of Artificial Sequence: Synthetic oligonucleotide
acccuccauuggccagcug

SEQ ID NO: 1764918 - RNA, 19 nt, Artificial Sequence
  Description of Artificial Sequence: Synthetic oligonucleotide
caucuguggaugccucuuu

SEQ ID NO: 1764919 - RNA, 19 nt, Artificial Sequence
  Description of Artificial Sequence: Synthetic oligonucleotide
cguccagcgcgaaucucuc

SEQ ID NO: 1764920 - RNA, 19 nt, Artificial Sequence
  Description of Artificial Sequence: Synthetic oligonucleotide
ggguguccagguguuaggu

SEQ ID NO: 1764921 - RNA, 19 nt, Artificial Sequence
  Description of Artificial Sequence: Synthetic oligonucleotide
gguguccagguguuagguu

SEQ ID NO: 1764922 - RNA, 19 nt, Artificial Sequence
  Description of Artificial Sequence: Synthetic oligonucleotide
agaggccagguaggccgaa

SEQ ID NO: 1764923 - RNA, 19 nt, Artificial Sequence
  Description of Artificial Sequence: Synthetic oligonucleotide
cuucugggagaggccaggu

SEQ ID NO: 1764924 - RNA, 19 nt, Artificial Sequence
  Description of Artificial Sequence: Synthetic oligonucleotide
gggcacaggucacgcaggu

SEQ ID NO: 1764925 - RNA, 19 nt, Artificial Sequence
  Description of Artificial Sequence: Synthetic oligonucleotide
gccgggcacgucuggcuuc

SEQ ID NO: 1764926 - RNA, 19 nt, Artificial Sequence
  Description of Artificial Sequence: Synthetic oligonucleotide
ggccggacagaagaucccu

SEQ ID NO: 1764927 - RNA, 19 nt, Artificial Sequence
  Description of Artificial Sequence: Synthetic oligonucleotide
gguagcagccuuggucggu

SEQ ID NO: 1764928 - RNA, 19 nt, Artificial Sequence
  Description of Artificial Sequence: Synthetic oligonucleotide
aggguggguggaaggccuu

SEQ ID NO: 1764929 - RNA, 19 nt, Artificial Sequence
  Description of Artificial Sequence: Synthetic oligonucleotide
agccccagugaaggcugua

SEQ ID NO: 1764930 - RNA, 19 nt, Artificial Sequence
  Description of Artificial Sequence: Synthetic oligonucleotide
cacgcaggugaagcagggu

SEQ ID NO: 1764931 - RNA, 19 nt, Artificial Sequence
  Description of Artificial Sequence: Synthetic oligonucleotide
cuggucguccagcgcgaau

SEQ ID NO: 1764932 - RNA, 19 nt, Artificial Sequence
  Description of Artificial Sequence: Synthetic oligonucleotide
gggccgggcacgucuggcu

SEQ ID NO: 1764933 - RNA, 19 nt, Artificial Sequence
  Description of Artificial Sequence: Synthetic oligonucleotide
ggcgcccauccuucugaua

SEQ ID NO: 1764934 - RNA, 19 nt, Artificial Sequence
  Description of Artificial Sequence: Synthetic oligonucleotide
ccugacccacuucuucagu

SEQ ID NO: 1764935 - RNA, 19 nt, Artificial Sequence
  Description of Artificial Sequence: Synthetic oligonucleotide
cgaaucucucaucuccgau

SEQ ID NO: 1764936 - RNA, 19 nt, Artificial Sequence
  Description of Artificial Sequence: Synthetic oligonucleotide
gcccuugugucuagacacu

SEQ ID NO: 1764937 - RNA, 19 nt, Artificial Sequence
  Description of Artificial Sequence: Synthetic oligonucleotide
ccagcugacggcggcaggu

SEQ ID NO: 1764938 - RNA, 19 nt, Artificial Sequence
  Description of Artificial Sequence: Synthetic oligonucleotide
gugaagcacugggcauggu

SEQ ID NO: 1764939 - RNA, 19 nt, Artificial Sequence
  Description of Artificial Sequence: Synthetic oligonucleotide
cgcccauccuucugauaga

SEQ ID NO: 1764940 - RNA, 19 nt, Artificial Sequence
  Description of Artificial Sequence: Synthetic oligonucleotide
ggggugccagggugauaaa

SEQ ID NO: 1764941 - RNA, 19 nt, Artificial Sequence
  Description of Artificial Sequence: Synthetic oligonucleotide
cacccuccauuggccagcu

SEQ ID NO: 1764942 - RNA, 19 nt, Artificial Sequence
  Description of Artificial Sequence: Synthetic oligonucleotide
ggcggucauucagcgggua

SEQ ID NO: 1764943 - RNA, 19 nt, Artificial Sequence
  Description of Artificial Sequence: Synthetic oligonucleotide
ccgaugcaccgggcacagg

SEQ ID NO: 1764944 - RNA, 19 nt, Artificial Sequence
  Description of Artificial Sequence: Synthetic oligonucleotide
cccuucgguggagccugug

SEQ ID NO: 1764945 - RNA, 19 nt, Artificial Sequence
  Description of Artificial Sequence: Synthetic oligonucleotide
cccaggggucuucguggga

SEQ ID NO: 1764946 - RNA, 19 nt, Artificial Sequence
  Description of Artificial Sequence: Synthetic oligonucleotide
ccgggcacgucuggcuuca

SEQ ID NO: 1764947 - RNA, 19 nt, Artificial Sequence
  Description of Artificial Sequence: Synthetic oligonucleotide
cccauccuucugauagaau

SEQ ID NO: 1764948 - RNA, 19 nt, Artificial Sequence
  Description of Artificial Sequence: Synthetic oligonucleotide
ccgugucucaggcccuugu

SEQ ID NO: 1764949 - RNA, 19 nt, Artificial Sequence
  Description of Artificial Sequence: Synthetic oligonucleotide
ccacagacaggaggacacu

SEQ ID NO: 1764950 - RNA, 19 nt, Artificial Sequence
  Description of Artificial Sequence: Synthetic oligonucleotide
gccggacagaagaucccuu

SEQ ID NO: 1764951 - RNA, 19 nt, Artificial Sequence
  Description of Artificial Sequence: Synthetic oligonucleotide
cgggcacgucuggcuucac

SEQ ID NO: 1764952 - RNA, 19 nt, Artificial Sequence
  Description of Artificial Sequence: Synthetic oligonucleotide
ccccgugucucaggcccuu

SEQ ID NO: 1764953 - RNA, 19 nt, Artificial Sequence
  Description of Artificial Sequence: Synthetic oligonucleotide
uuaaacuaaagaaaauacg

SEQ ID NO: 1764954 - RNA, 19 nt, Artificial Sequence
  Description of Artificial Sequence: Synthetic oligonucleotide
ugcagaguagaaaagaugg

SEQ ID NO: 1764955 - RNA, 19 nt, Artificial Sequence
  Description of Artificial Sequence: Synthetic oligonucleotide
aaauacguaagucucggac

SEQ ID NO: 1764956 - RNA, 19 nt, Artificial Sequence
  Description of Artificial Sequence: Synthetic oligonucleotide
aguccuuugauacugaguc

SEQ ID NO: 1764957 - RNA, 19 nt, Artificial Sequence
  Description of Artificial Sequence: Synthetic oligonucleotide
aacuucagacucuucaagc

SEQ ID NO: 1764958 - RNA, 19 nt, Artificial Sequence
  Description of Artificial Sequence: Synthetic oligonucleotide
auaagaaacgcacugacug

SEQ ID NO: 1764959 - RNA, 19 nt, Artificial Sequence
  Description of Artificial Sequence: Synthetic oligonucleotide
uuaguaagcgcauuguagg

SEQ ID NO: 1764960 - RNA, 19 nt, Artificial Sequence
  Description of Artificial Sequence: Synthetic oligonucleotide
uaacuuuacauauuuacca

SEQ ID NO: 1764961 - RNA, 19 nt, Artificial Sequence
  Description of Artificial Sequence: Synthetic oligonucleotide
aacuaaagaaaauacguaa

SEQ ID NO: 1764962 - RNA, 19 nt, Artificial Sequence
  Description of Artificial Sequence: Synthetic oligonucleotide
uguguaaccaacacaauga

SEQ ID NO: 1764963 - RNA, 19 nt, Artificial Sequence
  Description of Artificial Sequence: Synthetic oligonucleotide
ucuugugcgaaccuggagg

SEQ ID NO: 1764964 - RNA, 19 nt, Artificial Sequence
  Description of Artificial Sequence: Synthetic oligonucleotide
cuguuaaccaauuaguaag

SEQ ID NO: 1764965 - RNA, 19 nt, Artificial Sequence
  Description of Artificial Sequence: Synthetic oligonucleotide
aauguucugacucgccagc

SEQ ID NO: 1764966 - RNA, 19 nt, Artificial Sequence
  Description of Artificial Sequence: Synthetic oligonucleotide
augccuaacagccacauuc

SEQ ID NO: 1764967 - RNA, 19 nt, Artificial Sequence
  Description of Artificial Sequence: Synthetic oligonucleotide
acuuuacauauuuaccacc

SEQ ID NO: 1764968 - RNA, 19 nt, Artificial Sequence
  Description of Artificial Sequence: Synthetic oligonucleotide
cuaauugaacugaugaagc

SEQ ID NO: 1764969 - RNA, 19 nt, Artificial Sequence
  Description of Artificial Sequence: Synthetic oligonucleotide
uaagucucggacauggcgg

SEQ ID NO: 1764970 - RNA, 19 nt, Artificial Sequence
  Description of Artificial Sequence: Synthetic oligonucleotide
aauacguaagucucggaca

SEQ ID NO: 1764971 - RNA, 19 nt, Artificial Sequence
  Description of Artificial Sequence: Synthetic oligonucleotide
uuaaguauuuuccuugcac

SEQ ID NO: 1764972 - RNA, 19 nt, Artificial Sequence
  Description of Artificial Sequence: Synthetic oligonucleotide
caucuaaagguauuguccg

SEQ ID NO: 1764973 - RNA, 19 nt, Artificial Sequence
  Description of Artificial Sequence: Synthetic oligonucleotide
augaugacaauguucugac

SEQ ID NO: 1764974 - RNA, 19 nt, Artificial Sequence
  Description of Artificial Sequence: Synthetic oligonucleotide
aacgcacugacuguuagcg

SEQ ID NO: 1764975 - RNA, 19 nt, Artificial Sequence
  Description of Artificial Sequence: Synthetic oligonucleotide
ucuacuucugugcagagua

SEQ ID NO: 1764976 - RNA, 19 nt, Artificial Sequence
  Description of Artificial Sequence: Synthetic oligonucleotide
aaagguauuguccgcugag

SEQ ID NO: 1764977 - RNA, 19 nt, Artificial Sequence
  Description of Artificial Sequence: Synthetic oligonucleotide
gaaccuggaggcuucaagg

SEQ ID NO: 1764978 - RNA, 19 nt, Artificial Sequence
  Description of Artificial Sequence: Synthetic oligonucleotide
uuacauauuuaccaccaac

SEQ ID NO: 1764979 - RNA, 19 nt, Artificial Sequence
  Description of Artificial Sequence: Synthetic oligonucleotide
uuaaccaauuaguaagcgc

SEQ ID NO: 1764980 - RNA, 19 nt, Artificial Sequence
  Description of Artificial Sequence: Synthetic oligonucleotide
accugaaucguuccugucc

SEQ ID NO: 1764981 - RNA, 19 nt, Artificial Sequence
  Description of Artificial Sequence: Synthetic oligonucleotide
uguuaaccaauuaguaagc

SEQ ID NO: 1764982 - RNA, 19 nt, Artificial Sequence
  Description of Artificial Sequence: Synthetic oligonucleotide
uuuaccaccaacauuuauu

SEQ ID NO: 1764983 - RNA, 19 nt, Artificial Sequence
  Description of Artificial Sequence: Synthetic oligonucleotide
uuugagucaucuuugaauu

SEQ ID NO: 1764984 - RNA, 19 nt, Artificial Sequence
  Description of Artificial Sequence: Synthetic oligonucleotide
aaugagaaaagcacgcuca

SEQ ID NO: 1764985 - RNA, 19 nt, Artificial Sequence
  Description of Artificial Sequence: Synthetic oligonucleotide
ucuguuaaccaauuaguaa

SEQ ID NO: 1764986 - RNA, 19 nt, Artificial Sequence
  Description of Artificial Sequence: Synthetic oligonucleotide
auuugagucaucuuugaau

SEQ ID NO: 1764987 - RNA, 19 nt, Artificial Sequence
  Description of Artificial Sequence: Synthetic oligonucleotide
auguguaaccaacacaaug

SEQ ID NO: 1764988 - RNA, 19 nt, Artificial Sequence
  Description of Artificial Sequence: Synthetic oligonucleotide
agacucuucaagcuccagc

SEQ ID NO: 1764989 - RNA, 19 nt, Artificial Sequence
  Description of Artificial Sequence: Synthetic oligonucleotide
aaacgcacugacuguuagc

SEQ ID NO: 1764990 - RNA, 19 nt, Artificial Sequence
  Description of Artificial Sequence: Synthetic oligonucleotide
gaaaagcacgcucacauuc

SEQ ID NO: 1764991 - RNA, 19 nt, Artificial Sequence
  Description of Artificial Sequence: Synthetic oligonucleotide
guaagucucggacauggcg

SEQ ID NO: 1764992 - RNA, 19 nt, Artificial Sequence
  Description of Artificial Sequence: Synthetic oligonucleotide
gcaagcaagaauuugccgg

SEQ ID NO: 1764993 - RNA, 19 nt, Artificial Sequence
  Description of Artificial Sequence: Synthetic oligonucleotide
uguuaaguauuuuccuugc

SEQ ID NO: 1764994 - RNA, 19 nt, Artificial Sequence
  Description of Artificial Sequence: Synthetic oligonucleotide
agaauuugccgguucccgc

SEQ ID NO: 1764995 - RNA, 19 nt, Artificial Sequence
  Description of Artificial Sequence: Synthetic oligonucleotide
aaagcacgcucacauucac

SEQ ID NO: 1764996 - RNA, 19 nt, Artificial Sequence
  Description of Artificial Sequence: Synthetic oligonucleotide
aaggaaggugacuucccgg

SEQ ID NO: 1764997 - RNA, 19 nt, Artificial Sequence
  Description of Artificial Sequence: Synthetic oligonucleotide
auauguguaaccaacacaa

SEQ ID NO: 1764998 - RNA, 19 nt, Artificial Sequence
  Description of Artificial Sequence: Synthetic oligonucleotide
uuuucuaauugaacugaug

SEQ ID NO: 1764999 - RNA, 19 nt, Artificial Sequence
  Description of Artificial Sequence: Synthetic oligonucleotide
agucauauguguaaccaac

SEQ ID NO: 1765000 - RNA, 19 nt, Artificial Sequence
  Description of Artificial Sequence: Synthetic oligonucleotide
ugaguuaguuugcaguaug

SEQ ID NO: 1765001 - RNA, 19 nt, Artificial Sequence
  Description of Artificial Sequence: Synthetic oligonucleotide
auuaguaagcgcauuguag

SEQ ID NO: 1765002 - RNA, 19 nt, Artificial Sequence
  Description of Artificial Sequence: Synthetic oligonucleotide
ugaguuggguagauguggg

SEQ ID NO: 1765003 - RNA, 19 nt, Artificial Sequence
  Description of Artificial Sequence: Synthetic oligonucleotide
gaaggugacuucccggucg

SEQ ID NO: 1765004 - RNA, 19 nt, Artificial Sequence
  Description of Artificial Sequence: Synthetic oligonucleotide
aagaauuugccgguucccg

SEQ ID NO: 1765005 - RNA, 19 nt, Artificial Sequence
  Description of Artificial Sequence: Synthetic oligonucleotide
acuaaagaaaauacguaag

SEQ ID NO: 1765006 - RNA, 19 nt, Artificial Sequence
  Description of Artificial Sequence: Synthetic oligonucleotide
uagguuuagcauuucaggu

SEQ ID NO: 1765007 - RNA, 19 nt, Artificial Sequence
  Description of Artificial Sequence: Synthetic oligonucleotide
guaacuuuacauauuuacc

SEQ ID NO: 1765008 - RNA, 19 nt, Artificial Sequence
  Description of Artificial Sequence: Synthetic oligonucleotide
ucauauguguaaccaacac

SEQ ID NO: 1765009 - RNA, 19 nt, Artificial Sequence
  Description of Artificial Sequence: Synthetic oligonucleotide
caacucauucucuugugcg

SEQ ID NO: 1765010 - RNA, 19 nt, Artificial Sequence
  Description of Artificial Sequence: Synthetic oligonucleotide
aguuaguuugcaguauggc

SEQ ID NO: 1765011 - RNA, 19 nt, Artificial Sequence
  Description of Artificial Sequence: Synthetic oligonucleotide
ugauacugagucauaugug

SEQ ID NO: 1765012 - RNA, 19 nt, Artificial Sequence
  Description of Artificial Sequence: Synthetic oligonucleotide
aauuaguaagcgcauugua

SEQ ID NO: 1765013 - RNA, 19 nt, Artificial Sequence
  Description of Artificial Sequence: Synthetic oligonucleotide
ucaacucauucucuugugc

SEQ ID NO: 1765014 - RNA, 19 nt, Artificial Sequence
  Description of Artificial Sequence: Synthetic oligonucleotide
uguccgcugaguuaguuug

SEQ ID NO: 1765015 - RNA, 19 nt, Artificial Sequence
  Description of Artificial Sequence: Synthetic oligonucleotide
uuuguuaaguauuuuccuu

SEQ ID NO: 1765016 - RNA, 19 nt, Artificial Sequence
  Description of Artificial Sequence: Synthetic oligonucleotide
agggauuaaauaagaaacg

SEQ ID NO: 1765017 - RNA, 19 nt, Artificial Sequence
  Description of Artificial Sequence: Synthetic oligonucleotide
aaaaggacaagagggauua

SEQ ID NO: 1765018 - RNA, 19 nt, Artificial Sequence
  Description of Artificial Sequence: Synthetic oligonucleotide
ugagucauauguguaacca

SEQ ID NO: 1765019 - RNA, 19 nt, Artificial Sequence
  Description of Artificial Sequence: Synthetic oligonucleotide
aagaucuacuucugugcag

SEQ ID NO: 1765020 - RNA, 19 nt, Artificial Sequence
  Description of Artificial Sequence: Synthetic oligonucleotide
aauugaacugaugaagcaa

SEQ ID NO: 1765021 - RNA, 19 nt, Artificial Sequence
  Description of Artificial Sequence: Synthetic oligonucleotide
uuuagcauuucaggugugg

SEQ ID NO: 1765022 - RNA, 19 nt, Artificial Sequence
  Description of Artificial Sequence: Synthetic oligonucleotide
agguuuagcauuucaggug

SEQ ID NO: 1765023 - RNA, 19 nt, Artificial Sequence
  Description of Artificial Sequence: Synthetic oligonucleotide
uccacuuuauuuccagaug

SEQ ID NO: 1765024 - RNA, 19 nt, Artificial Sequence
  Description of Artificial Sequence: Synthetic oligonucleotide
acuguuagcgccagagucc

SEQ ID NO: 1765025 - RNA, 19 nt, Artificial Sequence
  Description of Artificial Sequence: Synthetic oligonucleotide
uguaaccaacacaaugaga

SEQ ID NO: 1765026 - RNA, 19 nt, Artificial Sequence
  Description of Artificial Sequence: Synthetic oligonucleotide
uuaccaccaacauuuauua

SEQ ID NO: 1765027 - RNA, 19 nt, Artificial Sequence
  Description of Artificial Sequence: Synthetic oligonucleotide
ucaacguucucaccaguca

SEQ ID NO: 1765028 - RNA, 19 nt, Artificial Sequence
  Description of Artificial Sequence: Synthetic oligonucleotide
cuuuacauauuuaccacca

SEQ ID NO: 1765029 - RNA, 19 nt, Artificial Sequence
  Description of Artificial Sequence: Synthetic oligonucleotide
cauuccugugcauuugggg

SEQ ID NO: 1765030 - RNA, 19 nt, Artificial Sequence
  Description of Artificial Sequence: Synthetic oligonucleotide
aacucauucucuugugcga

SEQ ID NO: 1765031 - RNA, 19 nt, Artificial Sequence
  Description of Artificial Sequence: Synthetic oligonucleotide
uccuaugguaugauuugag

SEQ ID NO: 1765032 - RNA, 19 nt, Artificial Sequence
  Description of Artificial Sequence: Synthetic oligonucleotide
uacaguuccgcgugguccg

SEQ ID NO: 1765033 - RNA, 19 nt, Artificial Sequence
  Description of Artificial Sequence: Synthetic oligonucleotide
augagaaaagcacgcucac

SEQ ID NO: 1765034 - RNA, 19 nt, Artificial Sequence
  Description of Artificial Sequence: Synthetic oligonucleotide
guagcuucuugucacagac

SEQ ID NO: 1765035 - RNA, 19 nt, Artificial Sequence
  Description of Artificial Sequence: Synthetic oligonucleotide
gacuguuagcgccagaguc

SEQ ID NO: 1765036 - RNA, 19 nt, Artificial Sequence
  Description of Artificial Sequence: Synthetic oligonucleotide
ugagccaaauuccacuccu

SEQ ID NO: 1765037 - RNA, 19 nt, Artificial Sequence
  Description of Artificial Sequence: Synthetic oligonucleotide
agcaagcaagaauuugccg

SEQ ID NO: 1765038 - RNA, 19 nt, Artificial Sequence
  Description of Artificial Sequence: Synthetic oligonucleotide
accaccaacauuuauuauu

SEQ ID NO: 1765039 - RNA, 19 nt, Artificial Sequence
  Description of Artificial Sequence: Synthetic oligonucleotide
aauaagaaacgcacugacu

SEQ ID NO: 1765040 - RNA, 19 nt, Artificial Sequence
  Description of Artificial Sequence: Synthetic oligonucleotide
uuguagguuucucggcugg

SEQ ID NO: 1765041 - RNA, 19 nt, Artificial Sequence
  Description of Artificial Sequence: Synthetic oligonucleotide
aaacuaaagaaaauacgua

SEQ ID NO: 1765042 - RNA, 19 nt, Artificial Sequence
  Description of Artificial Sequence: Synthetic oligonucleotide
guuaaccaauuaguaagcg

SEQ ID NO: 1765043 - RNA, 19 nt, Artificial Sequence
  Description of Artificial Sequence: Synthetic oligonucleotide
acuccuaugguaugauuug

SEQ ID NO: 1765044 - RNA, 19 nt, Artificial Sequence
  Description of Artificial Sequence: Synthetic oligonucleotide
acugagucauauguguaac

SEQ ID NO: 1765045 - RNA, 19 nt, Artificial Sequence
  Description of Artificial Sequence: Synthetic oligonucleotide
ugugaguuggguagaugug

SEQ ID NO: 1765046 - RNA, 19 nt, Artificial Sequence
  Description of Artificial Sequence: Synthetic oligonucleotide
cuugugcgaaccuggaggc

SEQ ID NO: 1765047 - RNA, 19 nt, Artificial Sequence
  Description of Artificial Sequence: Synthetic oligonucleotide
ucuccauacuggaugccag

SEQ ID NO: 1765048 - RNA, 19 nt, Artificial Sequence
  Description of Artificial Sequence: Synthetic oligonucleotide
cacgcucacauucacaaac

SEQ ID NO: 1765049 - RNA, 19 nt, Artificial Sequence
  Description of Artificial Sequence: Synthetic oligonucleotide
acguaagucucggacaugg

SEQ ID NO: 1765050 - RNA, 19 nt, Artificial Sequence
  Description of Artificial Sequence: Synthetic oligonucleotide
ucuaaagguauuguccgcu

SEQ ID NO: 1765051 - RNA, 19 nt, Artificial Sequence
  Description of Artificial Sequence: Synthetic oligonucleotide
uugaacugaugaagcaagc

SEQ ID NO: 1765052 - RNA, 19 nt, Artificial Sequence
  Description of Artificial Sequence: Synthetic oligonucleotide
acaauguucugacucgcca

SEQ ID NO: 1765053 - RNA, 19 nt, Artificial Sequence
  Description of Artificial Sequence: Synthetic oligonucleotide
uggaucacagaaacagugu

SEQ ID NO: 1765054 - RNA, 19 nt, Artificial Sequence
  Description of Artificial Sequence: Synthetic oligonucleotide
uaaagguauuguccgcuga

SEQ ID NO: 1765055 - RNA, 19 nt, Artificial Sequence
  Description of Artificial Sequence: Synthetic oligonucleotide
aaaauacguaagucucgga

SEQ ID NO: 1765056 - RNA, 19 nt, Artificial Sequence
  Description of Artificial Sequence: Synthetic oligonucleotide
guguaaccaacacaaugag

SEQ ID NO: 1765057 - RNA, 19 nt, Artificial Sequence
  Description of Artificial Sequence: Synthetic oligonucleotide
uuucacgagaaacuugguu

SEQ ID NO: 1765058 - RNA, 19 nt, Artificial Sequence
  Description of Artificial Sequence: Synthetic oligonucleotide
ugaacugaugaagcaagca

SEQ ID NO: 1765059 - RNA, 19 nt, Artificial Sequence
  Description of Artificial Sequence: Synthetic oligonucleotide
ugccuaacagccacauucc

SEQ ID NO: 1765060 - RNA, 19 nt, Artificial Sequence
  Description of Artificial Sequence: Synthetic oligonucleotide
gaguuaguuugcaguaugg

SEQ ID NO: 1765061 - RNA, 19 nt, Artificial Sequence
  Description of Artificial Sequence: Synthetic oligonucleotide
gugaguuggguagaugugg

SEQ ID NO: 1765062 - RNA, 19 nt, Artificial Sequence
  Description of Artificial Sequence: Synthetic oligonucleotide
aaccuggaggcuucaagga

SEQ ID NO: 1765063 - RNA, 19 nt, Artificial Sequence
  Description of Artificial Sequence: Synthetic oligonucleotide
uucccggucggcaucuagg

SEQ ID NO: 1765064 - RNA, 19 nt, Artificial Sequence
  Description of Artificial Sequence: Synthetic oligonucleotide
gaggcuucaaggaagguga

SEQ ID NO: 1765065 - RNA, 19 nt, Artificial Sequence
  Description of Artificial Sequence: Synthetic oligonucleotide
ugcaguauggcugcugagc

SEQ ID NO: 1765066 - RNA, 19 nt, Artificial Sequence
  Description of Artificial Sequence: Synthetic oligonucleotide
gggauuaaauaagaaacgc

SEQ ID NO: 1765067 - RNA, 19 nt, Artificial Sequence
  Description of Artificial Sequence: Synthetic oligonucleotide
uuccugugcauuuggggcc

SEQ ID NO: 1765068 - RNA, 19 nt, Artificial Sequence
  Description of Artificial Sequence: Synthetic oligonucleotide
auuuggggccuguguacgc

SEQ ID NO: 1765069 - RNA, 19 nt, Artificial Sequence
  Description of Artificial Sequence: Synthetic oligonucleotide
agcacgcucacauucacaa

SEQ ID NO: 1765070 - RNA, 19 nt, Artificial Sequence
  Description of Artificial Sequence: Synthetic oligonucleotide
uugcacacugcaugaaagc

SEQ ID NO: 1765071 - RNA, 19 nt, Artificial Sequence
  Description of Artificial Sequence: Synthetic oligonucleotide
auacguaagucucggacau

SEQ ID NO: 1765072 - RNA, 19 nt, Artificial Sequence
  Description of Artificial Sequence: Synthetic oligonucleotide
ugugcgcugauguuucccc

SEQ ID NO: 1765073 - RNA, 19 nt, Artificial Sequence
  Description of Artificial Sequence: Synthetic oligonucleotide
caaugagaaaagcacgcuc

SEQ ID NO: 1765074 - RNA, 19 nt, Artificial Sequence
  Description of Artificial Sequence: Synthetic oligonucleotide
gaaacuugguuccacuuua

SEQ ID NO: 1765075 - RNA, 19 nt, Artificial Sequence
  Description of Artificial Sequence: Synthetic oligonucleotide
cucaccugauucaauuuug

SEQ ID NO: 1765076 - RNA, 19 nt, Artificial Sequence
  Description of Artificial Sequence: Synthetic oligonucleotide
cauauguguaaccaacaca

SEQ ID NO: 1765077 - RNA, 19 nt, Artificial Sequence
  Description of Artificial Sequence: Synthetic oligonucleotide
accuguguugcuggcaugc

SEQ ID NO: 1765078 - RNA, 19 nt, Artificial Sequence
  Description of Artificial Sequence: Synthetic oligonucleotide
uucaacguucucaccaguc

SEQ ID NO: 1765079 - RNA, 19 nt, Artificial Sequence
  Description of Artificial Sequence: Synthetic oligonucleotide
uguguugcuggcaugccua

SEQ ID NO: 1765080 - RNA, 19 nt, Artificial Sequence
  Description of Artificial Sequence: Synthetic oligonucleotide
ucacagaccugaaucguuc

SEQ ID NO: 1765081 - RNA, 19 nt, Artificial Sequence
  Description of Artificial Sequence: Synthetic oligonucleotide
uucccgcagaggaugauga

SEQ ID NO: 1765082 - RNA, 19 nt, Artificial Sequence
  Description of Artificial Sequence: Synthetic oligonucleotide
ugcauuuggggccugugua

SEQ ID NO: 1765083 - RNA, 19 nt, Artificial Sequence
  Description of Artificial Sequence: Synthetic oligonucleotide
uugcuggcaugccuaacag

SEQ ID NO: 1765084 - RNA, 19 nt, Artificial Sequence
  Description of Artificial Sequence: Synthetic oligonucleotide
uugagccaaauuccacucc

SEQ ID NO: 1765085 - RNA, 19 nt, Artificial Sequence
  Description of Artificial Sequence: Synthetic oligonucleotide
gcaucuaaagguauugucc

SEQ ID NO: 1765086 - RNA, 19 nt, Artificial Sequence
  Description of Artificial Sequence: Synthetic oligonucleotide
auuguagguuucucggcug

SEQ ID NO: 1765087 - RNA, 19 nt, Artificial Sequence
  Description of Artificial Sequence: Synthetic oligonucleotide
cugagucauauguguaacc

SEQ ID NO: 1765088 - RNA, 19 nt, Artificial Sequence
  Description of Artificial Sequence: Synthetic oligonucleotide
guuaguuugcaguauggcu

SEQ ID NO: 1765089 - RNA, 19 nt, Artificial Sequence
  Description of Artificial Sequence: Synthetic oligonucleotide
auguuagugcguccuguag

SEQ ID NO: 1765090 - RNA, 19 nt, Artificial Sequence
  Description of Artificial Sequence: Synthetic oligonucleotide
uuagcauuucaggugugga

SEQ ID NO: 1765091 - RNA, 19 nt, Artificial Sequence
  Description of Artificial Sequence: Synthetic oligonucleotide
uaguaagcgcauuguaggu

SEQ ID NO: 1765092 - RNA, 19 nt, Artificial Sequence
  Description of Artificial Sequence: Synthetic oligonucleotide
ucggacauggcggucugcg

SEQ ID NO: 1765093 - RNA, 19 nt, Artificial Sequence
  Description of Artificial Sequence: Synthetic oligonucleotide
aucaacucauucucuugug

SEQ ID NO: 1765094 - RNA, 19 nt, Artificial Sequence
  Description of Artificial Sequence: Synthetic oligonucleotide
cuacaguuccgcguggucc

SEQ ID NO: 1765095 - RNA, 19 nt, Artificial Sequence
  Description of Artificial Sequence: Synthetic oligonucleotide
gaauuugccgguucccgca

SEQ ID NO: 1765096 - RNA, 19 nt, Artificial Sequence
  Description of Artificial Sequence: Synthetic oligonucleotide
agaucuacuucugugcaga

SEQ ID NO: 1765097 - RNA, 19 nt, Artificial Sequence
  Description of Artificial Sequence: Synthetic oligonucleotide
ugagucaucuuugaauuuu

SEQ ID NO: 1765098 - RNA, 19 nt, Artificial Sequence
  Description of Artificial Sequence: Synthetic oligonucleotide
caacguucucaccagucag

SEQ ID NO: 1765099 - RNA, 19 nt, Artificial Sequence
  Description of Artificial Sequence: Synthetic oligonucleotide
gucugcgccauucugucgc

SEQ ID NO: 1765100 - RNA, 19 nt, Artificial Sequence
  Description of Artificial Sequence: Synthetic oligonucleotide
agaguccuuugauacugag

SEQ ID NO: 1765101 - RNA, 19 nt, Artificial Sequence
  Description of Artificial Sequence: Synthetic oligonucleotide
ucguagacgaggagugccc

SEQ ID NO: 1765102 - RNA, 19 nt, Artificial Sequence
  Description of Artificial Sequence: Synthetic oligonucleotide
gaguuggguagaugugggg

SEQ ID NO: 1765103 - RNA, 19 nt, Artificial Sequence
  Description of Artificial Sequence: Synthetic oligonucleotide
cuaaagguauuguccgcug

SEQ ID NO: 1765104 - RNA, 19 nt, Artificial Sequence
  Description of Artificial Sequence: Synthetic oligonucleotide
gucgcuacaguuccgcgug

SEQ ID NO: 1765105 - RNA, 19 nt, Artificial Sequence
  Description of Artificial Sequence: Synthetic oligonucleotide
cuucuugucacagaccuga

SEQ ID NO: 1765106 - RNA, 19 nt, Artificial Sequence
  Description of Artificial Sequence: Synthetic oligonucleotide
ucuuugcauacauguggca

SEQ ID NO: 1765107 - RNA, 19 nt, Artificial Sequence
  Description of Artificial Sequence: Synthetic oligonucleotide
cuuguucccgcagaggaug

SEQ ID NO: 1765108 - RNA, 19 nt, Artificial Sequence
  Description of Artificial Sequence: Synthetic oligonucleotide
cauaucuguaacuuuacau

SEQ ID NO: 1765109 - RNA, 19 nt, Artificial Sequence
  Description of Artificial Sequence: Synthetic oligonucleotide
guguacgccguggugaccg

SEQ ID NO: 1765110 - RNA, 19 nt, Artificial Sequence
  Description of Artificial Sequence: Synthetic oligonucleotide
gaaccgagcguggagggcc

SEQ ID NO: 1765111 - RNA, 19 nt, Artificial Sequence
  Description of Artificial Sequence: Synthetic oligonucleotide
uacgccguggugaccguag

SEQ ID NO: 1765112 - RNA, 19 nt, Artificial Sequence
  Description of Artificial Sequence: Synthetic oligonucleotide
ugucgcuacaguuccgcgu

SEQ ID NO: 1765113 - RNA, 19 nt, Artificial Sequence
  Description of Artificial Sequence: Synthetic oligonucleotide
uguggcaucuaaagguauu

SEQ ID NO: 1765114 - RNA, 19 nt, Artificial Sequence
  Description of Artificial Sequence: Synthetic oligonucleotide
aagaaacgcacugacuguu

SEQ ID NO: 1765115 - RNA, 19 nt, Artificial Sequence
  Description of Artificial Sequence: Synthetic oligonucleotide
ugacaauguucugacucgc

SEQ ID NO: 1765116 - RNA, 19 nt, Artificial Sequence
  Description of Artificial Sequence: Synthetic oligonucleotide
auuuccugugaguugggua

SEQ ID NO: 1765117 - RNA, 19 nt, Artificial Sequence
  Description of Artificial Sequence: Synthetic oligonucleotide
caucuguuaaccaauuagu

SEQ ID NO: 1765118 - RNA, 19 nt, Artificial Sequence
  Description of Artificial Sequence: Synthetic oligonucleotide
gaucuacuucugugcagag

SEQ ID NO: 1765119 - RNA, 19 nt, Artificial Sequence
  Description of Artificial Sequence: Synthetic oligonucleotide
auuuaccaccaacauuuau

SEQ ID NO: 1765120 - RNA, 19 nt, Artificial Sequence
  Description of Artificial Sequence: Synthetic oligonucleotide
acgcacugacuguuagcgc

SEQ ID NO: 1765121 - RNA, 19 nt, Artificial Sequence
  Description of Artificial Sequence: Synthetic oligonucleotide
cauuuggggccuguguacg

SEQ ID NO: 1765122 - RNA, 19 nt, Artificial Sequence
  Description of Artificial Sequence: Synthetic oligonucleotide
uacuucugugcagaguaga

SEQ ID NO: 1765123 - RNA, 19 nt, Artificial Sequence
  Description of Artificial Sequence: Synthetic oligonucleotide
agcguggagggccggguac

SEQ ID NO: 1765124 - RNA, 19 nt, Artificial Sequence
  Description of Artificial Sequence: Synthetic oligonucleotide
ggauuaaauaagaaacgca

SEQ ID NO: 1765125 - RNA, 19 nt, Artificial Sequence
  Description of Artificial Sequence: Synthetic oligonucleotide
agaccugaaucguuccugu

SEQ ID NO: 1765126 - RNA, 19 nt, Artificial Sequence
  Description of Artificial Sequence: Synthetic oligonucleotide
ccugaaucguuccuguccg

SEQ ID NO: 1765127 - RNA, 19 nt, Artificial Sequence
  Description of Artificial Sequence: Synthetic oligonucleotide
ucuugucacagaccugaau

SEQ ID NO: 1765128 - RNA, 19 nt, Artificial Sequence
  Description of Artificial Sequence: Synthetic oligonucleotide
ugccgguucccgcauuucc

SEQ ID NO: 1765129 - RNA, 19 nt, Artificial Sequence
  Description of Artificial Sequence: Synthetic oligonucleotide
aagguauuguccgcugagu

SEQ ID NO: 1765130 - RNA, 19 nt, Artificial Sequence
  Description of Artificial Sequence: Synthetic oligonucleotide
aacuugguuccacuuuauu

SEQ ID NO: 1765131 - RNA, 19 nt, Artificial Sequence
  Description of Artificial Sequence: Synthetic oligonucleotide
guuaaguauuuuccuugca

SEQ ID NO: 1765132 - RNA, 19 nt, Artificial Sequence
  Description of Artificial Sequence: Synthetic oligonucleotide
caagaauuugccgguuccc

SEQ ID NO: 1765133 - RNA, 19 nt, Artificial Sequence
  Description of Artificial Sequence: Synthetic oligonucleotide
cagggcagcgucuccauac

SEQ ID NO: 1765134 - RNA, 19 nt, Artificial Sequence
  Description of Artificial Sequence: Synthetic oligonucleotide
guuggguagauguggggca

SEQ ID NO: 1765135 - RNA, 19 nt, Artificial Sequence
  Description of Artificial Sequence: Synthetic oligonucleotide
ugacuguuagcgccagagu

SEQ ID NO: 1765136 - RNA, 19 nt, Artificial Sequence
  Description of Artificial Sequence: Synthetic oligonucleotide
cacagaccugaaucguucc

SEQ ID NO: 1765137 - RNA, 19 nt, Artificial Sequence
  Description of Artificial Sequence: Synthetic oligonucleotide
augucguagacgaggagug

SEQ ID NO: 1765138 - RNA, 19 nt, Artificial Sequence
  Description of Artificial Sequence: Synthetic oligonucleotide
ccaauuaguaagcgcauug

SEQ ID NO: 1765139 - RNA, 19 nt, Artificial Sequence
  Description of Artificial Sequence: Synthetic oligonucleotide
cugauucaauuuuguuaag

SEQ ID NO: 1765140 - RNA, 19 nt, Artificial Sequence
  Description of Artificial Sequence: Synthetic oligonucleotide
gcaagaauuugccgguucc

SEQ ID NO: 1765141 - RNA, 19 nt, Artificial Sequence
  Description of Artificial Sequence: Synthetic oligonucleotide
ugucacagaccugaaucgu

SEQ ID NO: 1765142 - RNA, 19 nt, Artificial Sequence
  Description of Artificial Sequence: Synthetic oligonucleotide
aauuugccgguucccgcau

SEQ ID NO: 1765143 - RNA, 19 nt, Artificial Sequence
  Description of Artificial Sequence: Synthetic oligonucleotide
agguauuguccgcugaguu

SEQ ID NO: 1765144 - RNA, 19 nt, Artificial Sequence
  Description of Artificial Sequence: Synthetic oligonucleotide
cauacauguggcaucuaaa

SEQ ID NO: 1765145 - RNA, 19 nt, Artificial Sequence
  Description of Artificial Sequence: Synthetic oligonucleotide
gucguagacgaggagugcc

SEQ ID NO: 1765146 - RNA, 19 nt, Artificial Sequence
  Description of Artificial Sequence: Synthetic oligonucleotide
cuacuucugugcagaguag

SEQ ID NO: 1765147 - RNA, 19 nt, Artificial Sequence
  Description of Artificial Sequence: Synthetic oligonucleotide
cugguguccgcagagcgag

SEQ ID NO: 1765148 - RNA, 19 nt, Artificial Sequence
  Description of Artificial Sequence: Synthetic oligonucleotide
acagaccugaaucguuccu

SEQ ID NO: 1765149 - RNA, 19 nt, Artificial Sequence
  Description of Artificial Sequence: Synthetic oligonucleotide
caccacugaaccuguguug

SEQ ID NO: 1765150 - RNA, 19 nt, Artificial Sequence
  Description of Artificial Sequence: Synthetic oligonucleotide
cugugaguuggguagaugu

SEQ ID NO: 1765151 - RNA, 19 nt, Artificial Sequence
  Description of Artificial Sequence: Synthetic oligonucleotide
ucccgcauuuccgaugacc

SEQ ID NO: 1765152 - RNA, 19 nt, Artificial Sequence
  Description of Artificial Sequence: Synthetic oligonucleotide
uauuuaccaccaacauuua

SEQ ID NO: 1765153 - RNA, 19 nt, Artificial Sequence
  Description of Artificial Sequence: Synthetic oligonucleotide
gguccggucaguccucugg

SEQ ID NO: 1765154 - RNA, 19 nt, Artificial Sequence
  Description of Artificial Sequence: Synthetic oligonucleotide
guagauguggggcagggau

SEQ ID NO: 1765155 - RNA, 19 nt, Artificial Sequence
  Description of Artificial Sequence: Synthetic oligonucleotide
ucggcaucuagguccuucu

SEQ ID NO: 1765156 - RNA, 19 nt, Artificial Sequence
  Description of Artificial Sequence: Synthetic oligonucleotide
uguucugacucgccagcau

SEQ ID NO: 1765157 - RNA, 19 nt, Artificial Sequence
  Description of Artificial Sequence: Synthetic oligonucleotide
cgcauuguagguuucucgg

SEQ ID NO: 1765158 - RNA, 19 nt, Artificial Sequence
  Description of Artificial Sequence: Synthetic oligonucleotide
agauguuagugcguccugu

SEQ ID NO: 1765159 - RNA, 19 nt, Artificial Sequence
  Description of Artificial Sequence: Synthetic oligonucleotide
ugaaccuguguugcuggca

SEQ ID NO: 1765160 - RNA, 19 nt, Artificial Sequence
  Description of Artificial Sequence: Synthetic oligonucleotide
ugcgccauucugucgcuac

SEQ ID NO: 1765161 - RNA, 19 nt, Artificial Sequence
  Description of Artificial Sequence: Synthetic oligonucleotide
uugcaguauggcugcugag

SEQ ID NO: 1765162 - RNA, 19 nt, Artificial Sequence
  Description of Artificial Sequence: Synthetic oligonucleotide
ugaccguagcugccucagg

SEQ ID NO: 1765163 - RNA, 19 nt, Artificial Sequence
  Description of Artificial Sequence: Synthetic oligonucleotide
aaccaauuaguaagcgcau

SEQ ID NO: 1765164 - RNA, 19 nt, Artificial Sequence
  Description of Artificial Sequence: Synthetic oligonucleotide
gauguuagugcguccugua

SEQ ID NO: 1765165 - RNA, 19 nt, Artificial Sequence
  Description of Artificial Sequence: Synthetic oligonucleotide
acauuccugugcauuuggg

SEQ ID NO: 1765166 - RNA, 19 nt, Artificial Sequence
  Description of Artificial Sequence: Synthetic oligonucleotide
guuagugcguccuguaggu

SEQ ID NO: 1765167 - RNA, 19 nt, Artificial Sequence
  Description of Artificial Sequence: Synthetic oligonucleotide
gguuuagcauuucaggugu

SEQ ID NO: 1765168 - RNA, 19 nt, Artificial Sequence
  Description of Artificial Sequence: Synthetic oligonucleotide
gucauauguguaaccaaca

SEQ ID NO: 1765169 - RNA, 19 nt, Artificial Sequence
  Description of Artificial Sequence: Synthetic oligonucleotide
gcgcauuguagguuucucg

SEQ ID NO: 1765170 - RNA, 19 nt, Artificial Sequence
  Description of Artificial Sequence: Synthetic oligonucleotide
agcgcauuguagguuucuc

SEQ ID NO: 1765171 - RNA, 19 nt, Artificial Sequence
  Description of Artificial Sequence: Synthetic oligonucleotide
aguuccgcgugguccgguc

SEQ ID NO: 1765172 - RNA, 19 nt, Artificial Sequence
  Description of Artificial Sequence: Synthetic oligonucleotide
caguauggcugcugagccc

SEQ ID NO: 1765173 - RNA, 19 nt, Artificial Sequence
  Description of Artificial Sequence: Synthetic oligonucleotide
uuguucccgcagaggauga

SEQ ID NO: 1765174 - RNA, 19 nt, Artificial Sequence
  Description of Artificial Sequence: Synthetic oligonucleotide
uuagcgccagaguccuuug

SEQ ID NO: 1765175 - RNA, 19 nt, Artificial Sequence
  Description of Artificial Sequence: Synthetic oligonucleotide
cauguggcaucuaaaggua

SEQ ID NO: 1765176 - RNA, 19 nt, Artificial Sequence
  Description of Artificial Sequence: Synthetic oligonucleotide
aguagaaaagaugguugua

SEQ ID NO: 1765177 - RNA, 19 nt, Artificial Sequence
  Description of Artificial Sequence: Synthetic oligonucleotide
acguucucaccagucagug

SEQ ID NO: 1765178 - RNA, 19 nt, Artificial Sequence
  Description of Artificial Sequence: Synthetic oligonucleotide
cucuugugcgaaccuggag

SEQ ID NO: 1765179 - RNA, 19 nt, Artificial Sequence
  Description of Artificial Sequence: Synthetic oligonucleotide
uucucaccagucagugcac

SEQ ID NO: 1765180 - RNA, 19 nt, Artificial Sequence
  Description of Artificial Sequence: Synthetic oligonucleotide
cagaccugaaucguuccug

SEQ ID NO: 1765181 - RNA, 19 nt, Artificial Sequence
  Description of Artificial Sequence: Synthetic oligonucleotide
cuguguacgccguggugac

SEQ ID NO: 1765182 - RNA, 19 nt, Artificial Sequence
  Description of Artificial Sequence: Synthetic oligonucleotide
uuugccgguucccgcauuu

SEQ ID NO: 1765183 - RNA, 19 nt, Artificial Sequence
  Description of Artificial Sequence: Synthetic oligonucleotide
agcgccagaguccuuugau

SEQ ID NO: 1765184 - RNA, 19 nt, Artificial Sequence
  Description of Artificial Sequence: Synthetic oligonucleotide
cugucgcuacaguuccgcg

SEQ ID NO: 1765185 - RNA, 19 nt, Artificial Sequence
  Description of Artificial Sequence: Synthetic oligonucleotide
uccgcugaguuaguuugca

SEQ ID NO: 1765186 - RNA, 19 nt, Artificial Sequence
  Description of Artificial Sequence: Synthetic oligonucleotide
ucccggucggcaucuaggu

SEQ ID NO: 1765187 - RNA, 19 nt, Artificial Sequence
  Description of Artificial Sequence: Synthetic oligonucleotide
auggcggucugcgccauuc

SEQ ID NO: 1765188 - RNA, 19 nt, Artificial Sequence
  Description of Artificial Sequence: Synthetic oligonucleotide
cugaaucguuccuguccgg

SEQ ID NO: 1765189 - RNA, 19 nt, Artificial Sequence
  Description of Artificial Sequence: Synthetic oligonucleotide
ccuaacagccacauuccug

SEQ ID NO: 1765190 - RNA, 19 nt, Artificial Sequence
  Description of Artificial Sequence: Synthetic oligonucleotide
cgcacugacuguuagcgcc

SEQ ID NO: 1765191 - RNA, 19 nt, Artificial Sequence
  Description of Artificial Sequence: Synthetic oligonucleotide
ugucguagacgaggagugc

SEQ ID NO: 1765192 - RNA, 19 nt, Artificial Sequence
  Description of Artificial Sequence: Synthetic oligonucleotide
guuccacuuuauuuccaga

SEQ ID NO: 1765193 - RNA, 19 nt, Artificial Sequence
  Description of Artificial Sequence: Synthetic oligonucleotide
ucgcuacaguuccgcgugg

SEQ ID NO: 1765194 - RNA, 19 nt, Artificial Sequence
  Description of Artificial Sequence: Synthetic oligonucleotide
cauuguagguuucucggcu

SEQ ID NO: 1765195 - RNA, 19 nt, Artificial Sequence
  Description of Artificial Sequence: Synthetic oligonucleotide
aggagugccccugcugcac

SEQ ID NO: 1765196 - RNA, 19 nt, Artificial Sequence
  Description of Artificial Sequence: Synthetic oligonucleotide
uuguccgcugaguuaguuu

SEQ ID NO: 1765197 - RNA, 19 nt, Artificial Sequence
  Description of Artificial Sequence: Synthetic oligonucleotide
aguaagcgcauuguagguu

SEQ ID NO: 1765198 - RNA, 19 nt, Artificial Sequence
  Description of Artificial Sequence: Synthetic oligonucleotide
uggaugccagagcccauuc

SEQ ID NO: 1765199 - RNA, 19 nt, Artificial Sequence
  Description of Artificial Sequence: Synthetic oligonucleotide
uaagcgcauuguagguuuc

SEQ ID NO: 1765200 - RNA, 19 nt, Artificial Sequence
  Description of Artificial Sequence: Synthetic oligonucleotide
acgaggagugccccugcug

SEQ ID NO: 1765201 - RNA, 19 nt, Artificial Sequence
  Description of Artificial Sequence: Synthetic oligonucleotide
guagguuucucggcuggug

SEQ ID NO: 1765202 - RNA, 19 nt, Artificial Sequence
  Description of Artificial Sequence: Synthetic oligonucleotide
aagcgcauuguagguuucu

SEQ ID NO: 1765203 - RNA, 19 nt, Artificial Sequence
  Description of Artificial Sequence: Synthetic oligonucleotide
agcucaccugauucaauuu

SEQ ID NO: 1765204 - RNA, 19 nt, Artificial Sequence
  Description of Artificial Sequence: Synthetic oligonucleotide
aaacuugguuccacuuuau

SEQ ID NO: 1765205 - RNA, 19 nt, Artificial Sequence
  Description of Artificial Sequence: Synthetic oligonucleotide
acugcgagccggccaccgg

SEQ ID NO: 1765206 - RNA, 19 nt, Artificial Sequence
  Description of Artificial Sequence: Synthetic oligonucleotide
gaaccuguguugcuggcau

SEQ ID NO: 1765207 - RNA, 19 nt, Artificial Sequence
  Description of Artificial Sequence: Synthetic oligonucleotide
guaagcgcauuguagguuu

SEQ ID NO: 1765208 - RNA, 19 nt, Artificial Sequence
  Description of Artificial Sequence: Synthetic oligonucleotide
gcugaguuaguuugcagua

SEQ ID NO: 1765209 - RNA, 19 nt, Artificial Sequence
  Description of Artificial Sequence: Synthetic oligonucleotide
gugaccguagcugccucag

SEQ ID NO: 1765210 - RNA, 19 nt, Artificial Sequence
  Description of Artificial Sequence: Synthetic oligonucleotide
cugcgagccggccaccggc

SEQ ID NO: 1765211 - RNA, 19 nt, Artificial Sequence
  Description of Artificial Sequence: Synthetic oligonucleotide
guacaggcccacugcgagc

SEQ ID NO: 1765212 - RNA, 19 nt, Artificial Sequence
  Description of Artificial Sequence: Synthetic oligonucleotide
aucuacuucugugcagagu

SEQ ID NO: 1765213 - RNA, 19 nt, Artificial Sequence
  Description of Artificial Sequence: Synthetic oligonucleotide
ugacuucccggucggcauc

SEQ ID NO: 1765214 - RNA, 19 nt, Artificial Sequence
  Description of Artificial Sequence: Synthetic oligonucleotide
uauuguccgcugaguuagu

SEQ ID NO: 1765215 - RNA, 19 nt, Artificial Sequence
  Description of Artificial Sequence: Synthetic oligonucleotide
uguagguuucucggcuggu

SEQ ID NO: 1765216 - RNA, 19 nt, Artificial Sequence
  Description of Artificial Sequence: Synthetic oligonucleotide
gguguccgcagagcgaggg

SEQ ID NO: 1765217 - RNA, 19 nt, Artificial Sequence
  Description of Artificial Sequence: Synthetic oligonucleotide
ggggaaccgagcguggagg

SEQ ID NO: 1765218 - RNA, 19 nt, Artificial Sequence
  Description of Artificial Sequence: Synthetic oligonucleotide
gcauuucagguguggauca

SEQ ID NO: 1765219 - RNA, 19 nt, Artificial Sequence
  Description of Artificial Sequence: Synthetic oligonucleotide
guucccgcagaggaugaug

SEQ ID NO: 1765220 - RNA, 19 nt, Artificial Sequence
  Description of Artificial Sequence: Synthetic oligonucleotide
aaccgagcguggagggccg

SEQ ID NO: 1765221 - RNA, 19 nt, Artificial Sequence
  Description of Artificial Sequence: Synthetic oligonucleotide
gcauuuggggccuguguac

SEQ ID NO: 1765222 - RNA, 19 nt, Artificial Sequence
  Description of Artificial Sequence: Synthetic oligonucleotide
gguauuguccgcugaguua

SEQ ID NO: 1765223 - RNA, 19 nt, Artificial Sequence
  Description of Artificial Sequence: Synthetic oligonucleotide
aagcacgcucacauucaca

SEQ ID NO: 1765224 - RNA, 19 nt, Artificial Sequence
  Description of Artificial Sequence: Synthetic oligonucleotide
uagcgccagaguccuuuga

SEQ ID NO: 1765225 - RNA, 19 nt, Artificial Sequence
  Description of Artificial Sequence: Synthetic oligonucleotide
gagaaacuugguuccacuu

SEQ ID NO: 1765226 - RNA, 19 nt, Artificial Sequence
  Description of Artificial Sequence: Synthetic oligonucleotide
gcauacauguggcaucuaa

SEQ ID NO: 1765227 - RNA, 19 nt, Artificial Sequence
  Description of Artificial Sequence: Synthetic oligonucleotide
guguccgcagagcgagggg

SEQ ID NO: 1765228 - RNA, 19 nt, Artificial Sequence
  Description of Artificial Sequence: Synthetic oligonucleotide
uccugugcauuuggggccu

SEQ ID NO: 1765229 - RNA, 19 nt, Artificial Sequence
  Description of Artificial Sequence: Synthetic oligonucleotide
gcgucuccauacuggaugc

SEQ ID NO: 1765230 - RNA, 19 nt, Artificial Sequence
  Description of Artificial Sequence: Synthetic oligonucleotide
cuucccggucggcaucuag

SEQ ID NO: 1765231 - RNA, 19 nt, Artificial Sequence
  Description of Artificial Sequence: Synthetic oligonucleotide
ucugccagugugcgcugau

SEQ ID NO: 1765232 - RNA, 19 nt, Artificial Sequence
  Description of Artificial Sequence: Synthetic oligonucleotide
cugacucgccagcauucug

SEQ ID NO: 1765233 - RNA, 19 nt, Artificial Sequence
  Description of Artificial Sequence: Synthetic oligonucleotide
cuuugauacugagucauau

SEQ ID NO: 1765234 - RNA, 19 nt, Artificial Sequence
  Description of Artificial Sequence: Synthetic oligonucleotide
cucgccagcauucuggcau

SEQ ID NO: 1765235 - RNA, 19 nt, Artificial Sequence
  Description of Artificial Sequence: Synthetic oligonucleotide
accaauuaguaagcgcauu

SEQ ID NO: 1765236 - RNA, 19 nt, Artificial Sequence
  Description of Artificial Sequence: Synthetic oligonucleotide
cuuugcauacauguggcau

SEQ ID NO: 1765237 - RNA, 19 nt, Artificial Sequence
  Description of Artificial Sequence: Synthetic oligonucleotide
uccacuccuaugguaugau

SEQ ID NO: 1765238 - RNA, 19 nt, Artificial Sequence
  Description of Artificial Sequence: Synthetic oligonucleotide
guuuagcauuucaggugug

SEQ ID NO: 1765239 - RNA, 19 nt, Artificial Sequence
  Description of Artificial Sequence: Synthetic oligonucleotide
ucugcgccauucugucgcu

SEQ ID NO: 1765240 - RNA, 19 nt, Artificial Sequence
  Description of Artificial Sequence: Synthetic oligonucleotide
gcaucuagguccuucuugu

SEQ ID NO: 1765241 - RNA, 19 nt, Artificial Sequence
  Description of Artificial Sequence: Synthetic oligonucleotide
cauuucagguguggaucac

SEQ ID NO: 1765242 - RNA, 19 nt, Artificial Sequence
  Description of Artificial Sequence: Synthetic oligonucleotide
ggcagggaucuuugcauac

SEQ ID NO: 1765243 - RNA, 19 nt, Artificial Sequence
  Description of Artificial Sequence: Synthetic oligonucleotide
caauuaguaagcgcauugu

SEQ ID NO: 1765244 - RNA, 19 nt, Artificial Sequence
  Description of Artificial Sequence: Synthetic oligonucleotide
ugcgagccggccaccggcu

SEQ ID NO: 1765245 - RNA, 19 nt, Artificial Sequence
  Description of Artificial Sequence: Synthetic oligonucleotide
cgccagaguccuuugauac

SEQ ID NO: 1765246 - RNA, 19 nt, Artificial Sequence
  Description of Artificial Sequence: Synthetic oligonucleotide
aggcuucaaggaaggugac

SEQ ID NO: 1765247 - RNA, 19 nt, Artificial Sequence
  Description of Artificial Sequence: Synthetic oligonucleotide
gaggagugccccugcugca

SEQ ID NO: 1765248 - RNA, 19 nt, Artificial Sequence
  Description of Artificial Sequence: Synthetic oligonucleotide
ucccgcagaggaugaugac

SEQ ID NO: 1765249 - RNA, 19 nt, Artificial Sequence
  Description of Artificial Sequence: Synthetic oligonucleotide
gcccauucucucugggucc

SEQ ID NO: 1765250 - RNA, 19 nt, Artificial Sequence
  Description of Artificial Sequence: Synthetic oligonucleotide
cgaggagugccccugcugc

SEQ ID NO: 1765251 - RNA, 19 nt, Artificial Sequence
  Description of Artificial Sequence: Synthetic oligonucleotide
uauggcugcugagcccugu

SEQ ID NO: 1765252 - RNA, 19 nt, Artificial Sequence
  Description of Artificial Sequence: Synthetic oligonucleotide
cuccuaugguaugauuuga

SEQ ID NO: 1765253 - RNA, 19 nt, Artificial Sequence
  Description of Artificial Sequence: Synthetic oligonucleotide
uguguacgccguggugacc

SEQ ID NO: 1765254 - RNA, 19 nt, Artificial Sequence
  Description of Artificial Sequence: Synthetic oligonucleotide
cccgcauuuccgaugacca

SEQ ID NO: 1765255 - RNA, 19 nt, Artificial Sequence
  Description of Artificial Sequence: Synthetic oligonucleotide
cuucaagcuccagcagcug

SEQ ID NO: 1765256 - RNA, 19 nt, Artificial Sequence
  Description of Artificial Sequence: Synthetic oligonucleotide
gaguccuuugauacugagu

SEQ ID NO: 1765257 - RNA, 19 nt, Artificial Sequence
  Description of Artificial Sequence: Synthetic oligonucleotide
ugcguccuguagguuuagc

SEQ ID NO: 1765258 - RNA, 19 nt, Artificial Sequence
  Description of Artificial Sequence: Synthetic oligonucleotide
uggggccuguguacgccgu

SEQ ID NO: 1765259 - RNA, 19 nt, Artificial Sequence
  Description of Artificial Sequence: Synthetic oligonucleotide
gucggcaucuagguccuuc

SEQ ID NO: 1765260 - RNA, 19 nt, Artificial Sequence
  Description of Artificial Sequence: Synthetic oligonucleotide
auuguccgcugaguuaguu

SEQ ID NO: 1765261 - RNA, 19 nt, Artificial Sequence
  Description of Artificial Sequence: Synthetic oligonucleotide
agucucggacauggcgguc

SEQ ID NO: 1765262 - RNA, 19 nt, Artificial Sequence
  Description of Artificial Sequence: Synthetic oligonucleotide
auguggcaucuaaagguau

SEQ ID NO: 1765263 - RNA, 19 nt, Artificial Sequence
  Description of Artificial Sequence: Synthetic oligonucleotide
agugcguccuguagguuua

SEQ ID NO: 1765264 - RNA, 19 nt, Artificial Sequence
  Description of Artificial Sequence: Synthetic oligonucleotide
uguacgccguggugaccgu

SEQ ID NO: 1765265 - RNA, 19 nt, Artificial Sequence
  Description of Artificial Sequence: Synthetic oligonucleotide
uggcggucugcgccauucu

SEQ ID NO: 1765266 - RNA, 19 nt, Artificial Sequence
  Description of Artificial Sequence: Synthetic oligonucleotide
guccgcugaguuaguuugc

SEQ ID NO: 1765267 - RNA, 19 nt, Artificial Sequence
  Description of Artificial Sequence: Synthetic oligonucleotide
ccuguguacgccgugguga

SEQ ID NO: 1765268 - RNA, 19 nt, Artificial Sequence
  Description of Artificial Sequence: Synthetic oligonucleotide
ggcggucugcgccauucug

SEQ ID NO: 1765269 - RNA, 19 nt, Artificial Sequence
  Description of Artificial Sequence: Synthetic oligonucleotide
cacugacuguuagcgccag

SEQ ID NO: 1765270 - RNA, 19 nt, Artificial Sequence
  Description of Artificial Sequence: Synthetic oligonucleotide
uuagugcguccuguagguu

SEQ ID NO: 1765271 - RNA, 19 nt, Artificial Sequence
  Description of Artificial Sequence: Synthetic oligonucleotide
gccggguacaggcccacug

SEQ ID NO: 1765272 - RNA, 19 nt, Artificial Sequence
  Description of Artificial Sequence: Synthetic oligonucleotide
ccggguacaggcccacugc

SEQ ID NO: 1765273 - RNA, 19 nt, Artificial Sequence
  Description of Artificial Sequence: Synthetic oligonucleotide
guuagcgccagaguccuuu

SEQ ID NO: 1765274 - RNA, 19 nt, Artificial Sequence
  Description of Artificial Sequence: Synthetic oligonucleotide
ccuaugguaugauuugagu

SEQ ID NO: 1765275 - RNA, 19 nt, Artificial Sequence
  Description of Artificial Sequence: Synthetic oligonucleotide
guuccgcgugguccgguca

SEQ ID NO: 1765276 - RNA, 19 nt, Artificial Sequence
  Description of Artificial Sequence: Synthetic oligonucleotide
ugguccggucaguccucug

SEQ ID NO: 1765277 - RNA, 19 nt, Artificial Sequence
  Description of Artificial Sequence: Synthetic oligonucleotide
ggcaucuguuaaccaauua

SEQ ID NO: 1765278 - RNA, 19 nt, Artificial Sequence
  Description of Artificial Sequence: Synthetic oligonucleotide
aguuugcaguauggcugcu

SEQ ID NO: 1765279 - RNA, 19 nt, Artificial Sequence
  Description of Artificial Sequence: Synthetic oligonucleotide
gugacuucccggucggcau

SEQ ID NO: 1765280 - RNA, 19 nt, Artificial Sequence
  Description of Artificial Sequence: Synthetic oligonucleotide
guagacgaggagugccccu

SEQ ID NO: 1765281 - RNA, 19 nt, Artificial Sequence
  Description of Artificial Sequence: Synthetic oligonucleotide
cagcucaccugauucaauu

SEQ ID NO: 1765282 - RNA, 19 nt, Artificial Sequence
  Description of Artificial Sequence: Synthetic oligonucleotide
uguucccgcagaggaugau

SEQ ID NO: 1765283 - RNA, 19 nt, Artificial Sequence
  Description of Artificial Sequence: Synthetic oligonucleotide
uucccgcauuuccgaugac

SEQ ID NO: 1765284 - RNA, 19 nt, Artificial Sequence
  Description of Artificial Sequence: Synthetic oligonucleotide
cuguuagcgccagaguccu

SEQ ID NO: 1765285 - RNA, 19 nt, Artificial Sequence
  Description of Artificial Sequence: Synthetic oligonucleotide
guccucugguguccgcaga

SEQ ID NO: 1765286 - RNA, 19 nt, Artificial Sequence
  Description of Artificial Sequence: Synthetic oligonucleotide
cggguacaggcccacugcg

SEQ ID NO: 1765287 - RNA, 19 nt, Artificial Sequence
  Description of Artificial Sequence: Synthetic oligonucleotide
gccuguguacgccguggug

SEQ ID NO: 1765288 - RNA, 19 nt, Artificial Sequence
  Description of Artificial Sequence: Synthetic oligonucleotide
gcauuuccugugaguuggg

SEQ ID NO: 1765289 - RNA, 19 nt, Artificial Sequence
  Description of Artificial Sequence: Synthetic oligonucleotide
ggaaccgagcguggagggc

SEQ ID NO: 1765290 - RNA, 19 nt, Artificial Sequence
  Description of Artificial Sequence: Synthetic oligonucleotide
ggggcagggaucuuugcau

SEQ ID NO: 1765291 - RNA, 19 nt, Artificial Sequence
  Description of Artificial Sequence: Synthetic oligonucleotide
gggcagcgucuccauacug

SEQ ID NO: 1765292 - RNA, 19 nt, Artificial Sequence
  Description of Artificial Sequence: Synthetic oligonucleotide
gacgaggagugccccugcu

SEQ ID NO: 1765293 - RNA, 19 nt, Artificial Sequence
  Description of Artificial Sequence: Synthetic oligonucleotide
uguuagcgccagaguccuu

SEQ ID NO: 1765294 - RNA, 19 nt, Artificial Sequence
  Description of Artificial Sequence: Synthetic oligonucleotide
uugccgguucccgcauuuc

SEQ ID NO: 1765295 - RNA, 19 nt, Artificial Sequence
  Description of Artificial Sequence: Synthetic oligonucleotide
gcagggaucuuugcauaca

SEQ ID NO: 1765296 - RNA, 19 nt, Artificial Sequence
  Description of Artificial Sequence: Synthetic oligonucleotide
ccgcugaguuaguuugcag

SEQ ID NO: 1765297 - RNA, 19 nt, Artificial Sequence
  Description of Artificial Sequence: Synthetic oligonucleotide
gugcgaaccuggaggcuuc

SEQ ID NO: 1765298 - RNA, 19 nt, Artificial Sequence
  Description of Artificial Sequence: Synthetic oligonucleotide
ugcauacauguggcaucua

SEQ ID NO: 1765299 - RNA, 19 nt, Artificial Sequence
  Description of Artificial Sequence: Synthetic oligonucleotide
cugaguuaguuugcaguau

SEQ ID NO: 1765300 - RNA, 19 nt, Artificial Sequence
  Description of Artificial Sequence: Synthetic oligonucleotide
gagcguggagggccgggua

SEQ ID NO: 1765301 - RNA, 19 nt, Artificial Sequence
  Description of Artificial Sequence: Synthetic oligonucleotide
gucacagaccugaaucguu

SEQ ID NO: 1765302 - RNA, 19 nt, Artificial Sequence
  Description of Artificial Sequence: Synthetic oligonucleotide
ccguagcugccucagggca

SEQ ID NO: 1765303 - RNA, 19 nt, Artificial Sequence
  Description of Artificial Sequence: Synthetic oligonucleotide
gacuucccggucggcaucu

SEQ ID NO: 1765304 - RNA, 19 nt, Artificial Sequence
  Description of Artificial Sequence: Synthetic oligonucleotide
acacugcaugaaagccucu

SEQ ID NO: 1765305 - RNA, 19 nt, Artificial Sequence
  Description of Artificial Sequence: Synthetic oligonucleotide
cguagacgaggagugcccc

SEQ ID NO: 1765306 - RNA, 19 nt, Artificial Sequence
  Description of Artificial Sequence: Synthetic oligonucleotide
gggcagggaucuuugcaua

SEQ ID NO: 1765307 - RNA, 19 nt, Artificial Sequence
  Description of Artificial Sequence: Synthetic oligonucleotide
cauuuccugugaguugggu

SEQ ID NO: 1765308 - RNA, 19 nt, Artificial Sequence
  Description of Artificial Sequence: Synthetic oligonucleotide
guauggcugcugagcccug

SEQ ID NO: 1765309 - RNA, 19 nt, Artificial Sequence
  Description of Artificial Sequence: Synthetic oligonucleotide
gugcguccuguagguuuag

SEQ ID NO: 1765310 - RNA, 19 nt, Artificial Sequence
  Description of Artificial Sequence: Synthetic oligonucleotide
ggagggccggguacaggcc

SEQ ID NO: 1765311 - RNA, 19 nt, Artificial Sequence
  Description of Artificial Sequence: Synthetic oligonucleotide
gcacugacuguuagcgcca

SEQ ID NO: 1765312 - RNA, 19 nt, Artificial Sequence
  Description of Artificial Sequence: Synthetic oligonucleotide
cggucugcgccauucuguc

SEQ ID NO: 1765313 - RNA, 19 nt, Artificial Sequence
  Description of Artificial Sequence: Synthetic oligonucleotide
gcgccagaguccuuugaua

SEQ ID NO: 1765314 - RNA, 19 nt, Artificial Sequence
  Description of Artificial Sequence: Synthetic oligonucleotide
ggggccuguguacgccgug

SEQ ID NO: 1765315 - RNA, 19 nt, Artificial Sequence
  Description of Artificial Sequence: Synthetic oligonucleotide
ccgguucccgcauuuccga

SEQ ID NO: 1765316 - RNA, 19 nt, Artificial Sequence
  Description of Artificial Sequence: Synthetic oligonucleotide
gcgccauucugucgcuaca

SEQ ID NO: 1765317 - RNA, 19 nt, Artificial Sequence
  Description of Artificial Sequence: Synthetic oligonucleotide
gccuaacagccacauuccu

SEQ ID NO: 1765318 - RNA, 19 nt, Artificial Sequence
  Description of Artificial Sequence: Synthetic oligonucleotide
cgcgugguccggucagucc

SEQ ID NO: 1765319 - RNA, 19 nt, Artificial Sequence
  Description of Artificial Sequence: Synthetic oligonucleotide
ccauucugucgcuacaguu

SEQ ID NO: 1765320 - RNA, 19 nt, Artificial Sequence
  Description of Artificial Sequence: Synthetic oligonucleotide
cggacauggcggucugcgc

SEQ ID NO: 1765321 - RNA, 19 nt, Artificial Sequence
  Description of Artificial Sequence: Synthetic oligonucleotide
ggcaugccuaacagccaca

SEQ ID NO: 1765322 - RNA, 19 nt, Artificial Sequence
  Description of Artificial Sequence: Synthetic oligonucleotide
acauggcggucugcgccau

SEQ ID NO: 1765323 - RNA, 19 nt, Artificial Sequence
  Description of Artificial Sequence: Synthetic oligonucleotide
cguccuguagguuuagcau

SEQ ID NO: 1765324 - RNA, 19 nt, Artificial Sequence
  Description of Artificial Sequence: Synthetic oligonucleotide
gagcccugucugccagugu

SEQ ID NO: 1765325 - RNA, 19 nt, Artificial Sequence
  Description of Artificial Sequence: Synthetic oligonucleotide
gcccacugcgagccggcca

SEQ ID NO: 1765326 - RNA, 19 nt, Artificial Sequence
  Description of Artificial Sequence: Synthetic oligonucleotide
caugccuaacagccacauu

SEQ ID NO: 1765327 - RNA, 19 nt, Artificial Sequence
  Description of Artificial Sequence: Synthetic oligonucleotide
cccggucggcaucuagguc

SEQ ID NO: 1765328 - RNA, 19 nt, Artificial Sequence
  Description of Artificial Sequence: Synthetic oligonucleotide
ccaccacugaaccuguguu

SEQ ID NO: 1765329 - RNA, 19 nt, Artificial Sequence
  Description of Artificial Sequence: Synthetic oligonucleotide
cagcgucuccauacuggau

SEQ ID NO: 1765330 - RNA, 19 nt, Artificial Sequence
  Description of Artificial Sequence: Synthetic oligonucleotide
ccgcauuuccgaugaccaa

SEQ ID NO: 1765331 - RNA, 19 nt, Artificial Sequence
  Description of Artificial Sequence: Synthetic oligonucleotide
gcguggagggccggguaca

SEQ ID NO: 1765332 - RNA, 19 nt, Artificial Sequence
  Description of Artificial Sequence: Synthetic oligonucleotide
guacgccguggugaccgua

SEQ ID NO: 1765333 - RNA, 19 nt, Artificial Sequence
  Description of Artificial Sequence: Synthetic oligonucleotide
gugguccggucaguccucu

SEQ ID NO: 1765334 - RNA, 19 nt, Artificial Sequence
  Description of Artificial Sequence: Synthetic oligonucleotide
cguggagggccggguacag

SEQ ID NO: 1765335 - RNA, 19 nt, Artificial Sequence
  Description of Artificial Sequence: Synthetic oligonucleotide
gcugcggcccagcgggacu

SEQ ID NO: 1765336 - RNA, 19 nt, Artificial Sequence
  Description of Artificial Sequence: Synthetic oligonucleotide
gauguggggcagggaucuu

SEQ ID NO: 1765337 - RNA, 19 nt, Artificial Sequence
  Description of Artificial Sequence: Synthetic oligonucleotide
ccgcgugguccggucaguc

SEQ ID NO: 1765338 - RNA, 19 nt, Artificial Sequence
  Description of Artificial Sequence: Synthetic oligonucleotide
cugcgccauucugucgcua

SEQ ID NO: 1765339 - RNA, 19 nt, Artificial Sequence
  Description of Artificial Sequence: Synthetic oligonucleotide
gcgaaccuggaggcuucaa

SEQ ID NO: 1765340 - RNA, 19 nt, Artificial Sequence
  Description of Artificial Sequence: Synthetic oligonucleotide
cggucggcaucuagguccu

SEQ ID NO: 1765341 - RNA, 19 nt, Artificial Sequence
  Description of Artificial Sequence: Synthetic oligonucleotide
ggccaccggcugcggccca

SEQ ID NO: 1765342 - RNA, 19 nt, Artificial Sequence
  Description of Artificial Sequence: Synthetic oligonucleotide
cauggcggucugcgccauu

SEQ ID NO: 1765343 - RNA, 19 nt, Artificial Sequence
  Description of Artificial Sequence: Synthetic oligonucleotide
cgcuacaguuccgcguggu

SEQ ID NO: 1765344 - RNA, 19 nt, Artificial Sequence
  Description of Artificial Sequence: Synthetic oligonucleotide
cgguucccgcauuuccgau

SEQ ID NO: 1765345 - RNA, 19 nt, Artificial Sequence
  Description of Artificial Sequence: Synthetic oligonucleotide
ggccggguacaggcccacu

SEQ ID NO: 1765346 - RNA, 19 nt, Artificial Sequence
  Description of Artificial Sequence: Synthetic oligonucleotide
cgccagcauucuggcaucu

SEQ ID NO: 1765347 - RNA, 19 nt, Artificial Sequence
  Description of Artificial Sequence: Synthetic oligonucleotide
aauacaacuaacuugcagg

SEQ ID NO: 1765348 - RNA, 19 nt, Artificial Sequence
  Description of Artificial Sequence: Synthetic oligonucleotide
uuuuauuucggguagggcg

SEQ ID NO: 1765349 - RNA, 19 nt, Artificial Sequence
  Description of Artificial Sequence: Synthetic oligonucleotide
uuuccuaucaccuuggcug

SEQ ID NO: 1765350 - RNA, 19 nt, Artificial Sequence
  Description of Artificial Sequence: Synthetic oligonucleotide
uaaugaaacaggaaaacac

SEQ ID NO: 1765351 - RNA, 19 nt, Artificial Sequence
  Description of Artificial Sequence: Synthetic oligonucleotide
aggaaaacacaacaugucc

SEQ ID NO: 1765352 - RNA, 19 nt, Artificial Sequence
  Description of Artificial Sequence: Synthetic oligonucleotide
gauaggaggagacuuaucc

SEQ ID NO: 1765353 - RNA, 19 nt, Artificial Sequence
  Description of Artificial Sequence: Synthetic oligonucleotide
ugcaguuggagauaggagg

SEQ ID NO: 1765354 - RNA, 19 nt, Artificial Sequence
  Description of Artificial Sequence: Synthetic oligonucleotide
ugugagaccagaaucacac

SEQ ID NO: 1765355 - RNA, 19 nt, Artificial Sequence
  Description of Artificial Sequence: Synthetic oligonucleotide
agagauccugacuugaugg

SEQ ID NO: 1765356 - RNA, 19 nt, Artificial Sequence
  Description of Artificial Sequence: Synthetic oligonucleotide
uggagauucuucaaguuag

SEQ ID NO: 1765357 - RNA, 19 nt, Artificial Sequence
  Description of Artificial Sequence: Synthetic oligonucleotide
aauuagaaucauuuucuga

SEQ ID NO: 1765358 - RNA, 19 nt, Artificial Sequence
  Description of Artificial Sequence: Synthetic oligonucleotide
ucucaucaaaauuagaauc

SEQ ID NO: 1765359 - RNA, 19 nt, Artificial Sequence
  Description of Artificial Sequence: Synthetic oligonucleotide
gacagaaaaguucugugag

SEQ ID NO: 1765360 - RNA, 19 nt, Artificial Sequence
  Description of Artificial Sequence: Synthetic oligonucleotide
gaauucugcacuugguugg

SEQ ID NO: 1765361 - RNA, 19 nt, Artificial Sequence
  Description of Artificial Sequence: Synthetic oligonucleotide
uuuuagggacuuuugcugg

SEQ ID NO: 1765362 - RNA, 19 nt, Artificial Sequence
  Description of Artificial Sequence: Synthetic oligonucleotide
uuuauuucggguagggcgc

SEQ ID NO: 1765363 - RNA, 19 nt, Artificial Sequence
  Description of Artificial Sequence: Synthetic oligonucleotide
agaaucacacaacaggcag

SEQ ID NO: 1765364 - RNA, 19 nt, Artificial Sequence
  Description of Artificial Sequence: Synthetic oligonucleotide
aacuucuaggccucgcugg

SEQ ID NO: 1765365 - RNA, 19 nt, Artificial Sequence
  Description of Artificial Sequence: Synthetic oligonucleotide
uucaagaacccuuugcuga

SEQ ID NO: 1765366 - RNA, 19 nt, Artificial Sequence
  Description of Artificial Sequence: Synthetic oligonucleotide
ucacgugacucauuaaagg

SEQ ID NO: 1765367 - RNA, 19 nt, Artificial Sequence
  Description of Artificial Sequence: Synthetic oligonucleotide
uuugcugguuuccuugugg

SEQ ID NO: 1765368 - RNA, 19 nt, Artificial Sequence
  Description of Artificial Sequence: Synthetic oligonucleotide
ugugccagagcccuaagug

SEQ ID NO: 1765369 - RNA, 19 nt, Artificial Sequence
  Description of Artificial Sequence: Synthetic oligonucleotide
ucaaguuagguuuugguuu

SEQ ID NO: 1765370 - RNA, 19 nt, Artificial Sequence
  Description of Artificial Sequence: Synthetic oligonucleotide
acaacuaacuugcaggacu

SEQ ID NO: 1765371 - RNA, 19 nt, Artificial Sequence
  Description of Artificial Sequence: Synthetic oligonucleotide
accaccagaguccucaaac

SEQ ID NO: 1765372 - RNA, 19 nt, Artificial Sequence
  Description of Artificial Sequence: Synthetic oligonucleotide
uucacgugacucauuaaag

SEQ ID NO: 1765373 - RNA, 19 nt, Artificial Sequence
  Description of Artificial Sequence: Synthetic oligonucleotide
agaauucugcacuugguug

SEQ ID NO: 1765374 - RNA, 19 nt, Artificial Sequence
  Description of Artificial Sequence: Synthetic oligonucleotide
ucaccaguugcacuguccg

SEQ ID NO: 1765375 - RNA, 19 nt, Artificial Sequence
  Description of Artificial Sequence: Synthetic oligonucleotide
agugcuuuucucuugagaa

SEQ ID NO: 1765376 - RNA, 19 nt, Artificial Sequence
  Description of Artificial Sequence: Synthetic oligonucleotide
aaucacacaacaggcagag

SEQ ID NO: 1765377 - RNA, 19 nt, Artificial Sequence
  Description of Artificial Sequence: Synthetic oligonucleotide
uuuuggagauucuucaagu

SEQ ID NO: 1765378 - RNA, 19 nt, Artificial Sequence
  Description of Artificial Sequence: Synthetic oligonucleotide
aaacacaacauguccuuca

SEQ ID NO: 1765379 - RNA, 19 nt, Artificial Sequence
  Description of Artificial Sequence: Synthetic oligonucleotide
uuguuucuaggcaugguug

SEQ ID NO: 1765380 - RNA, 19 nt, Artificial Sequence
  Description of Artificial Sequence: Synthetic oligonucleotide
cacgugacucauuaaaggg

SEQ ID NO: 1765381 - RNA, 19 nt, Artificial Sequence
  Description of Artificial Sequence: Synthetic oligonucleotide
aagaacccuuugcugaagg

SEQ ID NO: 1765382 - RNA, 19 nt, Artificial Sequence
  Description of Artificial Sequence: Synthetic oligonucleotide
agacuuauccgauauuucu

SEQ ID NO: 1765383 - RNA, 19 nt, Artificial Sequence
  Description of Artificial Sequence: Synthetic oligonucleotide
ugcuuuaacuccuuuggca

SEQ ID NO: 1765384 - RNA, 19 nt, Artificial Sequence
  Description of Artificial Sequence: Synthetic oligonucleotide
uccuucacagauaaagcca

SEQ ID NO: 1765385 - RNA, 19 nt, Artificial Sequence
  Description of Artificial Sequence: Synthetic oligonucleotide
ugccgcaauaaaaucauca

SEQ ID NO: 1765386 - RNA, 19 nt, Artificial Sequence
  Description of Artificial Sequence: Synthetic oligonucleotide
uguuuuccuaucaccuugg

SEQ ID NO: 1765387 - RNA, 19 nt, Artificial Sequence
  Description of Artificial Sequence: Synthetic oligonucleotide
auaggaggagacuuauccg

SEQ ID NO: 1765388 - RNA, 19 nt, Artificial Sequence
  Description of Artificial Sequence: Synthetic oligonucleotide
aacacaacauguccuucag

SEQ ID NO: 1765389 - RNA, 19 nt, Artificial Sequence
  Description of Artificial Sequence: Synthetic oligonucleotide
aaggaaguccaacugccug

SEQ ID NO: 1765390 - RNA, 19 nt, Artificial Sequence
  Description of Artificial Sequence: Synthetic oligonucleotide
auccacuugggucucuugc

SEQ ID NO: 1765391 - RNA, 19 nt, Artificial Sequence
  Description of Artificial Sequence: Synthetic oligonucleotide
cuaacuugcaggacugagg

SEQ ID NO: 1765392 - RNA, 19 nt, Artificial Sequence
  Description of Artificial Sequence: Synthetic oligonucleotide
ugcugguaggauuucuucg

SEQ ID NO: 1765393 - RNA, 19 nt, Artificial Sequence
  Description of Artificial Sequence: Synthetic oligonucleotide
uuaacacugguuacacugc

SEQ ID NO: 1765394 - RNA, 19 nt, Artificial Sequence
  Description of Artificial Sequence: Synthetic oligonucleotide
aaggauagagauccugacu

SEQ ID NO: 1765395 - RNA, 19 nt, Artificial Sequence
  Description of Artificial Sequence: Synthetic oligonucleotide
acuugcaggacugaggguc

SEQ ID NO: 1765396 - RNA, 19 nt, Artificial Sequence
  Description of Artificial Sequence: Synthetic oligonucleotide
ucaucuaaagccauccuuu

SEQ ID NO: 1765397 - RNA, 19 nt, Artificial Sequence
  Description of Artificial Sequence: Synthetic oligonucleotide
acucauuaaaggguccucc

SEQ ID NO: 1765398 - RNA, 19 nt, Artificial Sequence
  Description of Artificial Sequence: Synthetic oligonucleotide
agcuccuucacagauaaag

SEQ ID NO: 1765399 - RNA, 19 nt, Artificial Sequence
  Description of Artificial Sequence: Synthetic oligonucleotide
ugacucggggacuuggugg

SEQ ID NO: 1765400 - RNA, 19 nt, Artificial Sequence
  Description of Artificial Sequence: Synthetic oligonucleotide
agcccuaagugacagugac

SEQ ID NO: 1765401 - RNA, 19 nt, Artificial Sequence
  Description of Artificial Sequence: Synthetic oligonucleotide
acugaugccucauauuugu

SEQ ID NO: 1765402 - RNA, 19 nt, Artificial Sequence
  Description of Artificial Sequence: Synthetic oligonucleotide
uggguguaaacgcuuaacu

SEQ ID NO: 1765403 - RNA, 19 nt, Artificial Sequence
  Description of Artificial Sequence: Synthetic oligonucleotide
ucacagauaaagccagggc

SEQ ID NO: 1765404 - RNA, 19 nt, Artificial Sequence
  Description of Artificial Sequence: Synthetic oligonucleotide
aggauagagauccugacuu

SEQ ID NO: 1765405 - RNA, 19 nt, Artificial Sequence
  Description of Artificial Sequence: Synthetic oligonucleotide
auuucuucguuuuggagau

SEQ ID NO: 1765406 - RNA, 19 nt, Artificial Sequence
  Description of Artificial Sequence: Synthetic oligonucleotide
uaggaggagacuuauccga

SEQ ID NO: 1765407 - RNA, 19 nt, Artificial Sequence
  Description of Artificial Sequence: Synthetic oligonucleotide
aaguccaacugccuggggu

SEQ ID NO: 1765408 - RNA, 19 nt, Artificial Sequence
  Description of Artificial Sequence: Synthetic oligonucleotide
uguggacucagaaggaagu

SEQ ID NO: 1765409 - RNA, 19 nt, Artificial Sequence
  Description of Artificial Sequence: Synthetic oligonucleotide
auacaacuaacuugcagga

SEQ ID NO: 1765410 - RNA, 19 nt, Artificial Sequence
  Description of Artificial Sequence: Synthetic oligonucleotide
acuuauccgauauuucugu

SEQ ID NO: 1765411 - RNA, 19 nt, Artificial Sequence
  Description of Artificial Sequence: Synthetic oligonucleotide
ucugaauccucaccaguug

SEQ ID NO: 1765412 - RNA, 19 nt, Artificial Sequence
  Description of Artificial Sequence: Synthetic oligonucleotide
uccgauauuucuguuuucc

SEQ ID NO: 1765413 - RNA, 19 nt, Artificial Sequence
  Description of Artificial Sequence: Synthetic oligonucleotide
uucaaguuagguuuugguu

SEQ ID NO: 1765414 - RNA, 19 nt, Artificial Sequence
  Description of Artificial Sequence: Synthetic oligonucleotide
uucguuuuggagauucuuc

SEQ ID NO: 1765415 - RNA, 19 nt, Artificial Sequence
  Description of Artificial Sequence: Synthetic oligonucleotide
uauccgauauuucuguuuu

SEQ ID NO: 1765416 - RNA, 19 nt, Artificial Sequence
  Description of Artificial Sequence: Synthetic oligonucleotide
accaguugcacuguccggc

SEQ ID NO: 1765417 - RNA, 19 nt, Artificial Sequence
  Description of Artificial Sequence: Synthetic oligonucleotide
uuguggacucagaaggaag

SEQ ID NO: 1765418 - RNA, 19 nt, Artificial Sequence
  Description of Artificial Sequence: Synthetic oligonucleotide
ugaugccucauauuugugu

SEQ ID NO: 1765419 - RNA, 19 nt, Artificial Sequence
  Description of Artificial Sequence: Synthetic oligonucleotide
caugaggagaaccuucaag

SEQ ID NO: 1765420 - RNA, 19 nt, Artificial Sequence
  Description of Artificial Sequence: Synthetic oligonucleotide
uacuugugacauuugggug

SEQ ID NO: 1765421 - RNA, 19 nt, Artificial Sequence
  Description of Artificial Sequence: Synthetic oligonucleotide
uuacacugcaguuggagau

SEQ ID NO: 1765422 - RNA, 19 nt, Artificial Sequence
  Description of Artificial Sequence: Synthetic oligonucleotide
aauuaacacugguuacacu

SEQ ID NO: 1765423 - RNA, 19 nt, Artificial Sequence
  Description of Artificial Sequence: Synthetic oligonucleotide
uaaggauagagauccugac

SEQ ID NO: 1765424 - RNA, 19 nt, Artificial Sequence
  Description of Artificial Sequence: Synthetic oligonucleotide
agaccagaaucacacaaca

SEQ ID NO: 1765425 - RNA, 19 nt, Artificial Sequence
  Description of Artificial Sequence: Synthetic oligonucleotide
uugucuugcuuuaacuccu

SEQ ID NO: 1765426 - RNA, 19 nt, Artificial Sequence
  Description of Artificial Sequence: Synthetic oligonucleotide
ugugcaagcugaauacaac

SEQ ID NO: 1765427 - RNA, 19 nt, Artificial Sequence
  Description of Artificial Sequence: Synthetic oligonucleotide
uuucuaggcaugguugccg

SEQ ID NO: 1765428 - RNA, 19 nt, Artificial Sequence
  Description of Artificial Sequence: Synthetic oligonucleotide
caagcugaauacaacuaac

SEQ ID NO: 1765429 - RNA, 19 nt, Artificial Sequence
  Description of Artificial Sequence: Synthetic oligonucleotide
uagagauccugacuugaug

SEQ ID NO: 1765430 - RNA, 19 nt, Artificial Sequence
  Description of Artificial Sequence: Synthetic oligonucleotide
uuucucacugaaaagucuu

SEQ ID NO: 1765431 - RNA, 19 nt, Artificial Sequence
  Description of Artificial Sequence: Synthetic oligonucleotide
aguugcacuguccggcucg

SEQ ID NO: 1765432 - RNA, 19 nt, Artificial Sequence
  Description of Artificial Sequence: Synthetic oligonucleotide
cauuaaaggguccuccaug

SEQ ID NO: 1765433 - RNA, 19 nt, Artificial Sequence
  Description of Artificial Sequence: Synthetic oligonucleotide
cacagauaaagccagggca

SEQ ID NO: 1765434 - RNA, 19 nt, Artificial Sequence
  Description of Artificial Sequence: Synthetic oligonucleotide
gggguaaggauagagaucc

SEQ ID NO: 1765435 - RNA, 19 nt, Artificial Sequence
  Description of Artificial Sequence: Synthetic oligonucleotide
agauucuucaaguuagguu

SEQ ID NO: 1765436 - RNA, 19 nt, Artificial Sequence
  Description of Artificial Sequence: Synthetic oligonucleotide
gagagcacccuccucugcg

SEQ ID NO: 1765437 - RNA, 19 nt, Artificial Sequence
  Description of Artificial Sequence: Synthetic oligonucleotide
gaauuaacacugguuacac

SEQ ID NO: 1765438 - RNA, 19 nt, Artificial Sequence
  Description of Artificial Sequence: Synthetic oligonucleotide
ucagcugaagggcugcaca

SEQ ID NO: 1765439 - RNA, 19 nt, Artificial Sequence
  Description of Artificial Sequence: Synthetic oligonucleotide
uuucuccccuucaacacug

SEQ ID NO: 1765440 - RNA, 19 nt, Artificial Sequence
  Description of Artificial Sequence: Synthetic oligonucleotide
ugaguaauugacugguuuu

SEQ ID NO: 1765441 - RNA, 19 nt, Artificial Sequence
  Description of Artificial Sequence: Synthetic oligonucleotide
aucaccuuggcugucagug

SEQ ID NO: 1765442 - RNA, 19 nt, Artificial Sequence
  Description of Artificial Sequence: Synthetic oligonucleotide
caucaucagagucaccacc

SEQ ID NO: 1765443 - RNA, 19 nt, Artificial Sequence
  Description of Artificial Sequence: Synthetic oligonucleotide
aacgcuuaacuggugcuag

SEQ ID NO: 1765444 - RNA, 19 nt, Artificial Sequence
  Description of Artificial Sequence: Synthetic oligonucleotide
cagaaggaaguccaacugc

SEQ ID NO: 1765445 - RNA, 19 nt, Artificial Sequence
  Description of Artificial Sequence: Synthetic oligonucleotide
ugaauccucaccaguugca

SEQ ID NO: 1765446 - RNA, 19 nt, Artificial Sequence
  Description of Artificial Sequence: Synthetic oligonucleotide
ugagaauucugcacuuggu

SEQ ID NO: 1765447 - RNA, 19 nt, Artificial Sequence
  Description of Artificial Sequence: Synthetic oligonucleotide
uaaacgcuuaacuggugcu

SEQ ID NO: 1765448 - RNA, 19 nt, Artificial Sequence
  Description of Artificial Sequence: Synthetic oligonucleotide
ucagcuucagauguuauuu

SEQ ID NO: 1765449 - RNA, 19 nt, Artificial Sequence
  Description of Artificial Sequence: Synthetic oligonucleotide
uucuaggccucgcuggaag

SEQ ID NO: 1765450 - RNA, 19 nt, Artificial Sequence
  Description of Artificial Sequence: Synthetic oligonucleotide
caggcagagauccuucacg

SEQ ID NO: 1765451 - RNA, 19 nt, Artificial Sequence
  Description of Artificial Sequence: Synthetic oligonucleotide
aggacugagggucccacag

SEQ ID NO: 1765452 - RNA, 19 nt, Artificial Sequence
  Description of Artificial Sequence: Synthetic oligonucleotide
uccacaaucuuguccaaau

SEQ ID NO: 1765453 - RNA, 19 nt, Artificial Sequence
  Description of Artificial Sequence: Synthetic oligonucleotide
aauccucaccaguugcacu

SEQ ID NO: 1765454 - RNA, 19 nt, Artificial Sequence
  Description of Artificial Sequence: Synthetic oligonucleotide
aagcugaauacaacuaacu

SEQ ID NO: 1765455 - RNA, 19 nt, Artificial Sequence
  Description of Artificial Sequence: Synthetic oligonucleotide
agguuuugguuugucuugc

SEQ ID NO: 1765456 - RNA, 19 nt, Artificial Sequence
  Description of Artificial Sequence: Synthetic oligonucleotide
agauccuucacgugacuca

SEQ ID NO: 1765457 - RNA, 19 nt, Artificial Sequence
  Description of Artificial Sequence: Synthetic oligonucleotide
aaaggguccuccaugugca

SEQ ID NO: 1765458 - RNA, 19 nt, Artificial Sequence
  Description of Artificial Sequence: Synthetic oligonucleotide
ugcaagcugaauacaacua

SEQ ID NO: 1765459 - RNA, 19 nt, Artificial Sequence
  Description of Artificial Sequence: Synthetic oligonucleotide
cugaauccucaccaguugc

SEQ ID NO: 1765460 - RNA, 19 nt, Artificial Sequence
  Description of Artificial Sequence: Synthetic oligonucleotide
acugguuacacugcaguug

SEQ ID NO: 1765461 - RNA, 19 nt, Artificial Sequence
  Description of Artificial Sequence: Synthetic oligonucleotide
agcugaauacaacuaacuu

SEQ ID NO: 1765462 - RNA, 19 nt, Artificial Sequence
  Description of Artificial Sequence: Synthetic oligonucleotide
caauaaaaucaucaucaga

SEQ ID NO: 1765463 - RNA, 19 nt, Artificial Sequence
  Description of Artificial Sequence: Synthetic oligonucleotide
ucauuaaaggguccuccau

SEQ ID NO: 1765464 - RNA, 19 nt, Artificial Sequence
  Description of Artificial Sequence: Synthetic oligonucleotide
uuauccgauauuucuguuu

SEQ ID NO: 1765465 - RNA, 19 nt, Artificial Sequence
  Description of Artificial Sequence: Synthetic oligonucleotide
ugccagagcccuaagugac

SEQ ID NO: 1765466 - RNA, 19 nt, Artificial Sequence
  Description of Artificial Sequence: Synthetic oligonucleotide
uggaagcuccuucacagau

SEQ ID NO: 1765467 - RNA, 19 nt, Artificial Sequence
  Description of Artificial Sequence: Synthetic oligonucleotide
uguaaacgcuuaacuggug

SEQ ID NO: 1765468 - RNA, 19 nt, Artificial Sequence
  Description of Artificial Sequence: Synthetic oligonucleotide
acucagaaggaaguccaac

SEQ ID NO: 1765469 - RNA, 19 nt, Artificial Sequence
  Description of Artificial Sequence: Synthetic oligonucleotide
aacuggugcuagucgggag

SEQ ID NO: 1765470 - RNA, 19 nt, Artificial Sequence
  Description of Artificial Sequence: Synthetic oligonucleotide
cugucuucagagagcaccc

SEQ ID NO: 1765471 - RNA, 19 nt, Artificial Sequence
  Description of Artificial Sequence: Synthetic oligonucleotide
aaaaguucugugagaccag

SEQ ID NO: 1765472 - RNA, 19 nt, Artificial Sequence
  Description of Artificial Sequence: Synthetic oligonucleotide
acuaacuugcaggacugag

SEQ ID NO: 1765473 - RNA, 19 nt, Artificial Sequence
  Description of Artificial Sequence: Synthetic oligonucleotide
uuaaaggguccuccaugug

SEQ ID NO: 1765474 - RNA, 19 nt, Artificial Sequence
  Description of Artificial Sequence: Synthetic oligonucleotide
uuuggagauucuucaaguu

SEQ ID NO: 1765475 - RNA, 19 nt, Artificial Sequence
  Description of Artificial Sequence: Synthetic oligonucleotide
ugcacuguccggcucggug

SEQ ID NO: 1765476 - RNA, 19 nt, Artificial Sequence
  Description of Artificial Sequence: Synthetic oligonucleotide
ucaagaacccuuugcugaa

SEQ ID NO: 1765477 - RNA, 19 nt, Artificial Sequence
  Description of Artificial Sequence: Synthetic oligonucleotide
ggcuacuugugacauuugg

SEQ ID NO: 1765478 - RNA, 19 nt, Artificial Sequence
  Description of Artificial Sequence: Synthetic oligonucleotide
uucuucguuuuggagauuc

SEQ ID NO: 1765479 - RNA, 19 nt, Artificial Sequence
  Description of Artificial Sequence: Synthetic oligonucleotide
acacaacauguccuucagg

SEQ ID NO: 1765480 - RNA, 19 nt, Artificial Sequence
  Description of Artificial Sequence: Synthetic oligonucleotide
ugcuagucgggagaggccc

SEQ ID NO: 1765481 - RNA, 19 nt, Artificial Sequence
  Description of Artificial Sequence: Synthetic oligonucleotide
ugcggguuuucucugcacu

SEQ ID NO: 1765482 - RNA, 19 nt, Artificial Sequence
  Description of Artificial Sequence: Synthetic oligonucleotide
aacugaugccucauauuug

SEQ ID NO: 1765483 - RNA, 19 nt, Artificial Sequence
  Description of Artificial Sequence: Synthetic oligonucleotide
agggacuuuugcugguagg

SEQ ID NO: 1765484 - RNA, 19 nt, Artificial Sequence
  Description of Artificial Sequence: Synthetic oligonucleotide
gauagagauccugacuuga

SEQ ID NO: 1765485 - RNA, 19 nt, Artificial Sequence
  Description of Artificial Sequence: Synthetic oligonucleotide
gaacccuuugcugaaggac

SEQ ID NO: 1765486 - RNA, 19 nt, Artificial Sequence
  Description of Artificial Sequence: Synthetic oligonucleotide
agagagcacccuccucugc

SEQ ID NO: 1765487 - RNA, 19 nt, Artificial Sequence
  Description of Artificial Sequence: Synthetic oligonucleotide
ucggguagggcgcaccaug

SEQ ID NO: 1765488 - RNA, 19 nt, Artificial Sequence
  Description of Artificial Sequence: Synthetic oligonucleotide
uucuaggcaugguugccgc

SEQ ID NO: 1765489 - RNA, 19 nt, Artificial Sequence
  Description of Artificial Sequence: Synthetic oligonucleotide
uuggcuacuugugacauuu

SEQ ID NO: 1765490 - RNA, 19 nt, Artificial Sequence
  Description of Artificial Sequence: Synthetic oligonucleotide
guuacacugcaguuggaga

SEQ ID NO: 1765491 - RNA, 19 nt, Artificial Sequence
  Description of Artificial Sequence: Synthetic oligonucleotide
ugucaucuaaagccauccu

SEQ ID NO: 1765492 - RNA, 19 nt, Artificial Sequence
  Description of Artificial Sequence: Synthetic oligonucleotide
uuuagggacuuuugcuggu

SEQ ID NO: 1765493 - RNA, 19 nt, Artificial Sequence
  Description of Artificial Sequence: Synthetic oligonucleotide
aggcagagauccuucacgu

SEQ ID NO: 1765494 - RNA, 19 nt, Artificial Sequence
  Description of Artificial Sequence: Synthetic oligonucleotide
gacuugauggcagcuggag

SEQ ID NO: 1765495 - RNA, 19 nt, Artificial Sequence
  Description of Artificial Sequence: Synthetic oligonucleotide
acuggugcuagucgggaga

SEQ ID NO: 1765496 - RNA, 19 nt, Artificial Sequence
  Description of Artificial Sequence: Synthetic oligonucleotide
cugcaguuggagauaggag

SEQ ID NO: 1765497 - RNA, 19 nt, Artificial Sequence
  Description of Artificial Sequence: Synthetic oligonucleotide
uugcugguuuccuugugga

SEQ ID NO: 1765498 - RNA, 19 nt, Artificial Sequence
  Description of Artificial Sequence: Synthetic oligonucleotide
caugguugccgcaauaaaa

SEQ ID NO: 1765499 - RNA, 19 nt, Artificial Sequence
  Description of Artificial Sequence: Synthetic oligonucleotide
cuucacgugacucauuaaa

SEQ ID NO: 1765500 - RNA, 19 nt, Artificial Sequence
  Description of Artificial Sequence: Synthetic oligonucleotide
cuacuugugacauuugggu

SEQ ID NO: 1765501 - RNA, 19 nt, Artificial Sequence
  Description of Artificial Sequence: Synthetic oligonucleotide
cuaagugacagugacuuaa

SEQ ID NO: 1765502 - RNA, 19 nt, Artificial Sequence
  Description of Artificial Sequence: Synthetic oligonucleotide
ugggguaaggauagagauc

SEQ ID NO: 1765503 - RNA, 19 nt, Artificial Sequence
  Description of Artificial Sequence: Synthetic oligonucleotide
cuucaggaguggcaugagg

SEQ ID NO: 1765504 - RNA, 19 nt, Artificial Sequence
  Description of Artificial Sequence: Synthetic oligonucleotide
cuugucaucuaaagccauc

SEQ ID NO: 1765505 - RNA, 19 nt, Artificial Sequence
  Description of Artificial Sequence: Synthetic oligonucleotide
ucgcuggaagaccuuguca

SEQ ID NO: 1765506 - RNA, 19 nt, Artificial Sequence
  Description of Artificial Sequence: Synthetic oligonucleotide
uaagugacagugacuuaau

SEQ ID NO: 1765507 - RNA, 19 nt, Artificial Sequence
  Description of Artificial Sequence: Synthetic oligonucleotide
cugccugggguaaggauag

SEQ ID NO: 1765508 - RNA, 19 nt, Artificial Sequence
  Description of Artificial Sequence: Synthetic oligonucleotide
uuuggguguaaacgcuuaa

SEQ ID NO: 1765509 - RNA, 19 nt, Artificial Sequence
  Description of Artificial Sequence: Synthetic oligonucleotide
gcuuaacuggugcuagucg

SEQ ID NO: 1765510 - RNA, 19 nt, Artificial Sequence
  Description of Artificial Sequence: Synthetic oligonucleotide
uggagauaggaggagacuu

SEQ ID NO: 1765511 - RNA, 19 nt, Artificial Sequence
  Description of Artificial Sequence: Synthetic oligonucleotide
ugucagugcuuuucucuug

SEQ ID NO: 1765512 - RNA, 19 nt, Artificial Sequence
  Description of Artificial Sequence: Synthetic oligonucleotide
gucucuugccuucagcuga

SEQ ID NO: 1765513 - RNA, 19 nt, Artificial Sequence
  Description of Artificial Sequence: Synthetic oligonucleotide
cuugcaggacugagggucc

SEQ ID NO: 1765514 - RNA, 19 nt, Artificial Sequence
  Description of Artificial Sequence: Synthetic oligonucleotide
ugcuagagcuucugcuucc

SEQ ID NO: 1765515 - RNA, 19 nt, Artificial Sequence
  Description of Artificial Sequence: Synthetic oligonucleotide
gcuacuugugacauuuggg

SEQ ID NO: 1765516 - RNA, 19 nt, Artificial Sequence
  Description of Artificial Sequence: Synthetic oligonucleotide
aguccucaaacugugagua

SEQ ID NO: 1765517 - RNA, 19 nt, Artificial Sequence
  Description of Artificial Sequence: Synthetic oligonucleotide
uggcaugaggagaaccuuc

SEQ ID NO: 1765518 - RNA, 19 nt, Artificial Sequence
  Description of Artificial Sequence: Synthetic oligonucleotide
guaggauuucuucguuuug

SEQ ID NO: 1765519 - RNA, 19 nt, Artificial Sequence
  Description of Artificial Sequence: Synthetic oligonucleotide
guggaugcugcugccagcg

SEQ ID NO: 1765520 - RNA, 19 nt, Artificial Sequence
  Description of Artificial Sequence: Synthetic oligonucleotide
auuucggguagggcgcacc

SEQ ID NO: 1765521 - RNA, 19 nt, Artificial Sequence
  Description of Artificial Sequence: Synthetic oligonucleotide
ugugacauuuggguguaaa

SEQ ID NO: 1765522 - RNA, 19 nt, Artificial Sequence
  Description of Artificial Sequence: Synthetic oligonucleotide
ucugcacuugguuggugac

SEQ ID NO: 1765523 - RNA, 19 nt, Artificial Sequence
  Description of Artificial Sequence: Synthetic oligonucleotide
cagagauccuucacgugac

SEQ ID NO: 1765524 - RNA, 19 nt, Artificial Sequence
  Description of Artificial Sequence: Synthetic oligonucleotide
uuucggguagggcgcacca

SEQ ID NO: 1765525 - RNA, 19 nt, Artificial Sequence
  Description of Artificial Sequence: Synthetic oligonucleotide
uuggguguaaacgcuuaac

SEQ ID NO: 1765526 - RNA, 19 nt, Artificial Sequence
  Description of Artificial Sequence: Synthetic oligonucleotide
aacugccugggguaaggau

SEQ ID NO: 1765527 - RNA, 19 nt, Artificial Sequence
  Description of Artificial Sequence: Synthetic oligonucleotide
augguugccgcaauaaaau

SEQ ID NO: 1765528 - RNA, 19 nt, Artificial Sequence
  Description of Artificial Sequence: Synthetic oligonucleotide
guagggcgcaccauggugc

SEQ ID NO: 1765529 - RNA, 19 nt, Artificial Sequence
  Description of Artificial Sequence: Synthetic oligonucleotide
uuggcaugguuuuggacuu

SEQ ID NO: 1765530 - RNA, 19 nt, Artificial Sequence
  Description of Artificial Sequence: Synthetic oligonucleotide
gcagagauccuucacguga

SEQ ID NO: 1765531 - RNA, 19 nt, Artificial Sequence
  Description of Artificial Sequence: Synthetic oligonucleotide
ucggggacuugguggaugc

SEQ ID NO: 1765532 - RNA, 19 nt, Artificial Sequence
  Description of Artificial Sequence: Synthetic oligonucleotide
uuuuguuucuaggcauggu

SEQ ID NO: 1765533 - RNA, 19 nt, Artificial Sequence
  Description of Artificial Sequence: Synthetic oligonucleotide
uuggcugucagugcuuuuc

SEQ ID NO: 1765534 - RNA, 19 nt, Artificial Sequence
  Description of Artificial Sequence: Synthetic oligonucleotide
gaugcugcugccagcgggc

SEQ ID NO: 1765535 - RNA, 19 nt, Artificial Sequence
  Description of Artificial Sequence: Synthetic oligonucleotide
gguuacacugcaguuggag

SEQ ID NO: 1765536 - RNA, 19 nt, Artificial Sequence
  Description of Artificial Sequence: Synthetic oligonucleotide
cucauuaaaggguccucca

SEQ ID NO: 1765537 - RNA, 19 nt, Artificial Sequence
  Description of Artificial Sequence: Synthetic oligonucleotide
ccaugugcaagcugaauac

SEQ ID NO: 1765538 - RNA, 19 nt, Artificial Sequence
  Description of Artificial Sequence: Synthetic oligonucleotide
aacuugcaggacugagggu

SEQ ID NO: 1765539 - RNA, 19 nt, Artificial Sequence
  Description of Artificial Sequence: Synthetic oligonucleotide
agaacccuuugcugaagga

SEQ ID NO: 1765540 - RNA, 19 nt, Artificial Sequence
  Description of Artificial Sequence: Synthetic oligonucleotide
ucugacucggggacuuggu

SEQ ID NO: 1765541 - RNA, 19 nt, Artificial Sequence
  Description of Artificial Sequence: Synthetic oligonucleotide
ugguugccgcaauaaaauc

SEQ ID NO: 1765542 - RNA, 19 nt, Artificial Sequence
  Description of Artificial Sequence: Synthetic oligonucleotide
caacuucuaggccucgcug

SEQ ID NO: 1765543 - RNA, 19 nt, Artificial Sequence
  Description of Artificial Sequence: Synthetic oligonucleotide
accgcacuuggcuacuugu

SEQ ID NO: 1765544 - RNA, 19 nt, Artificial Sequence
  Description of Artificial Sequence: Synthetic oligonucleotide
gguaaggauagagauccug

SEQ ID NO: 1765545 - RNA, 19 nt, Artificial Sequence
  Description of Artificial Sequence: Synthetic oligonucleotide
aguccaacugccuggggua

SEQ ID NO: 1765546 - RNA, 19 nt, Artificial Sequence
  Description of Artificial Sequence: Synthetic oligonucleotide
acgugacucauuaaagggu

SEQ ID NO: 1765547 - RNA, 19 nt, Artificial Sequence
  Description of Artificial Sequence: Synthetic oligonucleotide
ucuaggccucgcuggaaga

SEQ ID NO: 1765548 - RNA, 19 nt, Artificial Sequence
  Description of Artificial Sequence: Synthetic oligonucleotide
aaacgcuuaacuggugcua

SEQ ID NO: 1765549 - RNA, 19 nt, Artificial Sequence
  Description of Artificial Sequence: Synthetic oligonucleotide
ugcuaccgcacuuggcuac

SEQ ID NO: 1765550 - RNA, 19 nt, Artificial Sequence
  Description of Artificial Sequence: Synthetic oligonucleotide
uacaacuaacuugcaggac

SEQ ID NO: 1765551 - RNA, 19 nt, Artificial Sequence
  Description of Artificial Sequence: Synthetic oligonucleotide
agcgggcuacugcuagagc

SEQ ID NO: 1765552 - RNA, 19 nt, Artificial Sequence
  Description of Artificial Sequence: Synthetic oligonucleotide
uuggagauaggaggagacu

SEQ ID NO: 1765553 - RNA, 19 nt, Artificial Sequence
  Description of Artificial Sequence: Synthetic oligonucleotide
ggugcuagucgggagaggc

SEQ ID NO: 1765554 - RNA, 19 nt, Artificial Sequence
  Description of Artificial Sequence: Synthetic oligonucleotide
gaugccucauauuuguguu

SEQ ID NO: 1765555 - RNA, 19 nt, Artificial Sequence
  Description of Artificial Sequence: Synthetic oligonucleotide
gacucggggacuuggugga

SEQ ID NO: 1765556 - RNA, 19 nt, Artificial Sequence
  Description of Artificial Sequence: Synthetic oligonucleotide
agauccugacuugauggca

SEQ ID NO: 1765557 - RNA, 19 nt, Artificial Sequence
  Description of Artificial Sequence: Synthetic oligonucleotide
ugugaguaauugacugguu

SEQ ID NO: 1765558 - RNA, 19 nt, Artificial Sequence
  Description of Artificial Sequence: Synthetic oligonucleotide
acacugcaguuggagauag

SEQ ID NO: 1765559 - RNA, 19 nt, Artificial Sequence
  Description of Artificial Sequence: Synthetic oligonucleotide
acuuuugcugguaggauuu

SEQ ID NO: 1765560 - RNA, 19 nt, Artificial Sequence
  Description of Artificial Sequence: Synthetic oligonucleotide
guuucuaggcaugguugcc

SEQ ID NO: 1765561 - RNA, 19 nt, Artificial Sequence
  Description of Artificial Sequence: Synthetic oligonucleotide
guuuuccuaucaccuuggc

SEQ ID NO: 1765562 - RNA, 19 nt, Artificial Sequence
  Description of Artificial Sequence: Synthetic oligonucleotide
cucuugagaauucugcacu

SEQ ID NO: 1765563 - RNA, 19 nt, Artificial Sequence
  Description of Artificial Sequence: Synthetic oligonucleotide
gagaauucugcacuugguu

SEQ ID NO: 1765564 - RNA, 19 nt, Artificial Sequence
  Description of Artificial Sequence: Synthetic oligonucleotide
gucgggagaggcccaggcg

SEQ ID NO: 1765565 - RNA, 19 nt, Artificial Sequence
  Description of Artificial Sequence: Synthetic oligonucleotide
gugcaagcugaauacaacu

SEQ ID NO: 1765566 - RNA, 19 nt, Artificial Sequence
  Description of Artificial Sequence: Synthetic oligonucleotide
uccggcucggugucauuag

SEQ ID NO: 1765567 - RNA, 19 nt, Artificial Sequence
  Description of Artificial Sequence: Synthetic oligonucleotide
gguugccgcaauaaaauca

SEQ ID NO: 1765568 - RNA, 19 nt, Artificial Sequence
  Description of Artificial Sequence: Synthetic oligonucleotide
caacaggcagagauccuuc

SEQ ID NO: 1765569 - RNA, 19 nt, Artificial Sequence
  Description of Artificial Sequence: Synthetic oligonucleotide
ugguaggauuucuucguuu

SEQ ID NO: 1765570 - RNA, 19 nt, Artificial Sequence
  Description of Artificial Sequence: Synthetic oligonucleotide
agauaaagccagggcaacu

SEQ ID NO: 1765571 - RNA, 19 nt, Artificial Sequence
  Description of Artificial Sequence: Synthetic oligonucleotide
cugcuagagcuucugcuuc

SEQ ID NO: 1765572 - RNA, 19 nt, Artificial Sequence
  Description of Artificial Sequence: Synthetic oligonucleotide
ugccucauauuuguguuuu

SEQ ID NO: 1765573 - RNA, 19 nt, Artificial Sequence
  Description of Artificial Sequence: Synthetic oligonucleotide
ggauagagauccugacuug

SEQ ID NO: 1765574 - RNA, 19 nt, Artificial Sequence
  Description of Artificial Sequence: Synthetic oligonucleotide
acaacaggcagagauccuu

SEQ ID NO: 1765575 - RNA, 19 nt, Artificial Sequence
  Description of Artificial Sequence: Synthetic oligonucleotide
gaggagacuuauccgauau

SEQ ID NO: 1765576 - RNA, 19 nt, Artificial Sequence
  Description of Artificial Sequence: Synthetic oligonucleotide
gguagggcgcaccauggug

SEQ ID NO: 1765577 - RNA, 19 nt, Artificial Sequence
  Description of Artificial Sequence: Synthetic oligonucleotide
augugccagagcccuaagu

SEQ ID NO: 1765578 - RNA, 19 nt, Artificial Sequence
  Description of Artificial Sequence: Synthetic oligonucleotide
uccugcuaccgcacuuggc

SEQ ID NO: 1765579 - RNA, 19 nt, Artificial Sequence
  Description of Artificial Sequence: Synthetic oligonucleotide
uaccgcacuuggcuacuug

SEQ ID NO: 1765580 - RNA, 19 nt, Artificial Sequence
  Description of Artificial Sequence: Synthetic oligonucleotide
agauaggaggagacuuauc

SEQ ID NO: 1765581 - RNA, 19 nt, Artificial Sequence
  Description of Artificial Sequence: Synthetic oligonucleotide
cuaucaccuuggcugucag

SEQ ID NO: 1765582 - RNA, 19 nt, Artificial Sequence
  Description of Artificial Sequence: Synthetic oligonucleotide
acugcggguuuucucugca

SEQ ID NO: 1765583 - RNA, 19 nt, Artificial Sequence
  Description of Artificial Sequence: Synthetic oligonucleotide
caccaguugcacuguccgg

SEQ ID NO: 1765584 - RNA, 19 nt, Artificial Sequence
  Description of Artificial Sequence: Synthetic oligonucleotide
gcaagcugaauacaacuaa

SEQ ID NO: 1765585 - RNA, 19 nt, Artificial Sequence
  Description of Artificial Sequence: Synthetic oligonucleotide
aacuaacuugcaggacuga

SEQ ID NO: 1765586 - RNA, 19 nt, Artificial Sequence
  Description of Artificial Sequence: Synthetic oligonucleotide
uugggucucuugccuucag

SEQ ID NO: 1765587 - RNA, 19 nt, Artificial Sequence
  Description of Artificial Sequence: Synthetic oligonucleotide
uagggcgcaccauggugcc

SEQ ID NO: 1765588 - RNA, 19 nt, Artificial Sequence
  Description of Artificial Sequence: Synthetic oligonucleotide
uuauuucggguagggcgca

SEQ ID NO: 1765589 - RNA, 19 nt, Artificial Sequence
  Description of Artificial Sequence: Synthetic oligonucleotide
gaggcggcuggugggaucc

SEQ ID NO: 1765590 - RNA, 19 nt, Artificial Sequence
  Description of Artificial Sequence: Synthetic oligonucleotide
uuagcacugcugccaucac

SEQ ID NO: 1765591 - RNA, 19 nt, Artificial Sequence
  Description of Artificial Sequence: Synthetic oligonucleotide
uggugggauccacuugggu

SEQ ID NO: 1765592 - RNA, 19 nt, Artificial Sequence
  Description of Artificial Sequence: Synthetic oligonucleotide
ucuaggcaugguugccgca

SEQ ID NO: 1765593 - RNA, 19 nt, Artificial Sequence
  Description of Artificial Sequence: Synthetic oligonucleotide
acugccugggguaaggaua

SEQ ID NO: 1765594 - RNA, 19 nt, Artificial Sequence
  Description of Artificial Sequence: Synthetic oligonucleotide
gacucauuaaaggguccuc

SEQ ID NO: 1765595 - RNA, 19 nt, Artificial Sequence
  Description of Artificial Sequence: Synthetic oligonucleotide
cugaaaagucuucaucacu

SEQ ID NO: 1765596 - RNA, 19 nt, Artificial Sequence
  Description of Artificial Sequence: Synthetic oligonucleotide
agagauccuucacgugacu

SEQ ID NO: 1765597 - RNA, 19 nt, Artificial Sequence
  Description of Artificial Sequence: Synthetic oligonucleotide
ccagaguccucaaacugug

SEQ ID NO: 1765598 - RNA, 19 nt, Artificial Sequence
  Description of Artificial Sequence: Synthetic oligonucleotide
ggucccacagguccuuucc

SEQ ID NO: 1765599 - RNA, 19 nt, Artificial Sequence
  Description of Artificial Sequence: Synthetic oligonucleotide
gugaguaauugacugguuu

SEQ ID NO: 1765600 - RNA, 19 nt, Artificial Sequence
  Description of Artificial Sequence: Synthetic oligonucleotide
aggaguggcaugaggagaa

SEQ ID NO: 1765601 - RNA, 19 nt, Artificial Sequence
  Description of Artificial Sequence: Synthetic oligonucleotide
agcacccuccucugcggag

SEQ ID NO: 1765602 - RNA, 19 nt, Artificial Sequence
  Description of Artificial Sequence: Synthetic oligonucleotide
cucgcuggaagaccuuguc

SEQ ID NO: 1765603 - RNA, 19 nt, Artificial Sequence
  Description of Artificial Sequence: Synthetic oligonucleotide
cagagagcacccuccucug

SEQ ID NO: 1765604 - RNA, 19 nt, Artificial Sequence
  Description of Artificial Sequence: Synthetic oligonucleotide
uaucaccuuggcugucagu

SEQ ID NO: 1765605 - RNA, 19 nt, Artificial Sequence
  Description of Artificial Sequence: Synthetic oligonucleotide
uacacugcaguuggagaua

SEQ ID NO: 1765606 - RNA, 19 nt, Artificial Sequence
  Description of Artificial Sequence: Synthetic oligonucleotide
cacuuggcuacuugugaca

SEQ ID NO: 1765607 - RNA, 19 nt, Artificial Sequence
  Description of Artificial Sequence: Synthetic oligonucleotide
uugccgcaauaaaaucauc

SEQ ID NO: 1765608 - RNA, 19 nt, Artificial Sequence
  Description of Artificial Sequence: Synthetic oligonucleotide
gguuugucuugcuuuaacu

SEQ ID NO: 1765609 - RNA, 19 nt, Artificial Sequence
  Description of Artificial Sequence: Synthetic oligonucleotide
aggcggaggcucugacucg

SEQ ID NO: 1765610 - RNA, 19 nt, Artificial Sequence
  Description of Artificial Sequence: Synthetic oligonucleotide
acuugguuggugacugcug

SEQ ID NO: 1765611 - RNA, 19 nt, Artificial Sequence
  Description of Artificial Sequence: Synthetic oligonucleotide
uggcuacuugugacauuug

SEQ ID NO: 1765612 - RNA, 19 nt, Artificial Sequence
  Description of Artificial Sequence: Synthetic oligonucleotide
cugugagaccagaaucaca

SEQ ID NO: 1765613 - RNA, 19 nt, Artificial Sequence
  Description of Artificial Sequence: Synthetic oligonucleotide
cacugcggguuuucucugc

SEQ ID NO: 1765614 - RNA, 19 nt, Artificial Sequence
  Description of Artificial Sequence: Synthetic oligonucleotide
guguaaacgcuuaacuggu

SEQ ID NO: 1765615 - RNA, 19 nt, Artificial Sequence
  Description of Artificial Sequence: Synthetic oligonucleotide
auagagauccugacuugau

SEQ ID NO: 1765616 - RNA, 19 nt, Artificial Sequence
  Description of Artificial Sequence: Synthetic oligonucleotide
agaugugccagagcccuaa

SEQ ID NO: 1765617 - RNA, 19 nt, Artificial Sequence
  Description of Artificial Sequence: Synthetic oligonucleotide
cuaggccucgcuggaagac

SEQ ID NO: 1765618 - RNA, 19 nt, Artificial Sequence
  Description of Artificial Sequence: Synthetic oligonucleotide
ugguuacacugcaguugga

SEQ ID NO: 1765619 - RNA, 19 nt, Artificial Sequence
  Description of Artificial Sequence: Synthetic oligonucleotide
ggcucggugucauuagcac

SEQ ID NO: 1765620 - RNA, 19 nt, Artificial Sequence
  Description of Artificial Sequence: Synthetic oligonucleotide
uuagggacuuuugcuggua

SEQ ID NO: 1765621 - RNA, 19 nt, Artificial Sequence
  Description of Artificial Sequence: Synthetic oligonucleotide
gcuuuaacuccuuuggcau

SEQ ID NO: 1765622 - RNA, 19 nt, Artificial Sequence
  Description of Artificial Sequence: Synthetic oligonucleotide
aggguccuccaugugcaag

SEQ ID NO: 1765623 - RNA, 19 nt, Artificial Sequence
  Description of Artificial Sequence: Synthetic oligonucleotide
uccugacuugauggcagcu

SEQ ID NO: 1765624 - RNA, 19 nt, Artificial Sequence
  Description of Artificial Sequence: Synthetic oligonucleotide
augccucauauuuguguuu

SEQ ID NO: 1765625 - RNA, 19 nt, Artificial Sequence
  Description of Artificial Sequence: Synthetic oligonucleotide
guugccgcaauaaaaucau

SEQ ID NO: 1765626 - RNA, 19 nt, Artificial Sequence
  Description of Artificial Sequence: Synthetic oligonucleotide
auuuggguguaaacgcuua

SEQ ID NO: 1765627 - RNA, 19 nt, Artificial Sequence
  Description of Artificial Sequence: Synthetic oligonucleotide
guugcacuguccggcucgg

SEQ ID NO: 1765628 - RNA, 19 nt, Artificial Sequence
  Description of Artificial Sequence: Synthetic oligonucleotide
gcaguuggagauaggagga

SEQ ID NO: 1765629 - RNA, 19 nt, Artificial Sequence
  Description of Artificial Sequence: Synthetic oligonucleotide
acugagggucccacagguc

SEQ ID NO: 1765630 - RNA, 19 nt, Artificial Sequence
  Description of Artificial Sequence: Synthetic oligonucleotide
gggacuuuugcugguagga

SEQ ID NO: 1765631 - RNA, 19 nt, Artificial Sequence
  Description of Artificial Sequence: Synthetic oligonucleotide
acgcuuaacuggugcuagu

SEQ ID NO: 1765632 - RNA, 19 nt, Artificial Sequence
  Description of Artificial Sequence: Synthetic oligonucleotide
cacugcaguuggagauagg

SEQ ID NO: 1765633 - RNA, 19 nt, Artificial Sequence
  Description of Artificial Sequence: Synthetic oligonucleotide
ggagccacaucaacugaug

SEQ ID NO: 1765634 - RNA, 19 nt, Artificial Sequence
  Description of Artificial Sequence: Synthetic oligonucleotide
gcuucugcuuccagaggcg

SEQ ID NO: 1765635 - RNA, 19 nt, Artificial Sequence
  Description of Artificial Sequence: Synthetic oligonucleotide
cccacagguccuuuccugc

SEQ ID NO: 1765636 - RNA, 19 nt, Artificial Sequence
  Description of Artificial Sequence: Synthetic oligonucleotide
aggagacuuauccgauauu

SEQ ID NO: 1765637 - RNA, 19 nt, Artificial Sequence
  Description of Artificial Sequence: Synthetic oligonucleotide
gcggguuuucucugcacug

SEQ ID NO: 1765638 - RNA, 19 nt, Artificial Sequence
  Description of Artificial Sequence: Synthetic oligonucleotide
cuggaagaccuugucaucu

SEQ ID NO: 1765639 - RNA, 19 nt, Artificial Sequence
  Description of Artificial Sequence: Synthetic oligonucleotide
cuagucgggagaggcccag

SEQ ID NO: 1765640 - RNA, 19 nt, Artificial Sequence
  Description of Artificial Sequence: Synthetic oligonucleotide
gagauaggaggagacuuau

SEQ ID NO: 1765641 - RNA, 19 nt, Artificial Sequence
  Description of Artificial Sequence: Synthetic oligonucleotide
cagguccuuuccugcuacc

SEQ ID NO: 1765642 - RNA, 19 nt, Artificial Sequence
  Description of Artificial Sequence: Synthetic oligonucleotide
ggcagagauccuucacgug

SEQ ID NO: 1765643 - RNA, 19 nt, Artificial Sequence
  Description of Artificial Sequence: Synthetic oligonucleotide
gguaggauuucuucguuuu

SEQ ID NO: 1765644 - RNA, 19 nt, Artificial Sequence
  Description of Artificial Sequence: Synthetic oligonucleotide
gcugguaggauuucuucgu

SEQ ID NO: 1765645 - RNA, 19 nt, Artificial Sequence
  Description of Artificial Sequence: Synthetic oligonucleotide
ggagacuuauccgauauuu

SEQ ID NO: 1765646 - RNA, 19 nt, Artificial Sequence
  Description of Artificial Sequence: Synthetic oligonucleotide
aggaggagacuuauccgau

SEQ ID NO: 1765647 - RNA, 19 nt, Artificial Sequence
  Description of Artificial Sequence: Synthetic oligonucleotide
uagucgggagaggcccagg

SEQ ID NO: 1765648 - RNA, 19 nt, Artificial Sequence
  Description of Artificial Sequence: Synthetic oligonucleotide
cuggaagcuccuucacaga

SEQ ID NO: 1765649 - RNA, 19 nt, Artificial Sequence
  Description of Artificial Sequence: Synthetic oligonucleotide
gguggaugcugcugccagc

SEQ ID NO: 1765650 - RNA, 19 nt, Artificial Sequence
  Description of Artificial Sequence: Synthetic oligonucleotide
ggagaaccuucaagaaccc

SEQ ID NO: 1765651 - RNA, 19 nt, Artificial Sequence
  Description of Artificial Sequence: Synthetic oligonucleotide
gggucucuugccuucagcu

SEQ ID NO: 1765652 - RNA, 19 nt, Artificial Sequence
  Description of Artificial Sequence: Synthetic oligonucleotide
gccacaucaacugaugccu

SEQ ID NO: 1765653 - RNA, 19 nt, Artificial Sequence
  Description of Artificial Sequence: Synthetic oligonucleotide
cugcggguuuucucugcac

SEQ ID NO: 1765654 - RNA, 19 nt, Artificial Sequence
  Description of Artificial Sequence: Synthetic oligonucleotide
cuaggcaugguugccgcaa

SEQ ID NO: 1765655 - RNA, 19 nt, Artificial Sequence
  Description of Artificial Sequence: Synthetic oligonucleotide
ccuucaagaacccuuugcu

SEQ ID NO: 1765656 - RNA, 19 nt, Artificial Sequence
  Description of Artificial Sequence: Synthetic oligonucleotide
gccagcgggcuacugcuag

SEQ ID NO: 1765657 - RNA, 19 nt, Artificial Sequence
  Description of Artificial Sequence: Synthetic oligonucleotide
ggaagaccuugucaucuaa

SEQ ID NO: 1765658 - RNA, 19 nt, Artificial Sequence
  Description of Artificial Sequence: Synthetic oligonucleotide
gugcuagucgggagaggcc

SEQ ID NO: 1765659 - RNA, 19 nt, Artificial Sequence
  Description of Artificial Sequence: Synthetic oligonucleotide
gagcccuaagugacaguga

SEQ ID NO: 1765660 - RNA, 19 nt, Artificial Sequence
  Description of Artificial Sequence: Synthetic oligonucleotide
gcgggcuacugcuagagcu

SEQ ID NO: 1765661 - RNA, 19 nt, Artificial Sequence
  Description of Artificial Sequence: Synthetic oligonucleotide
uauuucggguagggcgcac

SEQ ID NO: 1765662 - RNA, 19 nt, Artificial Sequence
  Description of Artificial Sequence: Synthetic oligonucleotide
cacuguccggcucgguguc

SEQ ID NO: 1765663 - RNA, 19 nt, Artificial Sequence
  Description of Artificial Sequence: Synthetic oligonucleotide
cuugugacauuugggugua

SEQ ID NO: 1765664 - RNA, 19 nt, Artificial Sequence
  Description of Artificial Sequence: Synthetic oligonucleotide
ccaacugccugggguaagg

SEQ ID NO: 1765665 - RNA, 19 nt, Artificial Sequence
  Description of Artificial Sequence: Synthetic oligonucleotide
aggccucgcuggaagaccu

SEQ ID NO: 1765666 - RNA, 19 nt, Artificial Sequence
  Description of Artificial Sequence: Synthetic oligonucleotide
cacccuccucugcggagcc

SEQ ID NO: 1765667 - RNA, 19 nt, Artificial Sequence
  Description of Artificial Sequence: Synthetic oligonucleotide
cagaguccucaaacuguga

SEQ ID NO: 1765668 - RNA, 19 nt, Artificial Sequence
  Description of Artificial Sequence: Synthetic oligonucleotide
gccgcaauaaaaucaucau

SEQ ID NO: 1765669 - RNA, 19 nt, Artificial Sequence
  Description of Artificial Sequence: Synthetic oligonucleotide
ccugcuaccgcacuuggcu

SEQ ID NO: 1765670 - RNA, 19 nt, Artificial Sequence
  Description of Artificial Sequence: Synthetic oligonucleotide
gcaugguugccgcaauaaa

SEQ ID NO: 1765671 - RNA, 19 nt, Artificial Sequence
  Description of Artificial Sequence: Synthetic oligonucleotide
caguugcacuguccggcuc

SEQ ID NO: 1765672 - RNA, 19 nt, Artificial Sequence
  Description of Artificial Sequence: Synthetic oligonucleotide
gagaaccuucaagaacccu

SEQ ID NO: 1765673 - RNA, 19 nt, Artificial Sequence
  Description of Artificial Sequence: Synthetic oligonucleotide
ggcaugguugccgcaauaa

SEQ ID NO: 1765674 - RNA, 19 nt, Artificial Sequence
  Description of Artificial Sequence: Synthetic oligonucleotide
ggagauaggaggagacuua

SEQ ID NO: 1765675 - RNA, 19 nt, Artificial Sequence
  Description of Artificial Sequence: Synthetic oligonucleotide
aggcaugguugccgcaaua

SEQ ID NO: 1765676 - RNA, 19 nt, Artificial Sequence
  Description of Artificial Sequence: Synthetic oligonucleotide
cuuauccgauauuucuguu

SEQ ID NO: 1765677 - RNA, 19 nt, Artificial Sequence
  Description of Artificial Sequence: Synthetic oligonucleotide
cugccagcgggcuacugcu

SEQ ID NO: 1765678 - RNA, 19 nt, Artificial Sequence
  Description of Artificial Sequence: Synthetic oligonucleotide
aucacacaacaggcagaga

SEQ ID NO: 1765679 - RNA, 19 nt, Artificial Sequence
  Description of Artificial Sequence: Synthetic oligonucleotide
ccgcacuuggcuacuugug

SEQ ID NO: 1765680 - RNA, 19 nt, Artificial Sequence
  Description of Artificial Sequence: Synthetic oligonucleotide
uucggguagggcgcaccau

SEQ ID NO: 1765681 - RNA, 19 nt, Artificial Sequence
  Description of Artificial Sequence: Synthetic oligonucleotide
uccuaucaccuuggcuguc

SEQ ID NO: 1765682 - RNA, 19 nt, Artificial Sequence
  Description of Artificial Sequence: Synthetic oligonucleotide
ggaggagacuuauccgaua

SEQ ID NO: 1765683 - RNA, 19 nt, Artificial Sequence
  Description of Artificial Sequence: Synthetic oligonucleotide
ggcaacuucuaggccucgc

SEQ ID NO: 1765684 - RNA, 19 nt, Artificial Sequence
  Description of Artificial Sequence: Synthetic oligonucleotide
ggcugucagugcuuuucuc

SEQ ID NO: 1765685 - RNA, 19 nt, Artificial Sequence
  Description of Artificial Sequence: Synthetic oligonucleotide
ugccagcgggcuacugcua

SEQ ID NO: 1765686 - RNA, 19 nt, Artificial Sequence
  Description of Artificial Sequence: Synthetic oligonucleotide
cugcuaccgcacuuggcua

SEQ ID NO: 1765687 - RNA, 19 nt, Artificial Sequence
  Description of Artificial Sequence: Synthetic oligonucleotide
cggguagggcgcaccaugg

SEQ ID NO: 1765688 - RNA, 19 nt, Artificial Sequence
  Description of Artificial Sequence: Synthetic oligonucleotide
cuucguuuuggagauucuu

SEQ ID NO: 1765689 - RNA, 19 nt, Artificial Sequence
  Description of Artificial Sequence: Synthetic oligonucleotide
cacugguuacacugcaguu

SEQ ID NO: 1765690 - RNA, 19 nt, Artificial Sequence
  Description of Artificial Sequence: Synthetic oligonucleotide
agucaccaccagaguccuc

SEQ ID NO: 1765691 - RNA, 19 nt, Artificial Sequence
  Description of Artificial Sequence: Synthetic oligonucleotide
ccuuuggcaugguuuugga

SEQ ID NO: 1765692 - RNA, 19 nt, Artificial Sequence
  Description of Artificial Sequence: Synthetic oligonucleotide
cccuaagugacagugacuu

SEQ ID NO: 1765693 - RNA, 19 nt, Artificial Sequence
  Description of Artificial Sequence: Synthetic oligonucleotide
uugugacauuuggguguaa

SEQ ID NO: 1765694 - RNA, 19 nt, Artificial Sequence
  Description of Artificial Sequence: Synthetic oligonucleotide
ccggcucggugucauuagc

SEQ ID NO: 1765695 - RNA, 19 nt, Artificial Sequence
  Description of Artificial Sequence: Synthetic oligonucleotide
cagcuucagauguuauuuu

SEQ ID NO: 1765696 - RNA, 19 nt, Artificial Sequence
  Description of Artificial Sequence: Synthetic oligonucleotide
ccacugcggguuuucucug

SEQ ID NO: 1765697 - RNA, 19 nt, Artificial Sequence
  Description of Artificial Sequence: Synthetic oligonucleotide
caacugccugggguaagga

SEQ ID NO: 1765698 - RNA, 19 nt, Artificial Sequence
  Description of Artificial Sequence: Synthetic oligonucleotide
ggaagcuccuucacagaua

SEQ ID NO: 1765699 - RNA, 19 nt, Artificial Sequence
  Description of Artificial Sequence: Synthetic oligonucleotide
cugguaggauuucuucguu

SEQ ID NO: 1765700 - RNA, 19 nt, Artificial Sequence
  Description of Artificial Sequence: Synthetic oligonucleotide
ugccugggguaaggauaga

SEQ ID NO: 1765701 - RNA, 19 nt, Artificial Sequence
  Description of Artificial Sequence: Synthetic oligonucleotide
ccgauauuucuguuuuccu

SEQ ID NO: 1765702 - RNA, 19 nt, Artificial Sequence
  Description of Artificial Sequence: Synthetic oligonucleotide
ccuucaggaguggcaugag

SEQ ID NO: 1765703 - RNA, 19 nt, Artificial Sequence
  Description of Artificial Sequence: Synthetic oligonucleotide
uugcacuguccggcucggu

SEQ ID NO: 1765704 - RNA, 19 nt, Artificial Sequence
  Description of Artificial Sequence: Synthetic oligonucleotide
guggcaugaggagaaccuu

SEQ ID NO: 1765705 - RNA, 19 nt, Artificial Sequence
  Description of Artificial Sequence: Synthetic oligonucleotide
gcagcuggagccacaucaa

SEQ ID NO: 1765706 - RNA, 19 nt, Artificial Sequence
  Description of Artificial Sequence: Synthetic oligonucleotide
gggcaacuucuaggccucg

SEQ ID NO: 1765707 - RNA, 19 nt, Artificial Sequence
  Description of Artificial Sequence: Synthetic oligonucleotide
cugaagggcugcacauuuu

SEQ ID NO: 1765708 - RNA, 19 nt, Artificial Sequence
  Description of Artificial Sequence: Synthetic oligonucleotide
cuuggcuacuugugacauu

SEQ ID NO: 1765709 - RNA, 19 nt, Artificial Sequence
  Description of Artificial Sequence: Synthetic oligonucleotide
ccccuucaacacugcuggc

SEQ ID NO: 1765710 - RNA, 19 nt, Artificial Sequence
  Description of Artificial Sequence: Synthetic oligonucleotide
cagaugugccagagcccua

SEQ ID NO: 1765711 - RNA, 19 nt, Artificial Sequence
  Description of Artificial Sequence: Synthetic oligonucleotide
ccucaccaguugcacuguc

SEQ ID NO: 1765712 - RNA, 19 nt, Artificial Sequence
  Description of Artificial Sequence: Synthetic oligonucleotide
ccuaagugacagugacuua

SEQ ID NO: 1765713 - RNA, 19 nt, Artificial Sequence
  Description of Artificial Sequence: Synthetic oligonucleotide
ccuucacgugacucauuaa

SEQ ID NO: 1765714 - RNA, 19 nt, Artificial Sequence
  Description of Artificial Sequence: Synthetic oligonucleotide
gcuagucgggagaggccca

SEQ ID NO: 1765715 - RNA, 19 nt, Artificial Sequence
  Description of Artificial Sequence: Synthetic oligonucleotide
ccuugucaucuaaagccau

SEQ ID NO: 1765716 - RNA, 19 nt, Artificial Sequence
  Description of Artificial Sequence: Synthetic oligonucleotide
ccucaaacugugaguaauu

SEQ ID NO: 1765717 - RNA, 19 nt, Artificial Sequence
  Description of Artificial Sequence: Synthetic oligonucleotide
cccaggcggaggcucugac

SEQ ID NO: 1765718 - RNA, 19 nt, Artificial Sequence
  Description of Artificial Sequence: Synthetic oligonucleotide
cuccaugugcaagcugaau

SEQ ID NO: 1765719 - RNA, 19 nt, Artificial Sequence
  Description of Artificial Sequence: Synthetic oligonucleotide
cggagccucagcuucagau

SEQ ID NO: 1765720 - RNA, 19 nt, Artificial Sequence
  Description of Artificial Sequence: Synthetic oligonucleotide
ggguagggcgcaccauggu

SEQ ID NO: 1765721 - RNA, 19 nt, Artificial Sequence
  Description of Artificial Sequence: Synthetic oligonucleotide
ccagcgggcuacugcuaga

SEQ ID NO: 1765722 - RNA, 19 nt, Artificial Sequence
  Description of Artificial Sequence: Synthetic oligonucleotide
ccacagguccuuuccugcu

SEQ ID NO: 1765723 - RNA, 19 nt, Artificial Sequence
  Description of Artificial Sequence: Synthetic oligonucleotide
ggcaugguuuuggacuuuu

SEQ ID NO: 1765724 - RNA, 19 nt, Artificial Sequence
  Description of Artificial Sequence: Synthetic oligonucleotide
gcccuaagugacagugacu

SEQ ID NO: 1765725 - RNA, 19 nt, Artificial Sequence
  Description of Artificial Sequence: Synthetic oligonucleotide
gcuaccgcacuuggcuacu

SEQ ID NO: 1765726 - RNA, 19 nt, Artificial Sequence
  Description of Artificial Sequence: Synthetic oligonucleotide
ccucgcuggaagaccuugu

SEQ ID NO: 1765727 - RNA, 19 nt, Artificial Sequence
  Description of Artificial Sequence: Synthetic oligonucleotide
gcggagccucagcuucaga

SEQ ID NO: 1765728 - RNA, 19 nt, Artificial Sequence
  Description of Artificial Sequence: Synthetic oligonucleotide
cuguccggcucggugucau

SEQ ID NO: 1765729 - RNA, 19 nt, Artificial Sequence
  Description of Artificial Sequence: Synthetic oligonucleotide
gcggcuggugggauccacu

SEQ ID NO: 1765730 - RNA, 19 nt, Artificial Sequence
  Description of Artificial Sequence: Synthetic oligonucleotide
cgggcuacugcuagagcuu

SEQ ID NO: 1765731 - RNA, 19 nt, Artificial Sequence
  Description of Artificial Sequence: Synthetic oligonucleotide
cuaccgcacuuggcuacuu

SEQ ID NO: 1765732 - RNA, 19 nt, Artificial Sequence
  Description of Artificial Sequence: Synthetic oligonucleotide
cggcuggugggauccacuu

SEQ ID NO: 1765733 - RNA, 19 nt, Artificial Sequence
  Description of Artificial Sequence: Synthetic oligonucleotide
ggccucgcuggaagaccuu

SEQ ID NO: 1765734 - RNA, 19 nt, Artificial Sequence
  Description of Artificial Sequence: Synthetic oligonucleotide
aauguuuaagcucagauaa

SEQ ID NO: 1765735 - RNA, 19 nt, Artificial Sequence
  Description of Artificial Sequence: Synthetic oligonucleotide
uuauaaaucuaacagacua

SEQ ID NO: 1765736 - RNA, 19 nt, Artificial Sequence
  Description of Artificial Sequence: Synthetic oligonucleotide
auugacaacgauuucggcg

SEQ ID NO: 1765737 - RNA, 19 nt, Artificial Sequence
  Description of Artificial Sequence: Synthetic oligonucleotide
ugcagguuaggaaauagcg

SEQ ID NO: 1765738 - RNA, 19 nt, Artificial Sequence
  Description of Artificial Sequence: Synthetic oligonucleotide
uugacaacgauuucggcgg

SEQ ID NO: 1765739 - RNA, 19 nt, Artificial Sequence
  Description of Artificial Sequence: Synthetic oligonucleotide
uuaacugcaacaagcaagc

SEQ ID NO: 1765740 - RNA, 19 nt, Artificial Sequence
  Description of Artificial Sequence: Synthetic oligonucleotide
aaaauguuuaagcucagau

SEQ ID NO: 1765741 - RNA, 19 nt, Artificial Sequence
  Description of Artificial Sequence: Synthetic oligonucleotide
aaaaugcccuuucagguuc

SEQ ID NO: 1765742 - RNA, 19 nt, Artificial Sequence
  Description of Artificial Sequence: Synthetic oligonucleotide
uuacauuugucuuaacugc

SEQ ID NO: 1765743 - RNA, 19 nt, Artificial Sequence
  Description of Artificial Sequence: Synthetic oligonucleotide
ugucaauuauugcuggugg

SEQ ID NO: 1765744 - RNA, 19 nt, Artificial Sequence
  Description of Artificial Sequence: Synthetic oligonucleotide
auauucugcaaguuggagg

SEQ ID NO: 1765745 - RNA, 19 nt, Artificial Sequence
  Description of Artificial Sequence: Synthetic oligonucleotide
uuaagcucagauaacuacc

SEQ ID NO: 1765746 - RNA, 19 nt, Artificial Sequence
  Description of Artificial Sequence: Synthetic oligonucleotide
caagaguuuggacagauag

SEQ ID NO: 1765747 - RNA, 19 nt, Artificial Sequence
  Description of Artificial Sequence: Synthetic oligonucleotide
gacucuucggcuucgaggg

SEQ ID NO: 1765748 - RNA, 19 nt, Artificial Sequence
  Description of Artificial Sequence: Synthetic oligonucleotide
uuuauuugcuaaacacacg

SEQ ID NO: 1765749 - RNA, 19 nt, Artificial Sequence
  Description of Artificial Sequence: Synthetic oligonucleotide
ucuaacagacuacauaggu

SEQ ID NO: 1765750 - RNA, 19 nt, Artificial Sequence
  Description of Artificial Sequence: Synthetic oligonucleotide
acugauuuugaacugauaa

SEQ ID NO: 1765751 - RNA, 19 nt, Artificial Sequence
  Description of Artificial Sequence: Synthetic oligonucleotide
uguuacauuugucuuaacu

SEQ ID NO: 1765752 - RNA, 19 nt, Artificial Sequence
  Description of Artificial Sequence: Synthetic oligonucleotide
uauauuagcaaucuuucuu

SEQ ID NO: 1765753 - RNA, 19 nt, Artificial Sequence
  Description of Artificial Sequence: Synthetic oligonucleotide
uauaccacuguacugugug

SEQ ID NO: 1765754 - RNA, 19 nt, Artificial Sequence
  Description of Artificial Sequence: Synthetic oligonucleotide
uacuuauaaaucuaacaga

SEQ ID NO: 1765755 - RNA, 19 nt, Artificial Sequence
  Description of Artificial Sequence: Synthetic oligonucleotide
uaaacacacguauuuugcg

SEQ ID NO: 1765756 - RNA, 19 nt, Artificial Sequence
  Description of Artificial Sequence: Synthetic oligonucleotide
uggaccuguacgcuaaucg

SEQ ID NO: 1765757 - RNA, 19 nt, Artificial Sequence
  Description of Artificial Sequence: Synthetic oligonucleotide
uguauugauacuugugccc

SEQ ID NO: 1765758 - RNA, 19 nt, Artificial Sequence
  Description of Artificial Sequence: Synthetic oligonucleotide
uauaaaucuaacagacuac

SEQ ID NO: 1765759 - RNA, 19 nt, Artificial Sequence
  Description of Artificial Sequence: Synthetic oligonucleotide
uuucagguagaaaaugcgc

SEQ ID NO: 1765760 - RNA, 19 nt, Artificial Sequence
  Description of Artificial Sequence: Synthetic oligonucleotide
  modified_base (12)..(12): a, c, u, g, unknown or other
ugcuguuauaunuugggug

SEQ ID NO: 1765761 - RNA, 19 nt, Artificial Sequence
  Description of Artificial Sequence: Synthetic oligonucleotide
uaaucgaagaacaaauaau

SEQ ID NO: 1765762 - RNA, 19 nt, Artificial Sequence
  Description of Artificial Sequence: Synthetic oligonucleotide
  modified_base (3)..(3): a, c, u, g, unknown or other
aunuuggguggucaucucc

SEQ ID NO: 1765763 - RNA, 19 nt, Artificial Sequence
  Description of Artificial Sequence: Synthetic oligonucleotide
  modified_base (16)..(16): a, c, u, g, unknown or other
gaauugcuguuauaunuug

SEQ ID NO: 1765764 - RNA, 19 nt, Artificial Sequence
  Description of Artificial Sequence: Synthetic oligonucleotide
uggacagauaguugggucg

SEQ ID NO: 1765765 - RNA, 19 nt, Artificial Sequence
  Description of Artificial Sequence: Synthetic oligonucleotide
uucucaucguauauuagca

SEQ ID NO: 1765766 - RNA, 19 nt, Artificial Sequence
  Description of Artificial Sequence: Synthetic oligonucleotide
uuguccguuuucuaaaucc

SEQ ID NO: 1765767 - RNA, 19 nt, Artificial Sequence
  Description of Artificial Sequence: Synthetic oligonucleotide
aucgacaguauugacaacg

SEQ ID NO: 1765768 - RNA, 19 nt, Artificial Sequence
  Description of Artificial Sequence: Synthetic oligonucleotide
uucagguagaaaaugcgcu

SEQ ID NO: 1765769 - RNA, 19 nt, Artificial Sequence
  Description of Artificial Sequence: Synthetic oligonucleotide
aucuccacucaucugauag

SEQ ID NO: 1765770 - RNA, 19 nt, Artificial Sequence
  Description of Artificial Sequence: Synthetic oligonucleotide
uaugugucccuuuugucag

SEQ ID NO: 1765771 - RNA, 19 nt, Artificial Sequence
  Description of Artificial Sequence: Synthetic oligonucleotide
aaacacacguauuuugcgu

SEQ ID NO: 1765772 - RNA, 19 nt, Artificial Sequence
  Description of Artificial Sequence: Synthetic oligonucleotide
ucgacaugggcucugacga

SEQ ID NO: 1765773 - RNA, 19 nt, Artificial Sequence
  Description of Artificial Sequence: Synthetic oligonucleotide
gaguuuacccuccacuggg

SEQ ID NO: 1765774 - RNA, 19 nt, Artificial Sequence
  Description of Artificial Sequence: Synthetic oligonucleotide
ucguauauuagcaaucuuu

SEQ ID NO: 1765775 - RNA, 19 nt, Artificial Sequence
  Description of Artificial Sequence: Synthetic oligonucleotide
cagguuaggaaauagcgac

SEQ ID NO: 1765776 - RNA, 19 nt, Artificial Sequence
  Description of Artificial Sequence: Synthetic oligonucleotide
ugaguuuacccuccacugg

SEQ ID NO: 1765777 - RNA, 19 nt, Artificial Sequence
  Description of Artificial Sequence: Synthetic oligonucleotide
auuucggcggcgcuugucc

SEQ ID NO: 1765778 - RNA, 19 nt, Artificial Sequence
  Description of Artificial Sequence: Synthetic oligonucleotide
uaaacuguccgugcgaacc

SEQ ID NO: 1765779 - RNA, 19 nt, Artificial Sequence
  Description of Artificial Sequence: Synthetic oligonucleotide
uguuuaagcucagauaacu

SEQ ID NO: 1765780 - RNA, 19 nt, Artificial Sequence
  Description of Artificial Sequence: Synthetic oligonucleotide
uaagcucagauaacuacca

SEQ ID NO: 1765781 - RNA, 19 nt, Artificial Sequence
  Description of Artificial Sequence: Synthetic oligonucleotide
  modified_base (11)..(11): a, c, u, g, unknown or other
gcuguuauaunuugggugg

SEQ ID NO: 1765782 - RNA, 19 nt, Artificial Sequence
  Description of Artificial Sequence: Synthetic oligonucleotide
ugaucagacucaccggagg

SEQ ID NO: 1765783 - RNA, 19 nt, Artificial Sequence
  Description of Artificial Sequence: Synthetic oligonucleotide
uccaauguauugauacuug

SEQ ID NO: 1765784 - RNA, 19 nt, Artificial Sequence
  Description of Artificial Sequence: Synthetic oligonucleotide
aggguaaacgaccucuccg

SEQ ID NO: 1765785 - RNA, 19 nt, Artificial Sequence
  Description of Artificial Sequence: Synthetic oligonucleotide
auaaacugauuuugaacug

SEQ ID NO: 1765786 - RNA, 19 nt, Artificial Sequence
  Description of Artificial Sequence: Synthetic oligonucleotide
  modified_base (15)..(15): a, c, u, g, unknown or other
aauugcuguuauaunuugg

SEQ ID NO: 1765787 - RNA, 19 nt, Artificial Sequence
  Description of Artificial Sequence: Synthetic oligonucleotide
gauccuguggacucuucgg

SEQ ID NO: 1765788 - RNA, 19 nt, Artificial Sequence
  Description of Artificial Sequence: Synthetic oligonucleotide
cuaacagacuacauaggug

SEQ ID NO: 1765789 - RNA, 19 nt, Artificial Sequence
  Description of Artificial Sequence: Synthetic oligonucleotide
  modified_base (2)..(2): a, c, u, g, unknown or other
unuuggguggucaucucca

SEQ ID NO: 1765790 - RNA, 19 nt, Artificial Sequence
  Description of Artificial Sequence: Synthetic oligonucleotide
uuugucuuaacugcaacaa

SEQ ID NO: 1765791 - RNA, 19 nt, Artificial Sequence
  Description of Artificial Sequence: Synthetic oligonucleotide
uaaacgaccucuccggccu

SEQ ID NO: 1765792 - RNA, 19 nt, Artificial Sequence
  Description of Artificial Sequence: Synthetic oligonucleotide
uuaggaaauagcgacaguu

SEQ ID NO: 1765793 - RNA, 19 nt, Artificial Sequence
  Description of Artificial Sequence: Synthetic oligonucleotide
guuucagguagaaaaugcg

SEQ ID NO: 1765794 - RNA, 19 nt, Artificial Sequence
  Description of Artificial Sequence: Synthetic oligonucleotide
ucaauuauugcugguggug

SEQ ID NO: 1765795 - RNA, 19 nt, Artificial Sequence
  Description of Artificial Sequence: Synthetic oligonucleotide
uggacgguguuacaaacac

SEQ ID NO: 1765796 - RNA, 19 nt, Artificial Sequence
  Description of Artificial Sequence: Synthetic oligonucleotide
aaagccacgcacgcauugc

SEQ ID NO: 1765797 - RNA, 19 nt, Artificial Sequence
  Description of Artificial Sequence: Synthetic oligonucleotide
ucggcuucgaggguaaacg

SEQ ID NO: 1765798 - RNA, 19 nt, Artificial Sequence
  Description of Artificial Sequence: Synthetic oligonucleotide
caauacuuauaaaucuaac

SEQ ID NO: 1765799 - RNA, 19 nt, Artificial Sequence
  Description of Artificial Sequence: Synthetic oligonucleotide
uguguuguccguuuucuaa

SEQ ID NO: 1765800 - RNA, 19 nt, Artificial Sequence
  Description of Artificial Sequence: Synthetic oligonucleotide
ucuccggccuuuuaaacug

SEQ ID NO: 1765801 - RNA, 19 nt, Artificial Sequence
  Description of Artificial Sequence: Synthetic oligonucleotide
  modified_base (7)..(7): a, c, u, g, unknown or other
uuauaunuuggguggucau

SEQ ID NO: 1765802 - RNA, 19 nt, Artificial Sequence
  Description of Artificial Sequence: Synthetic oligonucleotide
uaaacugauuuugaacuga

SEQ ID NO: 1765803 - RNA, 19 nt, Artificial Sequence
  Description of Artificial Sequence: Synthetic oligonucleotide
gaaagguaagguguccagg

SEQ ID NO: 1765804 - RNA, 19 nt, Artificial Sequence
  Description of Artificial Sequence: Synthetic oligonucleotide
acuaugugucccuuuuguc

SEQ ID NO: 1765805 - RNA, 19 nt, Artificial Sequence
  Description of Artificial Sequence: Synthetic oligonucleotide
caauuauugcugguggugg

SEQ ID NO: 1765806 - RNA, 19 nt, Artificial Sequence
  Description of Artificial Sequence: Synthetic oligonucleotide
agcauggccaaacauuucu

SEQ ID NO: 1765807 - RNA, 19 nt, Artificial Sequence
  Description of Artificial Sequence: Synthetic oligonucleotide
acugaucagacucaccgga

SEQ ID NO: 1765808 - RNA, 19 nt, Artificial Sequence
  Description of Artificial Sequence: Synthetic oligonucleotide
uuuauaccacuguacugug

SEQ ID NO: 1765809 - RNA, 19 nt, Artificial Sequence
  Description of Artificial Sequence: Synthetic oligonucleotide
uguccguuuucuaaaucca

SEQ ID NO: 1765810 - RNA, 19 nt, Artificial Sequence
  Description of Artificial Sequence: Synthetic oligonucleotide
ggccaaacauuucucaucg

SEQ ID NO: 1765811 - RNA, 19 nt, Artificial Sequence
  Description of Artificial Sequence: Synthetic oligonucleotide
gacuacauaggugugugug

SEQ ID NO: 1765812 - RNA, 19 nt, Artificial Sequence
  Description of Artificial Sequence: Synthetic oligonucleotide
cuaaucgaagaacaaauaa

SEQ ID NO: 1765813 - RNA, 19 nt, Artificial Sequence
  Description of Artificial Sequence: Synthetic oligonucleotide
  modified_base (5)..(5): a, c, u, g, unknown or other
auaunuuggguggucaucu

SEQ ID NO: 1765814 - RNA, 19 nt, Artificial Sequence
  Description of Artificial Sequence: Synthetic oligonucleotide
agagccagucaggagaucg

SEQ ID NO: 1765815 - RNA, 19 nt, Artificial Sequence
  Description of Artificial Sequence: Synthetic oligonucleotide
agaaagguaagguguccag

SEQ ID NO: 1765816 - RNA, 19 nt, Artificial Sequence
  Description of Artificial Sequence: Synthetic oligonucleotide
uugucaauuauugcuggug

SEQ ID NO: 1765817 - RNA, 19 nt, Artificial Sequence
  Description of Artificial Sequence: Synthetic oligonucleotide
gucgacaugggcucugacg

SEQ ID NO: 1765818 - RNA, 19 nt, Artificial Sequence
  Description of Artificial Sequence: Synthetic oligonucleotide
caccuauuauacaauugag

SEQ ID NO: 1765819 - RNA, 19 nt, Artificial Sequence
  Description of Artificial Sequence: Synthetic oligonucleotide
aacacacguauuuugcguu

SEQ ID NO: 1765820 - RNA, 19 nt, Artificial Sequence
  Description of Artificial Sequence: Synthetic oligonucleotide
uguacgcuaaucgaagaac

SEQ ID NO: 1765821 - RNA, 19 nt, Artificial Sequence
  Description of Artificial Sequence: Synthetic oligonucleotide
gaaaaugcgcuggagcccc

SEQ ID NO: 1765822 - RNA, 19 nt, Artificial Sequence
  Description of Artificial Sequence: Synthetic oligonucleotide
ugccccggagccaaaaugc

SEQ ID NO: 1765823 - RNA, 19 nt, Artificial Sequence
  Description of Artificial Sequence: Synthetic oligonucleotide
ucacauggucuuuaagaca

SEQ ID NO: 1765824 - RNA, 19 nt, Artificial Sequence
  Description of Artificial Sequence: Synthetic oligonucleotide
uuuacccuccacuggguug

SEQ ID NO: 1765825 - RNA, 19 nt, Artificial Sequence
  Description of Artificial Sequence: Synthetic oligonucleotide
  modified_base (13)..(13): a, c, u, g, unknown or other
uugcuguuauaunuugggu

SEQ ID NO: 1765826 - RNA, 19 nt, Artificial Sequence
  Description of Artificial Sequence: Synthetic oligonucleotide
agauaguugggucgguuca

SEQ ID NO: 1765827 - RNA, 19 nt, Artificial Sequence
  Description of Artificial Sequence: Synthetic oligonucleotide
cuggaauaguccaggcugg

SEQ ID NO: 1765828 - RNA, 19 nt, Artificial Sequence
  Description of Artificial Sequence: Synthetic oligonucleotide
agccaaaaugcccuuucag

SEQ ID NO: 1765829 - RNA, 19 nt, Artificial Sequence
  Description of Artificial Sequence: Synthetic oligonucleotide
gucuuuaagacaauuuaca

SEQ ID NO: 1765830 - RNA, 19 nt, Artificial Sequence
  Description of Artificial Sequence: Synthetic oligonucleotide
uugucaggauuuuccaaug

SEQ ID NO: 1765831 - RNA, 19 nt, Artificial Sequence
  Description of Artificial Sequence: Synthetic oligonucleotide
gaugaguuuacccuccacu

SEQ ID NO: 1765832 - RNA, 19 nt, Artificial Sequence
  Description of Artificial Sequence: Synthetic oligonucleotide
ucgacaguauugacaacga

SEQ ID NO: 1765833 - RNA, 19 nt, Artificial Sequence
  Description of Artificial Sequence: Synthetic oligonucleotide
caggagaucguagaauugc

SEQ ID NO: 1765834 - RNA, 19 nt, Artificial Sequence
  Description of Artificial Sequence: Synthetic oligonucleotide
cuaaauccaggaugccccg

SEQ ID NO: 1765835 - RNA, 19 nt, Artificial Sequence
  Description of Artificial Sequence: Synthetic oligonucleotide
cucagauaacuaccaauac

SEQ ID NO: 1765836 - RNA, 19 nt, Artificial Sequence
  Description of Artificial Sequence: Synthetic oligonucleotide
gauaacuaccaauacuuau

SEQ ID NO: 1765837 - RNA, 19 nt, Artificial Sequence
  Description of Artificial Sequence: Synthetic oligonucleotide
acaacgauuucggcggcgc

SEQ ID NO: 1765838 - RNA, 19 nt, Artificial Sequence
  Description of Artificial Sequence: Synthetic oligonucleotide
uguacuguguguuguccgu

SEQ ID NO: 1765839 - RNA, 19 nt, Artificial Sequence
  Description of Artificial Sequence: Synthetic oligonucleotide
uauugacaacgauuucggc

SEQ ID NO: 1765840 - RNA, 19 nt, Artificial Sequence
  Description of Artificial Sequence: Synthetic oligonucleotide
aaacuguccgugcgaacca

SEQ ID NO: 1765841 - RNA, 19 nt, Artificial Sequence
  Description of Artificial Sequence: Synthetic oligonucleotide
ugucgauguucauauucug

SEQ ID NO: 1765842 - RNA, 19 nt, Artificial Sequence
  Description of Artificial Sequence: Synthetic oligonucleotide
uuugucaauuauugcuggu

SEQ ID NO: 1765843 - RNA, 19 nt, Artificial Sequence
  Description of Artificial Sequence: Synthetic oligonucleotide
ugcaaguuggaggagaauu

SEQ ID NO: 1765844 - RNA, 19 nt, Artificial Sequence
  Description of Artificial Sequence: Synthetic oligonucleotide
ugguacuaagucuuccagu

SEQ ID NO: 1765845 - RNA, 19 nt, Artificial Sequence
  Description of Artificial Sequence: Synthetic oligonucleotide
guuuauaccacuguacugu

SEQ ID NO: 1765846 - RNA, 19 nt, Artificial Sequence
  Description of Artificial Sequence: Synthetic oligonucleotide
auaacuaccaauacuuaua

SEQ ID NO: 1765847 - RNA, 19 nt, Artificial Sequence
  Description of Artificial Sequence: Synthetic oligonucleotide
agcucagauaacuaccaau

SEQ ID NO: 1765848 - RNA, 19 nt, Artificial Sequence
  Description of Artificial Sequence: Synthetic oligonucleotide
gagaucguagaauugcugu

SEQ ID NO: 1765849 - RNA, 19 nt, Artificial Sequence
  Description of Artificial Sequence: Synthetic oligonucleotide
accuauuauacaauugaga

SEQ ID NO: 1765850 - RNA, 19 nt, Artificial Sequence
  Description of Artificial Sequence: Synthetic oligonucleotide
uuggacgguguuacaaaca

SEQ ID NO: 1765851 - RNA, 19 nt, Artificial Sequence
  Description of Artificial Sequence: Synthetic oligonucleotide
uucugaaaucgacaguauu

SEQ ID NO: 1765852 - RNA, 19 nt, Artificial Sequence
  Description of Artificial Sequence: Synthetic oligonucleotide
gacgguguuacaaacacua

SEQ ID NO: 1765853 - RNA, 19 nt, Artificial Sequence
  Description of Artificial Sequence: Synthetic oligonucleotide
caauggaaucaauccauuc

SEQ ID NO: 1765854 - RNA, 19 nt, Artificial Sequence
  Description of Artificial Sequence: Synthetic oligonucleotide
ucgaggguaaacgaccucu

SEQ ID NO: 1765855 - RNA, 19 nt, Artificial Sequence
  Description of Artificial Sequence: Synthetic oligonucleotide
guaaacgaccucuccggcc

SEQ ID NO: 1765856 - RNA, 19 nt, Artificial Sequence
  Description of Artificial Sequence: Synthetic oligonucleotide
  modified_base (6)..(6): a, c, u, g, unknown or other
uauaunuuggguggucauc

SEQ ID NO: 1765857 - RNA, 19 nt, Artificial Sequence
  Description of Artificial Sequence: Synthetic oligonucleotide
auacaauugagaaaauguu

SEQ ID NO: 1765858 - RNA, 19 nt, Artificial Sequence
  Description of Artificial Sequence: Synthetic oligonucleotide
auaggugugugugugugug

SEQ ID NO: 1765859 - RNA, 19 nt, Artificial Sequence
  Description of Artificial Sequence: Synthetic oligonucleotide
agggcagcgaugcaggaga

SEQ ID NO: 1765860 - RNA, 19 nt, Artificial Sequence
  Description of Artificial Sequence: Synthetic oligonucleotide
uugugcccaccuauuauac

SEQ ID NO: 1765861 - RNA, 19 nt, Artificial Sequence
  Description of Artificial Sequence: Synthetic oligonucleotide
gcaaucuuucuucugaaca

SEQ ID NO: 1765862 - RNA, 19 nt, Artificial Sequence
  Description of Artificial Sequence: Synthetic oligonucleotide
uguuggacgguguuacaaa

SEQ ID NO: 1765863 - RNA, 19 nt, Artificial Sequence
  Description of Artificial Sequence: Synthetic oligonucleotide
uacgcuaaucgaagaacaa

SEQ ID NO: 1765864 - RNA, 19 nt, Artificial Sequence
  Description of Artificial Sequence: Synthetic oligonucleotide
gguuaggaaauagcgacag

SEQ ID NO: 1765865 - RNA, 19 nt, Artificial Sequence
  Description of Artificial Sequence: Synthetic oligonucleotide
ucucaucguauauuagcaa

SEQ ID NO: 1765866 - RNA, 19 nt, Artificial Sequence
  Description of Artificial Sequence: Synthetic oligonucleotide
guuggacgguguuacaaac

SEQ ID NO: 1765867 - RNA, 19 nt, Artificial Sequence
  Description of Artificial Sequence: Synthetic oligonucleotide
uugccuggaaccuggaaua

SEQ ID NO: 1765868 - RNA, 19 nt, Artificial Sequence
  Description of Artificial Sequence: Synthetic oligonucleotide
cauuucucaucguauauua

SEQ ID NO: 1765869 - RNA, 19 nt, Artificial Sequence
  Description of Artificial Sequence: Synthetic oligonucleotide
gacucaccggaggugaggg

SEQ ID NO: 1765870 - RNA, 19 nt, Artificial Sequence
  Description of Artificial Sequence: Synthetic oligonucleotide
aagaugaguuuacccucca

SEQ ID NO: 1765871 - RNA, 19 nt, Artificial Sequence
  Description of Artificial Sequence: Synthetic oligonucleotide
ucauagccggauuggaguc

SEQ ID NO: 1765872 - RNA, 19 nt, Artificial Sequence
  Description of Artificial Sequence: Synthetic oligonucleotide
  modified_base (8)..(8): a, c, u, g, unknown or other
guuauaunuugggugguca

SEQ ID NO: 1765873 - RNA, 19 nt, Artificial Sequence
  Description of Artificial Sequence: Synthetic oligonucleotide
cugcaacaagcaagcaugg

SEQ ID NO: 1765874 - RNA, 19 nt, Artificial Sequence
  Description of Artificial Sequence: Synthetic oligonucleotide
cacugaucagacucaccgg

SEQ ID NO: 1765875 - RNA, 19 nt, Artificial Sequence
  Description of Artificial Sequence: Synthetic oligonucleotide
uugauacuugugcccaccu

SEQ ID NO: 1765876 - RNA, 19 nt, Artificial Sequence
  Description of Artificial Sequence: Synthetic oligonucleotide
uguguguguuacauuuguc

SEQ ID NO: 1765877 - RNA, 19 nt, Artificial Sequence
  Description of Artificial Sequence: Synthetic oligonucleotide
guauugauacuugugccca

SEQ ID NO: 1765878 - RNA, 19 nt, Artificial Sequence
  Description of Artificial Sequence: Synthetic oligonucleotide
  modified_base (9)..(9): a, c, u, g, unknown or other
uguuauaunuugggugguc

SEQ ID NO: 1765879 - RNA, 19 nt, Artificial Sequence
  Description of Artificial Sequence: Synthetic oligonucleotide
aucuaacagacuacauagg

SEQ ID NO: 1765880 - RNA, 19 nt, Artificial Sequence
  Description of Artificial Sequence: Synthetic oligonucleotide
auguuuaagcucagauaac

SEQ ID NO: 1765881 - RNA, 19 nt, Artificial Sequence
  Description of Artificial Sequence: Synthetic oligonucleotide
cuacauaggugugugugug

SEQ ID NO: 1765882 - RNA, 19 nt, Artificial Sequence
  Description of Artificial Sequence: Synthetic oligonucleotide
caagcaagcauggccaaac

SEQ ID NO: 1765883 - RNA, 19 nt, Artificial Sequence
  Description of Artificial Sequence: Synthetic oligonucleotide
ggucuuuaagacaauuuac

SEQ ID NO: 1765884 - RNA, 19 nt, Artificial Sequence
  Description of Artificial Sequence: Synthetic oligonucleotide
cugaucagacucaccggag

SEQ ID NO: 1765885 - RNA, 19 nt, Artificial Sequence
  Description of Artificial Sequence: Synthetic oligonucleotide
acauaggugugugugugug

SEQ ID NO: 1765886 - RNA, 19 nt, Artificial Sequence
  Description of Artificial Sequence: Synthetic oligonucleotide
aagccacgcacgcauugca

SEQ ID NO: 1765887 - RNA, 19 nt, Artificial Sequence
  Description of Artificial Sequence: Synthetic oligonucleotide
cagauaguugggucgguuc

SEQ ID NO: 1765888 - RNA, 19 nt, Artificial Sequence
  Description of Artificial Sequence: Synthetic oligonucleotide
uguuguccguuuucuaaau

SEQ ID NO: 1765889 - RNA, 19 nt, Artificial Sequence
  Description of Artificial Sequence: Synthetic oligonucleotide
uauugauacuugugcccac

SEQ ID NO: 1765890 - RNA, 19 nt, Artificial Sequence
  Description of Artificial Sequence: Synthetic oligonucleotide
uugggucgguucaaacccc

SEQ ID NO: 1765891 - RNA, 19 nt, Artificial Sequence
  Description of Artificial Sequence: Synthetic oligonucleotide
  modified_base (4)..(4): a, c, u, g, unknown or other
uaunuuggguggucaucuc

SEQ ID NO: 1765892 - RNA, 19 nt, Artificial Sequence
  Description of Artificial Sequence: Synthetic oligonucleotide
cacgcauugcaaccugugc

SEQ ID NO: 1765893 - RNA, 19 nt, Artificial Sequence
  Description of Artificial Sequence: Synthetic oligonucleotide
uugcaaccugugcaagacc

SEQ ID NO: 1765894 - RNA, 19 nt, Artificial Sequence
  Description of Artificial Sequence: Synthetic oligonucleotide
uaaauccaggaugccccgg

SEQ ID NO: 1765895 - RNA, 19 nt, Artificial Sequence
  Description of Artificial Sequence: Synthetic oligonucleotide
uuucuaaauccaggaugcc

SEQ ID NO: 1765896 - RNA, 19 nt, Artificial Sequence
  Description of Artificial Sequence: Synthetic oligonucleotide
uuaaacuguccgugcgaac

SEQ ID NO: 1765897 - RNA, 19 nt, Artificial Sequence
  Description of Artificial Sequence: Synthetic oligonucleotide
agaucguagaauugcuguu

SEQ ID NO: 1765898 - RNA, 19 nt, Artificial Sequence
  Description of Artificial Sequence: Synthetic oligonucleotide
cauggccaaacauuucuca

SEQ ID NO: 1765899 - RNA, 19 nt, Artificial Sequence
  Description of Artificial Sequence: Synthetic oligonucleotide
aagcucagauaacuaccaa

SEQ ID NO: 1765900 - RNA, 19 nt, Artificial Sequence
  Description of Artificial Sequence: Synthetic oligonucleotide
guacgcuaaucgaagaaca

SEQ ID NO: 1765901 - RNA, 19 nt, Artificial Sequence
  Description of Artificial Sequence: Synthetic oligonucleotide
ugugcccaccuauuauaca

SEQ ID NO: 1765902 - RNA, 19 nt, Artificial Sequence
  Description of Artificial Sequence: Synthetic oligonucleotide
cagacuacauaggugugug

SEQ ID NO: 1765903 - RNA, 19 nt, Artificial Sequence
  Description of Artificial Sequence: Synthetic oligonucleotide
  modified_base (19)..(19): a, c, u, g, unknown or other
guagaauugcuguuauaun

SEQ ID NO: 1765904 - RNA, 19 nt, Artificial Sequence
  Description of Artificial Sequence: Synthetic oligonucleotide
aaacacuaugugucccuuu

SEQ ID NO: 1765905 - RNA, 19 nt, Artificial Sequence
  Description of Artificial Sequence: Synthetic oligonucleotide
gugcccaccuauuauacaa

SEQ ID NO: 1765906 - RNA, 19 nt, Artificial Sequence
  Description of Artificial Sequence: Synthetic oligonucleotide
gguguuacaaacacuaugu

SEQ ID NO: 1765907 - RNA, 19 nt, Artificial Sequence
  Description of Artificial Sequence: Synthetic oligonucleotide
cucugugaccauagccagg

SEQ ID NO: 1765908 - RNA, 19 nt, Artificial Sequence
  Description of Artificial Sequence: Synthetic oligonucleotide
uacuugugcccaccuauua

SEQ ID NO: 1765909 - RNA, 19 nt, Artificial Sequence
  Description of Artificial Sequence: Synthetic oligonucleotide
augccccggagccaaaaug

SEQ ID NO: 1765910 - RNA, 19 nt, Artificial Sequence
  Description of Artificial Sequence: Synthetic oligonucleotide
uacauaggugugugugugu

SEQ ID NO: 1765911 - RNA, 19 nt, Artificial Sequence
  Description of Artificial Sequence: Synthetic oligonucleotide
acagacuacauaggugugu

SEQ ID NO: 1765912 - RNA, 19 nt, Artificial Sequence
  Description of Artificial Sequence: Synthetic oligonucleotide
  modified_base (17)..(17): a, c, u, g, unknown or other
agaauugcuguuauaunuu

SEQ ID NO: 1765913 - RNA, 19 nt, Artificial Sequence
  Description of Artificial Sequence: Synthetic oligonucleotide
agguagaaaaugcgcugga

SEQ ID NO: 1765914 - RNA, 19 nt, Artificial Sequence
  Description of Artificial Sequence: Synthetic oligonucleotide
ugcgaaccacuucuuuaac

SEQ ID NO: 1765915 - RNA, 19 nt, Artificial Sequence
  Description of Artificial Sequence: Synthetic oligonucleotide
gacaguauugacaacgauu

SEQ ID NO: 1765916 - RNA, 19 nt, Artificial Sequence
  Description of Artificial Sequence: Synthetic oligonucleotide
gucauagccggauuggagu

SEQ ID NO: 1765917 - RNA, 19 nt, Artificial Sequence
  Description of Artificial Sequence: Synthetic oligonucleotide
ugauacuugugcccaccua

SEQ ID NO: 1765918 - RNA, 19 nt, Artificial Sequence
  Description of Artificial Sequence: Synthetic oligonucleotide
ugugugugugugugugugu

SEQ ID NO: 1765919 - RNA, 19 nt, Artificial Sequence
  Description of Artificial Sequence: Synthetic oligonucleotide
caaacauuucucaucguau

SEQ ID NO: 1765920 - RNA, 19 nt, Artificial Sequence
  Description of Artificial Sequence: Synthetic oligonucleotide
cuccacucaucugauaguc

SEQ ID NO: 1765921 - RNA, 19 nt, Artificial Sequence
  Description of Artificial Sequence: Synthetic oligonucleotide
gaucguagaauugcuguua

SEQ ID NO: 1765922 - RNA, 19 nt, Artificial Sequence
  Description of Artificial Sequence: Synthetic oligonucleotide
uggugguacuaagucuucc

SEQ ID NO: 1765923 - RNA, 19 nt, Artificial Sequence
  Description of Artificial Sequence: Synthetic oligonucleotide
acgagggcacugaucagac

SEQ ID NO: 1765924 - RNA, 19 nt, Artificial Sequence
  Description of Artificial Sequence: Synthetic oligonucleotide
gacgagggcacugaucaga

SEQ ID NO: 1765925 - RNA, 19 nt, Artificial Sequence
  Description of Artificial Sequence: Synthetic oligonucleotide
aggugugugugugugugug

SEQ ID NO: 1765926 - RNA, 19 nt, Artificial Sequence
  Description of Artificial Sequence: Synthetic oligonucleotide
gacaacgauuucggcggcg

SEQ ID NO: 1765927 - RNA, 19 nt, Artificial Sequence
  Description of Artificial Sequence: Synthetic oligonucleotide
cauagccggauuggagucg

SEQ ID NO: 1765928 - RNA, 19 nt, Artificial Sequence
  Description of Artificial Sequence: Synthetic oligonucleotide
ugacaacgauuucggcggc

SEQ ID NO: 1765929 - RNA, 19 nt, Artificial Sequence
  Description of Artificial Sequence: Synthetic oligonucleotide
ucugaacaauaaacugauu

SEQ ID NO: 1765930 - RNA, 19 nt, Artificial Sequence
  Description of Artificial Sequence: Synthetic oligonucleotide
uguguguguguguguuaca

SEQ ID NO: 1765931 - RNA, 19 nt, Artificial Sequence
  Description of Artificial Sequence: Synthetic oligonucleotide
agucgacaugggcucugac

SEQ ID NO: 1765932 - RNA, 19 nt, Artificial Sequence
  Description of Artificial Sequence: Synthetic oligonucleotide
auaccacuguacugugugu

SEQ ID NO: 1765933 - RNA, 19 nt, Artificial Sequence
  Description of Artificial Sequence: Synthetic oligonucleotide
guguguguguguguguuac

SEQ ID NO: 1765934 - RNA, 19 nt, Artificial Sequence
  Description of Artificial Sequence: Synthetic oligonucleotide
ggacagauaguugggucgg

SEQ ID NO: 1765935 - RNA, 19 nt, Artificial Sequence
  Description of Artificial Sequence: Synthetic oligonucleotide
gugugugugugugugugug

SEQ ID NO: 1765936 - RNA, 19 nt, Artificial Sequence
  Description of Artificial Sequence: Synthetic oligonucleotide
gugcgaaccacuucuuuaa

SEQ ID NO: 1765937 - RNA, 19 nt, Artificial Sequence
  Description of Artificial Sequence: Synthetic oligonucleotide
gcuucgaggguaaacgacc

SEQ ID NO: 1765938 - RNA, 19 nt, Artificial Sequence
  Description of Artificial Sequence: Synthetic oligonucleotide
guguguguguguuacauuu

SEQ ID NO: 1765939 - RNA, 19 nt, Artificial Sequence
  Description of Artificial Sequence: Synthetic oligonucleotide
gcgaaccacuucuuuaacc

SEQ ID NO: 1765940 - RNA, 19 nt, Artificial Sequence
  Description of Artificial Sequence: Synthetic oligonucleotide
agucaggagaucguagaau

SEQ ID NO: 1765941 - RNA, 19 nt, Artificial Sequence
  Description of Artificial Sequence: Synthetic oligonucleotide
guuguccguuuucuaaauc

SEQ ID NO: 1765942 - RNA, 19 nt, Artificial Sequence
  Description of Artificial Sequence: Synthetic oligonucleotide
cucaucguauauuagcaau

SEQ ID NO: 1765943 - RNA, 19 nt, Artificial Sequence
  Description of Artificial Sequence: Synthetic oligonucleotide
uguguguguguguuacauu

SEQ ID NO: 1765944 - RNA, 19 nt, Artificial Sequence
  Description of Artificial Sequence: Synthetic oligonucleotide
gaucagacucaccggaggu

SEQ ID NO: 1765945 - RNA, 19 nt, Artificial Sequence
  Description of Artificial Sequence: Synthetic oligonucleotide
cauugcaaccugugcaaga

SEQ ID NO: 1765946 - RNA, 19 nt, Artificial Sequence
  Description of Artificial Sequence: Synthetic oligonucleotide
aucguauauuagcaaucuu

SEQ ID NO: 1765947 - RNA, 19 nt, Artificial Sequence
  Description of Artificial Sequence: Synthetic oligonucleotide
aacgauuucggcggcgcuu

SEQ ID NO: 1765948 - RNA, 19 nt, Artificial Sequence
  Description of Artificial Sequence: Synthetic oligonucleotide
gguaaacgaccucuccggc

SEQ ID NO: 1765949 - RNA, 19 nt, Artificial Sequence
  Description of Artificial Sequence: Synthetic oligonucleotide
augcgcuggagccccugcg

SEQ ID NO: 1765950 - RNA, 19 nt, Artificial Sequence
  Description of Artificial Sequence: Synthetic oligonucleotide
cugauuuugaacugauaau

SEQ ID NO: 1765951 - RNA, 19 nt, Artificial Sequence
  Description of Artificial Sequence: Synthetic oligonucleotide
acgcuaaucgaagaacaaa

SEQ ID NO: 1765952 - RNA, 19 nt, Artificial Sequence
  Description of Artificial Sequence: Synthetic oligonucleotide
agacucaccggaggugagg

SEQ ID NO: 1765953 - RNA, 19 nt, Artificial Sequence
  Description of Artificial Sequence: Synthetic oligonucleotide
ugcgcuggagccccugcgu

SEQ ID NO: 1765954 - RNA, 19 nt, Artificial Sequence
  Description of Artificial Sequence: Synthetic oligonucleotide
uggucauagccggauugga

SEQ ID NO: 1765955 - RNA, 19 nt, Artificial Sequence
  Description of Artificial Sequence: Synthetic oligonucleotide
ugcccaccuauuauacaau

SEQ ID NO: 1765956 - RNA, 19 nt, Artificial Sequence
  Description of Artificial Sequence: Synthetic oligonucleotide
uguccgugcgaaccacuuc

SEQ ID NO: 1765957 - RNA, 19 nt, Artificial Sequence
  Description of Artificial Sequence: Synthetic oligonucleotide
gucaggagaucguagaauu

SEQ ID NO: 1765958 - RNA, 19 nt, Artificial Sequence
  Description of Artificial Sequence: Synthetic oligonucleotide
uucggcuucgaggguaaac

SEQ ID NO: 1765959 - RNA, 19 nt, Artificial Sequence
  Description of Artificial Sequence: Synthetic oligonucleotide
aggagaucguagaauugcu

SEQ ID NO: 1765960 - RNA, 19 nt, Artificial Sequence
  Description of Artificial Sequence: Synthetic oligonucleotide
ugccuggaaccuggaauag

SEQ ID NO: 1765961 - RNA, 19 nt, Artificial Sequence
  Description of Artificial Sequence: Synthetic oligonucleotide
agacuacauaggugugugu

SEQ ID NO: 1765962 - RNA, 19 nt, Artificial Sequence
  Description of Artificial Sequence: Synthetic oligonucleotide
gaccuguacgcuaaucgaa

SEQ ID NO: 1765963 - RNA, 19 nt, Artificial Sequence
  Description of Artificial Sequence: Synthetic oligonucleotide
cggccuuuuaaacuguccg

SEQ ID NO: 1765964 - RNA, 19 nt, Artificial Sequence
  Description of Artificial Sequence: Synthetic oligonucleotide
uaccacuguacuguguguu

SEQ ID NO: 1765965 - RNA, 19 nt, Artificial Sequence
  Description of Artificial Sequence: Synthetic oligonucleotide
acucaccggaggugagggg

SEQ ID NO: 1765966 - RNA, 19 nt, Artificial Sequence
  Description of Artificial Sequence: Synthetic oligonucleotide
acacacguauuuugcguuu

SEQ ID NO: 1765967 - RNA, 19 nt, Artificial Sequence
  Description of Artificial Sequence: Synthetic oligonucleotide
accucuccggccuuuuaaa

SEQ ID NO: 1765968 - RNA, 19 nt, Artificial Sequence
  Description of Artificial Sequence: Synthetic oligonucleotide
ggaccuguacgcuaaucga

SEQ ID NO: 1765969 - RNA, 19 nt, Artificial Sequence
  Description of Artificial Sequence: Synthetic oligonucleotide
uguguguguguguguguua

SEQ ID NO: 1765970 - RNA, 19 nt, Artificial Sequence
  Description of Artificial Sequence: Synthetic oligonucleotide
agguucugccugcagguua

SEQ ID NO: 1765971 - RNA, 19 nt, Artificial Sequence
  Description of Artificial Sequence: Synthetic oligonucleotide
cggauuggagucgacaugg

SEQ ID NO: 1765972 - RNA, 19 nt, Artificial Sequence
  Description of Artificial Sequence: Synthetic oligonucleotide
ggucauagccggauuggag

SEQ ID NO: 1765973 - RNA, 19 nt, Artificial Sequence
  Description of Artificial Sequence: Synthetic oligonucleotide
agguuaggaaauagcgaca

SEQ ID NO: 1765974 - RNA, 19 nt, Artificial Sequence
  Description of Artificial Sequence: Synthetic oligonucleotide
agauaacuaccaauacuua

SEQ ID NO: 1765975 - RNA, 19 nt, Artificial Sequence
  Description of Artificial Sequence: Synthetic oligonucleotide
aacugauuuugaacugaua

SEQ ID NO: 1765976 - RNA, 19 nt, Artificial Sequence
  Description of Artificial Sequence: Synthetic oligonucleotide
uaggugugugugugugugu

SEQ ID NO: 1765977 - RNA, 19 nt, Artificial Sequence
  Description of Artificial Sequence: Synthetic oligonucleotide
ugccugcagguuaggaaau

SEQ ID NO: 1765978 - RNA, 19 nt, Artificial Sequence
  Description of Artificial Sequence: Synthetic oligonucleotide
gggugcggaguucugggag

SEQ ID NO: 1765979 - RNA, 19 nt, Artificial Sequence
  Description of Artificial Sequence: Synthetic oligonucleotide
aaaugcgcuggagccccug

SEQ ID NO: 1765980 - RNA, 19 nt, Artificial Sequence
  Description of Artificial Sequence: Synthetic oligonucleotide
uggguuggaccuguacgcu

SEQ ID NO: 1765981 - RNA, 19 nt, Artificial Sequence
  Description of Artificial Sequence: Synthetic oligonucleotide
ggagaucguagaauugcug

SEQ ID NO: 1765982 - RNA, 19 nt, Artificial Sequence
  Description of Artificial Sequence: Synthetic oligonucleotide
cuguacgcuaaucgaagaa

SEQ ID NO: 1765983 - RNA, 19 nt, Artificial Sequence
  Description of Artificial Sequence: Synthetic oligonucleotide
ggugcggaguucugggagc

SEQ ID NO: 1765984 - RNA, 19 nt, Artificial Sequence
  Description of Artificial Sequence: Synthetic oligonucleotide
gguucugccugcagguuag

SEQ ID NO: 1765985 - RNA, 19 nt, Artificial Sequence
  Description of Artificial Sequence: Synthetic oligonucleotide
gcucagauaacuaccaaua

SEQ ID NO: 1765986 - RNA, 19 nt, Artificial Sequence
  Description of Artificial Sequence: Synthetic oligonucleotide
cccaccuauuauacaauug

SEQ ID NO: 1765987 - RNA, 19 nt, Artificial Sequence
  Description of Artificial Sequence: Synthetic oligonucleotide
guccgugcgaaccacuucu

SEQ ID NO: 1765988 - RNA, 19 nt, Artificial Sequence
  Description of Artificial Sequence: Synthetic oligonucleotide
auagccggauuggagucga

SEQ ID NO: 1765989 - RNA, 19 nt, Artificial Sequence
  Description of Artificial Sequence: Synthetic oligonucleotide
uucugccugcagguuagga

SEQ ID NO: 1765990 - RNA, 19 nt, Artificial Sequence
  Description of Artificial Sequence: Synthetic oligonucleotide
caucguauauuagcaaucu

SEQ ID NO: 1765991 - RNA, 19 nt, Artificial Sequence
  Description of Artificial Sequence: Synthetic oligonucleotide
aauucuccauagagccagu

SEQ ID NO: 1765992 - RNA, 19 nt, Artificial Sequence
  Description of Artificial Sequence: Synthetic oligonucleotide
cacuggguuggaccuguac

SEQ ID NO: 1765993 - RNA, 19 nt, Artificial Sequence
  Description of Artificial Sequence: Synthetic oligonucleotide
gcaaguuggaggagaauuc

SEQ ID NO: 1765994 - RNA, 19 nt, Artificial Sequence
  Description of Artificial Sequence: Synthetic oligonucleotide
ccaaaaugcccuuucaggu

SEQ ID NO: 1765995 - RNA, 19 nt, Artificial Sequence
  Description of Artificial Sequence: Synthetic oligonucleotide
cgguguuacaaacacuaug

SEQ ID NO: 1765996 - RNA, 19 nt, Artificial Sequence
  Description of Artificial Sequence: Synthetic oligonucleotide
ugcgugcaaagggugcgga

SEQ ID NO: 1765997 - RNA, 19 nt, Artificial Sequence
  Description of Artificial Sequence: Synthetic oligonucleotide
acgcacgcauugcaaccug

SEQ ID NO: 1765998 - RNA, 19 nt, Artificial Sequence
  Description of Artificial Sequence: Synthetic oligonucleotide
auaguugggucgguucaaa

SEQ ID NO: 1765999 - RNA, 19 nt, Artificial Sequence
  Description of Artificial Sequence: Synthetic oligonucleotide
uuggaccuguacgcuaauc

SEQ ID NO: 1766000 - RNA, 19 nt, Artificial Sequence
  Description of Artificial Sequence: Synthetic oligonucleotide
cucuccggccuuuuaaacu

SEQ ID NO: 1766001 - RNA, 19 nt, Artificial Sequence
  Description of Artificial Sequence: Synthetic oligonucleotide
agggugcggaguucuggga

SEQ ID NO: 1766002 - RNA, 19 nt, Artificial Sequence
  Description of Artificial Sequence: Synthetic oligonucleotide
ccaaacauuucucaucgua

SEQ ID NO: 1766003 - RNA, 19 nt, Artificial Sequence
  Description of Artificial Sequence: Synthetic oligonucleotide
ccacgcacgcauugcaacc

SEQ ID NO: 1766004 - RNA, 19 nt, Artificial Sequence
  Description of Artificial Sequence: Synthetic oligonucleotide
agccggauuggagucgaca

SEQ ID NO: 1766005 - RNA, 19 nt, Artificial Sequence
  Description of Artificial Sequence: Synthetic oligonucleotide
acagauaguugggucgguu

SEQ ID NO: 1766006 - RNA, 19 nt, Artificial Sequence
  Description of Artificial Sequence: Synthetic oligonucleotide
gauuucggcggcgcuuguc

SEQ ID NO: 1766007 - RNA, 19 nt, Artificial Sequence
  Description of Artificial Sequence: Synthetic oligonucleotide
agggcacugaucagacuca

SEQ ID NO: 1766008 - RNA, 19 nt, Artificial Sequence
  Description of Artificial Sequence: Synthetic oligonucleotide
cugcgugcaaagggugcgg

SEQ ID NO: 1766009 - RNA, 19 nt, Artificial Sequence
  Description of Artificial Sequence: Synthetic oligonucleotide
cagucaggagaucguagaa

SEQ ID NO: 1766010 - RNA, 19 nt, Artificial Sequence
  Description of Artificial Sequence: Synthetic oligonucleotide
ugcaaagggugcggaguuc

SEQ ID NO: 1766011 - RNA, 19 nt, Artificial Sequence
  Description of Artificial Sequence: Synthetic oligonucleotide
guuaggaaauagcgacagu

SEQ ID NO: 1766012 - RNA, 19 nt, Artificial Sequence
  Description of Artificial Sequence: Synthetic oligonucleotide
ggcuucgaggguaaacgac

SEQ ID NO: 1766013 - RNA, 19 nt, Artificial Sequence
  Description of Artificial Sequence: Synthetic oligonucleotide
ggagagggauccuguggac

SEQ ID NO: 1766014 - RNA, 19 nt, Artificial Sequence
  Description of Artificial Sequence: Synthetic oligonucleotide
uccgugcgaaccacuucuu

SEQ ID NO: 1766015 - RNA, 19 nt, Artificial Sequence
  Description of Artificial Sequence: Synthetic oligonucleotide
aaacgaccucuccggccuu

SEQ ID NO: 1766016 - RNA, 19 nt, Artificial Sequence
  Description of Artificial Sequence: Synthetic oligonucleotide
gcuaaucgaagaacaaaua

SEQ ID NO: 1766017 - RNA, 19 nt, Artificial Sequence
  Description of Artificial Sequence: Synthetic oligonucleotide
acucuucggcuucgagggu

SEQ ID NO: 1766018 - RNA, 19 nt, Artificial Sequence
  Description of Artificial Sequence: Synthetic oligonucleotide
augucucucugugaccaua

SEQ ID NO: 1766019 - RNA, 19 nt, Artificial Sequence
  Description of Artificial Sequence: Synthetic oligonucleotide
agguguccaggaaaaguuu

SEQ ID NO: 1766020 - RNA, 19 nt, Artificial Sequence
  Description of Artificial Sequence: Synthetic oligonucleotide
gcggcgcuuguccacuggg

SEQ ID NO: 1766021 - RNA, 19 nt, Artificial Sequence
  Description of Artificial Sequence: Synthetic oligonucleotide
  modified_base (10)..(10): a, c, u, g, unknown or other
cuguuauaunuuggguggu

SEQ ID NO: 1766022 - RNA, 19 nt, Artificial Sequence
  Description of Artificial Sequence: Synthetic oligonucleotide
uggagucgacaugggcucu

SEQ ID NO: 1766023 - RNA, 19 nt, Artificial Sequence
  Description of Artificial Sequence: Synthetic oligonucleotide
uuugcaccgugcgcuuaaa

SEQ ID NO: 1766024 - RNA, 19 nt, Artificial Sequence
  Description of Artificial Sequence: Synthetic oligonucleotide
guguuacauuugucuuaac

SEQ ID NO: 1766025 - RNA, 19 nt, Artificial Sequence
  Description of Artificial Sequence: Synthetic oligonucleotide
ggagccccugcgugcaaag

SEQ ID NO: 1766026 - RNA, 19 nt, Artificial Sequence
  Description of Artificial Sequence: Synthetic oligonucleotide
aaaaugcgcuggagccccu

SEQ ID NO: 1766027 - RNA, 19 nt, Artificial Sequence
  Description of Artificial Sequence: Synthetic oligonucleotide
guguguguguguguuacau

SEQ ID NO: 1766028 - RNA, 19 nt, Artificial Sequence
  Description of Artificial Sequence: Synthetic oligonucleotide
ccccggagccaaaaugccc

SEQ ID NO: 1766029 - RNA, 19 nt, Artificial Sequence
  Description of Artificial Sequence: Synthetic oligonucleotide
acgguguuacaaacacuau

SEQ ID NO: 1766030 - RNA, 19 nt, Artificial Sequence
  Description of Artificial Sequence: Synthetic oligonucleotide
cauaggugugugugugugu

SEQ ID NO: 1766031 - RNA, 19 nt, Artificial Sequence
  Description of Artificial Sequence: Synthetic oligonucleotide
cccugcgugcaaagggugc

SEQ ID NO: 1766032 - RNA, 19 nt, Artificial Sequence
  Description of Artificial Sequence: Synthetic oligonucleotide
guucugccugcagguuagg

SEQ ID NO: 1766033 - RNA, 19 nt, Artificial Sequence
  Description of Artificial Sequence: Synthetic oligonucleotide
gguuggaccuguacgcuaa

SEQ ID NO: 1766034 - RNA, 19 nt, Artificial Sequence
  Description of Artificial Sequence: Synthetic oligonucleotide
ccaauguauugauacuugu

SEQ ID NO: 1766035 - RNA, 19 nt, Artificial Sequence
  Description of Artificial Sequence: Synthetic oligonucleotide
ccuguacgcuaaucgaaga

SEQ ID NO: 1766036 - RNA, 19 nt, Artificial Sequence
  Description of Artificial Sequence: Synthetic oligonucleotide
guggugguacuaagucuuc

SEQ ID NO: 1766037 - RNA, 19 nt, Artificial Sequence
  Description of Artificial Sequence: Synthetic oligonucleotide
ccggauuggagucgacaug

SEQ ID NO: 1766038 - RNA, 19 nt, Artificial Sequence
  Description of Artificial Sequence: Synthetic oligonucleotide
cguagaauugcuguuauau

SEQ ID NO: 1766039 - RNA, 19 nt, Artificial Sequence
  Description of Artificial Sequence: Synthetic oligonucleotide
uggagccccugcgugcaaa

SEQ ID NO: 1766040 - RNA, 19 nt, Artificial Sequence
  Description of Artificial Sequence: Synthetic oligonucleotide
guacuaagucuuccaguuu

SEQ ID NO: 1766041 - RNA, 19 nt, Artificial Sequence
  Description of Artificial Sequence: Synthetic oligonucleotide
aacgaccucuccggccuuu

SEQ ID NO: 1766042 - RNA, 19 nt, Artificial Sequence
  Description of Artificial Sequence: Synthetic oligonucleotide
gcacgcauugcaaccugug

SEQ ID NO: 1766043 - RNA, 19 nt, Artificial Sequence
  Description of Artificial Sequence: Synthetic oligonucleotide
uagccggauuggagucgac

SEQ ID NO: 1766044 - RNA, 19 nt, Artificial Sequence
  Description of Artificial Sequence: Synthetic oligonucleotide
cgcuaaucgaagaacaaau

SEQ ID NO: 1766045 - RNA, 19 nt, Artificial Sequence
  Description of Artificial Sequence: Synthetic oligonucleotide
ggagucgacaugggcucug

SEQ ID NO: 1766046 - RNA, 19 nt, Artificial Sequence
  Description of Artificial Sequence: Synthetic oligonucleotide
gccggauuggagucgacau

SEQ ID NO: 1766047 - RNA, 19 nt, Artificial Sequence
  Description of Artificial Sequence: Synthetic oligonucleotide
agccacgcacgcauugcaa

SEQ ID NO: 1766048 - RNA, 19 nt, Artificial Sequence
  Description of Artificial Sequence: Synthetic oligonucleotide
guguguguguguguguguu

SEQ ID NO: 1766049 - RNA, 19 nt, Artificial Sequence
  Description of Artificial Sequence: Synthetic oligonucleotide
ggguuggaccuguacgcua

SEQ ID NO: 1766050 - RNA, 19 nt, Artificial Sequence
  Description of Artificial Sequence: Synthetic oligonucleotide
gccccggagccaaaaugcc

SEQ ID NO: 1766051 - RNA, 19 nt, Artificial Sequence
  Description of Artificial Sequence: Synthetic oligonucleotide
cgugcgaaccacuucuuua

SEQ ID NO: 1766052 - RNA, 19 nt, Artificial Sequence
  Description of Artificial Sequence: Synthetic oligonucleotide
ggugugugugugugugugu

SEQ ID NO: 1766053 - RNA, 19 nt, Artificial Sequence
  Description of Artificial Sequence: Synthetic oligonucleotide
ccccugcgugcaaagggug

SEQ ID NO: 1766054 - RNA, 19 nt, Artificial Sequence
  Description of Artificial Sequence: Synthetic oligonucleotide
cacgcacgcauugcaaccu

SEQ ID NO: 1766055 - RNA, 19 nt, Artificial Sequence
  Description of Artificial Sequence: Synthetic oligonucleotide
uacccuccacuggguugga

SEQ ID NO: 1766056 - RNA, 19 nt, Artificial Sequence
  Description of Artificial Sequence: Synthetic oligonucleotide
caacgauuucggcggcgcu

SEQ ID NO: 1766057 - RNA, 19 nt, Artificial Sequence
  Description of Artificial Sequence: Synthetic oligonucleotide
cuccggccuuuuaaacugu

SEQ ID NO: 1766058 - RNA, 19 nt, Artificial Sequence
  Description of Artificial Sequence: Synthetic oligonucleotide
ccaagaguuuggacagaua

SEQ ID NO: 1766059 - RNA, 19 nt, Artificial Sequence
  Description of Artificial Sequence: Synthetic oligonucleotide
caugucucucugugaccau

SEQ ID NO: 1766060 - RNA, 19 nt, Artificial Sequence
  Description of Artificial Sequence: Synthetic oligonucleotide
ggacgguguuacaaacacu

SEQ ID NO: 1766061 - RNA, 19 nt, Artificial Sequence
  Description of Artificial Sequence: Synthetic oligonucleotide
acgaccucuccggccuuuu

SEQ ID NO: 1766062 - RNA, 19 nt, Artificial Sequence
  Description of Artificial Sequence: Synthetic oligonucleotide
gguuugccuggaaccugga

SEQ ID NO: 1766063 - RNA, 19 nt, Artificial Sequence
  Description of Artificial Sequence: Synthetic oligonucleotide
gccaaacauuucucaucgu

SEQ ID NO: 1766064 - RNA, 19 nt, Artificial Sequence
  Description of Artificial Sequence: Synthetic oligonucleotide
cggcuucgaggguaaacga

SEQ ID NO: 1766065 - RNA, 19 nt, Artificial Sequence
  Description of Artificial Sequence: Synthetic oligonucleotide
cgugcaaagggugcggagu

SEQ ID NO: 1766066 - RNA, 19 nt, Artificial Sequence
  Description of Artificial Sequence: Synthetic oligonucleotide
cgcacgcauugcaaccugu

SEQ ID NO: 1766067 - RNA, 19 nt, Artificial Sequence
  Description of Artificial Sequence: Synthetic oligonucleotide
ccgugcgaaccacuucuuu

SEQ ID NO: 1766068 - RNA, 19 nt, Artificial Sequence
  Description of Artificial Sequence: Synthetic oligonucleotide
ccggagccaaaaugcccuu

SEQ ID NO: 1766069 - RNA, 19 nt, Artificial Sequence
  Description of Artificial Sequence: Synthetic oligonucleotide
cgaccucuccggccuuuua

SEQ ID NO: 1766070 - RNA, 19 nt, Artificial Sequence
  Description of Artificial Sequence: Synthetic oligonucleotide
cgauuucggcggcgcuugu

SEQ ID NO: 1766071 - RNA, 19 nt, Artificial Sequence
  Description of Artificial Sequence: Synthetic oligonucleotide
acaugcaugaauuucaagg

SEQ ID NO: 1766072 - RNA, 19 nt, Artificial Sequence
  Description of Artificial Sequence: Synthetic oligonucleotide
aauagagagagagagagag

SEQ ID NO: 1766073 - RNA, 19 nt, Artificial Sequence
  Description of Artificial Sequence: Synthetic oligonucleotide
uuuaaugugacccauguau

SEQ ID NO: 1766074 - RNA, 19 nt, Artificial Sequence
  Description of Artificial Sequence: Synthetic oligonucleotide
aauuugagcugucaauggc

SEQ ID NO: 1766075 - RNA, 19 nt, Artificial Sequence
  Description of Artificial Sequence: Synthetic oligonucleotide
gaaauagagagagagagag

SEQ ID NO: 1766076 - RNA, 19 nt, Artificial Sequence
  Description of Artificial Sequence: Synthetic oligonucleotide
ugaguuuugaguaacaaau

SEQ ID NO: 1766077 - RNA, 19 nt, Artificial Sequence
  Description of Artificial Sequence: Synthetic oligonucleotide
aaugauuggacuaucacug

SEQ ID NO: 1766078 - RNA, 19 nt, Artificial Sequence
  Description of Artificial Sequence: Synthetic oligonucleotide
agugucaauggcuucauac

SEQ ID NO: 1766079 - RNA, 19 nt, Artificial Sequence
  Description of Artificial Sequence: Synthetic oligonucleotide
aaaugauuggacuaucacu

SEQ ID NO: 1766080 - RNA, 19 nt, Artificial Sequence
  Description of Artificial Sequence: Synthetic oligonucleotide
ucugauaagagguuuacac

SEQ ID NO: 1766081 - RNA, 19 nt, Artificial Sequence
  Description of Artificial Sequence: Synthetic oligonucleotide
gagaaauagagagagagag

SEQ ID NO: 1766082 - RNA, 19 nt, Artificial Sequence
  Description of Artificial Sequence: Synthetic oligonucleotide
uccaggaugaggaaaaugc

SEQ ID NO: 1766083 - RNA, 19 nt, Artificial Sequence
  Description of Artificial Sequence: Synthetic oligonucleotide
auagguacaccuuaaauga

SEQ ID NO: 1766084 - RNA, 19 nt, Artificial Sequence
  Description of Artificial Sequence: Synthetic oligonucleotide
uacacuuucuugaagaggu

SEQ ID NO: 1766085 - RNA, 19 nt, Artificial Sequence
  Description of Artificial Sequence: Synthetic oligonucleotide
auuauuggcaaauaugcga

SEQ ID NO: 1766086 - RNA, 19 nt, Artificial Sequence
  Description of Artificial Sequence: Synthetic oligonucleotide
agugcuacugcauacauga

SEQ ID NO: 1766087 - RNA, 19 nt, Artificial Sequence
  Description of Artificial Sequence: Synthetic oligonucleotide
uuaaauagcugguucacca

SEQ ID NO: 1766088 - RNA, 19 nt, Artificial Sequence
  Description of Artificial Sequence: Synthetic oligonucleotide
cauagguacaccuuaaaug

SEQ ID NO: 1766089 - RNA, 19 nt, Artificial Sequence
  Description of Artificial Sequence: Synthetic oligonucleotide
ugguuaauggugaugugcg

SEQ ID NO: 1766090 - RNA, 19 nt, Artificial Sequence
  Description of Artificial Sequence: Synthetic oligonucleotide
auaguauuuguaugugacc

SEQ ID NO: 1766091 - RNA, 19 nt, Artificial Sequence
  Description of Artificial Sequence: Synthetic oligonucleotide
auaugcgaaggucaagugc

SEQ ID NO: 1766092 - RNA, 19 nt, Artificial Sequence
  Description of Artificial Sequence: Synthetic oligonucleotide
uucuuuaugagccuggaau

SEQ ID NO: 1766093 - RNA, 19 nt, Artificial Sequence
  Description of Artificial Sequence: Synthetic oligonucleotide
uguagguacugguuaaugg

SEQ ID NO: 1766094 - RNA, 19 nt, Artificial Sequence
  Description of Artificial Sequence: Synthetic oligonucleotide
aauacacuuucuugaagag

SEQ ID NO: 1766095 - RNA, 19 nt, Artificial Sequence
  Description of Artificial Sequence: Synthetic oligonucleotide
caaacauugccuuacgccc

SEQ ID NO: 1766096 - RNA, 19 nt, Artificial Sequence
  Description of Artificial Sequence: Synthetic oligonucleotide
aaauggaguuuguugaucu

SEQ ID NO: 1766097 - RNA, 19 nt, Artificial Sequence
  Description of Artificial Sequence: Synthetic oligonucleotide
gaguuuguugaucuuaaag

SEQ ID NO: 1766098 - RNA, 19 nt, Artificial Sequence
  Description of Artificial Sequence: Synthetic oligonucleotide
ugauaagagguuuacacaa

SEQ ID NO: 1766099 - RNA, 19 nt, Artificial Sequence
  Description of Artificial Sequence: Synthetic oligonucleotide
uaacaaauacacuuucuug

SEQ ID NO: 1766100 - RNA, 19 nt, Artificial Sequence
  Description of Artificial Sequence: Synthetic oligonucleotide
uagagagagagagagagag

SEQ ID NO: 1766101 - RNA, 19 nt, Artificial Sequence
  Description of Artificial Sequence: Synthetic oligonucleotide
ugccuuacgcccaacauag

SEQ ID NO: 1766102 - RNA, 19 nt, Artificial Sequence
  Description of Artificial Sequence: Synthetic oligonucleotide
caugcaugaauuucaaggc

SEQ ID NO: 1766103 - RNA, 19 nt, Artificial Sequence
  Description of Artificial Sequence: Synthetic oligonucleotide
uuguaugugacccucugug

SEQ ID NO: 1766104 - RNA, 19 nt, Artificial Sequence
  Description of Artificial Sequence: Synthetic oligonucleotide
uaguauuuguaugugaccc

SEQ ID NO: 1766105 - RNA, 19 nt, Artificial Sequence
  Description of Artificial Sequence: Synthetic oligonucleotide
augcaugaauuucaaggcc

SEQ ID NO: 1766106 - RNA, 19 nt, Artificial Sequence
  Description of Artificial Sequence: Synthetic oligonucleotide
gagagagagagagagagag

SEQ ID NO: 1766107 - RNA, 19 nt, Artificial Sequence
  Description of Artificial Sequence: Synthetic oligonucleotide
cuugaagucacugucaaac

SEQ ID NO: 1766108 - RNA, 19 nt, Artificial Sequence
  Description of Artificial Sequence: Synthetic oligonucleotide
uaucaaguuggccaguaug

SEQ ID NO: 1766109 - RNA, 19 nt, Artificial Sequence
  Description of Artificial Sequence: Synthetic oligonucleotide
ucuuuaugagccuggaaug

SEQ ID NO: 1766110 - RNA, 19 nt, Artificial Sequence
  Description of Artificial Sequence: Synthetic oligonucleotide
aaauaugcgaaggucaagu

SEQ ID NO: 1766111 - RNA, 19 nt, Artificial Sequence
  Description of Artificial Sequence: Synthetic oligonucleotide
uuaaaugagccgcaaacau

SEQ ID NO: 1766112 - RNA, 19 nt, Artificial Sequence
  Description of Artificial Sequence: Synthetic oligonucleotide
uuauuggcaaauaugcgaa

SEQ ID NO: 1766113 - RNA, 19 nt, Artificial Sequence
  Description of Artificial Sequence: Synthetic oligonucleotide
uuucugaugcugaugggag

SEQ ID NO: 1766114 - RNA, 19 nt, Artificial Sequence
  Description of Artificial Sequence: Synthetic oligonucleotide
uacaccuuaaaugagccgc

SEQ ID NO: 1766115 - RNA, 19 nt, Artificial Sequence
  Description of Artificial Sequence: Synthetic oligonucleotide
aauggcucugauaagaggu

SEQ ID NO: 1766116 - RNA, 19 nt, Artificial Sequence
  Description of Artificial Sequence: Synthetic oligonucleotide
acuauagucaucuuucaaa

SEQ ID NO: 1766117 - RNA, 19 nt, Artificial Sequence
  Description of Artificial Sequence: Synthetic oligonucleotide
ugcaugaauuucaaggcca

SEQ ID NO: 1766118 - RNA, 19 nt, Artificial Sequence
  Description of Artificial Sequence: Synthetic oligonucleotide
aaguagauuuuaaauagcu

SEQ ID NO: 1766119 - RNA, 19 nt, Artificial Sequence
  Description of Artificial Sequence: Synthetic oligonucleotide
uugaagagguuccuguaag

SEQ ID NO: 1766120 - RNA, 19 nt, Artificial Sequence
  Description of Artificial Sequence: Synthetic oligonucleotide
guagccuuuaaugugaccc

SEQ ID NO: 1766121 - RNA, 19 nt, Artificial Sequence
  Description of Artificial Sequence: Synthetic oligonucleotide
uccuacuuuacucuucccc

SEQ ID NO: 1766122 - RNA, 19 nt, Artificial Sequence
  Description of Artificial Sequence: Synthetic oligonucleotide
uccacaugcaugaauuuca

SEQ ID NO: 1766123 - RNA, 19 nt, Artificial Sequence
  Description of Artificial Sequence: Synthetic oligonucleotide
uccgaaaacugcauaaggu

SEQ ID NO: 1766124 - RNA, 19 nt, Artificial Sequence
  Description of Artificial Sequence: Synthetic oligonucleotide
gagagagagagagaggagg

SEQ ID NO: 1766125 - RNA, 19 nt, Artificial Sequence
  Description of Artificial Sequence: Synthetic oligonucleotide
ucggaagcagcucaucagg

SEQ ID NO: 1766126 - RNA, 19 nt, Artificial Sequence
  Description of Artificial Sequence: Synthetic oligonucleotide
accagaaaggcaucuagag

SEQ ID NO: 1766127 - RNA, 19 nt, Artificial Sequence
  Description of Artificial Sequence: Synthetic oligonucleotide
ugaauuucaaggccaccag

SEQ ID NO: 1766128 - RNA, 19 nt, Artificial Sequence
  Description of Artificial Sequence: Synthetic oligonucleotide
ugcaguacuauagucaucu

SEQ ID NO: 1766129 - RNA, 19 nt, Artificial Sequence
  Description of Artificial Sequence: Synthetic oligonucleotide
aauaugcgaaggucaagug

SEQ ID NO: 1766130 - RNA, 19 nt, Artificial Sequence
  Description of Artificial Sequence: Synthetic oligonucleotide
gaagucgugauuccccacg

SEQ ID NO: 1766131 - RNA, 19 nt, Artificial Sequence
  Description of Artificial Sequence: Synthetic oligonucleotide
uuuacacaaauggaguuug

SEQ ID NO: 1766132 - RNA, 19 nt, Artificial Sequence
  Description of Artificial Sequence: Synthetic oligonucleotide
aagagguuccuguaaguga

SEQ ID NO: 1766133 - RNA, 19 nt, Artificial Sequence
  Description of Artificial Sequence: Synthetic oligonucleotide
ucacugacggccuugguca

SEQ ID NO: 1766134 - RNA, 19 nt, Artificial Sequence
  Description of Artificial Sequence: Synthetic oligonucleotide
agauguagccuuuaaugug

SEQ ID NO: 1766135 - RNA, 19 nt, Artificial Sequence
  Description of Artificial Sequence: Synthetic oligonucleotide
gacaaccaguuucugaugc

SEQ ID NO: 1766136 - RNA, 19 nt, Artificial Sequence
  Description of Artificial Sequence: Synthetic oligonucleotide
uuguacgccucuaugaagu

SEQ ID NO: 1766137 - RNA, 19 nt, Artificial Sequence
  Description of Artificial Sequence: Synthetic oligonucleotide
agggaaaggguuuugcuug

SEQ ID NO: 1766138 - RNA, 19 nt, Artificial Sequence
  Description of Artificial Sequence: Synthetic oligonucleotide
acaugagggugcuugaaag

SEQ ID NO: 1766139 - RNA, 19 nt, Artificial Sequence
  Description of Artificial Sequence: Synthetic oligonucleotide
ucaauggcucugauaagag

SEQ ID NO: 1766140 - RNA, 19 nt, Artificial Sequence
  Description of Artificial Sequence: Synthetic oligonucleotide
agugcucaaaggcaaauga

SEQ ID NO: 1766141 - RNA, 19 nt, Artificial Sequence
  Description of Artificial Sequence: Synthetic oligonucleotide
auuggcaaauaugcgaagg

SEQ ID NO: 1766142 - RNA, 19 nt, Artificial Sequence
  Description of Artificial Sequence: Synthetic oligonucleotide
ugcauaaggugguauuucc

SEQ ID NO: 1766143 - RNA, 19 nt, Artificial Sequence
  Description of Artificial Sequence: Synthetic oligonucleotide
acugucuggcacuuguacg

SEQ ID NO: 1766144 - RNA, 19 nt, Artificial Sequence
  Description of Artificial Sequence: Synthetic oligonucleotide
uagcugaugaguuuugagu

SEQ ID NO: 1766145 - RNA, 19 nt, Artificial Sequence
  Description of Artificial Sequence: Synthetic oligonucleotide
uacugcauacaugacaggc

SEQ ID NO: 1766146 - RNA, 19 nt, Artificial Sequence
  Description of Artificial Sequence: Synthetic oligonucleotide
aacauaguauuuguaugug

SEQ ID NO: 1766147 - RNA, 19 nt, Artificial Sequence
  Description of Artificial Sequence: Synthetic oligonucleotide
uacugguuaauggugaugu

SEQ ID NO: 1766148 - RNA, 19 nt, Artificial Sequence
  Description of Artificial Sequence: Synthetic oligonucleotide
auagcugaugaguuuugag

SEQ ID NO: 1766149 - RNA, 19 nt, Artificial Sequence
  Description of Artificial Sequence: Synthetic oligonucleotide
gcauuauuggcaaauaugc

SEQ ID NO: 1766150 - RNA, 19 nt, Artificial Sequence
  Description of Artificial Sequence: Synthetic oligonucleotide
uuaugagccuggaaugccc

SEQ ID NO: 1766151 - RNA, 19 nt, Artificial Sequence
  Description of Artificial Sequence: Synthetic oligonucleotide
aagucucgugcuuugccag

SEQ ID NO: 1766152 - RNA, 19 nt, Artificial Sequence
  Description of Artificial Sequence: Synthetic oligonucleotide
aagaaagucucgugcuuug

SEQ ID NO: 1766153 - RNA, 19 nt, Artificial Sequence
  Description of Artificial Sequence: Synthetic oligonucleotide
cugucaauggcucugauaa

SEQ ID NO: 1766154 - RNA, 19 nt, Artificial Sequence
  Description of Artificial Sequence: Synthetic oligonucleotide
aagucgugauuccccacgg

SEQ ID NO: 1766155 - RNA, 19 nt, Artificial Sequence
  Description of Artificial Sequence: Synthetic oligonucleotide
aucuagagauagcugauga

SEQ ID NO: 1766156 - RNA, 19 nt, Artificial Sequence
  Description of Artificial Sequence: Synthetic oligonucleotide
uuugccagcgccucguuga

SEQ ID NO: 1766157 - RNA, 19 nt, Artificial Sequence
  Description of Artificial Sequence: Synthetic oligonucleotide
uuaccaacugcugaucugc

SEQ ID NO: 1766158 - RNA, 19 nt, Artificial Sequence
  Description of Artificial Sequence: Synthetic oligonucleotide
ugucaaacauugccuuacg

SEQ ID NO: 1766159 - RNA, 19 nt, Artificial Sequence
  Description of Artificial Sequence: Synthetic oligonucleotide
uuuaaauagcugguucacc

SEQ ID NO: 1766160 - RNA, 19 nt, Artificial Sequence
  Description of Artificial Sequence: Synthetic oligonucleotide
gagagagagagagagagga

SEQ ID NO: 1766161 - RNA, 19 nt, Artificial Sequence
  Description of Artificial Sequence: Synthetic oligonucleotide
aauuucaaggccaccagaa

SEQ ID NO: 1766162 - RNA, 19 nt, Artificial Sequence
  Description of Artificial Sequence: Synthetic oligonucleotide
uaaggugguauuuccucag

SEQ ID NO: 1766163 - RNA, 19 nt, Artificial Sequence
  Description of Artificial Sequence: Synthetic oligonucleotide
uuaaugugacccauguaua

SEQ ID NO: 1766164 - RNA, 19 nt, Artificial Sequence
  Description of Artificial Sequence: Synthetic oligonucleotide
uaugccagcacgaguguca

SEQ ID NO: 1766165 - RNA, 19 nt, Artificial Sequence
  Description of Artificial Sequence: Synthetic oligonucleotide
agguacaccuuaaaugagc

SEQ ID NO: 1766166 - RNA, 19 nt, Artificial Sequence
  Description of Artificial Sequence: Synthetic oligonucleotide
gaaagucucgugcuuugcc

SEQ ID NO: 1766167 - RNA, 19 nt, Artificial Sequence
  Description of Artificial Sequence: Synthetic oligonucleotide
augagggugcuugaaagac

SEQ ID NO: 1766168 - RNA, 19 nt, Artificial Sequence
  Description of Artificial Sequence: Synthetic oligonucleotide
cauaaggugguauuuccuc

SEQ ID NO: 1766169 - RNA, 19 nt, Artificial Sequence
  Description of Artificial Sequence: Synthetic oligonucleotide
augugacccauguauauca

SEQ ID NO: 1766170 - RNA, 19 nt, Artificial Sequence
  Description of Artificial Sequence: Synthetic oligonucleotide
uuuaccaacugcugaucug

SEQ ID NO: 1766171 - RNA, 19 nt, Artificial Sequence
  Description of Artificial Sequence: Synthetic oligonucleotide
ucuagugucaauggcuuca

SEQ ID NO: 1766172 - RNA, 19 nt, Artificial Sequence
  Description of Artificial Sequence: Synthetic oligonucleotide
uguaugugacccucugugc

SEQ ID NO: 1766173 - RNA, 19 nt, Artificial Sequence
  Description of Artificial Sequence: Synthetic oligonucleotide
cugucuggcacuuguacgc

SEQ ID NO: 1766174 - RNA, 19 nt, Artificial Sequence
  Description of Artificial Sequence: Synthetic oligonucleotide
caugucuccuacuuuacuc

SEQ ID NO: 1766175 - RNA, 19 nt, Artificial Sequence
  Description of Artificial Sequence: Synthetic oligonucleotide
uuggcaaauaugcgaaggu

SEQ ID NO: 1766176 - RNA, 19 nt, Artificial Sequence
  Description of Artificial Sequence: Synthetic oligonucleotide
ucgauggucggcaugugac

SEQ ID NO: 1766177 - RNA, 19 nt, Artificial Sequence
  Description of Artificial Sequence: Synthetic oligonucleotide
uggaaugcccucagaaaug

SEQ ID NO: 1766178 - RNA, 19 nt, Artificial Sequence
  Description of Artificial Sequence: Synthetic oligonucleotide
ugaucuuaaaguagauuuu

SEQ ID NO: 1766179 - RNA, 19 nt, Artificial Sequence
  Description of Artificial Sequence: Synthetic oligonucleotide
cucuaugaagucgugauuc

SEQ ID NO: 1766180 - RNA, 19 nt, Artificial Sequence
  Description of Artificial Sequence: Synthetic oligonucleotide
auuuguaugugacccucug

SEQ ID NO: 1766181 - RNA, 19 nt, Artificial Sequence
  Description of Artificial Sequence: Synthetic oligonucleotide
uguaagugaugaucuucag

SEQ ID NO: 1766182 - RNA, 19 nt, Artificial Sequence
  Description of Artificial Sequence: Synthetic oligonucleotide
uggcauuucucuucuggag

SEQ ID NO: 1766183 - RNA, 19 nt, Artificial Sequence
  Description of Artificial Sequence: Synthetic oligonucleotide
uuuaugagccuggaaugcc

SEQ ID NO: 1766184 - RNA, 19 nt, Artificial Sequence
  Description of Artificial Sequence: Synthetic oligonucleotide
gaagagguuccuguaagug

SEQ ID NO: 1766185 - RNA, 19 nt, Artificial Sequence
  Description of Artificial Sequence: Synthetic oligonucleotide
auacacuuucuugaagagg

SEQ ID NO: 1766186 - RNA, 19 nt, Artificial Sequence
  Description of Artificial Sequence: Synthetic oligonucleotide
gauggucggcaugugaccg

SEQ ID NO: 1766187 - RNA, 19 nt, Artificial Sequence
  Description of Artificial Sequence: Synthetic oligonucleotide
uacgccucuaugaagucgu

SEQ ID NO: 1766188 - RNA, 19 nt, Artificial Sequence
  Description of Artificial Sequence: Synthetic oligonucleotide
aacaugagggugcuugaaa

SEQ ID NO: 1766189 - RNA, 19 nt, Artificial Sequence
  Description of Artificial Sequence: Synthetic oligonucleotide
acuuccgaaaacugcauaa

SEQ ID NO: 1766190 - RNA, 19 nt, Artificial Sequence
  Description of Artificial Sequence: Synthetic oligonucleotide
uagguacaccuuaaaugag

SEQ ID NO: 1766191 - RNA, 19 nt, Artificial Sequence
  Description of Artificial Sequence: Synthetic oligonucleotide
acauaguauuuguauguga

SEQ ID NO: 1766192 - RNA, 19 nt, Artificial Sequence
  Description of Artificial Sequence: Synthetic oligonucleotide
auuggacuaucacugucug

SEQ ID NO: 1766193 - RNA, 19 nt, Artificial Sequence
  Description of Artificial Sequence: Synthetic oligonucleotide
acuaucacugucuggcacu

SEQ ID NO: 1766194 - RNA, 19 nt, Artificial Sequence
  Description of Artificial Sequence: Synthetic oligonucleotide
cuuuaugagccuggaaugc

SEQ ID NO: 1766195 - RNA, 19 nt, Artificial Sequence
  Description of Artificial Sequence: Synthetic oligonucleotide
aggcaaaugacagguacuc

SEQ ID NO: 1766196 - RNA, 19 nt, Artificial Sequence
  Description of Artificial Sequence: Synthetic oligonucleotide
aguagauuuuaaauagcug

SEQ ID NO: 1766197 - RNA, 19 nt, Artificial Sequence
  Description of Artificial Sequence: Synthetic oligonucleotide
uccucagcuugcuugaagu

SEQ ID NO: 1766198 - RNA, 19 nt, Artificial Sequence
  Description of Artificial Sequence: Synthetic oligonucleotide
uauuggcaaauaugcgaag

SEQ ID NO: 1766199 - RNA, 19 nt, Artificial Sequence
  Description of Artificial Sequence: Synthetic oligonucleotide
agagagagagaggagggag

SEQ ID NO: 1766200 - RNA, 19 nt, Artificial Sequence
  Description of Artificial Sequence: Synthetic oligonucleotide
gucacuggcacagacucgg

SEQ ID NO: 1766201 - RNA, 19 nt, Artificial Sequence
  Description of Artificial Sequence: Synthetic oligonucleotide
uacuauagucaucuuucaa

SEQ ID NO: 1766202 - RNA, 19 nt, Artificial Sequence
  Description of Artificial Sequence: Synthetic oligonucleotide
ugauuggacuaucacuguc

SEQ ID NO: 1766203 - RNA, 19 nt, Artificial Sequence
  Description of Artificial Sequence: Synthetic oligonucleotide
caauggcucugauaagagg

SEQ ID NO: 1766204 - RNA, 19 nt, Artificial Sequence
  Description of Artificial Sequence: Synthetic oligonucleotide
agccgcaaacauuucauca

SEQ ID NO: 1766205 - RNA, 19 nt, Artificial Sequence
  Description of Artificial Sequence: Synthetic oligonucleotide
aguauuuguaugugacccu

SEQ ID NO: 1766206 - RNA, 19 nt, Artificial Sequence
  Description of Artificial Sequence: Synthetic oligonucleotide
agagagagagagaggaggg

SEQ ID NO: 1766207 - RNA, 19 nt, Artificial Sequence
  Description of Artificial Sequence: Synthetic oligonucleotide
accagcucugcacaggaug

SEQ ID NO: 1766208 - RNA, 19 nt, Artificial Sequence
  Description of Artificial Sequence: Synthetic oligonucleotide
augucuccuacuuuacucu

SEQ ID NO: 1766209 - RNA, 19 nt, Artificial Sequence
  Description of Artificial Sequence: Synthetic oligonucleotide
ucucuagugucaauggcuu

SEQ ID NO: 1766210 - RNA, 19 nt, Artificial Sequence
  Description of Artificial Sequence: Synthetic oligonucleotide
agcggaugaagaaagucuc

SEQ ID NO: 1766211 - RNA, 19 nt, Artificial Sequence
  Description of Artificial Sequence: Synthetic oligonucleotide
cuuguacgccucuaugaag

SEQ ID NO: 1766212 - RNA, 19 nt, Artificial Sequence
  Description of Artificial Sequence: Synthetic oligonucleotide
aucuuucaaauuugagcug

SEQ ID NO: 1766213 - RNA, 19 nt, Artificial Sequence
  Description of Artificial Sequence: Synthetic oligonucleotide
cugauaagagguuuacaca

SEQ ID NO: 1766214 - RNA, 19 nt, Artificial Sequence
  Description of Artificial Sequence: Synthetic oligonucleotide
gaaaggguuuugcuugcug

SEQ ID NO: 1766215 - RNA, 19 nt, Artificial Sequence
  Description of Artificial Sequence: Synthetic oligonucleotide
aauagcugguucaccagga

SEQ ID NO: 1766216 - RNA, 19 nt, Artificial Sequence
  Description of Artificial Sequence: Synthetic oligonucleotide
acgagugucacuggcacag

SEQ ID NO: 1766217 - RNA, 19 nt, Artificial Sequence
  Description of Artificial Sequence: Synthetic oligonucleotide
acuuguacgccucuaugaa

SEQ ID NO: 1766218 - RNA, 19 nt, Artificial Sequence
  Description of Artificial Sequence: Synthetic oligonucleotide
uuggacuaucacugucugg

SEQ ID NO: 1766219 - RNA, 19 nt, Artificial Sequence
  Description of Artificial Sequence: Synthetic oligonucleotide
uauuuguaugugacccucu

SEQ ID NO: 1766220 - RNA, 19 nt, Artificial Sequence
  Description of Artificial Sequence: Synthetic oligonucleotide
agucucgugcuuugccagc

SEQ ID NO: 1766221 - RNA, 19 nt, Artificial Sequence
  Description of Artificial Sequence: Synthetic oligonucleotide
uguugaucuuaaaguagau

SEQ ID NO: 1766222 - RNA, 19 nt, Artificial Sequence
  Description of Artificial Sequence: Synthetic oligonucleotide
gaaggucaagugcuacugc

SEQ ID NO: 1766223 - RNA, 19 nt, Artificial Sequence
  Description of Artificial Sequence: Synthetic oligonucleotide
ugagggugcuugaaagaca

SEQ ID NO: 1766224 - RNA, 19 nt, Artificial Sequence
  Description of Artificial Sequence: Synthetic oligonucleotide
aguuucugaugcugauggg

SEQ ID NO: 1766225 - RNA, 19 nt, Artificial Sequence
  Description of Artificial Sequence: Synthetic oligonucleotide
caucucuagugucaauggc

SEQ ID NO: 1766226 - RNA, 19 nt, Artificial Sequence
  Description of Artificial Sequence: Synthetic oligonucleotide
cauguauaucaaguuggcc

SEQ ID NO: 1766227 - RNA, 19 nt, Artificial Sequence
  Description of Artificial Sequence: Synthetic oligonucleotide
agaaagucucgugcuuugc

SEQ ID NO: 1766228 - RNA, 19 nt, Artificial Sequence
  Description of Artificial Sequence: Synthetic oligonucleotide
caaaugacagguacuccuc

SEQ ID NO: 1766229 - RNA, 19 nt, Artificial Sequence
  Description of Artificial Sequence: Synthetic oligonucleotide
ugaugggagauguagccuu

SEQ ID NO: 1766230 - RNA, 19 nt, Artificial Sequence
  Description of Artificial Sequence: Synthetic oligonucleotide
gacuaucacugucuggcac

SEQ ID NO: 1766231 - RNA, 19 nt, Artificial Sequence
  Description of Artificial Sequence: Synthetic oligonucleotide
guaugugacccucugugca

SEQ ID NO: 1766232 - RNA, 19 nt, Artificial Sequence
  Description of Artificial Sequence: Synthetic oligonucleotide
ggugguauuuccucaggag

SEQ ID NO: 1766233 - RNA, 19 nt, Artificial Sequence
  Description of Artificial Sequence: Synthetic oligonucleotide
guacaccuuaaaugagccg

SEQ ID NO: 1766234 - RNA, 19 nt, Artificial Sequence
  Description of Artificial Sequence: Synthetic oligonucleotide
uaugagccuggaaugcccu

SEQ ID NO: 1766235 - RNA, 19 nt, Artificial Sequence
  Description of Artificial Sequence: Synthetic oligonucleotide
agucgugauuccccacggc

SEQ ID NO: 1766236 - RNA, 19 nt, Artificial Sequence
  Description of Artificial Sequence: Synthetic oligonucleotide
cugugcaguacuauaguca

SEQ ID NO: 1766237 - RNA, 19 nt, Artificial Sequence
  Description of Artificial Sequence: Synthetic oligonucleotide
uugccuuacgcccaacaua

SEQ ID NO: 1766238 - RNA, 19 nt, Artificial Sequence
  Description of Artificial Sequence: Synthetic oligonucleotide
ccaacauaguauuuguaug

SEQ ID NO: 1766239 - RNA, 19 nt, Artificial Sequence
  Description of Artificial Sequence: Synthetic oligonucleotide
ugcccucagaaaugauugg

SEQ ID NO: 1766240 - RNA, 19 nt, Artificial Sequence
  Description of Artificial Sequence: Synthetic oligonucleotide
cuuaaaugagccgcaaaca

SEQ ID NO: 1766241 - RNA, 19 nt, Artificial Sequence
  Description of Artificial Sequence: Synthetic oligonucleotide
ugacccucugugcaguacu

SEQ ID NO: 1766242 - RNA, 19 nt, Artificial Sequence
  Description of Artificial Sequence: Synthetic oligonucleotide
augaagucgugauucccca

SEQ ID NO: 1766243 - RNA, 19 nt, Artificial Sequence
  Description of Artificial Sequence: Synthetic oligonucleotide
ugucaauggcucugauaag

SEQ ID NO: 1766244 - RNA, 19 nt, Artificial Sequence
  Description of Artificial Sequence: Synthetic oligonucleotide
aaacauugccuuacgccca

SEQ ID NO: 1766245 - RNA, 19 nt, Artificial Sequence
  Description of Artificial Sequence: Synthetic oligonucleotide
gucaauggcucugauaaga

SEQ ID NO: 1766246 - RNA, 19 nt, Artificial Sequence
  Description of Artificial Sequence: Synthetic oligonucleotide
cuaugaagucgugauuccc

SEQ ID NO: 1766247 - RNA, 19 nt, Artificial Sequence
  Description of Artificial Sequence: Synthetic oligonucleotide
auugccuuacgcccaacau

SEQ ID NO: 1766248 - RNA, 19 nt, Artificial Sequence
  Description of Artificial Sequence: Synthetic oligonucleotide
aaauagagagagagagaga

SEQ ID NO: 1766249 - RNA, 19 nt, Artificial Sequence
  Description of Artificial Sequence: Synthetic oligonucleotide
cuuccgaaaacugcauaag

SEQ ID NO: 1766250 - RNA, 19 nt, Artificial Sequence
  Description of Artificial Sequence: Synthetic oligonucleotide
ucaggagcucgauggucgg

SEQ ID NO: 1766251 - RNA, 19 nt, Artificial Sequence
  Description of Artificial Sequence: Synthetic oligonucleotide
caacauaguauuuguaugu

SEQ ID NO: 1766252 - RNA, 19 nt, Artificial Sequence
  Description of Artificial Sequence: Synthetic oligonucleotide
cugucaaacauugccuuac

SEQ ID NO: 1766253 - RNA, 19 nt, Artificial Sequence
  Description of Artificial Sequence: Synthetic oligonucleotide
uuacgcccaacauaguauu

SEQ ID NO: 1766254 - RNA, 19 nt, Artificial Sequence
  Description of Artificial Sequence: Synthetic oligonucleotide
aauggaguuuguugaucuu

SEQ ID NO: 1766255 - RNA, 19 nt, Artificial Sequence
  Description of Artificial Sequence: Synthetic oligonucleotide
uacuccucagcuugcuuga

SEQ ID NO: 1766256 - RNA, 19 nt, Artificial Sequence
  Description of Artificial Sequence: Synthetic oligonucleotide
ccgaaaacugcauaaggug

SEQ ID NO: 1766257 - RNA, 19 nt, Artificial Sequence
  Description of Artificial Sequence: Synthetic oligonucleotide
uguagccuuuaaugugacc

SEQ ID NO: 1766258 - RNA, 19 nt, Artificial Sequence
  Description of Artificial Sequence: Synthetic oligonucleotide
gguacaccuuaaaugagcc

SEQ ID NO: 1766259 - RNA, 19 nt, Artificial Sequence
  Description of Artificial Sequence: Synthetic oligonucleotide
guauuuccucaggagcucg

SEQ ID NO: 1766260 - RNA, 19 nt, Artificial Sequence
  Description of Artificial Sequence: Synthetic oligonucleotide
gugacccauguauaucaag

SEQ ID NO: 1766261 - RNA, 19 nt, Artificial Sequence
  Description of Artificial Sequence: Synthetic oligonucleotide
uauaucaaguuggccagua

SEQ ID NO: 1766262 - RNA, 19 nt, Artificial Sequence
  Description of Artificial Sequence: Synthetic oligonucleotide
cacuuguacgccucuauga

SEQ ID NO: 1766263 - RNA, 19 nt, Artificial Sequence
  Description of Artificial Sequence: Synthetic oligonucleotide
ucuaugccagcacgagugu

SEQ ID NO: 1766264 - RNA, 19 nt, Artificial Sequence
  Description of Artificial Sequence: Synthetic oligonucleotide
agaaauagagagagagaga

SEQ ID NO: 1766265 - RNA, 19 nt, Artificial Sequence
  Description of Artificial Sequence: Synthetic oligonucleotide
uucugaugcugaugggaga

SEQ ID NO: 1766266 - RNA, 19 nt, Artificial Sequence
  Description of Artificial Sequence: Synthetic oligonucleotide
aacauugccuuacgcccaa

SEQ ID NO: 1766267 - RNA, 19 nt, Artificial Sequence
  Description of Artificial Sequence: Synthetic oligonucleotide
ugcuguagguacugguuaa

SEQ ID NO: 1766268 - RNA, 19 nt, Artificial Sequence
  Description of Artificial Sequence: Synthetic oligonucleotide
aggugguauuuccucagga

SEQ ID NO: 1766269 - RNA, 19 nt, Artificial Sequence
  Description of Artificial Sequence: Synthetic oligonucleotide
uggcaaauaugcgaagguc

SEQ ID NO: 1766270 - RNA, 19 nt, Artificial Sequence
  Description of Artificial Sequence: Synthetic oligonucleotide
guauuuguaugugacccuc

SEQ ID NO: 1766271 - RNA, 19 nt, Artificial Sequence
  Description of Artificial Sequence: Synthetic oligonucleotide
gaccgagcagcauuuucac

SEQ ID NO: 1766272 - RNA, 19 nt, Artificial Sequence
  Description of Artificial Sequence: Synthetic oligonucleotide
uccucuaugccagcacgag

SEQ ID NO: 1766273 - RNA, 19 nt, Artificial Sequence
  Description of Artificial Sequence: Synthetic oligonucleotide
ggcaacaugagggugcuug

SEQ ID NO: 1766274 - RNA, 19 nt, Artificial Sequence
  Description of Artificial Sequence: Synthetic oligonucleotide
gucgugauuccccacggca

SEQ ID NO: 1766275 - RNA, 19 nt, Artificial Sequence
  Description of Artificial Sequence: Synthetic oligonucleotide
guacuauagucaucuuuca

SEQ ID NO: 1766276 - RNA, 19 nt, Artificial Sequence
  Description of Artificial Sequence: Synthetic oligonucleotide
agagagagagagagagagg

SEQ ID NO: 1766277 - RNA, 19 nt, Artificial Sequence
  Description of Artificial Sequence: Synthetic oligonucleotide
guacgccucuaugaagucg

SEQ ID NO: 1766278 - RNA, 19 nt, Artificial Sequence
  Description of Artificial Sequence: Synthetic oligonucleotide
cuacugcauacaugacagg

SEQ ID NO: 1766279 - RNA, 19 nt, Artificial Sequence
  Description of Artificial Sequence: Synthetic oligonucleotide
ggcaaauaugcgaagguca

SEQ ID NO: 1766280 - RNA, 19 nt, Artificial Sequence
  Description of Artificial Sequence: Synthetic oligonucleotide
aaacugcauaaggugguau

SEQ ID NO: 1766281 - RNA, 19 nt, Artificial Sequence
  Description of Artificial Sequence: Synthetic oligonucleotide
caaauaugcgaaggucaag

SEQ ID NO: 1766282 - RNA, 19 nt, Artificial Sequence
  Description of Artificial Sequence: Synthetic oligonucleotide
gaaaacugcauaagguggu

SEQ ID NO: 1766283 - RNA, 19 nt, Artificial Sequence
  Description of Artificial Sequence: Synthetic oligonucleotide
guaugcacuggacuucauc

SEQ ID NO: 1766284 - RNA, 19 nt, Artificial Sequence
  Description of Artificial Sequence: Synthetic oligonucleotide
ucacuuccgaaaacugcau

SEQ ID NO: 1766285 - RNA, 19 nt, Artificial Sequence
  Description of Artificial Sequence: Synthetic oligonucleotide
ucggcaugugaccgagcag

SEQ ID NO: 1766286 - RNA, 19 nt, Artificial Sequence
  Description of Artificial Sequence: Synthetic oligonucleotide
gucggcaugugaccgagca

SEQ ID NO: 1766287 - RNA, 19 nt, Artificial Sequence
  Description of Artificial Sequence: Synthetic oligonucleotide
caaauggaguuuguugauc

SEQ ID NO: 1766288 - RNA, 19 nt, Artificial Sequence
  Description of Artificial Sequence: Synthetic oligonucleotide
gauuggacuaucacugucu

SEQ ID NO: 1766289 - RNA, 19 nt, Artificial Sequence
  Description of Artificial Sequence: Synthetic oligonucleotide
gauagcugaugaguuuuga

SEQ ID NO: 1766290 - RNA, 19 nt, Artificial Sequence
  Description of Artificial Sequence: Synthetic oligonucleotide
gauaagagguuuacacaaa

SEQ ID NO: 1766291 - RNA, 19 nt, Artificial Sequence
  Description of Artificial Sequence: Synthetic oligonucleotide
acggcauagguacaccuua

SEQ ID NO: 1766292 - RNA, 19 nt, Artificial Sequence
  Description of Artificial Sequence: Synthetic oligonucleotide
agcaugucuccuacuuuac

SEQ ID NO: 1766293 - RNA, 19 nt, Artificial Sequence
  Description of Artificial Sequence: Synthetic oligonucleotide
cuugaagagguuccuguaa

SEQ ID NO: 1766294 - RNA, 19 nt, Artificial Sequence
  Description of Artificial Sequence: Synthetic oligonucleotide
ccucugugcaguacuauag

SEQ ID NO: 1766295 - RNA, 19 nt, Artificial Sequence
  Description of Artificial Sequence: Synthetic oligonucleotide
acgcccaacauaguauuug

SEQ ID NO: 1766296 - RNA, 19 nt, Artificial Sequence
  Description of Artificial Sequence: Synthetic oligonucleotide
ugaagucgugauuccccac

SEQ ID NO: 1766297 - RNA, 19 nt, Artificial Sequence
  Description of Artificial Sequence: Synthetic oligonucleotide
caugagggugcuugaaaga

SEQ ID NO: 1766298 - RNA, 19 nt, Artificial Sequence
  Description of Artificial Sequence: Synthetic oligonucleotide
caucuagagauagcugaug

SEQ ID NO: 1766299 - RNA, 19 nt, Artificial Sequence
  Description of Artificial Sequence: Synthetic oligonucleotide
ggcauuucucuucuggaga

SEQ ID NO: 1766300 - RNA, 19 nt, Artificial Sequence
  Description of Artificial Sequence: Synthetic oligonucleotide
cauuucucuucuggagagg

SEQ ID NO: 1766301 - RNA, 19 nt, Artificial Sequence
  Description of Artificial Sequence: Synthetic oligonucleotide
uaccaacugcugaucugca

SEQ ID NO: 1766302 - RNA, 19 nt, Artificial Sequence
  Description of Artificial Sequence: Synthetic oligonucleotide
cuguagguacugguuaaug

SEQ ID NO: 1766303 - RNA, 19 nt, Artificial Sequence
  Description of Artificial Sequence: Synthetic oligonucleotide
acugcauaaggugguauuu

SEQ ID NO: 1766304 - RNA, 19 nt, Artificial Sequence
  Description of Artificial Sequence: Synthetic oligonucleotide
cagcucaucaggagcucag

SEQ ID NO: 1766305 - RNA, 19 nt, Artificial Sequence
  Description of Artificial Sequence: Synthetic oligonucleotide
ucgugcuuugccagcgccu

SEQ ID NO: 1766306 - RNA, 19 nt, Artificial Sequence
  Description of Artificial Sequence: Synthetic oligonucleotide
gaguuuugaguaacaaaua

SEQ ID NO: 1766307 - RNA, 19 nt, Artificial Sequence
  Description of Artificial Sequence: Synthetic oligonucleotide
agagagagagagagaggag

SEQ ID NO: 1766308 - RNA, 19 nt, Artificial Sequence
  Description of Artificial Sequence: Synthetic oligonucleotide
accuuaaaugagccgcaaa

SEQ ID NO: 1766309 - RNA, 19 nt, Artificial Sequence
  Description of Artificial Sequence: Synthetic oligonucleotide
gcaaaugacagguacuccu

SEQ ID NO: 1766310 - RNA, 19 nt, Artificial Sequence
  Description of Artificial Sequence: Synthetic oligonucleotide
agguacugguuaaugguga

SEQ ID NO: 1766311 - RNA, 19 nt, Artificial Sequence
  Description of Artificial Sequence: Synthetic oligonucleotide
cauacaugacaggcagagc

SEQ ID NO: 1766312 - RNA, 19 nt, Artificial Sequence
  Description of Artificial Sequence: Synthetic oligonucleotide
cuggcagcagguagaucag

SEQ ID NO: 1766313 - RNA, 19 nt, Artificial Sequence
  Description of Artificial Sequence: Synthetic oligonucleotide
gaguccucuaugccagcac

SEQ ID NO: 1766314 - RNA, 19 nt, Artificial Sequence
  Description of Artificial Sequence: Synthetic oligonucleotide
aggaugcuccaucucuagu

SEQ ID NO: 1766315 - RNA, 19 nt, Artificial Sequence
  Description of Artificial Sequence: Synthetic oligonucleotide
auggaguuuguugaucuua

SEQ ID NO: 1766316 - RNA, 19 nt, Artificial Sequence
  Description of Artificial Sequence: Synthetic oligonucleotide
uggccaguaugcacuggac

SEQ ID NO: 1766317 - RNA, 19 nt, Artificial Sequence
  Description of Artificial Sequence: Synthetic oligonucleotide
ugucuccuacuuuacucuu

SEQ ID NO: 1766318 - RNA, 19 nt, Artificial Sequence
  Description of Artificial Sequence: Synthetic oligonucleotide
augcacuggacuucaucaa

SEQ ID NO: 1766319 - RNA, 19 nt, Artificial Sequence
  Description of Artificial Sequence: Synthetic oligonucleotide
gggugcuugaaagacacca

SEQ ID NO: 1766320 - RNA, 19 nt, Artificial Sequence
  Description of Artificial Sequence: Synthetic oligonucleotide
caccagaaaggcaucuaga

SEQ ID NO: 1766321 - RNA, 19 nt, Artificial Sequence
  Description of Artificial Sequence: Synthetic oligonucleotide
cuggaaugcccucagaaau

SEQ ID NO: 1766322 - RNA, 19 nt, Artificial Sequence
  Description of Artificial Sequence: Synthetic oligonucleotide
ugcgaaggucaagugcuac

SEQ ID NO: 1766323 - RNA, 19 nt, Artificial Sequence
  Description of Artificial Sequence: Synthetic oligonucleotide
cagcacgagugucacuggc

SEQ ID NO: 1766324 - RNA, 19 nt, Artificial Sequence
  Description of Artificial Sequence: Synthetic oligonucleotide
uuggcaacaugagggugcu

SEQ ID NO: 1766325 - RNA, 19 nt, Artificial Sequence
  Description of Artificial Sequence: Synthetic oligonucleotide
guacugguuaauggugaug

SEQ ID NO: 1766326 - RNA, 19 nt, Artificial Sequence
  Description of Artificial Sequence: Synthetic oligonucleotide
cuuacgcccaacauaguau

SEQ ID NO: 1766327 - RNA, 19 nt, Artificial Sequence
  Description of Artificial Sequence: Synthetic oligonucleotide
agugucacuggcacagacu

SEQ ID NO: 1766328 - RNA, 19 nt, Artificial Sequence
  Description of Artificial Sequence: Synthetic oligonucleotide
ggugcuugaaagacaccag

SEQ ID NO: 1766329 - RNA, 19 nt, Artificial Sequence
  Description of Artificial Sequence: Synthetic oligonucleotide
cagcggaugaagaaagucu

SEQ ID NO: 1766330 - RNA, 19 nt, Artificial Sequence
  Description of Artificial Sequence: Synthetic oligonucleotide
auagagagagagagagaga

SEQ ID NO: 1766331 - RNA, 19 nt, Artificial Sequence
  Description of Artificial Sequence: Synthetic oligonucleotide
cuuugccagcgccucguug

SEQ ID NO: 1766332 - RNA, 19 nt, Artificial Sequence
  Description of Artificial Sequence: Synthetic oligonucleotide
agauagcugaugaguuuug

SEQ ID NO: 1766333 - RNA, 19 nt, Artificial Sequence
  Description of Artificial Sequence: Synthetic oligonucleotide
aggagcucgauggucggca

SEQ ID NO: 1766334 - RNA, 19 nt, Artificial Sequence
  Description of Artificial Sequence: Synthetic oligonucleotide
cuuuaccaacugcugaucu

SEQ ID NO: 1766335 - RNA, 19 nt, Artificial Sequence
  Description of Artificial Sequence: Synthetic oligonucleotide
cucuagugucaauggcuuc

SEQ ID NO: 1766336 - RNA, 19 nt, Artificial Sequence
  Description of Artificial Sequence: Synthetic oligonucleotide
gugaccgagcagcauuuuc

SEQ ID NO: 1766337 - RNA, 19 nt, Artificial Sequence
  Description of Artificial Sequence: Synthetic oligonucleotide
gagagagagagaggaggga

SEQ ID NO: 1766338 - RNA, 19 nt, Artificial Sequence
  Description of Artificial Sequence: Synthetic oligonucleotide
cuucuggagaggccaucug

SEQ ID NO: 1766339 - RNA, 19 nt, Artificial Sequence
  Description of Artificial Sequence: Synthetic oligonucleotide
gagauagcugaugaguuuu

SEQ ID NO: 1766340 - RNA, 19 nt, Artificial Sequence
  Description of Artificial Sequence: Synthetic oligonucleotide
agaguccucuaugccagca

SEQ ID NO: 1766341 - RNA, 19 nt, Artificial Sequence
  Description of Artificial Sequence: Synthetic oligonucleotide
uacgcccaacauaguauuu

SEQ ID NO: 1766342 - RNA, 19 nt, Artificial Sequence
  Description of Artificial Sequence: Synthetic oligonucleotide
uugcccucacugacggccu

SEQ ID NO: 1766343 - RNA, 19 nt, Artificial Sequence
  Description of Artificial Sequence: Synthetic oligonucleotide
acaccuuaaaugagccgca

SEQ ID NO: 1766344 - RNA, 19 nt, Artificial Sequence
  Description of Artificial Sequence: Synthetic oligonucleotide
gauuccccacggcauaggu

SEQ ID NO: 1766345 - RNA, 19 nt, Artificial Sequence
  Description of Artificial Sequence: Synthetic oligonucleotide
agagagagagagagagaga

SEQ ID NO: 1766346 - RNA, 19 nt, Artificial Sequence
  Description of Artificial Sequence: Synthetic oligonucleotide
gcacgagugucacuggcac

SEQ ID NO: 1766347 - RNA, 19 nt, Artificial Sequence
  Description of Artificial Sequence: Synthetic oligonucleotide
ggguuuugcuugcugacaa

SEQ ID NO: 1766348 - RNA, 19 nt, Artificial Sequence
  Description of Artificial Sequence: Synthetic oligonucleotide
ggaaugcccucagaaauga

SEQ ID NO: 1766349 - RNA, 19 nt, Artificial Sequence
  Description of Artificial Sequence: Synthetic oligonucleotide
ggaggacaucagcacacug

SEQ ID NO: 1766350 - RNA, 19 nt, Artificial Sequence
  Description of Artificial Sequence: Synthetic oligonucleotide
aaaugccacagcggaugaa

SEQ ID NO: 1766351 - RNA, 19 nt, Artificial Sequence
  Description of Artificial Sequence: Synthetic oligonucleotide
ggagccguggguuggcaac

SEQ ID NO: 1766352 - RNA, 19 nt, Artificial Sequence
  Description of Artificial Sequence: Synthetic oligonucleotide
gcggaugaagaaagucucg

SEQ ID NO: 1766353 - RNA, 19 nt, Artificial Sequence
  Description of Artificial Sequence: Synthetic oligonucleotide
auggucggcaugugaccga

SEQ ID NO: 1766354 - RNA, 19 nt, Artificial Sequence
  Description of Artificial Sequence: Synthetic oligonucleotide
gugcuuugccagcgccucg

SEQ ID NO: 1766355 - RNA, 19 nt, Artificial Sequence
  Description of Artificial Sequence: Synthetic oligonucleotide
agcacgagugucacuggca

SEQ ID NO: 1766356 - RNA, 19 nt, Artificial Sequence
  Description of Artificial Sequence: Synthetic oligonucleotide
gguagaucagaaucauccu

SEQ ID NO: 1766357 - RNA, 19 nt, Artificial Sequence
  Description of Artificial Sequence: Synthetic oligonucleotide
ggcaaaugacagguacucc

SEQ ID NO: 1766358 - RNA, 19 nt, Artificial Sequence
  Description of Artificial Sequence: Synthetic oligonucleotide
aguggagggaaaggguuuu

SEQ ID NO: 1766359 - RNA, 19 nt, Artificial Sequence
  Description of Artificial Sequence: Synthetic oligonucleotide
ggcuucauacaccugcugu

SEQ ID NO: 1766360 - RNA, 19 nt, Artificial Sequence
  Description of Artificial Sequence: Synthetic oligonucleotide
cuaugccagcacgaguguc

SEQ ID NO: 1766361 - RNA, 19 nt, Artificial Sequence
  Description of Artificial Sequence: Synthetic oligonucleotide
gguuuugcuugcugacaac

SEQ ID NO: 1766362 - RNA, 19 nt, Artificial Sequence
  Description of Artificial Sequence: Synthetic oligonucleotide
aggccaucuggagccgugg

SEQ ID NO: 1766363 - RNA, 19 nt, Artificial Sequence
  Description of Artificial Sequence: Synthetic oligonucleotide
uagugucaauggcuucaua

SEQ ID NO: 1766364 - RNA, 19 nt, Artificial Sequence
  Description of Artificial Sequence: Synthetic oligonucleotide
gagaggccaucuggagccg

SEQ ID NO: 1766365 - RNA, 19 nt, Artificial Sequence
  Description of Artificial Sequence: Synthetic oligonucleotide
ggucaagugcuacugcaua

SEQ ID NO: 1766366 - RNA, 19 nt, Artificial Sequence
  Description of Artificial Sequence: Synthetic oligonucleotide
gguuggcaacaugagggug

SEQ ID NO: 1766367 - RNA, 19 nt, Artificial Sequence
  Description of Artificial Sequence: Synthetic oligonucleotide
gcucaucaggagcucagca

SEQ ID NO: 1766368 - RNA, 19 nt, Artificial Sequence
  Description of Artificial Sequence: Synthetic oligonucleotide
caugugaccgagcagcauu

SEQ ID NO: 1766369 - RNA, 19 nt, Artificial Sequence
  Description of Artificial Sequence: Synthetic oligonucleotide
augugacccucugugcagu

SEQ ID NO: 1766370 - RNA, 19 nt, Artificial Sequence
  Description of Artificial Sequence: Synthetic oligonucleotide
gaggccaucuggagccgug

SEQ ID NO: 1766371 - RNA, 19 nt, Artificial Sequence
  Description of Artificial Sequence: Synthetic oligonucleotide
uggagccguggguuggcaa

SEQ ID NO: 1766372 - RNA, 19 nt, Artificial Sequence
  Description of Artificial Sequence: Synthetic oligonucleotide
caguaugcacuggacuuca

SEQ ID NO: 1766373 - RNA, 19 nt, Artificial Sequence
  Description of Artificial Sequence: Synthetic oligonucleotide
ucuccaggaugaggaaaau

SEQ ID NO: 1766374 - RNA, 19 nt, Artificial Sequence
  Description of Artificial Sequence: Synthetic oligonucleotide
ugugacccucugugcagua

SEQ ID NO: 1766375 - RNA, 19 nt, Artificial Sequence
  Description of Artificial Sequence: Synthetic oligonucleotide
cccaacauaguauuuguau

SEQ ID NO: 1766376 - RNA, 19 nt, Artificial Sequence
  Description of Artificial Sequence: Synthetic oligonucleotide
uccccacggcauagguaca

SEQ ID NO: 1766377 - RNA, 19 nt, Artificial Sequence
  Description of Artificial Sequence: Synthetic oligonucleotide
cucugugcaguacuauagu

SEQ ID NO: 1766378 - RNA, 19 nt, Artificial Sequence
  Description of Artificial Sequence: Synthetic oligonucleotide
gccuuggucacuuccgaaa

SEQ ID NO: 1766379 - RNA, 19 nt, Artificial Sequence
  Description of Artificial Sequence: Synthetic oligonucleotide
acauugccuuacgcccaac

SEQ ID NO: 1766380 - RNA, 19 nt, Artificial Sequence
  Description of Artificial Sequence: Synthetic oligonucleotide
ccguggguuggcaacauga

SEQ ID NO: 1766381 - RNA, 19 nt, Artificial Sequence
  Description of Artificial Sequence: Synthetic oligonucleotide
ggagggaaaggguuuugcu

SEQ ID NO: 1766382 - RNA, 19 nt, Artificial Sequence
  Description of Artificial Sequence: Synthetic oligonucleotide
gcaacaugagggugcuuga

SEQ ID NO: 1766383 - RNA, 19 nt, Artificial Sequence
  Description of Artificial Sequence: Synthetic oligonucleotide
aggagggagggaggacauc

SEQ ID NO: 1766384 - RNA, 19 nt, Artificial Sequence
  Description of Artificial Sequence: Synthetic oligonucleotide
gccucuaugaagucgugau

SEQ ID NO: 1766385 - RNA, 19 nt, Artificial Sequence
  Description of Artificial Sequence: Synthetic oligonucleotide
ggacuaucacugucuggca

SEQ ID NO: 1766386 - RNA, 19 nt, Artificial Sequence
  Description of Artificial Sequence: Synthetic oligonucleotide
agcugucaauggcucugau

SEQ ID NO: 1766387 - RNA, 19 nt, Artificial Sequence
  Description of Artificial Sequence: Synthetic oligonucleotide
ggcauagguacaccuuaaa

SEQ ID NO: 1766388 - RNA, 19 nt, Artificial Sequence
  Description of Artificial Sequence: Synthetic oligonucleotide
cacuuccgaaaacugcaua

SEQ ID NO: 1766389 - RNA, 19 nt, Artificial Sequence
  Description of Artificial Sequence: Synthetic oligonucleotide
cacgagugucacuggcaca

SEQ ID NO: 1766390 - RNA, 19 nt, Artificial Sequence
  Description of Artificial Sequence: Synthetic oligonucleotide
gaugcugaugggagaugua

SEQ ID NO: 1766391 - RNA, 19 nt, Artificial Sequence
  Description of Artificial Sequence: Synthetic oligonucleotide
ggaguuuguugaucuuaaa

SEQ ID NO: 1766392 - RNA, 19 nt, Artificial Sequence
  Description of Artificial Sequence: Synthetic oligonucleotide
gcuugcuugaagucacugu

SEQ ID NO: 1766393 - RNA, 19 nt, Artificial Sequence
  Description of Artificial Sequence: Synthetic oligonucleotide
ccucagaaaugauuggacu

SEQ ID NO: 1766394 - RNA, 19 nt, Artificial Sequence
  Description of Artificial Sequence: Synthetic oligonucleotide
ccuggaaugcccucagaaa

SEQ ID NO: 1766395 - RNA, 19 nt, Artificial Sequence
  Description of Artificial Sequence: Synthetic oligonucleotide
cgauggucggcaugugacc

SEQ ID NO: 1766396 - RNA, 19 nt, Artificial Sequence
  Description of Artificial Sequence: Synthetic oligonucleotide
ccuuacgcccaacauagua

SEQ ID NO: 1766397 - RNA, 19 nt, Artificial Sequence
  Description of Artificial Sequence: Synthetic oligonucleotide
gcugucaauggcucugaua

SEQ ID NO: 1766398 - RNA, 19 nt, Artificial Sequence
  Description of Artificial Sequence: Synthetic oligonucleotide
gcccucagaaaugauugga

SEQ ID NO: 1766399 - RNA, 19 nt, Artificial Sequence
  Description of Artificial Sequence: Synthetic oligonucleotide
ccucagcuugcuugaaguc

SEQ ID NO: 1766400 - RNA, 19 nt, Artificial Sequence
  Description of Artificial Sequence: Synthetic oligonucleotide
ggcuggagcgauggcagug

SEQ ID NO: 1766401 - RNA, 19 nt, Artificial Sequence
  Description of Artificial Sequence: Synthetic oligonucleotide
cacuggcacagacucggaa

SEQ ID NO: 1766402 - RNA, 19 nt, Artificial Sequence
  Description of Artificial Sequence: Synthetic oligonucleotide
ugugaccgagcagcauuuu

SEQ ID NO: 1766403 - RNA, 19 nt, Artificial Sequence
  Description of Artificial Sequence: Synthetic oligonucleotide
gccgcaaacauuucaucau

SEQ ID NO: 1766404 - RNA, 19 nt, Artificial Sequence
  Description of Artificial Sequence: Synthetic oligonucleotide
ggccaguaugcacuggacu

SEQ ID NO: 1766405 - RNA, 19 nt, Artificial Sequence
  Description of Artificial Sequence: Synthetic oligonucleotide
agaggccaucuggagccgu

SEQ ID NO: 1766406 - RNA, 19 nt, Artificial Sequence
  Description of Artificial Sequence: Synthetic oligonucleotide
gugcuacugcauacaugac

SEQ ID NO: 1766407 - RNA, 19 nt, Artificial Sequence
  Description of Artificial Sequence: Synthetic oligonucleotide
acccucugugcaguacuau

SEQ ID NO: 1766408 - RNA, 19 nt, Artificial Sequence
  Description of Artificial Sequence: Synthetic oligonucleotide
guauaucaaguuggccagu

SEQ ID NO: 1766409 - RNA, 19 nt, Artificial Sequence
  Description of Artificial Sequence: Synthetic oligonucleotide
augggagauguagccuuua

SEQ ID NO: 1766410 - RNA, 19 nt, Artificial Sequence
  Description of Artificial Sequence: Synthetic oligonucleotide
gacccucugugcaguacua

SEQ ID NO: 1766411 - RNA, 19 nt, Artificial Sequence
  Description of Artificial Sequence: Synthetic oligonucleotide
ggguuggcaacaugagggu

SEQ ID NO: 1766412 - RNA, 19 nt, Artificial Sequence
  Description of Artificial Sequence: Synthetic oligonucleotide
ggacuucaucaauguccac

SEQ ID NO: 1766413 - RNA, 19 nt, Artificial Sequence
  Description of Artificial Sequence: Synthetic oligonucleotide
ugcccucacugacggccuu

SEQ ID NO: 1766414 - RNA, 19 nt, Artificial Sequence
  Description of Artificial Sequence: Synthetic oligonucleotide
gcgaaggucaagugcuacu

SEQ ID NO: 1766415 - RNA, 19 nt, Artificial Sequence
  Description of Artificial Sequence: Synthetic oligonucleotide
caccuuaaaugagccgcaa

SEQ ID NO: 1766416 - RNA, 19 nt, Artificial Sequence
  Description of Artificial Sequence: Synthetic oligonucleotide
aguaugcacuggacuucau

SEQ ID NO: 1766417 - RNA, 19 nt, Artificial Sequence
  Description of Artificial Sequence: Synthetic oligonucleotide
gcauaaggugguauuuccu

SEQ ID NO: 1766418 - RNA, 19 nt, Artificial Sequence
  Description of Artificial Sequence: Synthetic oligonucleotide
ggcaugugaccgagcagca

SEQ ID NO: 1766419 - RNA, 19 nt, Artificial Sequence
  Description of Artificial Sequence: Synthetic oligonucleotide
cacggcauagguacaccuu

SEQ ID NO: 1766420 - RNA, 19 nt, Artificial Sequence
  Description of Artificial Sequence: Synthetic oligonucleotide
cgccucguugagcagcagc

SEQ ID NO: 1766421 - RNA, 19 nt, Artificial Sequence
  Description of Artificial Sequence: Synthetic oligonucleotide
ugacggccuuggucacuuc

SEQ ID NO: 1766422 - RNA, 19 nt, Artificial Sequence
  Description of Artificial Sequence: Synthetic oligonucleotide
augcgaaggucaagugcua

SEQ ID NO: 1766423 - RNA, 19 nt, Artificial Sequence
  Description of Artificial Sequence: Synthetic oligonucleotide
ccucaggagcucgaugguc

SEQ ID NO: 1766424 - RNA, 19 nt, Artificial Sequence
  Description of Artificial Sequence: Synthetic oligonucleotide
ccgcaaacauuucaucaua

SEQ ID NO: 1766425 - RNA, 19 nt, Artificial Sequence
  Description of Artificial Sequence: Synthetic oligonucleotide
acgccucuaugaagucgug

SEQ ID NO: 1766426 - RNA, 19 nt, Artificial Sequence
  Description of Artificial Sequence: Synthetic oligonucleotide
cuagugucaauggcuucau

SEQ ID NO: 1766427 - RNA, 19 nt, Artificial Sequence
  Description of Artificial Sequence: Synthetic oligonucleotide
ggaaaaugccacagcggau

SEQ ID NO: 1766428 - RNA, 19 nt, Artificial Sequence
  Description of Artificial Sequence: Synthetic oligonucleotide
cccucugugcaguacuaua

SEQ ID NO: 1766429 - RNA, 19 nt, Artificial Sequence
  Description of Artificial Sequence: Synthetic oligonucleotide
gaaugcccucagaaaugau

SEQ ID NO: 1766430 - RNA, 19 nt, Artificial Sequence
  Description of Artificial Sequence: Synthetic oligonucleotide
cccacggcauagguacacc

SEQ ID NO: 1766431 - RNA, 19 nt, Artificial Sequence
  Description of Artificial Sequence: Synthetic oligonucleotide
gcaucuagagauagcugau

SEQ ID NO: 1766432 - RNA, 19 nt, Artificial Sequence
  Description of Artificial Sequence: Synthetic oligonucleotide
agccguggguuggcaacau

SEQ ID NO: 1766433 - RNA, 19 nt, Artificial Sequence
  Description of Artificial Sequence: Synthetic oligonucleotide
cacuggcagcagguagauc

SEQ ID NO: 1766434 - RNA, 19 nt, Artificial Sequence
  Description of Artificial Sequence: Synthetic oligonucleotide
cuaucacugucuggcacuu

SEQ ID NO: 1766435 - RNA, 19 nt, Artificial Sequence
  Description of Artificial Sequence: Synthetic oligonucleotide
ccccacggcauagguacac

SEQ ID NO: 1766436 - RNA, 19 nt, Artificial Sequence
  Description of Artificial Sequence: Synthetic oligonucleotide
ggaaaggguuuugcuugcu

SEQ ID NO: 1766437 - RNA, 19 nt, Artificial Sequence
  Description of Artificial Sequence: Synthetic oligonucleotide
cuggagccguggguuggca

SEQ ID NO: 1766438 - RNA, 19 nt, Artificial Sequence
  Description of Artificial Sequence: Synthetic oligonucleotide
ccacggcauagguacaccu

SEQ ID NO: 1766439 - RNA, 19 nt, Artificial Sequence
  Description of Artificial Sequence: Synthetic oligonucleotide
ggucggcaugugaccgagc

SEQ ID NO: 1766440 - RNA, 19 nt, Artificial Sequence
  Description of Artificial Sequence: Synthetic oligonucleotide
ccucuaugccagcacgagu

SEQ ID NO: 1766441 - RNA, 19 nt, Artificial Sequence
  Description of Artificial Sequence: Synthetic oligonucleotide
gcuguagguacugguuaau

SEQ ID NO: 1766442 - RNA, 19 nt, Artificial Sequence
  Description of Artificial Sequence: Synthetic oligonucleotide
gcaguacuauagucaucuu

SEQ ID NO: 1766443 - RNA, 19 nt, Artificial Sequence
  Description of Artificial Sequence: Synthetic oligonucleotide
gccuuacgcccaacauagu

SEQ ID NO: 1766444 - RNA, 19 nt, Artificial Sequence
  Description of Artificial Sequence: Synthetic oligonucleotide
cgagugucacuggcacaga

SEQ ID NO: 1766445 - RNA, 19 nt, Artificial Sequence
  Description of Artificial Sequence: Synthetic oligonucleotide
cguugagcagcagcagauu

SEQ ID NO: 1766446 - RNA, 19 nt, Artificial Sequence
  Description of Artificial Sequence: Synthetic oligonucleotide
ucacaagaaaaccagcuuc

SEQ ID NO: 1766447 - RNA, 19 nt, Artificial Sequence
  Description of Artificial Sequence: Synthetic oligonucleotide
gaaaaccagcuucagauca

SEQ ID NO: 1766448 - RNA, 19 nt, Artificial Sequence
  Description of Artificial Sequence: Synthetic oligonucleotide
auguccuccucuuugagca

SEQ ID NO: 1766449 - RNA, 19 nt, Artificial Sequence
  Description of Artificial Sequence: Synthetic oligonucleotide
agaaaaccagcuucagauc

SEQ ID NO: 1766450 - RNA, 19 nt, Artificial Sequence
  Description of Artificial Sequence: Synthetic oligonucleotide
ucuuugagcagccgcuucc

SEQ ID NO: 1766451 - RNA, 19 nt, Artificial Sequence
  Description of Artificial Sequence: Synthetic oligonucleotide
accagcuucagaucagguc

SEQ ID NO: 1766452 - RNA, 19 nt, Artificial Sequence
  Description of Artificial Sequence: Synthetic oligonucleotide
uugagcagccgcuuccgcg

SEQ ID NO: 1766453 - RNA, 19 nt, Artificial Sequence
  Description of Artificial Sequence: Synthetic oligonucleotide
uucacaagaaaaccagcuu

SEQ ID NO: 1766454 - RNA, 19 nt, Artificial Sequence
  Description of Artificial Sequence: Synthetic oligonucleotide
uccucuuugagcagccgcu

SEQ ID NO: 1766455 - RNA, 19 nt, Artificial Sequence
  Description of Artificial Sequence: Synthetic oligonucleotide
aaaaccagcuucagaucag

SEQ ID NO: 1766456 - RNA, 19 nt, Artificial Sequence
  Description of Artificial Sequence: Synthetic oligonucleotide
ugagcagccgcuuccgcgc

SEQ ID NO: 1766457 - RNA, 19 nt, Artificial Sequence
  Description of Artificial Sequence: Synthetic oligonucleotide
ucauguccuccucuuugag

SEQ ID NO: 1766458 - RNA, 19 nt, Artificial Sequence
  Description of Artificial Sequence: Synthetic oligonucleotide
cauguccuccucuuugagc

SEQ ID NO: 1766459 - RNA, 19 nt, Artificial Sequence
  Description of Artificial Sequence: Synthetic oligonucleotide
cuccucuuugagcagccgc

SEQ ID NO: 1766460 - RNA, 19 nt, Artificial Sequence
  Description of Artificial Sequence: Synthetic oligonucleotide
uuugagcagccgcuuccgc

SEQ ID NO: 1766461 - RNA, 19 nt, Artificial Sequence
  Description of Artificial Sequence: Synthetic oligonucleotide
ggucauguccuccucuuug

SEQ ID NO: 1766462 - RNA, 19 nt, Artificial Sequence
  Description of Artificial Sequence: Synthetic oligonucleotide
caagaaaaccagcuucaga

SEQ ID NO: 1766463 - RNA, 19 nt, Artificial Sequence
  Description of Artificial Sequence: Synthetic oligonucleotide
ccagcuucagaucagguca

SEQ ID NO: 1766464 - RNA, 19 nt, Artificial Sequence
  Description of Artificial Sequence: Synthetic oligonucleotide
gagcccgacgucgccaucg

SEQ ID NO: 1766465 - RNA, 19 nt, Artificial Sequence
  Description of Artificial Sequence: Synthetic oligonucleotide
cagcuucagaucaggucag

SEQ ID NO: 1766466 - RNA, 19 nt, Artificial Sequence
  Description of Artificial Sequence: Synthetic oligonucleotide
cccgacgucgccaucgugg

SEQ ID NO: 1766467 - RNA, 19 nt, Artificial Sequence
  Description of Artificial Sequence: Synthetic oligonucleotide
uguccuccucuuugagcag

SEQ ID NO: 1766468 - RNA, 19 nt, Artificial Sequence
  Description of Artificial Sequence: Synthetic oligonucleotide
uuccgcgcggagcccgacg

SEQ ID NO: 1766469 - RNA, 19 nt, Artificial Sequence
  Description of Artificial Sequence: Synthetic oligonucleotide
uccgcgcggagcccgacgu

SEQ ID NO: 1766470 - RNA, 19 nt, Artificial Sequence
  Description of Artificial Sequence: Synthetic oligonucleotide
aaccagcuucagaucaggu

SEQ ID NO: 1766471 - RNA, 19 nt, Artificial Sequence
  Description of Artificial Sequence: Synthetic oligonucleotide
agccgcuuccgcgcggagc

SEQ ID NO: 1766472 - RNA, 19 nt, Artificial Sequence
  Description of Artificial Sequence: Synthetic oligonucleotide
gagcagccgcuuccgcgcg

SEQ ID NO: 1766473 - RNA, 19 nt, Artificial Sequence
  Description of Artificial Sequence: Synthetic oligonucleotide
gccgcuuccgcgcggagcc

SEQ ID NO: 1766474 - RNA, 19 nt, Artificial Sequence
  Description of Artificial Sequence: Synthetic oligonucleotide
uggucauguccuccucuuu

SEQ ID NO: 1766475 - RNA, 19 nt, Artificial Sequence
  Description of Artificial Sequence: Synthetic oligonucleotide
caccuuggucauguccucc

SEQ ID NO: 1766476 - RNA, 19 nt, Artificial Sequence
  Description of Artificial Sequence: Synthetic oligonucleotide
agcagccgcuuccgcgcgg

SEQ ID NO: 1766477 - RNA, 19 nt, Artificial Sequence
  Description of Artificial Sequence: Synthetic oligonucleotide
ccgacgucgccaucguggc

SEQ ID NO: 1766478 - RNA, 19 nt, Artificial Sequence
  Description of Artificial Sequence: Synthetic oligonucleotide
agcccgacgucgccaucgu

SEQ ID NO: 1766479 - RNA, 19 nt, Artificial Sequence
  Description of Artificial Sequence: Synthetic oligonucleotide
cgcgcggagcccgacgucg

SEQ ID NO: 1766480 - RNA, 19 nt, Artificial Sequence
  Description of Artificial Sequence: Synthetic oligonucleotide
ccuccucuuugagcagccg

SEQ ID NO: 1766481 - RNA, 19 nt, Artificial Sequence
  Description of Artificial Sequence: Synthetic oligonucleotide
cuuccgcgcggagcccgac

SEQ ID NO: 1766482 - RNA, 19 nt, Artificial Sequence
  Description of Artificial Sequence: Synthetic oligonucleotide
cagccgcuuccgcgcggag

SEQ ID NO: 1766483 - RNA, 19 nt, Artificial Sequence
  Description of Artificial Sequence: Synthetic oligonucleotide
gcccgacgucgccaucgug

SEQ ID NO: 1766484 - RNA, 19 nt, Artificial Sequence
  Description of Artificial Sequence: Synthetic oligonucleotide
gcagccgcuuccgcgcgga

SEQ ID NO: 1766485 - RNA, 19 nt, Artificial Sequence
  Description of Artificial Sequence: Synthetic oligonucleotide
cgcuuccgcgcggagcccg

SEQ ID NO: 1766486 - RNA, 19 nt, Artificial Sequence
  Description of Artificial Sequence: Synthetic oligonucleotide
gcggagcccgacgucgcca

SEQ ID NO: 1766487 - RNA, 19 nt, Artificial Sequence
  Description of Artificial Sequence: Synthetic oligonucleotide
ggagcccgacgucgccauc

SEQ ID NO: 1766488 - RNA, 19 nt, Artificial Sequence
  Description of Artificial Sequence: Synthetic oligonucleotide
gcgcggagcccgacgucgc

SEQ ID NO: 1766489 - RNA, 19 nt, Artificial Sequence
  Description of Artificial Sequence: Synthetic oligonucleotide
cgcggagcccgacgucgcc

SEQ ID NO: 1766490 - RNA, 19 nt, Artificial Sequence
  Description of Artificial Sequence: Synthetic oligonucleotide
gcuuccgcgcggagcccga

SEQ ID NO: 1766491 - RNA, 19 nt, Artificial Sequence
  Description of Artificial Sequence: Synthetic oligonucleotide
ccgcgcggagcccgacguc

SEQ ID NO: 1766492 - RNA, 19 nt, Artificial Sequence
  Description of Artificial Sequence: Synthetic oligonucleotide
ccgcuuccgcgcggagccc

SEQ ID NO: 1766493 - RNA, 19 nt, Artificial Sequence
  Description of Artificial Sequence: Synthetic oligonucleotide
cggagcccgacgucgccau

SEQ ID NO: 1766494 - RNA, 19 nt, Artificial Sequence
  Description of Artificial Sequence: Synthetic oligonucleotide
cuaagauccaauuagaccc

SEQ ID NO: 1766495 - RNA, 19 nt, Artificial Sequence
  Description of Artificial Sequence: Synthetic oligonucleotide
cuuaaugcugcuaagaucc

SEQ ID NO: 1766496 - RNA, 19 nt, Artificial Sequence
  Description of Artificial Sequence: Synthetic oligonucleotide
aaacaaaggugguagauuc

SEQ ID NO: 1766497 - RNA, 19 nt, Artificial Sequence
  Description of Artificial Sequence: Synthetic oligonucleotide
aacauugucucgcacauuc

SEQ ID NO: 1766498 - RNA, 19 nt, Artificial Sequence
  Description of Artificial Sequence: Synthetic oligonucleotide
uccaauuagacccaguccc

SEQ ID NO: 1766499 - RNA, 19 nt, Artificial Sequence
  Description of Artificial Sequence: Synthetic oligonucleotide
aaguguaguagccagaaca

SEQ ID NO: 1766500 - RNA, 19 nt, Artificial Sequence
  Description of Artificial Sequence: Synthetic oligonucleotide
aacaaccucagcucgacuc

SEQ ID NO: 1766501 - RNA, 19 nt, Artificial Sequence
  Description of Artificial Sequence: Synthetic oligonucleotide
uuaauugcuucuuagucca

SEQ ID NO: 1766502 - RNA, 19 nt, Artificial Sequence
  Description of Artificial Sequence: Synthetic oligonucleotide
ugagucacuacaaacuagc

SEQ ID NO: 1766503 - RNA, 19 nt, Artificial Sequence
  Description of Artificial Sequence: Synthetic oligonucleotide
aucccuaaggccuuguugg

SEQ ID NO: 1766504 - RNA, 19 nt, Artificial Sequence
  Description of Artificial Sequence: Synthetic oligonucleotide
ugcugcauacuuaaagagg

SEQ ID NO: 1766505 - RNA, 19 nt, Artificial Sequence
  Description of Artificial Sequence: Synthetic oligonucleotide
ucugaaaagaguagcuuug

SEQ ID NO: 1766506 - RNA, 19 nt, Artificial Sequence
  Description of Artificial Sequence: Synthetic oligonucleotide
aacuagcucauguacagcu

SEQ ID NO: 1766507 - RNA, 19 nt, Artificial Sequence
  Description of Artificial Sequence: Synthetic oligonucleotide
uguaguagccagaacaccu

SEQ ID NO: 1766508 - RNA, 19 nt, Artificial Sequence
  Description of Artificial Sequence: Synthetic oligonucleotide
gauccauagagauggcugg

SEQ ID NO: 1766509 - RNA, 19 nt, Artificial Sequence
  Description of Artificial Sequence: Synthetic oligonucleotide
aucauuauguuccaagggu

SEQ ID NO: 1766510 - RNA, 19 nt, Artificial Sequence
  Description of Artificial Sequence: Synthetic oligonucleotide
caucuuuucaaccauccag

SEQ ID NO: 1766511 - RNA, 19 nt, Artificial Sequence
  Description of Artificial Sequence: Synthetic oligonucleotide
uacaaacuagcucauguac

SEQ ID NO: 1766512 - RNA, 19 nt, Artificial Sequence
  Description of Artificial Sequence: Synthetic oligonucleotide
acuacaaacuagcucaugu

SEQ ID NO: 1766513 - RNA, 19 nt, Artificial Sequence
  Description of Artificial Sequence: Synthetic oligonucleotide
gacaaaggauuucagcucc

SEQ ID NO: 1766514 - RNA, 19 nt, Artificial Sequence
  Description of Artificial Sequence: Synthetic oligonucleotide
agucacuacaaacuagcuc

SEQ ID NO: 1766515 - RNA, 19 nt, Artificial Sequence
  Description of Artificial Sequence: Synthetic oligonucleotide
guuuaauugcuucuuaguc

SEQ ID NO: 1766516 - RNA, 19 nt, Artificial Sequence
  Description of Artificial Sequence: Synthetic oligonucleotide
caaacuagcucauguacag

SEQ ID NO: 1766517 - RNA, 19 nt, Artificial Sequence
  Description of Artificial Sequence: Synthetic oligonucleotide
acggaggagauccauagag

SEQ ID NO: 1766518 - RNA, 19 nt, Artificial Sequence
  Description of Artificial Sequence: Synthetic oligonucleotide
aauugcuucuuaguccaac

SEQ ID NO: 1766519 - RNA, 19 nt, Artificial Sequence
  Description of Artificial Sequence: Synthetic oligonucleotide
ucuuuucaaccauccaggg

SEQ ID NO: 1766520 - RNA, 19 nt, Artificial Sequence
  Description of Artificial Sequence: Synthetic oligonucleotide
gaaucaacugcucugcguc

SEQ ID NO: 1766521 - RNA, 19 nt, Artificial Sequence
  Description of Artificial Sequence: Synthetic oligonucleotide
aucuuuucaaccauccagg

SEQ ID NO: 1766522 - RNA, 19 nt, Artificial Sequence
  Description of Artificial Sequence: Synthetic oligonucleotide
aucugugaaacuugugguc

SEQ ID NO: 1766523 - RNA, 19 nt, Artificial Sequence
  Description of Artificial Sequence: Synthetic oligonucleotide
gauccaauuagacccaguc

SEQ ID NO: 1766524 - RNA, 19 nt, Artificial Sequence
  Description of Artificial Sequence: Synthetic oligonucleotide
cauacuuaaagaggugugg

SEQ ID NO: 1766525 - RNA, 19 nt, Artificial Sequence
  Description of Artificial Sequence: Synthetic oligonucleotide
aauuagacccaguccccag

SEQ ID NO: 1766526 - RNA, 19 nt, Artificial Sequence
  Description of Artificial Sequence: Synthetic oligonucleotide
auacuuaaagagguguggg

SEQ ID NO: 1766527 - RNA, 19 nt, Artificial Sequence
  Description of Artificial Sequence: Synthetic oligonucleotide
gguagauucauucagccga

SEQ ID NO: 1766528 - RNA, 19 nt, Artificial Sequence
  Description of Artificial Sequence: Synthetic oligonucleotide
agguaggccaucuuaccac

SEQ ID NO: 1766529 - RNA, 19 nt, Artificial Sequence
  Description of Artificial Sequence: Synthetic oligonucleotide
cuuaccaccaguugcccgc

SEQ ID NO: 1766530 - RNA, 19 nt, Artificial Sequence
  Description of Artificial Sequence: Synthetic oligonucleotide
uccucauugaugcuuggcu

SEQ ID NO: 1766531 - RNA, 19 nt, Artificial Sequence
  Description of Artificial Sequence: Synthetic oligonucleotide
uugauguagauucucccuc

SEQ ID NO: 1766532 - RNA, 19 nt, Artificial Sequence
  Description of Artificial Sequence: Synthetic oligonucleotide
ugguagauucauucagccg

SEQ ID NO: 1766533 - RNA, 19 nt, Artificial Sequence
  Description of Artificial Sequence: Synthetic oligonucleotide
aaacuagcucauguacagc

SEQ ID NO: 1766534 - RNA, 19 nt, Artificial Sequence
  Description of Artificial Sequence: Synthetic oligonucleotide
aguguaguagccagaacac

SEQ ID NO: 1766535 - RNA, 19 nt, Artificial Sequence
  Description of Artificial Sequence: Synthetic oligonucleotide
ugcuaagauccaauuagac

SEQ ID NO: 1766536 - RNA, 19 nt, Artificial Sequence
  Description of Artificial Sequence: Synthetic oligonucleotide
ugcuucuuaguccaacaac

SEQ ID NO: 1766537 - RNA, 19 nt, Artificial Sequence
  Description of Artificial Sequence: Synthetic oligonucleotide
acuuaaagaggugugggug

SEQ ID NO: 1766538 - RNA, 19 nt, Artificial Sequence
  Description of Artificial Sequence: Synthetic oligonucleotide
aggugguagauucauucag

SEQ ID NO: 1766539 - RNA, 19 nt, Artificial Sequence
  Description of Artificial Sequence: Synthetic oligonucleotide
uccauauacuuccgcaucu

SEQ ID NO: 1766540 - RNA, 19 nt, Artificial Sequence
  Description of Artificial Sequence: Synthetic oligonucleotide
cuuuucaaccauccagggg

SEQ ID NO: 1766541 - RNA, 19 nt, Artificial Sequence
  Description of Artificial Sequence: Synthetic oligonucleotide
ugcauacuuaaagaggugu

SEQ ID NO: 1766542 - RNA, 19 nt, Artificial Sequence
  Description of Artificial Sequence: Synthetic oligonucleotide
cuguaaucaucacuggcag

SEQ ID NO: 1766543 - RNA, 19 nt, Artificial Sequence
  Description of Artificial Sequence: Synthetic oligonucleotide
uaagauccaauuagaccca

SEQ ID NO: 1766544 - RNA, 19 nt, Artificial Sequence
  Description of Artificial Sequence: Synthetic oligonucleotide
aguugcccgcauaugaugc

SEQ ID NO: 1766545 - RNA, 19 nt, Artificial Sequence
  Description of Artificial Sequence: Synthetic oligonucleotide
ucauuugacaggacguguc

SEQ ID NO: 1766546 - RNA, 19 nt, Artificial Sequence
  Description of Artificial Sequence: Synthetic oligonucleotide
cucuguaaucaucacuggc

SEQ ID NO: 1766547 - RNA, 19 nt, Artificial Sequence
  Description of Artificial Sequence: Synthetic oligonucleotide
caaggguucgugagaaccg

SEQ ID NO: 1766548 - RNA, 19 nt, Artificial Sequence
  Description of Artificial Sequence: Synthetic oligonucleotide
ucuuaccaccaguugcccg

SEQ ID NO: 1766549 - RNA, 19 nt, Artificial Sequence
  Description of Artificial Sequence: Synthetic oligonucleotide
cugcugcauacuuaaagag

SEQ ID NO: 1766550 - RNA, 19 nt, Artificial Sequence
  Description of Artificial Sequence: Synthetic oligonucleotide
cugcaagacagcacggagg

SEQ ID NO: 1766551 - RNA, 19 nt, Artificial Sequence
  Description of Artificial Sequence: Synthetic oligonucleotide
ugaaucaacugcucugcgu

SEQ ID NO: 1766552 - RNA, 19 nt, Artificial Sequence
  Description of Artificial Sequence: Synthetic oligonucleotide
ugucucgcacauucaaugc

SEQ ID NO: 1766553 - RNA, 19 nt, Artificial Sequence
  Description of Artificial Sequence: Synthetic oligonucleotide
uucucggcgaauugguuca

SEQ ID NO: 1766554 - RNA, 19 nt, Artificial Sequence
  Description of Artificial Sequence: Synthetic oligonucleotide
cauuauguuccaaggguuc

SEQ ID NO: 1766555 - RNA, 19 nt, Artificial Sequence
  Description of Artificial Sequence: Synthetic oligonucleotide
agauccauagagauggcug

SEQ ID NO: 1766556 - RNA, 19 nt, Artificial Sequence
  Description of Artificial Sequence: Synthetic oligonucleotide
uacuuaaagaggugugggu

SEQ ID NO: 1766557 - RNA, 19 nt, Artificial Sequence
  Description of Artificial Sequence: Synthetic oligonucleotide
uuccgcaucuuuucaacca

SEQ ID NO: 1766558 - RNA, 19 nt, Artificial Sequence
  Description of Artificial Sequence: Synthetic oligonucleotide
aaggguucgugagaaccgg

SEQ ID NO: 1766559 - RNA, 19 nt, Artificial Sequence
  Description of Artificial Sequence: Synthetic oligonucleotide
agcuuaaugcugcuaagau

SEQ ID NO: 1766560 - RNA, 19 nt, Artificial Sequence
  Description of Artificial Sequence: Synthetic oligonucleotide
ugauguagauucucccucu

SEQ ID NO: 1766561 - RNA, 19 nt, Artificial Sequence
  Description of Artificial Sequence: Synthetic oligonucleotide
cauuugacaggacgugucc

SEQ ID NO: 1766562 - RNA, 19 nt, Artificial Sequence
  Description of Artificial Sequence: Synthetic oligonucleotide
cugaggaucugcugcauac

SEQ ID NO: 1766563 - RNA, 19 nt, Artificial Sequence
  Description of Artificial Sequence: Synthetic oligonucleotide
agugagucacuacaaacua

SEQ ID NO: 1766564 - RNA, 19 nt, Artificial Sequence
  Description of Artificial Sequence: Synthetic oligonucleotide
uguaaucaucacuggcagc

SEQ ID NO: 1766565 - RNA, 19 nt, Artificial Sequence
  Description of Artificial Sequence: Synthetic oligonucleotide
ugaaacuuguggucaucug

SEQ ID NO: 1766566 - RNA, 19 nt, Artificial Sequence
  Description of Artificial Sequence: Synthetic oligonucleotide
ucaaucuggguauuacuuu

SEQ ID NO: 1766567 - RNA, 19 nt, Artificial Sequence
  Description of Artificial Sequence: Synthetic oligonucleotide
agcuagccagugcuugucc

SEQ ID NO: 1766568 - RNA, 19 nt, Artificial Sequence
  Description of Artificial Sequence: Synthetic oligonucleotide
gauggccucagccggucgg

SEQ ID NO: 1766569 - RNA, 19 nt, Artificial Sequence
  Description of Artificial Sequence: Synthetic oligonucleotide
ggcgaauugguucacaaga

SEQ ID NO: 1766570 - RNA, 19 nt, Artificial Sequence
  Description of Artificial Sequence: Synthetic oligonucleotide
uuagacccaguccccagga

SEQ ID NO: 1766571 - RNA, 19 nt, Artificial Sequence
  Description of Artificial Sequence: Synthetic oligonucleotide
acaacaaccucagcucgac

SEQ ID NO: 1766572 - RNA, 19 nt, Artificial Sequence
  Description of Artificial Sequence: Synthetic oligonucleotide
guucgugagaaccggcugc

SEQ ID NO: 1766573 - RNA, 19 nt, Artificial Sequence
  Description of Artificial Sequence: Synthetic oligonucleotide
ucuccauauacuuccgcau

SEQ ID NO: 1766574 - RNA, 19 nt, Artificial Sequence
  Description of Artificial Sequence: Synthetic oligonucleotide
cuucucggcgaauugguuc

SEQ ID NO: 1766575 - RNA, 19 nt, Artificial Sequence
  Description of Artificial Sequence: Synthetic oligonucleotide
cacgcuugauuccuggaag

SEQ ID NO: 1766576 - RNA, 19 nt, Artificial Sequence
  Description of Artificial Sequence: Synthetic oligonucleotide
ugcccggucauuugacagg

SEQ ID NO: 1766577 - RNA, 19 nt, Artificial Sequence
  Description of Artificial Sequence: Synthetic oligonucleotide
ugaugcuuggcugcaagac

SEQ ID NO: 1766578 - RNA, 19 nt, Artificial Sequence
  Description of Artificial Sequence: Synthetic oligonucleotide
caggacguguccaggaggc

SEQ ID NO: 1766579 - RNA, 19 nt, Artificial Sequence
  Description of Artificial Sequence: Synthetic oligonucleotide
acaaacuagcucauguaca

SEQ ID NO: 1766580 - RNA, 19 nt, Artificial Sequence
  Description of Artificial Sequence: Synthetic oligonucleotide
gugagaaccggcugccccg

SEQ ID NO: 1766581 - RNA, 19 nt, Artificial Sequence
  Description of Artificial Sequence: Synthetic oligonucleotide
gacaggacguguccaggag

SEQ ID NO: 1766582 - RNA, 19 nt, Artificial Sequence
  Description of Artificial Sequence: Synthetic oligonucleotide
guucaugggucaaucuggg

SEQ ID NO: 1766583 - RNA, 19 nt, Artificial Sequence
  Description of Artificial Sequence: Synthetic oligonucleotide
acaaccucagcucgacuca

SEQ ID NO: 1766584 - RNA, 19 nt, Artificial Sequence
  Description of Artificial Sequence: Synthetic oligonucleotide
cauucagccgagcuggguc

SEQ ID NO: 1766585 - RNA, 19 nt, Artificial Sequence
  Description of Artificial Sequence: Synthetic oligonucleotide
aggaggccgaccuuuccuc

SEQ ID NO: 1766586 - RNA, 19 nt, Artificial Sequence
  Description of Artificial Sequence: Synthetic oligonucleotide
gucuccauauacuuccgca

SEQ ID NO: 1766587 - RNA, 19 nt, Artificial Sequence
  Description of Artificial Sequence: Synthetic oligonucleotide
ugcucggugucgccagucg

SEQ ID NO: 1766588 - RNA, 19 nt, Artificial Sequence
  Description of Artificial Sequence: Synthetic oligonucleotide
caagauuuugguuuccaua

SEQ ID NO: 1766589 - RNA, 19 nt, Artificial Sequence
  Description of Artificial Sequence: Synthetic oligonucleotide
uuaaagaggugugggugcu

SEQ ID NO: 1766590 - RNA, 19 nt, Artificial Sequence
  Description of Artificial Sequence: Synthetic oligonucleotide
uggcucgagaccccaaaac

SEQ ID NO: 1766591 - RNA, 19 nt, Artificial Sequence
  Description of Artificial Sequence: Synthetic oligonucleotide
uauguuccaaggguucgug

SEQ ID NO: 1766592 - RNA, 19 nt, Artificial Sequence
  Description of Artificial Sequence: Synthetic oligonucleotide
cucgcacauucaaugcugc

SEQ ID NO: 1766593 - RNA, 19 nt, Artificial Sequence
  Description of Artificial Sequence: Synthetic oligonucleotide
cugggugcucuucagugag

SEQ ID NO: 1766594 - RNA, 19 nt, Artificial Sequence
  Description of Artificial Sequence: Synthetic oligonucleotide
cugaaucaacugcucugcg

SEQ ID NO: 1766595 - RNA, 19 nt, Artificial Sequence
  Description of Artificial Sequence: Synthetic oligonucleotide
uggaucugugaaacuugug

SEQ ID NO: 1766596 - RNA, 19 nt, Artificial Sequence
  Description of Artificial Sequence: Synthetic oligonucleotide
aucuuaccaccaguugccc

SEQ ID NO: 1766597 - RNA, 19 nt, Artificial Sequence
  Description of Artificial Sequence: Synthetic oligonucleotide
uccucggugggacuccucu

SEQ ID NO: 1766598 - RNA, 19 nt, Artificial Sequence
  Description of Artificial Sequence: Synthetic oligonucleotide
gaauugguucacaagauuu

SEQ ID NO: 1766599 - RNA, 19 nt, Artificial Sequence
  Description of Artificial Sequence: Synthetic oligonucleotide
guagauucauucagccgag

SEQ ID NO: 1766600 - RNA, 19 nt, Artificial Sequence
  Description of Artificial Sequence: Synthetic oligonucleotide
cucggugucgccagucgcc

SEQ ID NO: 1766601 - RNA, 19 nt, Artificial Sequence
  Description of Artificial Sequence: Synthetic oligonucleotide
cuuggcugcaagacagcac

SEQ ID NO: 1766602 - RNA, 19 nt, Artificial Sequence
  Description of Artificial Sequence: Synthetic oligonucleotide
cuaaggccuuguuggcucg

SEQ ID NO: 1766603 - RNA, 19 nt, Artificial Sequence
  Description of Artificial Sequence: Synthetic oligonucleotide
cugcccggucauuugacag

SEQ ID NO: 1766604 - RNA, 19 nt, Artificial Sequence
  Description of Artificial Sequence: Synthetic oligonucleotide
gucgcccaacuccaggccg

SEQ ID NO: 1766605 - RNA, 19 nt, Artificial Sequence
  Description of Artificial Sequence: Synthetic oligonucleotide
uucgugagaaccggcugcc

SEQ ID NO: 1766606 - RNA, 19 nt, Artificial Sequence
  Description of Artificial Sequence: Synthetic oligonucleotide
ucggcgaauugguucacaa

SEQ ID NO: 1766607 - RNA, 19 nt, Artificial Sequence
  Description of Artificial Sequence: Synthetic oligonucleotide
uggcugcaagacagcacgg

SEQ ID NO: 1766608 - RNA, 19 nt, Artificial Sequence
  Description of Artificial Sequence: Synthetic oligonucleotide
aaccucagcucgacucagc

SEQ ID NO: 1766609 - RNA, 19 nt, Artificial Sequence
  Description of Artificial Sequence: Synthetic oligonucleotide
uacuuccgcaucuuuucaa

SEQ ID NO: 1766610 - RNA, 19 nt, Artificial Sequence
  Description of Artificial Sequence: Synthetic oligonucleotide
guaguagccagaacaccug

SEQ ID NO: 1766611 - RNA, 19 nt, Artificial Sequence
  Description of Artificial Sequence: Synthetic oligonucleotide
cuugauguagauucucccu

SEQ ID NO: 1766612 - RNA, 19 nt, Artificial Sequence
  Description of Artificial Sequence: Synthetic oligonucleotide
uguggucaucugagagcgg

SEQ ID NO: 1766613 - RNA, 19 nt, Artificial Sequence
  Description of Artificial Sequence: Synthetic oligonucleotide
gcuuaaugcugcuaagauc

SEQ ID NO: 1766614 - RNA, 19 nt, Artificial Sequence
  Description of Artificial Sequence: Synthetic oligonucleotide
gcacggaggagauccauag

SEQ ID NO: 1766615 - RNA, 19 nt, Artificial Sequence
  Description of Artificial Sequence: Synthetic oligonucleotide
cuuguuggcucgagacccc

SEQ ID NO: 1766616 - RNA, 19 nt, Artificial Sequence
  Description of Artificial Sequence: Synthetic oligonucleotide
caguugcccgcauaugaug

SEQ ID NO: 1766617 - RNA, 19 nt, Artificial Sequence
  Description of Artificial Sequence: Synthetic oligonucleotide
cugcuaagauccaauuaga

SEQ ID NO: 1766618 - RNA, 19 nt, Artificial Sequence
  Description of Artificial Sequence: Synthetic oligonucleotide
cagugagucacuacaaacu

SEQ ID NO: 1766619 - RNA, 19 nt, Artificial Sequence
  Description of Artificial Sequence: Synthetic oligonucleotide
cugcauacuuaaagaggug

SEQ ID NO: 1766620 - RNA, 19 nt, Artificial Sequence
  Description of Artificial Sequence: Synthetic oligonucleotide
ucgcacauucaaugcugcc

SEQ ID NO: 1766621 - RNA, 19 nt, Artificial Sequence
  Description of Artificial Sequence: Synthetic oligonucleotide
ggugguagauucauucagc

SEQ ID NO: 1766622 - RNA, 19 nt, Artificial Sequence
  Description of Artificial Sequence: Synthetic oligonucleotide
ccggucauuugacaggacg

SEQ ID NO: 1766623 - RNA, 19 nt, Artificial Sequence
  Description of Artificial Sequence: Synthetic oligonucleotide
ucccuaaggccuuguuggc

SEQ ID NO: 1766624 - RNA, 19 nt, Artificial Sequence
  Description of Artificial Sequence: Synthetic oligonucleotide
gguaggccaucuuaccacc

SEQ ID NO: 1766625 - RNA, 19 nt, Artificial Sequence
  Description of Artificial Sequence: Synthetic oligonucleotide
auauacuuccgcaucuuuu

SEQ ID NO: 1766626 - RNA, 19 nt, Artificial Sequence
  Description of Artificial Sequence: Synthetic oligonucleotide
uuggcucgagaccccaaaa

SEQ ID NO: 1766627 - RNA, 19 nt, Artificial Sequence
  Description of Artificial Sequence: Synthetic oligonucleotide
aagaggugugggugcuuga

SEQ ID NO: 1766628 - RNA, 19 nt, Artificial Sequence
  Description of Artificial Sequence: Synthetic oligonucleotide
ccuuguuggcucgagaccc

SEQ ID NO: 1766629 - RNA, 19 nt, Artificial Sequence
  Description of Artificial Sequence: Synthetic oligonucleotide
ggaucugcugcauacuuaa

SEQ ID NO: 1766630 - RNA, 19 nt, Artificial Sequence
  Description of Artificial Sequence: Synthetic oligonucleotide
guguaguagccagaacacc

SEQ ID NO: 1766631 - RNA, 19 nt, Artificial Sequence
  Description of Artificial Sequence: Synthetic oligonucleotide
ugccgguguuuuaucauua

SEQ ID NO: 1766632 - RNA, 19 nt, Artificial Sequence
  Description of Artificial Sequence: Synthetic oligonucleotide
ccaaggguucgugagaacc

SEQ ID NO: 1766633 - RNA, 19 nt, Artificial Sequence
  Description of Artificial Sequence: Synthetic oligonucleotide
uguccguagugucuccaua

SEQ ID NO: 1766634 - RNA, 19 nt, Artificial Sequence
  Description of Artificial Sequence: Synthetic oligonucleotide
uuuuaggaauggggcuucc

SEQ ID NO: 1766635 - RNA, 19 nt, Artificial Sequence
  Description of Artificial Sequence: Synthetic oligonucleotide
ucgcccaacuccaggccgc

SEQ ID NO: 1766636 - RNA, 19 nt, Artificial Sequence
  Description of Artificial Sequence: Synthetic oligonucleotide
cauugucucgcacauucaa

SEQ ID NO: 1766637 - RNA, 19 nt, Artificial Sequence
  Description of Artificial Sequence: Synthetic oligonucleotide
cucuucagugagucacuac

SEQ ID NO: 1766638 - RNA, 19 nt, Artificial Sequence
  Description of Artificial Sequence: Synthetic oligonucleotide
augagaagguaggccaucu

SEQ ID NO: 1766639 - RNA, 19 nt, Artificial Sequence
  Description of Artificial Sequence: Synthetic oligonucleotide
uccguagugucuccauaua

SEQ ID NO: 1766640 - RNA, 19 nt, Artificial Sequence
  Description of Artificial Sequence: Synthetic oligonucleotide
gccucguucugccacgccg

SEQ ID NO: 1766641 - RNA, 19 nt, Artificial Sequence
  Description of Artificial Sequence: Synthetic oligonucleotide
ccaauuagacccagucccc

SEQ ID NO: 1766642 - RNA, 19 nt, Artificial Sequence
  Description of Artificial Sequence: Synthetic oligonucleotide
ucggugggacuccucuucu

SEQ ID NO: 1766643 - RNA, 19 nt, Artificial Sequence
  Description of Artificial Sequence: Synthetic oligonucleotide
auaugaugcugcucagcua

SEQ ID NO: 1766644 - RNA, 19 nt, Artificial Sequence
  Description of Artificial Sequence: Synthetic oligonucleotide
accugccgguguuuuauca

SEQ ID NO: 1766645 - RNA, 19 nt, Artificial Sequence
  Description of Artificial Sequence: Synthetic oligonucleotide
gcucauuuucuguccguag

SEQ ID NO: 1766646 - RNA, 19 nt, Artificial Sequence
  Description of Artificial Sequence: Synthetic oligonucleotide
gcauacuuaaagaggugug

SEQ ID NO: 1766647 - RNA, 19 nt, Artificial Sequence
  Description of Artificial Sequence: Synthetic oligonucleotide
ugugaaacuuguggucauc

SEQ ID NO: 1766648 - RNA, 19 nt, Artificial Sequence
  Description of Artificial Sequence: Synthetic oligonucleotide
guagugucuccauauacuu

SEQ ID NO: 1766649 - RNA, 19 nt, Artificial Sequence
  Description of Artificial Sequence: Synthetic oligonucleotide
cuagcucauguacagcuua

SEQ ID NO: 1766650 - RNA, 19 nt, Artificial Sequence
  Description of Artificial Sequence: Synthetic oligonucleotide
cccacuuggggccuucucg

SEQ ID NO: 1766651 - RNA, 19 nt, Artificial Sequence
  Description of Artificial Sequence: Synthetic oligonucleotide
ggucauuugacaggacgug

SEQ ID NO: 1766652 - RNA, 19 nt, Artificial Sequence
  Description of Artificial Sequence: Synthetic oligonucleotide
gguucgugagaaccggcug

SEQ ID NO: 1766653 - RNA, 19 nt, Artificial Sequence
  Description of Artificial Sequence: Synthetic oligonucleotide
aggguucgugagaaccggc

SEQ ID NO: 1766654 - RNA, 19 nt, Artificial Sequence
  Description of Artificial Sequence: Synthetic oligonucleotide
auugucucgcacauucaau

SEQ ID NO: 1766655 - RNA, 19 nt, Artificial Sequence
  Description of Artificial Sequence: Synthetic oligonucleotide
uccauagagauggcuggau

SEQ ID NO: 1766656 - RNA, 19 nt, Artificial Sequence
  Description of Artificial Sequence: Synthetic oligonucleotide
ucuguccguagugucucca

SEQ ID NO: 1766657 - RNA, 19 nt, Artificial Sequence
  Description of Artificial Sequence: Synthetic oligonucleotide
uagauucauucagccgagc

SEQ ID NO: 1766658 - RNA, 19 nt, Artificial Sequence
  Description of Artificial Sequence: Synthetic oligonucleotide
uucuguccguagugucucc

SEQ ID NO: 1766659 - RNA, 19 nt, Artificial Sequence
  Description of Artificial Sequence: Synthetic oligonucleotide
uugccggccacgcuugauu

SEQ ID NO: 1766660 - RNA, 19 nt, Artificial Sequence
  Description of Artificial Sequence: Synthetic oligonucleotide
gcuucuuaguccaacaacu

SEQ ID NO: 1766661 - RNA, 19 nt, Artificial Sequence
  Description of Artificial Sequence: Synthetic oligonucleotide
ugccggccacgcuugauuc

SEQ ID NO: 1766662 - RNA, 19 nt, Artificial Sequence
  Description of Artificial Sequence: Synthetic oligonucleotide
ucggugucgccagucgccc

SEQ ID NO: 1766663 - RNA, 19 nt, Artificial Sequence
  Description of Artificial Sequence: Synthetic oligonucleotide
cagccggucggggaaagag

SEQ ID NO: 1766664 - RNA, 19 nt, Artificial Sequence
  Description of Artificial Sequence: Synthetic oligonucleotide
cacaacaaccucagcucga

SEQ ID NO: 1766665 - RNA, 19 nt, Artificial Sequence
  Description of Artificial Sequence: Synthetic oligonucleotide
ccuaaggccuuguuggcuc

SEQ ID NO: 1766666 - RNA, 19 nt, Artificial Sequence
  Description of Artificial Sequence: Synthetic oligonucleotide
ugagaaccggcugccccgc

SEQ ID NO: 1766667 - RNA, 19 nt, Artificial Sequence
  Description of Artificial Sequence: Synthetic oligonucleotide
cuuggggccuucucggcga

SEQ ID NO: 1766668 - RNA, 19 nt, Artificial Sequence
  Description of Artificial Sequence: Synthetic oligonucleotide
gguguuuuaucauuauguu

SEQ ID NO: 1766669 - RNA, 19 nt, Artificial Sequence
  Description of Artificial Sequence: Synthetic oligonucleotide
ccgcauaugaugcugcuca

SEQ ID NO: 1766670 - RNA, 19 nt, Artificial Sequence
  Description of Artificial Sequence: Synthetic oligonucleotide
cagcuuaaugcugcuaaga

SEQ ID NO: 1766671 - RNA, 19 nt, Artificial Sequence
  Description of Artificial Sequence: Synthetic oligonucleotide
gccggucggggaaagaggg

SEQ ID NO: 1766672 - RNA, 19 nt, Artificial Sequence
  Description of Artificial Sequence: Synthetic oligonucleotide
cucguucugccacgccggg

SEQ ID NO: 1766673 - RNA, 19 nt, Artificial Sequence
  Description of Artificial Sequence: Synthetic oligonucleotide
ucguucugccacgccgggg

SEQ ID NO: 1766674 - RNA, 19 nt, Artificial Sequence
  Description of Artificial Sequence: Synthetic oligonucleotide
uguuggcucgagaccccaa

SEQ ID NO: 1766675 - RNA, 19 nt, Artificial Sequence
  Description of Artificial Sequence: Synthetic oligonucleotide
guuggcucgagaccccaaa

SEQ ID NO: 1766676 - RNA, 19 nt, Artificial Sequence
  Description of Artificial Sequence: Synthetic oligonucleotide
ccucguucugccacgccgg

SEQ ID NO: 1766677 - RNA, 19 nt, Artificial Sequence
  Description of Artificial Sequence: Synthetic oligonucleotide
agcugcccggucauuugac

SEQ ID NO: 1766678 - RNA, 19 nt, Artificial Sequence
  Description of Artificial Sequence: Synthetic oligonucleotide
uuguuggcucgagacccca

SEQ ID NO: 1766679 - RNA, 19 nt, Artificial Sequence
  Description of Artificial Sequence: Synthetic oligonucleotide
gucaaucuggguauuacuu

SEQ ID NO: 1766680 - RNA, 19 nt, Artificial Sequence
  Description of Artificial Sequence: Synthetic oligonucleotide
gucucgcacauucaaugcu

SEQ ID NO: 1766681 - RNA, 19 nt, Artificial Sequence
  Description of Artificial Sequence: Synthetic oligonucleotide
ccguagugucuccauauac

SEQ ID NO: 1766682 - RNA, 19 nt, Artificial Sequence
  Description of Artificial Sequence: Synthetic oligonucleotide
gccuuguuggcucgagacc

SEQ ID NO: 1766683 - RNA, 19 nt, Artificial Sequence
  Description of Artificial Sequence: Synthetic oligonucleotide
caaccucagcucgacucag

SEQ ID NO: 1766684 - RNA, 19 nt, Artificial Sequence
  Description of Artificial Sequence: Synthetic oligonucleotide
ggccuucucggcgaauugg

SEQ ID NO: 1766685 - RNA, 19 nt, Artificial Sequence
  Description of Artificial Sequence: Synthetic oligonucleotide
aggauggccucagccgguc

SEQ ID NO: 1766686 - RNA, 19 nt, Artificial Sequence
  Description of Artificial Sequence: Synthetic oligonucleotide
ggccacgcuugauuccugg

SEQ ID NO: 1766687 - RNA, 19 nt, Artificial Sequence
  Description of Artificial Sequence: Synthetic oligonucleotide
cugcguccacuucuucccc

SEQ ID NO: 1766688 - RNA, 19 nt, Artificial Sequence
  Description of Artificial Sequence: Synthetic oligonucleotide
cuggaucugugaaacuugu

SEQ ID NO: 1766689 - RNA, 19 nt, Artificial Sequence
  Description of Artificial Sequence: Synthetic oligonucleotide
cccaacauugucucgcaca

SEQ ID NO: 1766690 - RNA, 19 nt, Artificial Sequence
  Description of Artificial Sequence: Synthetic oligonucleotide
gugcuugauguagauucuc

SEQ ID NO: 1766691 - RNA, 19 nt, Artificial Sequence
  Description of Artificial Sequence: Synthetic oligonucleotide
gcauaugaugcugcucagc

SEQ ID NO: 1766692 - RNA, 19 nt, Artificial Sequence
  Description of Artificial Sequence: Synthetic oligonucleotide
ccauagagauggcuggauc

SEQ ID NO: 1766693 - RNA, 19 nt, Artificial Sequence
  Description of Artificial Sequence: Synthetic oligonucleotide
gucauuugacaggacgugu

SEQ ID NO: 1766694 - RNA, 19 nt, Artificial Sequence
  Description of Artificial Sequence: Synthetic oligonucleotide
gggucaaucuggguauuac

SEQ ID NO: 1766695 - RNA, 19 nt, Artificial Sequence
  Description of Artificial Sequence: Synthetic oligonucleotide
gcccgcgucgcccaacucc

SEQ ID NO: 1766696 - RNA, 19 nt, Artificial Sequence
  Description of Artificial Sequence: Synthetic oligonucleotide
gcgucgcccaacuccaggc

SEQ ID NO: 1766697 - RNA, 19 nt, Artificial Sequence
  Description of Artificial Sequence: Synthetic oligonucleotide
ugggucaaucuggguauua

SEQ ID NO: 1766698 - RNA, 19 nt, Artificial Sequence
  Description of Artificial Sequence: Synthetic oligonucleotide
ggcugcucggugucgccag

SEQ ID NO: 1766699 - RNA, 19 nt, Artificial Sequence
  Description of Artificial Sequence: Synthetic oligonucleotide
agacagcacggaggagauc

SEQ ID NO: 1766700 - RNA, 19 nt, Artificial Sequence
  Description of Artificial Sequence: Synthetic oligonucleotide
ccaagucucggaugucuuc

SEQ ID NO: 1766701 - RNA, 19 nt, Artificial Sequence
  Description of Artificial Sequence: Synthetic oligonucleotide
caaugagaagguaggccau

SEQ ID NO: 1766702 - RNA, 19 nt, Artificial Sequence
  Description of Artificial Sequence: Synthetic oligonucleotide
aggccgaccuuuccucuuu

SEQ ID NO: 1766703 - RNA, 19 nt, Artificial Sequence
  Description of Artificial Sequence: Synthetic oligonucleotide
gcucggugucgccagucgc

SEQ ID NO: 1766704 - RNA, 19 nt, Artificial Sequence
  Description of Artificial Sequence: Synthetic oligonucleotide
gagaaccggcugccccgcc

SEQ ID NO: 1766705 - RNA, 19 nt, Artificial Sequence
  Description of Artificial Sequence: Synthetic oligonucleotide
guaggccaucuuaccacca

SEQ ID NO: 1766706 - RNA, 19 nt, Artificial Sequence
  Description of Artificial Sequence: Synthetic oligonucleotide
ccggcaggccuccugaauc

SEQ ID NO: 1766707 - RNA, 19 nt, Artificial Sequence
  Description of Artificial Sequence: Synthetic oligonucleotide
cauauacuuccgcaucuuu

SEQ ID NO: 1766708 - RNA, 19 nt, Artificial Sequence
  Description of Artificial Sequence: Synthetic oligonucleotide
gccccuucgcugcaccugc

SEQ ID NO: 1766709 - RNA, 19 nt, Artificial Sequence
  Description of Artificial Sequence: Synthetic oligonucleotide
guugcccgcauaugaugcu

SEQ ID NO: 1766710 - RNA, 19 nt, Artificial Sequence
  Description of Artificial Sequence: Synthetic oligonucleotide
ggugcucuucagugaguca

SEQ ID NO: 1766711 - RNA, 19 nt, Artificial Sequence
  Description of Artificial Sequence: Synthetic oligonucleotide
gccgccucguucugccacg

SEQ ID NO: 1766712 - RNA, 19 nt, Artificial Sequence
  Description of Artificial Sequence: Synthetic oligonucleotide
cggggaaagagggucuugg

SEQ ID NO: 1766713 - RNA, 19 nt, Artificial Sequence
  Description of Artificial Sequence: Synthetic oligonucleotide
caccugccgguguuuuauc

SEQ ID NO: 1766714 - RNA, 19 nt, Artificial Sequence
  Description of Artificial Sequence: Synthetic oligonucleotide
ucagccggucggggaaaga

SEQ ID NO: 1766715 - RNA, 19 nt, Artificial Sequence
  Description of Artificial Sequence: Synthetic oligonucleotide
ucucggcgaauugguucac

SEQ ID NO: 1766716 - RNA, 19 nt, Artificial Sequence
  Description of Artificial Sequence: Synthetic oligonucleotide
agcacggaggagauccaua

SEQ ID NO: 1766717 - RNA, 19 nt, Artificial Sequence
  Description of Artificial Sequence: Synthetic oligonucleotide
ccaaguguaguagccagaa

SEQ ID NO: 1766718 - RNA, 19 nt, Artificial Sequence
  Description of Artificial Sequence: Synthetic oligonucleotide
cucagccggucggggaaag

SEQ ID NO: 1766719 - RNA, 19 nt, Artificial Sequence
  Description of Artificial Sequence: Synthetic oligonucleotide
cuucgcugcaccugccggu

SEQ ID NO: 1766720 - RNA, 19 nt, Artificial Sequence
  Description of Artificial Sequence: Synthetic oligonucleotide
ucccaucccuaaggccuug

SEQ ID NO: 1766721 - RNA, 19 nt, Artificial Sequence
  Description of Artificial Sequence: Synthetic oligonucleotide
gauucucccucuggugccu

SEQ ID NO: 1766722 - RNA, 19 nt, Artificial Sequence
  Description of Artificial Sequence: Synthetic oligonucleotide
cguagugucuccauauacu

SEQ ID NO: 1766723 - RNA, 19 nt, Artificial Sequence
  Description of Artificial Sequence: Synthetic oligonucleotide
gggccuucucggcgaauug

SEQ ID NO: 1766724 - RNA, 19 nt, Artificial Sequence
  Description of Artificial Sequence: Synthetic oligonucleotide
gcggcggccccuucgcugc

SEQ ID NO: 1766725 - RNA, 19 nt, Artificial Sequence
  Description of Artificial Sequence: Synthetic oligonucleotide
gcugcccggucauuugaca

SEQ ID NO: 1766726 - RNA, 19 nt, Artificial Sequence
  Description of Artificial Sequence: Synthetic oligonucleotide
guacagcuuaaugcugcua

SEQ ID NO: 1766727 - RNA, 19 nt, Artificial Sequence
  Description of Artificial Sequence: Synthetic oligonucleotide
ggccgccucguucugccac

SEQ ID NO: 1766728 - RNA, 19 nt, Artificial Sequence
  Description of Artificial Sequence: Synthetic oligonucleotide
cggcgaauugguucacaag

SEQ ID NO: 1766729 - RNA, 19 nt, Artificial Sequence
  Description of Artificial Sequence: Synthetic oligonucleotide
cgcauaugaugcugcucag

SEQ ID NO: 1766730 - RNA, 19 nt, Artificial Sequence
  Description of Artificial Sequence: Synthetic oligonucleotide
cugcucggugucgccaguc

SEQ ID NO: 1766731 - RNA, 19 nt, Artificial Sequence
  Description of Artificial Sequence: Synthetic oligonucleotide
gccggccacgcuugauucc

SEQ ID NO: 1766732 - RNA, 19 nt, Artificial Sequence
  Description of Artificial Sequence: Synthetic oligonucleotide
cugccgguguuuuaucauu

SEQ ID NO: 1766733 - RNA, 19 nt, Artificial Sequence
  Description of Artificial Sequence: Synthetic oligonucleotide
gcuuccucggugggacucc

SEQ ID NO: 1766734 - RNA, 19 nt, Artificial Sequence
  Description of Artificial Sequence: Synthetic oligonucleotide
ggugcuugauguagauucu

SEQ ID NO: 1766735 - RNA, 19 nt, Artificial Sequence
  Description of Artificial Sequence: Synthetic oligonucleotide
cucggcgaauugguucaca

SEQ ID NO: 1766736 - RNA, 19 nt, Artificial Sequence
  Description of Artificial Sequence: Synthetic oligonucleotide
gccacgcuugauuccugga

SEQ ID NO: 1766737 - RNA, 19 nt, Artificial Sequence
  Description of Artificial Sequence: Synthetic oligonucleotide
cagugcuuguccugaggau

SEQ ID NO: 1766738 - RNA, 19 nt, Artificial Sequence
  Description of Artificial Sequence: Synthetic oligonucleotide
aggccgccucguucugcca

SEQ ID NO: 1766739 - RNA, 19 nt, Artificial Sequence
  Description of Artificial Sequence: Synthetic oligonucleotide
cccaguccccaggauggcc

SEQ ID NO: 1766740 - RNA, 19 nt, Artificial Sequence
  Description of Artificial Sequence: Synthetic oligonucleotide
cgucgcccaacuccaggcc

SEQ ID NO: 1766741 - RNA, 19 nt, Artificial Sequence
  Description of Artificial Sequence: Synthetic oligonucleotide
ggguucgugagaaccggcu

SEQ ID NO: 1766742 - RNA, 19 nt, Artificial Sequence
  Description of Artificial Sequence: Synthetic oligonucleotide
ggcccacaacaaccucagc

SEQ ID NO: 1766743 - RNA, 19 nt, Artificial Sequence
  Description of Artificial Sequence: Synthetic oligonucleotide
caacaaccucagcucgacu

SEQ ID NO: 1766744 - RNA, 19 nt, Artificial Sequence
  Description of Artificial Sequence: Synthetic oligonucleotide
cggucggggaaagaggguc

SEQ ID NO: 1766745 - RNA, 19 nt, Artificial Sequence
  Description of Artificial Sequence: Synthetic oligonucleotide
cggucauuugacaggacgu

SEQ ID NO: 1766746 - RNA, 19 nt, Artificial Sequence
  Description of Artificial Sequence: Synthetic oligonucleotide
ggccucagccggucgggga

SEQ ID NO: 1766747 - RNA, 19 nt, Artificial Sequence
  Description of Artificial Sequence: Synthetic oligonucleotide
gguggcgcuucagcagcac

SEQ ID NO: 1766748 - RNA, 19 nt, Artificial Sequence
  Description of Artificial Sequence: Synthetic oligonucleotide
cccgcauaugaugcugcuc

SEQ ID NO: 1766749 - RNA, 19 nt, Artificial Sequence
  Description of Artificial Sequence: Synthetic oligonucleotide
cuggugccucccaucccua

SEQ ID NO: 1766750 - RNA, 19 nt, Artificial Sequence
  Description of Artificial Sequence: Synthetic oligonucleotide
gcggccccuucgcugcacc

SEQ ID NO: 1766751 - RNA, 19 nt, Artificial Sequence
  Description of Artificial Sequence: Synthetic oligonucleotide
ccaguugcccgcauaugau

SEQ ID NO: 1766752 - RNA, 19 nt, Artificial Sequence
  Description of Artificial Sequence: Synthetic oligonucleotide
gccuucucggcgaauuggu

SEQ ID NO: 1766753 - RNA, 19 nt, Artificial Sequence
  Description of Artificial Sequence: Synthetic oligonucleotide
ggucggggaaagagggucu

SEQ ID NO: 1766754 - RNA, 19 nt, Artificial Sequence
  Description of Artificial Sequence: Synthetic oligonucleotide
gccgguguuuuaucauuau

SEQ ID NO: 1766755 - RNA, 19 nt, Artificial Sequence
  Description of Artificial Sequence: Synthetic oligonucleotide
cuccggcaggccuccugaa

SEQ ID NO: 1766756 - RNA, 19 nt, Artificial Sequence
  Description of Artificial Sequence: Synthetic oligonucleotide
gccacgccggggccccgcg

SEQ ID NO: 1766757 - RNA, 19 nt, Artificial Sequence
  Description of Artificial Sequence: Synthetic oligonucleotide
cucccaucccuaaggccuu

SEQ ID NO: 1766758 - RNA, 19 nt, Artificial Sequence
  Description of Artificial Sequence: Synthetic oligonucleotide
ccccuucgcugcaccugcc

SEQ ID NO: 1766759 - RNA, 19 nt, Artificial Sequence
  Description of Artificial Sequence: Synthetic oligonucleotide
gcaggcugccaaguguagu

SEQ ID NO: 1766760 - RNA, 19 nt, Artificial Sequence
  Description of Artificial Sequence: Synthetic oligonucleotide
ccaccaguugcccgcauau

SEQ ID NO: 1766761 - RNA, 19 nt, Artificial Sequence
  Description of Artificial Sequence: Synthetic oligonucleotide
gagcggcggccccuucgcu

SEQ ID NO: 1766762 - RNA, 19 nt, Artificial Sequence
  Description of Artificial Sequence: Synthetic oligonucleotide
cuuccucggugggacuccu

SEQ ID NO: 1766763 - RNA, 19 nt, Artificial Sequence
  Description of Artificial Sequence: Synthetic oligonucleotide
ggcgcuucagcagcacgau

SEQ ID NO: 1766764 - RNA, 19 nt, Artificial Sequence
  Description of Artificial Sequence: Synthetic oligonucleotide
cagcacggaggagauccau

SEQ ID NO: 1766765 - RNA, 19 nt, Artificial Sequence
  Description of Artificial Sequence: Synthetic oligonucleotide
cggugucgccagucgcccc

SEQ ID NO: 1766766 - RNA, 19 nt, Artificial Sequence
  Description of Artificial Sequence: Synthetic oligonucleotide
cuugccggccacgcuugau

SEQ ID NO: 1766767 - RNA, 19 nt, Artificial Sequence
  Description of Artificial Sequence: Synthetic oligonucleotide
ccacgccggggccccgcgg

SEQ ID NO: 1766768 - RNA, 19 nt, Artificial Sequence
  Description of Artificial Sequence: Synthetic oligonucleotide
ccgccucguucugccacgc

SEQ ID NO: 1766769 - RNA, 19 nt, Artificial Sequence
  Description of Artificial Sequence: Synthetic oligonucleotide
gccgagcugggucccacuu

SEQ ID NO: 1766770 - RNA, 19 nt, Artificial Sequence
  Description of Artificial Sequence: Synthetic oligonucleotide
ccuucucggcgaauugguu

SEQ ID NO: 1766771 - RNA, 19 nt, Artificial Sequence
  Description of Artificial Sequence: Synthetic oligonucleotide
ccggccacgcuugauuccu

SEQ ID NO: 1766772 - RNA, 19 nt, Artificial Sequence
  Description of Artificial Sequence: Synthetic oligonucleotide
cugcaccugccgguguuuu

SEQ ID NO: 1766773 - RNA, 19 nt, Artificial Sequence
  Description of Artificial Sequence: Synthetic oligonucleotide
ggcggccccuucgcugcac

SEQ ID NO: 1766774 - RNA, 19 nt, Artificial Sequence
  Description of Artificial Sequence: Synthetic oligonucleotide
ggccgaccuuuccucuuuu

SEQ ID NO: 1766775 - RNA, 19 nt, Artificial Sequence
  Description of Artificial Sequence: Synthetic oligonucleotide
ccggucggggaaagagggu

SEQ ID NO: 1766776 - RNA, 19 nt, Artificial Sequence
  Description of Artificial Sequence: Synthetic oligonucleotide
ccaucccuaaggccuuguu

SEQ ID NO: 1766777 - RNA, 19 nt, Artificial Sequence
  Description of Artificial Sequence: Synthetic oligonucleotide
ccucagccggucggggaaa

SEQ ID NO: 1766778 - RNA, 19 nt, Artificial Sequence
  Description of Artificial Sequence: Synthetic oligonucleotide
cccaucccuaaggccuugu

SEQ ID NO: 1766779 - RNA, 19 nt, Artificial Sequence
  Description of Artificial Sequence: Synthetic oligonucleotide
cgcccgcgucgcccaacuc

SEQ ID NO: 1766780 - RNA, 19 nt, Artificial Sequence
  Description of Artificial Sequence: Synthetic oligonucleotide
cggccccuucgcugcaccu

SEQ ID NO: 1766781 - RNA, 19 nt, Artificial Sequence
  Description of Artificial Sequence: Synthetic oligonucleotide
cuuuaaacggccaagcugc

SEQ ID NO: 1766782 - RNA, 19 nt, Artificial Sequence
  Description of Artificial Sequence: Synthetic oligonucleotide
aauucgaggcauaagcugc

SEQ ID NO: 1766783 - RNA, 19 nt, Artificial Sequence
  Description of Artificial Sequence: Synthetic oligonucleotide
aguaauugcuuucccaagg

SEQ ID NO: 1766784 - RNA, 19 nt, Artificial Sequence
  Description of Artificial Sequence: Synthetic oligonucleotide
aggacgagagguuugggcc

SEQ ID NO: 1766785 - RNA, 19 nt, Artificial Sequence
  Description of Artificial Sequence: Synthetic oligonucleotide
uguccugauccuuuaaacg

SEQ ID NO: 1766786 - RNA, 19 nt, Artificial Sequence
  Description of Artificial Sequence: Synthetic oligonucleotide
cacaauucgaggcauaagc

SEQ ID NO: 1766787 - RNA, 19 nt, Artificial Sequence
  Description of Artificial Sequence: Synthetic oligonucleotide
ucuguaagcccaaagcagc

SEQ ID NO: 1766788 - RNA, 19 nt, Artificial Sequence
  Description of Artificial Sequence: Synthetic oligonucleotide
ugaucauaccaguagacga

SEQ ID NO: 1766789 - RNA, 19 nt, Artificial Sequence
  Description of Artificial Sequence: Synthetic oligonucleotide
gaagacugaacacucauca

SEQ ID NO: 1766790 - RNA, 19 nt, Artificial Sequence
  Description of Artificial Sequence: Synthetic oligonucleotide
augaugaucauaccaguag

SEQ ID NO: 1766791 - RNA, 19 nt, Artificial Sequence
  Description of Artificial Sequence: Synthetic oligonucleotide
gaucacaugguacucauca

SEQ ID NO: 1766792 - RNA, 19 nt, Artificial Sequence
  Description of Artificial Sequence: Synthetic oligonucleotide
aauccuaggggcugagagg

SEQ ID NO: 1766793 - RNA, 19 nt, Artificial Sequence
  Description of Artificial Sequence: Synthetic oligonucleotide
caagcugcaaacaagcgug

SEQ ID NO: 1766794 - RNA, 19 nt, Artificial Sequence
  Description of Artificial Sequence: Synthetic oligonucleotide
agccauacccuuuggaugg

SEQ ID NO: 1766795 - RNA, 19 nt, Artificial Sequence
  Description of Artificial Sequence: Synthetic oligonucleotide
uugaaguggguucacuugc

SEQ ID NO: 1766796 - RNA, 19 nt, Artificial Sequence
  Description of Artificial Sequence: Synthetic oligonucleotide
ugaugaucauaccaguaga

SEQ ID NO: 1766797 - RNA, 19 nt, Artificial Sequence
  Description of Artificial Sequence: Synthetic oligonucleotide
uguaccuucauaaguguuc

SEQ ID NO: 1766798 - RNA, 19 nt, Artificial Sequence
  Description of Artificial Sequence: Synthetic oligonucleotide
caugugaugccauaucgag

SEQ ID NO: 1766799 - RNA, 19 nt, Artificial Sequence
  Description of Artificial Sequence: Synthetic oligonucleotide
auaccaguagacgaagccc

SEQ ID NO: 1766800 - RNA, 19 nt, Artificial Sequence
  Description of Artificial Sequence: Synthetic oligonucleotide
ugaaucagcugguuccugg

SEQ ID NO: 1766801 - RNA, 19 nt, Artificial Sequence
  Description of Artificial Sequence: Synthetic oligonucleotide
auagguguagauggggugc

SEQ ID NO: 1766802 - RNA, 19 nt, Artificial Sequence
  Description of Artificial Sequence: Synthetic oligonucleotide
uuccccucaauccuagggg

SEQ ID NO: 1766803 - RNA, 19 nt, Artificial Sequence
  Description of Artificial Sequence: Synthetic oligonucleotide
gaugucucgugccuggcgg

SEQ ID NO: 1766804 - RNA, 19 nt, Artificial Sequence
  Description of Artificial Sequence: Synthetic oligonucleotide
auacaguuguccucacacc

SEQ ID NO: 1766805 - RNA, 19 nt, Artificial Sequence
  Description of Artificial Sequence: Synthetic oligonucleotide
ugaguuucucaucagcagu

SEQ ID NO: 1766806 - RNA, 19 nt, Artificial Sequence
  Description of Artificial Sequence: Synthetic oligonucleotide
uuagggagcacauucuccu

SEQ ID NO: 1766807 - RNA, 19 nt, Artificial Sequence
  Description of Artificial Sequence: Synthetic oligonucleotide
agcaugccggaucacaugg

SEQ ID NO: 1766808 - RNA, 19 nt, Artificial Sequence
  Description of Artificial Sequence: Synthetic oligonucleotide
uucauagcaugccggauca

SEQ ID NO: 1766809 - RNA, 19 nt, Artificial Sequence
  Description of Artificial Sequence: Synthetic oligonucleotide
cacacuacgaacaggucag

SEQ ID NO: 1766810 - RNA, 19 nt, Artificial Sequence
  Description of Artificial Sequence: Synthetic oligonucleotide
aaacggccaagcugcaaac

SEQ ID NO: 1766811 - RNA, 19 nt, Artificial Sequence
  Description of Artificial Sequence: Synthetic oligonucleotide
uguccagagcguauugccg

SEQ ID NO: 1766812 - RNA, 19 nt, Artificial Sequence
  Description of Artificial Sequence: Synthetic oligonucleotide
gauuggccagcacaauucg

SEQ ID NO: 1766813 - RNA, 19 nt, Artificial Sequence
  Description of Artificial Sequence: Synthetic oligonucleotide
ucugguuugauggauugug

SEQ ID NO: 1766814 - RNA, 19 nt, Artificial Sequence
  Description of Artificial Sequence: Synthetic oligonucleotide
auaucgagcagcguugagg

SEQ ID NO: 1766815 - RNA, 19 nt, Artificial Sequence
  Description of Artificial Sequence: Synthetic oligonucleotide
uaaacggccaagcugcaaa

SEQ ID NO: 1766816 - RNA, 19 nt, Artificial Sequence
  Description of Artificial Sequence: Synthetic oligonucleotide
aguaccagugggucccucc

SEQ ID NO: 1766817 - RNA, 19 nt, Artificial Sequence
  Description of Artificial Sequence: Synthetic oligonucleotide
ucauguguaccuucauaag

SEQ ID NO: 1766818 - RNA, 19 nt, Artificial Sequence
  Description of Artificial Sequence: Synthetic oligonucleotide
auuguggcgagcucugguc

SEQ ID NO: 1766819 - RNA, 19 nt, Artificial Sequence
  Description of Artificial Sequence: Synthetic oligonucleotide
auuccgauuggccagcaca

SEQ ID NO: 1766820 - RNA, 19 nt, Artificial Sequence
  Description of Artificial Sequence: Synthetic oligonucleotide
caaacaagcguggaggccc

SEQ ID NO: 1766821 - RNA, 19 nt, Artificial Sequence
  Description of Artificial Sequence: Synthetic oligonucleotide
caauccuaggggcugagag

SEQ ID NO: 1766822 - RNA, 19 nt, Artificial Sequence
  Description of Artificial Sequence: Synthetic oligonucleotide
gguuugauggauuguggcg

SEQ ID NO: 1766823 - RNA, 19 nt, Artificial Sequence
  Description of Artificial Sequence: Synthetic oligonucleotide
caauucgaggcauaagcug

SEQ ID NO: 1766824 - RNA, 19 nt, Artificial Sequence
  Description of Artificial Sequence: Synthetic oligonucleotide
agagguuugggccggucgg

SEQ ID NO: 1766825 - RNA, 19 nt, Artificial Sequence
  Description of Artificial Sequence: Synthetic oligonucleotide
gauggugggucccagcaug

SEQ ID NO: 1766826 - RNA, 19 nt, Artificial Sequence
  Description of Artificial Sequence: Synthetic oligonucleotide
ugcaugacaagagaagacu

SEQ ID NO: 1766827 - RNA, 19 nt, Artificial Sequence
  Description of Artificial Sequence: Synthetic oligonucleotide
cuucauuccgauuggccag

SEQ ID NO: 1766828 - RNA, 19 nt, Artificial Sequence
  Description of Artificial Sequence: Synthetic oligonucleotide
aggacaccccaugugaugc

SEQ ID NO: 1766829 - RNA, 19 nt, Artificial Sequence
  Description of Artificial Sequence: Synthetic oligonucleotide
ugugaaugccugaauccca

SEQ ID NO: 1766830 - RNA, 19 nt, Artificial Sequence
  Description of Artificial Sequence: Synthetic oligonucleotide
cuacgaacaggucagccac

SEQ ID NO: 1766831 - RNA, 19 nt, Artificial Sequence
  Description of Artificial Sequence: Synthetic oligonucleotide
acuacgaacaggucagcca

SEQ ID NO: 1766832 - RNA, 19 nt, Artificial Sequence
  Description of Artificial Sequence: Synthetic oligonucleotide
uuugauggauuguggcgag

SEQ ID NO: 1766833 - RNA, 19 nt, Artificial Sequence
  Description of Artificial Sequence: Synthetic oligonucleotide
gucauguguaccuucauaa

SEQ ID NO: 1766834 - RNA, 19 nt, Artificial Sequence
  Description of Artificial Sequence: Synthetic oligonucleotide
cauacccuuuggauggugg

SEQ ID NO: 1766835 - RNA, 19 nt, Artificial Sequence
  Description of Artificial Sequence: Synthetic oligonucleotide
gaugaucauaccaguagac

SEQ ID NO: 1766836 - RNA, 19 nt, Artificial Sequence
  Description of Artificial Sequence: Synthetic oligonucleotide
gagagguuugggccggucg

SEQ ID NO: 1766837 - RNA, 19 nt, Artificial Sequence
  Description of Artificial Sequence: Synthetic oligonucleotide
uagauggggugcaugacaa

SEQ ID NO: 1766838 - RNA, 19 nt, Artificial Sequence
  Description of Artificial Sequence: Synthetic oligonucleotide
auguguaccuucauaagug

SEQ ID NO: 1766839 - RNA, 19 nt, Artificial Sequence
  Description of Artificial Sequence: Synthetic oligonucleotide
ggucccuccagucaaaccc

SEQ ID NO: 1766840 - RNA, 19 nt, Artificial Sequence
  Description of Artificial Sequence: Synthetic oligonucleotide
ugauccuuuaaacggccaa

SEQ ID NO: 1766841 - RNA, 19 nt, Artificial Sequence
  Description of Artificial Sequence: Synthetic oligonucleotide
uguguaccuucauaagugu

SEQ ID NO: 1766842 - RNA, 19 nt, Artificial Sequence
  Description of Artificial Sequence: Synthetic oligonucleotide
agauucauagcaugccgga

SEQ ID NO: 1766843 - RNA, 19 nt, Artificial Sequence
  Description of Artificial Sequence: Synthetic oligonucleotide
ugccauaucgagcagcguu

SEQ ID NO: 1766844 - RNA, 19 nt, Artificial Sequence
  Description of Artificial Sequence: Synthetic oligonucleotide
gguagccuuguccugaucc

SEQ ID NO: 1766845 - RNA, 19 nt, Artificial Sequence
  Description of Artificial Sequence: Synthetic oligonucleotide
ugguuccuggccaagggga

SEQ ID NO: 1766846 - RNA, 19 nt, Artificial Sequence
  Description of Artificial Sequence: Synthetic oligonucleotide
caggcuggacgcauuaggg

SEQ ID NO: 1766847 - RNA, 19 nt, Artificial Sequence
  Description of Artificial Sequence: Synthetic oligonucleotide
ucauacacgaugucccggu

SEQ ID NO: 1766848 - RNA, 19 nt, Artificial Sequence
  Description of Artificial Sequence: Synthetic oligonucleotide
gagaauguagcucugguuu

SEQ ID NO: 1766849 - RNA, 19 nt, Artificial Sequence
  Description of Artificial Sequence: Synthetic oligonucleotide
acaccgagcccacacuacg

SEQ ID NO: 1766850 - RNA, 19 nt, Artificial Sequence
  Description of Artificial Sequence: Synthetic oligonucleotide
aggcauaagcugcuccugg

SEQ ID NO: 1766851 - RNA, 19 nt, Artificial Sequence
  Description of Artificial Sequence: Synthetic oligonucleotide
caguuauuucucuucagca

SEQ ID NO: 1766852 - RNA, 19 nt, Artificial Sequence
  Description of Artificial Sequence: Synthetic oligonucleotide
aagccccgaauacaguugu

SEQ ID NO: 1766853 - RNA, 19 nt, Artificial Sequence
  Description of Artificial Sequence: Synthetic oligonucleotide
aguagacgaagcccgcaag

SEQ ID NO: 1766854 - RNA, 19 nt, Artificial Sequence
  Description of Artificial Sequence: Synthetic oligonucleotide
cugugaaugccugaauccc

SEQ ID NO: 1766855 - RNA, 19 nt, Artificial Sequence
  Description of Artificial Sequence: Synthetic oligonucleotide
uacacgaugucccggugaa

SEQ ID NO: 1766856 - RNA, 19 nt, Artificial Sequence
  Description of Artificial Sequence: Synthetic oligonucleotide
cuguaagcccaaagcagcc

SEQ ID NO: 1766857 - RNA, 19 nt, Artificial Sequence
  Description of Artificial Sequence: Synthetic oligonucleotide
aaaggacccgccaggcugg

SEQ ID NO: 1766858 - RNA, 19 nt, Artificial Sequence
  Description of Artificial Sequence: Synthetic oligonucleotide
ucgaggcauaagcugcucc

SEQ ID NO: 1766859 - RNA, 19 nt, Artificial Sequence
  Description of Artificial Sequence: Synthetic oligonucleotide
uccccucaauccuaggggc

SEQ ID NO: 1766860 - RNA, 19 nt, Artificial Sequence
  Description of Artificial Sequence: Synthetic oligonucleotide
ugccuggcgggcaaugucc

SEQ ID NO: 1766861 - RNA, 19 nt, Artificial Sequence
  Description of Artificial Sequence: Synthetic oligonucleotide
ugccggaucacaugguacu

SEQ ID NO: 1766862 - RNA, 19 nt, Artificial Sequence
  Description of Artificial Sequence: Synthetic oligonucleotide
caggacgagagguuugggc

SEQ ID NO: 1766863 - RNA, 19 nt, Artificial Sequence
  Description of Artificial Sequence: Synthetic oligonucleotide
aaguggguucacuugccaa

SEQ ID NO: 1766864 - RNA, 19 nt, Artificial Sequence
  Description of Artificial Sequence: Synthetic oligonucleotide
cagccauacccuuuggaug

SEQ ID NO: 1766865 - RNA, 19 nt, Artificial Sequence
  Description of Artificial Sequence: Synthetic oligonucleotide
cauaaguguucacugccuc

SEQ ID NO: 1766866 - RNA, 19 nt, Artificial Sequence
  Description of Artificial Sequence: Synthetic oligonucleotide
aaagccccgaauacaguug

SEQ ID NO: 1766867 - RNA, 19 nt, Artificial Sequence
  Description of Artificial Sequence: Synthetic oligonucleotide
aagcguggaggcccaaugu

SEQ ID NO: 1766868 - RNA, 19 nt, Artificial Sequence
  Description of Artificial Sequence: Synthetic oligonucleotide
ggcucuguaagcccaaagc

SEQ ID NO: 1766869 - RNA, 19 nt, Artificial Sequence
  Description of Artificial Sequence: Synthetic oligonucleotide
uuccgauuggccagcacaa

SEQ ID NO: 1766870 - RNA, 19 nt, Artificial Sequence
  Description of Artificial Sequence: Synthetic oligonucleotide
ugagaauguagcucugguu

SEQ ID NO: 1766871 - RNA, 19 nt, Artificial Sequence
  Description of Artificial Sequence: Synthetic oligonucleotide
acaauucgaggcauaagcu

SEQ ID NO: 1766872 - RNA, 19 nt, Artificial Sequence
  Description of Artificial Sequence: Synthetic oligonucleotide
uuuaaacggccaagcugca

SEQ ID NO: 1766873 - RNA, 19 nt, Artificial Sequence
  Description of Artificial Sequence: Synthetic oligonucleotide
guagauggggugcaugaca

SEQ ID NO: 1766874 - RNA, 19 nt, Artificial Sequence
  Description of Artificial Sequence: Synthetic oligonucleotide
aucucggugagcaugucug

SEQ ID NO: 1766875 - RNA, 19 nt, Artificial Sequence
  Description of Artificial Sequence: Synthetic oligonucleotide
ggcuggacgcauuagggag

SEQ ID NO: 1766876 - RNA, 19 nt, Artificial Sequence
  Description of Artificial Sequence: Synthetic oligonucleotide
uguaagcccaaagcagccc

SEQ ID NO: 1766877 - RNA, 19 nt, Artificial Sequence
  Description of Artificial Sequence: Synthetic oligonucleotide
auacacgaugucccgguga

SEQ ID NO: 1766878 - RNA, 19 nt, Artificial Sequence
  Description of Artificial Sequence: Synthetic oligonucleotide
auaccaccggggucacucc

SEQ ID NO: 1766879 - RNA, 19 nt, Artificial Sequence
  Description of Artificial Sequence: Synthetic oligonucleotide
gaucauaccaguagacgaa

SEQ ID NO: 1766880 - RNA, 19 nt, Artificial Sequence
  Description of Artificial Sequence: Synthetic oligonucleotide
caugguacucaucagaaau

SEQ ID NO: 1766881 - RNA, 19 nt, Artificial Sequence
  Description of Artificial Sequence: Synthetic oligonucleotide
cauaccaccggggucacuc

SEQ ID NO: 1766882 - RNA, 19 nt, Artificial Sequence
  Description of Artificial Sequence: Synthetic oligonucleotide
auaggccacugaugacacc

SEQ ID NO: 1766883 - RNA, 19 nt, Artificial Sequence
  Description of Artificial Sequence: Synthetic oligonucleotide
uagacgaagcccgcaagga

SEQ ID NO: 1766884 - RNA, 19 nt, Artificial Sequence
  Description of Artificial Sequence: Synthetic oligonucleotide
cccaugugaugccauaucg

SEQ ID NO: 1766885 - RNA, 19 nt, Artificial Sequence
  Description of Artificial Sequence: Synthetic oligonucleotide
ccagauucauagcaugccg

SEQ ID NO: 1766886 - RNA, 19 nt, Artificial Sequence
  Description of Artificial Sequence: Synthetic oligonucleotide
gugaaugccugaaucccag

SEQ ID NO: 1766887 - RNA, 19 nt, Artificial Sequence
  Description of Artificial Sequence: Synthetic oligonucleotide
ugcuccucgcucccauagg

SEQ ID NO: 1766888 - RNA, 19 nt, Artificial Sequence
  Description of Artificial Sequence: Synthetic oligonucleotide
ucccaguaauugcuuuccc

SEQ ID NO: 1766889 - RNA, 19 nt, Artificial Sequence
  Description of Artificial Sequence: Synthetic oligonucleotide
caguuguccucacaccgag

SEQ ID NO: 1766890 - RNA, 19 nt, Artificial Sequence
  Description of Artificial Sequence: Synthetic oligonucleotide
ucgggucaggagcccauag

SEQ ID NO: 1766891 - RNA, 19 nt, Artificial Sequence
  Description of Artificial Sequence: Synthetic oligonucleotide
ggucccauugagaauguag

SEQ ID NO: 1766892 - RNA, 19 nt, Artificial Sequence
  Description of Artificial Sequence: Synthetic oligonucleotide
gaaugccugaaucccagua

SEQ ID NO: 1766893 - RNA, 19 nt, Artificial Sequence
  Description of Artificial Sequence: Synthetic oligonucleotide
gacgaagcccgcaaggaga

SEQ ID NO: 1766894 - RNA, 19 nt, Artificial Sequence
  Description of Artificial Sequence: Synthetic oligonucleotide
aguucacccuuggccagcc

SEQ ID NO: 1766895 - RNA, 19 nt, Artificial Sequence
  Description of Artificial Sequence: Synthetic oligonucleotide
ucacaccgagcccacacua

SEQ ID NO: 1766896 - RNA, 19 nt, Artificial Sequence
  Description of Artificial Sequence: Synthetic oligonucleotide
uagcaugccggaucacaug

SEQ ID NO: 1766897 - RNA, 19 nt, Artificial Sequence
  Description of Artificial Sequence: Synthetic oligonucleotide
ggacgagagguuugggccg

SEQ ID NO: 1766898 - RNA, 19 nt, Artificial Sequence
  Description of Artificial Sequence: Synthetic oligonucleotide
uucauuccgauuggccagc

SEQ ID NO: 1766899 - RNA, 19 nt, Artificial Sequence
  Description of Artificial Sequence: Synthetic oligonucleotide
caagcguggaggcccaaug

SEQ ID NO: 1766900 - RNA, 19 nt, Artificial Sequence
  Description of Artificial Sequence: Synthetic oligonucleotide
guaccuucauaaguguuca

SEQ ID NO: 1766901 - RNA, 19 nt, Artificial Sequence
  Description of Artificial Sequence: Synthetic oligonucleotide
ucccaggaugucucgugcc

SEQ ID NO: 1766902 - RNA, 19 nt, Artificial Sequence
  Description of Artificial Sequence: Synthetic oligonucleotide
cugaaucccaguaauugcu

SEQ ID NO: 1766903 - RNA, 19 nt, Artificial Sequence
  Description of Artificial Sequence: Synthetic oligonucleotide
uuuggauggugggucccag

SEQ ID NO: 1766904 - RNA, 19 nt, Artificial Sequence
  Description of Artificial Sequence: Synthetic oligonucleotide
agucaaacccaggacgaga

SEQ ID NO: 1766905 - RNA, 19 nt, Artificial Sequence
  Description of Artificial Sequence: Synthetic oligonucleotide
cccauuuccucccaggaug

SEQ ID NO: 1766906 - RNA, 19 nt, Artificial Sequence
  Description of Artificial Sequence: Synthetic oligonucleotide
gaccauuucugggguagcc

SEQ ID NO: 1766907 - RNA, 19 nt, Artificial Sequence
  Description of Artificial Sequence: Synthetic oligonucleotide
agaccauuucugggguagc

SEQ ID NO: 1766908 - RNA, 19 nt, Artificial Sequence
  Description of Artificial Sequence: Synthetic oligonucleotide
uccagagcguauugccgug

SEQ ID NO: 1766909 - RNA, 19 nt, Artificial Sequence
  Description of Artificial Sequence: Synthetic oligonucleotide
agccggggcagauacuucu

SEQ ID NO: 1766910 - RNA, 19 nt, Artificial Sequence
  Description of Artificial Sequence: Synthetic oligonucleotide
augccggaucacaugguac

SEQ ID NO: 1766911 - RNA, 19 nt, Artificial Sequence
  Description of Artificial Sequence: Synthetic oligonucleotide
gaaagccccgaauacaguu

SEQ ID NO: 1766912 - RNA, 19 nt, Artificial Sequence
  Description of Artificial Sequence: Synthetic oligonucleotide
acgaacaggucagccacag

SEQ ID NO: 1766913 - RNA, 19 nt, Artificial Sequence
  Description of Artificial Sequence: Synthetic oligonucleotide
gacgagagguuugggccgg

SEQ ID NO: 1766914 - RNA, 19 nt, Artificial Sequence
  Description of Artificial Sequence: Synthetic oligonucleotide
aggcuggacgcauuaggga

SEQ ID NO: 1766915 - RNA, 19 nt, Artificial Sequence
  Description of Artificial Sequence: Synthetic oligonucleotide
uacgaacaggucagccaca

SEQ ID NO: 1766916 - RNA, 19 nt, Artificial Sequence
  Description of Artificial Sequence: Synthetic oligonucleotide
cacuacgaacaggucagcc

SEQ ID NO: 1766917 - RNA, 19 nt, Artificial Sequence
  Description of Artificial Sequence: Synthetic oligonucleotide
gaaggugucccugaugagu

SEQ ID NO: 1766918 - RNA, 19 nt, Artificial Sequence
  Description of Artificial Sequence: Synthetic oligonucleotide
ucuuggucccauugagaau

SEQ ID NO: 1766919 - RNA, 19 nt, Artificial Sequence
  Description of Artificial Sequence: Synthetic oligonucleotide
agauggggugcaugacaag

SEQ ID NO: 1766920 - RNA, 19 nt, Artificial Sequence
  Description of Artificial Sequence: Synthetic oligonucleotide
cuuguccugauccuuuaaa

SEQ ID NO: 1766921 - RNA, 19 nt, Artificial Sequence
  Description of Artificial Sequence: Synthetic oligonucleotide
ugaaugccugaaucccagu

SEQ ID NO: 1766922 - RNA, 19 nt, Artificial Sequence
  Description of Artificial Sequence: Synthetic oligonucleotide
cuccauaccaccgggguca

SEQ ID NO: 1766923 - RNA, 19 nt, Artificial Sequence
  Description of Artificial Sequence: Synthetic oligonucleotide
gucacucccaugguugggc

SEQ ID NO: 1766924 - RNA, 19 nt, Artificial Sequence
  Description of Artificial Sequence: Synthetic oligonucleotide
gaggcauaagcugcuccug

SEQ ID NO: 1766925 - RNA, 19 nt, Artificial Sequence
  Description of Artificial Sequence: Synthetic oligonucleotide
caggucagccacaggugag

SEQ ID NO: 1766926 - RNA, 19 nt, Artificial Sequence
  Description of Artificial Sequence: Synthetic oligonucleotide
caggacaccccaugugaug

SEQ ID NO: 1766927 - RNA, 19 nt, Artificial Sequence
  Description of Artificial Sequence: Synthetic oligonucleotide
aguuguccucacaccgagc

SEQ ID NO: 1766928 - RNA, 19 nt, Artificial Sequence
  Description of Artificial Sequence: Synthetic oligonucleotide
aacggccaagcugcaaaca

SEQ ID NO: 1766929 - RNA, 19 nt, Artificial Sequence
  Description of Artificial Sequence: Synthetic oligonucleotide
agcacaauucgaggcauaa

SEQ ID NO: 1766930 - RNA, 19 nt, Artificial Sequence
  Description of Artificial Sequence: Synthetic oligonucleotide
gcaugacaagagaagacug

SEQ ID NO: 1766931 - RNA, 19 nt, Artificial Sequence
  Description of Artificial Sequence: Synthetic oligonucleotide
acacuacgaacaggucagc

SEQ ID NO: 1766932 - RNA, 19 nt, Artificial Sequence
  Description of Artificial Sequence: Synthetic oligonucleotide
uacccuuuggauggugggu

SEQ ID NO: 1766933 - RNA, 19 nt, Artificial Sequence
  Description of Artificial Sequence: Synthetic oligonucleotide
gaaaucccauuuccuccca

SEQ ID NO: 1766934 - RNA, 19 nt, Artificial Sequence
  Description of Artificial Sequence: Synthetic oligonucleotide
auagcaugccggaucacau

SEQ ID NO: 1766935 - RNA, 19 nt, Artificial Sequence
  Description of Artificial Sequence: Synthetic oligonucleotide
agagcguauugccgugcug

SEQ ID NO: 1766936 - RNA, 19 nt, Artificial Sequence
  Description of Artificial Sequence: Synthetic oligonucleotide
guagccgcuguccacccuc

SEQ ID NO: 1766937 - RNA, 19 nt, Artificial Sequence
  Description of Artificial Sequence: Synthetic oligonucleotide
accccagcacagccauacc

SEQ ID NO: 1766938 - RNA, 19 nt, Artificial Sequence
  Description of Artificial Sequence: Synthetic oligonucleotide
ggaugucucgugccuggcg

SEQ ID NO: 1766939 - RNA, 19 nt, Artificial Sequence
  Description of Artificial Sequence: Synthetic oligonucleotide
cuaggggcugagaggcccc

SEQ ID NO: 1766940 - RNA, 19 nt, Artificial Sequence
  Description of Artificial Sequence: Synthetic oligonucleotide
cacaccgagcccacacuac

SEQ ID NO: 1766941 - RNA, 19 nt, Artificial Sequence
  Description of Artificial Sequence: Synthetic oligonucleotide
gaagcccgcaaggagaacu

SEQ ID NO: 1766942 - RNA, 19 nt, Artificial Sequence
  Description of Artificial Sequence: Synthetic oligonucleotide
uuaaacggccaagcugcaa

SEQ ID NO: 1766943 - RNA, 19 nt, Artificial Sequence
  Description of Artificial Sequence: Synthetic oligonucleotide
gauuguggcgagcucuggu

SEQ ID NO: 1766944 - RNA, 19 nt, Artificial Sequence
  Description of Artificial Sequence: Synthetic oligonucleotide
guauugccgugcugugugc

SEQ ID NO: 1766945 - RNA, 19 nt, Artificial Sequence
  Description of Artificial Sequence: Synthetic oligonucleotide
cauacacgaugucccggug

SEQ ID NO: 1766946 - RNA, 19 nt, Artificial Sequence
  Description of Artificial Sequence: Synthetic oligonucleotide
ugccugaaucccaguaauu

SEQ ID NO: 1766947 - RNA, 19 nt, Artificial Sequence
  Description of Artificial Sequence: Synthetic oligonucleotide
acaccaaacuggauccugu

SEQ ID NO: 1766948 - RNA, 19 nt, Artificial Sequence
  Description of Artificial Sequence: Synthetic oligonucleotide
gagcguauugccgugcugu

SEQ ID NO: 1766949 - RNA, 19 nt, Artificial Sequence
  Description of Artificial Sequence: Synthetic oligonucleotide
ucagagcgugaaugucaug

SEQ ID NO: 1766950 - RNA, 19 nt, Artificial Sequence
  Description of Artificial Sequence: Synthetic oligonucleotide
cacgaugucccggugaaaa

SEQ ID NO: 1766951 - RNA, 19 nt, Artificial Sequence
  Description of Artificial Sequence: Synthetic oligonucleotide
agcgugaaugucaugugua

SEQ ID NO: 1766952 - RNA, 19 nt, Artificial Sequence
  Description of Artificial Sequence: Synthetic oligonucleotide
aucagagcgugaaugucau

SEQ ID NO: 1766953 - RNA, 19 nt, Artificial Sequence
  Description of Artificial Sequence: Synthetic oligonucleotide
auugccgugcugugugcaa

SEQ ID NO: 1766954 - RNA, 19 nt, Artificial Sequence
  Description of Artificial Sequence: Synthetic oligonucleotide
uaccuucauaaguguucac

SEQ ID NO: 1766955 - RNA, 19 nt, Artificial Sequence
  Description of Artificial Sequence: Synthetic oligonucleotide
ugccgugcugugugcaaac

SEQ ID NO: 1766956 - RNA, 19 nt, Artificial Sequence
  Description of Artificial Sequence: Synthetic oligonucleotide
acaguuguccucacaccga

SEQ ID NO: 1766957 - RNA, 19 nt, Artificial Sequence
  Description of Artificial Sequence: Synthetic oligonucleotide
accgagcccacacuacgaa

SEQ ID NO: 1766958 - RNA, 19 nt, Artificial Sequence
  Description of Artificial Sequence: Synthetic oligonucleotide
aggcccaaugugaucucgg

SEQ ID NO: 1766959 - RNA, 19 nt, Artificial Sequence
  Description of Artificial Sequence: Synthetic oligonucleotide
ccacacuacgaacagguca

SEQ ID NO: 1766960 - RNA, 19 nt, Artificial Sequence
  Description of Artificial Sequence: Synthetic oligonucleotide
gagguuugggccggucggc

SEQ ID NO: 1766961 - RNA, 19 nt, Artificial Sequence
  Description of Artificial Sequence: Synthetic oligonucleotide
agcguugaggcagccaaaa

SEQ ID NO: 1766962 - RNA, 19 nt, Artificial Sequence
  Description of Artificial Sequence: Synthetic oligonucleotide
gcucccauagguguagaug

SEQ ID NO: 1766963 - RNA, 19 nt, Artificial Sequence
  Description of Artificial Sequence: Synthetic oligonucleotide
gcgugaaugucauguguac

SEQ ID NO: 1766964 - RNA, 19 nt, Artificial Sequence
  Description of Artificial Sequence: Synthetic oligonucleotide
ggggucacucccaugguug

SEQ ID NO: 1766965 - RNA, 19 nt, Artificial Sequence
  Description of Artificial Sequence: Synthetic oligonucleotide
cucgcucccauagguguag

SEQ ID NO: 1766966 - RNA, 19 nt, Artificial Sequence
  Description of Artificial Sequence: Synthetic oligonucleotide
auucgaggcauaagcugcu

SEQ ID NO: 1766967 - RNA, 19 nt, Artificial Sequence
  Description of Artificial Sequence: Synthetic oligonucleotide
uccuaggggcugagaggcc

SEQ ID NO: 1766968 - RNA, 19 nt, Artificial Sequence
  Description of Artificial Sequence: Synthetic oligonucleotide
gcagcguugaggcagccaa

SEQ ID NO: 1766969 - RNA, 19 nt, Artificial Sequence
  Description of Artificial Sequence: Synthetic oligonucleotide
ugucucgugccuggcgggc

SEQ ID NO: 1766970 - RNA, 19 nt, Artificial Sequence
  Description of Artificial Sequence: Synthetic oligonucleotide
gagcccauaggccacugau

SEQ ID NO: 1766971 - RNA, 19 nt, Artificial Sequence
  Description of Artificial Sequence: Synthetic oligonucleotide
uguagccgcuguccacccu

SEQ ID NO: 1766972 - RNA, 19 nt, Artificial Sequence
  Description of Artificial Sequence: Synthetic oligonucleotide
guccagagcguauugccgu

SEQ ID NO: 1766973 - RNA, 19 nt, Artificial Sequence
  Description of Artificial Sequence: Synthetic oligonucleotide
cccgcaaggagaacuuccc

SEQ ID NO: 1766974 - RNA, 19 nt, Artificial Sequence
  Description of Artificial Sequence: Synthetic oligonucleotide
cagucaaacccaggacgag

SEQ ID NO: 1766975 - RNA, 19 nt, Artificial Sequence
  Description of Artificial Sequence: Synthetic oligonucleotide
uugggcucuguaagcccaa

SEQ ID NO: 1766976 - RNA, 19 nt, Artificial Sequence
  Description of Artificial Sequence: Synthetic oligonucleotide
cugauccuuuaaacggcca

SEQ ID NO: 1766977 - RNA, 19 nt, Artificial Sequence
  Description of Artificial Sequence: Synthetic oligonucleotide
ccccaucucauacacgaug

SEQ ID NO: 1766978 - RNA, 19 nt, Artificial Sequence
  Description of Artificial Sequence: Synthetic oligonucleotide
ccaaugugaucucggugag

SEQ ID NO: 1766979 - RNA, 19 nt, Artificial Sequence
  Description of Artificial Sequence: Synthetic oligonucleotide
agcccauaggccacugaug

SEQ ID NO: 1766980 - RNA, 19 nt, Artificial Sequence
  Description of Artificial Sequence: Synthetic oligonucleotide
guguucacugccuccagau

SEQ ID NO: 1766981 - RNA, 19 nt, Artificial Sequence
  Description of Artificial Sequence: Synthetic oligonucleotide
agaaagccccgaauacagu

SEQ ID NO: 1766982 - RNA, 19 nt, Artificial Sequence
  Description of Artificial Sequence: Synthetic oligonucleotide
gccaagcugcaaacaagcg

SEQ ID NO: 1766983 - RNA, 19 nt, Artificial Sequence
  Description of Artificial Sequence: Synthetic oligonucleotide
gccccgaauacaguugucc

SEQ ID NO: 1766984 - RNA, 19 nt, Artificial Sequence
  Description of Artificial Sequence: Synthetic oligonucleotide
ccagucaaacccaggacga

SEQ ID NO: 1766985 - RNA, 19 nt, Artificial Sequence
  Description of Artificial Sequence: Synthetic oligonucleotide
gacaccccaugugaugcca

SEQ ID NO: 1766986 - RNA, 19 nt, Artificial Sequence
  Description of Artificial Sequence: Synthetic oligonucleotide
ggacgcauuagggagcaca

SEQ ID NO: 1766987 - RNA, 19 nt, Artificial Sequence
  Description of Artificial Sequence: Synthetic oligonucleotide
gcccaaugugaucucggug

SEQ ID NO: 1766988 - RNA, 19 nt, Artificial Sequence
  Description of Artificial Sequence: Synthetic oligonucleotide
gcaaacaagcguggaggcc

SEQ ID NO: 1766989 - RNA, 19 nt, Artificial Sequence
  Description of Artificial Sequence: Synthetic oligonucleotide
gacaccccagcacagccau

SEQ ID NO: 1766990 - RNA, 19 nt, Artificial Sequence
  Description of Artificial Sequence: Synthetic oligonucleotide
cauuccgauuggccagcac

SEQ ID NO: 1766991 - RNA, 19 nt, Artificial Sequence
  Description of Artificial Sequence: Synthetic oligonucleotide
agcccgcaaggagaacuuc

SEQ ID NO: 1766992 - RNA, 19 nt, Artificial Sequence
  Description of Artificial Sequence: Synthetic oligonucleotide
cccgaauacaguuguccuc

SEQ ID NO: 1766993 - RNA, 19 nt, Artificial Sequence
  Description of Artificial Sequence: Synthetic oligonucleotide
ucauuccgauuggccagca

SEQ ID NO: 1766994 - RNA, 19 nt, Artificial Sequence
  Description of Artificial Sequence: Synthetic oligonucleotide
uggugggucccagcaugcc

SEQ ID NO: 1766995 - RNA, 19 nt, Artificial Sequence
  Description of Artificial Sequence: Synthetic oligonucleotide
cugaaucagcugguuccug

SEQ ID NO: 1766996 - RNA, 19 nt, Artificial Sequence
  Description of Artificial Sequence: Synthetic oligonucleotide
cucaauccuaggggcugag

SEQ ID NO: 1766997 - RNA, 19 nt, Artificial Sequence
  Description of Artificial Sequence: Synthetic oligonucleotide
uugccgugcugugugcaaa

SEQ ID NO: 1766998 - RNA, 19 nt, Artificial Sequence
  Description of Artificial Sequence: Synthetic oligonucleotide
uucgaggcauaagcugcuc

SEQ ID NO: 1766999 - RNA, 19 nt, Artificial Sequence
  Description of Artificial Sequence: Synthetic oligonucleotide
cagccaaaaggacccgcca

SEQ ID NO: 1767000 - RNA, 19 nt, Artificial Sequence
  Description of Artificial Sequence: Synthetic oligonucleotide
ugggucccuccagucaaac

SEQ ID NO: 1767001 - RNA, 19 nt, Artificial Sequence
  Description of Artificial Sequence: Synthetic oligonucleotide
cccgcauucccuucuccag

SEQ ID NO: 1767002 - RNA, 19 nt, Artificial Sequence
  Description of Artificial Sequence: Synthetic oligonucleotide
ccaugugaugccauaucga

SEQ ID NO: 1767003 - RNA, 19 nt, Artificial Sequence
  Description of Artificial Sequence: Synthetic oligonucleotide
acgaagcccgcaaggagaa

SEQ ID NO: 1767004 - RNA, 19 nt, Artificial Sequence
  Description of Artificial Sequence: Synthetic oligonucleotide
guggaggcccaaugugauc

SEQ ID NO: 1767005 - RNA, 19 nt, Artificial Sequence
  Description of Artificial Sequence: Synthetic oligonucleotide
aagcccgcaaggagaacuu

SEQ ID NO: 1767006 - RNA, 19 nt, Artificial Sequence
  Description of Artificial Sequence: Synthetic oligonucleotide
gcacaauucgaggcauaag

SEQ ID NO: 1767007 - RNA, 19 nt, Artificial Sequence
  Description of Artificial Sequence: Synthetic oligonucleotide
gcuggacgcauuagggagc

SEQ ID NO: 1767008 - RNA, 19 nt, Artificial Sequence
  Description of Artificial Sequence: Synthetic oligonucleotide
guuugggccggucggcucu

SEQ ID NO: 1767009 - RNA, 19 nt, Artificial Sequence
  Description of Artificial Sequence: Synthetic oligonucleotide
cacucccaugguugggcuc

SEQ ID NO: 1767010 - RNA, 19 nt, Artificial Sequence
  Description of Artificial Sequence: Synthetic oligonucleotide
ggugagcaugucugccagc

SEQ ID NO: 1767011 - RNA, 19 nt, Artificial Sequence
  Description of Artificial Sequence: Synthetic oligonucleotide
caccgagcccacacuacga

SEQ ID NO: 1767012 - RNA, 19 nt, Artificial Sequence
  Description of Artificial Sequence: Synthetic oligonucleotide
cuggacgcauuagggagca

SEQ ID NO: 1767013 - RNA, 19 nt, Artificial Sequence
  Description of Artificial Sequence: Synthetic oligonucleotide
augugaucucggugagcau

SEQ ID NO: 1767014 - RNA, 19 nt, Artificial Sequence
  Description of Artificial Sequence: Synthetic oligonucleotide
ccgugcugugugcaaacag

SEQ ID NO: 1767015 - RNA, 19 nt, Artificial Sequence
  Description of Artificial Sequence: Synthetic oligonucleotide
gacgcauuagggagcacau

SEQ ID NO: 1767016 - RNA, 19 nt, Artificial Sequence
  Description of Artificial Sequence: Synthetic oligonucleotide
uccgauuggccagcacaau

SEQ ID NO: 1767017 - RNA, 19 nt, Artificial Sequence
  Description of Artificial Sequence: Synthetic oligonucleotide
ccgcauucccuucuccagc

SEQ ID NO: 1767018 - RNA, 19 nt, Artificial Sequence
  Description of Artificial Sequence: Synthetic oligonucleotide
gggucccuccagucaaacc

SEQ ID NO: 1767019 - RNA, 19 nt, Artificial Sequence
  Description of Artificial Sequence: Synthetic oligonucleotide
uuugggccggucggcucug

SEQ ID NO: 1767020 - RNA, 19 nt, Artificial Sequence
  Description of Artificial Sequence: Synthetic oligonucleotide
gugaucucggugagcaugu

SEQ ID NO: 1767021 - RNA, 19 nt, Artificial Sequence
  Description of Artificial Sequence: Synthetic oligonucleotide
ucgugccuggcgggcaaug

SEQ ID NO: 1767022 - RNA, 19 nt, Artificial Sequence
  Description of Artificial Sequence: Synthetic oligonucleotide
ggggugcaugacaagagaa

SEQ ID NO: 1767023 - RNA, 19 nt, Artificial Sequence
  Description of Artificial Sequence: Synthetic oligonucleotide
agcagcguugaggcagcca

SEQ ID NO: 1767024 - RNA, 19 nt, Artificial Sequence
  Description of Artificial Sequence: Synthetic oligonucleotide
acaagcguggaggcccaau

SEQ ID NO: 1767025 - RNA, 19 nt, Artificial Sequence
  Description of Artificial Sequence: Synthetic oligonucleotide
ccaagcugcaaacaagcgu

SEQ ID NO: 1767026 - RNA, 19 nt, Artificial Sequence
  Description of Artificial Sequence: Synthetic oligonucleotide
gguuccuggccaaggggac

SEQ ID NO: 1767027 - RNA, 19 nt, Artificial Sequence
  Description of Artificial Sequence: Synthetic oligonucleotide
ugaucucggugagcauguc

SEQ ID NO: 1767028 - RNA, 19 nt, Artificial Sequence
  Description of Artificial Sequence: Synthetic oligonucleotide
cauuuccucccaggauguc

SEQ ID NO: 1767029 - RNA, 19 nt, Artificial Sequence
  Description of Artificial Sequence: Synthetic oligonucleotide
uccaggucuuggucccauu

SEQ ID NO: 1767030 - RNA, 19 nt, Artificial Sequence
  Description of Artificial Sequence: Synthetic oligonucleotide
ccggggcagauacuucugc

SEQ ID NO: 1767031 - RNA, 19 nt, Artificial Sequence
  Description of Artificial Sequence: Synthetic oligonucleotide
cagggcuuucccacaguua

SEQ ID NO: 1767032 - RNA, 19 nt, Artificial Sequence
  Description of Artificial Sequence: Synthetic oligonucleotide
ggguucacuugccaacugu

SEQ ID NO: 1767033 - RNA, 19 nt, Artificial Sequence
  Description of Artificial Sequence: Synthetic oligonucleotide
cagccggggcagauacuuc

SEQ ID NO: 1767034 - RNA, 19 nt, Artificial Sequence
  Description of Artificial Sequence: Synthetic oligonucleotide
gcccacacuacgaacaggu

SEQ ID NO: 1767035 - RNA, 19 nt, Artificial Sequence
  Description of Artificial Sequence: Synthetic oligonucleotide
ugggcucuguaagcccaaa

SEQ ID NO: 1767036 - RNA, 19 nt, Artificial Sequence
  Description of Artificial Sequence: Synthetic oligonucleotide
augccauaucgagcagcgu

SEQ ID NO: 1767037 - RNA, 19 nt, Artificial Sequence
  Description of Artificial Sequence: Synthetic oligonucleotide
ccgagcccacacuacgaac

SEQ ID NO: 1767038 - RNA, 19 nt, Artificial Sequence
  Description of Artificial Sequence: Synthetic oligonucleotide
ucgcucccauagguguaga

SEQ ID NO: 1767039 - RNA, 19 nt, Artificial Sequence
  Description of Artificial Sequence: Synthetic oligonucleotide
gcguggaggcccaauguga

SEQ ID NO: 1767040 - RNA, 19 nt, Artificial Sequence
  Description of Artificial Sequence: Synthetic oligonucleotide
aaggacccgccaggcugga

SEQ ID NO: 1767041 - RNA, 19 nt, Artificial Sequence
  Description of Artificial Sequence: Synthetic oligonucleotide
aacaagcguggaggcccaa

SEQ ID NO: 1767042 - RNA, 19 nt, Artificial Sequence
  Description of Artificial Sequence: Synthetic oligonucleotide
uugggccggucggcucugg

SEQ ID NO: 1767043 - RNA, 19 nt, Artificial Sequence
  Description of Artificial Sequence: Synthetic oligonucleotide
cucacaccgagcccacacu

SEQ ID NO: 1767044 - RNA, 19 nt, Artificial Sequence
  Description of Artificial Sequence: Synthetic oligonucleotide
uggucccauugagaaugua

SEQ ID NO: 1767045 - RNA, 19 nt, Artificial Sequence
  Description of Artificial Sequence: Synthetic oligonucleotide
acgcauuagggagcacauu

SEQ ID NO: 1767046 - RNA, 19 nt, Artificial Sequence
  Description of Artificial Sequence: Synthetic oligonucleotide
ggccggucggcucuggugu

SEQ ID NO: 1767047 - RNA, 19 nt, Artificial Sequence
  Description of Artificial Sequence: Synthetic oligonucleotide
gagcagcguugaggcagcc

SEQ ID NO: 1767048 - RNA, 19 nt, Artificial Sequence
  Description of Artificial Sequence: Synthetic oligonucleotide
ccagagcguauugccgugc

SEQ ID NO: 1767049 - RNA, 19 nt, Artificial Sequence
  Description of Artificial Sequence: Synthetic oligonucleotide
guguaccuucauaaguguu

SEQ ID NO: 1767050 - RNA, 19 nt, Artificial Sequence
  Description of Artificial Sequence: Synthetic oligonucleotide
agguguagauggggugcau

SEQ ID NO: 1767051 - RNA, 19 nt, Artificial Sequence
  Description of Artificial Sequence: Synthetic oligonucleotide
cccacacuacgaacagguc

SEQ ID NO: 1767052 - RNA, 19 nt, Artificial Sequence
  Description of Artificial Sequence: Synthetic oligonucleotide
cagagcguauugccgugcu

SEQ ID NO: 1767053 - RNA, 19 nt, Artificial Sequence
  Description of Artificial Sequence: Synthetic oligonucleotide
caccccaugugaugccaua

SEQ ID NO: 1767054 - RNA, 19 nt, Artificial Sequence
  Description of Artificial Sequence: Synthetic oligonucleotide
ggauccuguccagagcgua

SEQ ID NO: 1767055 - RNA, 19 nt, Artificial Sequence
  Description of Artificial Sequence: Synthetic oligonucleotide
cucccaggacaccccaugu

SEQ ID NO: 1767056 - RNA, 19 nt, Artificial Sequence
  Description of Artificial Sequence: Synthetic oligonucleotide
cagcguugaggcagccaaa

SEQ ID NO: 1767057 - RNA, 19 nt, Artificial Sequence
  Description of Artificial Sequence: Synthetic oligonucleotide
caccggggucacucccaug

SEQ ID NO: 1767058 - RNA, 19 nt, Artificial Sequence
  Description of Artificial Sequence: Synthetic oligonucleotide
cucucgggucaggagccca

SEQ ID NO: 1767059 - RNA, 19 nt, Artificial Sequence
  Description of Artificial Sequence: Synthetic oligonucleotide
ggcccaaugugaucucggu

SEQ ID NO: 1767060 - RNA, 19 nt, Artificial Sequence
  Description of Artificial Sequence: Synthetic oligonucleotide
ccaggacgagagguuuggg

SEQ ID NO: 1767061 - RNA, 19 nt, Artificial Sequence
  Description of Artificial Sequence: Synthetic oligonucleotide
acacgaugucccggugaaa

SEQ ID NO: 1767062 - RNA, 19 nt, Artificial Sequence
  Description of Artificial Sequence: Synthetic oligonucleotide
ggagcccauaggccacuga

SEQ ID NO: 1767063 - RNA, 19 nt, Artificial Sequence
  Description of Artificial Sequence: Synthetic oligonucleotide
gucucgugccuggcgggca

SEQ ID NO: 1767064 - RNA, 19 nt, Artificial Sequence
  Description of Artificial Sequence: Synthetic oligonucleotide
cgcaaggagaacuuccccu

SEQ ID NO: 1767065 - RNA, 19 nt, Artificial Sequence
  Description of Artificial Sequence: Synthetic oligonucleotide
uggacgcauuagggagcac

SEQ ID NO: 1767066 - RNA, 19 nt, Artificial Sequence
  Description of Artificial Sequence: Synthetic oligonucleotide
gccggaucacaugguacuc

SEQ ID NO: 1767067 - RNA, 19 nt, Artificial Sequence
  Description of Artificial Sequence: Synthetic oligonucleotide
ccccgaauacaguuguccu

SEQ ID NO: 1767068 - RNA, 19 nt, Artificial Sequence
  Description of Artificial Sequence: Synthetic oligonucleotide
gccggggcagauacuucug

SEQ ID NO: 1767069 - RNA, 19 nt, Artificial Sequence
  Description of Artificial Sequence: Synthetic oligonucleotide
acgagagguuugggccggu

SEQ ID NO: 1767070 - RNA, 19 nt, Artificial Sequence
  Description of Artificial Sequence: Synthetic oligonucleotide
ggguagccuuguccugauc

SEQ ID NO: 1767071 - RNA, 19 nt, Artificial Sequence
  Description of Artificial Sequence: Synthetic oligonucleotide
ggucggcucuggugucuuc

SEQ ID NO: 1767072 - RNA, 19 nt, Artificial Sequence
  Description of Artificial Sequence: Synthetic oligonucleotide
ccucaauccuaggggcuga

SEQ ID NO: 1767073 - RNA, 19 nt, Artificial Sequence
  Description of Artificial Sequence: Synthetic oligonucleotide
ccgauuggccagcacaauu

SEQ ID NO: 1767074 - RNA, 19 nt, Artificial Sequence
  Description of Artificial Sequence: Synthetic oligonucleotide
cucgggucaggagcccaua

SEQ ID NO: 1767075 - RNA, 19 nt, Artificial Sequence
  Description of Artificial Sequence: Synthetic oligonucleotide
gccggucggcucugguguc

SEQ ID NO: 1767076 - RNA, 19 nt, Artificial Sequence
  Description of Artificial Sequence: Synthetic oligonucleotide
gcguauugccgugcugugu

SEQ ID NO: 1767077 - RNA, 19 nt, Artificial Sequence
  Description of Artificial Sequence: Synthetic oligonucleotide
cguggaggcccaaugugau

SEQ ID NO: 1767078 - RNA, 19 nt, Artificial Sequence
  Description of Artificial Sequence: Synthetic oligonucleotide
gggguagccuuguccugau

SEQ ID NO: 1767079 - RNA, 19 nt, Artificial Sequence
  Description of Artificial Sequence: Synthetic oligonucleotide
ccccucaauccuaggggcu

SEQ ID NO: 1767080 - RNA, 19 nt, Artificial Sequence
  Description of Artificial Sequence: Synthetic oligonucleotide
cgagagguuugggccgguc

SEQ ID NO: 1767081 - RNA, 19 nt, Artificial Sequence
  Description of Artificial Sequence: Synthetic oligonucleotide
cgaagcccgcaaggagaac

SEQ ID NO: 1767082 - RNA, 19 nt, Artificial Sequence
  Description of Artificial Sequence: Synthetic oligonucleotide
cucgugccuggcgggcaau

SEQ ID NO: 1767083 - RNA, 19 nt, Artificial Sequence
  Description of Artificial Sequence: Synthetic oligonucleotide
ccaccggggucacucccau

SEQ ID NO: 1767084 - RNA, 19 nt, Artificial Sequence
  Description of Artificial Sequence: Synthetic oligonucleotide
ccggggucacucccauggu

SEQ ID NO: 1767085 - RNA, 19 nt, Artificial Sequence
  Description of Artificial Sequence: Synthetic oligonucleotide
ccggucggcucuggugucu

SEQ ID NO: 1767086 - RNA, 19 nt, Artificial Sequence
  Description of Artificial Sequence: Synthetic oligonucleotide
aguauaaugaaauccaagc

SEQ ID NO: 1767087 - RNA, 19 nt, Artificial Sequence
  Description of Artificial Sequence: Synthetic oligonucleotide
aguaacauauucuucaacc

SEQ ID NO: 1767088 - RNA, 19 nt, Artificial Sequence
  Description of Artificial Sequence: Synthetic oligonucleotide
agauacaaaaucuugaagg

SEQ ID NO: 1767089 - RNA, 19 nt, Artificial Sequence
  Description of Artificial Sequence: Synthetic oligonucleotide
aucuguuucaccuaggccc

SEQ ID NO: 1767090 - RNA, 19 nt, Artificial Sequence
  Description of Artificial Sequence: Synthetic oligonucleotide
uuucaauacacaaagagac

SEQ ID NO: 1767091 - RNA, 19 nt, Artificial Sequence
  Description of Artificial Sequence: Synthetic oligonucleotide
uuuaaauuccgcaauguag

SEQ ID NO: 1767092 - RNA, 19 nt, Artificial Sequence
  Description of Artificial Sequence: Synthetic oligonucleotide
uguuucaauacacaaagag

SEQ ID NO: 1767093 - RNA, 19 nt, Artificial Sequence
  Description of Artificial Sequence: Synthetic oligonucleotide
gacaacauaauccaggccc

SEQ ID NO: 1767094 - RNA, 19 nt, Artificial Sequence
  Description of Artificial Sequence: Synthetic oligonucleotide
ugaagaacgcaccaaaggg

SEQ ID NO: 1767095 - RNA, 19 nt, Artificial Sequence
  Description of Artificial Sequence: Synthetic oligonucleotide
aaacuuaaugcucuaacug

SEQ ID NO: 1767096 - RNA, 19 nt, Artificial Sequence
  Description of Artificial Sequence: Synthetic oligonucleotide
auaucuuccaaauacccgg

SEQ ID NO: 1767097 - RNA, 19 nt, Artificial Sequence
  Description of Artificial Sequence: Synthetic oligonucleotide
aaauaucuuccaaauaccc

SEQ ID NO: 1767098 - RNA, 19 nt, Artificial Sequence
  Description of Artificial Sequence: Synthetic oligonucleotide
uauaaugaaauccaagcuc

SEQ ID NO: 1767099 - RNA, 19 nt, Artificial Sequence
  Description of Artificial Sequence: Synthetic oligonucleotide
uacacaaagagacugguca

SEQ ID NO: 1767100 - RNA, 19 nt, Artificial Sequence
  Description of Artificial Sequence: Synthetic oligonucleotide
uuaaauuccgcaauguagu

SEQ ID NO: 1767101 - RNA, 19 nt, Artificial Sequence
  Description of Artificial Sequence: Synthetic oligonucleotide
cauguuucaauacacaaag

SEQ ID NO: 1767102 - RNA, 19 nt, Artificial Sequence
  Description of Artificial Sequence: Synthetic oligonucleotide
ucuuaacagaacaaaaucu

SEQ ID NO: 1767103 - RNA, 19 nt, Artificial Sequence
  Description of Artificial Sequence: Synthetic oligonucleotide
uacaaaaucuugaaggucu

SEQ ID NO: 1767104 - RNA, 19 nt, Artificial Sequence
  Description of Artificial Sequence: Synthetic oligonucleotide
ucagacaucagacauuuca

SEQ ID NO: 1767105 - RNA, 19 nt, Artificial Sequence
  Description of Artificial Sequence: Synthetic oligonucleotide
ucugucuuuaaccauggag

SEQ ID NO: 1767106 - RNA, 19 nt, Artificial Sequence
  Description of Artificial Sequence: Synthetic oligonucleotide
uuuucuuuuagccacuaga

SEQ ID NO: 1767107 - RNA, 19 nt, Artificial Sequence
  Description of Artificial Sequence: Synthetic oligonucleotide
aaaacuuaaugcucuaacu

SEQ ID NO: 1767108 - RNA, 19 nt, Artificial Sequence
  Description of Artificial Sequence: Synthetic oligonucleotide
uuguccuagaguuaaacag

SEQ ID NO: 1767109 - RNA, 19 nt, Artificial Sequence
  Description of Artificial Sequence: Synthetic oligonucleotide
aguauuugaacuucucagg

SEQ ID NO: 1767110 - RNA, 19 nt, Artificial Sequence
  Description of Artificial Sequence: Synthetic oligonucleotide
acacaucuaauccugauag

SEQ ID NO: 1767111 - RNA, 19 nt, Artificial Sequence
  Description of Artificial Sequence: Synthetic oligonucleotide
ugcaguauaaugaaaucca

SEQ ID NO: 1767112 - RNA, 19 nt, Artificial Sequence
  Description of Artificial Sequence: Synthetic oligonucleotide
uuucuugcggucuuaacag

SEQ ID NO: 1767113 - RNA, 19 nt, Artificial Sequence
  Description of Artificial Sequence: Synthetic oligonucleotide
cugccuuauaugaagaacg

SEQ ID NO: 1767114 - RNA, 19 nt, Artificial Sequence
  Description of Artificial Sequence: Synthetic oligonucleotide
agacauuucagacucaaca

SEQ ID NO: 1767115 - RNA, 19 nt, Artificial Sequence
  Description of Artificial Sequence: Synthetic oligonucleotide
aggacaacauaauccaggc

SEQ ID NO: 1767116 - RNA, 19 nt, Artificial Sequence
  Description of Artificial Sequence: Synthetic oligonucleotide
aagaacgcaccaaagggcc

SEQ ID NO: 1767117 - RNA, 19 nt, Artificial Sequence
  Description of Artificial Sequence: Synthetic oligonucleotide
ucaauacacaaagagacug

SEQ ID NO: 1767118 - RNA, 19 nt, Artificial Sequence
  Description of Artificial Sequence: Synthetic oligonucleotide
cuuauaugaagaacgcacc

SEQ ID NO: 1767119 - RNA, 19 nt, Artificial Sequence
  Description of Artificial Sequence: Synthetic oligonucleotide
augaagaacgcaccaaagg

SEQ ID NO: 1767120 - RNA, 19 nt, Artificial Sequence
  Description of Artificial Sequence: Synthetic oligonucleotide
ugauagagcaaccuuuucu

SEQ ID NO: 1767121 - RNA, 19 nt, Artificial Sequence
  Description of Artificial Sequence: Synthetic oligonucleotide
ugauguuuugguaacaaua

SEQ ID NO: 1767122 - RNA, 19 nt, Artificial Sequence
  Description of Artificial Sequence: Synthetic oligonucleotide
aauuccgcaauguaguuuu

SEQ ID NO: 1767123 - RNA, 19 nt, Artificial Sequence
  Description of Artificial Sequence: Synthetic oligonucleotide
auuucuugcggucuuaaca

SEQ ID NO: 1767124 - RNA, 19 nt, Artificial Sequence
  Description of Artificial Sequence: Synthetic oligonucleotide
uuauaugaagaacgcacca

SEQ ID NO: 1767125 - RNA, 19 nt, Artificial Sequence
  Description of Artificial Sequence: Synthetic oligonucleotide
aauugcuuuggccguauug

SEQ ID NO: 1767126 - RNA, 19 nt, Artificial Sequence
  Description of Artificial Sequence: Synthetic oligonucleotide
uguggagauuuaaauuccg

SEQ ID NO: 1767127 - RNA, 19 nt, Artificial Sequence
  Description of Artificial Sequence: Synthetic oligonucleotide
aacagaacaaaaucugcaa

SEQ ID NO: 1767128 - RNA, 19 nt, Artificial Sequence
  Description of Artificial Sequence: Synthetic oligonucleotide
acaugauuguggcuguggc

SEQ ID NO: 1767129 - RNA, 19 nt, Artificial Sequence
  Description of Artificial Sequence: Synthetic oligonucleotide
gaaauccaagcucauuucc

SEQ ID NO: 1767130 - RNA, 19 nt, Artificial Sequence
  Description of Artificial Sequence: Synthetic oligonucleotide
aauaucaggcugaacuuuc

SEQ ID NO: 1767131 - RNA, 19 nt, Artificial Sequence
  Description of Artificial Sequence: Synthetic oligonucleotide
auccacgcagcguagagac

SEQ ID NO: 1767132 - RNA, 19 nt, Artificial Sequence
  Description of Artificial Sequence: Synthetic oligonucleotide
uugacauguuucaauacac

SEQ ID NO: 1767133 - RNA, 19 nt, Artificial Sequence
  Description of Artificial Sequence: Synthetic oligonucleotide
uggagauuuaaauuccgca

SEQ ID NO: 1767134 - RNA, 19 nt, Artificial Sequence
  Description of Artificial Sequence: Synthetic oligonucleotide
cauggaggcagucuuaacc

SEQ ID NO: 1767135 - RNA, 19 nt, Artificial Sequence
  Description of Artificial Sequence: Synthetic oligonucleotide
aagcaugacacagucuugg

SEQ ID NO: 1767136 - RNA, 19 nt, Artificial Sequence
  Description of Artificial Sequence: Synthetic oligonucleotide
uugcaguauaaugaaaucc

SEQ ID NO: 1767137 - RNA, 19 nt, Artificial Sequence
  Description of Artificial Sequence: Synthetic oligonucleotide
acaucuaauccugauagag

SEQ ID NO: 1767138 - RNA, 19 nt, Artificial Sequence
  Description of Artificial Sequence: Synthetic oligonucleotide
uauauuguccuagaguuaa

SEQ ID NO: 1767139 - RNA, 19 nt, Artificial Sequence
  Description of Artificial Sequence: Synthetic oligonucleotide
auaaugaaauccaagcuca

SEQ ID NO: 1767140 - RNA, 19 nt, Artificial Sequence
  Description of Artificial Sequence: Synthetic oligonucleotide
uguccuagaguuaaacagu

SEQ ID NO: 1767141 - RNA, 19 nt, Artificial Sequence
  Description of Artificial Sequence: Synthetic oligonucleotide
aaaaucuugaaggucuggu

SEQ ID NO: 1767142 - RNA, 19 nt, Artificial Sequence
  Description of Artificial Sequence: Synthetic oligonucleotide
agauuuaaauuccgcaaug

SEQ ID NO: 1767143 - RNA, 19 nt, Artificial Sequence
  Description of Artificial Sequence: Synthetic oligonucleotide
ucucagaucuccucggaag

SEQ ID NO: 1767144 - RNA, 19 nt, Artificial Sequence
  Description of Artificial Sequence: Synthetic oligonucleotide
uguugcguggacuugcuca

SEQ ID NO: 1767145 - RNA, 19 nt, Artificial Sequence
  Description of Artificial Sequence: Synthetic oligonucleotide
ucaucuguuucaccuaggc

SEQ ID NO: 1767146 - RNA, 19 nt, Artificial Sequence
  Description of Artificial Sequence: Synthetic oligonucleotide
aauucaccugccuuauaug

SEQ ID NO: 1767147 - RNA, 19 nt, Artificial Sequence
  Description of Artificial Sequence: Synthetic oligonucleotide
uuacccauggguaucucug

SEQ ID NO: 1767148 - RNA, 19 nt, Artificial Sequence
  Description of Artificial Sequence: Synthetic oligonucleotide
uucagacucaacaguacug

SEQ ID NO: 1767149 - RNA, 19 nt, Artificial Sequence
  Description of Artificial Sequence: Synthetic oligonucleotide
agagcaaccuuuucuacug

SEQ ID NO: 1767150 - RNA, 19 nt, Artificial Sequence
  Description of Artificial Sequence: Synthetic oligonucleotide
uuuuguuggcugcauauau

SEQ ID NO: 1767151 - RNA, 19 nt, Artificial Sequence
  Description of Artificial Sequence: Synthetic oligonucleotide
uuauugauguuuugguaac

SEQ ID NO: 1767152 - RNA, 19 nt, Artificial Sequence
  Description of Artificial Sequence: Synthetic oligonucleotide
uugguaacaauaucaggcu

SEQ ID NO: 1767153 - RNA, 19 nt, Artificial Sequence
  Description of Artificial Sequence: Synthetic oligonucleotide
uccucuguaauuccggaac

SEQ ID NO: 1767154 - RNA, 19 nt, Artificial Sequence
  Description of Artificial Sequence: Synthetic oligonucleotide
ucugacgcuuuaaauuucc

SEQ ID NO: 1767155 - RNA, 19 nt, Artificial Sequence
  Description of Artificial Sequence: Synthetic oligonucleotide
ucaacaguacugcugcaca

SEQ ID NO: 1767156 - RNA, 19 nt, Artificial Sequence
  Description of Artificial Sequence: Synthetic oligonucleotide
ugugcguacacaucuaauc

SEQ ID NO: 1767157 - RNA, 19 nt, Artificial Sequence
  Description of Artificial Sequence: Synthetic oligonucleotide
gaacaugaaaggcuggcac

SEQ ID NO: 1767158 - RNA, 19 nt, Artificial Sequence
  Description of Artificial Sequence: Synthetic oligonucleotide
uuaagguggcguuuuguug

SEQ ID NO: 1767159 - RNA, 19 nt, Artificial Sequence
  Description of Artificial Sequence: Synthetic oligonucleotide
ugaaaggcuggcaccaacc

SEQ ID NO: 1767160 - RNA, 19 nt, Artificial Sequence
  Description of Artificial Sequence: Synthetic oligonucleotide
ucucugucuuuaaccaugg

SEQ ID NO: 1767161 - RNA, 19 nt, Artificial Sequence
  Description of Artificial Sequence: Synthetic oligonucleotide
guuuugguaacaauaucag

SEQ ID NO: 1767162 - RNA, 19 nt, Artificial Sequence
  Description of Artificial Sequence: Synthetic oligonucleotide
auauucuccaccuccccag

SEQ ID NO: 1767163 - RNA, 19 nt, Artificial Sequence
  Description of Artificial Sequence: Synthetic oligonucleotide
uucaauacacaaagagacu

SEQ ID NO: 1767164 - RNA, 19 nt, Artificial Sequence
  Description of Artificial Sequence: Synthetic oligonucleotide
ucaggaguaacauauucuu

SEQ ID NO: 1767165 - RNA, 19 nt, Artificial Sequence
  Description of Artificial Sequence: Synthetic oligonucleotide
caucuaauccugauagagc

SEQ ID NO: 1767166 - RNA, 19 nt, Artificial Sequence
  Description of Artificial Sequence: Synthetic oligonucleotide
aacaugauuguggcugugg

SEQ ID NO: 1767167 - RNA, 19 nt, Artificial Sequence
  Description of Artificial Sequence: Synthetic oligonucleotide
auuggcauccaaaggaggg

SEQ ID NO: 1767168 - RNA, 19 nt, Artificial Sequence
  Description of Artificial Sequence: Synthetic oligonucleotide
augcacaggaacaugaaag

SEQ ID NO: 1767169 - RNA, 19 nt, Artificial Sequence
  Description of Artificial Sequence: Synthetic oligonucleotide
ucagacucaacaguacugc

SEQ ID NO: 1767170 - RNA, 19 nt, Artificial Sequence
  Description of Artificial Sequence: Synthetic oligonucleotide
ccuuauaugaagaacgcac

SEQ ID NO: 1767171 - RNA, 19 nt, Artificial Sequence
  Description of Artificial Sequence: Synthetic oligonucleotide
auacaaaaucuugaagguc

SEQ ID NO: 1767172 - RNA, 19 nt, Artificial Sequence
  Description of Artificial Sequence: Synthetic oligonucleotide
ugccuuauaugaagaacgc

SEQ ID NO: 1767173 - RNA, 19 nt, Artificial Sequence
  Description of Artificial Sequence: Synthetic oligonucleotide
auuguccuagaguuaaaca

SEQ ID NO: 1767174 - RNA, 19 nt, Artificial Sequence
  Description of Artificial Sequence: Synthetic oligonucleotide
uccgcaauguaguuuucag

SEQ ID NO: 1767175 - RNA, 19 nt, Artificial Sequence
  Description of Artificial Sequence: Synthetic oligonucleotide
guauuguagggcucauugg

SEQ ID NO: 1767176 - RNA, 19 nt, Artificial Sequence
  Description of Artificial Sequence: Synthetic oligonucleotide
ugguaacaauaucaggcug

SEQ ID NO: 1767177 - RNA, 19 nt, Artificial Sequence
  Description of Artificial Sequence: Synthetic oligonucleotide
uuauccgcaagaucaccag

SEQ ID NO: 1767178 - RNA, 19 nt, Artificial Sequence
  Description of Artificial Sequence: Synthetic oligonucleotide
guauuugaacuucucagga

SEQ ID NO: 1767179 - RNA, 19 nt, Artificial Sequence
  Description of Artificial Sequence: Synthetic oligonucleotide
cuagaguuaaacaguccac

SEQ ID NO: 1767180 - RNA, 19 nt, Artificial Sequence
  Description of Artificial Sequence: Synthetic oligonucleotide
uguaauuccggaaccguuu

SEQ ID NO: 1767181 - RNA, 19 nt, Artificial Sequence
  Description of Artificial Sequence: Synthetic oligonucleotide
aaccguuucuacguuaugu

SEQ ID NO: 1767182 - RNA, 19 nt, Artificial Sequence
  Description of Artificial Sequence: Synthetic oligonucleotide
gugcguacacaucuaaucc

SEQ ID NO: 1767183 - RNA, 19 nt, Artificial Sequence
  Description of Artificial Sequence: Synthetic oligonucleotide
cauauauuguccuagaguu

SEQ ID NO: 1767184 - RNA, 19 nt, Artificial Sequence
  Description of Artificial Sequence: Synthetic oligonucleotide
uggaagcaaaaucuuaaua

SEQ ID NO: 1767185 - RNA, 19 nt, Artificial Sequence
  Description of Artificial Sequence: Synthetic oligonucleotide
cagauacaaaaucuugaag

SEQ ID NO: 1767186 - RNA, 19 nt, Artificial Sequence
  Description of Artificial Sequence: Synthetic oligonucleotide
aucucgauccaccgaaguc

SEQ ID NO: 1767187 - RNA, 19 nt, Artificial Sequence
  Description of Artificial Sequence: Synthetic oligonucleotide
ucuguuucaccuaggccca

SEQ ID NO: 1767188 - RNA, 19 nt, Artificial Sequence
  Description of Artificial Sequence: Synthetic oligonucleotide
uucuugacauguuucaaua

SEQ ID NO: 1767189 - RNA, 19 nt, Artificial Sequence
  Description of Artificial Sequence: Synthetic oligonucleotide
ucaaaguuggcccggggau

SEQ ID NO: 1767190 - RNA, 19 nt, Artificial Sequence
  Description of Artificial Sequence: Synthetic oligonucleotide
guaucucugucuuuaacca

SEQ ID NO: 1767191 - RNA, 19 nt, Artificial Sequence
  Description of Artificial Sequence: Synthetic oligonucleotide
uuaauauuccugugauccu

SEQ ID NO: 1767192 - RNA, 19 nt, Artificial Sequence
  Description of Artificial Sequence: Synthetic oligonucleotide
cuugacauguuucaauaca

SEQ ID NO: 1767193 - RNA, 19 nt, Artificial Sequence
  Description of Artificial Sequence: Synthetic oligonucleotide
auugcuuuggccguauugu

SEQ ID NO: 1767194 - RNA, 19 nt, Artificial Sequence
  Description of Artificial Sequence: Synthetic oligonucleotide
uugcggucuuaacagaaca

SEQ ID NO: 1767195 - RNA, 19 nt, Artificial Sequence
  Description of Artificial Sequence: Synthetic oligonucleotide
auauucaucccagguacuc

SEQ ID NO: 1767196 - RNA, 19 nt, Artificial Sequence
  Description of Artificial Sequence: Synthetic oligonucleotide
cuugcaguauaaugaaauc

SEQ ID NO: 1767197 - RNA, 19 nt, Artificial Sequence
  Description of Artificial Sequence: Synthetic oligonucleotide
agcaugacacagucuuggc

SEQ ID NO: 1767198 - RNA, 19 nt, Artificial Sequence
  Description of Artificial Sequence: Synthetic oligonucleotide
aauccugauagagcaaccu

SEQ ID NO: 1767199 - RNA, 19 nt, Artificial Sequence
  Description of Artificial Sequence: Synthetic oligonucleotide
uuccggaaccguuucuacg

SEQ ID NO: 1767200 - RNA, 19 nt, Artificial Sequence
  Description of Artificial Sequence: Synthetic oligonucleotide
ucaggggugaggcauucca

SEQ ID NO: 1767201 - RNA, 19 nt, Artificial Sequence
  Description of Artificial Sequence: Synthetic oligonucleotide
guuaugugcguacacaucu

SEQ ID NO: 1767202 - RNA, 19 nt, Artificial Sequence
  Description of Artificial Sequence: Synthetic oligonucleotide
accguuucuacguuaugug

SEQ ID NO: 1767203 - RNA, 19 nt, Artificial Sequence
  Description of Artificial Sequence: Synthetic oligonucleotide
aucaucucgauccaccgaa

SEQ ID NO: 1767204 - RNA, 19 nt, Artificial Sequence
  Description of Artificial Sequence: Synthetic oligonucleotide
auuucagacucaacaguac

SEQ ID NO: 1767205 - RNA, 19 nt, Artificial Sequence
  Description of Artificial Sequence: Synthetic oligonucleotide
ucuugacauguuucaauac

SEQ ID NO: 1767206 - RNA, 19 nt, Artificial Sequence
  Description of Artificial Sequence: Synthetic oligonucleotide
uccggaaccguuucuacgu

SEQ ID NO: 1767207 - RNA, 19 nt, Artificial Sequence
  Description of Artificial Sequence: Synthetic oligonucleotide
ugcguacacaucuaauccu

SEQ ID NO: 1767208 - RNA, 19 nt, Artificial Sequence
  Description of Artificial Sequence: Synthetic oligonucleotide
uccugauagagcaaccuuu

SEQ ID NO: 1767209 - RNA, 19 nt, Artificial Sequence
  Description of Artificial Sequence: Synthetic oligonucleotide
uacacaucuaauccugaua

SEQ ID NO: 1767210 - RNA, 19 nt, Artificial Sequence
  Description of Artificial Sequence: Synthetic oligonucleotide
cuucaagcaugacacaguc

SEQ ID NO: 1767211 - RNA, 19 nt, Artificial Sequence
  Description of Artificial Sequence: Synthetic oligonucleotide
agacaucagacauuucaga

SEQ ID NO: 1767212 - RNA, 19 nt, Artificial Sequence
  Description of Artificial Sequence: Synthetic oligonucleotide
uauaugaagaacgcaccaa

SEQ ID NO: 1767213 - RNA, 19 nt, Artificial Sequence
  Description of Artificial Sequence: Synthetic oligonucleotide
acuugcaguauaaugaaau

SEQ ID NO: 1767214 - RNA, 19 nt, Artificial Sequence
  Description of Artificial Sequence: Synthetic oligonucleotide
guauaaugaaauccaagcu

SEQ ID NO: 1767215 - RNA, 19 nt, Artificial Sequence
  Description of Artificial Sequence: Synthetic oligonucleotide
ucuugcggucuuaacagaa

SEQ ID NO: 1767216 - RNA, 19 nt, Artificial Sequence
  Description of Artificial Sequence: Synthetic oligonucleotide
uuggccguauuguagggcu

SEQ ID NO: 1767217 - RNA, 19 nt, Artificial Sequence
  Description of Artificial Sequence: Synthetic oligonucleotide
agcguagagacauccccuc

SEQ ID NO: 1767218 - RNA, 19 nt, Artificial Sequence
  Description of Artificial Sequence: Synthetic oligonucleotide
uuuuggauuccuucccuuc

SEQ ID NO: 1767219 - RNA, 19 nt, Artificial Sequence
  Description of Artificial Sequence: Synthetic oligonucleotide
acaauaucaggcugaacuu

SEQ ID NO: 1767220 - RNA, 19 nt, Artificial Sequence
  Description of Artificial Sequence: Synthetic oligonucleotide
uaugugcguacacaucuaa

SEQ ID NO: 1767221 - RNA, 19 nt, Artificial Sequence
  Description of Artificial Sequence: Synthetic oligonucleotide
cccaucaacaugauugugg

SEQ ID NO: 1767222 - RNA, 19 nt, Artificial Sequence
  Description of Artificial Sequence: Synthetic oligonucleotide
ucuugccuaaguuucugaa

SEQ ID NO: 1767223 - RNA, 19 nt, Artificial Sequence
  Description of Artificial Sequence: Synthetic oligonucleotide
uuuacccauggguaucucu

SEQ ID NO: 1767224 - RNA, 19 nt, Artificial Sequence
  Description of Artificial Sequence: Synthetic oligonucleotide
accaaccugacaccaacug

SEQ ID NO: 1767225 - RNA, 19 nt, Artificial Sequence
  Description of Artificial Sequence: Synthetic oligonucleotide
uacguuaugugcguacaca

SEQ ID NO: 1767226 - RNA, 19 nt, Artificial Sequence
  Description of Artificial Sequence: Synthetic oligonucleotide
uccuagaguuaaacagucc

SEQ ID NO: 1767227 - RNA, 19 nt, Artificial Sequence
  Description of Artificial Sequence: Synthetic oligonucleotide
ggaagcaaaaucuuaauau

SEQ ID NO: 1767228 - RNA, 19 nt, Artificial Sequence
  Description of Artificial Sequence: Synthetic oligonucleotide
caaccugacaccaacugga

SEQ ID NO: 1767229 - RNA, 19 nt, Artificial Sequence
  Description of Artificial Sequence: Synthetic oligonucleotide
ugaaggucugguccagucu

SEQ ID NO: 1767230 - RNA, 19 nt, Artificial Sequence
  Description of Artificial Sequence: Synthetic oligonucleotide
agcgcuuucauuguugcgu

SEQ ID NO: 1767231 - RNA, 19 nt, Artificial Sequence
  Description of Artificial Sequence: Synthetic oligonucleotide
uuucccaguauuugaacuu

SEQ ID NO: 1767232 - RNA, 19 nt, Artificial Sequence
  Description of Artificial Sequence: Synthetic oligonucleotide
ugauccugaaggucuugcc

SEQ ID NO: 1767233 - RNA, 19 nt, Artificial Sequence
  Description of Artificial Sequence: Synthetic oligonucleotide
uccaccgaagucaggacaa

SEQ ID NO: 1767234 - RNA, 19 nt, Artificial Sequence
  Description of Artificial Sequence: Synthetic oligonucleotide
caucuguuucaccuaggcc

SEQ ID NO: 1767235 - RNA, 19 nt, Artificial Sequence
  Description of Artificial Sequence: Synthetic oligonucleotide
accucuuguacaggugucc

SEQ ID NO: 1767236 - RNA, 19 nt, Artificial Sequence
  Description of Artificial Sequence: Synthetic oligonucleotide
accuuucuccuuucugacg

SEQ ID NO: 1767237 - RNA, 19 nt, Artificial Sequence
  Description of Artificial Sequence: Synthetic oligonucleotide
acagcgggcuuccucacag

SEQ ID NO: 1767238 - RNA, 19 nt, Artificial Sequence
  Description of Artificial Sequence: Synthetic oligonucleotide
uucuacguuaugugcguac

SEQ ID NO: 1767239 - RNA, 19 nt, Artificial Sequence
  Description of Artificial Sequence: Synthetic oligonucleotide
uacucuuauccgcaagauc

SEQ ID NO: 1767240 - RNA, 19 nt, Artificial Sequence
  Description of Artificial Sequence: Synthetic oligonucleotide
aaaguuggcccggggauca

SEQ ID NO: 1767241 - RNA, 19 nt, Artificial Sequence
  Description of Artificial Sequence: Synthetic oligonucleotide
ucuacguuaugugcguaca

SEQ ID NO: 1767242 - RNA, 19 nt, Artificial Sequence
  Description of Artificial Sequence: Synthetic oligonucleotide
uuuguuggcugcauauauu

SEQ ID NO: 1767243 - RNA, 19 nt, Artificial Sequence
  Description of Artificial Sequence: Synthetic oligonucleotide
cuuauccgcaagaucacca

SEQ ID NO: 1767244 - RNA, 19 nt, Artificial Sequence
  Description of Artificial Sequence: Synthetic oligonucleotide
ucaaccuuaagguggcguu

SEQ ID NO: 1767245 - RNA, 19 nt, Artificial Sequence
  Description of Artificial Sequence: Synthetic oligonucleotide
uuucauuguugcguggacu

SEQ ID NO: 1767246 - RNA, 19 nt, Artificial Sequence
  Description of Artificial Sequence: Synthetic oligonucleotide
uguuggcugcauauauugu

SEQ ID NO: 1767247 - RNA, 19 nt, Artificial Sequence
  Description of Artificial Sequence: Synthetic oligonucleotide
ucuguaauuccggaaccgu

SEQ ID NO: 1767248 - RNA, 19 nt, Artificial Sequence
  Description of Artificial Sequence: Synthetic oligonucleotide
ugcguggacuugcucaucu

SEQ ID NO: 1767249 - RNA, 19 nt, Artificial Sequence
  Description of Artificial Sequence: Synthetic oligonucleotide
cauuucagacucaacagua

SEQ ID NO: 1767250 - RNA, 19 nt, Artificial Sequence
  Description of Artificial Sequence: Synthetic oligonucleotide
guaacauauucuucaaccu

SEQ ID NO: 1767251 - RNA, 19 nt, Artificial Sequence
  Description of Artificial Sequence: Synthetic oligonucleotide
cauuguugcguggacuugc

SEQ ID NO: 1767252 - RNA, 19 nt, Artificial Sequence
  Description of Artificial Sequence: Synthetic oligonucleotide
acgaacuuuccucuguaau

SEQ ID NO: 1767253 - RNA, 19 nt, Artificial Sequence
  Description of Artificial Sequence: Synthetic oligonucleotide
ccaucaacaugauuguggc

SEQ ID NO: 1767254 - RNA, 19 nt, Artificial Sequence
  Description of Artificial Sequence: Synthetic oligonucleotide
cuuuggccguauuguaggg

SEQ ID NO: 1767255 - RNA, 19 nt, Artificial Sequence
  Description of Artificial Sequence: Synthetic oligonucleotide
acguuaugugcguacacau

SEQ ID NO: 1767256 - RNA, 19 nt, Artificial Sequence
  Description of Artificial Sequence: Synthetic oligonucleotide
ucuuauccgcaagaucacc

SEQ ID NO: 1767257 - RNA, 19 nt, Artificial Sequence
  Description of Artificial Sequence: Synthetic oligonucleotide
ucaucucgauccaccgaag

SEQ ID NO: 1767258 - RNA, 19 nt, Artificial Sequence
  Description of Artificial Sequence: Synthetic oligonucleotide
cguuucuacguuaugugcg

SEQ ID NO: 1767259 - RNA, 19 nt, Artificial Sequence
  Description of Artificial Sequence: Synthetic oligonucleotide
cucuguaauuccggaaccg

SEQ ID NO: 1767260 - RNA, 19 nt, Artificial Sequence
  Description of Artificial Sequence: Synthetic oligonucleotide
uucaagcaugacacagucu

SEQ ID NO: 1767261 - RNA, 19 nt, Artificial Sequence
  Description of Artificial Sequence: Synthetic oligonucleotide
aguuuucaguuuauuauaa

SEQ ID NO: 1767262 - RNA, 19 nt, Artificial Sequence
  Description of Artificial Sequence: Synthetic oligonucleotide
aauuccggaaccguuucua

SEQ ID NO: 1767263 - RNA, 19 nt, Artificial Sequence
  Description of Artificial Sequence: Synthetic oligonucleotide
ugcggucuuaacagaacaa

SEQ ID NO: 1767264 - RNA, 19 nt, Artificial Sequence
  Description of Artificial Sequence: Synthetic oligonucleotide
uauucaucccagguacucu

SEQ ID NO: 1767265 - RNA, 19 nt, Artificial Sequence
  Description of Artificial Sequence: Synthetic oligonucleotide
cuugcggucuuaacagaac

SEQ ID NO: 1767266 - RNA, 19 nt, Artificial Sequence
  Description of Artificial Sequence: Synthetic oligonucleotide
uucaaccuuaagguggcgu

SEQ ID NO: 1767267 - RNA, 19 nt, Artificial Sequence
  Description of Artificial Sequence: Synthetic oligonucleotide
guguggagauuuaaauucc

SEQ ID NO: 1767268 - RNA, 19 nt, Artificial Sequence
  Description of Artificial Sequence: Synthetic oligonucleotide
aaccucuuguacagguguc

SEQ ID NO: 1767269 - RNA, 19 nt, Artificial Sequence
  Description of Artificial Sequence: Synthetic oligonucleotide
auccaccgaagucaggaca

SEQ ID NO: 1767270 - RNA, 19 nt, Artificial Sequence
  Description of Artificial Sequence: Synthetic oligonucleotide
gaucacgaacuuuccucug

SEQ ID NO: 1767271 - RNA, 19 nt, Artificial Sequence
  Description of Artificial Sequence: Synthetic oligonucleotide
cucgauccaccgaagucag

SEQ ID NO: 1767272 - RNA, 19 nt, Artificial Sequence
  Description of Artificial Sequence: Synthetic oligonucleotide
acgcagcguagagacaucc

SEQ ID NO: 1767273 - RNA, 19 nt, Artificial Sequence
  Description of Artificial Sequence: Synthetic oligonucleotide
cuuucauuguugcguggac

SEQ ID NO: 1767274 - RNA, 19 nt, Artificial Sequence
  Description of Artificial Sequence: Synthetic oligonucleotide
guaauuccggaaccguuuc

SEQ ID NO: 1767275 - RNA, 19 nt, Artificial Sequence
  Description of Artificial Sequence: Synthetic oligonucleotide
uucugacgcuuuaaauuuc

SEQ ID NO: 1767276 - RNA, 19 nt, Artificial Sequence
  Description of Artificial Sequence: Synthetic oligonucleotide
caauguaguuuucaguuua

SEQ ID NO: 1767277 - RNA, 19 nt, Artificial Sequence
  Description of Artificial Sequence: Synthetic oligonucleotide
uuggauuccuucccuucaa

SEQ ID NO: 1767278 - RNA, 19 nt, Artificial Sequence
  Description of Artificial Sequence: Synthetic oligonucleotide
gcacggagcgcuuucauug

SEQ ID NO: 1767279 - RNA, 19 nt, Artificial Sequence
  Description of Artificial Sequence: Synthetic oligonucleotide
auaauccaggccccacuca

SEQ ID NO: 1767280 - RNA, 19 nt, Artificial Sequence
  Description of Artificial Sequence: Synthetic oligonucleotide
uuuggccguauuguagggc

SEQ ID NO: 1767281 - RNA, 19 nt, Artificial Sequence
  Description of Artificial Sequence: Synthetic oligonucleotide
agguacucuuauccgcaag

SEQ ID NO: 1767282 - RNA, 19 nt, Artificial Sequence
  Description of Artificial Sequence: Synthetic oligonucleotide
gcugcauauauuguccuag

SEQ ID NO: 1767283 - RNA, 19 nt, Artificial Sequence
  Description of Artificial Sequence: Synthetic oligonucleotide
cucuuauccgcaagaucac

SEQ ID NO: 1767284 - RNA, 19 nt, Artificial Sequence
  Description of Artificial Sequence: Synthetic oligonucleotide
cugggcugcauaaauaucu

SEQ ID NO: 1767285 - RNA, 19 nt, Artificial Sequence
  Description of Artificial Sequence: Synthetic oligonucleotide
gggaucacgaacuuuccuc

SEQ ID NO: 1767286 - RNA, 19 nt, Artificial Sequence
  Description of Artificial Sequence: Synthetic oligonucleotide
auccugaaggucuugccua

SEQ ID NO: 1767287 - RNA, 19 nt, Artificial Sequence
  Description of Artificial Sequence: Synthetic oligonucleotide
ucuacugcucucagaucuc

SEQ ID NO: 1767288 - RNA, 19 nt, Artificial Sequence
  Description of Artificial Sequence: Synthetic oligonucleotide
accugacaccaacuggaag

SEQ ID NO: 1767289 - RNA, 19 nt, Artificial Sequence
  Description of Artificial Sequence: Synthetic oligonucleotide
uuaugugcguacacaucua

SEQ ID NO: 1767290 - RNA, 19 nt, Artificial Sequence
  Description of Artificial Sequence: Synthetic oligonucleotide
gguaacaauaucaggcuga

SEQ ID NO: 1767291 - RNA, 19 nt, Artificial Sequence
  Description of Artificial Sequence: Synthetic oligonucleotide
aacuggaagcaaaaucuua

SEQ ID NO: 1767292 - RNA, 19 nt, Artificial Sequence
  Description of Artificial Sequence: Synthetic oligonucleotide
gccacuugcaguauaauga

SEQ ID NO: 1767293 - RNA, 19 nt, Artificial Sequence
  Description of Artificial Sequence: Synthetic oligonucleotide
gagcgcuuucauuguugcg

SEQ ID NO: 1767294 - RNA, 19 nt, Artificial Sequence
  Description of Artificial Sequence: Synthetic oligonucleotide
gcagcguagagacaucccc

SEQ ID NO: 1767295 - RNA, 19 nt, Artificial Sequence
  Description of Artificial Sequence: Synthetic oligonucleotide
ccuagaguuaaacagucca

SEQ ID NO: 1767296 - RNA, 19 nt, Artificial Sequence
  Description of Artificial Sequence: Synthetic oligonucleotide
gauccugaaggucuugccu

SEQ ID NO: 1767297 - RNA, 19 nt, Artificial Sequence
  Description of Artificial Sequence: Synthetic oligonucleotide
aucagcugcacggagcgcu

SEQ ID NO: 1767298 - RNA, 19 nt, Artificial Sequence
  Description of Artificial Sequence: Synthetic oligonucleotide
acgcuuuaaauuuccuuua

SEQ ID NO: 1767299 - RNA, 19 nt, Artificial Sequence
  Description of Artificial Sequence: Synthetic oligonucleotide
cacuccccaauguugggac

SEQ ID NO: 1767300 - RNA, 19 nt, Artificial Sequence
  Description of Artificial Sequence: Synthetic oligonucleotide
ucacgaacuuuccucugua

SEQ ID NO: 1767301 - RNA, 19 nt, Artificial Sequence
  Description of Artificial Sequence: Synthetic oligonucleotide
uucuugcggucuuaacaga

SEQ ID NO: 1767302 - RNA, 19 nt, Artificial Sequence
  Description of Artificial Sequence: Synthetic oligonucleotide
uucccaguauuugaacuuc

SEQ ID NO: 1767303 - RNA, 19 nt, Artificial Sequence
  Description of Artificial Sequence: Synthetic oligonucleotide
ccuaggcccagcauuauug

SEQ ID NO: 1767304 - RNA, 19 nt, Artificial Sequence
  Description of Artificial Sequence: Synthetic oligonucleotide
cuacguuaugugcguacac

SEQ ID NO: 1767305 - RNA, 19 nt, Artificial Sequence
  Description of Artificial Sequence: Synthetic oligonucleotide
agcacuccccaauguuggg

SEQ ID NO: 1767306 - RNA, 19 nt, Artificial Sequence
  Description of Artificial Sequence: Synthetic oligonucleotide
gauccaccgaagucaggac

SEQ ID NO: 1767307 - RNA, 19 nt, Artificial Sequence
  Description of Artificial Sequence: Synthetic oligonucleotide
uggcugcauauauuguccu

SEQ ID NO: 1767308 - RNA, 19 nt, Artificial Sequence
  Description of Artificial Sequence: Synthetic oligonucleotide
uuccucuguaauuccggaa

SEQ ID NO: 1767309 - RNA, 19 nt, Artificial Sequence
  Description of Artificial Sequence: Synthetic oligonucleotide
caggcugcgggccgcaucc

SEQ ID NO: 1767310 - RNA, 19 nt, Artificial Sequence
  Description of Artificial Sequence: Synthetic oligonucleotide
ccaacuggaagcaaaaucu

SEQ ID NO: 1767311 - RNA, 19 nt, Artificial Sequence
  Description of Artificial Sequence: Synthetic oligonucleotide
guggcguuuuguuggcugc

SEQ ID NO: 1767312 - RNA, 19 nt, Artificial Sequence
  Description of Artificial Sequence: Synthetic oligonucleotide
aggcauuccacaaggauuu

SEQ ID NO: 1767313 - RNA, 19 nt, Artificial Sequence
  Description of Artificial Sequence: Synthetic oligonucleotide
cuguggcauauucuccacc

SEQ ID NO: 1767314 - RNA, 19 nt, Artificial Sequence
  Description of Artificial Sequence: Synthetic oligonucleotide
auccugauagagcaaccuu

SEQ ID NO: 1767315 - RNA, 19 nt, Artificial Sequence
  Description of Artificial Sequence: Synthetic oligonucleotide
ccaaccugacaccaacugg

SEQ ID NO: 1767316 - RNA, 19 nt, Artificial Sequence
  Description of Artificial Sequence: Synthetic oligonucleotide
acugggcugcauaaauauc

SEQ ID NO: 1767317 - RNA, 19 nt, Artificial Sequence
  Description of Artificial Sequence: Synthetic oligonucleotide
ucauuguugcguggacuug

SEQ ID NO: 1767318 - RNA, 19 nt, Artificial Sequence
  Description of Artificial Sequence: Synthetic oligonucleotide
ucuuaaccuuucuccuuuc

SEQ ID NO: 1767319 - RNA, 19 nt, Artificial Sequence
  Description of Artificial Sequence: Synthetic oligonucleotide
auggguaucucugucuuua

SEQ ID NO: 1767320 - RNA, 19 nt, Artificial Sequence
  Description of Artificial Sequence: Synthetic oligonucleotide
ggagcgcuuucauuguugc

SEQ ID NO: 1767321 - RNA, 19 nt, Artificial Sequence
  Description of Artificial Sequence: Synthetic oligonucleotide
gcauauauuguccuagagu

SEQ ID NO: 1767322 - RNA, 19 nt, Artificial Sequence
  Description of Artificial Sequence: Synthetic oligonucleotide
caggcugaacuuucuugac

SEQ ID NO: 1767323 - RNA, 19 nt, Artificial Sequence
  Description of Artificial Sequence: Synthetic oligonucleotide
cuacugcucucagaucucc

SEQ ID NO: 1767324 - RNA, 19 nt, Artificial Sequence
  Description of Artificial Sequence: Synthetic oligonucleotide
gaacgcaccaaagggccac

SEQ ID NO: 1767325 - RNA, 19 nt, Artificial Sequence
  Description of Artificial Sequence: Synthetic oligonucleotide
aaccuuaagguggcguuuu

SEQ ID NO: 1767326 - RNA, 19 nt, Artificial Sequence
  Description of Artificial Sequence: Synthetic oligonucleotide
uuuaaccauggaggcaguc

SEQ ID NO: 1767327 - RNA, 19 nt, Artificial Sequence
  Description of Artificial Sequence: Synthetic oligonucleotide
cugauagagcaaccuuuuc

SEQ ID NO: 1767328 - RNA, 19 nt, Artificial Sequence
  Description of Artificial Sequence: Synthetic oligonucleotide
ucgauccaccgaagucagg

SEQ ID NO: 1767329 - RNA, 19 nt, Artificial Sequence
  Description of Artificial Sequence: Synthetic oligonucleotide
uccgcaagaucaccagaua

SEQ ID NO: 1767330 - RNA, 19 nt, Artificial Sequence
  Description of Artificial Sequence: Synthetic oligonucleotide
uggcccggggaucacgaac

SEQ ID NO: 1767331 - RNA, 19 nt, Artificial Sequence
  Description of Artificial Sequence: Synthetic oligonucleotide
guuucuacguuaugugcgu

SEQ ID NO: 1767332 - RNA, 19 nt, Artificial Sequence
  Description of Artificial Sequence: Synthetic oligonucleotide
uguuucaccuaggcccagc

SEQ ID NO: 1767333 - RNA, 19 nt, Artificial Sequence
  Description of Artificial Sequence: Synthetic oligonucleotide
ccguuucuacguuaugugc

SEQ ID NO: 1767334 - RNA, 19 nt, Artificial Sequence
  Description of Artificial Sequence: Synthetic oligonucleotide
uuucaccuaggcccagcau

SEQ ID NO: 1767335 - RNA, 19 nt, Artificial Sequence
  Description of Artificial Sequence: Synthetic oligonucleotide
gguggcguuuuguuggcug

SEQ ID NO: 1767336 - RNA, 19 nt, Artificial Sequence
  Description of Artificial Sequence: Synthetic oligonucleotide
ucagaucuccucggaaguc

SEQ ID NO: 1767337 - RNA, 19 nt, Artificial Sequence
  Description of Artificial Sequence: Synthetic oligonucleotide
uguugggacagcgggcuuc

SEQ ID NO: 1767338 - RNA, 19 nt, Artificial Sequence
  Description of Artificial Sequence: Synthetic oligonucleotide
uccuucccuucaagcauga

SEQ ID NO: 1767339 - RNA, 19 nt, Artificial Sequence
  Description of Artificial Sequence: Synthetic oligonucleotide
uccugugauccugaagguc

SEQ ID NO: 1767340 - RNA, 19 nt, Artificial Sequence
  Description of Artificial Sequence: Synthetic oligonucleotide
cagcauuauugauguuuug

SEQ ID NO: 1767341 - RNA, 19 nt, Artificial Sequence
  Description of Artificial Sequence: Synthetic oligonucleotide
cuaggcccagcauuauuga

SEQ ID NO: 1767342 - RNA, 19 nt, Artificial Sequence
  Description of Artificial Sequence: Synthetic oligonucleotide
cucacagacuguguggaga

SEQ ID NO: 1767343 - RNA, 19 nt, Artificial Sequence
  Description of Artificial Sequence: Synthetic oligonucleotide
auccgcaagaucaccagau

SEQ ID NO: 1767344 - RNA, 19 nt, Artificial Sequence
  Description of Artificial Sequence: Synthetic oligonucleotide
cugcgggccgcauccacgc

SEQ ID NO: 1767345 - RNA, 19 nt, Artificial Sequence
  Description of Artificial Sequence: Synthetic oligonucleotide
caucccagguacucuuauc

SEQ ID NO: 1767346 - RNA, 19 nt, Artificial Sequence
  Description of Artificial Sequence: Synthetic oligonucleotide
accuuaagguggcguuuug

SEQ ID NO: 1767347 - RNA, 19 nt, Artificial Sequence
  Description of Artificial Sequence: Synthetic oligonucleotide
aagggccacuugcaguaua

SEQ ID NO: 1767348 - RNA, 19 nt, Artificial Sequence
  Description of Artificial Sequence: Synthetic oligonucleotide
uggcaccaaccugacacca

SEQ ID NO: 1767349 - RNA, 19 nt, Artificial Sequence
  Description of Artificial Sequence: Synthetic oligonucleotide
ccggggaucacgaacuuuc

SEQ ID NO: 1767350 - RNA, 19 nt, Artificial Sequence
  Description of Artificial Sequence: Synthetic oligonucleotide
cacaucuaauccugauaga

SEQ ID NO: 1767351 - RNA, 19 nt, Artificial Sequence
  Description of Artificial Sequence: Synthetic oligonucleotide
ccucuguaauuccggaacc

SEQ ID NO: 1767352 - RNA, 19 nt, Artificial Sequence
  Description of Artificial Sequence: Synthetic oligonucleotide
auauauuguccuagaguua

SEQ ID NO: 1767353 - RNA, 19 nt, Artificial Sequence
  Description of Artificial Sequence: Synthetic oligonucleotide
ccgcaagaucaccagauac

SEQ ID NO: 1767354 - RNA, 19 nt, Artificial Sequence
  Description of Artificial Sequence: Synthetic oligonucleotide
cuuaagguggcguuuuguu

SEQ ID NO: 1767355 - RNA, 19 nt, Artificial Sequence
  Description of Artificial Sequence: Synthetic oligonucleotide
aguuggcccggggaucacg

SEQ ID NO: 1767356 - RNA, 19 nt, Artificial Sequence
  Description of Artificial Sequence: Synthetic oligonucleotide
uggguaucucugucuuuaa

SEQ ID NO: 1767357 - RNA, 19 nt, Artificial Sequence
  Description of Artificial Sequence: Synthetic oligonucleotide
cccaauguugggacagcgg

SEQ ID NO: 1767358 - RNA, 19 nt, Artificial Sequence
  Description of Artificial Sequence: Synthetic oligonucleotide
guugggacagcgggcuucc

SEQ ID NO: 1767359 - RNA, 19 nt, Artificial Sequence
  Description of Artificial Sequence: Synthetic oligonucleotide
cugacaccaacuggaagca

SEQ ID NO: 1767360 - RNA, 19 nt, Artificial Sequence
  Description of Artificial Sequence: Synthetic oligonucleotide
gcaagaucaccagauacaa

SEQ ID NO: 1767361 - RNA, 19 nt, Artificial Sequence
  Description of Artificial Sequence: Synthetic oligonucleotide
ccugccuuauaugaagaac

SEQ ID NO: 1767362 - RNA, 19 nt, Artificial Sequence
  Description of Artificial Sequence: Synthetic oligonucleotide
uuguugcguggacuugcuc

SEQ ID NO: 1767363 - RNA, 19 nt, Artificial Sequence
  Description of Artificial Sequence: Synthetic oligonucleotide
gcguacacaucuaauccug

SEQ ID NO: 1767364 - RNA, 19 nt, Artificial Sequence
  Description of Artificial Sequence: Synthetic oligonucleotide
uccacgcagcguagagaca

SEQ ID NO: 1767365 - RNA, 19 nt, Artificial Sequence
  Description of Artificial Sequence: Synthetic oligonucleotide
gggugaggcauuccacaag

SEQ ID NO: 1767366 - RNA, 19 nt, Artificial Sequence
  Description of Artificial Sequence: Synthetic oligonucleotide
gcauccacgcagcguagag

SEQ ID NO: 1767367 - RNA, 19 nt, Artificial Sequence
  Description of Artificial Sequence: Synthetic oligonucleotide
ggaucacgaacuuuccucu

SEQ ID NO: 1767368 - RNA, 19 nt, Artificial Sequence
  Description of Artificial Sequence: Synthetic oligonucleotide
ggguaucucugucuuuaac

SEQ ID NO: 1767369 - RNA, 19 nt, Artificial Sequence
  Description of Artificial Sequence: Synthetic oligonucleotide
auuguugcguggacuugcu

SEQ ID NO: 1767370 - RNA, 19 nt, Artificial Sequence
  Description of Artificial Sequence: Synthetic oligonucleotide
caccugccuuauaugaaga

SEQ ID NO: 1767371 - RNA, 19 nt, Artificial Sequence
  Description of Artificial Sequence: Synthetic oligonucleotide
caucaucucgauccaccga

SEQ ID NO: 1767372 - RNA, 19 nt, Artificial Sequence
  Description of Artificial Sequence: Synthetic oligonucleotide
aaguuggcccggggaucac

SEQ ID NO: 1767373 - RNA, 19 nt, Artificial Sequence
  Description of Artificial Sequence: Synthetic oligonucleotide
ggucuuaacagaacaaaau

SEQ ID NO: 1767374 - RNA, 19 nt, Artificial Sequence
  Description of Artificial Sequence: Synthetic oligonucleotide
caagaucaccagauacaaa

SEQ ID NO: 1767375 - RNA, 19 nt, Artificial Sequence
  Description of Artificial Sequence: Synthetic oligonucleotide
uggcguuuuguuggcugca

SEQ ID NO: 1767376 - RNA, 19 nt, Artificial Sequence
  Description of Artificial Sequence: Synthetic oligonucleotide
uuucuacguuaugugcgua

SEQ ID NO: 1767377 - RNA, 19 nt, Artificial Sequence
  Description of Artificial Sequence: Synthetic oligonucleotide
agacuguguggagauuuaa

SEQ ID NO: 1767378 - RNA, 19 nt, Artificial Sequence
  Description of Artificial Sequence: Synthetic oligonucleotide
gcgcuuucauuguugcgug

SEQ ID NO: 1767379 - RNA, 19 nt, Artificial Sequence
  Description of Artificial Sequence: Synthetic oligonucleotide
guacacaucuaauccugau

SEQ ID NO: 1767380 - RNA, 19 nt, Artificial Sequence
  Description of Artificial Sequence: Synthetic oligonucleotide
cacuugcaguauaaugaaa

SEQ ID NO: 1767381 - RNA, 19 nt, Artificial Sequence
  Description of Artificial Sequence: Synthetic oligonucleotide
uggccguauuguagggcuc

SEQ ID NO: 1767382 - RNA, 19 nt, Artificial Sequence
  Description of Artificial Sequence: Synthetic oligonucleotide
cucagaucuccucggaagu

SEQ ID NO: 1767383 - RNA, 19 nt, Artificial Sequence
  Description of Artificial Sequence: Synthetic oligonucleotide
aacgcaccaaagggccacu

SEQ ID NO: 1767384 - RNA, 19 nt, Artificial Sequence
  Description of Artificial Sequence: Synthetic oligonucleotide
uuuuacccauggguaucuc

SEQ ID NO: 1767385 - RNA, 19 nt, Artificial Sequence
  Description of Artificial Sequence: Synthetic oligonucleotide
ggcaaugugcucagcuccc

SEQ ID NO: 1767386 - RNA, 19 nt, Artificial Sequence
  Description of Artificial Sequence: Synthetic oligonucleotide
auuccgcaauguaguuuuc

SEQ ID NO: 1767387 - RNA, 19 nt, Artificial Sequence
  Description of Artificial Sequence: Synthetic oligonucleotide
accuaggcccagcauuauu

SEQ ID NO: 1767388 - RNA, 19 nt, Artificial Sequence
  Description of Artificial Sequence: Synthetic oligonucleotide
gacagcgggcuuccucaca

SEQ ID NO: 1767389 - RNA, 19 nt, Artificial Sequence
  Description of Artificial Sequence: Synthetic oligonucleotide
augugcguacacaucuaau

SEQ ID NO: 1767390 - RNA, 19 nt, Artificial Sequence
  Description of Artificial Sequence: Synthetic oligonucleotide
cucucagaucuccucggaa

SEQ ID NO: 1767391 - RNA, 19 nt, Artificial Sequence
  Description of Artificial Sequence: Synthetic oligonucleotide
guugcguggacuugcucau

SEQ ID NO: 1767392 - RNA, 19 nt, Artificial Sequence
  Description of Artificial Sequence: Synthetic oligonucleotide
aaccauggaggcagucuua

SEQ ID NO: 1767393 - RNA, 19 nt, Artificial Sequence
  Description of Artificial Sequence: Synthetic oligonucleotide
agaacgcaccaaagggcca

SEQ ID NO: 1767394 - RNA, 19 nt, Artificial Sequence
  Description of Artificial Sequence: Synthetic oligonucleotide
cuuaaccuuucuccuuucu

SEQ ID NO: 1767395 - RNA, 19 nt, Artificial Sequence
  Description of Artificial Sequence: Synthetic oligonucleotide
cacgaacuuuccucuguaa

SEQ ID NO: 1767396 - RNA, 19 nt, Artificial Sequence
  Description of Artificial Sequence: Synthetic oligonucleotide
ccucuuguacagguguccc

SEQ ID NO: 1767397 - RNA, 19 nt, Artificial Sequence
  Description of Artificial Sequence: Synthetic oligonucleotide
aggucuugccuaaguuucu

SEQ ID NO: 1767398 - RNA, 19 nt, Artificial Sequence
  Description of Artificial Sequence: Synthetic oligonucleotide
caacaugauuguggcugug

SEQ ID NO: 1767399 - RNA, 19 nt, Artificial Sequence
  Description of Artificial Sequence: Synthetic oligonucleotide
caguacugcugcacaugca

SEQ ID NO: 1767400 - RNA, 19 nt, Artificial Sequence
  Description of Artificial Sequence: Synthetic oligonucleotide
ugacaccaacuggaagcaa

SEQ ID NO: 1767401 - RNA, 19 nt, Artificial Sequence
  Description of Artificial Sequence: Synthetic oligonucleotide
agggccacuugcaguauaa

SEQ ID NO: 1767402 - RNA, 19 nt, Artificial Sequence
  Description of Artificial Sequence: Synthetic oligonucleotide
gccgcauccacgcagcgua

SEQ ID NO: 1767403 - RNA, 19 nt, Artificial Sequence
  Description of Artificial Sequence: Synthetic oligonucleotide
cagcguagagacauccccu

SEQ ID NO: 1767404 - RNA, 19 nt, Artificial Sequence
  Description of Artificial Sequence: Synthetic oligonucleotide
gccuuauaugaagaacgca

SEQ ID NO: 1767405 - RNA, 19 nt, Artificial Sequence
  Description of Artificial Sequence: Synthetic oligonucleotide
guuggcccggggaucacga

SEQ ID NO: 1767406 - RNA, 19 nt, Artificial Sequence
  Description of Artificial Sequence: Synthetic oligonucleotide
gcggucuuaacagaacaaa

SEQ ID NO: 1767407 - RNA, 19 nt, Artificial Sequence
  Description of Artificial Sequence: Synthetic oligonucleotide
cuguaauuccggaaccguu

SEQ ID NO: 1767408 - RNA, 19 nt, Artificial Sequence
  Description of Artificial Sequence: Synthetic oligonucleotide
gcaaccucuuguacaggug

SEQ ID NO: 1767409 - RNA, 19 nt, Artificial Sequence
  Description of Artificial Sequence: Synthetic oligonucleotide
caccgaagucaggacaaca

SEQ ID NO: 1767410 - RNA, 19 nt, Artificial Sequence
  Description of Artificial Sequence: Synthetic oligonucleotide
cauccacgcagcguagaga

SEQ ID NO: 1767411 - RNA, 19 nt, Artificial Sequence
  Description of Artificial Sequence: Synthetic oligonucleotide
cguuaugugcguacacauc

SEQ ID NO: 1767412 - RNA, 19 nt, Artificial Sequence
  Description of Artificial Sequence: Synthetic oligonucleotide
acggagcgcuuucauuguu

SEQ ID NO: 1767413 - RNA, 19 nt, Artificial Sequence
  Description of Artificial Sequence: Synthetic oligonucleotide
aucagacauuucagacuca

SEQ ID NO: 1767414 - RNA, 19 nt, Artificial Sequence
  Description of Artificial Sequence: Synthetic oligonucleotide
aggcuggcaccaaccugac

SEQ ID NO: 1767415 - RNA, 19 nt, Artificial Sequence
  Description of Artificial Sequence: Synthetic oligonucleotide
caucucgauccaccgaagu

SEQ ID NO: 1767416 - RNA, 19 nt, Artificial Sequence
  Description of Artificial Sequence: Synthetic oligonucleotide
cagacuguguggagauuua

SEQ ID NO: 1767417 - RNA, 19 nt, Artificial Sequence
  Description of Artificial Sequence: Synthetic oligonucleotide
cacgcagcguagagacauc

SEQ ID NO: 1767418 - RNA, 19 nt, Artificial Sequence
  Description of Artificial Sequence: Synthetic oligonucleotide
cagcaauugcuuuggccgu

SEQ ID NO: 1767419 - RNA, 19 nt, Artificial Sequence
  Description of Artificial Sequence: Synthetic oligonucleotide
guacucuuauccgcaagau

SEQ ID NO: 1767420 - RNA, 19 nt, Artificial Sequence
  Description of Artificial Sequence: Synthetic oligonucleotide
caacaguacugcugcacau

SEQ ID NO: 1767421 - RNA, 19 nt, Artificial Sequence
  Description of Artificial Sequence: Synthetic oligonucleotide
gcgggccgcauccacgcag

SEQ ID NO: 1767422 - RNA, 19 nt, Artificial Sequence
  Description of Artificial Sequence: Synthetic oligonucleotide
cucugucuuuaaccaugga

SEQ ID NO: 1767423 - RNA, 19 nt, Artificial Sequence
  Description of Artificial Sequence: Synthetic oligonucleotide
ccucacagacuguguggag

SEQ ID NO: 1767424 - RNA, 19 nt, Artificial Sequence
  Description of Artificial Sequence: Synthetic oligonucleotide
uuggcccggggaucacgaa

SEQ ID NO: 1767425 - RNA, 19 nt, Artificial Sequence
  Description of Artificial Sequence: Synthetic oligonucleotide
auguugggacagcgggcuu

SEQ ID NO: 1767426 - RNA, 19 nt, Artificial Sequence
  Description of Artificial Sequence: Synthetic oligonucleotide
ggauuucuugcggucuuaa

SEQ ID NO: 1767427 - RNA, 19 nt, Artificial Sequence
  Description of Artificial Sequence: Synthetic oligonucleotide
ggccguauuguagggcuca

SEQ ID NO: 1767428 - RNA, 19 nt, Artificial Sequence
  Description of Artificial Sequence: Synthetic oligonucleotide
cuuuaaccauggaggcagu

SEQ ID NO: 1767429 - RNA, 19 nt, Artificial Sequence
  Description of Artificial Sequence: Synthetic oligonucleotide
cgauccaccgaagucagga

SEQ ID NO: 1767430 - RNA, 19 nt, Artificial Sequence
  Description of Artificial Sequence: Synthetic oligonucleotide
gcucucagaucuccucgga

SEQ ID NO: 1767431 - RNA, 19 nt, Artificial Sequence
  Description of Artificial Sequence: Synthetic oligonucleotide
uugcguggacuugcucauc

SEQ ID NO: 1767432 - RNA, 19 nt, Artificial Sequence
  Description of Artificial Sequence: Synthetic oligonucleotide
caugaaaggcuggcaccaa

SEQ ID NO: 1767433 - RNA, 19 nt, Artificial Sequence
  Description of Artificial Sequence: Synthetic oligonucleotide
cggagcgcuuucauuguug

SEQ ID NO: 1767434 - RNA, 19 nt, Artificial Sequence
  Description of Artificial Sequence: Synthetic oligonucleotide
ccauggaggcagucuuaac

SEQ ID NO: 1767435 - RNA, 19 nt, Artificial Sequence
  Description of Artificial Sequence: Synthetic oligonucleotide
caccaaccugacaccaacu

SEQ ID NO: 1767436 - RNA, 19 nt, Artificial Sequence
  Description of Artificial Sequence: Synthetic oligonucleotide
ggaaccguuucuacguuau

SEQ ID NO: 1767437 - RNA, 19 nt, Artificial Sequence
  Description of Artificial Sequence: Synthetic oligonucleotide
ggggaucacgaacuuuccu

SEQ ID NO: 1767438 - RNA, 19 nt, Artificial Sequence
  Description of Artificial Sequence: Synthetic oligonucleotide
cgcagcguagagacauccc

SEQ ID NO: 1767439 - RNA, 19 nt, Artificial Sequence
  Description of Artificial Sequence: Synthetic oligonucleotide
cacggagcgcuuucauugu

SEQ ID NO: 1767440 - RNA, 19 nt, Artificial Sequence
  Description of Artificial Sequence: Synthetic oligonucleotide
cgcuuucauuguugcgugg

SEQ ID NO: 1767441 - RNA, 19 nt, Artificial Sequence
  Description of Artificial Sequence: Synthetic oligonucleotide
cguacacaucuaauccuga

SEQ ID NO: 1767442 - RNA, 19 nt, Artificial Sequence
  Description of Artificial Sequence: Synthetic oligonucleotide
ccgaagucaggacaacaua

SEQ ID NO: 1767443 - RNA, 19 nt, Artificial Sequence
  Description of Artificial Sequence: Synthetic oligonucleotide
ccugauagagcaaccuuuu

SEQ ID NO: 1767444 - RNA, 19 nt, Artificial Sequence
  Description of Artificial Sequence: Synthetic oligonucleotide
cgcaccaaagggccacuug

SEQ ID NO: 1767445 - RNA, 19 nt, Artificial Sequence
  Description of Artificial Sequence: Synthetic oligonucleotide
ggcugcgggccgcauccac

SEQ ID NO: 1767446 - RNA, 19 nt, Artificial Sequence
  Description of Artificial Sequence: Synthetic oligonucleotide
gcguuuuguuggcugcaua

SEQ ID NO: 1767447 - RNA, 19 nt, Artificial Sequence
  Description of Artificial Sequence: Synthetic oligonucleotide
ccgcaauguaguuuucagu

SEQ ID NO: 1767448 - RNA, 19 nt, Artificial Sequence
  Description of Artificial Sequence: Synthetic oligonucleotide
caaccuuaagguggcguuu

SEQ ID NO: 1767449 - RNA, 19 nt, Artificial Sequence
  Description of Artificial Sequence: Synthetic oligonucleotide
gcugcacggagcgcuuuca

SEQ ID NO: 1767450 - RNA, 19 nt, Artificial Sequence
  Description of Artificial Sequence: Synthetic oligonucleotide
ccgcauccacgcagcguag

SEQ ID NO: 1767451 - RNA, 19 nt, Artificial Sequence
  Description of Artificial Sequence: Synthetic oligonucleotide
ccaccgaagucaggacaac

SEQ ID NO: 1767452 - RNA, 19 nt, Artificial Sequence
  Description of Artificial Sequence: Synthetic oligonucleotide
ccacgcagcguagagacau

SEQ ID NO: 1767453 - RNA, 19 nt, Artificial Sequence
  Description of Artificial Sequence: Synthetic oligonucleotide
gggauuucuugcggucuua

SEQ ID NO: 1767454 - RNA, 19 nt, Artificial Sequence
  Description of Artificial Sequence: Synthetic oligonucleotide
cguggacuugcucaucugu

SEQ ID NO: 1767455 - RNA, 19 nt, Artificial Sequence
  Description of Artificial Sequence: Synthetic oligonucleotide
ggcuggcaccaaccugaca

SEQ ID NO: 1767456 - RNA, 19 nt, Artificial Sequence
  Description of Artificial Sequence: Synthetic oligonucleotide
cugcacggagcgcuuucau

SEQ ID NO: 1767457 - RNA, 19 nt, Artificial Sequence
  Description of Artificial Sequence: Synthetic oligonucleotide
ccuucccuucaagcaugac

SEQ ID NO: 1767458 - RNA, 19 nt, Artificial Sequence
  Description of Artificial Sequence: Synthetic oligonucleotide
aggcugcgggccgcaucca

SEQ ID NO: 1767459 - RNA, 19 nt, Artificial Sequence
  Description of Artificial Sequence: Synthetic oligonucleotide
caauugcuuuggccguauu

SEQ ID NO: 1767460 - RNA, 19 nt, Artificial Sequence
  Description of Artificial Sequence: Synthetic oligonucleotide
gcaauugcuuuggccguau

SEQ ID NO: 1767461 - RNA, 19 nt, Artificial Sequence
  Description of Artificial Sequence: Synthetic oligonucleotide
cggaaccguuucuacguua

SEQ ID NO: 1767462 - RNA, 19 nt, Artificial Sequence
  Description of Artificial Sequence: Synthetic oligonucleotide
caggccccacucagcaauu

SEQ ID NO: 1767463 - RNA, 19 nt, Artificial Sequence
  Description of Artificial Sequence: Synthetic oligonucleotide
gcgggcuuccucacagacu

SEQ ID NO: 1767464 - RNA, 19 nt, Artificial Sequence
  Description of Artificial Sequence: Synthetic oligonucleotide
ggccgcauccacgcagcgu

SEQ ID NO: 1767465 - RNA, 19 nt, Artificial Sequence
  Description of Artificial Sequence: Synthetic oligonucleotide
gggccacuugcaguauaau

SEQ ID NO: 1767466 - RNA, 19 nt, Artificial Sequence
  Description of Artificial Sequence: Synthetic oligonucleotide
cgcauccacgcagcguaga

SEQ ID NO: 1767467 - RNA, 19 nt, Artificial Sequence
  Description of Artificial Sequence: Synthetic oligonucleotide
gccguauuguagggcucau

SEQ ID NO: 1767468 - RNA, 19 nt, Artificial Sequence
  Description of Artificial Sequence: Synthetic oligonucleotide
ccggaaccguuucuacguu

SEQ ID NO: 1767469 - RNA, 19 nt, Artificial Sequence
  Description of Artificial Sequence: Synthetic oligonucleotide
gcccggggaucacgaacuu

SEQ ID NO: 1767470 - RNA, 19 nt, Artificial Sequence
  Description of Artificial Sequence: Synthetic oligonucleotide
ccguauuguagggcucauu

SEQ ID NO: 1767471 - RNA, 19 nt, Artificial Sequence
  Description of Artificial Sequence: Synthetic oligonucleotide
cccggggaucacgaacuuu

SEQ ID NO: 1767472 - RNA, 19 nt, Artificial Sequence
  Description of Artificial Sequence: Synthetic oligonucleotide
ucuccagacaugcaaaagg

SEQ ID NO: 1767473 - RNA, 19 nt, Artificial Sequence
  Description of Artificial Sequence: Synthetic oligonucleotide
aaccaccuugcucaaaacc

SEQ ID NO: 1767474 - RNA, 19 nt, Artificial Sequence
  Description of Artificial Sequence: Synthetic oligonucleotide
cauuggucgcucuagaagg

SEQ ID NO: 1767475 - RNA, 19 nt, Artificial Sequence
  Description of Artificial Sequence: Synthetic oligonucleotide
ugcaaaaggagucucuucu

SEQ ID NO: 1767476 - RNA, 19 nt, Artificial Sequence
  Description of Artificial Sequence: Synthetic oligonucleotide
accaccuugcucaaaaccc

SEQ ID NO: 1767477 - RNA, 19 nt, Artificial Sequence
  Description of Artificial Sequence: Synthetic oligonucleotide
ugcucaaaacccuacguac

SEQ ID NO: 1767478 - RNA, 19 nt, Artificial Sequence
  Description of Artificial Sequence: Synthetic oligonucleotide
aaacccuacguacccuugg

SEQ ID NO: 1767479 - RNA, 19 nt, Artificial Sequence
  Description of Artificial Sequence: Synthetic oligonucleotide
aacccuacguacccuuggg

SEQ ID NO: 1767480 - RNA, 19 nt, Artificial Sequence
  Description of Artificial Sequence: Synthetic oligonucleotide
acaaccagccccaaccacc

SEQ ID NO: 1767481 - RNA, 19 nt, Artificial Sequence
  Description of Artificial Sequence: Synthetic oligonucleotide
cucaaaacccuacguaccc

SEQ ID NO: 1767482 - RNA, 19 nt, Artificial Sequence
  Description of Artificial Sequence: Synthetic oligonucleotide
cagacaugcaaaaggaguc

SEQ ID NO: 1767483 - RNA, 19 nt, Artificial Sequence
  Description of Artificial Sequence: Synthetic oligonucleotide
uccagacaugcaaaaggag

SEQ ID NO: 1767484 - RNA, 19 nt, Artificial Sequence
  Description of Artificial Sequence: Synthetic oligonucleotide
uguccccacaaccagcccc

SEQ ID NO: 1767485 - RNA, 19 nt, Artificial Sequence
  Description of Artificial Sequence: Synthetic oligonucleotide
uaagcauuggucgcucuag

SEQ ID NO: 1767486 - RNA, 19 nt, Artificial Sequence
  Description of Artificial Sequence: Synthetic oligonucleotide
guagugaucagugauugga

SEQ ID NO: 1767487 - RNA, 19 nt, Artificial Sequence
  Description of Artificial Sequence: Synthetic oligonucleotide
gaggccaggggacuugagg

SEQ ID NO: 1767488 - RNA, 19 nt, Artificial Sequence
  Description of Artificial Sequence: Synthetic oligonucleotide
augcaaaaggagucucuuc

SEQ ID NO: 1767489 - RNA, 19 nt, Artificial Sequence
  Description of Artificial Sequence: Synthetic oligonucleotide
uugcucaaaacccuacgua

SEQ ID NO: 1767490 - RNA, 19 nt, Artificial Sequence
  Description of Artificial Sequence: Synthetic oligonucleotide
aacuuaagcauuggucgcu

SEQ ID NO: 1767491 - RNA, 19 nt, Artificial Sequence
  Description of Artificial Sequence: Synthetic oligonucleotide
ucgcucuagaaggaaauga

SEQ ID NO: 1767492 - RNA, 19 nt, Artificial Sequence
  Description of Artificial Sequence: Synthetic oligonucleotide
aagguggaggccaggggac

SEQ ID NO: 1767493 - RNA, 19 nt, Artificial Sequence
  Description of Artificial Sequence: Synthetic oligonucleotide
uuaagcauuggucgcucua

SEQ ID NO: 1767494 - RNA, 19 nt, Artificial Sequence
  Description of Artificial Sequence: Synthetic oligonucleotide
aggccaggggacuugagga

SEQ ID NO: 1767495 - RNA, 19 nt, Artificial Sequence
  Description of Artificial Sequence: Synthetic oligonucleotide
uagugaucagugauuggau

SEQ ID NO: 1767496 - RNA, 19 nt, Artificial Sequence
  Description of Artificial Sequence: Synthetic oligonucleotide
cuccagacaugcaaaagga

SEQ ID NO: 1767497 - RNA, 19 nt, Artificial Sequence
  Description of Artificial Sequence: Synthetic oligonucleotide
aagcauuggucgcucuaga

SEQ ID NO: 1767498 - RNA, 19 nt, Artificial Sequence
  Description of Artificial Sequence: Synthetic oligonucleotide
agugaucagugauuggaua

SEQ ID NO: 1767499 - RNA, 19 nt, Artificial Sequence
  Description of Artificial Sequence: Synthetic oligonucleotide
gcauuggucgcucuagaag

SEQ ID NO: 1767500 - RNA, 19 nt, Artificial Sequence
  Description of Artificial Sequence: Synthetic oligonucleotide
acuuaagcauuggucgcuc

SEQ ID NO: 1767501 - RNA, 19 nt, Artificial Sequence
  Description of Artificial Sequence: Synthetic oligonucleotide
acccuacguacccuugggg

SEQ ID NO: 1767502 - RNA, 19 nt, Artificial Sequence
  Description of Artificial Sequence: Synthetic oligonucleotide
aaaacccuacguacccuug

SEQ ID NO: 1767503 - RNA, 19 nt, Artificial Sequence
  Description of Artificial Sequence: Synthetic oligonucleotide
cccacaaccagccccaacc

SEQ ID NO: 1767504 - RNA, 19 nt, Artificial Sequence
  Description of Artificial Sequence: Synthetic oligonucleotide
agacaugcaaaaggagucu

SEQ ID NO: 1767505 - RNA, 19 nt, Artificial Sequence
  Description of Artificial Sequence: Synthetic oligonucleotide
ucaaaacccuacguacccu

SEQ ID NO: 1767506 - RNA, 19 nt, Artificial Sequence
  Description of Artificial Sequence: Synthetic oligonucleotide
gguagugaucagugauugg

SEQ ID NO: 1767507 - RNA, 19 nt, Artificial Sequence
  Description of Artificial Sequence: Synthetic oligonucleotide
uggucgcucuagaaggaaa

SEQ ID NO: 1767508 - RNA, 19 nt, Artificial Sequence
  Description of Artificial Sequence: Synthetic oligonucleotide
gacaugcaaaaggagucuc

SEQ ID NO: 1767509 - RNA, 19 nt, Artificial Sequence
  Description of Artificial Sequence: Synthetic oligonucleotide
agcauuggucgcucuagaa

SEQ ID NO: 1767510 - RNA, 19 nt, Artificial Sequence
  Description of Artificial Sequence: Synthetic oligonucleotide
gccccaaccaccuugcuca

SEQ ID NO: 1767511 - RNA, 19 nt, Artificial Sequence
  Description of Artificial Sequence: Synthetic oligonucleotide
accuugcucaaaacccuac

SEQ ID NO: 1767512 - RNA, 19 nt, Artificial Sequence
  Description of Artificial Sequence: Synthetic oligonucleotide
accuguccccacaaccagc

SEQ ID NO: 1767513 - RNA, 19 nt, Artificial Sequence
  Description of Artificial Sequence: Synthetic oligonucleotide
ggguagugaucagugauug

SEQ ID NO: 1767514 - RNA, 19 nt, Artificial Sequence
  Description of Artificial Sequence: Synthetic oligonucleotide
acaugcaaaaggagucucu

SEQ ID NO: 1767515 - RNA, 19 nt, Artificial Sequence
  Description of Artificial Sequence: Synthetic oligonucleotide
ccuugcucaaaacccuacg

SEQ ID NO: 1767516 - RNA, 19 nt, Artificial Sequence
  Description of Artificial Sequence: Synthetic oligonucleotide
gcucaaaacccuacguacc

SEQ ID NO: 1767517 - RNA, 19 nt, Artificial Sequence
  Description of Artificial Sequence: Synthetic oligonucleotide
cuugcucaaaacccuacgu

SEQ ID NO: 1767518 - RNA, 19 nt, Artificial Sequence
  Description of Artificial Sequence: Synthetic oligonucleotide
caccuguccccacaaccag

SEQ ID NO: 1767519 - RNA, 19 nt, Artificial Sequence
  Description of Artificial Sequence: Synthetic oligonucleotide
cacaaccagccccaaccac

SEQ ID NO: 1767520 - RNA, 19 nt, Artificial Sequence
  Description of Artificial Sequence: Synthetic oligonucleotide
ccuguccccacaaccagcc

SEQ ID NO: 1767521 - RNA, 19 nt, Artificial Sequence
  Description of Artificial Sequence: Synthetic oligonucleotide
caaccaccuugcucaaaac

SEQ ID NO: 1767522 - RNA, 19 nt, Artificial Sequence
  Description of Artificial Sequence: Synthetic oligonucleotide
gucgcucuagaaggaaaug

SEQ ID NO: 1767523 - RNA, 19 nt, Artificial Sequence
  Description of Artificial Sequence: Synthetic oligonucleotide
auuggucgcucuagaagga

SEQ ID NO: 1767524 - RNA, 19 nt, Artificial Sequence
  Description of Artificial Sequence: Synthetic oligonucleotide
uuggucgcucuagaaggaa

SEQ ID NO: 1767525 - RNA, 19 nt, Artificial Sequence
  Description of Artificial Sequence: Synthetic oligonucleotide
ccagacaugcaaaaggagu

SEQ ID NO: 1767526 - RNA, 19 nt, Artificial Sequence
  Description of Artificial Sequence: Synthetic oligonucleotide
caaaaggagucucuucuuu

SEQ ID NO: 1767527 - RNA, 19 nt, Artificial Sequence
  Description of Artificial Sequence: Synthetic oligonucleotide
cuguccccacaaccagccc

SEQ ID NO: 1767528 - RNA, 19 nt, Artificial Sequence
  Description of Artificial Sequence: Synthetic oligonucleotide
caaaacccuacguacccuu

SEQ ID NO: 1767529 - RNA, 19 nt, Artificial Sequence
  Description of Artificial Sequence: Synthetic oligonucleotide
caaccagccccaaccaccu

SEQ ID NO: 1767530 - RNA, 19 nt, Artificial Sequence
  Description of Artificial Sequence: Synthetic oligonucleotide
aggggacuugaggacuaca

SEQ ID NO: 1767531 - RNA, 19 nt, Artificial Sequence
  Description of Artificial Sequence: Synthetic oligonucleotide
ggccaggggacuugaggac

SEQ ID NO: 1767532 - RNA, 19 nt, Artificial Sequence
  Description of Artificial Sequence: Synthetic oligonucleotide
cuuaagcauuggucgcucu

SEQ ID NO: 1767533 - RNA, 19 nt, Artificial Sequence
  Description of Artificial Sequence: Synthetic oligonucleotide
caccuugcucaaaacccua

SEQ ID NO: 1767534 - RNA, 19 nt, Artificial Sequence
  Description of Artificial Sequence: Synthetic oligonucleotide
caugcaaaaggagucucuu

SEQ ID NO: 1767535 - RNA, 19 nt, Artificial Sequence
  Description of Artificial Sequence: Synthetic oligonucleotide
agguggaggccaggggacu

SEQ ID NO: 1767536 - RNA, 19 nt, Artificial Sequence
  Description of Artificial Sequence: Synthetic oligonucleotide
aaccagccccaaccaccuu

SEQ ID NO: 1767537 - RNA, 19 nt, Artificial Sequence
  Description of Artificial Sequence: Synthetic oligonucleotide
caggggacuugaggacuac

SEQ ID NO: 1767538 - RNA, 19 nt, Artificial Sequence
  Description of Artificial Sequence: Synthetic oligonucleotide
gcaaaaggagucucuucuu

SEQ ID NO: 1767539 - RNA, 19 nt, Artificial Sequence
  Description of Artificial Sequence: Synthetic oligonucleotide
ccacaaccagccccaacca

SEQ ID NO: 1767540 - RNA, 19 nt, Artificial Sequence
  Description of Artificial Sequence: Synthetic oligonucleotide
ggucgcucuagaaggaaau

SEQ ID NO: 1767541 - RNA, 19 nt, Artificial Sequence
  Description of Artificial Sequence: Synthetic oligonucleotide
ccaccuugcucaaaacccu

SEQ ID NO: 1767542 - RNA, 19 nt, Artificial Sequence
  Description of Artificial Sequence: Synthetic oligonucleotide
ggaggccaggggacuugag

SEQ ID NO: 1767543 - RNA, 19 nt, Artificial Sequence
  Description of Artificial Sequence: Synthetic oligonucleotide
gggguagugaucagugauu

SEQ ID NO: 1767544 - RNA, 19 nt, Artificial Sequence
  Description of Artificial Sequence: Synthetic oligonucleotide
gccaggggacuugaggacu

SEQ ID NO: 1767545 - RNA, 19 nt, Artificial Sequence
  Description of Artificial Sequence: Synthetic oligonucleotide
ccaggggacuugaggacua

SEQ ID NO: 1767546 - RNA, 19 nt, Artificial Sequence
  Description of Artificial Sequence: Synthetic oligonucleotide
ccccacaaccagccccaac

SEQ ID NO: 1767547 - RNA, 19 nt, Artificial Sequence
  Description of Artificial Sequence: Synthetic oligonucleotide
gguggaggccaggggacuu

SEQ ID NO: 1767548 - RNA, 19 nt, Artificial Sequence
  Description of Artificial Sequence: Synthetic oligonucleotide
auaucaaauaaguaaaugg

SEQ ID NO: 1767549 - RNA, 19 nt, Artificial Sequence
  Description of Artificial Sequence: Synthetic oligonucleotide
aaucucagcaacaagacgc

SEQ ID NO: 1767550 - RNA, 19 nt, Artificial Sequence
  Description of Artificial Sequence: Synthetic oligonucleotide
uuauaaaccaugaauggug

SEQ ID NO: 1767551 - RNA, 19 nt, Artificial Sequence
  Description of Artificial Sequence: Synthetic oligonucleotide
aucacuuaauucuuuaggg

SEQ ID NO: 1767552 - RNA, 19 nt, Artificial Sequence
  Description of Artificial Sequence: Synthetic oligonucleotide
uuucauuccacucuuguca

SEQ ID NO: 1767553 - RNA, 19 nt, Artificial Sequence
  Description of Artificial Sequence: Synthetic oligonucleotide
aaugcugccacaguuuggc

SEQ ID NO: 1767554 - RNA, 19 nt, Artificial Sequence
  Description of Artificial Sequence: Synthetic oligonucleotide
gauaccuuuaguuucuuug

SEQ ID NO: 1767555 - RNA, 19 nt, Artificial Sequence
  Description of Artificial Sequence: Synthetic oligonucleotide
uuaguguuaaacuuagugu

SEQ ID NO: 1767556 - RNA, 19 nt, Artificial Sequence
  Description of Artificial Sequence: Synthetic oligonucleotide
aaagucaaaccccaucgag

SEQ ID NO: 1767557 - RNA, 19 nt, Artificial Sequence
  Description of Artificial Sequence: Synthetic oligonucleotide
uucucauuguuucaaaucu

SEQ ID NO: 1767558 - RNA, 19 nt, Artificial Sequence
  Description of Artificial Sequence: Synthetic oligonucleotide
uuuagggauguaaucagag

SEQ ID NO: 1767559 - RNA, 19 nt, Artificial Sequence
  Description of Artificial Sequence: Synthetic oligonucleotide
uuagacacaaagucaaacc

SEQ ID NO: 1767560 - RNA, 19 nt, Artificial Sequence
  Description of Artificial Sequence: Synthetic oligonucleotide
acacauaucaaauaaguaa

SEQ ID NO: 1767561 - RNA, 19 nt, Artificial Sequence
  Description of Artificial Sequence: Synthetic oligonucleotide
uuaguuucuuugauggagg

SEQ ID NO: 1767562 - RNA, 19 nt, Artificial Sequence
  Description of Artificial Sequence: Synthetic oligonucleotide
ucuuuaguguuaaacuuag

SEQ ID NO: 1767563 - RNA, 19 nt, Artificial Sequence
  Description of Artificial Sequence: Synthetic oligonucleotide
ugacuaagggucaggaugg

SEQ ID NO: 1767564 - RNA, 19 nt, Artificial Sequence
  Description of Artificial Sequence: Synthetic oligonucleotide
uaugagguagugaaggagc

SEQ ID NO: 1767565 - RNA, 19 nt, Artificial Sequence
  Description of Artificial Sequence: Synthetic oligonucleotide
aaaucucagcaacaagacg

SEQ ID NO: 1767566 - RNA, 19 nt, Artificial Sequence
  Description of Artificial Sequence: Synthetic oligonucleotide
aacguaauccucuuccuug

SEQ ID NO: 1767567 - RNA, 19 nt, Artificial Sequence
  Description of Artificial Sequence: Synthetic oligonucleotide
acugauugauuuauaaacc

SEQ ID NO: 1767568 - RNA, 19 nt, Artificial Sequence
  Description of Artificial Sequence: Synthetic oligonucleotide
acuuagauaagucaucacu

SEQ ID NO: 1767569 - RNA, 19 nt, Artificial Sequence
  Description of Artificial Sequence: Synthetic oligonucleotide
aaauaaguaaauggcuccg

SEQ ID NO: 1767570 - RNA, 19 nt, Artificial Sequence
  Description of Artificial Sequence: Synthetic oligonucleotide
ucagagaucagaccauggg

SEQ ID NO: 1767571 - RNA, 19 nt, Artificial Sequence
  Description of Artificial Sequence: Synthetic oligonucleotide
cauuguuucaaaucuuucc

SEQ ID NO: 1767572 - RNA, 19 nt, Artificial Sequence
  Description of Artificial Sequence: Synthetic oligonucleotide
cuuuaugagguagugaagg

SEQ ID NO: 1767573 - RNA, 19 nt, Artificial Sequence
  Description of Artificial Sequence: Synthetic oligonucleotide
ugaugacuuuucauuaugg

SEQ ID NO: 1767574 - RNA, 19 nt, Artificial Sequence
  Description of Artificial Sequence: Synthetic oligonucleotide
aaaggcaucaauacuuuuc

SEQ ID NO: 1767575 - RNA, 19 nt, Artificial Sequence
  Description of Artificial Sequence: Synthetic oligonucleotide
guaaucagagaucagacca

SEQ ID NO: 1767576 - RNA, 19 nt, Artificial Sequence
  Description of Artificial Sequence: Synthetic oligonucleotide
auuguuucaaaucuuucca

SEQ ID NO: 1767577 - RNA, 19 nt, Artificial Sequence
  Description of Artificial Sequence: Synthetic oligonucleotide
uggcaaacauuccagaggc

SEQ ID NO: 1767578 - RNA, 19 nt, Artificial Sequence
  Description of Artificial Sequence: Synthetic oligonucleotide
uuagccaaagccuucugag

SEQ ID NO: 1767579 - RNA, 19 nt, Artificial Sequence
  Description of Artificial Sequence: Synthetic oligonucleotide
uaaacuuaguguaaucuuc

SEQ ID NO: 1767580 - RNA, 19 nt, Artificial Sequence
  Description of Artificial Sequence: Synthetic oligonucleotide
auaagucaucacuuaauuc

SEQ ID NO: 1767581 - RNA, 19 nt, Artificial Sequence
  Description of Artificial Sequence: Synthetic oligonucleotide
auaugcagaugacuguacc

SEQ ID NO: 1767582 - RNA, 19 nt, Artificial Sequence
  Description of Artificial Sequence: Synthetic oligonucleotide
aaggcaucaauacuuuuca

SEQ ID NO: 1767583 - RNA, 19 nt, Artificial Sequence
  Description of Artificial Sequence: Synthetic oligonucleotide
aaccccaucgaguuacugg

SEQ ID NO: 1767584 - RNA, 19 nt, Artificial Sequence
  Description of Artificial Sequence: Synthetic oligonucleotide
aaguaggaacacgaguugc

SEQ ID NO: 1767585 - RNA, 19 nt, Artificial Sequence
  Description of Artificial Sequence: Synthetic oligonucleotide
uguuucaaaucuuuccagc

SEQ ID NO: 1767586 - RNA, 19 nt, Artificial Sequence
  Description of Artificial Sequence: Synthetic oligonucleotide
uaguguuaaacuuagugua

SEQ ID NO: 1767587 - RNA, 19 nt, Artificial Sequence
  Description of Artificial Sequence: Synthetic oligonucleotide
aguguaaucuucuuuugcu

SEQ ID NO: 1767588 - RNA, 19 nt, Artificial Sequence
  Description of Artificial Sequence: Synthetic oligonucleotide
auggcaaacauuccagagg

SEQ ID NO: 1767589 - RNA, 19 nt, Artificial Sequence
  Description of Artificial Sequence: Synthetic oligonucleotide
uggaauugaagauggaggu

SEQ ID NO: 1767590 - RNA, 19 nt, Artificial Sequence
  Description of Artificial Sequence: Synthetic oligonucleotide
uagggauguaaucagagau

SEQ ID NO: 1767591 - RNA, 19 nt, Artificial Sequence
  Description of Artificial Sequence: Synthetic oligonucleotide
ugaaacucuguccacuuga

SEQ ID NO: 1767592 - RNA, 19 nt, Artificial Sequence
  Description of Artificial Sequence: Synthetic oligonucleotide
gaugacuuuucauuauggc

SEQ ID NO: 1767593 - RNA, 19 nt, Artificial Sequence
  Description of Artificial Sequence: Synthetic oligonucleotide
uauaaaccaugaauggugu

SEQ ID NO: 1767594 - RNA, 19 nt, Artificial Sequence
  Description of Artificial Sequence: Synthetic oligonucleotide
accccaucgaguuacuggc

SEQ ID NO: 1767595 - RNA, 19 nt, Artificial Sequence
  Description of Artificial Sequence: Synthetic oligonucleotide
uguaaucagagaucagacc

SEQ ID NO: 1767596 - RNA, 19 nt, Artificial Sequence
  Description of Artificial Sequence: Synthetic oligonucleotide
guagugaaggagcagaaac

SEQ ID NO: 1767597 - RNA, 19 nt, Artificial Sequence
  Description of Artificial Sequence: Synthetic oligonucleotide
agcaacaagacgcaaucug

SEQ ID NO: 1767598 - RNA, 19 nt, Artificial Sequence
  Description of Artificial Sequence: Synthetic oligonucleotide
caagacgcaaucuggaaac

SEQ ID NO: 1767599 - RNA, 19 nt, Artificial Sequence
  Description of Artificial Sequence: Synthetic oligonucleotide
ucugauaccuuuaguuucu

SEQ ID NO: 1767600 - RNA, 19 nt, Artificial Sequence
  Description of Artificial Sequence: Synthetic oligonucleotide
aauaugcagaugacuguac

SEQ ID NO: 1767601 - RNA, 19 nt, Artificial Sequence
  Description of Artificial Sequence: Synthetic oligonucleotide
uuuagccaaagccuucuga

SEQ ID NO: 1767602 - RNA, 19 nt, Artificial Sequence
  Description of Artificial Sequence: Synthetic oligonucleotide
ucuuugccagccuuuauga

SEQ ID NO: 1767603 - RNA, 19 nt, Artificial Sequence
  Description of Artificial Sequence: Synthetic oligonucleotide
ugauugauuuauaaaccau

SEQ ID NO: 1767604 - RNA, 19 nt, Artificial Sequence
  Description of Artificial Sequence: Synthetic oligonucleotide
ugucacaugccgaagugac

SEQ ID NO: 1767605 - RNA, 19 nt, Artificial Sequence
  Description of Artificial Sequence: Synthetic oligonucleotide
uuaugagguagugaaggag

SEQ ID NO: 1767606 - RNA, 19 nt, Artificial Sequence
  Description of Artificial Sequence: Synthetic oligonucleotide
agaggcaaacuucucuuuc

SEQ ID NO: 1767607 - RNA, 19 nt, Artificial Sequence
  Description of Artificial Sequence: Synthetic oligonucleotide
uuuauucucauuguuucaa

SEQ ID NO: 1767608 - RNA, 19 nt, Artificial Sequence
  Description of Artificial Sequence: Synthetic oligonucleotide
auuauggcaaacauuccag

SEQ ID NO: 1767609 - RNA, 19 nt, Artificial Sequence
  Description of Artificial Sequence: Synthetic oligonucleotide
uuuaugagguagugaagga

SEQ ID NO: 1767610 - RNA, 19 nt, Artificial Sequence
  Description of Artificial Sequence: Synthetic oligonucleotide
agggcugauacuuucccuc

SEQ ID NO: 1767611 - RNA, 19 nt, Artificial Sequence
  Description of Artificial Sequence: Synthetic oligonucleotide
uuccagaggccccagucgg

SEQ ID NO: 1767612 - RNA, 19 nt, Artificial Sequence
  Description of Artificial Sequence: Synthetic oligonucleotide
aggaacacgaguugccggg

SEQ ID NO: 1767613 - RNA, 19 nt, Artificial Sequence
  Description of Artificial Sequence: Synthetic oligonucleotide
uucucugugcuauacuugu

SEQ ID NO: 1767614 - RNA, 19 nt, Artificial Sequence
  Description of Artificial Sequence: Synthetic oligonucleotide
uagauaagucaucacuuaa

SEQ ID NO: 1767615 - RNA, 19 nt, Artificial Sequence
  Description of Artificial Sequence: Synthetic oligonucleotide
aaauauucuggaaguagga

SEQ ID NO: 1767616 - RNA, 19 nt, Artificial Sequence
  Description of Artificial Sequence: Synthetic oligonucleotide
acaagcaagaggcaaacuu

SEQ ID NO: 1767617 - RNA, 19 nt, Artificial Sequence
  Description of Artificial Sequence: Synthetic oligonucleotide
uugauuuauaaaccaugaa

SEQ ID NO: 1767618 - RNA, 19 nt, Artificial Sequence
  Description of Artificial Sequence: Synthetic oligonucleotide
ucaaggacuuagauaaguc

SEQ ID NO: 1767619 - RNA, 19 nt, Artificial Sequence
  Description of Artificial Sequence: Synthetic oligonucleotide
aguaggaacacgaguugcc

SEQ ID NO: 1767620 - RNA, 19 nt, Artificial Sequence
  Description of Artificial Sequence: Synthetic oligonucleotide
uauuggcuuucaaugcugc

SEQ ID NO: 1767621 - RNA, 19 nt, Artificial Sequence
  Description of Artificial Sequence: Synthetic oligonucleotide
caagcaagaggcaaacuuc

SEQ ID NO: 1767622 - RNA, 19 nt, Artificial Sequence
  Description of Artificial Sequence: Synthetic oligonucleotide
aaacuuaguguaaucuucu

SEQ ID NO: 1767623 - RNA, 19 nt, Artificial Sequence
  Description of Artificial Sequence: Synthetic oligonucleotide
caucaauacuuuucauucc

SEQ ID NO: 1767624 - RNA, 19 nt, Artificial Sequence
  Description of Artificial Sequence: Synthetic oligonucleotide
uuucaaugcugccacaguu

SEQ ID NO: 1767625 - RNA, 19 nt, Artificial Sequence
  Description of Artificial Sequence: Synthetic oligonucleotide
gacgcaaucuggaaacagg

SEQ ID NO: 1767626 - RNA, 19 nt, Artificial Sequence
  Description of Artificial Sequence: Synthetic oligonucleotide
agacacauaucaaauaagu

SEQ ID NO: 1767627 - RNA, 19 nt, Artificial Sequence
  Description of Artificial Sequence: Synthetic oligonucleotide
augcagaugacuguacccg

SEQ ID NO: 1767628 - RNA, 19 nt, Artificial Sequence
  Description of Artificial Sequence: Synthetic oligonucleotide
cucaggaaaucucagcaac

SEQ ID NO: 1767629 - RNA, 19 nt, Artificial Sequence
  Description of Artificial Sequence: Synthetic oligonucleotide
ugauacuuucccucuuugc

SEQ ID NO: 1767630 - RNA, 19 nt, Artificial Sequence
  Description of Artificial Sequence: Synthetic oligonucleotide
uuagggauguaaucagaga

SEQ ID NO: 1767631 - RNA, 19 nt, Artificial Sequence
  Description of Artificial Sequence: Synthetic oligonucleotide
aaauaugcagaugacugua

SEQ ID NO: 1767632 - RNA, 19 nt, Artificial Sequence
  Description of Artificial Sequence: Synthetic oligonucleotide
ucgguaacucacacaauca

SEQ ID NO: 1767633 - RNA, 19 nt, Artificial Sequence
  Description of Artificial Sequence: Synthetic oligonucleotide
cugauugauuuauaaacca

SEQ ID NO: 1767634 - RNA, 19 nt, Artificial Sequence
  Description of Artificial Sequence: Synthetic oligonucleotide
gcaucaauacuuuucauuc

SEQ ID NO: 1767635 - RNA, 19 nt, Artificial Sequence
  Description of Artificial Sequence: Synthetic oligonucleotide
uuucccauaguuuguuaga

SEQ ID NO: 1767636 - RNA, 19 nt, Artificial Sequence
  Description of Artificial Sequence: Synthetic oligonucleotide
aaaaccacuucuccuguuu

SEQ ID NO: 1767637 - RNA, 19 nt, Artificial Sequence
  Description of Artificial Sequence: Synthetic oligonucleotide
ucauuauggcaaacauucc

SEQ ID NO: 1767638 - RNA, 19 nt, Artificial Sequence
  Description of Artificial Sequence: Synthetic oligonucleotide
agccaaagccuucugagcu

SEQ ID NO: 1767639 - RNA, 19 nt, Artificial Sequence
  Description of Artificial Sequence: Synthetic oligonucleotide
gguuuggaauugaagaugg

SEQ ID NO: 1767640 - RNA, 19 nt, Artificial Sequence
  Description of Artificial Sequence: Synthetic oligonucleotide
uuuucauuccacucuuguc

SEQ ID NO: 1767641 - RNA, 19 nt, Artificial Sequence
  Description of Artificial Sequence: Synthetic oligonucleotide
gucgguaacucacacaauc

SEQ ID NO: 1767642 - RNA, 19 nt, Artificial Sequence
  Description of Artificial Sequence: Synthetic oligonucleotide
uguuaaacuuaguguaauc

SEQ ID NO: 1767643 - RNA, 19 nt, Artificial Sequence
  Description of Artificial Sequence: Synthetic oligonucleotide
aacaagacgcaaucuggaa

SEQ ID NO: 1767644 - RNA, 19 nt, Artificial Sequence
  Description of Artificial Sequence: Synthetic oligonucleotide
cauuauggcaaacauucca

SEQ ID NO: 1767645 - RNA, 19 nt, Artificial Sequence
  Description of Artificial Sequence: Synthetic oligonucleotide
uucaaggacuuagauaagu

SEQ ID NO: 1767646 - RNA, 19 nt, Artificial Sequence
  Description of Artificial Sequence: Synthetic oligonucleotide
aggaucugaaaaccacuuc

SEQ ID NO: 1767647 - RNA, 19 nt, Artificial Sequence
  Description of Artificial Sequence: Synthetic oligonucleotide
gaucagaccaugggcauag

SEQ ID NO: 1767648 - RNA, 19 nt, Artificial Sequence
  Description of Artificial Sequence: Synthetic oligonucleotide
caaacauuccagaggcccc

SEQ ID NO: 1767649 - RNA, 19 nt, Artificial Sequence
  Description of Artificial Sequence: Synthetic oligonucleotide
uucgaggcaucuuuuaaau

SEQ ID NO: 1767650 - RNA, 19 nt, Artificial Sequence
  Description of Artificial Sequence: Synthetic oligonucleotide
cuucauuagauuuuauucu

SEQ ID NO: 1767651 - RNA, 19 nt, Artificial Sequence
  Description of Artificial Sequence: Synthetic oligonucleotide
uuggaaaccugaucaccag

SEQ ID NO: 1767652 - RNA, 19 nt, Artificial Sequence
  Description of Artificial Sequence: Synthetic oligonucleotide
acagguucaucugauaccu

SEQ ID NO: 1767653 - RNA, 19 nt, Artificial Sequence
  Description of Artificial Sequence: Synthetic oligonucleotide
auugaacugauugauuuau

SEQ ID NO: 1767654 - RNA, 19 nt, Artificial Sequence
  Description of Artificial Sequence: Synthetic oligonucleotide
ucuucgaggcaucuuuuaa

SEQ ID NO: 1767655 - RNA, 19 nt, Artificial Sequence
  Description of Artificial Sequence: Synthetic oligonucleotide
cuuggaaaccugaucacca

SEQ ID NO: 1767656 - RNA, 19 nt, Artificial Sequence
  Description of Artificial Sequence: Synthetic oligonucleotide
aagucaaaccccaucgagu

SEQ ID NO: 1767657 - RNA, 19 nt, Artificial Sequence
  Description of Artificial Sequence: Synthetic oligonucleotide
agcugcugaagacacauau

SEQ ID NO: 1767658 - RNA, 19 nt, Artificial Sequence
  Description of Artificial Sequence: Synthetic oligonucleotide
agucaaaccccaucgaguu

SEQ ID NO: 1767659 - RNA, 19 nt, Artificial Sequence
  Description of Artificial Sequence: Synthetic oligonucleotide
ucgaguuacuggcaggauc

SEQ ID NO: 1767660 - RNA, 19 nt, Artificial Sequence
  Description of Artificial Sequence: Synthetic oligonucleotide
accaugggcauagcgaacg

SEQ ID NO: 1767661 - RNA, 19 nt, Artificial Sequence
  Description of Artificial Sequence: Synthetic oligonucleotide
acaagacgcaaucuggaaa

SEQ ID NO: 1767662 - RNA, 19 nt, Artificial Sequence
  Description of Artificial Sequence: Synthetic oligonucleotide
agcggugacucugaaacuc

SEQ ID NO: 1767663 - RNA, 19 nt, Artificial Sequence
  Description of Artificial Sequence: Synthetic oligonucleotide
aucuggaaacaggucgucc

SEQ ID NO: 1767664 - RNA, 19 nt, Artificial Sequence
  Description of Artificial Sequence: Synthetic oligonucleotide
guaggaacacgaguugccg

SEQ ID NO: 1767665 - RNA, 19 nt, Artificial Sequence
  Description of Artificial Sequence: Synthetic oligonucleotide
agaccaugggcauagcgaa

SEQ ID NO: 1767666 - RNA, 19 nt, Artificial Sequence
  Description of Artificial Sequence: Synthetic oligonucleotide
uaguacuucuugcuguuua

SEQ ID NO: 1767667 - RNA, 19 nt, Artificial Sequence
  Description of Artificial Sequence: Synthetic oligonucleotide
guuggccaguuuuacaaac

SEQ ID NO: 1767668 - RNA, 19 nt, Artificial Sequence
  Description of Artificial Sequence: Synthetic oligonucleotide
agggauguaaucagagauc

SEQ ID NO: 1767669 - RNA, 19 nt, Artificial Sequence
  Description of Artificial Sequence: Synthetic oligonucleotide
aagggcugauacuuucccu

SEQ ID NO: 1767670 - RNA, 19 nt, Artificial Sequence
  Description of Artificial Sequence: Synthetic oligonucleotide
gaaauaugcagaugacugu

SEQ ID NO: 1767671 - RNA, 19 nt, Artificial Sequence
  Description of Artificial Sequence: Synthetic oligonucleotide
auagcgaacguaauccucu

SEQ ID NO: 1767672 - RNA, 19 nt, Artificial Sequence
  Description of Artificial Sequence: Synthetic oligonucleotide
aggagaccacucuucaucu

SEQ ID NO: 1767673 - RNA, 19 nt, Artificial Sequence
  Description of Artificial Sequence: Synthetic oligonucleotide
ggaagcuucaaggacuuag

SEQ ID NO: 1767674 - RNA, 19 nt, Artificial Sequence
  Description of Artificial Sequence: Synthetic oligonucleotide
cacaaagucaaaccccauc

SEQ ID NO: 1767675 - RNA, 19 nt, Artificial Sequence
  Description of Artificial Sequence: Synthetic oligonucleotide
cauagcgaacguaauccuc

SEQ ID NO: 1767676 - RNA, 19 nt, Artificial Sequence
  Description of Artificial Sequence: Synthetic oligonucleotide
uucccauaguuuguuagac

SEQ ID NO: 1767677 - RNA, 19 nt, Artificial Sequence
  Description of Artificial Sequence: Synthetic oligonucleotide
aauugaagauggagguucu

SEQ ID NO: 1767678 - RNA, 19 nt, Artificial Sequence
  Description of Artificial Sequence: Synthetic oligonucleotide
aaacauuccagaggcccca

SEQ ID NO: 1767679 - RNA, 19 nt, Artificial Sequence
  Description of Artificial Sequence: Synthetic oligonucleotide
uugcaaaguggagaagccc

SEQ ID NO: 1767680 - RNA, 19 nt, Artificial Sequence
  Description of Artificial Sequence: Synthetic oligonucleotide
ugucaacuuuagccaaagc

SEQ ID NO: 1767681 - RNA, 19 nt, Artificial Sequence
  Description of Artificial Sequence: Synthetic oligonucleotide
gcgaacguaauccucuucc

SEQ ID NO: 1767682 - RNA, 19 nt, Artificial Sequence
  Description of Artificial Sequence: Synthetic oligonucleotide
cagucgguaacucacacaa

SEQ ID NO: 1767683 - RNA, 19 nt, Artificial Sequence
  Description of Artificial Sequence: Synthetic oligonucleotide
ucucauuguuucaaaucuu

SEQ ID NO: 1767684 - RNA, 19 nt, Artificial Sequence
  Description of Artificial Sequence: Synthetic oligonucleotide
cugauccaagggcugauac

SEQ ID NO: 1767685 - RNA, 19 nt, Artificial Sequence
  Description of Artificial Sequence: Synthetic oligonucleotide
aaaccacuucuccuguuuu

SEQ ID NO: 1767686 - RNA, 19 nt, Artificial Sequence
  Description of Artificial Sequence: Synthetic oligonucleotide
gacuuagauaagucaucac

SEQ ID NO: 1767687 - RNA, 19 nt, Artificial Sequence
  Description of Artificial Sequence: Synthetic oligonucleotide
ucacaugccgaagugacuu

SEQ ID NO: 1767688 - RNA, 19 nt, Artificial Sequence
  Description of Artificial Sequence: Synthetic oligonucleotide
gccaguuuuacaaacagga

SEQ ID NO: 1767689 - RNA, 19 nt, Artificial Sequence
  Description of Artificial Sequence: Synthetic oligonucleotide
gcaaacauuccagaggccc

SEQ ID NO: 1767690 - RNA, 19 nt, Artificial Sequence
  Description of Artificial Sequence: Synthetic oligonucleotide
ucccauaguuuguuagaca

SEQ ID NO: 1767691 - RNA, 19 nt, Artificial Sequence
  Description of Artificial Sequence: Synthetic oligonucleotide
gaacaagcaagaggcaaac

SEQ ID NO: 1767692 - RNA, 19 nt, Artificial Sequence
  Description of Artificial Sequence: Synthetic oligonucleotide
cuuuucauuauggcaaaca

SEQ ID NO: 1767693 - RNA, 19 nt, Artificial Sequence
  Description of Artificial Sequence: Synthetic oligonucleotide
cuuagauaagucaucacuu

SEQ ID NO: 1767694 - RNA, 19 nt, Artificial Sequence
  Description of Artificial Sequence: Synthetic oligonucleotide
aggcaaacuucucuuucug

SEQ ID NO: 1767695 - RNA, 19 nt, Artificial Sequence
  Description of Artificial Sequence: Synthetic oligonucleotide
gugacucugaaacucuguc

SEQ ID NO: 1767696 - RNA, 19 nt, Artificial Sequence
  Description of Artificial Sequence: Synthetic oligonucleotide
gagcagaaacagaggaucc

SEQ ID NO: 1767697 - RNA, 19 nt, Artificial Sequence
  Description of Artificial Sequence: Synthetic oligonucleotide
uccaagggcugauacuuuc

SEQ ID NO: 1767698 - RNA, 19 nt, Artificial Sequence
  Description of Artificial Sequence: Synthetic oligonucleotide
agauaagucaucacuuaau

SEQ ID NO: 1767699 - RNA, 19 nt, Artificial Sequence
  Description of Artificial Sequence: Synthetic oligonucleotide
cauuccagaggccccaguc

SEQ ID NO: 1767700 - RNA, 19 nt, Artificial Sequence
  Description of Artificial Sequence: Synthetic oligonucleotide
aguccccgcggucucggcc

SEQ ID NO: 1767701 - RNA, 19 nt, Artificial Sequence
  Description of Artificial Sequence: Synthetic oligonucleotide
gcugaagacacauaucaaa

SEQ ID NO: 1767702 - RNA, 19 nt, Artificial Sequence
  Description of Artificial Sequence: Synthetic oligonucleotide
acguaauccucuuccuugu

SEQ ID NO: 1767703 - RNA, 19 nt, Artificial Sequence
  Description of Artificial Sequence: Synthetic oligonucleotide
gacacauaucaaauaagua

SEQ ID NO: 1767704 - RNA, 19 nt, Artificial Sequence
  Description of Artificial Sequence: Synthetic oligonucleotide
uccuuggaaaccugaucac

SEQ ID NO: 1767705 - RNA, 19 nt, Artificial Sequence
  Description of Artificial Sequence: Synthetic oligonucleotide
agcgaacguaauccucuuc

SEQ ID NO: 1767706 - RNA, 19 nt, Artificial Sequence
  Description of Artificial Sequence: Synthetic oligonucleotide
gauggaggguuuggaauug

SEQ ID NO: 1767707 - RNA, 19 nt, Artificial Sequence
  Description of Artificial Sequence: Synthetic oligonucleotide
uugaacugauugauuuaua

SEQ ID NO: 1767708 - RNA, 19 nt, Artificial Sequence
  Description of Artificial Sequence: Synthetic oligonucleotide
gaaacaggucguccacuac

SEQ ID NO: 1767709 - RNA, 19 nt, Artificial Sequence
  Description of Artificial Sequence: Synthetic oligonucleotide
acacgaguugccggggagc

SEQ ID NO: 1767710 - RNA, 19 nt, Artificial Sequence
  Description of Artificial Sequence: Synthetic oligonucleotide
cagaugacuguacccgggc

SEQ ID NO: 1767711 - RNA, 19 nt, Artificial Sequence
  Description of Artificial Sequence: Synthetic oligonucleotide
gguguugcaaaguggagaa

SEQ ID NO: 1767712 - RNA, 19 nt, Artificial Sequence
  Description of Artificial Sequence: Synthetic oligonucleotide
agacgcaaucuggaaacag

SEQ ID NO: 1767713 - RNA, 19 nt, Artificial Sequence
  Description of Artificial Sequence: Synthetic oligonucleotide
cuauacuuguaguacuucu

SEQ ID NO: 1767714 - RNA, 19 nt, Artificial Sequence
  Description of Artificial Sequence: Synthetic oligonucleotide
accugaucaccagagaaau

SEQ ID NO: 1767715 - RNA, 19 nt, Artificial Sequence
  Description of Artificial Sequence: Synthetic oligonucleotide
uguacccgggcuccaacau

SEQ ID NO: 1767716 - RNA, 19 nt, Artificial Sequence
  Description of Artificial Sequence: Synthetic oligonucleotide
aacaagcaagaggcaaacu

SEQ ID NO: 1767717 - RNA, 19 nt, Artificial Sequence
  Description of Artificial Sequence: Synthetic oligonucleotide
agaugacuguacccgggcu

SEQ ID NO: 1767718 - RNA, 19 nt, Artificial Sequence
  Description of Artificial Sequence: Synthetic oligonucleotide
agaacaagcaagaggcaaa

SEQ ID NO: 1767719 - RNA, 19 nt, Artificial Sequence
  Description of Artificial Sequence: Synthetic oligonucleotide
agugacuaagggucaggau

SEQ ID NO: 1767720 - RNA, 19 nt, Artificial Sequence
  Description of Artificial Sequence: Synthetic oligonucleotide
uaaauggcuccguccccug

SEQ ID NO: 1767721 - RNA, 19 nt, Artificial Sequence
  Description of Artificial Sequence: Synthetic oligonucleotide
agugacuucucaagcucag

SEQ ID NO: 1767722 - RNA, 19 nt, Artificial Sequence
  Description of Artificial Sequence: Synthetic oligonucleotide
cuucgaggcaucuuuuaaa

SEQ ID NO: 1767723 - RNA, 19 nt, Artificial Sequence
  Description of Artificial Sequence: Synthetic oligonucleotide
uggaggguuuggaauugaa

SEQ ID NO: 1767724 - RNA, 19 nt, Artificial Sequence
  Description of Artificial Sequence: Synthetic oligonucleotide
aguugaagccaugcacgag

SEQ ID NO: 1767725 - RNA, 19 nt, Artificial Sequence
  Description of Artificial Sequence: Synthetic oligonucleotide
aggucguccacuaccaccu

SEQ ID NO: 1767726 - RNA, 19 nt, Artificial Sequence
  Description of Artificial Sequence: Synthetic oligonucleotide
acgcaaucuggaaacaggu

SEQ ID NO: 1767727 - RNA, 19 nt, Artificial Sequence
  Description of Artificial Sequence: Synthetic oligonucleotide
ggguuuggaauugaagaug

SEQ ID NO: 1767728 - RNA, 19 nt, Artificial Sequence
  Description of Artificial Sequence: Synthetic oligonucleotide
augggcauagcgaacguaa

SEQ ID NO: 1767729 - RNA, 19 nt, Artificial Sequence
  Description of Artificial Sequence: Synthetic oligonucleotide
agcggagacuagcuggcca

SEQ ID NO: 1767730 - RNA, 19 nt, Artificial Sequence
  Description of Artificial Sequence: Synthetic oligonucleotide
cugaucaccagagaaauau

SEQ ID NO: 1767731 - RNA, 19 nt, Artificial Sequence
  Description of Artificial Sequence: Synthetic oligonucleotide
agaggauccauggguguug

SEQ ID NO: 1767732 - RNA, 19 nt, Artificial Sequence
  Description of Artificial Sequence: Synthetic oligonucleotide
uuccacucuugucaacuuu

SEQ ID NO: 1767733 - RNA, 19 nt, Artificial Sequence
  Description of Artificial Sequence: Synthetic oligonucleotide
uggccaucacucaaagcuu

SEQ ID NO: 1767734 - RNA, 19 nt, Artificial Sequence
  Description of Artificial Sequence: Synthetic oligonucleotide
gagacuagcuggccaucac

SEQ ID NO: 1767735 - RNA, 19 nt, Artificial Sequence
  Description of Artificial Sequence: Synthetic oligonucleotide
aagacgcaaucuggaaaca

SEQ ID NO: 1767736 - RNA, 19 nt, Artificial Sequence
  Description of Artificial Sequence: Synthetic oligonucleotide
cuuaauucuuuagggaugu

SEQ ID NO: 1767737 - RNA, 19 nt, Artificial Sequence
  Description of Artificial Sequence: Synthetic oligonucleotide
gagugacuaagggucagga

SEQ ID NO: 1767738 - RNA, 19 nt, Artificial Sequence
  Description of Artificial Sequence: Synthetic oligonucleotide
ggacuuagauaagucauca

SEQ ID NO: 1767739 - RNA, 19 nt, Artificial Sequence
  Description of Artificial Sequence: Synthetic oligonucleotide
caaagucaaaccccaucga

SEQ ID NO: 1767740 - RNA, 19 nt, Artificial Sequence
  Description of Artificial Sequence: Synthetic oligonucleotide
guaacucacacaaucacuu

SEQ ID NO: 1767741 - RNA, 19 nt, Artificial Sequence
  Description of Artificial Sequence: Synthetic oligonucleotide
gauccaagggcugauacuu

SEQ ID NO: 1767742 - RNA, 19 nt, Artificial Sequence
  Description of Artificial Sequence: Synthetic oligonucleotide
gcuuucaaugcugccacag

SEQ ID NO: 1767743 - RNA, 19 nt, Artificial Sequence
  Description of Artificial Sequence: Synthetic oligonucleotide
ucgaggcaucuuuuaaaua

SEQ ID NO: 1767744 - RNA, 19 nt, Artificial Sequence
  Description of Artificial Sequence: Synthetic oligonucleotide
ugggcauagcgaacguaau

SEQ ID NO: 1767745 - RNA, 19 nt, Artificial Sequence
  Description of Artificial Sequence: Synthetic oligonucleotide
ggguuggccaguuuuacaa

SEQ ID NO: 1767746 - RNA, 19 nt, Artificial Sequence
  Description of Artificial Sequence: Synthetic oligonucleotide
ugauaccuuuaguuucuuu

SEQ ID NO: 1767747 - RNA, 19 nt, Artificial Sequence
  Description of Artificial Sequence: Synthetic oligonucleotide
agcaagaggcaaacuucuc

SEQ ID NO: 1767748 - RNA, 19 nt, Artificial Sequence
  Description of Artificial Sequence: Synthetic oligonucleotide
ccgaagugacuucucaagc

SEQ ID NO: 1767749 - RNA, 19 nt, Artificial Sequence
  Description of Artificial Sequence: Synthetic oligonucleotide
agggucuucucugugcuau

SEQ ID NO: 1767750 - RNA, 19 nt, Artificial Sequence
  Description of Artificial Sequence: Synthetic oligonucleotide
aguuacuggcaggaucuga

SEQ ID NO: 1767751 - RNA, 19 nt, Artificial Sequence
  Description of Artificial Sequence: Synthetic oligonucleotide
uuucccucuuugccagccu

SEQ ID NO: 1767752 - RNA, 19 nt, Artificial Sequence
  Description of Artificial Sequence: Synthetic oligonucleotide
ccuuuaugagguagugaag

SEQ ID NO: 1767753 - RNA, 19 nt, Artificial Sequence
  Description of Artificial Sequence: Synthetic oligonucleotide
ggccaguuuuacaaacagg

SEQ ID NO: 1767754 - RNA, 19 nt, Artificial Sequence
  Description of Artificial Sequence: Synthetic oligonucleotide
cuugccagucuucaagucu

SEQ ID NO: 1767755 - RNA, 19 nt, Artificial Sequence
  Description of Artificial Sequence: Synthetic oligonucleotide
ucucugugcuauacuugua

SEQ ID NO: 1767756 - RNA, 19 nt, Artificial Sequence
  Description of Artificial Sequence: Synthetic oligonucleotide
acaugccgaagugacuucu

SEQ ID NO: 1767757 - RNA, 19 nt, Artificial Sequence
  Description of Artificial Sequence: Synthetic oligonucleotide
aggagugacuaagggucag

SEQ ID NO: 1767758 - RNA, 19 nt, Artificial Sequence
  Description of Artificial Sequence: Synthetic oligonucleotide
acuaagggucaggauggca

SEQ ID NO: 1767759 - RNA, 19 nt, Artificial Sequence
  Description of Artificial Sequence: Synthetic oligonucleotide
caucgaguuacuggcagga

SEQ ID NO: 1767760 - RNA, 19 nt, Artificial Sequence
  Description of Artificial Sequence: Synthetic oligonucleotide
auuccacucuugucaacuu

SEQ ID NO: 1767761 - RNA, 19 nt, Artificial Sequence
  Description of Artificial Sequence: Synthetic oligonucleotide
agcugcagucauuuugcua

SEQ ID NO: 1767762 - RNA, 19 nt, Artificial Sequence
  Description of Artificial Sequence: Synthetic oligonucleotide
caugccgaagugacuucuc

SEQ ID NO: 1767763 - RNA, 19 nt, Artificial Sequence
  Description of Artificial Sequence: Synthetic oligonucleotide
gcugccacaguuuggcuga

SEQ ID NO: 1767764 - RNA, 19 nt, Artificial Sequence
  Description of Artificial Sequence: Synthetic oligonucleotide
gugcuauacuuguaguacu

SEQ ID NO: 1767765 - RNA, 19 nt, Artificial Sequence
  Description of Artificial Sequence: Synthetic oligonucleotide
ggaaguaggaacacgaguu

SEQ ID NO: 1767766 - RNA, 19 nt, Artificial Sequence
  Description of Artificial Sequence: Synthetic oligonucleotide
ccuuggaaaccugaucacc

SEQ ID NO: 1767767 - RNA, 19 nt, Artificial Sequence
  Description of Artificial Sequence: Synthetic oligonucleotide
aggcaucaauacuuuucau

SEQ ID NO: 1767768 - RNA, 19 nt, Artificial Sequence
  Description of Artificial Sequence: Synthetic oligonucleotide
cagaggagugacuaagggu

SEQ ID NO: 1767769 - RNA, 19 nt, Artificial Sequence
  Description of Artificial Sequence: Synthetic oligonucleotide
ccauggguguugcaaagug

SEQ ID NO: 1767770 - RNA, 19 nt, Artificial Sequence
  Description of Artificial Sequence: Synthetic oligonucleotide
ccaagggcugauacuuucc

SEQ ID NO: 1767771 - RNA, 19 nt, Artificial Sequence
  Description of Artificial Sequence: Synthetic oligonucleotide
cacuaccaccugauccaag

SEQ ID NO: 1767772 - RNA, 19 nt, Artificial Sequence
  Description of Artificial Sequence: Synthetic oligonucleotide
gcagaugacuguacccggg

SEQ ID NO: 1767773 - RNA, 19 nt, Artificial Sequence
  Description of Artificial Sequence: Synthetic oligonucleotide
guccccgcggucucggccc

SEQ ID NO: 1767774 - RNA, 19 nt, Artificial Sequence
  Description of Artificial Sequence: Synthetic oligonucleotide
ggguguugcaaaguggaga

SEQ ID NO: 1767775 - RNA, 19 nt, Artificial Sequence
  Description of Artificial Sequence: Synthetic oligonucleotide
ccaucgaguuacuggcagg

SEQ ID NO: 1767776 - RNA, 19 nt, Artificial Sequence
  Description of Artificial Sequence: Synthetic oligonucleotide
ggagugacuaagggucagg

SEQ ID NO: 1767777 - RNA, 19 nt, Artificial Sequence
  Description of Artificial Sequence: Synthetic oligonucleotide
gagaucagaccaugggcau

SEQ ID NO: 1767778 - RNA, 19 nt, Artificial Sequence
  Description of Artificial Sequence: Synthetic oligonucleotide
gacuaagggucaggauggc

SEQ ID NO: 1767779 - RNA, 19 nt, Artificial Sequence
  Description of Artificial Sequence: Synthetic oligonucleotide
ggcaucaauacuuuucauu

SEQ ID NO: 1767780 - RNA, 19 nt, Artificial Sequence
  Description of Artificial Sequence: Synthetic oligonucleotide
gcuccguccccugagcgcg

SEQ ID NO: 1767781 - RNA, 19 nt, Artificial Sequence
  Description of Artificial Sequence: Synthetic oligonucleotide
cccaucgaguuacuggcag

SEQ ID NO: 1767782 - RNA, 19 nt, Artificial Sequence
  Description of Artificial Sequence: Synthetic oligonucleotide
agccaaguccccgcggucu

SEQ ID NO: 1767783 - RNA, 19 nt, Artificial Sequence
  Description of Artificial Sequence: Synthetic oligonucleotide
gggcauagcgaacguaauc

SEQ ID NO: 1767784 - RNA, 19 nt, Artificial Sequence
  Description of Artificial Sequence: Synthetic oligonucleotide
caugcacgagggagcggag

SEQ ID NO: 1767785 - RNA, 19 nt, Artificial Sequence
  Description of Artificial Sequence: Synthetic oligonucleotide
cacaugccgaagugacuuc

SEQ ID NO: 1767786 - RNA, 19 nt, Artificial Sequence
  Description of Artificial Sequence: Synthetic oligonucleotide
ucucagcaacaagacgcaa

SEQ ID NO: 1767787 - RNA, 19 nt, Artificial Sequence
  Description of Artificial Sequence: Synthetic oligonucleotide
ggaaacaggucguccacua

SEQ ID NO: 1767788 - RNA, 19 nt, Artificial Sequence
  Description of Artificial Sequence: Synthetic oligonucleotide
uagcgaacguaauccucuu

SEQ ID NO: 1767789 - RNA, 19 nt, Artificial Sequence
  Description of Artificial Sequence: Synthetic oligonucleotide
gaguuacuggcaggaucug

SEQ ID NO: 1767790 - RNA, 19 nt, Artificial Sequence
  Description of Artificial Sequence: Synthetic oligonucleotide
guaaauggcuccguccccu

SEQ ID NO: 1767791 - RNA, 19 nt, Artificial Sequence
  Description of Artificial Sequence: Synthetic oligonucleotide
gguaacucacacaaucacu

SEQ ID NO: 1767792 - RNA, 19 nt, Artificial Sequence
  Description of Artificial Sequence: Synthetic oligonucleotide
ggagcggagacuagcuggc

SEQ ID NO: 1767793 - RNA, 19 nt, Artificial Sequence
  Description of Artificial Sequence: Synthetic oligonucleotide
uuaauucuuuagggaugua

SEQ ID NO: 1767794 - RNA, 19 nt, Artificial Sequence
  Description of Artificial Sequence: Synthetic oligonucleotide
caaguccccgcggucucgg

SEQ ID NO: 1767795 - RNA, 19 nt, Artificial Sequence
  Description of Artificial Sequence: Synthetic oligonucleotide
ggauguaaucagagaucag

SEQ ID NO: 1767796 - RNA, 19 nt, Artificial Sequence
  Description of Artificial Sequence: Synthetic oligonucleotide
cuguacccgggcuccaaca

SEQ ID NO: 1767797 - RNA, 19 nt, Artificial Sequence
  Description of Artificial Sequence: Synthetic oligonucleotide
guguuaaacuuaguguaau

SEQ ID NO: 1767798 - RNA, 19 nt, Artificial Sequence
  Description of Artificial Sequence: Synthetic oligonucleotide
gcuauacuuguaguacuuc

SEQ ID NO: 1767799 - RNA, 19 nt, Artificial Sequence
  Description of Artificial Sequence: Synthetic oligonucleotide
gaccaugggcauagcgaac

SEQ ID NO: 1767800 - RNA, 19 nt, Artificial Sequence
  Description of Artificial Sequence: Synthetic oligonucleotide
cgguaacucacacaaucac

SEQ ID NO: 1767801 - RNA, 19 nt, Artificial Sequence
  Description of Artificial Sequence: Synthetic oligonucleotide
ggucuucucugugcuauac

SEQ ID NO: 1767802 - RNA, 19 nt, Artificial Sequence
  Description of Artificial Sequence: Synthetic oligonucleotide
cccugauugaacugauuga

SEQ ID NO: 1767803 - RNA, 19 nt, Artificial Sequence
  Description of Artificial Sequence: Synthetic oligonucleotide
caggaucugaaaaccacuu

SEQ ID NO: 1767804 - RNA, 19 nt, Artificial Sequence
  Description of Artificial Sequence: Synthetic oligonucleotide
auggaggguuuggaauuga

SEQ ID NO: 1767805 - RNA, 19 nt, Artificial Sequence
  Description of Artificial Sequence: Synthetic oligonucleotide
agaucagaccaugggcaua

SEQ ID NO: 1767806 - RNA, 19 nt, Artificial Sequence
  Description of Artificial Sequence: Synthetic oligonucleotide
agcaagcggugacucugaa

SEQ ID NO: 1767807 - RNA, 19 nt, Artificial Sequence
  Description of Artificial Sequence: Synthetic oligonucleotide
gaaaaccacuucuccuguu

SEQ ID NO: 1767808 - RNA, 19 nt, Artificial Sequence
  Description of Artificial Sequence: Synthetic oligonucleotide
gagcggagacuagcuggcc

SEQ ID NO: 1767809 - RNA, 19 nt, Artificial Sequence
  Description of Artificial Sequence: Synthetic oligonucleotide
gaggcaucuuuuaaauauu

SEQ ID NO: 1767810 - RNA, 19 nt, Artificial Sequence
  Description of Artificial Sequence: Synthetic oligonucleotide
cucugaaacucuguccacu

SEQ ID NO: 1767811 - RNA, 19 nt, Artificial Sequence
  Description of Artificial Sequence: Synthetic oligonucleotide
guacuucuugcuguuuacu

SEQ ID NO: 1767812 - RNA, 19 nt, Artificial Sequence
  Description of Artificial Sequence: Synthetic oligonucleotide
ggcuccguccccugagcgc

SEQ ID NO: 1767813 - RNA, 19 nt, Artificial Sequence
  Description of Artificial Sequence: Synthetic oligonucleotide
uccguccccugagcgcggg

SEQ ID NO: 1767814 - RNA, 19 nt, Artificial Sequence
  Description of Artificial Sequence: Synthetic oligonucleotide
aucgaguuacuggcaggau

SEQ ID NO: 1767815 - RNA, 19 nt, Artificial Sequence
  Description of Artificial Sequence: Synthetic oligonucleotide
augcacgagggagcggaga

SEQ ID NO: 1767816 - RNA, 19 nt, Artificial Sequence
  Description of Artificial Sequence: Synthetic oligonucleotide
ggccaucacucaaagcuuc

SEQ ID NO: 1767817 - RNA, 19 nt, Artificial Sequence
  Description of Artificial Sequence: Synthetic oligonucleotide
ccgggcuccaacauugaca

SEQ ID NO: 1767818 - RNA, 19 nt, Artificial Sequence
  Description of Artificial Sequence: Synthetic oligonucleotide
gucaaaccccaucgaguua

SEQ ID NO: 1767819 - RNA, 19 nt, Artificial Sequence
  Description of Artificial Sequence: Synthetic oligonucleotide
cacgagggagcggagacua

SEQ ID NO: 1767820 - RNA, 19 nt, Artificial Sequence
  Description of Artificial Sequence: Synthetic oligonucleotide
aggccccagucgguaacuc

SEQ ID NO: 1767821 - RNA, 19 nt, Artificial Sequence
  Description of Artificial Sequence: Synthetic oligonucleotide
gagggagcggagacuagcu

SEQ ID NO: 1767822 - RNA, 19 nt, Artificial Sequence
  Description of Artificial Sequence: Synthetic oligonucleotide
gguagugaaggagcagaaa

SEQ ID NO: 1767823 - RNA, 19 nt, Artificial Sequence
  Description of Artificial Sequence: Synthetic oligonucleotide
ggagacuagcuggccauca

SEQ ID NO: 1767824 - RNA, 19 nt, Artificial Sequence
  Description of Artificial Sequence: Synthetic oligonucleotide
cgaguuacuggcaggaucu

SEQ ID NO: 1767825 - RNA, 19 nt, Artificial Sequence
  Description of Artificial Sequence: Synthetic oligonucleotide
ggcaaacauuccagaggcc

SEQ ID NO: 1767826 - RNA, 19 nt, Artificial Sequence
  Description of Artificial Sequence: Synthetic oligonucleotide
aguugccggggagccaagu

SEQ ID NO: 1767827 - RNA, 19 nt, Artificial Sequence
  Description of Artificial Sequence: Synthetic oligonucleotide
gccccagucgguaacucac

SEQ ID NO: 1767828 - RNA, 19 nt, Artificial Sequence
  Description of Artificial Sequence: Synthetic oligonucleotide
gcauagcgaacguaauccu

SEQ ID NO: 1767829 - RNA, 19 nt, Artificial Sequence
  Description of Artificial Sequence: Synthetic oligonucleotide
cuccguccccugagcgcgg

SEQ ID NO: 1767830 - RNA, 19 nt, Artificial Sequence
  Description of Artificial Sequence: Synthetic oligonucleotide
agucgguaacucacacaau

SEQ ID NO: 1767831 - RNA, 19 nt, Artificial Sequence
  Description of Artificial Sequence: Synthetic oligonucleotide
ccugauugaacugauugau

SEQ ID NO: 1767832 - RNA, 19 nt, Artificial Sequence
  Description of Artificial Sequence: Synthetic oligonucleotide
cgcaaucuggaaacagguc

SEQ ID NO: 1767833 - RNA, 19 nt, Artificial Sequence
  Description of Artificial Sequence: Synthetic oligonucleotide
ccaugcacgagggagcgga

SEQ ID NO: 1767834 - RNA, 19 nt, Artificial Sequence
  Description of Artificial Sequence: Synthetic oligonucleotide
ggagccaaguccccgcggu

SEQ ID NO: 1767835 - RNA, 19 nt, Artificial Sequence
  Description of Artificial Sequence: Synthetic oligonucleotide
gaguugccggggagccaag

SEQ ID NO: 1767836 - RNA, 19 nt, Artificial Sequence
  Description of Artificial Sequence: Synthetic oligonucleotide
gcaagcggugacucugaaa

SEQ ID NO: 1767837 - RNA, 19 nt, Artificial Sequence
  Description of Artificial Sequence: Synthetic oligonucleotide
ccagucgguaacucacaca

SEQ ID NO: 1767838 - RNA, 19 nt, Artificial Sequence
  Description of Artificial Sequence: Synthetic oligonucleotide
caugggcauagcgaacgua

SEQ ID NO: 1767839 - RNA, 19 nt, Artificial Sequence
  Description of Artificial Sequence: Synthetic oligonucleotide
acgagggagcggagacuag

SEQ ID NO: 1767840 - RNA, 19 nt, Artificial Sequence
  Description of Artificial Sequence: Synthetic oligonucleotide
auccaagggcugauacuuu

SEQ ID NO: 1767841 - RNA, 19 nt, Artificial Sequence
  Description of Artificial Sequence: Synthetic oligonucleotide
cgagggagcggagacuagc

SEQ ID NO: 1767842 - RNA, 19 nt, Artificial Sequence
  Description of Artificial Sequence: Synthetic oligonucleotide
gcggucucggcccgcggcc

SEQ ID NO: 1767843 - RNA, 19 nt, Artificial Sequence
  Description of Artificial Sequence: Synthetic oligonucleotide
ggccccagucgguaacuca

SEQ ID NO: 1767844 - RNA, 19 nt, Artificial Sequence
  Description of Artificial Sequence: Synthetic oligonucleotide
cugagcaagcggugacucu

SEQ ID NO: 1767845 - RNA, 19 nt, Artificial Sequence
  Description of Artificial Sequence: Synthetic oligonucleotide
gucacaugccgaagugacu

SEQ ID NO: 1767846 - RNA, 19 nt, Artificial Sequence
  Description of Artificial Sequence: Synthetic oligonucleotide
acgaguugccggggagcca

SEQ ID NO: 1767847 - RNA, 19 nt, Artificial Sequence
  Description of Artificial Sequence: Synthetic oligonucleotide
ggugacucugaaacucugu

SEQ ID NO: 1767848 - RNA, 19 nt, Artificial Sequence
  Description of Artificial Sequence: Synthetic oligonucleotide
ggucguccacuaccaccug

SEQ ID NO: 1767849 - RNA, 19 nt, Artificial Sequence
  Description of Artificial Sequence: Synthetic oligonucleotide
gcggguuggccaguuuuac

SEQ ID NO: 1767850 - RNA, 19 nt, Artificial Sequence
  Description of Artificial Sequence: Synthetic oligonucleotide
ggaauugaagauggagguu

SEQ ID NO: 1767851 - RNA, 19 nt, Artificial Sequence
  Description of Artificial Sequence: Synthetic oligonucleotide
cggugacucugaaacucug

SEQ ID NO: 1767852 - RNA, 19 nt, Artificial Sequence
  Description of Artificial Sequence: Synthetic oligonucleotide
ccagccuuuaugagguagu

SEQ ID NO: 1767853 - RNA, 19 nt, Artificial Sequence
  Description of Artificial Sequence: Synthetic oligonucleotide
ccaaguccccgcggucucg

SEQ ID NO: 1767854 - RNA, 19 nt, Artificial Sequence
  Description of Artificial Sequence: Synthetic oligonucleotide
gaggccccagucgguaacu

SEQ ID NO: 1767855 - RNA, 19 nt, Artificial Sequence
  Description of Artificial Sequence: Synthetic oligonucleotide
guacccgggcuccaacauu

SEQ ID NO: 1767856 - RNA, 19 nt, Artificial Sequence
  Description of Artificial Sequence: Synthetic oligonucleotide
cggggagccaaguccccgc

SEQ ID NO: 1767857 - RNA, 19 nt, Artificial Sequence
  Description of Artificial Sequence: Synthetic oligonucleotide
cagggucuucucugugcua

SEQ ID NO: 1767858 - RNA, 19 nt, Artificial Sequence
  Description of Artificial Sequence: Synthetic oligonucleotide
ccggggagccaaguccccg

SEQ ID NO: 1767859 - RNA, 19 nt, Artificial Sequence
  Description of Artificial Sequence: Synthetic oligonucleotide
gcggagacuagcuggccau

SEQ ID NO: 1767860 - RNA, 19 nt, Artificial Sequence
  Description of Artificial Sequence: Synthetic oligonucleotide
agcgcggguuggccaguuu

SEQ ID NO: 1767861 - RNA, 19 nt, Artificial Sequence
  Description of Artificial Sequence: Synthetic oligonucleotide
gucucggcccgcggccaug

SEQ ID NO: 1767862 - RNA, 19 nt, Artificial Sequence
  Description of Artificial Sequence: Synthetic oligonucleotide
gccaugcacgagggagcgg

SEQ ID NO: 1767863 - RNA, 19 nt, Artificial Sequence
  Description of Artificial Sequence: Synthetic oligonucleotide
cagaggauccauggguguu

SEQ ID NO: 1767864 - RNA, 19 nt, Artificial Sequence
  Description of Artificial Sequence: Synthetic oligonucleotide
acccgggcuccaacauuga

SEQ ID NO: 1767865 - RNA, 19 nt, Artificial Sequence
  Description of Artificial Sequence: Synthetic oligonucleotide
cugcagucauuuugcuauu

SEQ ID NO: 1767866 - RNA, 19 nt, Artificial Sequence
  Description of Artificial Sequence: Synthetic oligonucleotide
ccccagucgguaacucaca

SEQ ID NO: 1767867 - RNA, 19 nt, Artificial Sequence
  Description of Artificial Sequence: Synthetic oligonucleotide
gggucuucucugugcuaua

SEQ ID NO: 1767868 - RNA, 19 nt, Artificial Sequence
  Description of Artificial Sequence: Synthetic oligonucleotide
cgcggucucggcccgcggc

SEQ ID NO: 1767869 - RNA, 19 nt, Artificial Sequence
  Description of Artificial Sequence: Synthetic oligonucleotide
ccccaucgaguuacuggca

SEQ ID NO: 1767870 - RNA, 19 nt, Artificial Sequence
  Description of Artificial Sequence: Synthetic oligonucleotide
cgaguugccggggagccaa

SEQ ID NO: 1767871 - RNA, 19 nt, Artificial Sequence
  Description of Artificial Sequence: Synthetic oligonucleotide
gcgcggguuggccaguuuu

SEQ ID NO: 1767872 - RNA, 19 nt, Artificial Sequence
  Description of Artificial Sequence: Synthetic oligonucleotide
ccaucacucaaagcuuccu

SEQ ID NO: 1767873 - RNA, 19 nt, Artificial Sequence
  Description of Artificial Sequence: Synthetic oligonucleotide
cccgcggucucggcccgcg

SEQ ID NO: 1767874 - RNA, 19 nt, Artificial Sequence
  Description of Artificial Sequence: Synthetic oligonucleotide
cccucuuugccagccuuua

SEQ ID NO: 1767875 - RNA, 19 nt, Artificial Sequence
  Description of Artificial Sequence: Synthetic oligonucleotide
ccacuaccaccugauccaa

SEQ ID NO: 1767876 - RNA, 19 nt, Artificial Sequence
  Description of Artificial Sequence: Synthetic oligonucleotide
cgcggguuggccaguuuua

SEQ ID NO: 1767877 - RNA, 19 nt, Artificial Sequence
  Description of Artificial Sequence: Synthetic oligonucleotide
gcacgagggagcggagacu

SEQ ID NO: 1767878 - RNA, 19 nt, Artificial Sequence
  Description of Artificial Sequence: Synthetic oligonucleotide
ccaugggcauagcgaacgu

SEQ ID NO: 1767879 - RNA, 19 nt, Artificial Sequence
  Description of Artificial Sequence: Synthetic oligonucleotide
cggagacuagcuggccauc

SEQ ID NO: 1767880 - RNA, 19 nt, Artificial Sequence
  Description of Artificial Sequence: Synthetic oligonucleotide
ccacaguuuggcugaccuu

SEQ ID NO: 1767881 - RNA, 19 nt, Artificial Sequence
  Description of Artificial Sequence: Synthetic oligonucleotide
ccgcggucucggcccgcgg

SEQ ID NO: 1767882 - RNA, 19 nt, Artificial Sequence
  Description of Artificial Sequence: Synthetic oligonucleotide
ccucuuugccagccuuuau

SEQ ID NO: 1767883 - RNA, 19 nt, Artificial Sequence
  Description of Artificial Sequence: Synthetic oligonucleotide
cggucucggcccgcggcca

SEQ ID NO: 1767884 - RNA, 19 nt, Artificial Sequence
  Description of Artificial Sequence: Synthetic oligonucleotide
ccccgcggucucggcccgc

SEQ ID NO: 1767885 - RNA, 19 nt, Artificial Sequence
  Description of Artificial Sequence: Synthetic oligonucleotide
cguccccugagcgcggguu

SEQ ID NO: 1767886 - RNA, 19 nt, Artificial Sequence
  Description of Artificial Sequence: Synthetic oligonucleotide
ccguccccugagcgcgggu

SEQ ID NO: 1767887 - RNA, 19 nt, Artificial Sequence
  Description of Artificial Sequence: Synthetic oligonucleotide
aauacuaucugcuucauuc

SEQ ID NO: 1767888 - RNA, 19 nt, Artificial Sequence
  Description of Artificial Sequence: Synthetic oligonucleotide
aaaaugacaaccuuucaac

SEQ ID NO: 1767889 - RNA, 19 nt, Artificial Sequence
  Description of Artificial Sequence: Synthetic oligonucleotide
uguaguauauuuaugaagu

SEQ ID NO: 1767890 - RNA, 19 nt, Artificial Sequence
  Description of Artificial Sequence: Synthetic oligonucleotide
uuuacuuagacccaucacc

SEQ ID NO: 1767891 - RNA, 19 nt, Artificial Sequence
  Description of Artificial Sequence: Synthetic oligonucleotide
gacagguuuacuuagaccc

SEQ ID NO: 1767892 - RNA, 19 nt, Artificial Sequence
  Description of Artificial Sequence: Synthetic oligonucleotide
aaaucuguaccauagguga

SEQ ID NO: 1767893 - RNA, 19 nt, Artificial Sequence
  Description of Artificial Sequence: Synthetic oligonucleotide
auaaacaccacuuucugag

SEQ ID NO: 1767894 - RNA, 19 nt, Artificial Sequence
  Description of Artificial Sequence: Synthetic oligonucleotide
aauuucaggacacagugca

SEQ ID NO: 1767895 - RNA, 19 nt, Artificial Sequence
  Description of Artificial Sequence: Synthetic oligonucleotide
aguaguacuaauuucagga

SEQ ID NO: 1767896 - RNA, 19 nt, Artificial Sequence
  Description of Artificial Sequence: Synthetic oligonucleotide
ucaugaaucgcauauaaac

SEQ ID NO: 1767897 - RNA, 19 nt, Artificial Sequence
  Description of Artificial Sequence: Synthetic oligonucleotide
auugaaaucccucggacgg

SEQ ID NO: 1767898 - RNA, 19 nt, Artificial Sequence
  Description of Artificial Sequence: Synthetic oligonucleotide
augaaucgcauauaaacac

SEQ ID NO: 1767899 - RNA, 19 nt, Artificial Sequence
  Description of Artificial Sequence: Synthetic oligonucleotide
auaucuacaacuuuuccug

SEQ ID NO: 1767900 - RNA, 19 nt, Artificial Sequence
  Description of Artificial Sequence: Synthetic oligonucleotide
uucucuagcagcaagauua

SEQ ID NO: 1767901 - RNA, 19 nt, Artificial Sequence
  Description of Artificial Sequence: Synthetic oligonucleotide
aaaaguaguacuaauuuca

SEQ ID NO: 1767902 - RNA, 19 nt, Artificial Sequence
  Description of Artificial Sequence: Synthetic oligonucleotide
ugcauguuuggacauaagg

SEQ ID NO: 1767903 - RNA, 19 nt, Artificial Sequence
  Description of Artificial Sequence: Synthetic oligonucleotide
aacaaauugagugaaagaa

SEQ ID NO: 1767904 - RNA, 19 nt, Artificial Sequence
  Description of Artificial Sequence: Synthetic oligonucleotide
auacguuuucucuagcagc

SEQ ID NO: 1767905 - RNA, 19 nt, Artificial Sequence
  Description of Artificial Sequence: Synthetic oligonucleotide
uaaaaugacaaccuuucaa

SEQ ID NO: 1767906 - RNA, 19 nt, Artificial Sequence
  Description of Artificial Sequence: Synthetic oligonucleotide
uuuaaguucuccugugagg

SEQ ID NO: 1767907 - RNA, 19 nt, Artificial Sequence
  Description of Artificial Sequence: Synthetic oligonucleotide
uagauuaaaaugacaaccu

SEQ ID NO: 1767908 - RNA, 19 nt, Artificial Sequence
  Description of Artificial Sequence: Synthetic oligonucleotide
uaaaucuguaccauaggug

SEQ ID NO: 1767909 - RNA, 19 nt, Artificial Sequence
  Description of Artificial Sequence: Synthetic oligonucleotide
uauacguuuucucuagcag

SEQ ID NO: 1767910 - RNA, 19 nt, Artificial Sequence
  Description of Artificial Sequence: Synthetic oligonucleotide
gcuacuaaggcaaagaagg

SEQ ID NO: 1767911 - RNA, 19 nt, Artificial Sequence
  Description of Artificial Sequence: Synthetic oligonucleotide
uauuauacguuuucucuag

SEQ ID NO: 1767912 - RNA, 19 nt, Artificial Sequence
  Description of Artificial Sequence: Synthetic oligonucleotide
uuuagacagguuuacuuag

SEQ ID NO: 1767913 - RNA, 19 nt, Artificial Sequence
  Description of Artificial Sequence: Synthetic oligonucleotide
ugaggacagucuuugaacg

SEQ ID NO: 1767914 - RNA, 19 nt, Artificial Sequence
  Description of Artificial Sequence: Synthetic oligonucleotide
aaguaguacuaauuucagg

SEQ ID NO: 1767915 - RNA, 19 nt, Artificial Sequence
  Description of Artificial Sequence: Synthetic oligonucleotide
aaacaccacuuucugaguc

SEQ ID NO: 1767916 - RNA, 19 nt, Artificial Sequence
  Description of Artificial Sequence: Synthetic oligonucleotide
auaggugacuuauaguauc

SEQ ID NO: 1767917 - RNA, 19 nt, Artificial Sequence
  Description of Artificial Sequence: Synthetic oligonucleotide
ugacauauugcauguuugg

SEQ ID NO: 1767918 - RNA, 19 nt, Artificial Sequence
  Description of Artificial Sequence: Synthetic oligonucleotide
uugaacgcaagccugaauc

SEQ ID NO: 1767919 - RNA, 19 nt, Artificial Sequence
  Description of Artificial Sequence: Synthetic oligonucleotide
uucucaguugccuagauua

SEQ ID NO: 1767920 - RNA, 19 nt, Artificial Sequence
  Description of Artificial Sequence: Synthetic oligonucleotide
aaugacaaccuuucaacaa

SEQ ID NO: 1767921 - RNA, 19 nt, Artificial Sequence
  Description of Artificial Sequence: Synthetic oligonucleotide
aaaauacugugagcggugc

SEQ ID NO: 1767922 - RNA, 19 nt, Artificial Sequence
  Description of Artificial Sequence: Synthetic oligonucleotide
auauuuaugaagucuguaa

SEQ ID NO: 1767923 - RNA, 19 nt, Artificial Sequence
  Description of Artificial Sequence: Synthetic oligonucleotide
ugaaucgcauauaaacacc

SEQ ID NO: 1767924 - RNA, 19 nt, Artificial Sequence
  Description of Artificial Sequence: Synthetic oligonucleotide
ugacagggagauaauaccc

SEQ ID NO: 1767925 - RNA, 19 nt, Artificial Sequence
  Description of Artificial Sequence: Synthetic oligonucleotide
aguacuaauuucaggacac

SEQ ID NO: 1767926 - RNA, 19 nt, Artificial Sequence
  Description of Artificial Sequence: Synthetic oligonucleotide
aguauauuuaugaagucug

SEQ ID NO: 1767927 - RNA, 19 nt, Artificial Sequence
  Description of Artificial Sequence: Synthetic oligonucleotide
cauucacucacuuucaguc

SEQ ID NO: 1767928 - RNA, 19 nt, Artificial Sequence
  Description of Artificial Sequence: Synthetic oligonucleotide
aaccuuucaacaaauugag

SEQ ID NO: 1767929 - RNA, 19 nt, Artificial Sequence
  Description of Artificial Sequence: Synthetic oligonucleotide
uuggacauaaggcaccgug

SEQ ID NO: 1767930 - RNA, 19 nt, Artificial Sequence
  Description of Artificial Sequence: Synthetic oligonucleotide
agacagguuuacuuagacc

SEQ ID NO: 1767931 - RNA, 19 nt, Artificial Sequence
  Description of Artificial Sequence: Synthetic oligonucleotide
ucuacgguggucauucagc

SEQ ID NO: 1767932 - RNA, 19 nt, Artificial Sequence
  Description of Artificial Sequence: Synthetic oligonucleotide
aguugccuagauuaaaaug

SEQ ID NO: 1767933 - RNA, 19 nt, Artificial Sequence
  Description of Artificial Sequence: Synthetic oligonucleotide
aauguagugucgaagacaa

SEQ ID NO: 1767934 - RNA, 19 nt, Artificial Sequence
  Description of Artificial Sequence: Synthetic oligonucleotide
uagauuauuauacguuuuc

SEQ ID NO: 1767935 - RNA, 19 nt, Artificial Sequence
  Description of Artificial Sequence: Synthetic oligonucleotide
ucuguaaucgugagcauuc

SEQ ID NO: 1767936 - RNA, 19 nt, Artificial Sequence
  Description of Artificial Sequence: Synthetic oligonucleotide
uacguuuucucuagcagca

SEQ ID NO: 1767937 - RNA, 19 nt, Artificial Sequence
  Description of Artificial Sequence: Synthetic oligonucleotide
cauugaaaucccucggacg

SEQ ID NO: 1767938 - RNA, 19 nt, Artificial Sequence
  Description of Artificial Sequence: Synthetic oligonucleotide
uaacuugcaauguaguguc

SEQ ID NO: 1767939 - RNA, 19 nt, Artificial Sequence
  Description of Artificial Sequence: Synthetic oligonucleotide
guugccuagauuaaaauga

SEQ ID NO: 1767940 - RNA, 19 nt, Artificial Sequence
  Description of Artificial Sequence: Synthetic oligonucleotide
aauacccacaauacuaucu

SEQ ID NO: 1767941 - RNA, 19 nt, Artificial Sequence
  Description of Artificial Sequence: Synthetic oligonucleotide
aguacaacucccuccaugu

SEQ ID NO: 1767942 - RNA, 19 nt, Artificial Sequence
  Description of Artificial Sequence: Synthetic oligonucleotide
ugucuagauuauuauacgu

SEQ ID NO: 1767943 - RNA, 19 nt, Artificial Sequence
  Description of Artificial Sequence: Synthetic oligonucleotide
aaguacaacucccuccaug

SEQ ID NO: 1767944 - RNA, 19 nt, Artificial Sequence
  Description of Artificial Sequence: Synthetic oligonucleotide
acaacaagcuuugaacugg

SEQ ID NO: 1767945 - RNA, 19 nt, Artificial Sequence
  Description of Artificial Sequence: Synthetic oligonucleotide
acgguggucauucagccuc

SEQ ID NO: 1767946 - RNA, 19 nt, Artificial Sequence
  Description of Artificial Sequence: Synthetic oligonucleotide
uuauacguuuucucuagca

SEQ ID NO: 1767947 - RNA, 19 nt, Artificial Sequence
  Description of Artificial Sequence: Synthetic oligonucleotide
uccgcuuguaaguacaacu

SEQ ID NO: 1767948 - RNA, 19 nt, Artificial Sequence
  Description of Artificial Sequence: Synthetic oligonucleotide
uguguaguauauuuaugaa

SEQ ID NO: 1767949 - RNA, 19 nt, Artificial Sequence
  Description of Artificial Sequence: Synthetic oligonucleotide
uggaacgaugucauaacac

SEQ ID NO: 1767950 - RNA, 19 nt, Artificial Sequence
  Description of Artificial Sequence: Synthetic oligonucleotide
cuguguaguauauuuauga

SEQ ID NO: 1767951 - RNA, 19 nt, Artificial Sequence
  Description of Artificial Sequence: Synthetic oligonucleotide
cuuucaacaaauugaguga

SEQ ID NO: 1767952 - RNA, 19 nt, Artificial Sequence
  Description of Artificial Sequence: Synthetic oligonucleotide
aacgaugucauaacacuug

SEQ ID NO: 1767953 - RNA, 19 nt, Artificial Sequence
  Description of Artificial Sequence: Synthetic oligonucleotide
acccucaaaauacugugag

SEQ ID NO: 1767954 - RNA, 19 nt, Artificial Sequence
  Description of Artificial Sequence: Synthetic oligonucleotide
auacccacaauacuaucug

SEQ ID NO: 1767955 - RNA, 19 nt, Artificial Sequence
  Description of Artificial Sequence: Synthetic oligonucleotide
uaauuucaggacacagugc

SEQ ID NO: 1767956 - RNA, 19 nt, Artificial Sequence
  Description of Artificial Sequence: Synthetic oligonucleotide
gugaaagaaagagacuggg

SEQ ID NO: 1767957 - RNA, 19 nt, Artificial Sequence
  Description of Artificial Sequence: Synthetic oligonucleotide
ucuacaacuuuuccugacu

SEQ ID NO: 1767958 - RNA, 19 nt, Artificial Sequence
  Description of Artificial Sequence: Synthetic oligonucleotide
caugaaucgcauauaaaca

SEQ ID NO: 1767959 - RNA, 19 nt, Artificial Sequence
  Description of Artificial Sequence: Synthetic oligonucleotide
cucaaaauacugugagcgg

SEQ ID NO: 1767960 - RNA, 19 nt, Artificial Sequence
  Description of Artificial Sequence: Synthetic oligonucleotide
ucgcauauaaacaccacuu

SEQ ID NO: 1767961 - RNA, 19 nt, Artificial Sequence
  Description of Artificial Sequence: Synthetic oligonucleotide
augucauaacacuugugug

SEQ ID NO: 1767962 - RNA, 19 nt, Artificial Sequence
  Description of Artificial Sequence: Synthetic oligonucleotide
gcugauauccgcuuguaag

SEQ ID NO: 1767963 - RNA, 19 nt, Artificial Sequence
  Description of Artificial Sequence: Synthetic oligonucleotide
uguaccauaggugacuuau

SEQ ID NO: 1767964 - RNA, 19 nt, Artificial Sequence
  Description of Artificial Sequence: Synthetic oligonucleotide
agucuuugaacgcaagccu

SEQ ID NO: 1767965 - RNA, 19 nt, Artificial Sequence
  Description of Artificial Sequence: Synthetic oligonucleotide
ccucaaaauacugugagcg

SEQ ID NO: 1767966 - RNA, 19 nt, Artificial Sequence
  Description of Artificial Sequence: Synthetic oligonucleotide
uaaucgugagcauuccuac

SEQ ID NO: 1767967 - RNA, 19 nt, Artificial Sequence
  Description of Artificial Sequence: Synthetic oligonucleotide
ucacauucggggcugggug

SEQ ID NO: 1767968 - RNA, 19 nt, Artificial Sequence
  Description of Artificial Sequence: Synthetic oligonucleotide
guaaguacaacucccucca

SEQ ID NO: 1767969 - RNA, 19 nt, Artificial Sequence
  Description of Artificial Sequence: Synthetic oligonucleotide
uccuacaaagcucuguuuu

SEQ ID NO: 1767970 - RNA, 19 nt, Artificial Sequence
  Description of Artificial Sequence: Synthetic oligonucleotide
cauggugaguaggagaugc

SEQ ID NO: 1767971 - RNA, 19 nt, Artificial Sequence
  Description of Artificial Sequence: Synthetic oligonucleotide
ucuuugaacgcaagccuga

SEQ ID NO: 1767972 - RNA, 19 nt, Artificial Sequence
  Description of Artificial Sequence: Synthetic oligonucleotide
aacugguuggaacgauguc

SEQ ID NO: 1767973 - RNA, 19 nt, Artificial Sequence
  Description of Artificial Sequence: Synthetic oligonucleotide
uagacagguuuacuuagac

SEQ ID NO: 1767974 - RNA, 19 nt, Artificial Sequence
  Description of Artificial Sequence: Synthetic oligonucleotide
aaucgcauauaaacaccac

SEQ ID NO: 1767975 - RNA, 19 nt, Artificial Sequence
  Description of Artificial Sequence: Synthetic oligonucleotide
uuggaacgaugucauaaca

SEQ ID NO: 1767976 - RNA, 19 nt, Artificial Sequence
  Description of Artificial Sequence: Synthetic oligonucleotide
cagucuuugaacgcaagcc

SEQ ID NO: 1767977 - RNA, 19 nt, Artificial Sequence
  Description of Artificial Sequence: Synthetic oligonucleotide
aaaaugugaccccgagacu

SEQ ID NO: 1767978 - RNA, 19 nt, Artificial Sequence
  Description of Artificial Sequence: Synthetic oligonucleotide
gacuccguuggcuacuaag

SEQ ID NO: 1767979 - RNA, 19 nt, Artificial Sequence
  Description of Artificial Sequence: Synthetic oligonucleotide
uacagcauugaaaucccuc

SEQ ID NO: 1767980 - RNA, 19 nt, Artificial Sequence
  Description of Artificial Sequence: Synthetic oligonucleotide
agcgccgcauuucuuaggg

SEQ ID NO: 1767981 - RNA, 19 nt, Artificial Sequence
  Description of Artificial Sequence: Synthetic oligonucleotide
aaucuguaccauaggugac

SEQ ID NO: 1767982 - RNA, 19 nt, Artificial Sequence
  Description of Artificial Sequence: Synthetic oligonucleotide
aucuggacgugccauucac

SEQ ID NO: 1767983 - RNA, 19 nt, Artificial Sequence
  Description of Artificial Sequence: Synthetic oligonucleotide
uugccuagauuaaaaugac

SEQ ID NO: 1767984 - RNA, 19 nt, Artificial Sequence
  Description of Artificial Sequence: Synthetic oligonucleotide
uagugucgaagacaacaag

SEQ ID NO: 1767985 - RNA, 19 nt, Artificial Sequence
  Description of Artificial Sequence: Synthetic oligonucleotide
agcacuuugggccgagcgg

SEQ ID NO: 1767986 - RNA, 19 nt, Artificial Sequence
  Description of Artificial Sequence: Synthetic oligonucleotide
aacgcaagccugaaucuuc

SEQ ID NO: 1767987 - RNA, 19 nt, Artificial Sequence
  Description of Artificial Sequence: Synthetic oligonucleotide
ucggcucucacuauccugu

SEQ ID NO: 1767988 - RNA, 19 nt, Artificial Sequence
  Description of Artificial Sequence: Synthetic oligonucleotide
guaguacuaauuucaggac

SEQ ID NO: 1767989 - RNA, 19 nt, Artificial Sequence
  Description of Artificial Sequence: Synthetic oligonucleotide
augacaaccuuucaacaaa

SEQ ID NO: 1767990 - RNA, 19 nt, Artificial Sequence
  Description of Artificial Sequence: Synthetic oligonucleotide
uggacauaaggcaccguga

SEQ ID NO: 1767991 - RNA, 19 nt, Artificial Sequence
  Description of Artificial Sequence: Synthetic oligonucleotide
agggagauaauacccacaa

SEQ ID NO: 1767992 - RNA, 19 nt, Artificial Sequence
  Description of Artificial Sequence: Synthetic oligonucleotide
cuacuaaggcaaagaaggc

SEQ ID NO: 1767993 - RNA, 19 nt, Artificial Sequence
  Description of Artificial Sequence: Synthetic oligonucleotide
ugaugucuagauuauuaua

SEQ ID NO: 1767994 - RNA, 19 nt, Artificial Sequence
  Description of Artificial Sequence: Synthetic oligonucleotide
uuaugaagucuguaaucgu

SEQ ID NO: 1767995 - RNA, 19 nt, Artificial Sequence
  Description of Artificial Sequence: Synthetic oligonucleotide
acugguuggaacgauguca

SEQ ID NO: 1767996 - RNA, 19 nt, Artificial Sequence
  Description of Artificial Sequence: Synthetic oligonucleotide
auaguaucuguguaguaua

SEQ ID NO: 1767997 - RNA, 19 nt, Artificial Sequence
  Description of Artificial Sequence: Synthetic oligonucleotide
uaggugacuuauaguaucu

SEQ ID NO: 1767998 - RNA, 19 nt, Artificial Sequence
  Description of Artificial Sequence: Synthetic oligonucleotide
gugccauucacucacuuuc

SEQ ID NO: 1767999 - RNA, 19 nt, Artificial Sequence
  Description of Artificial Sequence: Synthetic oligonucleotide
ugaacgcaagccugaaucu

SEQ ID NO: 1768000 - RNA, 19 nt, Artificial Sequence
  Description of Artificial Sequence: Synthetic oligonucleotide
aaucgugagcauuccuaca

SEQ ID NO: 1768001 - RNA, 19 nt, Artificial Sequence
  Description of Artificial Sequence: Synthetic oligonucleotide
uacaacuuuuccugacuca

SEQ ID NO: 1768002 - RNA, 19 nt, Artificial Sequence
  Description of Artificial Sequence: Synthetic oligonucleotide
uacaacucccuccauguuu

SEQ ID NO: 1768003 - RNA, 19 nt, Artificial Sequence
  Description of Artificial Sequence: Synthetic oligonucleotide
uauugcacuucaccacacc

SEQ ID NO: 1768004 - RNA, 19 nt, Artificial Sequence
  Description of Artificial Sequence: Synthetic oligonucleotide
gaaucgcauauaaacacca

SEQ ID NO: 1768005 - RNA, 19 nt, Artificial Sequence
  Description of Artificial Sequence: Synthetic oligonucleotide
auacuaucugcuucauuca

SEQ ID NO: 1768006 - RNA, 19 nt, Artificial Sequence
  Description of Artificial Sequence: Synthetic oligonucleotide
aaauacugugagcggugcu

SEQ ID NO: 1768007 - RNA, 19 nt, Artificial Sequence
  Description of Artificial Sequence: Synthetic oligonucleotide
auacugugagcggugcugc

SEQ ID NO: 1768008 - RNA, 19 nt, Artificial Sequence
  Description of Artificial Sequence: Synthetic oligonucleotide
auuccuacaaagcucuguu

SEQ ID NO: 1768009 - RNA, 19 nt, Artificial Sequence
  Description of Artificial Sequence: Synthetic oligonucleotide
gauauccgcuuguaaguac

SEQ ID NO: 1768010 - RNA, 19 nt, Artificial Sequence
  Description of Artificial Sequence: Synthetic oligonucleotide
agcauugaaaucccucgga

SEQ ID NO: 1768011 - RNA, 19 nt, Artificial Sequence
  Description of Artificial Sequence: Synthetic oligonucleotide
uggaccucggcucucacua

SEQ ID NO: 1768012 - RNA, 19 nt, Artificial Sequence
  Description of Artificial Sequence: Synthetic oligonucleotide
gcauguuuggacauaaggc

SEQ ID NO: 1768013 - RNA, 19 nt, Artificial Sequence
  Description of Artificial Sequence: Synthetic oligonucleotide
acuccguuggcuacuaagg

SEQ ID NO: 1768014 - RNA, 19 nt, Artificial Sequence
  Description of Artificial Sequence: Synthetic oligonucleotide
uaacacuugugugaccuca

SEQ ID NO: 1768015 - RNA, 19 nt, Artificial Sequence
  Description of Artificial Sequence: Synthetic oligonucleotide
aucgugagcauuccuacaa

SEQ ID NO: 1768016 - RNA, 19 nt, Artificial Sequence
  Description of Artificial Sequence: Synthetic oligonucleotide
uaucuacaacuuuuccuga

SEQ ID NO: 1768017 - RNA, 19 nt, Artificial Sequence
  Description of Artificial Sequence: Synthetic oligonucleotide
ugccuagauuaaaaugaca

SEQ ID NO: 1768018 - RNA, 19 nt, Artificial Sequence
  Description of Artificial Sequence: Synthetic oligonucleotide
uggcuacuaaggcaaagaa

SEQ ID NO: 1768019 - RNA, 19 nt, Artificial Sequence
  Description of Artificial Sequence: Synthetic oligonucleotide
uugcaauguagugucgaag

SEQ ID NO: 1768020 - RNA, 19 nt, Artificial Sequence
  Description of Artificial Sequence: Synthetic oligonucleotide
uuugaacugguuggaacga

SEQ ID NO: 1768021 - RNA, 19 nt, Artificial Sequence
  Description of Artificial Sequence: Synthetic oligonucleotide
guaguauauuuaugaaguc

SEQ ID NO: 1768022 - RNA, 19 nt, Artificial Sequence
  Description of Artificial Sequence: Synthetic oligonucleotide
cuuugggccgagcggagcg

SEQ ID NO: 1768023 - RNA, 19 nt, Artificial Sequence
  Description of Artificial Sequence: Synthetic oligonucleotide
aaggcaccgugaucuggac

SEQ ID NO: 1768024 - RNA, 19 nt, Artificial Sequence
  Description of Artificial Sequence: Synthetic oligonucleotide
cucacuuucagucaccugu

SEQ ID NO: 1768025 - RNA, 19 nt, Artificial Sequence
  Description of Artificial Sequence: Synthetic oligonucleotide
aucuacgguggucauucag

SEQ ID NO: 1768026 - RNA, 19 nt, Artificial Sequence
  Description of Artificial Sequence: Synthetic oligonucleotide
gucauaacacuugugugac

SEQ ID NO: 1768027 - RNA, 19 nt, Artificial Sequence
  Description of Artificial Sequence: Synthetic oligonucleotide
cuggacgugccauucacuc

SEQ ID NO: 1768028 - RNA, 19 nt, Artificial Sequence
  Description of Artificial Sequence: Synthetic oligonucleotide
uaguaucuguguaguauau

SEQ ID NO: 1768029 - RNA, 19 nt, Artificial Sequence
  Description of Artificial Sequence: Synthetic oligonucleotide
cucacuauccuguccacga

SEQ ID NO: 1768030 - RNA, 19 nt, Artificial Sequence
  Description of Artificial Sequence: Synthetic oligonucleotide
cagcauugaaaucccucgg

SEQ ID NO: 1768031 - RNA, 19 nt, Artificial Sequence
  Description of Artificial Sequence: Synthetic oligonucleotide
gcauauaaacaccacuuuc

SEQ ID NO: 1768032 - RNA, 19 nt, Artificial Sequence
  Description of Artificial Sequence: Synthetic oligonucleotide
gacauauugcauguuugga

SEQ ID NO: 1768033 - RNA, 19 nt, Artificial Sequence
  Description of Artificial Sequence: Synthetic oligonucleotide
accauaggugacuuauagu

SEQ ID NO: 1768034 - RNA, 19 nt, Artificial Sequence
  Description of Artificial Sequence: Synthetic oligonucleotide
ggcggugacauauugcaug

SEQ ID NO: 1768035 - RNA, 19 nt, Artificial Sequence
  Description of Artificial Sequence: Synthetic oligonucleotide
cagcaugccggcuuccgcg

SEQ ID NO: 1768036 - RNA, 19 nt, Artificial Sequence
  Description of Artificial Sequence: Synthetic oligonucleotide
ugcugcacggacuccguug

SEQ ID NO: 1768037 - RNA, 19 nt, Artificial Sequence
  Description of Artificial Sequence: Synthetic oligonucleotide
augaaaaguaguacuaauu

SEQ ID NO: 1768038 - RNA, 19 nt, Artificial Sequence
  Description of Artificial Sequence: Synthetic oligonucleotide
cuccguuggcuacuaaggc

SEQ ID NO: 1768039 - RNA, 19 nt, Artificial Sequence
  Description of Artificial Sequence: Synthetic oligonucleotide
ccuagauuaaaaugacaac

SEQ ID NO: 1768040 - RNA, 19 nt, Artificial Sequence
  Description of Artificial Sequence: Synthetic oligonucleotide
uuauaguaucuguguagua

SEQ ID NO: 1768041 - RNA, 19 nt, Artificial Sequence
  Description of Artificial Sequence: Synthetic oligonucleotide
ucucaguugccuagauuaa

SEQ ID NO: 1768042 - RNA, 19 nt, Artificial Sequence
  Description of Artificial Sequence: Synthetic oligonucleotide
agaaagagacuggguaaag

SEQ ID NO: 1768043 - RNA, 19 nt, Artificial Sequence
  Description of Artificial Sequence: Synthetic oligonucleotide
gucuuugaacgcaagccug

SEQ ID NO: 1768044 - RNA, 19 nt, Artificial Sequence
  Description of Artificial Sequence: Synthetic oligonucleotide
ucucuagcagcaagauuaa

SEQ ID NO: 1768045 - RNA, 19 nt, Artificial Sequence
  Description of Artificial Sequence: Synthetic oligonucleotide
gaccccgagacuuuguuua

SEQ ID NO: 1768046 - RNA, 19 nt, Artificial Sequence
  Description of Artificial Sequence: Synthetic oligonucleotide
cugugagcggugcugcagg

SEQ ID NO: 1768047 - RNA, 19 nt, Artificial Sequence
  Description of Artificial Sequence: Synthetic oligonucleotide
ucauaacacuugugugacc

SEQ ID NO: 1768048 - RNA, 19 nt, Artificial Sequence
  Description of Artificial Sequence: Synthetic oligonucleotide
uuugaacgcaagccugaau

SEQ ID NO: 1768049 - RNA, 19 nt, Artificial Sequence
  Description of Artificial Sequence: Synthetic oligonucleotide
gcuuguaaguacaacuccc

SEQ ID NO: 1768050 - RNA, 19 nt, Artificial Sequence
  Description of Artificial Sequence: Synthetic oligonucleotide
uugcauguuuggacauaag

SEQ ID NO: 1768051 - RNA, 19 nt, Artificial Sequence
  Description of Artificial Sequence: Synthetic oligonucleotide
ugggucaccgugaugucua

SEQ ID NO: 1768052 - RNA, 19 nt, Artificial Sequence
  Description of Artificial Sequence: Synthetic oligonucleotide
ccauaggugacuuauagua

SEQ ID NO: 1768053 - RNA, 19 nt, Artificial Sequence
  Description of Artificial Sequence: Synthetic oligonucleotide
ugcugauauccgcuuguaa

SEQ ID NO: 1768054 - RNA, 19 nt, Artificial Sequence
  Description of Artificial Sequence: Synthetic oligonucleotide
ucuggacgugccauucacu

SEQ ID NO: 1768055 - RNA, 19 nt, Artificial Sequence
  Description of Artificial Sequence: Synthetic oligonucleotide
aucuguaccauaggugacu

SEQ ID NO: 1768056 - RNA, 19 nt, Artificial Sequence
  Description of Artificial Sequence: Synthetic oligonucleotide
auauccgcuuguaaguaca

SEQ ID NO: 1768057 - RNA, 19 nt, Artificial Sequence
  Description of Artificial Sequence: Synthetic oligonucleotide
caccgugaugucuagauua

SEQ ID NO: 1768058 - RNA, 19 nt, Artificial Sequence
  Description of Artificial Sequence: Synthetic oligonucleotide
ugauauccgcuuguaagua

SEQ ID NO: 1768059 - RNA, 19 nt, Artificial Sequence
  Description of Artificial Sequence: Synthetic oligonucleotide
ccucuaauucauaaaucug

SEQ ID NO: 1768060 - RNA, 19 nt, Artificial Sequence
  Description of Artificial Sequence: Synthetic oligonucleotide
agggcaucuacggugguca

SEQ ID NO: 1768061 - RNA, 19 nt, Artificial Sequence
  Description of Artificial Sequence: Synthetic oligonucleotide
agcaugccggcuuccgcgg

SEQ ID NO: 1768062 - RNA, 19 nt, Artificial Sequence
  Description of Artificial Sequence: Synthetic oligonucleotide
cacuauccuguccacgaug

SEQ ID NO: 1768063 - RNA, 19 nt, Artificial Sequence
  Description of Artificial Sequence: Synthetic oligonucleotide
cauaacacuugugugaccu

SEQ ID NO: 1768064 - RNA, 19 nt, Artificial Sequence
  Description of Artificial Sequence: Synthetic oligonucleotide
ggaacgaugucauaacacu

SEQ ID NO: 1768065 - RNA, 19 nt, Artificial Sequence
  Description of Artificial Sequence: Synthetic oligonucleotide
ggcuacuaaggcaaagaag

SEQ ID NO: 1768066 - RNA, 19 nt, Artificial Sequence
  Description of Artificial Sequence: Synthetic oligonucleotide
uccaguguuuccagcuuau

SEQ ID NO: 1768067 - RNA, 19 nt, Artificial Sequence
  Description of Artificial Sequence: Synthetic oligonucleotide
guaaucgugagcauuccua

SEQ ID NO: 1768068 - RNA, 19 nt, Artificial Sequence
  Description of Artificial Sequence: Synthetic oligonucleotide
accucggcucucacuaucc

SEQ ID NO: 1768069 - RNA, 19 nt, Artificial Sequence
  Description of Artificial Sequence: Synthetic oligonucleotide
acccacaauacuaucugcu

SEQ ID NO: 1768070 - RNA, 19 nt, Artificial Sequence
  Description of Artificial Sequence: Synthetic oligonucleotide
uauccgcuuguaaguacaa

SEQ ID NO: 1768071 - RNA, 19 nt, Artificial Sequence
  Description of Artificial Sequence: Synthetic oligonucleotide
ucgugagcauuccuacaaa

SEQ ID NO: 1768072 - RNA, 19 nt, Artificial Sequence
  Description of Artificial Sequence: Synthetic oligonucleotide
cugauauccgcuuguaagu

SEQ ID NO: 1768073 - RNA, 19 nt, Artificial Sequence
  Description of Artificial Sequence: Synthetic oligonucleotide
gcauugaaaucccucggac

SEQ ID NO: 1768074 - RNA, 19 nt, Artificial Sequence
  Description of Artificial Sequence: Synthetic oligonucleotide
acuuugggccgagcggagc

SEQ ID NO: 1768075 - RNA, 19 nt, Artificial Sequence
  Description of Artificial Sequence: Synthetic oligonucleotide
cgagacuuuguuuaaguuc

SEQ ID NO: 1768076 - RNA, 19 nt, Artificial Sequence
  Description of Artificial Sequence: Synthetic oligonucleotide
ugaucuggacgugccauuc

SEQ ID NO: 1768077 - RNA, 19 nt, Artificial Sequence
  Description of Artificial Sequence: Synthetic oligonucleotide
auccgcuuguaaguacaac

SEQ ID NO: 1768078 - RNA, 19 nt, Artificial Sequence
  Description of Artificial Sequence: Synthetic oligonucleotide
gcugcacggacuccguugg

SEQ ID NO: 1768079 - RNA, 19 nt, Artificial Sequence
  Description of Artificial Sequence: Synthetic oligonucleotide
cucggcucucacuauccug

SEQ ID NO: 1768080 - RNA, 19 nt, Artificial Sequence
  Description of Artificial Sequence: Synthetic oligonucleotide
cauaaggcaccgugaucug

SEQ ID NO: 1768081 - RNA, 19 nt, Artificial Sequence
  Description of Artificial Sequence: Synthetic oligonucleotide
ugugaccccgagacuuugu

SEQ ID NO: 1768082 - RNA, 19 nt, Artificial Sequence
  Description of Artificial Sequence: Synthetic oligonucleotide
cucaugaaucgcauauaaa

SEQ ID NO: 1768083 - RNA, 19 nt, Artificial Sequence
  Description of Artificial Sequence: Synthetic oligonucleotide
acucacuuucagucaccug

SEQ ID NO: 1768084 - RNA, 19 nt, Artificial Sequence
  Description of Artificial Sequence: Synthetic oligonucleotide
guagugucgaagacaacaa

SEQ ID NO: 1768085 - RNA, 19 nt, Artificial Sequence
  Description of Artificial Sequence: Synthetic oligonucleotide
uuccuacaaagcucuguuu

SEQ ID NO: 1768086 - RNA, 19 nt, Artificial Sequence
  Description of Artificial Sequence: Synthetic oligonucleotide
cuguaaucgugagcauucc

SEQ ID NO: 1768087 - RNA, 19 nt, Artificial Sequence
  Description of Artificial Sequence: Synthetic oligonucleotide
ggguaaagguuugaagaug

SEQ ID NO: 1768088 - RNA, 19 nt, Artificial Sequence
  Description of Artificial Sequence: Synthetic oligonucleotide
ucaccgugaugucuagauu

SEQ ID NO: 1768089 - RNA, 19 nt, Artificial Sequence
  Description of Artificial Sequence: Synthetic oligonucleotide
ucuguaccauaggugacuu

SEQ ID NO: 1768090 - RNA, 19 nt, Artificial Sequence
  Description of Artificial Sequence: Synthetic oligonucleotide
gcaauguagugucgaagac

SEQ ID NO: 1768091 - RNA, 19 nt, Artificial Sequence
  Description of Artificial Sequence: Synthetic oligonucleotide
gucgaagacaacaagcuuu

SEQ ID NO: 1768092 - RNA, 19 nt, Artificial Sequence
  Description of Artificial Sequence: Synthetic oligonucleotide
gguaaagguuugaagaugu

SEQ ID NO: 1768093 - RNA, 19 nt, Artificial Sequence
  Description of Artificial Sequence: Synthetic oligonucleotide
gcaucuacgguggucauuc

SEQ ID NO: 1768094 - RNA, 19 nt, Artificial Sequence
  Description of Artificial Sequence: Synthetic oligonucleotide
gaacugguuggaacgaugu

SEQ ID NO: 1768095 - RNA, 19 nt, Artificial Sequence
  Description of Artificial Sequence: Synthetic oligonucleotide
ugucugacagggagauaau

SEQ ID NO: 1768096 - RNA, 19 nt, Artificial Sequence
  Description of Artificial Sequence: Synthetic oligonucleotide
gaucuggacgugccauuca

SEQ ID NO: 1768097 - RNA, 19 nt, Artificial Sequence
  Description of Artificial Sequence: Synthetic oligonucleotide
ccacaauacuaucugcuuc

SEQ ID NO: 1768098 - RNA, 19 nt, Artificial Sequence
  Description of Artificial Sequence: Synthetic oligonucleotide
gagcggcggugacauauug

SEQ ID NO: 1768099 - RNA, 19 nt, Artificial Sequence
  Description of Artificial Sequence: Synthetic oligonucleotide
aggugacuuauaguaucug

SEQ ID NO: 1768100 - RNA, 19 nt, Artificial Sequence
  Description of Artificial Sequence: Synthetic oligonucleotide
gucaccgugaugucuagau

SEQ ID NO: 1768101 - RNA, 19 nt, Artificial Sequence
  Description of Artificial Sequence: Synthetic oligonucleotide
agguuuacuuagacccauc

SEQ ID NO: 1768102 - RNA, 19 nt, Artificial Sequence
  Description of Artificial Sequence: Synthetic oligonucleotide
aguaucuguguaguauauu

SEQ ID NO: 1768103 - RNA, 19 nt, Artificial Sequence
  Description of Artificial Sequence: Synthetic oligonucleotide
cuagauuauuauacguuuu

SEQ ID NO: 1768104 - RNA, 19 nt, Artificial Sequence
  Description of Artificial Sequence: Synthetic oligonucleotide
gaccucggcucucacuauc

SEQ ID NO: 1768105 - RNA, 19 nt, Artificial Sequence
  Description of Artificial Sequence: Synthetic oligonucleotide
ugaccucaugaaucgcaua

SEQ ID NO: 1768106 - RNA, 19 nt, Artificial Sequence
  Description of Artificial Sequence: Synthetic oligonucleotide
cauaggugacuuauaguau

SEQ ID NO: 1768107 - RNA, 19 nt, Artificial Sequence
  Description of Artificial Sequence: Synthetic oligonucleotide
ccgcuuguaaguacaacuc

SEQ ID NO: 1768108 - RNA, 19 nt, Artificial Sequence
  Description of Artificial Sequence: Synthetic oligonucleotide
cccucaaaauacugugagc

SEQ ID NO: 1768109 - RNA, 19 nt, Artificial Sequence
  Description of Artificial Sequence: Synthetic oligonucleotide
gucuagauuauuauacguu

SEQ ID NO: 1768110 - RNA, 19 nt, Artificial Sequence
  Description of Artificial Sequence: Synthetic oligonucleotide
ugaccccgagacuuuguuu

SEQ ID NO: 1768111 - RNA, 19 nt, Artificial Sequence
  Description of Artificial Sequence: Synthetic oligonucleotide
cacggacuccguuggcuac

SEQ ID NO: 1768112 - RNA, 19 nt, Artificial Sequence
  Description of Artificial Sequence: Synthetic oligonucleotide
ugggccgagcggagcggcg

SEQ ID NO: 1768113 - RNA, 19 nt, Artificial Sequence
  Description of Artificial Sequence: Synthetic oligonucleotide
cgcuuguaaguacaacucc

SEQ ID NO: 1768114 - RNA, 19 nt, Artificial Sequence
  Description of Artificial Sequence: Synthetic oligonucleotide
uuuggacauaaggcaccgu

SEQ ID NO: 1768115 - RNA, 19 nt, Artificial Sequence
  Description of Artificial Sequence: Synthetic oligonucleotide
accuuucaacaaauugagu

SEQ ID NO: 1768116 - RNA, 19 nt, Artificial Sequence
  Description of Artificial Sequence: Synthetic oligonucleotide
guuccaucccagugacuuc

SEQ ID NO: 1768117 - RNA, 19 nt, Artificial Sequence
  Description of Artificial Sequence: Synthetic oligonucleotide
gauggaccucggcucucac

SEQ ID NO: 1768118 - RNA, 19 nt, Artificial Sequence
  Description of Artificial Sequence: Synthetic oligonucleotide
ggugacauauugcauguuu

SEQ ID NO: 1768119 - RNA, 19 nt, Artificial Sequence
  Description of Artificial Sequence: Synthetic oligonucleotide
ugugaggaucagggcuugc

SEQ ID NO: 1768120 - RNA, 19 nt, Artificial Sequence
  Description of Artificial Sequence: Synthetic oligonucleotide
gaacgaugucauaacacuu

SEQ ID NO: 1768121 - RNA, 19 nt, Artificial Sequence
  Description of Artificial Sequence: Synthetic oligonucleotide
ugcuuggcaccugcuggug

SEQ ID NO: 1768122 - RNA, 19 nt, Artificial Sequence
  Description of Artificial Sequence: Synthetic oligonucleotide
auguagugucgaagacaac

SEQ ID NO: 1768123 - RNA, 19 nt, Artificial Sequence
  Description of Artificial Sequence: Synthetic oligonucleotide
agugcacuuuaaugacaua

SEQ ID NO: 1768124 - RNA, 19 nt, Artificial Sequence
  Description of Artificial Sequence: Synthetic oligonucleotide
ccucaugaaucgcauauaa

SEQ ID NO: 1768125 - RNA, 19 nt, Artificial Sequence
  Description of Artificial Sequence: Synthetic oligonucleotide
cuuccgcgggucccggggc

SEQ ID NO: 1768126 - RNA, 19 nt, Artificial Sequence
  Description of Artificial Sequence: Synthetic oligonucleotide
caccgugaucuggacgugc

SEQ ID NO: 1768127 - RNA, 19 nt, Artificial Sequence
  Description of Artificial Sequence: Synthetic oligonucleotide
accgugaugucuagauuau

SEQ ID NO: 1768128 - RNA, 19 nt, Artificial Sequence
  Description of Artificial Sequence: Synthetic oligonucleotide
acgcaagccugaaucuucu

SEQ ID NO: 1768129 - RNA, 19 nt, Artificial Sequence
  Description of Artificial Sequence: Synthetic oligonucleotide
uggcaccugcuggugugag

SEQ ID NO: 1768130 - RNA, 19 nt, Artificial Sequence
  Description of Artificial Sequence: Synthetic oligonucleotide
cuccauguuucaaucuuau

SEQ ID NO: 1768131 - RNA, 19 nt, Artificial Sequence
  Description of Artificial Sequence: Synthetic oligonucleotide
accccgagacuuuguuuaa

SEQ ID NO: 1768132 - RNA, 19 nt, Artificial Sequence
  Description of Artificial Sequence: Synthetic oligonucleotide
ggacauaaggcaccgugau

SEQ ID NO: 1768133 - RNA, 19 nt, Artificial Sequence
  Description of Artificial Sequence: Synthetic oligonucleotide
gucugaggacagucuuuga

SEQ ID NO: 1768134 - RNA, 19 nt, Artificial Sequence
  Description of Artificial Sequence: Synthetic oligonucleotide
gcacuuugggccgagcgga

SEQ ID NO: 1768135 - RNA, 19 nt, Artificial Sequence
  Description of Artificial Sequence: Synthetic oligonucleotide
caguugccuagauuaaaau

SEQ ID NO: 1768136 - RNA, 19 nt, Artificial Sequence
  Description of Artificial Sequence: Synthetic oligonucleotide
acgugccauucacucacuu

SEQ ID NO: 1768137 - RNA, 19 nt, Artificial Sequence
  Description of Artificial Sequence: Synthetic oligonucleotide
cuuugaacgcaagccugaa

SEQ ID NO: 1768138 - RNA, 19 nt, Artificial Sequence
  Description of Artificial Sequence: Synthetic oligonucleotide
acggacuccguuggcuacu

SEQ ID NO: 1768139 - RNA, 19 nt, Artificial Sequence
  Description of Artificial Sequence: Synthetic oligonucleotide
acgauggucuccaguguuu

SEQ ID NO: 1768140 - RNA, 19 nt, Artificial Sequence
  Description of Artificial Sequence: Synthetic oligonucleotide
agcagcacuuugggccgag

SEQ ID NO: 1768141 - RNA, 19 nt, Artificial Sequence
  Description of Artificial Sequence: Synthetic oligonucleotide
cugcacggacuccguuggc

SEQ ID NO: 1768142 - RNA, 19 nt, Artificial Sequence
  Description of Artificial Sequence: Synthetic oligonucleotide
gaacgcaagccugaaucuu

SEQ ID NO: 1768143 - RNA, 19 nt, Artificial Sequence
  Description of Artificial Sequence: Synthetic oligonucleotide
cacauucggggcugggugu

SEQ ID NO: 1768144 - RNA, 19 nt, Artificial Sequence
  Description of Artificial Sequence: Synthetic oligonucleotide
cgaugucauaacacuugug

SEQ ID NO: 1768145 - RNA, 19 nt, Artificial Sequence
  Description of Artificial Sequence: Synthetic oligonucleotide
gcggugacauauugcaugu

SEQ ID NO: 1768146 - RNA, 19 nt, Artificial Sequence
  Description of Artificial Sequence: Synthetic oligonucleotide
gcgccgcauuucuuagggg

SEQ ID NO: 1768147 - RNA, 19 nt, Artificial Sequence
  Description of Artificial Sequence: Synthetic oligonucleotide
caucuacgguggucauuca

SEQ ID NO: 1768148 - RNA, 19 nt, Artificial Sequence
  Description of Artificial Sequence: Synthetic oligonucleotide
gugaccccgagacuuuguu

SEQ ID NO: 1768149 - RNA, 19 nt, Artificial Sequence
  Description of Artificial Sequence: Synthetic oligonucleotide
cuguaccauaggugacuua

SEQ ID NO: 1768150 - RNA, 19 nt, Artificial Sequence
  Description of Artificial Sequence: Synthetic oligonucleotide
cccgagacuuuguuuaagu

SEQ ID NO: 1768151 - RNA, 19 nt, Artificial Sequence
  Description of Artificial Sequence: Synthetic oligonucleotide
guacaacucccuccauguu

SEQ ID NO: 1768152 - RNA, 19 nt, Artificial Sequence
  Description of Artificial Sequence: Synthetic oligonucleotide
cuauccuguccacgauggu

SEQ ID NO: 1768153 - RNA, 19 nt, Artificial Sequence
  Description of Artificial Sequence: Synthetic oligonucleotide
ccccgagacuuuguuuaag

SEQ ID NO: 1768154 - RNA, 19 nt, Artificial Sequence
  Description of Artificial Sequence: Synthetic oligonucleotide
ggucaccgugaugucuaga

SEQ ID NO: 1768155 - RNA, 19 nt, Artificial Sequence
  Description of Artificial Sequence: Synthetic oligonucleotide
caugccggcuuccgcgggu

SEQ ID NO: 1768156 - RNA, 19 nt, Artificial Sequence
  Description of Artificial Sequence: Synthetic oligonucleotide
cuguuccaucccagugacu

SEQ ID NO: 1768157 - RNA, 19 nt, Artificial Sequence
  Description of Artificial Sequence: Synthetic oligonucleotide
gccggcuuccgcggguccc

SEQ ID NO: 1768158 - RNA, 19 nt, Artificial Sequence
  Description of Artificial Sequence: Synthetic oligonucleotide
ccgagacuuuguuuaaguu

SEQ ID NO: 1768159 - RNA, 19 nt, Artificial Sequence
  Description of Artificial Sequence: Synthetic oligonucleotide
ggacuccguuggcuacuaa

SEQ ID NO: 1768160 - RNA, 19 nt, Artificial Sequence
  Description of Artificial Sequence: Synthetic oligonucleotide
ggaccucggcucucacuau

SEQ ID NO: 1768161 - RNA, 19 nt, Artificial Sequence
  Description of Artificial Sequence: Synthetic oligonucleotide
gccgagcggagcggcggug

SEQ ID NO: 1768162 - RNA, 19 nt, Artificial Sequence
  Description of Artificial Sequence: Synthetic oligonucleotide
cguuggcuacuaaggcaaa

SEQ ID NO: 1768163 - RNA, 19 nt, Artificial Sequence
  Description of Artificial Sequence: Synthetic oligonucleotide
cgugccauucacucacuuu

SEQ ID NO: 1768164 - RNA, 19 nt, Artificial Sequence
  Description of Artificial Sequence: Synthetic oligonucleotide
ggcaucuacgguggucauu

SEQ ID NO: 1768165 - RNA, 19 nt, Artificial Sequence
  Description of Artificial Sequence: Synthetic oligonucleotide
gggcaucuacgguggucau

SEQ ID NO: 1768166 - RNA, 19 nt, Artificial Sequence
  Description of Artificial Sequence: Synthetic oligonucleotide
ccgagcggagcggcgguga

SEQ ID NO: 1768167 - RNA, 19 nt, Artificial Sequence
  Description of Artificial Sequence: Synthetic oligonucleotide
ggagcggcggugacauauu

SEQ ID NO: 1768168 - RNA, 19 nt, Artificial Sequence
  Description of Artificial Sequence: Synthetic oligonucleotide
cggagcggcggugacauau

SEQ ID NO: 1768169 - RNA, 19 nt, Artificial Sequence
  Description of Artificial Sequence: Synthetic oligonucleotide
cggcuuccgcgggucccgg

SEQ ID NO: 1768170 - RNA, 19 nt, Artificial Sequence
  Description of Artificial Sequence: Synthetic oligonucleotide
ccgugaugucuagauuauu

SEQ ID NO: 1768171 - RNA, 19 nt, Artificial Sequence
  Description of Artificial Sequence: Synthetic oligonucleotide
cggcggugacauauugcau

SEQ ID NO: 1768172 - RNA, 19 nt, Artificial Sequence
  Description of Artificial Sequence: Synthetic oligonucleotide
cggacuccguuggcuacua

SEQ ID NO: 1768173 - RNA, 19 nt, Artificial Sequence
  Description of Artificial Sequence: Synthetic oligonucleotide
cggugacauauugcauguu

SEQ ID NO: 1768174 - RNA, 19 nt, Artificial Sequence
  Description of Artificial Sequence: Synthetic oligonucleotide
aacacaucggcucauagag

SEQ ID NO: 1768175 - RNA, 19 nt, Artificial Sequence
  Description of Artificial Sequence: Synthetic oligonucleotide
aaaaugagugagcauuagc

SEQ ID NO: 1768176 - RNA, 19 nt, Artificial Sequence
  Description of Artificial Sequence: Synthetic oligonucleotide
agagggaacauucucauac

SEQ ID NO: 1768177 - RNA, 19 nt, Artificial Sequence
  Description of Artificial Sequence: Synthetic oligonucleotide
aggauauacacuuauaucu

SEQ ID NO: 1768178 - RNA, 19 nt, Artificial Sequence
  Description of Artificial Sequence: Synthetic oligonucleotide
uucacacuaacuaaaauga

SEQ ID NO: 1768179 - RNA, 19 nt, Artificial Sequence
  Description of Artificial Sequence: Synthetic oligonucleotide
augacaauagugcacauuc

SEQ ID NO: 1768180 - RNA, 19 nt, Artificial Sequence
  Description of Artificial Sequence: Synthetic oligonucleotide
auaguaaaugaauugucgg

SEQ ID NO: 1768181 - RNA, 19 nt, Artificial Sequence
  Description of Artificial Sequence: Synthetic oligonucleotide
uugacuaauuccaauagca

SEQ ID NO: 1768182 - RNA, 19 nt, Artificial Sequence
  Description of Artificial Sequence: Synthetic oligonucleotide
aaacugacugcuuagagaa

SEQ ID NO: 1768183 - RNA, 19 nt, Artificial Sequence
  Description of Artificial Sequence: Synthetic oligonucleotide
agguguaaaagcccaaugc

SEQ ID NO: 1768184 - RNA, 19 nt, Artificial Sequence
  Description of Artificial Sequence: Synthetic oligonucleotide
uucgguucacguaagagag

SEQ ID NO: 1768185 - RNA, 19 nt, Artificial Sequence
  Description of Artificial Sequence: Synthetic oligonucleotide
caagaguuccacuaaauag

SEQ ID NO: 1768186 - RNA, 19 nt, Artificial Sequence
  Description of Artificial Sequence: Synthetic oligonucleotide
aauagcaucucccauccga

SEQ ID NO: 1768187 - RNA, 19 nt, Artificial Sequence
  Description of Artificial Sequence: Synthetic oligonucleotide
aaauaguaaaugaauuguc

SEQ ID NO: 1768188 - RNA, 19 nt, Artificial Sequence
  Description of Artificial Sequence: Synthetic oligonucleotide
uauuauagcgauacucugc

SEQ ID NO: 1768189 - RNA, 19 nt, Artificial Sequence
  Description of Artificial Sequence: Synthetic oligonucleotide
ucuacagucauuagugccc

SEQ ID NO: 1768190 - RNA, 19 nt, Artificial Sequence
  Description of Artificial Sequence: Synthetic oligonucleotide
aguggauaaacugggaggc

SEQ ID NO: 1768191 - RNA, 19 nt, Artificial Sequence
  Description of Artificial Sequence: Synthetic oligonucleotide
uguugugaaggacacaaca

SEQ ID NO: 1768192 - RNA, 19 nt, Artificial Sequence
  Description of Artificial Sequence: Synthetic oligonucleotide
aguaaaugaauugucgggg

SEQ ID NO: 1768193 - RNA, 19 nt, Artificial Sequence
  Description of Artificial Sequence: Synthetic oligonucleotide
uaucagacaguucaaagaa

SEQ ID NO: 1768194 - RNA, 19 nt, Artificial Sequence
  Description of Artificial Sequence: Synthetic oligonucleotide
ugaauugucggggaaaucc

SEQ ID NO: 1768195 - RNA, 19 nt, Artificial Sequence
  Description of Artificial Sequence: Synthetic oligonucleotide
ugugaaggacacaacaagc

SEQ ID NO: 1768196 - RNA, 19 nt, Artificial Sequence
  Description of Artificial Sequence: Synthetic oligonucleotide
ugagcauuagcuccugccg

SEQ ID NO: 1768197 - RNA, 19 nt, Artificial Sequence
  Description of Artificial Sequence: Synthetic oligonucleotide
aauccauacauggacauca

SEQ ID NO: 1768198 - RNA, 19 nt, Artificial Sequence
  Description of Artificial Sequence: Synthetic oligonucleotide
uguucaauggguccagucc

SEQ ID NO: 1768199 - RNA, 19 nt, Artificial Sequence
  Description of Artificial Sequence: Synthetic oligonucleotide
uucucauacuucauucugg

SEQ ID NO: 1768200 - RNA, 19 nt, Artificial Sequence
  Description of Artificial Sequence: Synthetic oligonucleotide
gacaauagugcacauucag

SEQ ID NO: 1768201 - RNA, 19 nt, Artificial Sequence
  Description of Artificial Sequence: Synthetic oligonucleotide
auagucaaugaggauauac

SEQ ID NO: 1768202 - RNA, 19 nt, Artificial Sequence
  Description of Artificial Sequence: Synthetic oligonucleotide
aaccugagguguaaaagcc

SEQ ID NO: 1768203 - RNA, 19 nt, Artificial Sequence
  Description of Artificial Sequence: Synthetic oligonucleotide
auuauagcgauacucugcu

SEQ ID NO: 1768204 - RNA, 19 nt, Artificial Sequence
  Description of Artificial Sequence: Synthetic oligonucleotide
acuaucagacaguucaaag

SEQ ID NO: 1768205 - RNA, 19 nt, Artificial Sequence
  Description of Artificial Sequence: Synthetic oligonucleotide
aagaguuccacuaaauagu

SEQ ID NO: 1768206 - RNA, 19 nt, Artificial Sequence
  Description of Artificial Sequence: Synthetic oligonucleotide
uccuuuagagacugcacgg

SEQ ID NO: 1768207 - RNA, 19 nt, Artificial Sequence
  Description of Artificial Sequence: Synthetic oligonucleotide
uagucaaugaggauauaca

SEQ ID NO: 1768208 - RNA, 19 nt, Artificial Sequence
  Description of Artificial Sequence: Synthetic oligonucleotide
uuagagaagacugcuguag

SEQ ID NO: 1768209 - RNA, 19 nt, Artificial Sequence
  Description of Artificial Sequence: Synthetic oligonucleotide
caauagugcacauucaguc

SEQ ID NO: 1768210 - RNA, 19 nt, Artificial Sequence
  Description of Artificial Sequence: Synthetic oligonucleotide
agucaaguacuguaauugg

SEQ ID NO: 1768211 - RNA, 19 nt, Artificial Sequence
  Description of Artificial Sequence: Synthetic oligonucleotide
uggagaggaccaaacaucc

SEQ ID NO: 1768212 - RNA, 19 nt, Artificial Sequence
  Description of Artificial Sequence: Synthetic oligonucleotide
acacuaacuaaaaugagug

SEQ ID NO: 1768213 - RNA, 19 nt, Artificial Sequence
  Description of Artificial Sequence: Synthetic oligonucleotide
ugugaguugcagaaugggc

SEQ ID NO: 1768214 - RNA, 19 nt, Artificial Sequence
  Description of Artificial Sequence: Synthetic oligonucleotide
gacuaauuccaauagcauc

SEQ ID NO: 1768215 - RNA, 19 nt, Artificial Sequence
  Description of Artificial Sequence: Synthetic oligonucleotide
auggacaucaaauauucau

SEQ ID NO: 1768216 - RNA, 19 nt, Artificial Sequence
  Description of Artificial Sequence: Synthetic oligonucleotide
auagaggcuugacuaauuc

SEQ ID NO: 1768217 - RNA, 19 nt, Artificial Sequence
  Description of Artificial Sequence: Synthetic oligonucleotide
accucgaccauacagcaag

SEQ ID NO: 1768218 - RNA, 19 nt, Artificial Sequence
  Description of Artificial Sequence: Synthetic oligonucleotide
uggacaucaaauauucauc

SEQ ID NO: 1768219 - RNA, 19 nt, Artificial Sequence
  Description of Artificial Sequence: Synthetic oligonucleotide
cacaucggcucauagaggc

SEQ ID NO: 1768220 - RNA, 19 nt, Artificial Sequence
  Description of Artificial Sequence: Synthetic oligonucleotide
cuggaaaguggauaaacug

SEQ ID NO: 1768221 - RNA, 19 nt, Artificial Sequence
  Description of Artificial Sequence: Synthetic oligonucleotide
ugucucuacagucauuagu

SEQ ID NO: 1768222 - RNA, 19 nt, Artificial Sequence
  Description of Artificial Sequence: Synthetic oligonucleotide
ucacacuaacuaaaaugag

SEQ ID NO: 1768223 - RNA, 19 nt, Artificial Sequence
  Description of Artificial Sequence: Synthetic oligonucleotide
cauacucgcccucaggugg

SEQ ID NO: 1768224 - RNA, 19 nt, Artificial Sequence
  Description of Artificial Sequence: Synthetic oligonucleotide
aaacugggaggcccuuucc

SEQ ID NO: 1768225 - RNA, 19 nt, Artificial Sequence
  Description of Artificial Sequence: Synthetic oligonucleotide
augggcaacacaucggcuc

SEQ ID NO: 1768226 - RNA, 19 nt, Artificial Sequence
  Description of Artificial Sequence: Synthetic oligonucleotide
ggagucaugagccagguac

SEQ ID NO: 1768227 - RNA, 19 nt, Artificial Sequence
  Description of Artificial Sequence: Synthetic oligonucleotide
gaggauauacacuuauauc

SEQ ID NO: 1768228 - RNA, 19 nt, Artificial Sequence
  Description of Artificial Sequence: Synthetic oligonucleotide
uacggagaaagaaggaacu

SEQ ID NO: 1768229 - RNA, 19 nt, Artificial Sequence
  Description of Artificial Sequence: Synthetic oligonucleotide
ggaccaaacauccaucccg

SEQ ID NO: 1768230 - RNA, 19 nt, Artificial Sequence
  Description of Artificial Sequence: Synthetic oligonucleotide
cucuacagucauuagugcc

SEQ ID NO: 1768231 - RNA, 19 nt, Artificial Sequence
  Description of Artificial Sequence: Synthetic oligonucleotide
agucacaucauccaacuua

SEQ ID NO: 1768232 - RNA, 19 nt, Artificial Sequence
  Description of Artificial Sequence: Synthetic oligonucleotide
ucucauacuucauucugga

SEQ ID NO: 1768233 - RNA, 19 nt, Artificial Sequence
  Description of Artificial Sequence: Synthetic oligonucleotide
uacuguaauugguacggcc

SEQ ID NO: 1768234 - RNA, 19 nt, Artificial Sequence
  Description of Artificial Sequence: Synthetic oligonucleotide
gucgugaaagacuugcccc

SEQ ID NO: 1768235 - RNA, 19 nt, Artificial Sequence
  Description of Artificial Sequence: Synthetic oligonucleotide
aauagcccuagaucgcuga

SEQ ID NO: 1768236 - RNA, 19 nt, Artificial Sequence
  Description of Artificial Sequence: Synthetic oligonucleotide
ugcagaaugggcccuauua

SEQ ID NO: 1768237 - RNA, 19 nt, Artificial Sequence
  Description of Artificial Sequence: Synthetic oligonucleotide
gagcauuagcuccugccgg

SEQ ID NO: 1768238 - RNA, 19 nt, Artificial Sequence
  Description of Artificial Sequence: Synthetic oligonucleotide
cugguaagagggaacauuc

SEQ ID NO: 1768239 - RNA, 19 nt, Artificial Sequence
  Description of Artificial Sequence: Synthetic oligonucleotide
ucgaccauacagcaagaga

SEQ ID NO: 1768240 - RNA, 19 nt, Artificial Sequence
  Description of Artificial Sequence: Synthetic oligonucleotide
cauuugcucauacucgccc

SEQ ID NO: 1768241 - RNA, 19 nt, Artificial Sequence
  Description of Artificial Sequence: Synthetic oligonucleotide
uaaaugaauugucggggaa

SEQ ID NO: 1768242 - RNA, 19 nt, Artificial Sequence
  Description of Artificial Sequence: Synthetic oligonucleotide
ugacagaacuuggcgaugg

SEQ ID NO: 1768243 - RNA, 19 nt, Artificial Sequence
  Description of Artificial Sequence: Synthetic oligonucleotide
gugaguugcagaaugggcc

SEQ ID NO: 1768244 - RNA, 19 nt, Artificial Sequence
  Description of Artificial Sequence: Synthetic oligonucleotide
gaguuucagcaauaugaag

SEQ ID NO: 1768245 - RNA, 19 nt, Artificial Sequence
  Description of Artificial Sequence: Synthetic oligonucleotide
agaaugggcccuauuauag

SEQ ID NO: 1768246 - RNA, 19 nt, Artificial Sequence
  Description of Artificial Sequence: Synthetic oligonucleotide
agcuggaaaguggauaaac

SEQ ID NO: 1768247 - RNA, 19 nt, Artificial Sequence
  Description of Artificial Sequence: Synthetic oligonucleotide
uagaggcuugacuaauucc

SEQ ID NO: 1768248 - RNA, 19 nt, Artificial Sequence
  Description of Artificial Sequence: Synthetic oligonucleotide
agugacaugggcaacacau

SEQ ID NO: 1768249 - RNA, 19 nt, Artificial Sequence
  Description of Artificial Sequence: Synthetic oligonucleotide
ucuagggacuccauuugcu

SEQ ID NO: 1768250 - RNA, 19 nt, Artificial Sequence
  Description of Artificial Sequence: Synthetic oligonucleotide
uggauaaacugggaggccc

SEQ ID NO: 1768251 - RNA, 19 nt, Artificial Sequence
  Description of Artificial Sequence: Synthetic oligonucleotide
ugggcuaauagcccuagau

SEQ ID NO: 1768252 - RNA, 19 nt, Artificial Sequence
  Description of Artificial Sequence: Synthetic oligonucleotide
cuaagguccggugaccucg

SEQ ID NO: 1768253 - RNA, 19 nt, Artificial Sequence
  Description of Artificial Sequence: Synthetic oligonucleotide
guggauacagucaaccacc

SEQ ID NO: 1768254 - RNA, 19 nt, Artificial Sequence
  Description of Artificial Sequence: Synthetic oligonucleotide
uggaaagucucccuccuuc

SEQ ID NO: 1768255 - RNA, 19 nt, Artificial Sequence
  Description of Artificial Sequence: Synthetic oligonucleotide
uaaaaugagugagcauuag

SEQ ID NO: 1768256 - RNA, 19 nt, Artificial Sequence
  Description of Artificial Sequence: Synthetic oligonucleotide
cccaguuucaaacugacug

SEQ ID NO: 1768257 - RNA, 19 nt, Artificial Sequence
  Description of Artificial Sequence: Synthetic oligonucleotide
uuggcgaugggcugguaag

SEQ ID NO: 1768258 - RNA, 19 nt, Artificial Sequence
  Description of Artificial Sequence: Synthetic oligonucleotide
uccgagucuggaaggaacc

SEQ ID NO: 1768259 - RNA, 19 nt, Artificial Sequence
  Description of Artificial Sequence: Synthetic oligonucleotide
ucaaucacacugugaguug

SEQ ID NO: 1768260 - RNA, 19 nt, Artificial Sequence
  Description of Artificial Sequence: Synthetic oligonucleotide
gagguguaaaagcccaaug

SEQ ID NO: 1768261 - RNA, 19 nt, Artificial Sequence
  Description of Artificial Sequence: Synthetic oligonucleotide
aacaagccaagaugaugug

SEQ ID NO: 1768262 - RNA, 19 nt, Artificial Sequence
  Description of Artificial Sequence: Synthetic oligonucleotide
guaauugguacggccauag

SEQ ID NO: 1768263 - RNA, 19 nt, Artificial Sequence
  Description of Artificial Sequence: Synthetic oligonucleotide
aacuaaaaugagugagcau

SEQ ID NO: 1768264 - RNA, 19 nt, Artificial Sequence
  Description of Artificial Sequence: Synthetic oligonucleotide
ucacagucaaguacuguaa

SEQ ID NO: 1768265 - RNA, 19 nt, Artificial Sequence
  Description of Artificial Sequence: Synthetic oligonucleotide
uugucggggaaauccauac

SEQ ID NO: 1768266 - RNA, 19 nt, Artificial Sequence
  Description of Artificial Sequence: Synthetic oligonucleotide
auaugaaguggagucauga

SEQ ID NO: 1768267 - RNA, 19 nt, Artificial Sequence
  Description of Artificial Sequence: Synthetic oligonucleotide
uccaccuuucacacuaacu

SEQ ID NO: 1768268 - RNA, 19 nt, Artificial Sequence
  Description of Artificial Sequence: Synthetic oligonucleotide
ucuaagucuagggacucca

SEQ ID NO: 1768269 - RNA, 19 nt, Artificial Sequence
  Description of Artificial Sequence: Synthetic oligonucleotide
auacacuuauaucugcuuu

SEQ ID NO: 1768270 - RNA, 19 nt, Artificial Sequence
  Description of Artificial Sequence: Synthetic oligonucleotide
gaaugggcccuauuauagc

SEQ ID NO: 1768271 - RNA, 19 nt, Artificial Sequence
  Description of Artificial Sequence: Synthetic oligonucleotide
caguucaaagaaugcagac

SEQ ID NO: 1768272 - RNA, 19 nt, Artificial Sequence
  Description of Artificial Sequence: Synthetic oligonucleotide
acaagccaagaugaugugg

SEQ ID NO: 1768273 - RNA, 19 nt, Artificial Sequence
  Description of Artificial Sequence: Synthetic oligonucleotide
agacaguucaaagaaugca

SEQ ID NO: 1768274 - RNA, 19 nt, Artificial Sequence
  Description of Artificial Sequence: Synthetic oligonucleotide
aacggucuaagguccggug

SEQ ID NO: 1768275 - RNA, 19 nt, Artificial Sequence
  Description of Artificial Sequence: Synthetic oligonucleotide
ugacaauagugcacauuca

SEQ ID NO: 1768276 - RNA, 19 nt, Artificial Sequence
  Description of Artificial Sequence: Synthetic oligonucleotide
uauacacuuauaucugcuu

SEQ ID NO: 1768277 - RNA, 19 nt, Artificial Sequence
  Description of Artificial Sequence: Synthetic oligonucleotide
guaaaugaauugucgggga

SEQ ID NO: 1768278 - RNA, 19 nt, Artificial Sequence
  Description of Artificial Sequence: Synthetic oligonucleotide
agcaagagaucacagucaa

SEQ ID NO: 1768279 - RNA, 19 nt, Artificial Sequence
  Description of Artificial Sequence: Synthetic oligonucleotide
guguaaaagcccaaugcug

SEQ ID NO: 1768280 - RNA, 19 nt, Artificial Sequence
  Description of Artificial Sequence: Synthetic oligonucleotide
cacugugaguugcagaaug

SEQ ID NO: 1768281 - RNA, 19 nt, Artificial Sequence
  Description of Artificial Sequence: Synthetic oligonucleotide
acugacugcuuagagaaga

SEQ ID NO: 1768282 - RNA, 19 nt, Artificial Sequence
  Description of Artificial Sequence: Synthetic oligonucleotide
uacggccauagucaaugag

SEQ ID NO: 1768283 - RNA, 19 nt, Artificial Sequence
  Description of Artificial Sequence: Synthetic oligonucleotide
ggacaucaaauauucauca

SEQ ID NO: 1768284 - RNA, 19 nt, Artificial Sequence
  Description of Artificial Sequence: Synthetic oligonucleotide
gauccauccaggcaucgga

SEQ ID NO: 1768285 - RNA, 19 nt, Artificial Sequence
  Description of Artificial Sequence: Synthetic oligonucleotide
auucggucagccucuaagu

SEQ ID NO: 1768286 - RNA, 19 nt, Artificial Sequence
  Description of Artificial Sequence: Synthetic oligonucleotide
aaguggagucaugagccag

SEQ ID NO: 1768287 - RNA, 19 nt, Artificial Sequence
  Description of Artificial Sequence: Synthetic oligonucleotide
gagccagguacggagaaag

SEQ ID NO: 1768288 - RNA, 19 nt, Artificial Sequence
  Description of Artificial Sequence: Synthetic oligonucleotide
agugagcauuagcuccugc

SEQ ID NO: 1768289 - RNA, 19 nt, Artificial Sequence
  Description of Artificial Sequence: Synthetic oligonucleotide
gugcaucccaguuucaaac

SEQ ID NO: 1768290 - RNA, 19 nt, Artificial Sequence
  Description of Artificial Sequence: Synthetic oligonucleotide
cuuucgguucacguaagag

SEQ ID NO: 1768291 - RNA, 19 nt, Artificial Sequence
  Description of Artificial Sequence: Synthetic oligonucleotide
uggugaguacugcagugcu

SEQ ID NO: 1768292 - RNA, 19 nt, Artificial Sequence
  Description of Artificial Sequence: Synthetic oligonucleotide
acuguaauugguacggcca

SEQ ID NO: 1768293 - RNA, 19 nt, Artificial Sequence
  Description of Artificial Sequence: Synthetic oligonucleotide
gagucaugagccagguacg

SEQ ID NO: 1768294 - RNA, 19 nt, Artificial Sequence
  Description of Artificial Sequence: Synthetic oligonucleotide
ucacacacuaucagacagu

SEQ ID NO: 1768295 - RNA, 19 nt, Artificial Sequence
  Description of Artificial Sequence: Synthetic oligonucleotide
agguccggugaccucgacc

SEQ ID NO: 1768296 - RNA, 19 nt, Artificial Sequence
  Description of Artificial Sequence: Synthetic oligonucleotide
caacaagccaagaugaugu

SEQ ID NO: 1768297 - RNA, 19 nt, Artificial Sequence
  Description of Artificial Sequence: Synthetic oligonucleotide
cacguggauacagucaacc

SEQ ID NO: 1768298 - RNA, 19 nt, Artificial Sequence
  Description of Artificial Sequence: Synthetic oligonucleotide
gaagacugcuguagcacag

SEQ ID NO: 1768299 - RNA, 19 nt, Artificial Sequence
  Description of Artificial Sequence: Synthetic oligonucleotide
agcgauacucugcuggagu

SEQ ID NO: 1768300 - RNA, 19 nt, Artificial Sequence
  Description of Artificial Sequence: Synthetic oligonucleotide
auagcgauacucugcugga

SEQ ID NO: 1768301 - RNA, 19 nt, Artificial Sequence
  Description of Artificial Sequence: Synthetic oligonucleotide
ugaguaggucgugaaagac

SEQ ID NO: 1768302 - RNA, 19 nt, Artificial Sequence
  Description of Artificial Sequence: Synthetic oligonucleotide
uucaaacugacugcuuaga

SEQ ID NO: 1768303 - RNA, 19 nt, Artificial Sequence
  Description of Artificial Sequence: Synthetic oligonucleotide
ucgguucacguaagagagg

SEQ ID NO: 1768304 - RNA, 19 nt, Artificial Sequence
  Description of Artificial Sequence: Synthetic oligonucleotide
ugcacggcagcuucaucag

SEQ ID NO: 1768305 - RNA, 19 nt, Artificial Sequence
  Description of Artificial Sequence: Synthetic oligonucleotide
guacggagaaagaaggaac

SEQ ID NO: 1768306 - RNA, 19 nt, Artificial Sequence
  Description of Artificial Sequence: Synthetic oligonucleotide
ucucugggcuaauagcccu

SEQ ID NO: 1768307 - RNA, 19 nt, Artificial Sequence
  Description of Artificial Sequence: Synthetic oligonucleotide
ucccugccaauccauagaa

SEQ ID NO: 1768308 - RNA, 19 nt, Artificial Sequence
  Description of Artificial Sequence: Synthetic oligonucleotide
uaauagcccuagaucgcug

SEQ ID NO: 1768309 - RNA, 19 nt, Artificial Sequence
  Description of Artificial Sequence: Synthetic oligonucleotide
ugugcaucccaguuucaaa

SEQ ID NO: 1768310 - RNA, 19 nt, Artificial Sequence
  Description of Artificial Sequence: Synthetic oligonucleotide
accauacagcaagagauca

SEQ ID NO: 1768311 - RNA, 19 nt, Artificial Sequence
  Description of Artificial Sequence: Synthetic oligonucleotide
ugcaucccaguuucaaacu

SEQ ID NO: 1768312 - RNA, 19 nt, Artificial Sequence
  Description of Artificial Sequence: Synthetic oligonucleotide
ggauauacacuuauaucug

SEQ ID NO: 1768313 - RNA, 19 nt, Artificial Sequence
  Description of Artificial Sequence: Synthetic oligonucleotide
acguaagagaggucuucag

SEQ ID NO: 1768314 - RNA, 19 nt, Artificial Sequence
  Description of Artificial Sequence: Synthetic oligonucleotide
caucccugccaauccauag

SEQ ID NO: 1768315 - RNA, 19 nt, Artificial Sequence
  Description of Artificial Sequence: Synthetic oligonucleotide
gguacggccauagucaaug

SEQ ID NO: 1768316 - RNA, 19 nt, Artificial Sequence
  Description of Artificial Sequence: Synthetic oligonucleotide
guggcuguucaaugggucc

SEQ ID NO: 1768317 - RNA, 19 nt, Artificial Sequence
  Description of Artificial Sequence: Synthetic oligonucleotide
cuagggacuccauuugcuc

SEQ ID NO: 1768318 - RNA, 19 nt, Artificial Sequence
  Description of Artificial Sequence: Synthetic oligonucleotide
acaauagugcacauucagu

SEQ ID NO: 1768319 - RNA, 19 nt, Artificial Sequence
  Description of Artificial Sequence: Synthetic oligonucleotide
uucgcaaagucuucucaau

SEQ ID NO: 1768320 - RNA, 19 nt, Artificial Sequence
  Description of Artificial Sequence: Synthetic oligonucleotide
gauggccacguggauacag

SEQ ID NO: 1768321 - RNA, 19 nt, Artificial Sequence
  Description of Artificial Sequence: Synthetic oligonucleotide
acagucaaguacuguaauu

SEQ ID NO: 1768322 - RNA, 19 nt, Artificial Sequence
  Description of Artificial Sequence: Synthetic oligonucleotide
aguaggucgugaaagacuu

SEQ ID NO: 1768323 - RNA, 19 nt, Artificial Sequence
  Description of Artificial Sequence: Synthetic oligonucleotide
acaguucaaagaaugcaga

SEQ ID NO: 1768324 - RNA, 19 nt, Artificial Sequence
  Description of Artificial Sequence: Synthetic oligonucleotide
gaacugucaccaagaagcc

SEQ ID NO: 1768325 - RNA, 19 nt, Artificial Sequence
  Description of Artificial Sequence: Synthetic oligonucleotide
aucccaguuucaaacugac

SEQ ID NO: 1768326 - RNA, 19 nt, Artificial Sequence
  Description of Artificial Sequence: Synthetic oligonucleotide
agucaugagccagguacgg

SEQ ID NO: 1768327 - RNA, 19 nt, Artificial Sequence
  Description of Artificial Sequence: Synthetic oligonucleotide
auccgagucuggaaggaac

SEQ ID NO: 1768328 - RNA, 19 nt, Artificial Sequence
  Description of Artificial Sequence: Synthetic oligonucleotide
ugucggggaaauccauaca

SEQ ID NO: 1768329 - RNA, 19 nt, Artificial Sequence
  Description of Artificial Sequence: Synthetic oligonucleotide
agcauuagcuccugccgga

SEQ ID NO: 1768330 - RNA, 19 nt, Artificial Sequence
  Description of Artificial Sequence: Synthetic oligonucleotide
cauugggugccuugauggc

SEQ ID NO: 1768331 - RNA, 19 nt, Artificial Sequence
  Description of Artificial Sequence: Synthetic oligonucleotide
agagaggucuucagcauug

SEQ ID NO: 1768332 - RNA, 19 nt, Artificial Sequence
  Description of Artificial Sequence: Synthetic oligonucleotide
ccagguacggagaaagaag

SEQ ID NO: 1768333 - RNA, 19 nt, Artificial Sequence
  Description of Artificial Sequence: Synthetic oligonucleotide
ugcagugcucccuucgauc

SEQ ID NO: 1768334 - RNA, 19 nt, Artificial Sequence
  Description of Artificial Sequence: Synthetic oligonucleotide
uuauagcgauacucugcug

SEQ ID NO: 1768335 - RNA, 19 nt, Artificial Sequence
  Description of Artificial Sequence: Synthetic oligonucleotide
cuuuagagacugcacggca

SEQ ID NO: 1768336 - RNA, 19 nt, Artificial Sequence
  Description of Artificial Sequence: Synthetic oligonucleotide
gaauugucggggaaaucca

SEQ ID NO: 1768337 - RNA, 19 nt, Artificial Sequence
  Description of Artificial Sequence: Synthetic oligonucleotide
acguggauacagucaacca

SEQ ID NO: 1768338 - RNA, 19 nt, Artificial Sequence
  Description of Artificial Sequence: Synthetic oligonucleotide
ugcucauacucgcccucag

SEQ ID NO: 1768339 - RNA, 19 nt, Artificial Sequence
  Description of Artificial Sequence: Synthetic oligonucleotide
aguacugcagugcucccuu

SEQ ID NO: 1768340 - RNA, 19 nt, Artificial Sequence
  Description of Artificial Sequence: Synthetic oligonucleotide
agacugcuguagcacagca

SEQ ID NO: 1768341 - RNA, 19 nt, Artificial Sequence
  Description of Artificial Sequence: Synthetic oligonucleotide
cccuagaucgcugaguagg

SEQ ID NO: 1768342 - RNA, 19 nt, Artificial Sequence
  Description of Artificial Sequence: Synthetic oligonucleotide
uaugacaauagugcacauu

SEQ ID NO: 1768343 - RNA, 19 nt, Artificial Sequence
  Description of Artificial Sequence: Synthetic oligonucleotide
acggucuaagguccgguga

SEQ ID NO: 1768344 - RNA, 19 nt, Artificial Sequence
  Description of Artificial Sequence: Synthetic oligonucleotide
gguguaaaagcccaaugcu

SEQ ID NO: 1768345 - RNA, 19 nt, Artificial Sequence
  Description of Artificial Sequence: Synthetic oligonucleotide
cacuaacuaaaaugaguga

SEQ ID NO: 1768346 - RNA, 19 nt, Artificial Sequence
  Description of Artificial Sequence: Synthetic oligonucleotide
aagcccaaugcugccagga

SEQ ID NO: 1768347 - RNA, 19 nt, Artificial Sequence
  Description of Artificial Sequence: Synthetic oligonucleotide
ugggcugguaagagggaac

SEQ ID NO: 1768348 - RNA, 19 nt, Artificial Sequence
  Description of Artificial Sequence: Synthetic oligonucleotide
ugagguguaaaagcccaau

SEQ ID NO: 1768349 - RNA, 19 nt, Artificial Sequence
  Description of Artificial Sequence: Synthetic oligonucleotide
ggcccuauuauagcgauac

SEQ ID NO: 1768350 - RNA, 19 nt, Artificial Sequence
  Description of Artificial Sequence: Synthetic oligonucleotide
aaccuagagcagaggguuc

SEQ ID NO: 1768351 - RNA, 19 nt, Artificial Sequence
  Description of Artificial Sequence: Synthetic oligonucleotide
ucugggcuaauagcccuag

SEQ ID NO: 1768352 - RNA, 19 nt, Artificial Sequence
  Description of Artificial Sequence: Synthetic oligonucleotide
guucgcaaagucuucucaa

SEQ ID NO: 1768353 - RNA, 19 nt, Artificial Sequence
  Description of Artificial Sequence: Synthetic oligonucleotide
aaacggucuaagguccggu

SEQ ID NO: 1768354 - RNA, 19 nt, Artificial Sequence
  Description of Artificial Sequence: Synthetic oligonucleotide
aauugucggggaaauccau

SEQ ID NO: 1768355 - RNA, 19 nt, Artificial Sequence
  Description of Artificial Sequence: Synthetic oligonucleotide
agaggguucgcaaagucuu

SEQ ID NO: 1768356 - RNA, 19 nt, Artificial Sequence
  Description of Artificial Sequence: Synthetic oligonucleotide
uuugugcaucccaguuuca

SEQ ID NO: 1768357 - RNA, 19 nt, Artificial Sequence
  Description of Artificial Sequence: Synthetic oligonucleotide
gauuucucuggugaguacu

SEQ ID NO: 1768358 - RNA, 19 nt, Artificial Sequence
  Description of Artificial Sequence: Synthetic oligonucleotide
ugcucccuucgauccaucc

SEQ ID NO: 1768359 - RNA, 19 nt, Artificial Sequence
  Description of Artificial Sequence: Synthetic oligonucleotide
caacacaucggcucauaga

SEQ ID NO: 1768360 - RNA, 19 nt, Artificial Sequence
  Description of Artificial Sequence: Synthetic oligonucleotide
gaaugcagacccuuucggu

SEQ ID NO: 1768361 - RNA, 19 nt, Artificial Sequence
  Description of Artificial Sequence: Synthetic oligonucleotide
uucacguaagagaggucuu

SEQ ID NO: 1768362 - RNA, 19 nt, Artificial Sequence
  Description of Artificial Sequence: Synthetic oligonucleotide
aaucacacugugaguugca

SEQ ID NO: 1768363 - RNA, 19 nt, Artificial Sequence
  Description of Artificial Sequence: Synthetic oligonucleotide
agcuugucucuacagucau

SEQ ID NO: 1768364 - RNA, 19 nt, Artificial Sequence
  Description of Artificial Sequence: Synthetic oligonucleotide
gaccauacagcaagagauc

SEQ ID NO: 1768365 - RNA, 19 nt, Artificial Sequence
  Description of Artificial Sequence: Synthetic oligonucleotide
augaauugucggggaaauc

SEQ ID NO: 1768366 - RNA, 19 nt, Artificial Sequence
  Description of Artificial Sequence: Synthetic oligonucleotide
caucccaguuucaaacuga

SEQ ID NO: 1768367 - RNA, 19 nt, Artificial Sequence
  Description of Artificial Sequence: Synthetic oligonucleotide
acggagaaagaaggaacug

SEQ ID NO: 1768368 - RNA, 19 nt, Artificial Sequence
  Description of Artificial Sequence: Synthetic oligonucleotide
auacucgcccucagguggc

SEQ ID NO: 1768369 - RNA, 19 nt, Artificial Sequence
  Description of Artificial Sequence: Synthetic oligonucleotide
uggcuguucaaugggucca

SEQ ID NO: 1768370 - RNA, 19 nt, Artificial Sequence
  Description of Artificial Sequence: Synthetic oligonucleotide
cugaguaggucgugaaaga

SEQ ID NO: 1768371 - RNA, 19 nt, Artificial Sequence
  Description of Artificial Sequence: Synthetic oligonucleotide
cagcaagagaucacaguca

SEQ ID NO: 1768372 - RNA, 19 nt, Artificial Sequence
  Description of Artificial Sequence: Synthetic oligonucleotide
uccuggaggcuaccuggcc

SEQ ID NO: 1768373 - RNA, 19 nt, Artificial Sequence
  Description of Artificial Sequence: Synthetic oligonucleotide
ucccaguuucaaacugacu

SEQ ID NO: 1768374 - RNA, 19 nt, Artificial Sequence
  Description of Artificial Sequence: Synthetic oligonucleotide
ugggcccuauuauagcgau

SEQ ID NO: 1768375 - RNA, 19 nt, Artificial Sequence
  Description of Artificial Sequence: Synthetic oligonucleotide
aucggaaccuagagcagag

SEQ ID NO: 1768376 - RNA, 19 nt, Artificial Sequence
  Description of Artificial Sequence: Synthetic oligonucleotide
cuucgauccauccaggcau

SEQ ID NO: 1768377 - RNA, 19 nt, Artificial Sequence
  Description of Artificial Sequence: Synthetic oligonucleotide
uugugcaucccaguuucaa

SEQ ID NO: 1768378 - RNA, 19 nt, Artificial Sequence
  Description of Artificial Sequence: Synthetic oligonucleotide
agugcacauucagucccac

SEQ ID NO: 1768379 - RNA, 19 nt, Artificial Sequence
  Description of Artificial Sequence: Synthetic oligonucleotide
agggacuccauuugcucau

SEQ ID NO: 1768380 - RNA, 19 nt, Artificial Sequence
  Description of Artificial Sequence: Synthetic oligonucleotide
auguugugaaggacacaac

SEQ ID NO: 1768381 - RNA, 19 nt, Artificial Sequence
  Description of Artificial Sequence: Synthetic oligonucleotide
gggcuaauagcccuagauc

SEQ ID NO: 1768382 - RNA, 19 nt, Artificial Sequence
  Description of Artificial Sequence: Synthetic oligonucleotide
uccaggcaucggaaccuag

SEQ ID NO: 1768383 - RNA, 19 nt, Artificial Sequence
  Description of Artificial Sequence: Synthetic oligonucleotide
ucuaagguccggugaccuc

SEQ ID NO: 1768384 - RNA, 19 nt, Artificial Sequence
  Description of Artificial Sequence: Synthetic oligonucleotide
aagguccggugaccucgac

SEQ ID NO: 1768385 - RNA, 19 nt, Artificial Sequence
  Description of Artificial Sequence: Synthetic oligonucleotide
ucggaaccuagagcagagg

SEQ ID NO: 1768386 - RNA, 19 nt, Artificial Sequence
  Description of Artificial Sequence: Synthetic oligonucleotide
ucgauccauccaggcaucg

SEQ ID NO: 1768387 - RNA, 19 nt, Artificial Sequence
  Description of Artificial Sequence: Synthetic oligonucleotide
cccuauuauagcgauacuc

SEQ ID NO: 1768388 - RNA, 19 nt, Artificial Sequence
  Description of Artificial Sequence: Synthetic oligonucleotide
uaagguccggugaccucga

SEQ ID NO: 1768389 - RNA, 19 nt, Artificial Sequence
  Description of Artificial Sequence: Synthetic oligonucleotide
ggaucugugucucugggcu

SEQ ID NO: 1768390 - RNA, 19 nt, Artificial Sequence
  Description of Artificial Sequence: Synthetic oligonucleotide
uagcgauacucugcuggag

SEQ ID NO: 1768391 - RNA, 19 nt, Artificial Sequence
  Description of Artificial Sequence: Synthetic oligonucleotide
gucggggaaauccauacau

SEQ ID NO: 1768392 - RNA, 19 nt, Artificial Sequence
  Description of Artificial Sequence: Synthetic oligonucleotide
cucauacucgcccucaggu

SEQ ID NO: 1768393 - RNA, 19 nt, Artificial Sequence
  Description of Artificial Sequence: Synthetic oligonucleotide
gcaacacaucggcucauag

SEQ ID NO: 1768394 - RNA, 19 nt, Artificial Sequence
  Description of Artificial Sequence: Synthetic oligonucleotide
gaaccuagagcagaggguu

SEQ ID NO: 1768395 - RNA, 19 nt, Artificial Sequence
  Description of Artificial Sequence: Synthetic oligonucleotide
caucccguguuccagggaa

SEQ ID NO: 1768396 - RNA, 19 nt, Artificial Sequence
  Description of Artificial Sequence: Synthetic oligonucleotide
cguggauacagucaaccac

SEQ ID NO: 1768397 - RNA, 19 nt, Artificial Sequence
  Description of Artificial Sequence: Synthetic oligonucleotide
uguaauugguacggccaua

SEQ ID NO: 1768398 - RNA, 19 nt, Artificial Sequence
  Description of Artificial Sequence: Synthetic oligonucleotide
cagaaugggcccuauuaua

SEQ ID NO: 1768399 - RNA, 19 nt, Artificial Sequence
  Description of Artificial Sequence: Synthetic oligonucleotide
gccauagucaaugaggaua

SEQ ID NO: 1768400 - RNA, 19 nt, Artificial Sequence
  Description of Artificial Sequence: Synthetic oligonucleotide
uggccacguggauacaguc

SEQ ID NO: 1768401 - RNA, 19 nt, Artificial Sequence
  Description of Artificial Sequence: Synthetic oligonucleotide
gacccuuucgguucacgua

SEQ ID NO: 1768402 - RNA, 19 nt, Artificial Sequence
  Description of Artificial Sequence: Synthetic oligonucleotide
gguacggagaaagaaggaa

SEQ ID NO: 1768403 - RNA, 19 nt, Artificial Sequence
  Description of Artificial Sequence: Synthetic oligonucleotide
ggcuugacuaauuccaaua

SEQ ID NO: 1768404 - RNA, 19 nt, Artificial Sequence
  Description of Artificial Sequence: Synthetic oligonucleotide
cucaaucacacugugaguu

SEQ ID NO: 1768405 - RNA, 19 nt, Artificial Sequence
  Description of Artificial Sequence: Synthetic oligonucleotide
cacauucagucccacugga

SEQ ID NO: 1768406 - RNA, 19 nt, Artificial Sequence
  Description of Artificial Sequence: Synthetic oligonucleotide
ugucaccaagaagccagcu

SEQ ID NO: 1768407 - RNA, 19 nt, Artificial Sequence
  Description of Artificial Sequence: Synthetic oligonucleotide
gaguaggucgugaaagacu

SEQ ID NO: 1768408 - RNA, 19 nt, Artificial Sequence
  Description of Artificial Sequence: Synthetic oligonucleotide
aggguucgcaaagucuucu

SEQ ID NO: 1768409 - RNA, 19 nt, Artificial Sequence
  Description of Artificial Sequence: Synthetic oligonucleotide
guggauaaacugggaggcc

SEQ ID NO: 1768410 - RNA, 19 nt, Artificial Sequence
  Description of Artificial Sequence: Synthetic oligonucleotide
caugagccagguacggaga

SEQ ID NO: 1768411 - RNA, 19 nt, Artificial Sequence
  Description of Artificial Sequence: Synthetic oligonucleotide
guacuguaauugguacggc

SEQ ID NO: 1768412 - RNA, 19 nt, Artificial Sequence
  Description of Artificial Sequence: Synthetic oligonucleotide
gacuccauuugcucauacu

SEQ ID NO: 1768413 - RNA, 19 nt, Artificial Sequence
  Description of Artificial Sequence: Synthetic oligonucleotide
acacacuaucagacaguuc

SEQ ID NO: 1768414 - RNA, 19 nt, Artificial Sequence
  Description of Artificial Sequence: Synthetic oligonucleotide
agugccccucugaugucac

SEQ ID NO: 1768415 - RNA, 19 nt, Artificial Sequence
  Description of Artificial Sequence: Synthetic oligonucleotide
cuuggcgaugggcugguaa

SEQ ID NO: 1768416 - RNA, 19 nt, Artificial Sequence
  Description of Artificial Sequence: Synthetic oligonucleotide
ccuuuagagacugcacggc

SEQ ID NO: 1768417 - RNA, 19 nt, Artificial Sequence
  Description of Artificial Sequence: Synthetic oligonucleotide
gccacguggauacagucaa

SEQ ID NO: 1768418 - RNA, 19 nt, Artificial Sequence
  Description of Artificial Sequence: Synthetic oligonucleotide
ccauuugcucauacucgcc

SEQ ID NO: 1768419 - RNA, 19 nt, Artificial Sequence
  Description of Artificial Sequence: Synthetic oligonucleotide
uggcgaugggcugguaaga

SEQ ID NO: 1768420 - RNA, 19 nt, Artificial Sequence
  Description of Artificial Sequence: Synthetic oligonucleotide
cuagaucgcugaguagguc

SEQ ID NO: 1768421 - RNA, 19 nt, Artificial Sequence
  Description of Artificial Sequence: Synthetic oligonucleotide
uuagugccccucugauguc

SEQ ID NO: 1768422 - RNA, 19 nt, Artificial Sequence
  Description of Artificial Sequence: Synthetic oligonucleotide
cacguaagagaggucuuca

SEQ ID NO: 1768423 - RNA, 19 nt, Artificial Sequence
  Description of Artificial Sequence: Synthetic oligonucleotide
auacagucaaccaccccua

SEQ ID NO: 1768424 - RNA, 19 nt, Artificial Sequence
  Description of Artificial Sequence: Synthetic oligonucleotide
agguacggagaaagaagga

SEQ ID NO: 1768425 - RNA, 19 nt, Artificial Sequence
  Description of Artificial Sequence: Synthetic oligonucleotide
augaggauauacacuuaua

SEQ ID NO: 1768426 - RNA, 19 nt, Artificial Sequence
  Description of Artificial Sequence: Synthetic oligonucleotide
cuaauagcccuagaucgcu

SEQ ID NO: 1768427 - RNA, 19 nt, Artificial Sequence
  Description of Artificial Sequence: Synthetic oligonucleotide
gugacaugggcaacacauc

SEQ ID NO: 1768428 - RNA, 19 nt, Artificial Sequence
  Description of Artificial Sequence: Synthetic oligonucleotide
agcccaaugcugccaggau

SEQ ID NO: 1768429 - RNA, 19 nt, Artificial Sequence
  Description of Artificial Sequence: Synthetic oligonucleotide
cagaggguucgcaaagucu

SEQ ID NO: 1768430 - RNA, 19 nt, Artificial Sequence
  Description of Artificial Sequence: Synthetic oligonucleotide
gaggguucgcaaagucuuc

SEQ ID NO: 1768431 - RNA, 19 nt, Artificial Sequence
  Description of Artificial Sequence: Synthetic oligonucleotide
augggcccuauuauagcga

SEQ ID NO: 1768432 - RNA, 19 nt, Artificial Sequence
  Description of Artificial Sequence: Synthetic oligonucleotide
uccggugaccucgaccaua

SEQ ID NO: 1768433 - RNA, 19 nt, Artificial Sequence
  Description of Artificial Sequence: Synthetic oligonucleotide
caaugaggauauacacuua

SEQ ID NO: 1768434 - RNA, 19 nt, Artificial Sequence
  Description of Artificial Sequence: Synthetic oligonucleotide
ggcgaugggcugguaagag

SEQ ID NO: 1768435 - RNA, 19 nt, Artificial Sequence
  Description of Artificial Sequence: Synthetic oligonucleotide
ugguacggccauagucaau

SEQ ID NO: 1768436 - RNA, 19 nt, Artificial Sequence
  Description of Artificial Sequence: Synthetic oligonucleotide
gcagaggguucgcaaaguc

SEQ ID NO: 1768437 - RNA, 19 nt, Artificial Sequence
  Description of Artificial Sequence: Synthetic oligonucleotide
gguccagucccuggagagg

SEQ ID NO: 1768438 - RNA, 19 nt, Artificial Sequence
  Description of Artificial Sequence: Synthetic oligonucleotide
auaaacugggaggcccuuu

SEQ ID NO: 1768439 - RNA, 19 nt, Artificial Sequence
  Description of Artificial Sequence: Synthetic oligonucleotide
uggagucaugagccaggua

SEQ ID NO: 1768440 - RNA, 19 nt, Artificial Sequence
  Description of Artificial Sequence: Synthetic oligonucleotide
cacuaucagacaguucaaa

SEQ ID NO: 1768441 - RNA, 19 nt, Artificial Sequence
  Description of Artificial Sequence: Synthetic oligonucleotide
uugcagaaugggcccuauu

SEQ ID NO: 1768442 - RNA, 19 nt, Artificial Sequence
  Description of Artificial Sequence: Synthetic oligonucleotide
ccuuucacacuaacuaaaa

SEQ ID NO: 1768443 - RNA, 19 nt, Artificial Sequence
  Description of Artificial Sequence: Synthetic oligonucleotide
ucggcucauagaggcuuga

SEQ ID NO: 1768444 - RNA, 19 nt, Artificial Sequence
  Description of Artificial Sequence: Synthetic oligonucleotide
ggcucauagaggcuugacu

SEQ ID NO: 1768445 - RNA, 19 nt, Artificial Sequence
  Description of Artificial Sequence: Synthetic oligonucleotide
guacggccauagucaauga

SEQ ID NO: 1768446 - RNA, 19 nt, Artificial Sequence
  Description of Artificial Sequence: Synthetic oligonucleotide
cgaccauacagcaagagau

SEQ ID NO: 1768447 - RNA, 19 nt, Artificial Sequence
  Description of Artificial Sequence: Synthetic oligonucleotide
aucggcucauagaggcuug

SEQ ID NO: 1768448 - RNA, 19 nt, Artificial Sequence
  Description of Artificial Sequence: Synthetic oligonucleotide
cccuucgauccauccaggc

SEQ ID NO: 1768449 - RNA, 19 nt, Artificial Sequence
  Description of Artificial Sequence: Synthetic oligonucleotide
ggacuccauuugcucauac

SEQ ID NO: 1768450 - RNA, 19 nt, Artificial Sequence
  Description of Artificial Sequence: Synthetic oligonucleotide
ggucuaagguccggugacc

SEQ ID NO: 1768451 - RNA, 19 nt, Artificial Sequence
  Description of Artificial Sequence: Synthetic oligonucleotide
ccggugaccucgaccauac

SEQ ID NO: 1768452 - RNA, 19 nt, Artificial Sequence
  Description of Artificial Sequence: Synthetic oligonucleotide
cuguaauugguacggccau

SEQ ID NO: 1768453 - RNA, 19 nt, Artificial Sequence
  Description of Artificial Sequence: Synthetic oligonucleotide
ccugccaauccauagaauu

SEQ ID NO: 1768454 - RNA, 19 nt, Artificial Sequence
  Description of Artificial Sequence: Synthetic oligonucleotide
acaucggcucauagaggcu

SEQ ID NO: 1768455 - RNA, 19 nt, Artificial Sequence
  Description of Artificial Sequence: Synthetic oligonucleotide
gcaagagaucacagucaag

SEQ ID NO: 1768456 - RNA, 19 nt, Artificial Sequence
  Description of Artificial Sequence: Synthetic oligonucleotide
ccuucgauccauccaggca

SEQ ID NO: 1768457 - RNA, 19 nt, Artificial Sequence
  Description of Artificial Sequence: Synthetic oligonucleotide
gcagaaugggcccuauuau

SEQ ID NO: 1768458 - RNA, 19 nt, Artificial Sequence
  Description of Artificial Sequence: Synthetic oligonucleotide
ggcuguucaauggguccag

SEQ ID NO: 1768459 - RNA, 19 nt, Artificial Sequence
  Description of Artificial Sequence: Synthetic oligonucleotide
gucuaagguccggugaccu

SEQ ID NO: 1768460 - RNA, 19 nt, Artificial Sequence
  Description of Artificial Sequence: Synthetic oligonucleotide
cauagaggcuugacuaauu

SEQ ID NO: 1768461 - RNA, 19 nt, Artificial Sequence
  Description of Artificial Sequence: Synthetic oligonucleotide
caagggcuucagugacaug

SEQ ID NO: 1768462 - RNA, 19 nt, Artificial Sequence
  Description of Artificial Sequence: Synthetic oligonucleotide
aguugcagaaugggcccua

SEQ ID NO: 1768463 - RNA, 19 nt, Artificial Sequence
  Description of Artificial Sequence: Synthetic oligonucleotide
guacugcagugcucccuuc

SEQ ID NO: 1768464 - RNA, 19 nt, Artificial Sequence
  Description of Artificial Sequence: Synthetic oligonucleotide
caugggcaacacaucggcu

SEQ ID NO: 1768465 - RNA, 19 nt, Artificial Sequence
  Description of Artificial Sequence: Synthetic oligonucleotide
accaccccuaucaccccug

SEQ ID NO: 1768466 - RNA, 19 nt, Artificial Sequence
  Description of Artificial Sequence: Synthetic oligonucleotide
ggaaccuagagcagagggu

SEQ ID NO: 1768467 - RNA, 19 nt, Artificial Sequence
  Description of Artificial Sequence: Synthetic oligonucleotide
cacaguccuggaggcuacc

SEQ ID NO: 1768468 - RNA, 19 nt, Artificial Sequence
  Description of Artificial Sequence: Synthetic oligonucleotide
ggugaguacugcagugcuc

SEQ ID NO: 1768469 - RNA, 19 nt, Artificial Sequence
  Description of Artificial Sequence: Synthetic oligonucleotide
cggucuaagguccggugac

SEQ ID NO: 1768470 - RNA, 19 nt, Artificial Sequence
  Description of Artificial Sequence: Synthetic oligonucleotide
ccaggcaucggaaccuaga

SEQ ID NO: 1768471 - RNA, 19 nt, Artificial Sequence
  Description of Artificial Sequence: Synthetic oligonucleotide
gcccuagaucgcugaguag

SEQ ID NO: 1768472 - RNA, 19 nt, Artificial Sequence
  Description of Artificial Sequence: Synthetic oligonucleotide
ggugccuugauggccacgu

SEQ ID NO: 1768473 - RNA, 19 nt, Artificial Sequence
  Description of Artificial Sequence: Synthetic oligonucleotide
cuaagucuagggacuccau

SEQ ID NO: 1768474 - RNA, 19 nt, Artificial Sequence
  Description of Artificial Sequence: Synthetic oligonucleotide
cucugggcuaauagcccua

SEQ ID NO: 1768475 - RNA, 19 nt, Artificial Sequence
  Description of Artificial Sequence: Synthetic oligonucleotide
gaccucgaccauacagcaa

SEQ ID NO: 1768476 - RNA, 19 nt, Artificial Sequence
  Description of Artificial Sequence: Synthetic oligonucleotide
ggccacguggauacaguca

SEQ ID NO: 1768477 - RNA, 19 nt, Artificial Sequence
  Description of Artificial Sequence: Synthetic oligonucleotide
cccuuucgguucacguaag

SEQ ID NO: 1768478 - RNA, 19 nt, Artificial Sequence
  Description of Artificial Sequence: Synthetic oligonucleotide
gccagcuugucucuacagu

SEQ ID NO: 1768479 - RNA, 19 nt, Artificial Sequence
  Description of Artificial Sequence: Synthetic oligonucleotide
ggagaggaccaaacaucca

SEQ ID NO: 1768480 - RNA, 19 nt, Artificial Sequence
  Description of Artificial Sequence: Synthetic oligonucleotide
ccucuaagucuagggacuc

SEQ ID NO: 1768481 - RNA, 19 nt, Artificial Sequence
  Description of Artificial Sequence: Synthetic oligonucleotide
gaggcuaccuggccagcuu

SEQ ID NO: 1768482 - RNA, 19 nt, Artificial Sequence
  Description of Artificial Sequence: Synthetic oligonucleotide
ccuagagcagaggguucgc

SEQ ID NO: 1768483 - RNA, 19 nt, Artificial Sequence
  Description of Artificial Sequence: Synthetic oligonucleotide
gccucuaagucuagggacu

SEQ ID NO: 1768484 - RNA, 19 nt, Artificial Sequence
  Description of Artificial Sequence: Synthetic oligonucleotide
gcugguaagagggaacauu

SEQ ID NO: 1768485 - RNA, 19 nt, Artificial Sequence
  Description of Artificial Sequence: Synthetic oligonucleotide
caucggcucauagaggcuu

SEQ ID NO: 1768486 - RNA, 19 nt, Artificial Sequence
  Description of Artificial Sequence: Synthetic oligonucleotide
cucgcccucagguggcugu

SEQ ID NO: 1768487 - RNA, 19 nt, Artificial Sequence
  Description of Artificial Sequence: Synthetic oligonucleotide
ccaccccuaucaccccugg

SEQ ID NO: 1768488 - RNA, 19 nt, Artificial Sequence
  Description of Artificial Sequence: Synthetic oligonucleotide
gguucacguaagagagguc

SEQ ID NO: 1768489 - RNA, 19 nt, Artificial Sequence
  Description of Artificial Sequence: Synthetic oligonucleotide
aucccguguuccagggaaa

SEQ ID NO: 1768490 - RNA, 19 nt, Artificial Sequence
  Description of Artificial Sequence: Synthetic oligonucleotide
ccguguuccagggaaaugu

SEQ ID NO: 1768491 - RNA, 19 nt, Artificial Sequence
  Description of Artificial Sequence: Synthetic oligonucleotide
cccuaucaccccuggcauc

SEQ ID NO: 1768492 - RNA, 19 nt, Artificial Sequence
  Description of Artificial Sequence: Synthetic oligonucleotide
caucagcuggaaaguggau

SEQ ID NO: 1768493 - RNA, 19 nt, Artificial Sequence
  Description of Artificial Sequence: Synthetic oligonucleotide
ccuagaucgcugaguaggu

SEQ ID NO: 1768494 - RNA, 19 nt, Artificial Sequence
  Description of Artificial Sequence: Synthetic oligonucleotide
ccuuucgguucacguaaga

SEQ ID NO: 1768495 - RNA, 19 nt, Artificial Sequence
  Description of Artificial Sequence: Synthetic oligonucleotide
gggugccuugauggccacg

SEQ ID NO: 1768496 - RNA, 19 nt, Artificial Sequence
  Description of Artificial Sequence: Synthetic oligonucleotide
gcgauacucugcuggaguu

SEQ ID NO: 1768497 - RNA, 19 nt, Artificial Sequence
  Description of Artificial Sequence: Synthetic oligonucleotide
gcuggaguuucagcaauau

SEQ ID NO: 1768498 - RNA, 19 nt, Artificial Sequence
  Description of Artificial Sequence: Synthetic oligonucleotide
cagcuggaaaguggauaaa

SEQ ID NO: 1768499 - RNA, 19 nt, Artificial Sequence
  Description of Artificial Sequence: Synthetic oligonucleotide
cggucagccucuaagucua

SEQ ID NO: 1768500 - RNA, 19 nt, Artificial Sequence
  Description of Artificial Sequence: Synthetic oligonucleotide
cccguguuccagggaaaug

SEQ ID NO: 1768501 - RNA, 19 nt, Artificial Sequence
  Description of Artificial Sequence: Synthetic oligonucleotide
cugcagugcucccuucgau

SEQ ID NO: 1768502 - RNA, 19 nt, Artificial Sequence
  Description of Artificial Sequence: Synthetic oligonucleotide
ucgcccucagguggcuguu

SEQ ID NO: 1768503 - RNA, 19 nt, Artificial Sequence
  Description of Artificial Sequence: Synthetic oligonucleotide
ccauccgagucuggaagga

SEQ ID NO: 1768504 - RNA, 19 nt, Artificial Sequence
  Description of Artificial Sequence: Synthetic oligonucleotide
ggauucggucagccucuaa

SEQ ID NO: 1768505 - RNA, 19 nt, Artificial Sequence
  Description of Artificial Sequence: Synthetic oligonucleotide
ggcaacacaucggcucaua

SEQ ID NO: 1768506 - RNA, 19 nt, Artificial Sequence
  Description of Artificial Sequence: Synthetic oligonucleotide
ccugccggauucggucagc

SEQ ID NO: 1768507 - RNA, 19 nt, Artificial Sequence
  Description of Artificial Sequence: Synthetic oligonucleotide
gugcucccuucgauccauc

SEQ ID NO: 1768508 - RNA, 19 nt, Artificial Sequence
  Description of Artificial Sequence: Synthetic oligonucleotide
gccaauccauagaauucau

SEQ ID NO: 1768509 - RNA, 19 nt, Artificial Sequence
  Description of Artificial Sequence: Synthetic oligonucleotide
gcccuauuauagcgauacu

SEQ ID NO: 1768510 - RNA, 19 nt, Artificial Sequence
  Description of Artificial Sequence: Synthetic oligonucleotide
ggcaucccugccaauccau

SEQ ID NO: 1768511 - RNA, 19 nt, Artificial Sequence
  Description of Artificial Sequence: Synthetic oligonucleotide
cggcucauagaggcuugac

SEQ ID NO: 1768512 - RNA, 19 nt, Artificial Sequence
  Description of Artificial Sequence: Synthetic oligonucleotide
guccggugaccucgaccau

SEQ ID NO: 1768513 - RNA, 19 nt, Artificial Sequence
  Description of Artificial Sequence: Synthetic oligonucleotide
gggcccuauuauagcgaua

SEQ ID NO: 1768514 - RNA, 19 nt, Artificial Sequence
  Description of Artificial Sequence: Synthetic oligonucleotide
ccgagucuggaaggaaccu

SEQ ID NO: 1768515 - RNA, 19 nt, Artificial Sequence
  Description of Artificial Sequence: Synthetic oligonucleotide
cguguuccagggaaauguu

SEQ ID NO: 1768516 - RNA, 19 nt, Artificial Sequence
  Description of Artificial Sequence: Synthetic oligonucleotide
gcuugucucuacagucauu

SEQ ID NO: 1768517 - RNA, 19 nt, Artificial Sequence
  Description of Artificial Sequence: Synthetic oligonucleotide
gggcaacacaucggcucau

SEQ ID NO: 1768518 - RNA, 19 nt, Artificial Sequence
  Description of Artificial Sequence: Synthetic oligonucleotide
cggauucggucagccucua

SEQ ID NO: 1768519 - RNA, 19 nt, Artificial Sequence
  Description of Artificial Sequence: Synthetic oligonucleotide
aaugucaugauuuucacag

SEQ ID NO: 1768520 - RNA, 19 nt, Artificial Sequence
  Description of Artificial Sequence: Synthetic oligonucleotide
uauagaaauaaaacaaggg

SEQ ID NO: 1768521 - RNA, 19 nt, Artificial Sequence
  Description of Artificial Sequence: Synthetic oligonucleotide
aaaagcuacacaucuuucc

SEQ ID NO: 1768522 - RNA, 19 nt, Artificial Sequence
  Description of Artificial Sequence: Synthetic oligonucleotide
  modified_base (10)..(10): a, c, u, g, unknown or other
acugacaucngguuggacc

SEQ ID NO: 1768523 - RNA, 19 nt, Artificial Sequence
  Description of Artificial Sequence: Synthetic oligonucleotide
auuugaacaaaacuaaguc

SEQ ID NO: 1768524 - RNA, 19 nt, Artificial Sequence
  Description of Artificial Sequence: Synthetic oligonucleotide
aacauuaccaaagauggac

SEQ ID NO: 1768525 - RNA, 19 nt, Artificial Sequence
  Description of Artificial Sequence: Synthetic oligonucleotide
aaaacuaagucucccuagc

SEQ ID NO: 1768526 - RNA, 19 nt, Artificial Sequence
  Description of Artificial Sequence: Synthetic oligonucleotide
uuagccaugauaauauagg

SEQ ID NO: 1768527 - RNA, 19 nt, Artificial Sequence
  Description of Artificial Sequence: Synthetic oligonucleotide
acaaaagacccuuucaggc

SEQ ID NO: 1768528 - RNA, 19 nt, Artificial Sequence
  Description of Artificial Sequence: Synthetic oligonucleotide
uaauucauguaacaguggg

SEQ ID NO: 1768529 - RNA, 19 nt, Artificial Sequence
  Description of Artificial Sequence: Synthetic oligonucleotide
ucuaaaauugaccucaggu

SEQ ID NO: 1768530 - RNA, 19 nt, Artificial Sequence
  Description of Artificial Sequence: Synthetic oligonucleotide
aguaucacgaccuaaaagu

SEQ ID NO: 1768531 - RNA, 19 nt, Artificial Sequence
  Description of Artificial Sequence: Synthetic oligonucleotide
uuauauuaagggcagcagg

SEQ ID NO: 1768532 - RNA, 19 nt, Artificial Sequence
  Description of Artificial Sequence: Synthetic oligonucleotide
auuucacugaacuauuagc

SEQ ID NO: 1768533 - RNA, 19 nt, Artificial Sequence
  Description of Artificial Sequence: Synthetic oligonucleotide
auaauauaggaacacuugg

SEQ ID NO: 1768534 - RNA, 19 nt, Artificial Sequence
  Description of Artificial Sequence: Synthetic oligonucleotide
aagcuauagaaauaaaaca

SEQ ID NO: 1768535 - RNA, 19 nt, Artificial Sequence
  Description of Artificial Sequence: Synthetic oligonucleotide
uuauuuaugcuuuggauac

SEQ ID NO: 1768536 - RNA, 19 nt, Artificial Sequence
  Description of Artificial Sequence: Synthetic oligonucleotide
  modified_base (19)..(19): a, c, u, g, unknown or other
aaggaaacgacugacaucn

SEQ ID NO: 1768537 - RNA, 19 nt, Artificial Sequence
  Description of Artificial Sequence: Synthetic oligonucleotide
uauaucgaaguucaguuca

SEQ ID NO: 1768538 - RNA, 19 nt, Artificial Sequence
  Description of Artificial Sequence: Synthetic oligonucleotide
aacuaucaaacagaaaagg

SEQ ID NO: 1768539 - RNA, 19 nt, Artificial Sequence
  Description of Artificial Sequence: Synthetic oligonucleotide
uuuagagucacaaacuauc

SEQ ID NO: 1768540 - RNA, 19 nt, Artificial Sequence
  Description of Artificial Sequence: Synthetic oligonucleotide
cuguucuuaaccuaguggg

SEQ ID NO: 1768541 - RNA, 19 nt, Artificial Sequence
  Description of Artificial Sequence: Synthetic oligonucleotide
aaacuaagucucccuagcc

SEQ ID NO: 1768542 - RNA, 19 nt, Artificial Sequence
  Description of Artificial Sequence: Synthetic oligonucleotide
ugaacuauuagccaugaua

SEQ ID NO: 1768543 - RNA, 19 nt, Artificial Sequence
  Description of Artificial Sequence: Synthetic oligonucleotide
cagaucuuaaugcacaugg

SEQ ID NO: 1768544 - RNA, 19 nt, Artificial Sequence
  Description of Artificial Sequence: Synthetic oligonucleotide
uauaggaacacuugggaca

SEQ ID NO: 1768545 - RNA, 19 nt, Artificial Sequence
  Description of Artificial Sequence: Synthetic oligonucleotide
uaaauuaauucauguaaca

SEQ ID NO: 1768546 - RNA, 19 nt, Artificial Sequence
  Description of Artificial Sequence: Synthetic oligonucleotide
ucuugcacagaucuuaaug

SEQ ID NO: 1768547 - RNA, 19 nt, Artificial Sequence
  Description of Artificial Sequence: Synthetic oligonucleotide
auauaggaacacuugggac

SEQ ID NO: 1768548 - RNA, 19 nt, Artificial Sequence
  Description of Artificial Sequence: Synthetic oligonucleotide
aaguaucacgaccuaaaag

SEQ ID NO: 1768549 - RNA, 19 nt, Artificial Sequence
  Description of Artificial Sequence: Synthetic oligonucleotide
aaaggaaacgacugacauc

SEQ ID NO: 1768550 - RNA, 19 nt, Artificial Sequence
  Description of Artificial Sequence: Synthetic oligonucleotide
ccaacauuaccaaagaugg

SEQ ID NO: 1768551 - RNA, 19 nt, Artificial Sequence
  Description of Artificial Sequence: Synthetic oligonucleotide
uauguauaccaacauuacc

SEQ ID NO: 1768552 - RNA, 19 nt, Artificial Sequence
  Description of Artificial Sequence: Synthetic oligonucleotide
aaagcuacacaucuuucca

SEQ ID NO: 1768553 - RNA, 19 nt, Artificial Sequence
  Description of Artificial Sequence: Synthetic oligonucleotide
aauucauguaacagugggc

SEQ ID NO: 1768554 - RNA, 19 nt, Artificial Sequence
  Description of Artificial Sequence: Synthetic oligonucleotide
gauaauauaggaacacuug

SEQ ID NO: 1768555 - RNA, 19 nt, Artificial Sequence
  Description of Artificial Sequence: Synthetic oligonucleotide
  modified_base (14)..(14): a, c, u, g, unknown or other
aacgacugacaucngguug

SEQ ID NO: 1768556 - RNA, 19 nt, Artificial Sequence
  Description of Artificial Sequence: Synthetic oligonucleotide
uuaauucauguaacagugg

SEQ ID NO: 1768557 - RNA, 19 nt, Artificial Sequence
  Description of Artificial Sequence: Synthetic oligonucleotide
uguaacagugggcauuuag

SEQ ID NO: 1768558 - RNA, 19 nt, Artificial Sequence
  Description of Artificial Sequence: Synthetic oligonucleotide
uaacagugggcauuuagag

SEQ ID NO: 1768559 - RNA, 19 nt, Artificial Sequence
  Description of Artificial Sequence: Synthetic oligonucleotide
  modified_base (4)..(4): a, c, u, g, unknown or other
aucngguuggaccugagcu

SEQ ID NO: 1768560 - RNA, 19 nt, Artificial Sequence
  Description of Artificial Sequence: Synthetic oligonucleotide
aacugaaagacggcaaagg

SEQ ID NO: 1768561 - RNA, 19 nt, Artificial Sequence
  Description of Artificial Sequence: Synthetic oligonucleotide
uauuaagggcagcaggaag

SEQ ID NO: 1768562 - RNA, 19 nt, Artificial Sequence
  Description of Artificial Sequence: Synthetic oligonucleotide
ugauaauauaggaacacuu

SEQ ID NO: 1768563 - RNA, 19 nt, Artificial Sequence
  Description of Artificial Sequence: Synthetic oligonucleotide
uauuaauagugauuugaac

SEQ ID NO: 1768564 - RNA, 19 nt, Artificial Sequence
  Description of Artificial Sequence: Synthetic oligonucleotide
ugucaugauuuucacagcu

SEQ ID NO: 1768565 - RNA, 19 nt, Artificial Sequence
  Description of Artificial Sequence: Synthetic oligonucleotide
uuauguauaccaacauuac

SEQ ID NO: 1768566 - RNA, 19 nt, Artificial Sequence
  Description of Artificial Sequence: Synthetic oligonucleotide
agaauucaaauucaacacu

SEQ ID NO: 1768567 - RNA, 19 nt, Artificial Sequence
  Description of Artificial Sequence: Synthetic oligonucleotide
auguauaccaacauuacca

SEQ ID NO: 1768568 - RNA, 19 nt, Artificial Sequence
  Description of Artificial Sequence: Synthetic oligonucleotide
acuaagucucccuagccag

SEQ ID NO: 1768569 - RNA, 19 nt, Artificial Sequence
  Description of Artificial Sequence: Synthetic oligonucleotide
aaagacggcaaaggaaacg

SEQ ID NO: 1768570 - RNA, 19 nt, Artificial Sequence
  Description of Artificial Sequence: Synthetic oligonucleotide
ugaacaaaacuaagucucc

SEQ ID NO: 1768571 - RNA, 19 nt, Artificial Sequence
  Description of Artificial Sequence: Synthetic oligonucleotide
agucccgcagacuugcugc

SEQ ID NO: 1768572 - RNA, 19 nt, Artificial Sequence
  Description of Artificial Sequence: Synthetic oligonucleotide
uuagagucacaaacuauca

SEQ ID NO: 1768573 - RNA, 19 nt, Artificial Sequence
  Description of Artificial Sequence: Synthetic oligonucleotide
gaugaacagagagaaaagc

SEQ ID NO: 1768574 - RNA, 19 nt, Artificial Sequence
  Description of Artificial Sequence: Synthetic oligonucleotide
aacuaagucucccuagcca

SEQ ID NO: 1768575 - RNA, 19 nt, Artificial Sequence
  Description of Artificial Sequence: Synthetic oligonucleotide
agcugaacaggacagcagg

SEQ ID NO: 1768576 - RNA, 19 nt, Artificial Sequence
  Description of Artificial Sequence: Synthetic oligonucleotide
aaagauggacacauuucac

SEQ ID NO: 1768577 - RNA, 19 nt, Artificial Sequence
  Description of Artificial Sequence: Synthetic oligonucleotide
ucagucagcucuuauauua

SEQ ID NO: 1768578 - RNA, 19 nt, Artificial Sequence
  Description of Artificial Sequence: Synthetic oligonucleotide
ucuuauauuaagggcagca

SEQ ID NO: 1768579 - RNA, 19 nt, Artificial Sequence
  Description of Artificial Sequence: Synthetic oligonucleotide
uuuggauacagccacccau

SEQ ID NO: 1768580 - RNA, 19 nt, Artificial Sequence
  Description of Artificial Sequence: Synthetic oligonucleotide
aagcuuuugcugcccaacg

SEQ ID NO: 1768581 - RNA, 19 nt, Artificial Sequence
  Description of Artificial Sequence: Synthetic oligonucleotide
ucuacuuuaacaggugaug

SEQ ID NO: 1768582 - RNA, 19 nt, Artificial Sequence
  Description of Artificial Sequence: Synthetic oligonucleotide
agagucacaaacuaucaaa

SEQ ID NO: 1768583 - RNA, 19 nt, Artificial Sequence
  Description of Artificial Sequence: Synthetic oligonucleotide
ggagagaaaaggaagagag

SEQ ID NO: 1768584 - RNA, 19 nt, Artificial Sequence
  Description of Artificial Sequence: Synthetic oligonucleotide
agcuaucucuucuuucccc

SEQ ID NO: 1768585 - RNA, 19 nt, Artificial Sequence
  Description of Artificial Sequence: Synthetic oligonucleotide
uuaacaggugaugagguac

SEQ ID NO: 1768586 - RNA, 19 nt, Artificial Sequence
  Description of Artificial Sequence: Synthetic oligonucleotide
uaucacgaccuaaaaguug

SEQ ID NO: 1768587 - RNA, 19 nt, Artificial Sequence
  Description of Artificial Sequence: Synthetic oligonucleotide
ggauaugucccagagaagg

SEQ ID NO: 1768588 - RNA, 19 nt, Artificial Sequence
  Description of Artificial Sequence: Synthetic oligonucleotide
aaaagacccuuucaggcaa

SEQ ID NO: 1768589 - RNA, 19 nt, Artificial Sequence
  Description of Artificial Sequence: Synthetic oligonucleotide
aguucuauaucgaaguuca

SEQ ID NO: 1768590 - RNA, 19 nt, Artificial Sequence
  Description of Artificial Sequence: Synthetic oligonucleotide
uacuuuaacaggugaugag

SEQ ID NO: 1768591 - RNA, 19 nt, Artificial Sequence
  Description of Artificial Sequence: Synthetic oligonucleotide
acgaccuaaaaguuggucu

SEQ ID NO: 1768592 - RNA, 19 nt, Artificial Sequence
  Description of Artificial Sequence: Synthetic oligonucleotide
aacuguaggggcauuaugu

SEQ ID NO: 1768593 - RNA, 19 nt, Artificial Sequence
  Description of Artificial Sequence: Synthetic oligonucleotide
uguucuuaaccuagugggc

SEQ ID NO: 1768594 - RNA, 19 nt, Artificial Sequence
  Description of Artificial Sequence: Synthetic oligonucleotide
ugcuaaaagggaauauuaa

SEQ ID NO: 1768595 - RNA, 19 nt, Artificial Sequence
  Description of Artificial Sequence: Synthetic oligonucleotide
gguacauccagaugaacag

SEQ ID NO: 1768596 - RNA, 19 nt, Artificial Sequence
  Description of Artificial Sequence: Synthetic oligonucleotide
agugggaucuaaaauugac

SEQ ID NO: 1768597 - RNA, 19 nt, Artificial Sequence
  Description of Artificial Sequence: Synthetic oligonucleotide
aaggcccuuuucaugauac

SEQ ID NO: 1768598 - RNA, 19 nt, Artificial Sequence
  Description of Artificial Sequence: Synthetic oligonucleotide
gaacacuugggacagcaac

SEQ ID NO: 1768599 - RNA, 19 nt, Artificial Sequence
  Description of Artificial Sequence: Synthetic oligonucleotide
uguauaccaacauuaccaa

SEQ ID NO: 1768600 - RNA, 19 nt, Artificial Sequence
  Description of Artificial Sequence: Synthetic oligonucleotide
auuagccaugauaauauag

SEQ ID NO: 1768601 - RNA, 19 nt, Artificial Sequence
  Description of Artificial Sequence: Synthetic oligonucleotide
uguaggggcauuauguaua

SEQ ID NO: 1768602 - RNA, 19 nt, Artificial Sequence
  Description of Artificial Sequence: Synthetic oligonucleotide
aauagugauuugaacaaaa

SEQ ID NO: 1768603 - RNA, 19 nt, Artificial Sequence
  Description of Artificial Sequence: Synthetic oligonucleotide
cauuucacugaacuauuag

SEQ ID NO: 1768604 - RNA, 19 nt, Artificial Sequence
  Description of Artificial Sequence: Synthetic oligonucleotide
uaaccuagugggcagggga

SEQ ID NO: 1768605 - RNA, 19 nt, Artificial Sequence
  Description of Artificial Sequence: Synthetic oligonucleotide
uucuauaucgaaguucagu

SEQ ID NO: 1768606 - RNA, 19 nt, Artificial Sequence
  Description of Artificial Sequence: Synthetic oligonucleotide
auagugauuugaacaaaac

SEQ ID NO: 1768607 - RNA, 19 nt, Artificial Sequence
  Description of Artificial Sequence: Synthetic oligonucleotide
uagccaugauaauauagga

SEQ ID NO: 1768608 - RNA, 19 nt, Artificial Sequence
  Description of Artificial Sequence: Synthetic oligonucleotide
aaggcaaaagcuacacauc

SEQ ID NO: 1768609 - RNA, 19 nt, Artificial Sequence
  Description of Artificial Sequence: Synthetic oligonucleotide
aagagagggcacuaaugga

SEQ ID NO: 1768610 - RNA, 19 nt, Artificial Sequence
  Description of Artificial Sequence: Synthetic oligonucleotide
aaguucaguucaggaaagc

SEQ ID NO: 1768611 - RNA, 19 nt, Artificial Sequence
  Description of Artificial Sequence: Synthetic oligonucleotide
gcuggaaacugaaagacgg

SEQ ID NO: 1768612 - RNA, 19 nt, Artificial Sequence
  Description of Artificial Sequence: Synthetic oligonucleotide
aggaggaaaguaucacgac

SEQ ID NO: 1768613 - RNA, 19 nt, Artificial Sequence
  Description of Artificial Sequence: Synthetic oligonucleotide
uucuuaaccuagugggcag

SEQ ID NO: 1768614 - RNA, 19 nt, Artificial Sequence
  Description of Artificial Sequence: Synthetic oligonucleotide
acuaucaaacagaaaagga

SEQ ID NO: 1768615 - RNA, 19 nt, Artificial Sequence
  Description of Artificial Sequence: Synthetic oligonucleotide
ucgaaguucaguucaggaa

SEQ ID NO: 1768616 - RNA, 19 nt, Artificial Sequence
  Description of Artificial Sequence: Synthetic oligonucleotide
cauuaccaaagauggacac

SEQ ID NO: 1768617 - RNA, 19 nt, Artificial Sequence
  Description of Artificial Sequence: Synthetic oligonucleotide
cuuauauuaagggcagcag

SEQ ID NO: 1768618 - RNA, 19 nt, Artificial Sequence
  Description of Artificial Sequence: Synthetic oligonucleotide
ggacauuccauaccguugg

SEQ ID NO: 1768619 - RNA, 19 nt, Artificial Sequence
  Description of Artificial Sequence: Synthetic oligonucleotide
uuggaccugagcuaucucu

SEQ ID NO: 1768620 - RNA, 19 nt, Artificial Sequence
  Description of Artificial Sequence: Synthetic oligonucleotide
gagucacaaacuaucaaac

SEQ ID NO: 1768621 - RNA, 19 nt, Artificial Sequence
  Description of Artificial Sequence: Synthetic oligonucleotide
cagcucuuauauuaagggc

SEQ ID NO: 1768622 - RNA, 19 nt, Artificial Sequence
  Description of Artificial Sequence: Synthetic oligonucleotide
aucuaaaauugaccucagg

SEQ ID NO: 1768623 - RNA, 19 nt, Artificial Sequence
  Description of Artificial Sequence: Synthetic oligonucleotide
uugcacagaucuuaaugca

SEQ ID NO: 1768624 - RNA, 19 nt, Artificial Sequence
  Description of Artificial Sequence: Synthetic oligonucleotide
uaacaggugaugagguaca

SEQ ID NO: 1768625 - RNA, 19 nt, Artificial Sequence
  Description of Artificial Sequence: Synthetic oligonucleotide
  modified_base (13)..(13): a, c, u, g, unknown or other
acgacugacaucngguugg

SEQ ID NO: 1768626 - RNA, 19 nt, Artificial Sequence
  Description of Artificial Sequence: Synthetic oligonucleotide
cuggaugguggcuagauga

SEQ ID NO: 1768627 - RNA, 19 nt, Artificial Sequence
  Description of Artificial Sequence: Synthetic oligonucleotide
aucgaaguucaguucagga

SEQ ID NO: 1768628 - RNA, 19 nt, Artificial Sequence
  Description of Artificial Sequence: Synthetic oligonucleotide
accuaaaaguuggucuugc

SEQ ID NO: 1768629 - RNA, 19 nt, Artificial Sequence
  Description of Artificial Sequence: Synthetic oligonucleotide
accaaagauggacacauuu

SEQ ID NO: 1768630 - RNA, 19 nt, Artificial Sequence
  Description of Artificial Sequence: Synthetic oligonucleotide
agucuuguaaagacagaac

SEQ ID NO: 1768631 - RNA, 19 nt, Artificial Sequence
  Description of Artificial Sequence: Synthetic oligonucleotide
acauuccauaccguuggcc

SEQ ID NO: 1768632 - RNA, 19 nt, Artificial Sequence
  Description of Artificial Sequence: Synthetic oligonucleotide
aacacuugggacagcaacu

SEQ ID NO: 1768633 - RNA, 19 nt, Artificial Sequence
  Description of Artificial Sequence: Synthetic oligonucleotide
gauuugaacaaaacuaagu

SEQ ID NO: 1768634 - RNA, 19 nt, Artificial Sequence
  Description of Artificial Sequence: Synthetic oligonucleotide
gaaguucaguucaggaaag

SEQ ID NO: 1768635 - RNA, 19 nt, Artificial Sequence
  Description of Artificial Sequence: Synthetic oligonucleotide
ggaggaaaguaucacgacc

SEQ ID NO: 1768636 - RNA, 19 nt, Artificial Sequence
  Description of Artificial Sequence: Synthetic oligonucleotide
aggggaucaaagaaagcac

SEQ ID NO: 1768637 - RNA, 19 nt, Artificial Sequence
  Description of Artificial Sequence: Synthetic oligonucleotide
gaaaguaucacgaccuaaa

SEQ ID NO: 1768638 - RNA, 19 nt, Artificial Sequence
  Description of Artificial Sequence: Synthetic oligonucleotide
agagugggaucuaaaauug

SEQ ID NO: 1768639 - RNA, 19 nt, Artificial Sequence
  Description of Artificial Sequence: Synthetic oligonucleotide
uagagucacaaacuaucaa

SEQ ID NO: 1768640 - RNA, 19 nt, Artificial Sequence
  Description of Artificial Sequence: Synthetic oligonucleotide
  modified_base (17)..(17): a, c, u, g, unknown or other
ggaaacgacugacaucngg

SEQ ID NO: 1768641 - RNA, 19 nt, Artificial Sequence
  Description of Artificial Sequence: Synthetic oligonucleotide
agucagcucuuauauuaag

SEQ ID NO: 1768642 - RNA, 19 nt, Artificial Sequence
  Description of Artificial Sequence: Synthetic oligonucleotide
acaaaguucaggauucaca

SEQ ID NO: 1768643 - RNA, 19 nt, Artificial Sequence
  Description of Artificial Sequence: Synthetic oligonucleotide
ggaucuaaaauugaccuca

SEQ ID NO: 1768644 - RNA, 19 nt, Artificial Sequence
  Description of Artificial Sequence: Synthetic oligonucleotide
gagcccucacaaaagaccc

SEQ ID NO: 1768645 - RNA, 19 nt, Artificial Sequence
  Description of Artificial Sequence: Synthetic oligonucleotide
  modified_base (16)..(16): a, c, u, g, unknown or other
gaaacgacugacaucnggu

SEQ ID NO: 1768646 - RNA, 19 nt, Artificial Sequence
  Description of Artificial Sequence: Synthetic oligonucleotide
augauaauauaggaacacu

SEQ ID NO: 1768647 - RNA, 19 nt, Artificial Sequence
  Description of Artificial Sequence: Synthetic oligonucleotide
acccuuucaggcaaaauug

SEQ ID NO: 1768648 - RNA, 19 nt, Artificial Sequence
  Description of Artificial Sequence: Synthetic oligonucleotide
agacagucagucuuguaaa

SEQ ID NO: 1768649 - RNA, 19 nt, Artificial Sequence
  Description of Artificial Sequence: Synthetic oligonucleotide
  modified_base (15)..(15): a, c, u, g, unknown or other
aaacgacugacaucngguu

SEQ ID NO: 1768650 - RNA, 19 nt, Artificial Sequence
  Description of Artificial Sequence: Synthetic oligonucleotide
gugauuugaacaaaacuaa

SEQ ID NO: 1768651 - RNA, 19 nt, Artificial Sequence
  Description of Artificial Sequence: Synthetic oligonucleotide
cccaacgugugcuaaaagg

SEQ ID NO: 1768652 - RNA, 19 nt, Artificial Sequence
  Description of Artificial Sequence: Synthetic oligonucleotide
gaacuguaggggcauuaug

SEQ ID NO: 1768653 - RNA, 19 nt, Artificial Sequence
  Description of Artificial Sequence: Synthetic oligonucleotide
uggaccugcugccacaguc

SEQ ID NO: 1768654 - RNA, 19 nt, Artificial Sequence
  Description of Artificial Sequence: Synthetic oligonucleotide
agguacauccagaugaaca

SEQ ID NO: 1768655 - RNA, 19 nt, Artificial Sequence
  Description of Artificial Sequence: Synthetic oligonucleotide
cucaaguaaggcaaaagcu

SEQ ID NO: 1768656 - RNA, 19 nt, Artificial Sequence
  Description of Artificial Sequence: Synthetic oligonucleotide
gguugcuacagcuggaaac

SEQ ID NO: 1768657 - RNA, 19 nt, Artificial Sequence
  Description of Artificial Sequence: Synthetic oligonucleotide
caggaggaaaguaucacga

SEQ ID NO: 1768658 - RNA, 19 nt, Artificial Sequence
  Description of Artificial Sequence: Synthetic oligonucleotide
ucccuagccaguucuauau

SEQ ID NO: 1768659 - RNA, 19 nt, Artificial Sequence
  Description of Artificial Sequence: Synthetic oligonucleotide
uuggauacagccacccauu

SEQ ID NO: 1768660 - RNA, 19 nt, Artificial Sequence
  Description of Artificial Sequence: Synthetic oligonucleotide
  modified_base (3)..(3): a, c, u, g, unknown or other
ucngguuggaccugagcua

SEQ ID NO: 1768661 - RNA, 19 nt, Artificial Sequence
  Description of Artificial Sequence: Synthetic oligonucleotide
uuacuggcccagauaccag

SEQ ID NO: 1768662 - RNA, 19 nt, Artificial Sequence
  Description of Artificial Sequence: Synthetic oligonucleotide
agucucccuagccaguucu

SEQ ID NO: 1768663 - RNA, 19 nt, Artificial Sequence
  Description of Artificial Sequence: Synthetic oligonucleotide
guaacagugggcauuuaga

SEQ ID NO: 1768664 - RNA, 19 nt, Artificial Sequence
  Description of Artificial Sequence: Synthetic oligonucleotide
cacugcacaucucucaguc

SEQ ID NO: 1768665 - RNA, 19 nt, Artificial Sequence
  Description of Artificial Sequence: Synthetic oligonucleotide
uuaaccuagugggcagggg

SEQ ID NO: 1768666 - RNA, 19 nt, Artificial Sequence
  Description of Artificial Sequence: Synthetic oligonucleotide
uaauagugauuugaacaaa

SEQ ID NO: 1768667 - RNA, 19 nt, Artificial Sequence
  Description of Artificial Sequence: Synthetic oligonucleotide
agcaugaguuucugagcuc

SEQ ID NO: 1768668 - RNA, 19 nt, Artificial Sequence
  Description of Artificial Sequence: Synthetic oligonucleotide
cuuacuggcccagauacca

SEQ ID NO: 1768669 - RNA, 19 nt, Artificial Sequence
  Description of Artificial Sequence: Synthetic oligonucleotide
acggcaaaggaaacgacug

SEQ ID NO: 1768670 - RNA, 19 nt, Artificial Sequence
  Description of Artificial Sequence: Synthetic oligonucleotide
uuaaugcacaugguacaga

SEQ ID NO: 1768671 - RNA, 19 nt, Artificial Sequence
  Description of Artificial Sequence: Synthetic oligonucleotide
aacgugugcuaaaagggaa

SEQ ID NO: 1768672 - RNA, 19 nt, Artificial Sequence
  Description of Artificial Sequence: Synthetic oligonucleotide
uaccguuggccaauuauuu

SEQ ID NO: 1768673 - RNA, 19 nt, Artificial Sequence
  Description of Artificial Sequence: Synthetic oligonucleotide
cuaaaauugaccucagguu

SEQ ID NO: 1768674 - RNA, 19 nt, Artificial Sequence
  Description of Artificial Sequence: Synthetic oligonucleotide
guucuuaaccuagugggca

SEQ ID NO: 1768675 - RNA, 19 nt, Artificial Sequence
  Description of Artificial Sequence: Synthetic oligonucleotide
auuaccaaagauggacaca

SEQ ID NO: 1768676 - RNA, 19 nt, Artificial Sequence
  Description of Artificial Sequence: Synthetic oligonucleotide
cacuaauggagggaaggag

SEQ ID NO: 1768677 - RNA, 19 nt, Artificial Sequence
  Description of Artificial Sequence: Synthetic oligonucleotide
ggcacuaauggagggaagg

SEQ ID NO: 1768678 - RNA, 19 nt, Artificial Sequence
  Description of Artificial Sequence: Synthetic oligonucleotide
gaggaaaguaucacgaccu

SEQ ID NO: 1768679 - RNA, 19 nt, Artificial Sequence
  Description of Artificial Sequence: Synthetic oligonucleotide
caggggauaugucccagag

SEQ ID NO: 1768680 - RNA, 19 nt, Artificial Sequence
  Description of Artificial Sequence: Synthetic oligonucleotide
ucaagggccauguccacuu

SEQ ID NO: 1768681 - RNA, 19 nt, Artificial Sequence
  Description of Artificial Sequence: Synthetic oligonucleotide
cuuaaccuagugggcaggg

SEQ ID NO: 1768682 - RNA, 19 nt, Artificial Sequence
  Description of Artificial Sequence: Synthetic oligonucleotide
aggcccuuuucaugauacc

SEQ ID NO: 1768683 - RNA, 19 nt, Artificial Sequence
  Description of Artificial Sequence: Synthetic oligonucleotide
cugaacaggacagcaggag

SEQ ID NO: 1768684 - RNA, 19 nt, Artificial Sequence
  Description of Artificial Sequence: Synthetic oligonucleotide
gaacaugcuugaaaucuca

SEQ ID NO: 1768685 - RNA, 19 nt, Artificial Sequence
  Description of Artificial Sequence: Synthetic oligonucleotide
cuacuuuaacaggugauga

SEQ ID NO: 1768686 - RNA, 19 nt, Artificial Sequence
  Description of Artificial Sequence: Synthetic oligonucleotide
caguucuauaucgaaguuc

SEQ ID NO: 1768687 - RNA, 19 nt, Artificial Sequence
  Description of Artificial Sequence: Synthetic oligonucleotide
caaggggaucaaagaaagc

SEQ ID NO: 1768688 - RNA, 19 nt, Artificial Sequence
  Description of Artificial Sequence: Synthetic oligonucleotide
aaaaggcccuuuucaugau

SEQ ID NO: 1768689 - RNA, 19 nt, Artificial Sequence
  Description of Artificial Sequence: Synthetic oligonucleotide
auuuagagucacaaacuau

SEQ ID NO: 1768690 - RNA, 19 nt, Artificial Sequence
  Description of Artificial Sequence: Synthetic oligonucleotide
uucaggcaaaauuguggaa

SEQ ID NO: 1768691 - RNA, 19 nt, Artificial Sequence
  Description of Artificial Sequence: Synthetic oligonucleotide
gacccuuucaggcaaaauu

SEQ ID NO: 1768692 - RNA, 19 nt, Artificial Sequence
  Description of Artificial Sequence: Synthetic oligonucleotide
aaaggcccuuuucaugaua

SEQ ID NO: 1768693 - RNA, 19 nt, Artificial Sequence
  Description of Artificial Sequence: Synthetic oligonucleotide
uagccaguucuauaucgaa

SEQ ID NO: 1768694 - RNA, 19 nt, Artificial Sequence
  Description of Artificial Sequence: Synthetic oligonucleotide
aggacauuccauaccguug

SEQ ID NO: 1768695 - RNA, 19 nt, Artificial Sequence
  Description of Artificial Sequence: Synthetic oligonucleotide
ccaauuauuuaugcuuugg

SEQ ID NO: 1768696 - RNA, 19 nt, Artificial Sequence
  Description of Artificial Sequence: Synthetic oligonucleotide
aggaagagagggcacuaau

SEQ ID NO: 1768697 - RNA, 19 nt, Artificial Sequence
  Description of Artificial Sequence: Synthetic oligonucleotide
  modified_base (5)..(5): a, c, u, g, unknown or other
caucngguuggaccugagc

SEQ ID NO: 1768698 - RNA, 19 nt, Artificial Sequence
  Description of Artificial Sequence: Synthetic oligonucleotide
agccaguucuauaucgaag

SEQ ID NO: 1768699 - RNA, 19 nt, Artificial Sequence
  Description of Artificial Sequence: Synthetic oligonucleotide
ggagcccucacaaaagacc

SEQ ID NO: 1768700 - RNA, 19 nt, Artificial Sequence
  Description of Artificial Sequence: Synthetic oligonucleotide
gaaagacggcaaaggaaac

SEQ ID NO: 1768701 - RNA, 19 nt, Artificial Sequence
  Description of Artificial Sequence: Synthetic oligonucleotide
uucauguaacagugggcau

SEQ ID NO: 1768702 - RNA, 19 nt, Artificial Sequence
  Description of Artificial Sequence: Synthetic oligonucleotide
auaucgaaguucaguucag

SEQ ID NO: 1768703 - RNA, 19 nt, Artificial Sequence
  Description of Artificial Sequence: Synthetic oligonucleotide
auaugucccagagaaggau

SEQ ID NO: 1768704 - RNA, 19 nt, Artificial Sequence
  Description of Artificial Sequence: Synthetic oligonucleotide
  modified_base (9)..(9): a, c, u, g, unknown or other
cugacaucngguuggaccu

SEQ ID NO: 1768705 - RNA, 19 nt, Artificial Sequence
  Description of Artificial Sequence: Synthetic oligonucleotide
cccuuuucaugauaccagg

SEQ ID NO: 1768706 - RNA, 19 nt, Artificial Sequence
  Description of Artificial Sequence: Synthetic oligonucleotide
gacauuccauaccguuggc

SEQ ID NO: 1768707 - RNA, 19 nt, Artificial Sequence
  Description of Artificial Sequence: Synthetic oligonucleotide
guaaggcaaaagcuacaca

SEQ ID NO: 1768708 - RNA, 19 nt, Artificial Sequence
  Description of Artificial Sequence: Synthetic oligonucleotide
agugggcauuuagagucac

SEQ ID NO: 1768709 - RNA, 19 nt, Artificial Sequence
  Description of Artificial Sequence: Synthetic oligonucleotide
gggaaagcuauagaaauaa

SEQ ID NO: 1768710 - RNA, 19 nt, Artificial Sequence
  Description of Artificial Sequence: Synthetic oligonucleotide
cucaccucaggugaggaca

SEQ ID NO: 1768711 - RNA, 19 nt, Artificial Sequence
  Description of Artificial Sequence: Synthetic oligonucleotide
gcucuuauauuaagggcag

SEQ ID NO: 1768712 - RNA, 19 nt, Artificial Sequence
  Description of Artificial Sequence: Synthetic oligonucleotide
aaaguuggucuugcacaga

SEQ ID NO: 1768713 - RNA, 19 nt, Artificial Sequence
  Description of Artificial Sequence: Synthetic oligonucleotide
caaaggaaacgacugacau

SEQ ID NO: 1768714 - RNA, 19 nt, Artificial Sequence
  Description of Artificial Sequence: Synthetic oligonucleotide
agccaugauaauauaggaa

SEQ ID NO: 1768715 - RNA, 19 nt, Artificial Sequence
  Description of Artificial Sequence: Synthetic oligonucleotide
cacagucccgcagacuugc

SEQ ID NO: 1768716 - RNA, 19 nt, Artificial Sequence
  Description of Artificial Sequence: Synthetic oligonucleotide
cuaauggagggaaggaggu

SEQ ID NO: 1768717 - RNA, 19 nt, Artificial Sequence
  Description of Artificial Sequence: Synthetic oligonucleotide
gugcuaaaagggaauauua

SEQ ID NO: 1768718 - RNA, 19 nt, Artificial Sequence
  Description of Artificial Sequence: Synthetic oligonucleotide
gaucaagggccauguccac

SEQ ID NO: 1768719 - RNA, 19 nt, Artificial Sequence
  Description of Artificial Sequence: Synthetic oligonucleotide
  modified_base (7)..(7): a, c, u, g, unknown or other
gacaucngguuggaccuga

SEQ ID NO: 1768720 - RNA, 19 nt, Artificial Sequence
  Description of Artificial Sequence: Synthetic oligonucleotide
ucucaccucaggugaggac

SEQ ID NO: 1768721 - RNA, 19 nt, Artificial Sequence
  Description of Artificial Sequence: Synthetic oligonucleotide
ucucucagucagcucuuau

SEQ ID NO: 1768722 - RNA, 19 nt, Artificial Sequence
  Description of Artificial Sequence: Synthetic oligonucleotide
cccagauaccagcucaagg

SEQ ID NO: 1768723 - RNA, 19 nt, Artificial Sequence
  Description of Artificial Sequence: Synthetic oligonucleotide
agaucuuaaugcacauggu

SEQ ID NO: 1768724 - RNA, 19 nt, Artificial Sequence
  Description of Artificial Sequence: Synthetic oligonucleotide
auaccguuggccaauuauu

SEQ ID NO: 1768725 - RNA, 19 nt, Artificial Sequence
  Description of Artificial Sequence: Synthetic oligonucleotide
aggggauaugucccagaga

SEQ ID NO: 1768726 - RNA, 19 nt, Artificial Sequence
  Description of Artificial Sequence: Synthetic oligonucleotide
cucuuauauuaagggcagc

SEQ ID NO: 1768727 - RNA, 19 nt, Artificial Sequence
  Description of Artificial Sequence: Synthetic oligonucleotide
ugcccacagagugggaucu

SEQ ID NO: 1768728 - RNA, 19 nt, Artificial Sequence
  Description of Artificial Sequence: Synthetic oligonucleotide
accguuggccaauuauuua

SEQ ID NO: 1768729 - RNA, 19 nt, Artificial Sequence
  Description of Artificial Sequence: Synthetic oligonucleotide
aaccuagugggcaggggau

SEQ ID NO: 1768730 - RNA, 19 nt, Artificial Sequence
  Description of Artificial Sequence: Synthetic oligonucleotide
gggaucuaaaauugaccuc

SEQ ID NO: 1768731 - RNA, 19 nt, Artificial Sequence
  Description of Artificial Sequence: Synthetic oligonucleotide
acuagacagucagucuugu

SEQ ID NO: 1768732 - RNA, 19 nt, Artificial Sequence
  Description of Artificial Sequence: Synthetic oligonucleotide
gacggcaaaggaaacgacu

SEQ ID NO: 1768733 - RNA, 19 nt, Artificial Sequence
  Description of Artificial Sequence: Synthetic oligonucleotide
gccaauuauuuaugcuuug

SEQ ID NO: 1768734 - RNA, 19 nt, Artificial Sequence
  Description of Artificial Sequence: Synthetic oligonucleotide
cacgaccuaaaaguugguc

SEQ ID NO: 1768735 - RNA, 19 nt, Artificial Sequence
  Description of Artificial Sequence: Synthetic oligonucleotide
agggcacuaauggagggaa

SEQ ID NO: 1768736 - RNA, 19 nt, Artificial Sequence
  Description of Artificial Sequence: Synthetic oligonucleotide
aguuggucuugcacagauc

SEQ ID NO: 1768737 - RNA, 19 nt, Artificial Sequence
  Description of Artificial Sequence: Synthetic oligonucleotide
gaugaggaccccagcuuca

SEQ ID NO: 1768738 - RNA, 19 nt, Artificial Sequence
  Description of Artificial Sequence: Synthetic oligonucleotide
gccaguucuauaucgaagu

SEQ ID NO: 1768739 - RNA, 19 nt, Artificial Sequence
  Description of Artificial Sequence: Synthetic oligonucleotide
aggaaaguaucacgaccua

SEQ ID NO: 1768740 - RNA, 19 nt, Artificial Sequence
  Description of Artificial Sequence: Synthetic oligonucleotide
ggcucaaguaaggcaaaag

SEQ ID NO: 1768741 - RNA, 19 nt, Artificial Sequence
  Description of Artificial Sequence: Synthetic oligonucleotide
gcccuuuucaugauaccag

SEQ ID NO: 1768742 - RNA, 19 nt, Artificial Sequence
  Description of Artificial Sequence: Synthetic oligonucleotide
cuuuugcugcccaacgugu

SEQ ID NO: 1768743 - RNA, 19 nt, Artificial Sequence
  Description of Artificial Sequence: Synthetic oligonucleotide
gagugggaucuaaaauuga

SEQ ID NO: 1768744 - RNA, 19 nt, Artificial Sequence
  Description of Artificial Sequence: Synthetic oligonucleotide
ggaagacagacacaaucua

SEQ ID NO: 1768745 - RNA, 19 nt, Artificial Sequence
  Description of Artificial Sequence: Synthetic oligonucleotide
cauaccguuggccaauuau

SEQ ID NO: 1768746 - RNA, 19 nt, Artificial Sequence
  Description of Artificial Sequence: Synthetic oligonucleotide
uuccauaccguuggccaau

SEQ ID NO: 1768747 - RNA, 19 nt, Artificial Sequence
  Description of Artificial Sequence: Synthetic oligonucleotide
ugcccaacgugugcuaaaa

SEQ ID NO: 1768748 - RNA, 19 nt, Artificial Sequence
  Description of Artificial Sequence: Synthetic oligonucleotide
gagguacauccagaugaac

SEQ ID NO: 1768749 - RNA, 19 nt, Artificial Sequence
  Description of Artificial Sequence: Synthetic oligonucleotide
acccauuguguggugauua

SEQ ID NO: 1768750 - RNA, 19 nt, Artificial Sequence
  Description of Artificial Sequence: Synthetic oligonucleotide
  modified_base (8)..(8): a, c, u, g, unknown or other
ugacaucngguuggaccug

SEQ ID NO: 1768751 - RNA, 19 nt, Artificial Sequence
  Description of Artificial Sequence: Synthetic oligonucleotide
cuugggacagcaacuuacu

SEQ ID NO: 1768752 - RNA, 19 nt, Artificial Sequence
  Description of Artificial Sequence: Synthetic oligonucleotide
caguucaggaaagcagcuc

SEQ ID NO: 1768753 - RNA, 19 nt, Artificial Sequence
  Description of Artificial Sequence: Synthetic oligonucleotide
gagguugcuacagcuggaa

SEQ ID NO: 1768754 - RNA, 19 nt, Artificial Sequence
  Description of Artificial Sequence: Synthetic oligonucleotide
cagucagcucuuauauuaa

SEQ ID NO: 1768755 - RNA, 19 nt, Artificial Sequence
  Description of Artificial Sequence: Synthetic oligonucleotide
auacagccacccauugugu

SEQ ID NO: 1768756 - RNA, 19 nt, Artificial Sequence
  Description of Artificial Sequence: Synthetic oligonucleotide
cagucccgcagacuugcug

SEQ ID NO: 1768757 - RNA, 19 nt, Artificial Sequence
  Description of Artificial Sequence: Synthetic oligonucleotide
ggcccuuuucaugauacca

SEQ ID NO: 1768758 - RNA, 19 nt, Artificial Sequence
  Description of Artificial Sequence: Synthetic oligonucleotide
ggcucuggagcccucacaa

SEQ ID NO: 1768759 - RNA, 19 nt, Artificial Sequence
  Description of Artificial Sequence: Synthetic oligonucleotide
uggcuagaugaggacccca

SEQ ID NO: 1768760 - RNA, 19 nt, Artificial Sequence
  Description of Artificial Sequence: Synthetic oligonucleotide
acgugugcuaaaagggaau

SEQ ID NO: 1768761 - RNA, 19 nt, Artificial Sequence
  Description of Artificial Sequence: Synthetic oligonucleotide
ggaaaguaucacgaccuaa

SEQ ID NO: 1768762 - RNA, 19 nt, Artificial Sequence
  Description of Artificial Sequence: Synthetic oligonucleotide
ugaccucagguuggcucug

SEQ ID NO: 1768763 - RNA, 19 nt, Artificial Sequence
  Description of Artificial Sequence: Synthetic oligonucleotide
agcucucaccucaggugag

SEQ ID NO: 1768764 - RNA, 19 nt, Artificial Sequence
  Description of Artificial Sequence: Synthetic oligonucleotide
agcaacuuacuggcccaga

SEQ ID NO: 1768765 - RNA, 19 nt, Artificial Sequence
  Description of Artificial Sequence: Synthetic oligonucleotide
aggaacuguaggggcauua

SEQ ID NO: 1768766 - RNA, 19 nt, Artificial Sequence
  Description of Artificial Sequence: Synthetic oligonucleotide
guggcuagaugaggacccc

SEQ ID NO: 1768767 - RNA, 19 nt, Artificial Sequence
  Description of Artificial Sequence: Synthetic oligonucleotide
gccaggaggaaaguaucac

SEQ ID NO: 1768768 - RNA, 19 nt, Artificial Sequence
  Description of Artificial Sequence: Synthetic oligonucleotide
gggaauauuaauagugauu

SEQ ID NO: 1768769 - RNA, 19 nt, Artificial Sequence
  Description of Artificial Sequence: Synthetic oligonucleotide
cguuggccaauuauuuaug

SEQ ID NO: 1768770 - RNA, 19 nt, Artificial Sequence
  Description of Artificial Sequence: Synthetic oligonucleotide
cagugggcauuuagaguca

SEQ ID NO: 1768771 - RNA, 19 nt, Artificial Sequence
  Description of Artificial Sequence: Synthetic oligonucleotide
guaucacgaccuaaaaguu

SEQ ID NO: 1768772 - RNA, 19 nt, Artificial Sequence
  Description of Artificial Sequence: Synthetic oligonucleotide
  modified_base (6)..(6): a, c, u, g, unknown or other
acaucngguuggaccugag

SEQ ID NO: 1768773 - RNA, 19 nt, Artificial Sequence
  Description of Artificial Sequence: Synthetic oligonucleotide
cuagugggcaggggauaug

SEQ ID NO: 1768774 - RNA, 19 nt, Artificial Sequence
  Description of Artificial Sequence: Synthetic oligonucleotide
cagcaacuuacuggcccag

SEQ ID NO: 1768775 - RNA, 19 nt, Artificial Sequence
  Description of Artificial Sequence: Synthetic oligonucleotide
cuaagucucccuagccagu

SEQ ID NO: 1768776 - RNA, 19 nt, Artificial Sequence
  Description of Artificial Sequence: Synthetic oligonucleotide
gcauacuccccuccccuca

SEQ ID NO: 1768777 - RNA, 19 nt, Artificial Sequence
  Description of Artificial Sequence: Synthetic oligonucleotide
cuagacagucagucuugua

SEQ ID NO: 1768778 - RNA, 19 nt, Artificial Sequence
  Description of Artificial Sequence: Synthetic oligonucleotide
gcacuaauggagggaagga

SEQ ID NO: 1768779 - RNA, 19 nt, Artificial Sequence
  Description of Artificial Sequence: Synthetic oligonucleotide
cucccuagccaguucuaua

SEQ ID NO: 1768780 - RNA, 19 nt, Artificial Sequence
  Description of Artificial Sequence: Synthetic oligonucleotide
gcucucaccucaggugagg

SEQ ID NO: 1768781 - RNA, 19 nt, Artificial Sequence
  Description of Artificial Sequence: Synthetic oligonucleotide
aggcucaaguaaggcaaaa

SEQ ID NO: 1768782 - RNA, 19 nt, Artificial Sequence
  Description of Artificial Sequence: Synthetic oligonucleotide
  modified_base (18)..(18): a, c, u, g, unknown or other
aggaaacgacugacaucng

SEQ ID NO: 1768783 - RNA, 19 nt, Artificial Sequence
  Description of Artificial Sequence: Synthetic oligonucleotide
ucccgcagacuugcugcug

SEQ ID NO: 1768784 - RNA, 19 nt, Artificial Sequence
  Description of Artificial Sequence: Synthetic oligonucleotide
aaggaacuguaggggcauu

SEQ ID NO: 1768785 - RNA, 19 nt, Artificial Sequence
  Description of Artificial Sequence: Synthetic oligonucleotide
gcccaacgugugcuaaaag

SEQ ID NO: 1768786 - RNA, 19 nt, Artificial Sequence
  Description of Artificial Sequence: Synthetic oligonucleotide
ggauucacagcaugaguuu

SEQ ID NO: 1768787 - RNA, 19 nt, Artificial Sequence
  Description of Artificial Sequence: Synthetic oligonucleotide
caggcucaaguaaggcaaa

SEQ ID NO: 1768788 - RNA, 19 nt, Artificial Sequence
  Description of Artificial Sequence: Synthetic oligonucleotide
cauguaacagugggcauuu

SEQ ID NO: 1768789 - RNA, 19 nt, Artificial Sequence
  Description of Artificial Sequence: Synthetic oligonucleotide
agcccucacaaaagacccu

SEQ ID NO: 1768790 - RNA, 19 nt, Artificial Sequence
  Description of Artificial Sequence: Synthetic oligonucleotide
ggggaaagcuauagaaaua

SEQ ID NO: 1768791 - RNA, 19 nt, Artificial Sequence
  Description of Artificial Sequence: Synthetic oligonucleotide
uccauaccguuggccaauu

SEQ ID NO: 1768792 - RNA, 19 nt, Artificial Sequence
  Description of Artificial Sequence: Synthetic oligonucleotide
gcaacuuacuggcccagau

SEQ ID NO: 1768793 - RNA, 19 nt, Artificial Sequence
  Description of Artificial Sequence: Synthetic oligonucleotide
accuagugggcaggggaua

SEQ ID NO: 1768794 - RNA, 19 nt, Artificial Sequence
  Description of Artificial Sequence: Synthetic oligonucleotide
  modified_base (2)..(2): a, c, u, g, unknown or other
cngguuggaccugagcuau

SEQ ID NO: 1768795 - RNA, 19 nt, Artificial Sequence
  Description of Artificial Sequence: Synthetic oligonucleotide
ggacagcaacuuacuggcc

SEQ ID NO: 1768796 - RNA, 19 nt, Artificial Sequence
  Description of Artificial Sequence: Synthetic oligonucleotide
cacuugggacagcaacuua

SEQ ID NO: 1768797 - RNA, 19 nt, Artificial Sequence
  Description of Artificial Sequence: Synthetic oligonucleotide
gcaggggauaugucccaga

SEQ ID NO: 1768798 - RNA, 19 nt, Artificial Sequence
  Description of Artificial Sequence: Synthetic oligonucleotide
gggagaucaagggccaugu

SEQ ID NO: 1768799 - RNA, 19 nt, Artificial Sequence
  Description of Artificial Sequence: Synthetic oligonucleotide
ccguuggccaauuauuuau

SEQ ID NO: 1768800 - RNA, 19 nt, Artificial Sequence
  Description of Artificial Sequence: Synthetic oligonucleotide
gggcacuaauggagggaag

SEQ ID NO: 1768801 - RNA, 19 nt, Artificial Sequence
  Description of Artificial Sequence: Synthetic oligonucleotide
aucucucagucagcucuua

SEQ ID NO: 1768802 - RNA, 19 nt, Artificial Sequence
  Description of Artificial Sequence: Synthetic oligonucleotide
cccuagccaguucuauauc

SEQ ID NO: 1768803 - RNA, 19 nt, Artificial Sequence
  Description of Artificial Sequence: Synthetic oligonucleotide
gucccgcagacuugcugcu

SEQ ID NO: 1768804 - RNA, 19 nt, Artificial Sequence
  Description of Artificial Sequence: Synthetic oligonucleotide
ggaacacuugggacagcaa

SEQ ID NO: 1768805 - RNA, 19 nt, Artificial Sequence
  Description of Artificial Sequence: Synthetic oligonucleotide
cgaccuaaaaguuggucuu

SEQ ID NO: 1768806 - RNA, 19 nt, Artificial Sequence
  Description of Artificial Sequence: Synthetic oligonucleotide
ggggcuucuuguugagaau

SEQ ID NO: 1768807 - RNA, 19 nt, Artificial Sequence
  Description of Artificial Sequence: Synthetic oligonucleotide
cgugugcuaaaagggaaua

SEQ ID NO: 1768808 - RNA, 19 nt, Artificial Sequence
  Description of Artificial Sequence: Synthetic oligonucleotide
cugcugccacagucccgca

SEQ ID NO: 1768809 - RNA, 19 nt, Artificial Sequence
  Description of Artificial Sequence: Synthetic oligonucleotide
ccaguucuauaucgaaguu

SEQ ID NO: 1768810 - RNA, 19 nt, Artificial Sequence
  Description of Artificial Sequence: Synthetic oligonucleotide
ccccagcuucacaacugaa

SEQ ID NO: 1768811 - RNA, 19 nt, Artificial Sequence
  Description of Artificial Sequence: Synthetic oligonucleotide
cacccauuguguggugauu

SEQ ID NO: 1768812 - RNA, 19 nt, Artificial Sequence
  Description of Artificial Sequence: Synthetic oligonucleotide
ccuagugggcaggggauau

SEQ ID NO: 1768813 - RNA, 19 nt, Artificial Sequence
  Description of Artificial Sequence: Synthetic oligonucleotide
  modified_base (12)..(12): a, c, u, g, unknown or other
cgacugacaucngguugga

SEQ ID NO: 1768814 - RNA, 19 nt, Artificial Sequence
  Description of Artificial Sequence: Synthetic oligonucleotide
ccauaccguuggccaauua

SEQ ID NO: 1768815 - RNA, 19 nt, Artificial Sequence
  Description of Artificial Sequence: Synthetic oligonucleotide
gcccacagagugggaucua

SEQ ID NO: 1768816 - RNA, 19 nt, Artificial Sequence
  Description of Artificial Sequence: Synthetic oligonucleotide
caccucaggugaggacauu

SEQ ID NO: 1768817 - RNA, 19 nt, Artificial Sequence
  Description of Artificial Sequence: Synthetic oligonucleotide
ccgcagacuugcugcuguu

SEQ ID NO: 1768818 - RNA, 19 nt, Artificial Sequence
  Description of Artificial Sequence: Synthetic oligonucleotide
ugacauacaauauugacgg

SEQ ID NO: 1768819 - RNA, 19 nt, Artificial Sequence
  Description of Artificial Sequence: Synthetic oligonucleotide
aauaggagaacugaugagg

SEQ ID NO: 1768820 - RNA, 19 nt, Artificial Sequence
  Description of Artificial Sequence: Synthetic oligonucleotide
agugacauacaauauugac

SEQ ID NO: 1768821 - RNA, 19 nt, Artificial Sequence
  Description of Artificial Sequence: Synthetic oligonucleotide
agauguggcaauuccagcc

SEQ ID NO: 1768822 - RNA, 19 nt, Artificial Sequence
  Description of Artificial Sequence: Synthetic oligonucleotide
ugagugacauacaauauug

SEQ ID NO: 1768823 - RNA, 19 nt, Artificial Sequence
  Description of Artificial Sequence: Synthetic oligonucleotide
aacuugccaagcuuuauuc

SEQ ID NO: 1768824 - RNA, 19 nt, Artificial Sequence
  Description of Artificial Sequence: Synthetic oligonucleotide
aaccauagugcuuuccaac

SEQ ID NO: 1768825 - RNA, 19 nt, Artificial Sequence
  Description of Artificial Sequence: Synthetic oligonucleotide
aaauugaugaugucaacau

SEQ ID NO: 1768826 - RNA, 19 nt, Artificial Sequence
  Description of Artificial Sequence: Synthetic oligonucleotide
cuuuccaacaccaucuugc

SEQ ID NO: 1768827 - RNA, 19 nt, Artificial Sequence
  Description of Artificial Sequence: Synthetic oligonucleotide
uuauucgggauguaaaggc

SEQ ID NO: 1768828 - RNA, 19 nt, Artificial Sequence
  Description of Artificial Sequence: Synthetic oligonucleotide
aaaauugaugaugucaaca

SEQ ID NO: 1768829 - RNA, 19 nt, Artificial Sequence
  Description of Artificial Sequence: Synthetic oligonucleotide
aaacacgaagagcuagggc

SEQ ID NO: 1768830 - RNA, 19 nt, Artificial Sequence
  Description of Artificial Sequence: Synthetic oligonucleotide
uuccauagaaacacgaaga

SEQ ID NO: 1768831 - RNA, 19 nt, Artificial Sequence
  Description of Artificial Sequence: Synthetic oligonucleotide
uucaguguguucacaaagg

SEQ ID NO: 1768832 - RNA, 19 nt, Artificial Sequence
  Description of Artificial Sequence: Synthetic oligonucleotide
agaauaggagaacugauga

SEQ ID NO: 1768833 - RNA, 19 nt, Artificial Sequence
  Description of Artificial Sequence: Synthetic oligonucleotide
ucagauguguccauggcug

SEQ ID NO: 1768834 - RNA, 19 nt, Artificial Sequence
  Description of Artificial Sequence: Synthetic oligonucleotide
aagucuauguccaaccccg

SEQ ID NO: 1768835 - RNA, 19 nt, Artificial Sequence
  Description of Artificial Sequence: Synthetic oligonucleotide
uccauagaaacacgaagag

SEQ ID NO: 1768836 - RNA, 19 nt, Artificial Sequence
  Description of Artificial Sequence: Synthetic oligonucleotide
uuuauucgggauguaaagg

SEQ ID NO: 1768837 - RNA, 19 nt, Artificial Sequence
  Description of Artificial Sequence: Synthetic oligonucleotide
agaugggccacucgaaugc

SEQ ID NO: 1768838 - RNA, 19 nt, Artificial Sequence
  Description of Artificial Sequence: Synthetic oligonucleotide
acugaugagggcaucagcc

SEQ ID NO: 1768839 - RNA, 19 nt, Artificial Sequence
  Description of Artificial Sequence: Synthetic oligonucleotide
ucuaagucuauguccaacc

SEQ ID NO: 1768840 - RNA, 19 nt, Artificial Sequence
  Description of Artificial Sequence: Synthetic oligonucleotide
aacugaugagggcaucagc

SEQ ID NO: 1768841 - RNA, 19 nt, Artificial Sequence
  Description of Artificial Sequence: Synthetic oligonucleotide
uauucgggauguaaaggcg

SEQ ID NO: 1768842 - RNA, 19 nt, Artificial Sequence
  Description of Artificial Sequence: Synthetic oligonucleotide
gugacauacaauauugacg

SEQ ID NO: 1768843 - RNA, 19 nt, Artificial Sequence
  Description of Artificial Sequence: Synthetic oligonucleotide
cacaucuaagucuaugucc

SEQ ID NO: 1768844 - RNA, 19 nt, Artificial Sequence
  Description of Artificial Sequence: Synthetic oligonucleotide
gacaguauggagcuuggag

SEQ ID NO: 1768845 - RNA, 19 nt, Artificial Sequence
  Description of Artificial Sequence: Synthetic oligonucleotide
uuuacaguccccugggcag

SEQ ID NO: 1768846 - RNA, 19 nt, Artificial Sequence
  Description of Artificial Sequence: Synthetic oligonucleotide
cuucaguagggcaucaucc

SEQ ID NO: 1768847 - RNA, 19 nt, Artificial Sequence
  Description of Artificial Sequence: Synthetic oligonucleotide
cauggcauaggcaaucugc

SEQ ID NO: 1768848 - RNA, 19 nt, Artificial Sequence
  Description of Artificial Sequence: Synthetic oligonucleotide
uacaauauugacggcaucc

SEQ ID NO: 1768849 - RNA, 19 nt, Artificial Sequence
  Description of Artificial Sequence: Synthetic oligonucleotide
cuugccaagcuuuauucgg

SEQ ID NO: 1768850 - RNA, 19 nt, Artificial Sequence
  Description of Artificial Sequence: Synthetic oligonucleotide
caucuugugauucuugccc

SEQ ID NO: 1768851 - RNA, 19 nt, Artificial Sequence
  Description of Artificial Sequence: Synthetic oligonucleotide
cuuuauucgggauguaaag

SEQ ID NO: 1768852 - RNA, 19 nt, Artificial Sequence
  Description of Artificial Sequence: Synthetic oligonucleotide
uccacacaaaccauagugc

SEQ ID NO: 1768853 - RNA, 19 nt, Artificial Sequence
  Description of Artificial Sequence: Synthetic oligonucleotide
auuucgaauggcuucguug

SEQ ID NO: 1768854 - RNA, 19 nt, Artificial Sequence
  Description of Artificial Sequence: Synthetic oligonucleotide
cuuggguuggacaguaugg

SEQ ID NO: 1768855 - RNA, 19 nt, Artificial Sequence
  Description of Artificial Sequence: Synthetic oligonucleotide
cuuccauagaaacacgaag

SEQ ID NO: 1768856 - RNA, 19 nt, Artificial Sequence
  Description of Artificial Sequence: Synthetic oligonucleotide
uuucgaauggcuucguugu

SEQ ID NO: 1768857 - RNA, 19 nt, Artificial Sequence
  Description of Artificial Sequence: Synthetic oligonucleotide
ugagcuggcgucaauguca

SEQ ID NO: 1768858 - RNA, 19 nt, Artificial Sequence
  Description of Artificial Sequence: Synthetic oligonucleotide
uaagucuauguccaacccc

SEQ ID NO: 1768859 - RNA, 19 nt, Artificial Sequence
  Description of Artificial Sequence: Synthetic oligonucleotide
agcacggccaaacuccugc

SEQ ID NO: 1768860 - RNA, 19 nt, Artificial Sequence
  Description of Artificial Sequence: Synthetic oligonucleotide
uucaguagggcaucauccg

SEQ ID NO: 1768861 - RNA, 19 nt, Artificial Sequence
  Description of Artificial Sequence: Synthetic oligonucleotide
gaaggaagucuccauuccg

SEQ ID NO: 1768862 - RNA, 19 nt, Artificial Sequence
  Description of Artificial Sequence: Synthetic oligonucleotide
ucaguguguucacaaaggc

SEQ ID NO: 1768863 - RNA, 19 nt, Artificial Sequence
  Description of Artificial Sequence: Synthetic oligonucleotide
acaguauggagcuuggaga

SEQ ID NO: 1768864 - RNA, 19 nt, Artificial Sequence
  Description of Artificial Sequence: Synthetic oligonucleotide
auguaaaggcggcagacag

SEQ ID NO: 1768865 - RNA, 19 nt, Artificial Sequence
  Description of Artificial Sequence: Synthetic oligonucleotide
augugauccgguuccgucc

SEQ ID NO: 1768866 - RNA, 19 nt, Artificial Sequence
  Description of Artificial Sequence: Synthetic oligonucleotide
acuguuguccacacaaacc

SEQ ID NO: 1768867 - RNA, 19 nt, Artificial Sequence
  Description of Artificial Sequence: Synthetic oligonucleotide
gaauaggagaacugaugag

SEQ ID NO: 1768868 - RNA, 19 nt, Artificial Sequence
  Description of Artificial Sequence: Synthetic oligonucleotide
aagagcuagggccaacuca

SEQ ID NO: 1768869 - RNA, 19 nt, Artificial Sequence
  Description of Artificial Sequence: Synthetic oligonucleotide
agaggaugcggccaguguc

SEQ ID NO: 1768870 - RNA, 19 nt, Artificial Sequence
  Description of Artificial Sequence: Synthetic oligonucleotide
acugucaccagaugugauc

SEQ ID NO: 1768871 - RNA, 19 nt, Artificial Sequence
  Description of Artificial Sequence: Synthetic oligonucleotide
augauucucaucuugugau

SEQ ID NO: 1768872 - RNA, 19 nt, Artificial Sequence
  Description of Artificial Sequence: Synthetic oligonucleotide
uugccaagcuuuauucggg

SEQ ID NO: 1768873 - RNA, 19 nt, Artificial Sequence
  Description of Artificial Sequence: Synthetic oligonucleotide
uggaagguucucuaggaca

SEQ ID NO: 1768874 - RNA, 19 nt, Artificial Sequence
  Description of Artificial Sequence: Synthetic oligonucleotide
ugcauuucgaauggcuucg

SEQ ID NO: 1768875 - RNA, 19 nt, Artificial Sequence
  Description of Artificial Sequence: Synthetic oligonucleotide
gaugauucucaucuuguga

SEQ ID NO: 1768876 - RNA, 19 nt, Artificial Sequence
  Description of Artificial Sequence: Synthetic oligonucleotide
gaagucuccauuccgcaug

SEQ ID NO: 1768877 - RNA, 19 nt, Artificial Sequence
  Description of Artificial Sequence: Synthetic oligonucleotide
acuugccaagcuuuauucg

SEQ ID NO: 1768878 - RNA, 19 nt, Artificial Sequence
  Description of Artificial Sequence: Synthetic oligonucleotide
uguggucagcacuucacag

SEQ ID NO: 1768879 - RNA, 19 nt, Artificial Sequence
  Description of Artificial Sequence: Synthetic oligonucleotide
accuucaccagccagaaua

SEQ ID NO: 1768880 - RNA, 19 nt, Artificial Sequence
  Description of Artificial Sequence: Synthetic oligonucleotide
uugagugacauacaauauu

SEQ ID NO: 1768881 - RNA, 19 nt, Artificial Sequence
  Description of Artificial Sequence: Synthetic oligonucleotide
guugcuucgggucuuugag

SEQ ID NO: 1768882 - RNA, 19 nt, Artificial Sequence
  Description of Artificial Sequence: Synthetic oligonucleotide
caaacucgaagucacuggc

SEQ ID NO: 1768883 - RNA, 19 nt, Artificial Sequence
  Description of Artificial Sequence: Synthetic oligonucleotide
aauggcuucguuguuggga

SEQ ID NO: 1768884 - RNA, 19 nt, Artificial Sequence
  Description of Artificial Sequence: Synthetic oligonucleotide
uccaaccccgucuuuacag

SEQ ID NO: 1768885 - RNA, 19 nt, Artificial Sequence
  Description of Artificial Sequence: Synthetic oligonucleotide
acauacaauauugacggca

SEQ ID NO: 1768886 - RNA, 19 nt, Artificial Sequence
  Description of Artificial Sequence: Synthetic oligonucleotide
uuugagugacauacaauau

SEQ ID NO: 1768887 - RNA, 19 nt, Artificial Sequence
  Description of Artificial Sequence: Synthetic oligonucleotide
cuuggccaaacucugcucc

SEQ ID NO: 1768888 - RNA, 19 nt, Artificial Sequence
  Description of Artificial Sequence: Synthetic oligonucleotide
cauagugcuuuccaacacc

SEQ ID NO: 1768889 - RNA, 19 nt, Artificial Sequence
  Description of Artificial Sequence: Synthetic oligonucleotide
uccugcaucacaucguagu

SEQ ID NO: 1768890 - RNA, 19 nt, Artificial Sequence
  Description of Artificial Sequence: Synthetic oligonucleotide
ucaggggugagugugguca

SEQ ID NO: 1768891 - RNA, 19 nt, Artificial Sequence
  Description of Artificial Sequence: Synthetic oligonucleotide
ggcuaguuucaccagaucc

SEQ ID NO: 1768892 - RNA, 19 nt, Artificial Sequence
  Description of Artificial Sequence: Synthetic oligonucleotide
cuaagucuauguccaaccc

SEQ ID NO: 1768893 - RNA, 19 nt, Artificial Sequence
  Description of Artificial Sequence: Synthetic oligonucleotide
ucuuccauagaaacacgaa

SEQ ID NO: 1768894 - RNA, 19 nt, Artificial Sequence
  Description of Artificial Sequence: Synthetic oligonucleotide
agacagcacaucuaagucu

SEQ ID NO: 1768895 - RNA, 19 nt, Artificial Sequence
  Description of Artificial Sequence: Synthetic oligonucleotide
gugauucuugcccugccgg

SEQ ID NO: 1768896 - RNA, 19 nt, Artificial Sequence
  Description of Artificial Sequence: Synthetic oligonucleotide
guagucauccuccuccuug

SEQ ID NO: 1768897 - RNA, 19 nt, Artificial Sequence
  Description of Artificial Sequence: Synthetic oligonucleotide
aaacuugccaagcuuuauu

SEQ ID NO: 1768898 - RNA, 19 nt, Artificial Sequence
  Description of Artificial Sequence: Synthetic oligonucleotide
aacucaggguccugcauca

SEQ ID NO: 1768899 - RNA, 19 nt, Artificial Sequence
  Description of Artificial Sequence: Synthetic oligonucleotide
uagggcaucauccgugucu

SEQ ID NO: 1768900 - RNA, 19 nt, Artificial Sequence
  Description of Artificial Sequence: Synthetic oligonucleotide
aucauccgugucuucaguc

SEQ ID NO: 1768901 - RNA, 19 nt, Artificial Sequence
  Description of Artificial Sequence: Synthetic oligonucleotide
aaaccauagugcuuuccaa

SEQ ID NO: 1768902 - RNA, 19 nt, Artificial Sequence
  Description of Artificial Sequence: Synthetic oligonucleotide
gucuuuacaguccccuggg

SEQ ID NO: 1768903 - RNA, 19 nt, Artificial Sequence
  Description of Artificial Sequence: Synthetic oligonucleotide
uaggacacucugaaggaac

SEQ ID NO: 1768904 - RNA, 19 nt, Artificial Sequence
  Description of Artificial Sequence: Synthetic oligonucleotide
aucuaagucuauguccaac

SEQ ID NO: 1768905 - RNA, 19 nt, Artificial Sequence
  Description of Artificial Sequence: Synthetic oligonucleotide
agagcuagggccaacucag

SEQ ID NO: 1768906 - RNA, 19 nt, Artificial Sequence
  Description of Artificial Sequence: Synthetic oligonucleotide
ggcauaggcaaucugcucc

SEQ ID NO: 1768907 - RNA, 19 nt, Artificial Sequence
  Description of Artificial Sequence: Synthetic oligonucleotide
uccucagucaugcugcuua

SEQ ID NO: 1768908 - RNA, 19 nt, Artificial Sequence
  Description of Artificial Sequence: Synthetic oligonucleotide
uuggacaguauggagcuug

SEQ ID NO: 1768909 - RNA, 19 nt, Artificial Sequence
  Description of Artificial Sequence: Synthetic oligonucleotide
cuguuguccacacaaacca

SEQ ID NO: 1768910 - RNA, 19 nt, Artificial Sequence
  Description of Artificial Sequence: Synthetic oligonucleotide
ugcuucagagccagauggg

SEQ ID NO: 1768911 - RNA, 19 nt, Artificial Sequence
  Description of Artificial Sequence: Synthetic oligonucleotide
uggucagcacuucacaguc

SEQ ID NO: 1768912 - RNA, 19 nt, Artificial Sequence
  Description of Artificial Sequence: Synthetic oligonucleotide
uccaaacucgaagucacug

SEQ ID NO: 1768913 - RNA, 19 nt, Artificial Sequence
  Description of Artificial Sequence: Synthetic oligonucleotide
auauugacggcauccugcu

SEQ ID NO: 1768914 - RNA, 19 nt, Artificial Sequence
  Description of Artificial Sequence: Synthetic oligonucleotide
gaggcuagagagcccauug

SEQ ID NO: 1768915 - RNA, 19 nt, Artificial Sequence
  Description of Artificial Sequence: Synthetic oligonucleotide
ucuuugagugacauacaau

SEQ ID NO: 1768916 - RNA, 19 nt, Artificial Sequence
  Description of Artificial Sequence: Synthetic oligonucleotide
aaccccgucuuuacagucc

SEQ ID NO: 1768917 - RNA, 19 nt, Artificial Sequence
  Description of Artificial Sequence: Synthetic oligonucleotide
agaaacacgaagagcuagg

SEQ ID NO: 1768918 - RNA, 19 nt, Artificial Sequence
  Description of Artificial Sequence: Synthetic oligonucleotide
cacguuauucucaggguug

SEQ ID NO: 1768919 - RNA, 19 nt, Artificial Sequence
  Description of Artificial Sequence: Synthetic oligonucleotide
cugccggugcuucagagcc

SEQ ID NO: 1768920 - RNA, 19 nt, Artificial Sequence
  Description of Artificial Sequence: Synthetic oligonucleotide
uucgggauguaaaggcggc

SEQ ID NO: 1768921 - RNA, 19 nt, Artificial Sequence
  Description of Artificial Sequence: Synthetic oligonucleotide
acaaaccauagugcuuucc

SEQ ID NO: 1768922 - RNA, 19 nt, Artificial Sequence
  Description of Artificial Sequence: Synthetic oligonucleotide
accccgucuuuacaguccc

SEQ ID NO: 1768923 - RNA, 19 nt, Artificial Sequence
  Description of Artificial Sequence: Synthetic oligonucleotide
aggagaacugaugagggca

SEQ ID NO: 1768924 - RNA, 19 nt, Artificial Sequence
  Description of Artificial Sequence: Synthetic oligonucleotide
uccuccuccccaaaauuga

SEQ ID NO: 1768925 - RNA, 19 nt, Artificial Sequence
  Description of Artificial Sequence: Synthetic oligonucleotide
uggguuggacaguauggag

SEQ ID NO: 1768926 - RNA, 19 nt, Artificial Sequence
  Description of Artificial Sequence: Synthetic oligonucleotide
acguuauucucaggguugc

SEQ ID NO: 1768927 - RNA, 19 nt, Artificial Sequence
  Description of Artificial Sequence: Synthetic oligonucleotide
aaugccggugcagaaggug

SEQ ID NO: 1768928 - RNA, 19 nt, Artificial Sequence
  Description of Artificial Sequence: Synthetic oligonucleotide
gaugugauccgguuccguc

SEQ ID NO: 1768929 - RNA, 19 nt, Artificial Sequence
  Description of Artificial Sequence: Synthetic oligonucleotide
cugaaggaacucagggucc

SEQ ID NO: 1768930 - RNA, 19 nt, Artificial Sequence
  Description of Artificial Sequence: Synthetic oligonucleotide
auucgggauguaaaggcgg

SEQ ID NO: 1768931 - RNA, 19 nt, Artificial Sequence
  Description of Artificial Sequence: Synthetic oligonucleotide
ucaguagggcaucauccgu

SEQ ID NO: 1768932 - RNA, 19 nt, Artificial Sequence
  Description of Artificial Sequence: Synthetic oligonucleotide
ugaugagggcaucagccaa

SEQ ID NO: 1768933 - RNA, 19 nt, Artificial Sequence
  Description of Artificial Sequence: Synthetic oligonucleotide
caaaauugaugaugucaac

SEQ ID NO: 1768934 - RNA, 19 nt, Artificial Sequence
  Description of Artificial Sequence: Synthetic oligonucleotide
agggcuacccacgaaggcg

SEQ ID NO: 1768935 - RNA, 19 nt, Artificial Sequence
  Description of Artificial Sequence: Synthetic oligonucleotide
guaaaggcggcagacagca

SEQ ID NO: 1768936 - RNA, 19 nt, Artificial Sequence
  Description of Artificial Sequence: Synthetic oligonucleotide
ucguuguugggauccacac

SEQ ID NO: 1768937 - RNA, 19 nt, Artificial Sequence
  Description of Artificial Sequence: Synthetic oligonucleotide
ucuccauuccgcauguauu

SEQ ID NO: 1768938 - RNA, 19 nt, Artificial Sequence
  Description of Artificial Sequence: Synthetic oligonucleotide
cuccauuccgcauguauuc

SEQ ID NO: 1768939 - RNA, 19 nt, Artificial Sequence
  Description of Artificial Sequence: Synthetic oligonucleotide
cuagggccaacucaggauc

SEQ ID NO: 1768940 - RNA, 19 nt, Artificial Sequence
  Description of Artificial Sequence: Synthetic oligonucleotide
auuccgcauguauucacug

SEQ ID NO: 1768941 - RNA, 19 nt, Artificial Sequence
  Description of Artificial Sequence: Synthetic oligonucleotide
aucuugugauucuugcccu

SEQ ID NO: 1768942 - RNA, 19 nt, Artificial Sequence
  Description of Artificial Sequence: Synthetic oligonucleotide
uugggauccacaccuggaa

SEQ ID NO: 1768943 - RNA, 19 nt, Artificial Sequence
  Description of Artificial Sequence: Synthetic oligonucleotide
ugugauccgguuccguccu

SEQ ID NO: 1768944 - RNA, 19 nt, Artificial Sequence
  Description of Artificial Sequence: Synthetic oligonucleotide
caaaccauagugcuuucca

SEQ ID NO: 1768945 - RNA, 19 nt, Artificial Sequence
  Description of Artificial Sequence: Synthetic oligonucleotide
uuggcuaguuucaccagau

SEQ ID NO: 1768946 - RNA, 19 nt, Artificial Sequence
  Description of Artificial Sequence: Synthetic oligonucleotide
gaugaggcccacguuauuc

SEQ ID NO: 1768947 - RNA, 19 nt, Artificial Sequence
  Description of Artificial Sequence: Synthetic oligonucleotide
uugacuggcucagaugugu

SEQ ID NO: 1768948 - RNA, 19 nt, Artificial Sequence
  Description of Artificial Sequence: Synthetic oligonucleotide
ucucguuguccuccacagg

SEQ ID NO: 1768949 - RNA, 19 nt, Artificial Sequence
  Description of Artificial Sequence: Synthetic oligonucleotide
uggggucuacuccaaacuc

SEQ ID NO: 1768950 - RNA, 19 nt, Artificial Sequence
  Description of Artificial Sequence: Synthetic oligonucleotide
uccgcauguauucacuguu

SEQ ID NO: 1768951 - RNA, 19 nt, Artificial Sequence
  Description of Artificial Sequence: Synthetic oligonucleotide
acacaaaccauagugcuuu

SEQ ID NO: 1768952 - RNA, 19 nt, Artificial Sequence
  Description of Artificial Sequence: Synthetic oligonucleotide
ucuuuacaguccccugggc

SEQ ID NO: 1768953 - RNA, 19 nt, Artificial Sequence
  Description of Artificial Sequence: Synthetic oligonucleotide
uuggguuggacaguaugga

SEQ ID NO: 1768954 - RNA, 19 nt, Artificial Sequence
  Description of Artificial Sequence: Synthetic oligonucleotide
gcccacguuauucucaggg

SEQ ID NO: 1768955 - RNA, 19 nt, Artificial Sequence
  Description of Artificial Sequence: Synthetic oligonucleotide
uugugauucuugcccugcc

SEQ ID NO: 1768956 - RNA, 19 nt, Artificial Sequence
  Description of Artificial Sequence: Synthetic oligonucleotide
gagagcccauugcauuucg

SEQ ID NO: 1768957 - RNA, 19 nt, Artificial Sequence
  Description of Artificial Sequence: Synthetic oligonucleotide
accagauccuucucguugu

SEQ ID NO: 1768958 - RNA, 19 nt, Artificial Sequence
  Description of Artificial Sequence: Synthetic oligonucleotide
caauauugacggcauccug

SEQ ID NO: 1768959 - RNA, 19 nt, Artificial Sequence
  Description of Artificial Sequence: Synthetic oligonucleotide
cuuuacaguccccugggca

SEQ ID NO: 1768960 - RNA, 19 nt, Artificial Sequence
  Description of Artificial Sequence: Synthetic oligonucleotide
ucuugugauucuugcccug

SEQ ID NO: 1768961 - RNA, 19 nt, Artificial Sequence
  Description of Artificial Sequence: Synthetic oligonucleotide
gacauacaauauugacggc

SEQ ID NO: 1768962 - RNA, 19 nt, Artificial Sequence
  Description of Artificial Sequence: Synthetic oligonucleotide
caccagauccuucucguug

SEQ ID NO: 1768963 - RNA, 19 nt, Artificial Sequence
  Description of Artificial Sequence: Synthetic oligonucleotide
gacacucugaaggaacuca

SEQ ID NO: 1768964 - RNA, 19 nt, Artificial Sequence
  Description of Artificial Sequence: Synthetic oligonucleotide
cauccgugucuucaguccc

SEQ ID NO: 1768965 - RNA, 19 nt, Artificial Sequence
  Description of Artificial Sequence: Synthetic oligonucleotide
gauguguccauggcugagc

SEQ ID NO: 1768966 - RNA, 19 nt, Artificial Sequence
  Description of Artificial Sequence: Synthetic oligonucleotide
ugucaccagaugugauccg

SEQ ID NO: 1768967 - RNA, 19 nt, Artificial Sequence
  Description of Artificial Sequence: Synthetic oligonucleotide
gucaccagaugugauccgg

SEQ ID NO: 1768968 - RNA, 19 nt, Artificial Sequence
  Description of Artificial Sequence: Synthetic oligonucleotide
gucuuugagugacauacaa

SEQ ID NO: 1768969 - RNA, 19 nt, Artificial Sequence
  Description of Artificial Sequence: Synthetic oligonucleotide
agccagaugggccacucga

SEQ ID NO: 1768970 - RNA, 19 nt, Artificial Sequence
  Description of Artificial Sequence: Synthetic oligonucleotide
gaagucacuggcaccaaga

SEQ ID NO: 1768971 - RNA, 19 nt, Artificial Sequence
  Description of Artificial Sequence: Synthetic oligonucleotide
ucgaaugccggugcagaag

SEQ ID NO: 1768972 - RNA, 19 nt, Artificial Sequence
  Description of Artificial Sequence: Synthetic oligonucleotide
uguuguccacacaaaccau

SEQ ID NO: 1768973 - RNA, 19 nt, Artificial Sequence
  Description of Artificial Sequence: Synthetic oligonucleotide
cuucacagucauuggccag

SEQ ID NO: 1768974 - RNA, 19 nt, Artificial Sequence
  Description of Artificial Sequence: Synthetic oligonucleotide
ugccgcugcucuuccauag

SEQ ID NO: 1768975 - RNA, 19 nt, Artificial Sequence
  Description of Artificial Sequence: Synthetic oligonucleotide
auagugcuuuccaacacca

SEQ ID NO: 1768976 - RNA, 19 nt, Artificial Sequence
  Description of Artificial Sequence: Synthetic oligonucleotide
cagaugggccacucgaaug

SEQ ID NO: 1768977 - RNA, 19 nt, Artificial Sequence
  Description of Artificial Sequence: Synthetic oligonucleotide
ccaaacucgaagucacugg

SEQ ID NO: 1768978 - RNA, 19 nt, Artificial Sequence
  Description of Artificial Sequence: Synthetic oligonucleotide
uguccaaccccgucuuuac

SEQ ID NO: 1768979 - RNA, 19 nt, Artificial Sequence
  Description of Artificial Sequence: Synthetic oligonucleotide
guuuggcuaguuucaccag

SEQ ID NO: 1768980 - RNA, 19 nt, Artificial Sequence
  Description of Artificial Sequence: Synthetic oligonucleotide
ggcaauuccagccucagcu

SEQ ID NO: 1768981 - RNA, 19 nt, Artificial Sequence
  Description of Artificial Sequence: Synthetic oligonucleotide
uuccgcauguauucacugu

SEQ ID NO: 1768982 - RNA, 19 nt, Artificial Sequence
  Description of Artificial Sequence: Synthetic oligonucleotide
cuugugauucuugcccugc

SEQ ID NO: 1768983 - RNA, 19 nt, Artificial Sequence
  Description of Artificial Sequence: Synthetic oligonucleotide
uguccacacaaaccauagu

SEQ ID NO: 1768984 - RNA, 19 nt, Artificial Sequence
  Description of Artificial Sequence: Synthetic oligonucleotide
uagagagcccauugcauuu

SEQ ID NO: 1768985 - RNA, 19 nt, Artificial Sequence
  Description of Artificial Sequence: Synthetic oligonucleotide
ugccaagcuuuauucggga

SEQ ID NO: 1768986 - RNA, 19 nt, Artificial Sequence
  Description of Artificial Sequence: Synthetic oligonucleotide
ucaccagaugugauccggu

SEQ ID NO: 1768987 - RNA, 19 nt, Artificial Sequence
  Description of Artificial Sequence: Synthetic oligonucleotide
aguauggagcuuggagagg

SEQ ID NO: 1768988 - RNA, 19 nt, Artificial Sequence
  Description of Artificial Sequence: Synthetic oligonucleotide
agcuagggccaacucagga

SEQ ID NO: 1768989 - RNA, 19 nt, Artificial Sequence
  Description of Artificial Sequence: Synthetic oligonucleotide
aggcccacguuauucucag

SEQ ID NO: 1768990 - RNA, 19 nt, Artificial Sequence
  Description of Artificial Sequence: Synthetic oligonucleotide
guauggagcuuggagagga

SEQ ID NO: 1768991 - RNA, 19 nt, Artificial Sequence
  Description of Artificial Sequence: Synthetic oligonucleotide
ggcucagauguguccaugg

SEQ ID NO: 1768992 - RNA, 19 nt, Artificial Sequence
  Description of Artificial Sequence: Synthetic oligonucleotide
ugaaggaacucaggguccu

SEQ ID NO: 1768993 - RNA, 19 nt, Artificial Sequence
  Description of Artificial Sequence: Synthetic oligonucleotide
uagggccaacucaggauca

SEQ ID NO: 1768994 - RNA, 19 nt, Artificial Sequence
  Description of Artificial Sequence: Synthetic oligonucleotide
ugggaggcuagagagccca

SEQ ID NO: 1768995 - RNA, 19 nt, Artificial Sequence
  Description of Artificial Sequence: Synthetic oligonucleotide
aucacaucguagucauccu

SEQ ID NO: 1768996 - RNA, 19 nt, Artificial Sequence
  Description of Artificial Sequence: Synthetic oligonucleotide
uggucaucuucaguagggc

SEQ ID NO: 1768997 - RNA, 19 nt, Artificial Sequence
  Description of Artificial Sequence: Synthetic oligonucleotide
caguguguucacaaaggca

SEQ ID NO: 1768998 - RNA, 19 nt, Artificial Sequence
  Description of Artificial Sequence: Synthetic oligonucleotide
gauguggcaauuccagccu

SEQ ID NO: 1768999 - RNA, 19 nt, Artificial Sequence
  Description of Artificial Sequence: Synthetic oligonucleotide
uauugacggcauccugcug

SEQ ID NO: 1769000 - RNA, 19 nt, Artificial Sequence
  Description of Artificial Sequence: Synthetic oligonucleotide
ugauucucaucuugugauu

SEQ ID NO: 1769001 - RNA, 19 nt, Artificial Sequence
  Description of Artificial Sequence: Synthetic oligonucleotide
ucagcacuggggucuacuc

SEQ ID NO: 1769002 - RNA, 19 nt, Artificial Sequence
  Description of Artificial Sequence: Synthetic oligonucleotide
cuggaagguucucuaggac

SEQ ID NO: 1769003 - RNA, 19 nt, Artificial Sequence
  Description of Artificial Sequence: Synthetic oligonucleotide
acagggcuacccacgaagg

SEQ ID NO: 1769004 - RNA, 19 nt, Artificial Sequence
  Description of Artificial Sequence: Synthetic oligonucleotide
cuacuccaaacucgaaguc

SEQ ID NO: 1769005 - RNA, 19 nt, Artificial Sequence
  Description of Artificial Sequence: Synthetic oligonucleotide
cccagcacggccaaacucc

SEQ ID NO: 1769006 - RNA, 19 nt, Artificial Sequence
  Description of Artificial Sequence: Synthetic oligonucleotide
gaaggcgaugauucucauc

SEQ ID NO: 1769007 - RNA, 19 nt, Artificial Sequence
  Description of Artificial Sequence: Synthetic oligonucleotide
agagagcccauugcauuuc

SEQ ID NO: 1769008 - RNA, 19 nt, Artificial Sequence
  Description of Artificial Sequence: Synthetic oligonucleotide
ugcagcuacccucccucca

SEQ ID NO: 1769009 - RNA, 19 nt, Artificial Sequence
  Description of Artificial Sequence: Synthetic oligonucleotide
cuacccucccuccagucuc

SEQ ID NO: 1769010 - RNA, 19 nt, Artificial Sequence
  Description of Artificial Sequence: Synthetic oligonucleotide
ggguuggacaguauggagc

SEQ ID NO: 1769011 - RNA, 19 nt, Artificial Sequence
  Description of Artificial Sequence: Synthetic oligonucleotide
uugcuucgggucuuugagu

SEQ ID NO: 1769012 - RNA, 19 nt, Artificial Sequence
  Description of Artificial Sequence: Synthetic oligonucleotide
guauucacuguuguccaca

SEQ ID NO: 1769013 - RNA, 19 nt, Artificial Sequence
  Description of Artificial Sequence: Synthetic oligonucleotide
aggugaucuugcccuuggg

SEQ ID NO: 1769014 - RNA, 19 nt, Artificial Sequence
  Description of Artificial Sequence: Synthetic oligonucleotide
uuccguccuugccauucag

SEQ ID NO: 1769015 - RNA, 19 nt, Artificial Sequence
  Description of Artificial Sequence: Synthetic oligonucleotide
cccauugcauuucgaaugg

SEQ ID NO: 1769016 - RNA, 19 nt, Artificial Sequence
  Description of Artificial Sequence: Synthetic oligonucleotide
cuccuccccaaaauugaug

SEQ ID NO: 1769017 - RNA, 19 nt, Artificial Sequence
  Description of Artificial Sequence: Synthetic oligonucleotide
uccauuccgcauguauuca

SEQ ID NO: 1769018 - RNA, 19 nt, Artificial Sequence
  Description of Artificial Sequence: Synthetic oligonucleotide
uccguccuugccauucagu

SEQ ID NO: 1769019 - RNA, 19 nt, Artificial Sequence
  Description of Artificial Sequence: Synthetic oligonucleotide
ggcagaugcagcuacccuc

SEQ ID NO: 1769020 - RNA, 19 nt, Artificial Sequence
  Description of Artificial Sequence: Synthetic oligonucleotide
cagucauuggccaguguga

SEQ ID NO: 1769021 - RNA, 19 nt, Artificial Sequence
  Description of Artificial Sequence: Synthetic oligonucleotide
gagugacauacaauauuga

SEQ ID NO: 1769022 - RNA, 19 nt, Artificial Sequence
  Description of Artificial Sequence: Synthetic oligonucleotide
agcuuuauucgggauguaa

SEQ ID NO: 1769023 - RNA, 19 nt, Artificial Sequence
  Description of Artificial Sequence: Synthetic oligonucleotide
agcuacccucccuccaguc

SEQ ID NO: 1769024 - RNA, 19 nt, Artificial Sequence
  Description of Artificial Sequence: Synthetic oligonucleotide
cauacaauauugacggcau

SEQ ID NO: 1769025 - RNA, 19 nt, Artificial Sequence
  Description of Artificial Sequence: Synthetic oligonucleotide
gggaaggaagucuccauuc

SEQ ID NO: 1769026 - RNA, 19 nt, Artificial Sequence
  Description of Artificial Sequence: Synthetic oligonucleotide
cauugcauuucgaauggcu

SEQ ID NO: 1769027 - RNA, 19 nt, Artificial Sequence
  Description of Artificial Sequence: Synthetic oligonucleotide
ccaagacccagcauggcac

SEQ ID NO: 1769028 - RNA, 19 nt, Artificial Sequence
  Description of Artificial Sequence: Synthetic oligonucleotide
agauguguccauggcugag

SEQ ID NO: 1769029 - RNA, 19 nt, Artificial Sequence
  Description of Artificial Sequence: Synthetic oligonucleotide
cuacccacgaaggcgauga

SEQ ID NO: 1769030 - RNA, 19 nt, Artificial Sequence
  Description of Artificial Sequence: Synthetic oligonucleotide
aggaacucaggguccugca

SEQ ID NO: 1769031 - RNA, 19 nt, Artificial Sequence
  Description of Artificial Sequence: Synthetic oligonucleotide
cugcuuaggucaggaagcc

SEQ ID NO: 1769032 - RNA, 19 nt, Artificial Sequence
  Description of Artificial Sequence: Synthetic oligonucleotide
agaugcagcuacccucccu

SEQ ID NO: 1769033 - RNA, 19 nt, Artificial Sequence
  Description of Artificial Sequence: Synthetic oligonucleotide
auggagcuuggagaggaug

SEQ ID NO: 1769034 - RNA, 19 nt, Artificial Sequence
  Description of Artificial Sequence: Synthetic oligonucleotide
ugacuggcucagauguguc

SEQ ID NO: 1769035 - RNA, 19 nt, Artificial Sequence
  Description of Artificial Sequence: Synthetic oligonucleotide
acucgaaugccggugcaga

SEQ ID NO: 1769036 - RNA, 19 nt, Artificial Sequence
  Description of Artificial Sequence: Synthetic oligonucleotide
cuugcccuuggguuggaca

SEQ ID NO: 1769037 - RNA, 19 nt, Artificial Sequence
  Description of Artificial Sequence: Synthetic oligonucleotide
caaugucagcagacucugc

SEQ ID NO: 1769038 - RNA, 19 nt, Artificial Sequence
  Description of Artificial Sequence: Synthetic oligonucleotide
cuucaccagccagaauagg

SEQ ID NO: 1769039 - RNA, 19 nt, Artificial Sequence
  Description of Artificial Sequence: Synthetic oligonucleotide
ucccuccagucucacuucu

SEQ ID NO: 1769040 - RNA, 19 nt, Artificial Sequence
  Description of Artificial Sequence: Synthetic oligonucleotide
gaggaugcggccaguguca

SEQ ID NO: 1769041 - RNA, 19 nt, Artificial Sequence
  Description of Artificial Sequence: Synthetic oligonucleotide
ggugcuucagagccagaug

SEQ ID NO: 1769042 - RNA, 19 nt, Artificial Sequence
  Description of Artificial Sequence: Synthetic oligonucleotide
ccagucucacuucuuuucc

SEQ ID NO: 1769043 - RNA, 19 nt, Artificial Sequence
  Description of Artificial Sequence: Synthetic oligonucleotide
ugauccgguuccguccuug

SEQ ID NO: 1769044 - RNA, 19 nt, Artificial Sequence
  Description of Artificial Sequence: Synthetic oligonucleotide
cagggcuacccacgaaggc

SEQ ID NO: 1769045 - RNA, 19 nt, Artificial Sequence
  Description of Artificial Sequence: Synthetic oligonucleotide
uuaggucaggaagcccagc

SEQ ID NO: 1769046 - RNA, 19 nt, Artificial Sequence
  Description of Artificial Sequence: Synthetic oligonucleotide
caaccccgucuuuacaguc

SEQ ID NO: 1769047 - RNA, 19 nt, Artificial Sequence
  Description of Artificial Sequence: Synthetic oligonucleotide
gcuuaggucaggaagccca

SEQ ID NO: 1769048 - RNA, 19 nt, Artificial Sequence
  Description of Artificial Sequence: Synthetic oligonucleotide
ugaugucaacauucacuuu

SEQ ID NO: 1769049 - RNA, 19 nt, Artificial Sequence
  Description of Artificial Sequence: Synthetic oligonucleotide
uuacaguccccugggcaga

SEQ ID NO: 1769050 - RNA, 19 nt, Artificial Sequence
  Description of Artificial Sequence: Synthetic oligonucleotide
guguggucagcacuucaca

SEQ ID NO: 1769051 - RNA, 19 nt, Artificial Sequence
  Description of Artificial Sequence: Synthetic oligonucleotide
aucagccaagcuaggcccg

SEQ ID NO: 1769052 - RNA, 19 nt, Artificial Sequence
  Description of Artificial Sequence: Synthetic oligonucleotide
ugcuuaggucaggaagccc

SEQ ID NO: 1769053 - RNA, 19 nt, Artificial Sequence
  Description of Artificial Sequence: Synthetic oligonucleotide
cgaaugccggugcagaagg

SEQ ID NO: 1769054 - RNA, 19 nt, Artificial Sequence
  Description of Artificial Sequence: Synthetic oligonucleotide
ggucaucuucaguagggca

SEQ ID NO: 1769055 - RNA, 19 nt, Artificial Sequence
  Description of Artificial Sequence: Synthetic oligonucleotide
uccgugucuucagucccag

SEQ ID NO: 1769056 - RNA, 19 nt, Artificial Sequence
  Description of Artificial Sequence: Synthetic oligonucleotide
caagcuuuauucgggaugu

SEQ ID NO: 1769057 - RNA, 19 nt, Artificial Sequence
  Description of Artificial Sequence: Synthetic oligonucleotide
cacgaaggcgaugauucuc

SEQ ID NO: 1769058 - RNA, 19 nt, Artificial Sequence
  Description of Artificial Sequence: Synthetic oligonucleotide
cgaauggcuucguuguugg

SEQ ID NO: 1769059 - RNA, 19 nt, Artificial Sequence
  Description of Artificial Sequence: Synthetic oligonucleotide
ccaagcuaggcccgggagg

SEQ ID NO: 1769060 - RNA, 19 nt, Artificial Sequence
  Description of Artificial Sequence: Synthetic oligonucleotide
uggcuaguuucaccagauc

SEQ ID NO: 1769061 - RNA, 19 nt, Artificial Sequence
  Description of Artificial Sequence: Synthetic oligonucleotide
agccagaauaggagaacug

SEQ ID NO: 1769062 - RNA, 19 nt, Artificial Sequence
  Description of Artificial Sequence: Synthetic oligonucleotide
gugcuuuccaacaccaucu

SEQ ID NO: 1769063 - RNA, 19 nt, Artificial Sequence
  Description of Artificial Sequence: Synthetic oligonucleotide
uucgaauggcuucguuguu

SEQ ID NO: 1769064 - RNA, 19 nt, Artificial Sequence
  Description of Artificial Sequence: Synthetic oligonucleotide
cgucuuuacaguccccugg

SEQ ID NO: 1769065 - RNA, 19 nt, Artificial Sequence
  Description of Artificial Sequence: Synthetic oligonucleotide
ggcuucguuguugggaucc

SEQ ID NO: 1769066 - RNA, 19 nt, Artificial Sequence
  Description of Artificial Sequence: Synthetic oligonucleotide
ccguccuugccauucagug

SEQ ID NO: 1769067 - RNA, 19 nt, Artificial Sequence
  Description of Artificial Sequence: Synthetic oligonucleotide
uucgggucuuugagugaca

SEQ ID NO: 1769068 - RNA, 19 nt, Artificial Sequence
  Description of Artificial Sequence: Synthetic oligonucleotide
ucacaaaggcagucagcuu

SEQ ID NO: 1769069 - RNA, 19 nt, Artificial Sequence
  Description of Artificial Sequence: Synthetic oligonucleotide
gcagaugcagcuacccucc

SEQ ID NO: 1769070 - RNA, 19 nt, Artificial Sequence
  Description of Artificial Sequence: Synthetic oligonucleotide
uauggagcuuggagaggau

SEQ ID NO: 1769071 - RNA, 19 nt, Artificial Sequence
  Description of Artificial Sequence: Synthetic oligonucleotide
ccuuggguuggacaguaug

SEQ ID NO: 1769072 - RNA, 19 nt, Artificial Sequence
  Description of Artificial Sequence: Synthetic oligonucleotide
ucgggucuuugagugacau

SEQ ID NO: 1769073 - RNA, 19 nt, Artificial Sequence
  Description of Artificial Sequence: Synthetic oligonucleotide
auagaaacacgaagagcua

SEQ ID NO: 1769074 - RNA, 19 nt, Artificial Sequence
  Description of Artificial Sequence: Synthetic oligonucleotide
gugacaucugcauggcaua

SEQ ID NO: 1769075 - RNA, 19 nt, Artificial Sequence
  Description of Artificial Sequence: Synthetic oligonucleotide
caugcugcuuaggucagga

SEQ ID NO: 1769076 - RNA, 19 nt, Artificial Sequence
  Description of Artificial Sequence: Synthetic oligonucleotide
ucgggauguaaaggcggca

SEQ ID NO: 1769077 - RNA, 19 nt, Artificial Sequence
  Description of Artificial Sequence: Synthetic oligonucleotide
uacccucccuccagucuca

SEQ ID NO: 1769078 - RNA, 19 nt, Artificial Sequence
  Description of Artificial Sequence: Synthetic oligonucleotide
cugcaucacaucguaguca

SEQ ID NO: 1769079 - RNA, 19 nt, Artificial Sequence
  Description of Artificial Sequence: Synthetic oligonucleotide
gagcuagggccaacucagg

SEQ ID NO: 1769080 - RNA, 19 nt, Artificial Sequence
  Description of Artificial Sequence: Synthetic oligonucleotide
gcuuuauucgggauguaaa

SEQ ID NO: 1769081 - RNA, 19 nt, Artificial Sequence
  Description of Artificial Sequence: Synthetic oligonucleotide
gaggcccacguuauucuca

SEQ ID NO: 1769082 - RNA, 19 nt, Artificial Sequence
  Description of Artificial Sequence: Synthetic oligonucleotide
uggcucagauguguccaug

SEQ ID NO: 1769083 - RNA, 19 nt, Artificial Sequence
  Description of Artificial Sequence: Synthetic oligonucleotide
cagaugugauccgguuccg

SEQ ID NO: 1769084 - RNA, 19 nt, Artificial Sequence
  Description of Artificial Sequence: Synthetic oligonucleotide
cauuggccagugugaugag

SEQ ID NO: 1769085 - RNA, 19 nt, Artificial Sequence
  Description of Artificial Sequence: Synthetic oligonucleotide
aggcguuuggcuaguuuca

SEQ ID NO: 1769086 - RNA, 19 nt, Artificial Sequence
  Description of Artificial Sequence: Synthetic oligonucleotide
augggccacucgaaugccg

SEQ ID NO: 1769087 - RNA, 19 nt, Artificial Sequence
  Description of Artificial Sequence: Synthetic oligonucleotide
uauguccaaccccgucuuu

SEQ ID NO: 1769088 - RNA, 19 nt, Artificial Sequence
  Description of Artificial Sequence: Synthetic oligonucleotide
ugcggcugcccgccgugcc

SEQ ID NO: 1769089 - RNA, 19 nt, Artificial Sequence
  Description of Artificial Sequence: Synthetic oligonucleotide
ccauagugcuuuccaacac

SEQ ID NO: 1769090 - RNA, 19 nt, Artificial Sequence
  Description of Artificial Sequence: Synthetic oligonucleotide
ggcaucauccgugucuuca

SEQ ID NO: 1769091 - RNA, 19 nt, Artificial Sequence
  Description of Artificial Sequence: Synthetic oligonucleotide
cacggccaaacuccugcug

SEQ ID NO: 1769092 - RNA, 19 nt, Artificial Sequence
  Description of Artificial Sequence: Synthetic oligonucleotide
ugaugaggcccacguuauu

SEQ ID NO: 1769093 - RNA, 19 nt, Artificial Sequence
  Description of Artificial Sequence: Synthetic oligonucleotide
gguugcuucgggucuuuga

SEQ ID NO: 1769094 - RNA, 19 nt, Artificial Sequence
  Description of Artificial Sequence: Synthetic oligonucleotide
auguccaaccccgucuuua

SEQ ID NO: 1769095 - RNA, 19 nt, Artificial Sequence
  Description of Artificial Sequence: Synthetic oligonucleotide
agccaagcuaggcccggga

SEQ ID NO: 1769096 - RNA, 19 nt, Artificial Sequence
  Description of Artificial Sequence: Synthetic oligonucleotide
agaugugauccgguuccgu

SEQ ID NO: 1769097 - RNA, 19 nt, Artificial Sequence
  Description of Artificial Sequence: Synthetic oligonucleotide
ggcaucagccaagcuaggc

SEQ ID NO: 1769098 - RNA, 19 nt, Artificial Sequence
  Description of Artificial Sequence: Synthetic oligonucleotide
ugaguguggucagcacuuc

SEQ ID NO: 1769099 - RNA, 19 nt, Artificial Sequence
  Description of Artificial Sequence: Synthetic oligonucleotide
gccaacucaggaucagcac

SEQ ID NO: 1769100 - RNA, 19 nt, Artificial Sequence
  Description of Artificial Sequence: Synthetic oligonucleotide
gccacucgaaugccggugc

SEQ ID NO: 1769101 - RNA, 19 nt, Artificial Sequence
  Description of Artificial Sequence: Synthetic oligonucleotide
cuucguuguugggauccac

SEQ ID NO: 1769102 - RNA, 19 nt, Artificial Sequence
  Description of Artificial Sequence: Synthetic oligonucleotide
gagaacugaugagggcauc

SEQ ID NO: 1769103 - RNA, 19 nt, Artificial Sequence
  Description of Artificial Sequence: Synthetic oligonucleotide
gccaagcuaggcccgggag

SEQ ID NO: 1769104 - RNA, 19 nt, Artificial Sequence
  Description of Artificial Sequence: Synthetic oligonucleotide
augcggccagugucagggg

SEQ ID NO: 1769105 - RNA, 19 nt, Artificial Sequence
  Description of Artificial Sequence: Synthetic oligonucleotide
ccauuccgcauguauucac

SEQ ID NO: 1769106 - RNA, 19 nt, Artificial Sequence
  Description of Artificial Sequence: Synthetic oligonucleotide
cucccuccagucucacuuc

SEQ ID NO: 1769107 - RNA, 19 nt, Artificial Sequence
  Description of Artificial Sequence: Synthetic oligonucleotide
gccaaacucugcucccugc

SEQ ID NO: 1769108 - RNA, 19 nt, Artificial Sequence
  Description of Artificial Sequence: Synthetic oligonucleotide
ugccggugcuucagagcca

SEQ ID NO: 1769109 - RNA, 19 nt, Artificial Sequence
  Description of Artificial Sequence: Synthetic oligonucleotide
agggccaacucaggaucag

SEQ ID NO: 1769110 - RNA, 19 nt, Artificial Sequence
  Description of Artificial Sequence: Synthetic oligonucleotide
cuggggucuacuccaaacu

SEQ ID NO: 1769111 - RNA, 19 nt, Artificial Sequence
  Description of Artificial Sequence: Synthetic oligonucleotide
ggcgucaaugucagcagac

SEQ ID NO: 1769112 - RNA, 19 nt, Artificial Sequence
  Description of Artificial Sequence: Synthetic oligonucleotide
gguuccguccuugccauuc

SEQ ID NO: 1769113 - RNA, 19 nt, Artificial Sequence
  Description of Artificial Sequence: Synthetic oligonucleotide
aggaugcggccagugucag

SEQ ID NO: 1769114 - RNA, 19 nt, Artificial Sequence
  Description of Artificial Sequence: Synthetic oligonucleotide
cgaugauucucaucuugug

SEQ ID NO: 1769115 - RNA, 19 nt, Artificial Sequence
  Description of Artificial Sequence: Synthetic oligonucleotide
guuauucucaggguugcuu

SEQ ID NO: 1769116 - RNA, 19 nt, Artificial Sequence
  Description of Artificial Sequence: Synthetic oligonucleotide
gacucugcuuggccaaacu

SEQ ID NO: 1769117 - RNA, 19 nt, Artificial Sequence
  Description of Artificial Sequence: Synthetic oligonucleotide
gggauguaaaggcggcaga

SEQ ID NO: 1769118 - RNA, 19 nt, Artificial Sequence
  Description of Artificial Sequence: Synthetic oligonucleotide
guuccguccuugccauuca

SEQ ID NO: 1769119 - RNA, 19 nt, Artificial Sequence
  Description of Artificial Sequence: Synthetic oligonucleotide
gggucuacuccaaacucga

SEQ ID NO: 1769120 - RNA, 19 nt, Artificial Sequence
  Description of Artificial Sequence: Synthetic oligonucleotide
ccaacaccaucuugccacc

SEQ ID NO: 1769121 - RNA, 19 nt, Artificial Sequence
  Description of Artificial Sequence: Synthetic oligonucleotide
ggccaacucaggaucagca

SEQ ID NO: 1769122 - RNA, 19 nt, Artificial Sequence
  Description of Artificial Sequence: Synthetic oligonucleotide
cucgaaugccggugcagaa

SEQ ID NO: 1769123 - RNA, 19 nt, Artificial Sequence
  Description of Artificial Sequence: Synthetic oligonucleotide
caucuaagucuauguccaa

SEQ ID NO: 1769124 - RNA, 19 nt, Artificial Sequence
  Description of Artificial Sequence: Synthetic oligonucleotide
ccugccggugcuucagagc

SEQ ID NO: 1769125 - RNA, 19 nt, Artificial Sequence
  Description of Artificial Sequence: Synthetic oligonucleotide
ggcagacagcacaucuaag

SEQ ID NO: 1769126 - RNA, 19 nt, Artificial Sequence
  Description of Artificial Sequence: Synthetic oligonucleotide
guccaaccccgucuuuaca

SEQ ID NO: 1769127 - RNA, 19 nt, Artificial Sequence
  Description of Artificial Sequence: Synthetic oligonucleotide
caggguccugcaucacauc

SEQ ID NO: 1769128 - RNA, 19 nt, Artificial Sequence
  Description of Artificial Sequence: Synthetic oligonucleotide
agucuauguccaaccccgu

SEQ ID NO: 1769129 - RNA, 19 nt, Artificial Sequence
  Description of Artificial Sequence: Synthetic oligonucleotide
cacacaaaccauagugcuu

SEQ ID NO: 1769130 - RNA, 19 nt, Artificial Sequence
  Description of Artificial Sequence: Synthetic oligonucleotide
ggaugcggccagugucagg

SEQ ID NO: 1769131 - RNA, 19 nt, Artificial Sequence
  Description of Artificial Sequence: Synthetic oligonucleotide
agagcccauugcauuucga

SEQ ID NO: 1769132 - RNA, 19 nt, Artificial Sequence
  Description of Artificial Sequence: Synthetic oligonucleotide
ucgaagucacuggcaccaa

SEQ ID NO: 1769133 - RNA, 19 nt, Artificial Sequence
  Description of Artificial Sequence: Synthetic oligonucleotide
acucugcucccugcaguga

SEQ ID NO: 1769134 - RNA, 19 nt, Artificial Sequence
  Description of Artificial Sequence: Synthetic oligonucleotide
aagcuuuauucgggaugua

SEQ ID NO: 1769135 - RNA, 19 nt, Artificial Sequence
  Description of Artificial Sequence: Synthetic oligonucleotide
ccaacucaggaucagcacu

SEQ ID NO: 1769136 - RNA, 19 nt, Artificial Sequence
  Description of Artificial Sequence: Synthetic oligonucleotide
gccagugugaugaggccca

SEQ ID NO: 1769137 - RNA, 19 nt, Artificial Sequence
  Description of Artificial Sequence: Synthetic oligonucleotide
aagcuaggcccgggaggca

SEQ ID NO: 1769138 - RNA, 19 nt, Artificial Sequence
  Description of Artificial Sequence: Synthetic oligonucleotide
uacccacgaaggcgaugau

SEQ ID NO: 1769139 - RNA, 19 nt, Artificial Sequence
  Description of Artificial Sequence: Synthetic oligonucleotide
ccaaacucugcucccugca

SEQ ID NO: 1769140 - RNA, 19 nt, Artificial Sequence
  Description of Artificial Sequence: Synthetic oligonucleotide
cuaggcccgggaggcacug

SEQ ID NO: 1769141 - RNA, 19 nt, Artificial Sequence
  Description of Artificial Sequence: Synthetic oligonucleotide
gaagguucucuaggacacu

SEQ ID NO: 1769142 - RNA, 19 nt, Artificial Sequence
  Description of Artificial Sequence: Synthetic oligonucleotide
gcuagggccaacucaggau

SEQ ID NO: 1769143 - RNA, 19 nt, Artificial Sequence
  Description of Artificial Sequence: Synthetic oligonucleotide
ccgucuuuacaguccccug

SEQ ID NO: 1769144 - RNA, 19 nt, Artificial Sequence
  Description of Artificial Sequence: Synthetic oligonucleotide
cgggauguaaaggcggcag

SEQ ID NO: 1769145 - RNA, 19 nt, Artificial Sequence
  Description of Artificial Sequence: Synthetic oligonucleotide
ccauggcugagcuggcguc

SEQ ID NO: 1769146 - RNA, 19 nt, Artificial Sequence
  Description of Artificial Sequence: Synthetic oligonucleotide
ugacggcauccugcugggc

SEQ ID NO: 1769147 - RNA, 19 nt, Artificial Sequence
  Description of Artificial Sequence: Synthetic oligonucleotide
gggcuacccacgaaggcga

SEQ ID NO: 1769148 - RNA, 19 nt, Artificial Sequence
  Description of Artificial Sequence: Synthetic oligonucleotide
ugcagccgggugggaagga

SEQ ID NO: 1769149 - RNA, 19 nt, Artificial Sequence
  Description of Artificial Sequence: Synthetic oligonucleotide
caucauccgugucuucagu

SEQ ID NO: 1769150 - RNA, 19 nt, Artificial Sequence
  Description of Artificial Sequence: Synthetic oligonucleotide
cgaagucacuggcaccaag

SEQ ID NO: 1769151 - RNA, 19 nt, Artificial Sequence
  Description of Artificial Sequence: Synthetic oligonucleotide
gcgaugauucucaucuugu

SEQ ID NO: 1769152 - RNA, 19 nt, Artificial Sequence
  Description of Artificial Sequence: Synthetic oligonucleotide
ggaagucuccauuccgcau

SEQ ID NO: 1769153 - RNA, 19 nt, Artificial Sequence
  Description of Artificial Sequence: Synthetic oligonucleotide
gcccgggaggcacugucac

SEQ ID NO: 1769154 - RNA, 19 nt, Artificial Sequence
  Description of Artificial Sequence: Synthetic oligonucleotide
gaucagcacuggggucuac

SEQ ID NO: 1769155 - RNA, 19 nt, Artificial Sequence
  Description of Artificial Sequence: Synthetic oligonucleotide
gcuagagagcccauugcau

SEQ ID NO: 1769156 - RNA, 19 nt, Artificial Sequence
  Description of Artificial Sequence: Synthetic oligonucleotide
cauuucgaauggcuucguu

SEQ ID NO: 1769157 - RNA, 19 nt, Artificial Sequence
  Description of Artificial Sequence: Synthetic oligonucleotide
ggaacucaggguccugcau

SEQ ID NO: 1769158 - RNA, 19 nt, Artificial Sequence
  Description of Artificial Sequence: Synthetic oligonucleotide
gcuacccacgaaggcgaug

SEQ ID NO: 1769159 - RNA, 19 nt, Artificial Sequence
  Description of Artificial Sequence: Synthetic oligonucleotide
cacugucaccagaugugau

SEQ ID NO: 1769160 - RNA, 19 nt, Artificial Sequence
  Description of Artificial Sequence: Synthetic oligonucleotide
gcuacccucccuccagucu

SEQ ID NO: 1769161 - RNA, 19 nt, Artificial Sequence
  Description of Artificial Sequence: Synthetic oligonucleotide
ggucagcacuucacaguca

SEQ ID NO: 1769162 - RNA, 19 nt, Artificial Sequence
  Description of Artificial Sequence: Synthetic oligonucleotide
caccuccuccuccccaaaa

SEQ ID NO: 1769163 - RNA, 19 nt, Artificial Sequence
  Description of Artificial Sequence: Synthetic oligonucleotide
cacgaagagcuagggccaa

SEQ ID NO: 1769164 - RNA, 19 nt, Artificial Sequence
  Description of Artificial Sequence: Synthetic oligonucleotide
ggacaguauggagcuugga

SEQ ID NO: 1769165 - RNA, 19 nt, Artificial Sequence
  Description of Artificial Sequence: Synthetic oligonucleotide
uugaggcguuuggcuaguu

SEQ ID NO: 1769166 - RNA, 19 nt, Artificial Sequence
  Description of Artificial Sequence: Synthetic oligonucleotide
ccgccgugccuccuccucc

SEQ ID NO: 1769167 - RNA, 19 nt, Artificial Sequence
  Description of Artificial Sequence: Synthetic oligonucleotide
cugcccgccgugccuccuc

SEQ ID NO: 1769168 - RNA, 19 nt, Artificial Sequence
  Description of Artificial Sequence: Synthetic oligonucleotide
cugccgcugcucuuccaua

SEQ ID NO: 1769169 - RNA, 19 nt, Artificial Sequence
  Description of Artificial Sequence: Synthetic oligonucleotide
cugcggcugcccgccgugc

SEQ ID NO: 1769170 - RNA, 19 nt, Artificial Sequence
  Description of Artificial Sequence: Synthetic oligonucleotide
ccucccuccagucucacuu

SEQ ID NO: 1769171 - RNA, 19 nt, Artificial Sequence
  Description of Artificial Sequence: Synthetic oligonucleotide
gccgcugcucuuccauaga

SEQ ID NO: 1769172 - RNA, 19 nt, Artificial Sequence
  Description of Artificial Sequence: Synthetic oligonucleotide
uaggcccgggaggcacugu

SEQ ID NO: 1769173 - RNA, 19 nt, Artificial Sequence
  Description of Artificial Sequence: Synthetic oligonucleotide
cuugaggcguuuggcuagu

SEQ ID NO: 1769174 - RNA, 19 nt, Artificial Sequence
  Description of Artificial Sequence: Synthetic oligonucleotide
cggcagacagcacaucuaa

SEQ ID NO: 1769175 - RNA, 19 nt, Artificial Sequence
  Description of Artificial Sequence: Synthetic oligonucleotide
gccaagcuuuauucgggau

SEQ ID NO: 1769176 - RNA, 19 nt, Artificial Sequence
  Description of Artificial Sequence: Synthetic oligonucleotide
cagugucaggggugagugu

SEQ ID NO: 1769177 - RNA, 19 nt, Artificial Sequence
  Description of Artificial Sequence: Synthetic oligonucleotide
gcuucguuguugggaucca

SEQ ID NO: 1769178 - RNA, 19 nt, Artificial Sequence
  Description of Artificial Sequence: Synthetic oligonucleotide
ggucuacuccaaacucgaa

SEQ ID NO: 1769179 - RNA, 19 nt, Artificial Sequence
  Description of Artificial Sequence: Synthetic oligonucleotide
ccccgucuuuacagucccc

SEQ ID NO: 1769180 - RNA, 19 nt, Artificial Sequence
  Description of Artificial Sequence: Synthetic oligonucleotide
ccgcugcucuuccauagaa

SEQ ID NO: 1769181 - RNA, 19 nt, Artificial Sequence
  Description of Artificial Sequence: Synthetic oligonucleotide
ggguugcuucgggucuuug

SEQ ID NO: 1769182 - RNA, 19 nt, Artificial Sequence
  Description of Artificial Sequence: Synthetic oligonucleotide
ccaaccccgucuuuacagu

SEQ ID NO: 1769183 - RNA, 19 nt, Artificial Sequence
  Description of Artificial Sequence: Synthetic oligonucleotide
gccggugcagaaggugauc

SEQ ID NO: 1769184 - RNA, 19 nt, Artificial Sequence
  Description of Artificial Sequence: Synthetic oligonucleotide
gcggcagacagcacaucua

SEQ ID NO: 1769185 - RNA, 19 nt, Artificial Sequence
  Description of Artificial Sequence: Synthetic oligonucleotide
cagcuacccucccuccagu

SEQ ID NO: 1769186 - RNA, 19 nt, Artificial Sequence
  Description of Artificial Sequence: Synthetic oligonucleotide
ccagaugggccacucgaau

SEQ ID NO: 1769187 - RNA, 19 nt, Artificial Sequence
  Description of Artificial Sequence: Synthetic oligonucleotide
ccacucgaaugccggugca

SEQ ID NO: 1769188 - RNA, 19 nt, Artificial Sequence
  Description of Artificial Sequence: Synthetic oligonucleotide
ggcugcccgccgugccucc

SEQ ID NO: 1769189 - RNA, 19 nt, Artificial Sequence
  Description of Artificial Sequence: Synthetic oligonucleotide
gcccuuggguuggacagua

SEQ ID NO: 1769190 - RNA, 19 nt, Artificial Sequence
  Description of Artificial Sequence: Synthetic oligonucleotide
cccgucuuuacaguccccu

SEQ ID NO: 1769191 - RNA, 19 nt, Artificial Sequence
  Description of Artificial Sequence: Synthetic oligonucleotide
gcacggccaaacuccugcu

SEQ ID NO: 1769192 - RNA, 19 nt, Artificial Sequence
  Description of Artificial Sequence: Synthetic oligonucleotide
ggcccgggaggcacuguca

SEQ ID NO: 1769193 - RNA, 19 nt, Artificial Sequence
  Description of Artificial Sequence: Synthetic oligonucleotide
ccggugcagaaggugaucu

SEQ ID NO: 1769194 - RNA, 19 nt, Artificial Sequence
  Description of Artificial Sequence: Synthetic oligonucleotide
ccagcacggccaaacuccu

SEQ ID NO: 1769195 - RNA, 19 nt, Artificial Sequence
  Description of Artificial Sequence: Synthetic oligonucleotide
gcagccgggugggaaggaa

SEQ ID NO: 1769196 - RNA, 19 nt, Artificial Sequence
  Description of Artificial Sequence: Synthetic oligonucleotide
ccgggugggaaggaagucu

SEQ ID NO: 1769197 - RNA, 19 nt, Artificial Sequence
  Description of Artificial Sequence: Synthetic oligonucleotide
ccuccuccccaaaauugau

SEQ ID NO: 1769198 - RNA, 19 nt, Artificial Sequence
  Description of Artificial Sequence: Synthetic oligonucleotide
ccacgaaggcgaugauucu

SEQ ID NO: 1769199 - RNA, 19 nt, Artificial Sequence
  Description of Artificial Sequence: Synthetic oligonucleotide
gcauuucgaauggcuucgu

SEQ ID NO: 1769200 - RNA, 19 nt, Artificial Sequence
  Description of Artificial Sequence: Synthetic oligonucleotide
ggaggcuagagagcccauu

SEQ ID NO: 1769201 - RNA, 19 nt, Artificial Sequence
  Description of Artificial Sequence: Synthetic oligonucleotide
cgaagagcuagggccaacu

SEQ ID NO: 1769202 - RNA, 19 nt, Artificial Sequence
  Description of Artificial Sequence: Synthetic oligonucleotide
ccgguuccguccuugccau

SEQ ID NO: 1769203 - RNA, 19 nt, Artificial Sequence
  Description of Artificial Sequence: Synthetic oligonucleotide
caggguugcuucgggucuu

SEQ ID NO: 1769204 - RNA, 19 nt, Artificial Sequence
  Description of Artificial Sequence: Synthetic oligonucleotide
gugauccgguuccguccuu

SEQ ID NO: 1769205 - RNA, 19 nt, Artificial Sequence
  Description of Artificial Sequence: Synthetic oligonucleotide
gcggcugcccgccgugccu

SEQ ID NO: 1769206 - RNA, 19 nt, Artificial Sequence
  Description of Artificial Sequence: Synthetic oligonucleotide
gcuaggcccgggaggcacu

SEQ ID NO: 1769207 - RNA, 19 nt, Artificial Sequence
  Description of Artificial Sequence: Synthetic oligonucleotide
ccggugcuucagagccaga

SEQ ID NO: 1769208 - RNA, 19 nt, Artificial Sequence
  Description of Artificial Sequence: Synthetic oligonucleotide
ggcuacccacgaaggcgau

SEQ ID NO: 1769209 - RNA, 19 nt, Artificial Sequence
  Description of Artificial Sequence: Synthetic oligonucleotide
gggaggcuagagagcccau

SEQ ID NO: 1769210 - RNA, 19 nt, Artificial Sequence
  Description of Artificial Sequence: Synthetic oligonucleotide
cccuuggguuggacaguau

SEQ ID NO: 1769211 - RNA, 19 nt, Artificial Sequence
  Description of Artificial Sequence: Synthetic oligonucleotide
cgguuccguccuugccauu

SEQ ID NO: 1769212 - RNA, 19 nt, Artificial Sequence
  Description of Artificial Sequence: Synthetic oligonucleotide
uucaacuacaccauaaugg

SEQ ID NO: 1769213 - RNA, 19 nt, Artificial Sequence
  Description of Artificial Sequence: Synthetic oligonucleotide
aacaauaguauauauauau

SEQ ID NO: 1769214 - RNA, 19 nt, Artificial Sequence
  Description of Artificial Sequence: Synthetic oligonucleotide
acaguuguaagaucuaugc

SEQ ID NO: 1769215 - RNA, 19 nt, Artificial Sequence
  Description of Artificial Sequence: Synthetic oligonucleotide
aauaacuaacuuaugcugc

SEQ ID NO: 1769216 - RNA, 19 nt, Artificial Sequence
  Description of Artificial Sequence: Synthetic oligonucleotide
aguauauauauauauaaca

SEQ ID NO: 1769217 - RNA, 19 nt, Artificial Sequence
  Description of Artificial Sequence: Synthetic oligonucleotide
uguguuaguguucauaucc

SEQ ID NO: 1769218 - RNA, 19 nt, Artificial Sequence
  Description of Artificial Sequence: Synthetic oligonucleotide
aaaggauaaacaauugagc

SEQ ID NO: 1769219 - RNA, 19 nt, Artificial Sequence
  Description of Artificial Sequence: Synthetic oligonucleotide
aaagcuuuaucacaaggag

SEQ ID NO: 1769220 - RNA, 19 nt, Artificial Sequence
  Description of Artificial Sequence: Synthetic oligonucleotide
uuauuugugugauagauga

SEQ ID NO: 1769221 - RNA, 19 nt, Artificial Sequence
  Description of Artificial Sequence: Synthetic oligonucleotide
aaggauaaacaauugagcu

SEQ ID NO: 1769222 - RNA, 19 nt, Artificial Sequence
  Description of Artificial Sequence: Synthetic oligonucleotide
uaugcaaauguuucuaugg

SEQ ID NO: 1769223 - RNA, 19 nt, Artificial Sequence
  Description of Artificial Sequence: Synthetic oligonucleotide
uguaacuuugguuugacug

SEQ ID NO: 1769224 - RNA, 19 nt, Artificial Sequence
  Description of Artificial Sequence: Synthetic oligonucleotide
  modified_base (7)..(7): a, c, u, g, unknown or other
cuugcanagauaauguuag

SEQ ID NO: 1769225 - RNA, 19 nt, Artificial Sequence
  Description of Artificial Sequence: Synthetic oligonucleotide
uauauauauauaacaauac

SEQ ID NO: 1769226 - RNA, 19 nt, Artificial Sequence
  Description of Artificial Sequence: Synthetic oligonucleotide
aagaucuaugcagauaugc

SEQ ID NO: 1769227 - RNA, 19 nt, Artificial Sequence
  Description of Artificial Sequence: Synthetic oligonucleotide
aauaccaugggcuacacuu

SEQ ID NO: 1769228 - RNA, 19 nt, Artificial Sequence
  Description of Artificial Sequence: Synthetic oligonucleotide
aauuauauguaacuuuggu

SEQ ID NO: 1769229 - RNA, 19 nt, Artificial Sequence
  Description of Artificial Sequence: Synthetic oligonucleotide
aacuaacuuaugcugcugc

SEQ ID NO: 1769230 - RNA, 19 nt, Artificial Sequence
  Description of Artificial Sequence: Synthetic oligonucleotide
auaguauauauauauauaa

SEQ ID NO: 1769231 - RNA, 19 nt, Artificial Sequence
  Description of Artificial Sequence: Synthetic oligonucleotide
uauaacaauacgcaaucug

SEQ ID NO: 1769232 - RNA, 19 nt, Artificial Sequence
  Description of Artificial Sequence: Synthetic oligonucleotide
uggauuaucauaguuuugg

SEQ ID NO: 1769233 - RNA, 19 nt, Artificial Sequence
  Description of Artificial Sequence: Synthetic oligonucleotide
auaguuuugggguuuagag

SEQ ID NO: 1769234 - RNA, 19 nt, Artificial Sequence
  Description of Artificial Sequence: Synthetic oligonucleotide
uuuagaguugugaagaaaa

SEQ ID NO: 1769235 - RNA, 19 nt, Artificial Sequence
  Description of Artificial Sequence: Synthetic oligonucleotide
cuugcuauaaucuaaacaa

SEQ ID NO: 1769236 - RNA, 19 nt, Artificial Sequence
  Description of Artificial Sequence: Synthetic oligonucleotide
uaauguuaagcucuagcag

SEQ ID NO: 1769237 - RNA, 19 nt, Artificial Sequence
  Description of Artificial Sequence: Synthetic oligonucleotide
agccuaagguuuuagaugg

SEQ ID NO: 1769238 - RNA, 19 nt, Artificial Sequence
  Description of Artificial Sequence: Synthetic oligonucleotide
auaauguuaagcucuagca

SEQ ID NO: 1769239 - RNA, 19 nt, Artificial Sequence
  Description of Artificial Sequence: Synthetic oligonucleotide
caucuuaacacuaacagca

SEQ ID NO: 1769240 - RNA, 19 nt, Artificial Sequence
  Description of Artificial Sequence: Synthetic oligonucleotide
aguauuaucaagacuuggc

SEQ ID NO: 1769241 - RNA, 19 nt, Artificial Sequence
  Description of Artificial Sequence: Synthetic oligonucleotide
uauauauauauauaacaau

SEQ ID NO: 1769242 - RNA, 19 nt, Artificial Sequence
  Description of Artificial Sequence: Synthetic oligonucleotide
agcaauaaccaucaucagg

SEQ ID NO: 1769243 - RNA, 19 nt, Artificial Sequence
  Description of Artificial Sequence: Synthetic oligonucleotide
augaaaagaucccagaggu

SEQ ID NO: 1769244 - RNA, 19 nt, Artificial Sequence
  Description of Artificial Sequence: Synthetic oligonucleotide
uaauguuagcuuaggauug

SEQ ID NO: 1769245 - RNA, 19 nt, Artificial Sequence
  Description of Artificial Sequence: Synthetic oligonucleotide
auaauguuagcuuaggauu

SEQ ID NO: 1769246 - RNA, 19 nt, Artificial Sequence
  Description of Artificial Sequence: Synthetic oligonucleotide
uuuaguugugguuuuguca

SEQ ID NO: 1769247 - RNA, 19 nt, Artificial Sequence
  Description of Artificial Sequence: Synthetic oligonucleotide
ucaacuacaccauaaugga

SEQ ID NO: 1769248 - RNA, 19 nt, Artificial Sequence
  Description of Artificial Sequence: Synthetic oligonucleotide
auuaucaagacuuggcaca

SEQ ID NO: 1769249 - RNA, 19 nt, Artificial Sequence
  Description of Artificial Sequence: Synthetic oligonucleotide
uuugguuugacugaaaaua

SEQ ID NO: 1769250 - RNA, 19 nt, Artificial Sequence
  Description of Artificial Sequence: Synthetic oligonucleotide
aacaauuuggccugcacaa

SEQ ID NO: 1769251 - RNA, 19 nt, Artificial Sequence
  Description of Artificial Sequence: Synthetic oligonucleotide
uccuuuauuugugugauag

SEQ ID NO: 1769252 - RNA, 19 nt, Artificial Sequence
  Description of Artificial Sequence: Synthetic oligonucleotide
uaguauauauauauauaac

SEQ ID NO: 1769253 - RNA, 19 nt, Artificial Sequence
  Description of Artificial Sequence: Synthetic oligonucleotide
uuuauuugugugauagaug

SEQ ID NO: 1769254 - RNA, 19 nt, Artificial Sequence
  Description of Artificial Sequence: Synthetic oligonucleotide
uaaacaauugagcuuacuu

SEQ ID NO: 1769255 - RNA, 19 nt, Artificial Sequence
  Description of Artificial Sequence: Synthetic oligonucleotide
cauaauguuaagcucuagc

SEQ ID NO: 1769256 - RNA, 19 nt, Artificial Sequence
  Description of Artificial Sequence: Synthetic oligonucleotide
uaacuuaugcugcugcugc

SEQ ID NO: 1769257 - RNA, 19 nt, Artificial Sequence
  Description of Artificial Sequence: Synthetic oligonucleotide
cagcauuccaacaauuugg

SEQ ID NO: 1769258 - RNA, 19 nt, Artificial Sequence
  Description of Artificial Sequence: Synthetic oligonucleotide
agaauuauauguaacuuug

SEQ ID NO: 1769259 - RNA, 19 nt, Artificial Sequence
  Description of Artificial Sequence: Synthetic oligonucleotide
aauuacuguguuuuguaau

SEQ ID NO: 1769260 - RNA, 19 nt, Artificial Sequence
  Description of Artificial Sequence: Synthetic oligonucleotide
aauguuagcuuaggauugc

SEQ ID NO: 1769261 - RNA, 19 nt, Artificial Sequence
  Description of Artificial Sequence: Synthetic oligonucleotide
guugcaacagucuaauuac

SEQ ID NO: 1769262 - RNA, 19 nt, Artificial Sequence
  Description of Artificial Sequence: Synthetic oligonucleotide
uauuaucaagacuuggcac

SEQ ID NO: 1769263 - RNA, 19 nt, Artificial Sequence
  Description of Artificial Sequence: Synthetic oligonucleotide
  modified_base (2)..(2): a, c, u, g, unknown or other
anagauaauguuagcuuag

SEQ ID NO: 1769264 - RNA, 19 nt, Artificial Sequence
  Description of Artificial Sequence: Synthetic oligonucleotide
ugcuauaaucuaaacaaaa

SEQ ID NO: 1769265 - RNA, 19 nt, Artificial Sequence
  Description of Artificial Sequence: Synthetic oligonucleotide
uaugaggucccuugguugg

SEQ ID NO: 1769266 - RNA, 19 nt, Artificial Sequence
  Description of Artificial Sequence: Synthetic oligonucleotide
uuugguuugcagcuguagc

SEQ ID NO: 1769267 - RNA, 19 nt, Artificial Sequence
  Description of Artificial Sequence: Synthetic oligonucleotide
uaauggauuaucauaguuu

SEQ ID NO: 1769268 - RNA, 19 nt, Artificial Sequence
  Description of Artificial Sequence: Synthetic oligonucleotide
uacuaauugaaguuacaga

SEQ ID NO: 1769269 - RNA, 19 nt, Artificial Sequence
  Description of Artificial Sequence: Synthetic oligonucleotide
ucauaucccguauaagaag

SEQ ID NO: 1769270 - RNA, 19 nt, Artificial Sequence
  Description of Artificial Sequence: Synthetic oligonucleotide
uguuaguguucauaucccg

SEQ ID NO: 1769271 - RNA, 19 nt, Artificial Sequence
  Description of Artificial Sequence: Synthetic oligonucleotide
aguuuugggguuuagaguu

SEQ ID NO: 1769272 - RNA, 19 nt, Artificial Sequence
  Description of Artificial Sequence: Synthetic oligonucleotide
acuugcuauaaucuaaaca

SEQ ID NO: 1769273 - RNA, 19 nt, Artificial Sequence
  Description of Artificial Sequence: Synthetic oligonucleotide
uuacaucuuaacacuaaca

SEQ ID NO: 1769274 - RNA, 19 nt, Artificial Sequence
  Description of Artificial Sequence: Synthetic oligonucleotide
aaguauuaucaagacuugg

SEQ ID NO: 1769275 - RNA, 19 nt, Artificial Sequence
  Description of Artificial Sequence: Synthetic oligonucleotide
guuuuaagcaaacaucuga

SEQ ID NO: 1769276 - RNA, 19 nt, Artificial Sequence
  Description of Artificial Sequence: Synthetic oligonucleotide
auauauauauauaacaaua

SEQ ID NO: 1769277 - RNA, 19 nt, Artificial Sequence
  Description of Artificial Sequence: Synthetic oligonucleotide
cuaauugaaguuacagaag

SEQ ID NO: 1769278 - RNA, 19 nt, Artificial Sequence
  Description of Artificial Sequence: Synthetic oligonucleotide
uaacaauacgcaaucugca

SEQ ID NO: 1769279 - RNA, 19 nt, Artificial Sequence
  Description of Artificial Sequence: Synthetic oligonucleotide
uucauaucccguauaagaa

SEQ ID NO: 1769280 - RNA, 19 nt, Artificial Sequence
  Description of Artificial Sequence: Synthetic oligonucleotide
ucugacuaugcuaucuuca

SEQ ID NO: 1769281 - RNA, 19 nt, Artificial Sequence
  Description of Artificial Sequence: Synthetic oligonucleotide
uuaggauugcacuuuacau

SEQ ID NO: 1769282 - RNA, 19 nt, Artificial Sequence
  Description of Artificial Sequence: Synthetic oligonucleotide
ucuauuugcugacuucagc

SEQ ID NO: 1769283 - RNA, 19 nt, Artificial Sequence
  Description of Artificial Sequence: Synthetic oligonucleotide
  modified_base (5)..(5): a, c, u, g, unknown or other
ugcanagauaauguuagcu

SEQ ID NO: 1769284 - RNA, 19 nt, Artificial Sequence
  Description of Artificial Sequence: Synthetic oligonucleotide
aauaguauauauauauaua

SEQ ID NO: 1769285 - RNA, 19 nt, Artificial Sequence
  Description of Artificial Sequence: Synthetic oligonucleotide
uccuuuguacuaauugaag

SEQ ID NO: 1769286 - RNA, 19 nt, Artificial Sequence
  Description of Artificial Sequence: Synthetic oligonucleotide
auuccaacaauuuggccug

SEQ ID NO: 1769287 - RNA, 19 nt, Artificial Sequence
  Description of Artificial Sequence: Synthetic oligonucleotide
gcuaucuucaacuacacca

SEQ ID NO: 1769288 - RNA, 19 nt, Artificial Sequence
  Description of Artificial Sequence: Synthetic oligonucleotide
acauaauuguuuuggucag

SEQ ID NO: 1769289 - RNA, 19 nt, Artificial Sequence
  Description of Artificial Sequence: Synthetic oligonucleotide
aucccguauaagaagaggc

SEQ ID NO: 1769290 - RNA, 19 nt, Artificial Sequence
  Description of Artificial Sequence: Synthetic oligonucleotide
cuuacuuugcaagaaccgg

SEQ ID NO: 1769291 - RNA, 19 nt, Artificial Sequence
  Description of Artificial Sequence: Synthetic oligonucleotide
ucauaacuuccacugcuag

SEQ ID NO: 1769292 - RNA, 19 nt, Artificial Sequence
  Description of Artificial Sequence: Synthetic oligonucleotide
uggacuuuuggccucagaa

SEQ ID NO: 1769293 - RNA, 19 nt, Artificial Sequence
  Description of Artificial Sequence: Synthetic oligonucleotide
cuugguuuagggcuaaaug

SEQ ID NO: 1769294 - RNA, 19 nt, Artificial Sequence
  Description of Artificial Sequence: Synthetic oligonucleotide
aaccggcuccaucacaugg

SEQ ID NO: 1769295 - RNA, 19 nt, Artificial Sequence
  Description of Artificial Sequence: Synthetic oligonucleotide
aacacuaacagcacagacu

SEQ ID NO: 1769296 - RNA, 19 nt, Artificial Sequence
  Description of Artificial Sequence: Synthetic oligonucleotide
gacuuuuggccucagaaga

SEQ ID NO: 1769297 - RNA, 19 nt, Artificial Sequence
  Description of Artificial Sequence: Synthetic oligonucleotide
agguaaagaguacaguugu

SEQ ID NO: 1769298 - RNA, 19 nt, Artificial Sequence
  Description of Artificial Sequence: Synthetic oligonucleotide
guauauauauauauaacaa

SEQ ID NO: 1769299 - RNA, 19 nt, Artificial Sequence
  Description of Artificial Sequence: Synthetic oligonucleotide
ccauaauggauuaucauag

SEQ ID NO: 1769300 - RNA, 19 nt, Artificial Sequence
  Description of Artificial Sequence: Synthetic oligonucleotide
uacgcaaucugcauuugca

SEQ ID NO: 1769301 - RNA, 19 nt, Artificial Sequence
  Description of Artificial Sequence: Synthetic oligonucleotide
gauaauguuagcuuaggau

SEQ ID NO: 1769302 - RNA, 19 nt, Artificial Sequence
  Description of Artificial Sequence: Synthetic oligonucleotide
  modified_base (17)..(17): a, c, u, g, unknown or other
uucuauggugcuugcanag

SEQ ID NO: 1769303 - RNA, 19 nt, Artificial Sequence
  Description of Artificial Sequence: Synthetic oligonucleotide
ucuuaacacuaacagcaca

SEQ ID NO: 1769304 - RNA, 19 nt, Artificial Sequence
  Description of Artificial Sequence: Synthetic oligonucleotide
uuaugaggucccuugguug

SEQ ID NO: 1769305 - RNA, 19 nt, Artificial Sequence
  Description of Artificial Sequence: Synthetic oligonucleotide
uuagggcuaaaugaaaaga

SEQ ID NO: 1769306 - RNA, 19 nt, Artificial Sequence
  Description of Artificial Sequence: Synthetic oligonucleotide
aacaauacgcaaucugcau

SEQ ID NO: 1769307 - RNA, 19 nt, Artificial Sequence
  Description of Artificial Sequence: Synthetic oligonucleotide
uccaucacauggaaccggg

SEQ ID NO: 1769308 - RNA, 19 nt, Artificial Sequence
  Description of Artificial Sequence: Synthetic oligonucleotide
cagguuuuaagcaaacauc

SEQ ID NO: 1769309 - RNA, 19 nt, Artificial Sequence
  Description of Artificial Sequence: Synthetic oligonucleotide
uaggauugcacuuuacauc

SEQ ID NO: 1769310 - RNA, 19 nt, Artificial Sequence
  Description of Artificial Sequence: Synthetic oligonucleotide
uacaguuguaagaucuaug

SEQ ID NO: 1769311 - RNA, 19 nt, Artificial Sequence
  Description of Artificial Sequence: Synthetic oligonucleotide
aaacaucugacuaugcuau

SEQ ID NO: 1769312 - RNA, 19 nt, Artificial Sequence
  Description of Artificial Sequence: Synthetic oligonucleotide
auacgcaaucugcauuugc

SEQ ID NO: 1769313 - RNA, 19 nt, Artificial Sequence
  Description of Artificial Sequence: Synthetic oligonucleotide
gaagaggcagaauuauaug

SEQ ID NO: 1769314 - RNA, 19 nt, Artificial Sequence
  Description of Artificial Sequence: Synthetic oligonucleotide
agcuuacuuugcaagaacc

SEQ ID NO: 1769315 - RNA, 19 nt, Artificial Sequence
  Description of Artificial Sequence: Synthetic oligonucleotide
cuuugacuguguuugcagg

SEQ ID NO: 1769316 - RNA, 19 nt, Artificial Sequence
  Description of Artificial Sequence: Synthetic oligonucleotide
uugguuugacugaaaauaa

SEQ ID NO: 1769317 - RNA, 19 nt, Artificial Sequence
  Description of Artificial Sequence: Synthetic oligonucleotide
ugcagguagacaaagcuuu

SEQ ID NO: 1769318 - RNA, 19 nt, Artificial Sequence
  Description of Artificial Sequence: Synthetic oligonucleotide
uaacacuaacagcacagac

SEQ ID NO: 1769319 - RNA, 19 nt, Artificial Sequence
  Description of Artificial Sequence: Synthetic oligonucleotide
auaacuaacuuaugcugcu

SEQ ID NO: 1769320 - RNA, 19 nt, Artificial Sequence
  Description of Artificial Sequence: Synthetic oligonucleotide
guauuaucaagacuuggca

SEQ ID NO: 1769321 - RNA, 19 nt, Artificial Sequence
  Description of Artificial Sequence: Synthetic oligonucleotide
ucuaauuacuguguuuugu

SEQ ID NO: 1769322 - RNA, 19 nt, Artificial Sequence
  Description of Artificial Sequence: Synthetic oligonucleotide
uuccuuuguacuaauugaa

SEQ ID NO: 1769323 - RNA, 19 nt, Artificial Sequence
  Description of Artificial Sequence: Synthetic oligonucleotide
aauugagcuuacuuugcaa

SEQ ID NO: 1769324 - RNA, 19 nt, Artificial Sequence
  Description of Artificial Sequence: Synthetic oligonucleotide
auauauaacaauacgcaau

SEQ ID NO: 1769325 - RNA, 19 nt, Artificial Sequence
  Description of Artificial Sequence: Synthetic oligonucleotide
ucuaacucuauuugcugac

SEQ ID NO: 1769326 - RNA, 19 nt, Artificial Sequence
  Description of Artificial Sequence: Synthetic oligonucleotide
caacagucuaauuacugug

SEQ ID NO: 1769327 - RNA, 19 nt, Artificial Sequence
  Description of Artificial Sequence: Synthetic oligonucleotide
auuacuguguuuuguaaua

SEQ ID NO: 1769328 - RNA, 19 nt, Artificial Sequence
  Description of Artificial Sequence: Synthetic oligonucleotide
aacuacaccauaauggauu

SEQ ID NO: 1769329 - RNA, 19 nt, Artificial Sequence
  Description of Artificial Sequence: Synthetic oligonucleotide
cucaccucugucuuuaaug

SEQ ID NO: 1769330 - RNA, 19 nt, Artificial Sequence
  Description of Artificial Sequence: Synthetic oligonucleotide
auaauggauuaucauaguu

SEQ ID NO: 1769331 - RNA, 19 nt, Artificial Sequence
  Description of Artificial Sequence: Synthetic oligonucleotide
auaacuuccacugcuagau

SEQ ID NO: 1769332 - RNA, 19 nt, Artificial Sequence
  Description of Artificial Sequence: Synthetic oligonucleotide
uuuagaugguugcaacagu

SEQ ID NO: 1769333 - RNA, 19 nt, Artificial Sequence
  Description of Artificial Sequence: Synthetic oligonucleotide
auguuaagcucuagcagcc

SEQ ID NO: 1769334 - RNA, 19 nt, Artificial Sequence
  Description of Artificial Sequence: Synthetic oligonucleotide
acaauugagcuuacuuugc

SEQ ID NO: 1769335 - RNA, 19 nt, Artificial Sequence
  Description of Artificial Sequence: Synthetic oligonucleotide
gagguaaagaguacaguug

SEQ ID NO: 1769336 - RNA, 19 nt, Artificial Sequence
  Description of Artificial Sequence: Synthetic oligonucleotide
aagcaauaaccaucaucag

SEQ ID NO: 1769337 - RNA, 19 nt, Artificial Sequence
  Description of Artificial Sequence: Synthetic oligonucleotide
uaucccguauaagaagagg

SEQ ID NO: 1769338 - RNA, 19 nt, Artificial Sequence
  Description of Artificial Sequence: Synthetic oligonucleotide
acguaaaagucucagguuu

SEQ ID NO: 1769339 - RNA, 19 nt, Artificial Sequence
  Description of Artificial Sequence: Synthetic oligonucleotide
caaagcuuuaucacaagga

SEQ ID NO: 1769340 - RNA, 19 nt, Artificial Sequence
  Description of Artificial Sequence: Synthetic oligonucleotide
uaguuuugggguuuagagu

SEQ ID NO: 1769341 - RNA, 19 nt, Artificial Sequence
  Description of Artificial Sequence: Synthetic oligonucleotide
guaacuuugguuugacuga

SEQ ID NO: 1769342 - RNA, 19 nt, Artificial Sequence
  Description of Artificial Sequence: Synthetic oligonucleotide
aacaucugacuaugcuauc

SEQ ID NO: 1769343 - RNA, 19 nt, Artificial Sequence
  Description of Artificial Sequence: Synthetic oligonucleotide
ugcagauaugcaaauguuu

SEQ ID NO: 1769344 - RNA, 19 nt, Artificial Sequence
  Description of Artificial Sequence: Synthetic oligonucleotide
agauuuuguccucaccucu

SEQ ID NO: 1769345 - RNA, 19 nt, Artificial Sequence
  Description of Artificial Sequence: Synthetic oligonucleotide
uagcaugucauaacuucca

SEQ ID NO: 1769346 - RNA, 19 nt, Artificial Sequence
  Description of Artificial Sequence: Synthetic oligonucleotide
guaagaucuaugcagauau

SEQ ID NO: 1769347 - RNA, 19 nt, Artificial Sequence
  Description of Artificial Sequence: Synthetic oligonucleotide
agcaacacguaaaagucuc

SEQ ID NO: 1769348 - RNA, 19 nt, Artificial Sequence
  Description of Artificial Sequence: Synthetic oligonucleotide
uuaucaagacuuggcacag

SEQ ID NO: 1769349 - RNA, 19 nt, Artificial Sequence
  Description of Artificial Sequence: Synthetic oligonucleotide
gguuccuuuguacuaauug

SEQ ID NO: 1769350 - RNA, 19 nt, Artificial Sequence
  Description of Artificial Sequence: Synthetic oligonucleotide
gcacuuuacaucuuaacac

SEQ ID NO: 1769351 - RNA, 19 nt, Artificial Sequence
  Description of Artificial Sequence: Synthetic oligonucleotide
aucugacuaugcuaucuuc

SEQ ID NO: 1769352 - RNA, 19 nt, Artificial Sequence
  Description of Artificial Sequence: Synthetic oligonucleotide
cauuccaacaauuuggccu

SEQ ID NO: 1769353 - RNA, 19 nt, Artificial Sequence
  Description of Artificial Sequence: Synthetic oligonucleotide
uacuuugcaagaaccggcu

SEQ ID NO: 1769354 - RNA, 19 nt, Artificial Sequence
  Description of Artificial Sequence: Synthetic oligonucleotide
uacucugugacugaaugaa

SEQ ID NO: 1769355 - RNA, 19 nt, Artificial Sequence
  Description of Artificial Sequence: Synthetic oligonucleotide
acugcuagauuuuguccuc

SEQ ID NO: 1769356 - RNA, 19 nt, Artificial Sequence
  Description of Artificial Sequence: Synthetic oligonucleotide
agauaauguuagcuuagga

SEQ ID NO: 1769357 - RNA, 19 nt, Artificial Sequence
  Description of Artificial Sequence: Synthetic oligonucleotide
  modified_base (11)..(11): a, c, u, g, unknown or other
ggugcuugcanagauaaug

SEQ ID NO: 1769358 - RNA, 19 nt, Artificial Sequence
  Description of Artificial Sequence: Synthetic oligonucleotide
ucccguauaagaagaggca

SEQ ID NO: 1769359 - RNA, 19 nt, Artificial Sequence
  Description of Artificial Sequence: Synthetic oligonucleotide
cacaagucuuugaaggaag

SEQ ID NO: 1769360 - RNA, 19 nt, Artificial Sequence
  Description of Artificial Sequence: Synthetic oligonucleotide
aacagucuaauuacugugu

SEQ ID NO: 1769361 - RNA, 19 nt, Artificial Sequence
  Description of Artificial Sequence: Synthetic oligonucleotide
uacaccauaauggauuauc

SEQ ID NO: 1769362 - RNA, 19 nt, Artificial Sequence
  Description of Artificial Sequence: Synthetic oligonucleotide
agaguacaguuguaagauc

SEQ ID NO: 1769363 - RNA, 19 nt, Artificial Sequence
  Description of Artificial Sequence: Synthetic oligonucleotide
aagauuacucugugacuga

SEQ ID NO: 1769364 - RNA, 19 nt, Artificial Sequence
  Description of Artificial Sequence: Synthetic oligonucleotide
uuguaauaacuaacuuaug

SEQ ID NO: 1769365 - RNA, 19 nt, Artificial Sequence
  Description of Artificial Sequence: Synthetic oligonucleotide
guacauaauuguuuugguc

SEQ ID NO: 1769366 - RNA, 19 nt, Artificial Sequence
  Description of Artificial Sequence: Synthetic oligonucleotide
cauaucccguauaagaaga

SEQ ID NO: 1769367 - RNA, 19 nt, Artificial Sequence
  Description of Artificial Sequence: Synthetic oligonucleotide
caauaguauauauauauau

SEQ ID NO: 1769368 - RNA, 19 nt, Artificial Sequence
  Description of Artificial Sequence: Synthetic oligonucleotide
uugcuauaaucuaaacaaa

SEQ ID NO: 1769369 - RNA, 19 nt, Artificial Sequence
  Description of Artificial Sequence: Synthetic oligonucleotide
  modified_base (3)..(3): a, c, u, g, unknown or other
canagauaauguuagcuua

SEQ ID NO: 1769370 - RNA, 19 nt, Artificial Sequence
  Description of Artificial Sequence: Synthetic oligonucleotide
  modified_base (18)..(18): a, c, u, g, unknown or other
uuucuauggugcuugcana

SEQ ID NO: 1769371 - RNA, 19 nt, Artificial Sequence
  Description of Artificial Sequence: Synthetic oligonucleotide
uguuagcuuaggauugcac

SEQ ID NO: 1769372 - RNA, 19 nt, Artificial Sequence
  Description of Artificial Sequence: Synthetic oligonucleotide
augcaaauguuucuauggu

SEQ ID NO: 1769373 - RNA, 19 nt, Artificial Sequence
  Description of Artificial Sequence: Synthetic oligonucleotide
ugcacaagucuuugaagga

SEQ ID NO: 1769374 - RNA, 19 nt, Artificial Sequence
  Description of Artificial Sequence: Synthetic oligonucleotide
agaagaggcagaauuauau

SEQ ID NO: 1769375 - RNA, 19 nt, Artificial Sequence
  Description of Artificial Sequence: Synthetic oligonucleotide
aggauaaacaauugagcuu

SEQ ID NO: 1769376 - RNA, 19 nt, Artificial Sequence
  Description of Artificial Sequence: Synthetic oligonucleotide
ucagaagauuacucuguga

SEQ ID NO: 1769377 - RNA, 19 nt, Artificial Sequence
  Description of Artificial Sequence: Synthetic oligonucleotide
uagaugguugcaacagucu

SEQ ID NO: 1769378 - RNA, 19 nt, Artificial Sequence
  Description of Artificial Sequence: Synthetic oligonucleotide
  modified_base (19)..(19): a, c, u, g, unknown or other
guuucuauggugcuugcan

SEQ ID NO: 1769379 - RNA, 19 nt, Artificial Sequence
  Description of Artificial Sequence: Synthetic oligonucleotide
ucugugacugaaugaacuc

SEQ ID NO: 1769380 - RNA, 19 nt, Artificial Sequence
  Description of Artificial Sequence: Synthetic oligonucleotide
ugggguuuagaguugugaa

SEQ ID NO: 1769381 - RNA, 19 nt, Artificial Sequence
  Description of Artificial Sequence: Synthetic oligonucleotide
uugucauauuuguuucuug

SEQ ID NO: 1769382 - RNA, 19 nt, Artificial Sequence
  Description of Artificial Sequence: Synthetic oligonucleotide
agggcuaaaugaaaagauc

SEQ ID NO: 1769383 - RNA, 19 nt, Artificial Sequence
  Description of Artificial Sequence: Synthetic oligonucleotide
  modified_base (14)..(14): a, c, u, g, unknown or other
uauggugcuugcanagaua

SEQ ID NO: 1769384 - RNA, 19 nt, Artificial Sequence
  Description of Artificial Sequence: Synthetic oligonucleotide
aucaucagguuaugagguc

SEQ ID NO: 1769385 - RNA, 19 nt, Artificial Sequence
  Description of Artificial Sequence: Synthetic oligonucleotide
uggaaccgggacauaaugu

SEQ ID NO: 1769386 - RNA, 19 nt, Artificial Sequence
  Description of Artificial Sequence: Synthetic oligonucleotide
auaaauaccaugggcuaca

SEQ ID NO: 1769387 - RNA, 19 nt, Artificial Sequence
  Description of Artificial Sequence: Synthetic oligonucleotide
ucuaugcagauaugcaaau

SEQ ID NO: 1769388 - RNA, 19 nt, Artificial Sequence
  Description of Artificial Sequence: Synthetic oligonucleotide
cagguuaugaggucccuug

SEQ ID NO: 1769389 - RNA, 19 nt, Artificial Sequence
  Description of Artificial Sequence: Synthetic oligonucleotide
caucacauggaaccgggac

SEQ ID NO: 1769390 - RNA, 19 nt, Artificial Sequence
  Description of Artificial Sequence: Synthetic oligonucleotide
uagauuuuguccucaccuc

SEQ ID NO: 1769391 - RNA, 19 nt, Artificial Sequence
  Description of Artificial Sequence: Synthetic oligonucleotide
ugacuaugcuaucuucaac

SEQ ID NO: 1769392 - RNA, 19 nt, Artificial Sequence
  Description of Artificial Sequence: Synthetic oligonucleotide
acuaacuuaugcugcugcu

SEQ ID NO: 1769393 - RNA, 19 nt, Artificial Sequence
  Description of Artificial Sequence: Synthetic oligonucleotide
uaagaucuaugcagauaug

SEQ ID NO: 1769394 - RNA, 19 nt, Artificial Sequence
  Description of Artificial Sequence: Synthetic oligonucleotide
uuugcaagaaccggcucca

SEQ ID NO: 1769395 - RNA, 19 nt, Artificial Sequence
  Description of Artificial Sequence: Synthetic oligonucleotide
ugauccacauuucuugcuu

SEQ ID NO: 1769396 - RNA, 19 nt, Artificial Sequence
  Description of Artificial Sequence: Synthetic oligonucleotide
agguuaugaggucccuugg

SEQ ID NO: 1769397 - RNA, 19 nt, Artificial Sequence
  Description of Artificial Sequence: Synthetic oligonucleotide
caaagcauguggcugcuuc

SEQ ID NO: 1769398 - RNA, 19 nt, Artificial Sequence
  Description of Artificial Sequence: Synthetic oligonucleotide
aagcaaaucuucauugcau

SEQ ID NO: 1769399 - RNA, 19 nt, Artificial Sequence
  Description of Artificial Sequence: Synthetic oligonucleotide
aagguuuuagaugguugca

SEQ ID NO: 1769400 - RNA, 19 nt, Artificial Sequence
  Description of Artificial Sequence: Synthetic oligonucleotide
guuagcuuaggauugcacu

SEQ ID NO: 1769401 - RNA, 19 nt, Artificial Sequence
  Description of Artificial Sequence: Synthetic oligonucleotide
acucuauuugcugacuuca

SEQ ID NO: 1769402 - RNA, 19 nt, Artificial Sequence
  Description of Artificial Sequence: Synthetic oligonucleotide
cacaaggagguaaagagua

SEQ ID NO: 1769403 - RNA, 19 nt, Artificial Sequence
  Description of Artificial Sequence: Synthetic oligonucleotide
uugcacuuuacaucuuaac

SEQ ID NO: 1769404 - RNA, 19 nt, Artificial Sequence
  Description of Artificial Sequence: Synthetic oligonucleotide
acaauacgcaaucugcauu

SEQ ID NO: 1769405 - RNA, 19 nt, Artificial Sequence
  Description of Artificial Sequence: Synthetic oligonucleotide
uuuuggccucagaagauua

SEQ ID NO: 1769406 - RNA, 19 nt, Artificial Sequence
  Description of Artificial Sequence: Synthetic oligonucleotide
gaggcagaauuauauguaa

SEQ ID NO: 1769407 - RNA, 19 nt, Artificial Sequence
  Description of Artificial Sequence: Synthetic oligonucleotide
agcaaaucuucauugcauu

SEQ ID NO: 1769408 - RNA, 19 nt, Artificial Sequence
  Description of Artificial Sequence: Synthetic oligonucleotide
acucuuuuaguugugguuu

SEQ ID NO: 1769409 - RNA, 19 nt, Artificial Sequence
  Description of Artificial Sequence: Synthetic oligonucleotide
agucucagguuuuaagcaa

SEQ ID NO: 1769410 - RNA, 19 nt, Artificial Sequence
  Description of Artificial Sequence: Synthetic oligonucleotide
uugggguuuagaguuguga

SEQ ID NO: 1769411 - RNA, 19 nt, Artificial Sequence
  Description of Artificial Sequence: Synthetic oligonucleotide
ucucagguuuuaagcaaac

SEQ ID NO: 1769412 - RNA, 19 nt, Artificial Sequence
  Description of Artificial Sequence: Synthetic oligonucleotide
cucagaagauuacucugug

SEQ ID NO: 1769413 - RNA, 19 nt, Artificial Sequence
  Description of Artificial Sequence: Synthetic oligonucleotide
  modified_base (6)..(6): a, c, u, g, unknown or other
uugcanagauaauguuagc

SEQ ID NO: 1769414 - RNA, 19 nt, Artificial Sequence
  Description of Artificial Sequence: Synthetic oligonucleotide
uguaagaucuaugcagaua

SEQ ID NO: 1769415 - RNA, 19 nt, Artificial Sequence
  Description of Artificial Sequence: Synthetic oligonucleotide
gagguuguccuuuauuugu

SEQ ID NO: 1769416 - RNA, 19 nt, Artificial Sequence
  Description of Artificial Sequence: Synthetic oligonucleotide
ugagcuuacuuugcaagaa

SEQ ID NO: 1769417 - RNA, 19 nt, Artificial Sequence
  Description of Artificial Sequence: Synthetic oligonucleotide
ggacuuuuggccucagaag

SEQ ID NO: 1769418 - RNA, 19 nt, Artificial Sequence
  Description of Artificial Sequence: Synthetic oligonucleotide
caacacguaaaagucucag

SEQ ID NO: 1769419 - RNA, 19 nt, Artificial Sequence
  Description of Artificial Sequence: Synthetic oligonucleotide
aggcagaauuauauguaac

SEQ ID NO: 1769420 - RNA, 19 nt, Artificial Sequence
  Description of Artificial Sequence: Synthetic oligonucleotide
agaucuaugcagauaugca

SEQ ID NO: 1769421 - RNA, 19 nt, Artificial Sequence
  Description of Artificial Sequence: Synthetic oligonucleotide
ggauaaacaauugagcuua

SEQ ID NO: 1769422 - RNA, 19 nt, Artificial Sequence
  Description of Artificial Sequence: Synthetic oligonucleotide
aagcaacacguaaaagucu

SEQ ID NO: 1769423 - RNA, 19 nt, Artificial Sequence
  Description of Artificial Sequence: Synthetic oligonucleotide
cuaacuuaugcugcugcug

SEQ ID NO: 1769424 - RNA, 19 nt, Artificial Sequence
  Description of Artificial Sequence: Synthetic oligonucleotide
ugacuucagcaaaggauaa

SEQ ID NO: 1769425 - RNA, 19 nt, Artificial Sequence
  Description of Artificial Sequence: Synthetic oligonucleotide
agaguuggcuuugguuugc

SEQ ID NO: 1769426 - RNA, 19 nt, Artificial Sequence
  Description of Artificial Sequence: Synthetic oligonucleotide
cucuauuugcugacuucag

SEQ ID NO: 1769427 - RNA, 19 nt, Artificial Sequence
  Description of Artificial Sequence: Synthetic oligonucleotide
gguuuuagaugguugcaac

SEQ ID NO: 1769428 - RNA, 19 nt, Artificial Sequence
  Description of Artificial Sequence: Synthetic oligonucleotide
acuacaccauaauggauua

SEQ ID NO: 1769429 - RNA, 19 nt, Artificial Sequence
  Description of Artificial Sequence: Synthetic oligonucleotide
agaugguugcaacagucua

SEQ ID NO: 1769430 - RNA, 19 nt, Artificial Sequence
  Description of Artificial Sequence: Synthetic oligonucleotide
aagaaccggcuccaucaca

SEQ ID NO: 1769431 - RNA, 19 nt, Artificial Sequence
  Description of Artificial Sequence: Synthetic oligonucleotide
ucaagacuuggcacagcac

SEQ ID NO: 1769432 - RNA, 19 nt, Artificial Sequence
  Description of Artificial Sequence: Synthetic oligonucleotide
gcaaucugcauuugcauca

SEQ ID NO: 1769433 - RNA, 19 nt, Artificial Sequence
  Description of Artificial Sequence: Synthetic oligonucleotide
aauacgcaaucugcauuug

SEQ ID NO: 1769434 - RNA, 19 nt, Artificial Sequence
  Description of Artificial Sequence: Synthetic oligonucleotide
cucuuggccaugguuagag

SEQ ID NO: 1769435 - RNA, 19 nt, Artificial Sequence
  Description of Artificial Sequence: Synthetic oligonucleotide
gauugcacuuuacaucuua

SEQ ID NO: 1769436 - RNA, 19 nt, Artificial Sequence
  Description of Artificial Sequence: Synthetic oligonucleotide
gacuggguaucucucuaac

SEQ ID NO: 1769437 - RNA, 19 nt, Artificial Sequence
  Description of Artificial Sequence: Synthetic oligonucleotide
gggguuuagaguugugaag

SEQ ID NO: 1769438 - RNA, 19 nt, Artificial Sequence
  Description of Artificial Sequence: Synthetic oligonucleotide
uggccucagaagauuacuc

SEQ ID NO: 1769439 - RNA, 19 nt, Artificial Sequence
  Description of Artificial Sequence: Synthetic oligonucleotide
gucuaauuacuguguuuug

SEQ ID NO: 1769440 - RNA, 19 nt, Artificial Sequence
  Description of Artificial Sequence: Synthetic oligonucleotide
uaguguucauaucccguau

SEQ ID NO: 1769441 - RNA, 19 nt, Artificial Sequence
  Description of Artificial Sequence: Synthetic oligonucleotide
gcaagaaccggcuccauca

SEQ ID NO: 1769442 - RNA, 19 nt, Artificial Sequence
  Description of Artificial Sequence: Synthetic oligonucleotide
acagucuaauuacuguguu

SEQ ID NO: 1769443 - RNA, 19 nt, Artificial Sequence
  Description of Artificial Sequence: Synthetic oligonucleotide
cuuuaucacaaggagguaa

SEQ ID NO: 1769444 - RNA, 19 nt, Artificial Sequence
  Description of Artificial Sequence: Synthetic oligonucleotide
aaccgggacauaauguuaa

SEQ ID NO: 1769445 - RNA, 19 nt, Artificial Sequence
  Description of Artificial Sequence: Synthetic oligonucleotide
aucuaugcagauaugcaaa

SEQ ID NO: 1769446 - RNA, 19 nt, Artificial Sequence
  Description of Artificial Sequence: Synthetic oligonucleotide
aaggcugaccaaagcaugu

SEQ ID NO: 1769447 - RNA, 19 nt, Artificial Sequence
  Description of Artificial Sequence: Synthetic oligonucleotide
uuguaagaucuaugcagau

SEQ ID NO: 1769448 - RNA, 19 nt, Artificial Sequence
  Description of Artificial Sequence: Synthetic oligonucleotide
gcagauaugcaaauguuuc

SEQ ID NO: 1769449 - RNA, 19 nt, Artificial Sequence
  Description of Artificial Sequence: Synthetic oligonucleotide
uguuucuuguuuugucaua

SEQ ID NO: 1769450 - RNA, 19 nt, Artificial Sequence
  Description of Artificial Sequence: Synthetic oligonucleotide
uaugcugcugcugcugcug

SEQ ID NO: 1769451 - RNA, 19 nt, Artificial Sequence
  Description of Artificial Sequence: Synthetic oligonucleotide
acaauaguauauauauaua

SEQ ID NO: 1769452 - RNA, 19 nt, Artificial Sequence
  Description of Artificial Sequence: Synthetic oligonucleotide
ugcaagaaccggcuccauc

SEQ ID NO: 1769453 - RNA, 19 nt, Artificial Sequence
  Description of Artificial Sequence: Synthetic oligonucleotide
cauaacuuccacugcuaga

SEQ ID NO: 1769454 - RNA, 19 nt, Artificial Sequence
  Description of Artificial Sequence: Synthetic oligonucleotide
cacuuuacaucuuaacacu

SEQ ID NO: 1769455 - RNA, 19 nt, Artificial Sequence
  Description of Artificial Sequence: Synthetic oligonucleotide
ggcuacacuugcuauaauc

SEQ ID NO: 1769456 - RNA, 19 nt, Artificial Sequence
  Description of Artificial Sequence: Synthetic oligonucleotide
ccaccuucugucaaaacug

SEQ ID NO: 1769457 - RNA, 19 nt, Artificial Sequence
  Description of Artificial Sequence: Synthetic oligonucleotide
gggacauaauguuaagcuc

SEQ ID NO: 1769458 - RNA, 19 nt, Artificial Sequence
  Description of Artificial Sequence: Synthetic oligonucleotide
uuggccucagaagauuacu

SEQ ID NO: 1769459 - RNA, 19 nt, Artificial Sequence
  Description of Artificial Sequence: Synthetic oligonucleotide
cuaugcagauaugcaaaug

SEQ ID NO: 1769460 - RNA, 19 nt, Artificial Sequence
  Description of Artificial Sequence: Synthetic oligonucleotide
guguucauaucccguauaa

SEQ ID NO: 1769461 - RNA, 19 nt, Artificial Sequence
  Description of Artificial Sequence: Synthetic oligonucleotide
  modified_base (9)..(9): a, c, u, g, unknown or other
ugcuugcanagauaauguu

SEQ ID NO: 1769462 - RNA, 19 nt, Artificial Sequence
  Description of Artificial Sequence: Synthetic oligonucleotide
gcuaaaugaaaagauccca

SEQ ID NO: 1769463 - RNA, 19 nt, Artificial Sequence
  Description of Artificial Sequence: Synthetic oligonucleotide
ggguuuagaguugugaaga

SEQ ID NO: 1769464 - RNA, 19 nt, Artificial Sequence
  Description of Artificial Sequence: Synthetic oligonucleotide
aguugugguuuugucauau

SEQ ID NO: 1769465 - RNA, 19 nt, Artificial Sequence
  Description of Artificial Sequence: Synthetic oligonucleotide
cacuugcuauaaucuaaac

SEQ ID NO: 1769466 - RNA, 19 nt, Artificial Sequence
  Description of Artificial Sequence: Synthetic oligonucleotide
uagauggacuuuuggccuc

SEQ ID NO: 1769467 - RNA, 19 nt, Artificial Sequence
  Description of Artificial Sequence: Synthetic oligonucleotide
auaaacaauugagcuuacu

SEQ ID NO: 1769468 - RNA, 19 nt, Artificial Sequence
  Description of Artificial Sequence: Synthetic oligonucleotide
ucuugguuuagggcuaaau

SEQ ID NO: 1769469 - RNA, 19 nt, Artificial Sequence
  Description of Artificial Sequence: Synthetic oligonucleotide
ggcacagcacaugaaaagc

SEQ ID NO: 1769470 - RNA, 19 nt, Artificial Sequence
  Description of Artificial Sequence: Synthetic oligonucleotide
caauugagcuuacuuugca

SEQ ID NO: 1769471 - RNA, 19 nt, Artificial Sequence
  Description of Artificial Sequence: Synthetic oligonucleotide
uggaagccuaagguuuuag

SEQ ID NO: 1769472 - RNA, 19 nt, Artificial Sequence
  Description of Artificial Sequence: Synthetic oligonucleotide
acgcaaucugcauuugcau

SEQ ID NO: 1769473 - RNA, 19 nt, Artificial Sequence
  Description of Artificial Sequence: Synthetic oligonucleotide
cucugugacugaaugaacu

SEQ ID NO: 1769474 - RNA, 19 nt, Artificial Sequence
  Description of Artificial Sequence: Synthetic oligonucleotide
cuuugaaggaaguguguua

SEQ ID NO: 1769475 - RNA, 19 nt, Artificial Sequence
  Description of Artificial Sequence: Synthetic oligonucleotide
auaucccguauaagaagag

SEQ ID NO: 1769476 - RNA, 19 nt, Artificial Sequence
  Description of Artificial Sequence: Synthetic oligonucleotide
ugaggucccuugguugggg

SEQ ID NO: 1769477 - RNA, 19 nt, Artificial Sequence
  Description of Artificial Sequence: Synthetic oligonucleotide
acauaauguuaagcucuag

SEQ ID NO: 1769478 - RNA, 19 nt, Artificial Sequence
  Description of Artificial Sequence: Synthetic oligonucleotide
accucugucuuuaaugaaa

SEQ ID NO: 1769479 - RNA, 19 nt, Artificial Sequence
  Description of Artificial Sequence: Synthetic oligonucleotide
caaagguuccuuuguacua

SEQ ID NO: 1769480 - RNA, 19 nt, Artificial Sequence
  Description of Artificial Sequence: Synthetic oligonucleotide
cugacuaugcuaucuucaa

SEQ ID NO: 1769481 - RNA, 19 nt, Artificial Sequence
  Description of Artificial Sequence: Synthetic oligonucleotide
gauaaacaauugagcuuac

SEQ ID NO: 1769482 - RNA, 19 nt, Artificial Sequence
  Description of Artificial Sequence: Synthetic oligonucleotide
agguuuuagaugguugcaa

SEQ ID NO: 1769483 - RNA, 19 nt, Artificial Sequence
  Description of Artificial Sequence: Synthetic oligonucleotide
cauugcauuuagauggacu

SEQ ID NO: 1769484 - RNA, 19 nt, Artificial Sequence
  Description of Artificial Sequence: Synthetic oligonucleotide
cagacuggaagccuaaggu

SEQ ID NO: 1769485 - RNA, 19 nt, Artificial Sequence
  Description of Artificial Sequence: Synthetic oligonucleotide
cacugcuagauuuuguccu

SEQ ID NO: 1769486 - RNA, 19 nt, Artificial Sequence
  Description of Artificial Sequence: Synthetic oligonucleotide
ggacauaauguuaagcucu

SEQ ID NO: 1769487 - RNA, 19 nt, Artificial Sequence
  Description of Artificial Sequence: Synthetic oligonucleotide
agaaccggcuccaucacau

SEQ ID NO: 1769488 - RNA, 19 nt, Artificial Sequence
  Description of Artificial Sequence: Synthetic oligonucleotide
cuacacuugcuauaaucua

SEQ ID NO: 1769489 - RNA, 19 nt, Artificial Sequence
  Description of Artificial Sequence: Synthetic oligonucleotide
cauaguuuugggguuuaga

SEQ ID NO: 1769490 - RNA, 19 nt, Artificial Sequence
  Description of Artificial Sequence: Synthetic oligonucleotide
auaccaugggcuacacuug

SEQ ID NO: 1769491 - RNA, 19 nt, Artificial Sequence
  Description of Artificial Sequence: Synthetic oligonucleotide
agccaccuucugucaaaac

SEQ ID NO: 1769492 - RNA, 19 nt, Artificial Sequence
  Description of Artificial Sequence: Synthetic oligonucleotide
gguuuuaagcaaacaucug

SEQ ID NO: 1769493 - RNA, 19 nt, Artificial Sequence
  Description of Artificial Sequence: Synthetic oligonucleotide
gagcucuuggccaugguua

SEQ ID NO: 1769494 - RNA, 19 nt, Artificial Sequence
  Description of Artificial Sequence: Synthetic oligonucleotide
ggagguaaagaguacaguu

SEQ ID NO: 1769495 - RNA, 19 nt, Artificial Sequence
  Description of Artificial Sequence: Synthetic oligonucleotide
  modified_base (4)..(4): a, c, u, g, unknown or other
gcanagauaauguuagcuu

SEQ ID NO: 1769496 - RNA, 19 nt, Artificial Sequence
  Description of Artificial Sequence: Synthetic oligonucleotide
ucauugcauuuagauggac

SEQ ID NO: 1769497 - RNA, 19 nt, Artificial Sequence
  Description of Artificial Sequence: Synthetic oligonucleotide
guuuagaguugugaagaaa

SEQ ID NO: 1769498 - RNA, 19 nt, Artificial Sequence
  Description of Artificial Sequence: Synthetic oligonucleotide
augggcuacacuugcuaua

SEQ ID NO: 1769499 - RNA, 19 nt, Artificial Sequence
  Description of Artificial Sequence: Synthetic oligonucleotide
acuuuacaucuuaacacua

SEQ ID NO: 1769500 - RNA, 19 nt, Artificial Sequence
  Description of Artificial Sequence: Synthetic oligonucleotide
caagaaccggcuccaucac

SEQ ID NO: 1769501 - RNA, 19 nt, Artificial Sequence
  Description of Artificial Sequence: Synthetic oligonucleotide
gacauaauguuaagcucua

SEQ ID NO: 1769502 - RNA, 19 nt, Artificial Sequence
  Description of Artificial Sequence: Synthetic oligonucleotide
cagauaugcaaauguuucu

SEQ ID NO: 1769503 - RNA, 19 nt, Artificial Sequence
  Description of Artificial Sequence: Synthetic oligonucleotide
agauuacucugugacugaa

SEQ ID NO: 1769504 - RNA, 19 nt, Artificial Sequence
  Description of Artificial Sequence: Synthetic oligonucleotide
guuuugggguuuagaguug

SEQ ID NO: 1769505 - RNA, 19 nt, Artificial Sequence
  Description of Artificial Sequence: Synthetic oligonucleotide
cagguaguuccuggcaaag

SEQ ID NO: 1769506 - RNA, 19 nt, Artificial Sequence
  Description of Artificial Sequence: Synthetic oligonucleotide
auugcacuuuacaucuuaa

SEQ ID NO: 1769507 - RNA, 19 nt, Artificial Sequence
  Description of Artificial Sequence: Synthetic oligonucleotide
caauacgcaaucugcauuu

SEQ ID NO: 1769508 - RNA, 19 nt, Artificial Sequence
  Description of Artificial Sequence: Synthetic oligonucleotide
gaaccggcuccaucacaug

SEQ ID NO: 1769509 - RNA, 19 nt, Artificial Sequence
  Description of Artificial Sequence: Synthetic oligonucleotide
ggaagccuaagguuuuaga

SEQ ID NO: 1769510 - RNA, 19 nt, Artificial Sequence
  Description of Artificial Sequence: Synthetic oligonucleotide
guuaguguucauaucccgu

SEQ ID NO: 1769511 - RNA, 19 nt, Artificial Sequence
  Description of Artificial Sequence: Synthetic oligonucleotide
cccguauaagaagaggcag

SEQ ID NO: 1769512 - RNA, 19 nt, Artificial Sequence
  Description of Artificial Sequence: Synthetic oligonucleotide
  modified_base (8)..(8): a, c, u, g, unknown or other
gcuugcanagauaauguua

SEQ ID NO: 1769513 - RNA, 19 nt, Artificial Sequence
  Description of Artificial Sequence: Synthetic oligonucleotide
gcauuccaacaauuuggcc

SEQ ID NO: 1769514 - RNA, 19 nt, Artificial Sequence
  Description of Artificial Sequence: Synthetic oligonucleotide
cauaauggauuaucauagu

SEQ ID NO: 1769515 - RNA, 19 nt, Artificial Sequence
  Description of Artificial Sequence: Synthetic oligonucleotide
guuaugaggucccuugguu

SEQ ID NO: 1769516 - RNA, 19 nt, Artificial Sequence
  Description of Artificial Sequence: Synthetic oligonucleotide
  modified_base (12)..(12): a, c, u, g, unknown or other
uggugcuugcanagauaau

SEQ ID NO: 1769517 - RNA, 19 nt, Artificial Sequence
  Description of Artificial Sequence: Synthetic oligonucleotide
uggccugcacaagucuuug

SEQ ID NO: 1769518 - RNA, 19 nt, Artificial Sequence
  Description of Artificial Sequence: Synthetic oligonucleotide
uccaacaauuuggccugca

SEQ ID NO: 1769519 - RNA, 19 nt, Artificial Sequence
  Description of Artificial Sequence: Synthetic oligonucleotide
gauagaugacuggguaucu

SEQ ID NO: 1769520 - RNA, 19 nt, Artificial Sequence
  Description of Artificial Sequence: Synthetic oligonucleotide
auguuagcuuaggauugca

SEQ ID NO: 1769521 - RNA, 19 nt, Artificial Sequence
  Description of Artificial Sequence: Synthetic oligonucleotide
gugauagaugacuggguau

SEQ ID NO: 1769522 - RNA, 19 nt, Artificial Sequence
  Description of Artificial Sequence: Synthetic oligonucleotide
aguacaguuguaagaucua

SEQ ID NO: 1769523 - RNA, 19 nt, Artificial Sequence
  Description of Artificial Sequence: Synthetic oligonucleotide
gaaccgggacauaauguua

SEQ ID NO: 1769524 - RNA, 19 nt, Artificial Sequence
  Description of Artificial Sequence: Synthetic oligonucleotide
ucagguuaugaggucccuu

SEQ ID NO: 1769525 - RNA, 19 nt, Artificial Sequence
  Description of Artificial Sequence: Synthetic oligonucleotide
uaguugugguuuugucaua

SEQ ID NO: 1769526 - RNA, 19 nt, Artificial Sequence
  Description of Artificial Sequence: Synthetic oligonucleotide
gucuuuaaugaaagcaaau

SEQ ID NO: 1769527 - RNA, 19 nt, Artificial Sequence
  Description of Artificial Sequence: Synthetic oligonucleotide
ccaacaauuuggccugcac

SEQ ID NO: 1769528 - RNA, 19 nt, Artificial Sequence
  Description of Artificial Sequence: Synthetic oligonucleotide
augcugcugcugcugcugu

SEQ ID NO: 1769529 - RNA, 19 nt, Artificial Sequence
  Description of Artificial Sequence: Synthetic oligonucleotide
  modified_base (15)..(15): a, c, u, g, unknown or other
cuauggugcuugcanagau

SEQ ID NO: 1769530 - RNA, 19 nt, Artificial Sequence
  Description of Artificial Sequence: Synthetic oligonucleotide
ggaaccgggacauaauguu

SEQ ID NO: 1769531 - RNA, 19 nt, Artificial Sequence
  Description of Artificial Sequence: Synthetic oligonucleotide
caccauaauggauuaucau

SEQ ID NO: 1769532 - RNA, 19 nt, Artificial Sequence
  Description of Artificial Sequence: Synthetic oligonucleotide
ccguauaagaagaggcaga

SEQ ID NO: 1769533 - RNA, 19 nt, Artificial Sequence
  Description of Artificial Sequence: Synthetic oligonucleotide
guagccuuugacuguguuu

SEQ ID NO: 1769534 - RNA, 19 nt, Artificial Sequence
  Description of Artificial Sequence: Synthetic oligonucleotide
accggcuccaucacaugga

SEQ ID NO: 1769535 - RNA, 19 nt, Artificial Sequence
  Description of Artificial Sequence: Synthetic oligonucleotide
aucauaguuuugggguuua

SEQ ID NO: 1769536 - RNA, 19 nt, Artificial Sequence
  Description of Artificial Sequence: Synthetic oligonucleotide
ccgggacauaauguuaagc

SEQ ID NO: 1769537 - RNA, 19 nt, Artificial Sequence
  Description of Artificial Sequence: Synthetic oligonucleotide
cacguaaaagucucagguu

SEQ ID NO: 1769538 - RNA, 19 nt, Artificial Sequence
  Description of Artificial Sequence: Synthetic oligonucleotide
guacaguuguaagaucuau

SEQ ID NO: 1769539 - RNA, 19 nt, Artificial Sequence
  Description of Artificial Sequence: Synthetic oligonucleotide
gguuaugaggucccuuggu

SEQ ID NO: 1769540 - RNA, 19 nt, Artificial Sequence
  Description of Artificial Sequence: Synthetic oligonucleotide
cgggacauaauguuaagcu

SEQ ID NO: 1769541 - RNA, 19 nt, Artificial Sequence
  Description of Artificial Sequence: Synthetic oligonucleotide
caccuucugucaaaacugu

SEQ ID NO: 1769542 - RNA, 19 nt, Artificial Sequence
  Description of Artificial Sequence: Synthetic oligonucleotide
caacuacaccauaauggau

SEQ ID NO: 1769543 - RNA, 19 nt, Artificial Sequence
  Description of Artificial Sequence: Synthetic oligonucleotide
gcacaagucuuugaaggaa

SEQ ID NO: 1769544 - RNA, 19 nt, Artificial Sequence
  Description of Artificial Sequence: Synthetic oligonucleotide
cuaacucuauuugcugacu

SEQ ID NO: 1769545 - RNA, 19 nt, Artificial Sequence
  Description of Artificial Sequence: Synthetic oligonucleotide
gaguuggcuuugguuugca

SEQ ID NO: 1769546 - RNA, 19 nt, Artificial Sequence
  Description of Artificial Sequence: Synthetic oligonucleotide
cagucuaauuacuguguuu

SEQ ID NO: 1769547 - RNA, 19 nt, Artificial Sequence
  Description of Artificial Sequence: Synthetic oligonucleotide
gguaaagaguacaguugua

SEQ ID NO: 1769548 - RNA, 19 nt, Artificial Sequence
  Description of Artificial Sequence: Synthetic oligonucleotide
cauaauuguuuuggucagu

SEQ ID NO: 1769549 - RNA, 19 nt, Artificial Sequence
  Description of Artificial Sequence: Synthetic oligonucleotide
guauaagaagaggcagaau

SEQ ID NO: 1769550 - RNA, 19 nt, Artificial Sequence
  Description of Artificial Sequence: Synthetic oligonucleotide
guccuuuauuugugugaua

SEQ ID NO: 1769551 - RNA, 19 nt, Artificial Sequence
  Description of Artificial Sequence: Synthetic oligonucleotide
ugcugcugcugcugcuguu

SEQ ID NO: 1769552 - RNA, 19 nt, Artificial Sequence
  Description of Artificial Sequence: Synthetic oligonucleotide
ggguaucucucuaacucua

SEQ ID NO: 1769553 - RNA, 19 nt, Artificial Sequence
  Description of Artificial Sequence: Synthetic oligonucleotide
gguuagaguuggcuuuggu

SEQ ID NO: 1769554 - RNA, 19 nt, Artificial Sequence
  Description of Artificial Sequence: Synthetic oligonucleotide
gcaacacguaaaagucuca

SEQ ID NO: 1769555 - RNA, 19 nt, Artificial Sequence
  Description of Artificial Sequence: Synthetic oligonucleotide
guugugguuuugucauauu

SEQ ID NO: 1769556 - RNA, 19 nt, Artificial Sequence
  Description of Artificial Sequence: Synthetic oligonucleotide
gcagguagacaaagcuuua

SEQ ID NO: 1769557 - RNA, 19 nt, Artificial Sequence
  Description of Artificial Sequence: Synthetic oligonucleotide
gguaucucucuaacucuau

SEQ ID NO: 1769558 - RNA, 19 nt, Artificial Sequence
  Description of Artificial Sequence: Synthetic oligonucleotide
cguaaaagucucagguuuu

SEQ ID NO: 1769559 - RNA, 19 nt, Artificial Sequence
  Description of Artificial Sequence: Synthetic oligonucleotide
cuguagccuuugacugugu

SEQ ID NO: 1769560 - RNA, 19 nt, Artificial Sequence
  Description of Artificial Sequence: Synthetic oligonucleotide
ccuaagguuuuagaugguu

SEQ ID NO: 1769561 - RNA, 19 nt, Artificial Sequence
  Description of Artificial Sequence: Synthetic oligonucleotide
gccuaagguuuuagauggu

SEQ ID NO: 1769562 - RNA, 19 nt, Artificial Sequence
  Description of Artificial Sequence: Synthetic oligonucleotide
ccucaccucugucuuuaau

SEQ ID NO: 1769563 - RNA, 19 nt, Artificial Sequence
  Description of Artificial Sequence: Synthetic oligonucleotide
ccaaagcauguggcugcuu

SEQ ID NO: 1769564 - RNA, 19 nt, Artificial Sequence
  Description of Artificial Sequence: Synthetic oligonucleotide
  modified_base (1)..(1): a, c, u, g, unknown or other
nagauaauguuagcuuagg

SEQ ID NO: 1769565 - RNA, 19 nt, Artificial Sequence
  Description of Artificial Sequence: Synthetic oligonucleotide
ucuaauguaaauaucaucu

SEQ ID NO: 1769566 - RNA, 19 nt, Artificial Sequence
  Description of Artificial Sequence: Synthetic oligonucleotide
acaauuuucuaacagauuc

SEQ ID NO: 1769567 - RNA, 19 nt, Artificial Sequence
  Description of Artificial Sequence: Synthetic oligonucleotide
ugugaaugaaaauucacgg

SEQ ID NO: 1769568 - RNA, 19 nt, Artificial Sequence
  Description of Artificial Sequence: Synthetic oligonucleotide
uuucuaauuauguuuauag

SEQ ID NO: 1769569 - RNA, 19 nt, Artificial Sequence
  Description of Artificial Sequence: Synthetic oligonucleotide
aaauucacgguguugaaag

SEQ ID NO: 1769570 - RNA, 19 nt, Artificial Sequence
  Description of Artificial Sequence: Synthetic oligonucleotide
ucuaauucucggcagaugg

SEQ ID NO: 1769571 - RNA, 19 nt, Artificial Sequence
  Description of Artificial Sequence: Synthetic oligonucleotide
ugaaugaaaauucacggug

SEQ ID NO: 1769572 - RNA, 19 nt, Artificial Sequence
  Description of Artificial Sequence: Synthetic oligonucleotide
aagugauugauuccuuugc

SEQ ID NO: 1769573 - RNA, 19 nt, Artificial Sequence
  Description of Artificial Sequence: Synthetic oligonucleotide
uaaauaucaucuuucagug

SEQ ID NO: 1769574 - RNA, 19 nt, Artificial Sequence
  Description of Artificial Sequence: Synthetic oligonucleotide
uagauuuccugacaaaagg

SEQ ID NO: 1769575 - RNA, 19 nt, Artificial Sequence
  Description of Artificial Sequence: Synthetic oligonucleotide
auuaguggaaaccacaucu

SEQ ID NO: 1769576 - RNA, 19 nt, Artificial Sequence
  Description of Artificial Sequence: Synthetic oligonucleotide
uuucugaaaaucaauuggc

SEQ ID NO: 1769577 - RNA, 19 nt, Artificial Sequence
  Description of Artificial Sequence: Synthetic oligonucleotide
uucacuuccggacuuaucc

SEQ ID NO: 1769578 - RNA, 19 nt, Artificial Sequence
  Description of Artificial Sequence: Synthetic oligonucleotide
aacagauucaucacagacc

SEQ ID NO: 1769579 - RNA, 19 nt, Artificial Sequence
  Description of Artificial Sequence: Synthetic oligonucleotide
uucaagaauaucuuggcca

SEQ ID NO: 1769580 - RNA, 19 nt, Artificial Sequence
  Description of Artificial Sequence: Synthetic oligonucleotide
acuuagaacauaugucugc

SEQ ID NO: 1769581 - RNA, 19 nt, Artificial Sequence
  Description of Artificial Sequence: Synthetic oligonucleotide
uuuacaagacucaaguacu

SEQ ID NO: 1769582 - RNA, 19 nt, Artificial Sequence
  Description of Artificial Sequence: Synthetic oligonucleotide
aggaacaagggcuaaaauc

SEQ ID NO: 1769583 - RNA, 19 nt, Artificial Sequence
  Description of Artificial Sequence: Synthetic oligonucleotide
cuuuacaagacucaaguac

SEQ ID NO: 1769584 - RNA, 19 nt, Artificial Sequence
  Description of Artificial Sequence: Synthetic oligonucleotide
ucuccuuacaucaucguag

SEQ ID NO: 1769585 - RNA, 19 nt, Artificial Sequence
  Description of Artificial Sequence: Synthetic oligonucleotide
uguuuuaggaugaacgcug

SEQ ID NO: 1769586 - RNA, 19 nt, Artificial Sequence
  Description of Artificial Sequence: Synthetic oligonucleotide
aaugcgaccuguuuuagga

SEQ ID NO: 1769587 - RNA, 19 nt, Artificial Sequence
  Description of Artificial Sequence: Synthetic oligonucleotide
uuuaacaucuugaccaccc

SEQ ID NO: 1769588 - RNA, 19 nt, Artificial Sequence
  Description of Artificial Sequence: Synthetic oligonucleotide
agaggcggugcuuaaaucc

SEQ ID NO: 1769589 - RNA, 19 nt, Artificial Sequence
  Description of Artificial Sequence: Synthetic oligonucleotide
uucaguaagugauugauuc

SEQ ID NO: 1769590 - RNA, 19 nt, Artificial Sequence
  Description of Artificial Sequence: Synthetic oligonucleotide
uaacagauucaucacagac

SEQ ID NO: 1769591 - RNA, 19 nt, Artificial Sequence
  Description of Artificial Sequence: Synthetic oligonucleotide
ugaaaguaauucuuuguca

SEQ ID NO: 1769592 - RNA, 19 nt, Artificial Sequence
  Description of Artificial Sequence: Synthetic oligonucleotide
auauacagcaccgauauca

SEQ ID NO: 1769593 - RNA, 19 nt, Artificial Sequence
  Description of Artificial Sequence: Synthetic oligonucleotide
guaauauagcuucaguagc

SEQ ID NO: 1769594 - RNA, 19 nt, Artificial Sequence
  Description of Artificial Sequence: Synthetic oligonucleotide
ugauugauuccuuugcuca

SEQ ID NO: 1769595 - RNA, 19 nt, Artificial Sequence
  Description of Artificial Sequence: Synthetic oligonucleotide
auguuuauagauuuccuga

SEQ ID NO: 1769596 - RNA, 19 nt, Artificial Sequence
  Description of Artificial Sequence: Synthetic oligonucleotide
aaugcccggucuaugaugc

SEQ ID NO: 1769597 - RNA, 19 nt, Artificial Sequence
  Description of Artificial Sequence: Synthetic oligonucleotide
cuuaaauccaaaguccucc

SEQ ID NO: 1769598 - RNA, 19 nt, Artificial Sequence
  Description of Artificial Sequence: Synthetic oligonucleotide
aucaaucuuguauggauuc

SEQ ID NO: 1769599 - RNA, 19 nt, Artificial Sequence
  Description of Artificial Sequence: Synthetic oligonucleotide
auauagcuucaguagcucc

SEQ ID NO: 1769600 - RNA, 19 nt, Artificial Sequence
  Description of Artificial Sequence: Synthetic oligonucleotide
uugaccacccuuuacaaga

SEQ ID NO: 1769601 - RNA, 19 nt, Artificial Sequence
  Description of Artificial Sequence: Synthetic oligonucleotide
uagaacauaugucugcaga

SEQ ID NO: 1769602 - RNA, 19 nt, Artificial Sequence
  Description of Artificial Sequence: Synthetic oligonucleotide
uuucaagaauaucuuggcc

SEQ ID NO: 1769603 - RNA, 19 nt, Artificial Sequence
  Description of Artificial Sequence: Synthetic oligonucleotide
gauaguacugggcguaggg

SEQ ID NO: 1769604 - RNA, 19 nt, Artificial Sequence
  Description of Artificial Sequence: Synthetic oligonucleotide
acaguacugaaccaugauc

SEQ ID NO: 1769605 - RNA, 19 nt, Artificial Sequence
  Description of Artificial Sequence: Synthetic oligonucleotide
accgauaucaaucuuguau

SEQ ID NO: 1769606 - RNA, 19 nt, Artificial Sequence
  Description of Artificial Sequence: Synthetic oligonucleotide
ucaaacggcuccaugaagu

SEQ ID NO: 1769607 - RNA, 19 nt, Artificial Sequence
  Description of Artificial Sequence: Synthetic oligonucleotide
uuuccugacaaaaggguga

SEQ ID NO: 1769608 - RNA, 19 nt, Artificial Sequence
  Description of Artificial Sequence: Synthetic oligonucleotide
aauauagcuucaguagcuc

SEQ ID NO: 1769609 - RNA, 19 nt, Artificial Sequence
  Description of Artificial Sequence: Synthetic oligonucleotide
ugggcguagggaaagaggc

SEQ ID NO: 1769610 - RNA, 19 nt, Artificial Sequence
  Description of Artificial Sequence: Synthetic oligonucleotide
uaauucucggcagauggcg

SEQ ID NO: 1769611 - RNA, 19 nt, Artificial Sequence
  Description of Artificial Sequence: Synthetic oligonucleotide
cuuacaucaucguagucug

SEQ ID NO: 1769612 - RNA, 19 nt, Artificial Sequence
  Description of Artificial Sequence: Synthetic oligonucleotide
ugguuggaacaguaaaugg

SEQ ID NO: 1769613 - RNA, 19 nt, Artificial Sequence
  Description of Artificial Sequence: Synthetic oligonucleotide
uguuuauagauuuccugac

SEQ ID NO: 1769614 - RNA, 19 nt, Artificial Sequence
  Description of Artificial Sequence: Synthetic oligonucleotide
ugaaccaugaucucccacu

SEQ ID NO: 1769615 - RNA, 19 nt, Artificial Sequence
  Description of Artificial Sequence: Synthetic oligonucleotide
aaaugcgaccuguuuuagg

SEQ ID NO: 1769616 - RNA, 19 nt, Artificial Sequence
  Description of Artificial Sequence: Synthetic oligonucleotide
gauauucccagcguugagg

SEQ ID NO: 1769617 - RNA, 19 nt, Artificial Sequence
  Description of Artificial Sequence: Synthetic oligonucleotide
uucuaauuauguuuauaga

SEQ ID NO: 1769618 - RNA, 19 nt, Artificial Sequence
  Description of Artificial Sequence: Synthetic oligonucleotide
uagaaguucacuuccggac

SEQ ID NO: 1769619 - RNA, 19 nt, Artificial Sequence
  Description of Artificial Sequence: Synthetic oligonucleotide
uauccagguuucaagaaac

SEQ ID NO: 1769620 - RNA, 19 nt, Artificial Sequence
  Description of Artificial Sequence: Synthetic oligonucleotide
accuguuuuaggaugaacg

SEQ ID NO: 1769621 - RNA, 19 nt, Artificial Sequence
  Description of Artificial Sequence: Synthetic oligonucleotide
ucuguguuugaucucagau

SEQ ID NO: 1769622 - RNA, 19 nt, Artificial Sequence
  Description of Artificial Sequence: Synthetic oligonucleotide
ugguaucuaauguaaauau

SEQ ID NO: 1769623 - RNA, 19 nt, Artificial Sequence
  Description of Artificial Sequence: Synthetic oligonucleotide
ucacauauggugcuagacu

SEQ ID NO: 1769624 - RNA, 19 nt, Artificial Sequence
  Description of Artificial Sequence: Synthetic oligonucleotide
uucgugaauggucucagga

SEQ ID NO: 1769625 - RNA, 19 nt, Artificial Sequence
  Description of Artificial Sequence: Synthetic oligonucleotide
agacccaacagugaacgcc

SEQ ID NO: 1769626 - RNA, 19 nt, Artificial Sequence
  Description of Artificial Sequence: Synthetic oligonucleotide
gacuuauccagguuucaag

SEQ ID NO: 1769627 - RNA, 19 nt, Artificial Sequence
  Description of Artificial Sequence: Synthetic oligonucleotide
cucaaguacuccacuaucc

SEQ ID NO: 1769628 - RNA, 19 nt, Artificial Sequence
  Description of Artificial Sequence: Synthetic oligonucleotide
ugcuuaaauccaaaguccu

SEQ ID NO: 1769629 - RNA, 19 nt, Artificial Sequence
  Description of Artificial Sequence: Synthetic oligonucleotide
uauuguguugacugggucu

SEQ ID NO: 1769630 - RNA, 19 nt, Artificial Sequence
  Description of Artificial Sequence: Synthetic oligonucleotide
uguugacugggucugugag

SEQ ID NO: 1769631 - RNA, 19 nt, Artificial Sequence
  Description of Artificial Sequence: Synthetic oligonucleotide
auggguuaaacugauccac

SEQ ID NO: 1769632 - RNA, 19 nt, Artificial Sequence
  Description of Artificial Sequence: Synthetic oligonucleotide
ugucacuccgccauaguug

SEQ ID NO: 1769633 - RNA, 19 nt, Artificial Sequence
  Description of Artificial Sequence: Synthetic oligonucleotide
acuuauccagguuucaaga

SEQ ID NO: 1769634 - RNA, 19 nt, Artificial Sequence
  Description of Artificial Sequence: Synthetic oligonucleotide
caugucgaugucaaagacc

SEQ ID NO: 1769635 - RNA, 19 nt, Artificial Sequence
  Description of Artificial Sequence: Synthetic oligonucleotide
guauggauucauuuucugc

SEQ ID NO: 1769636 - RNA, 19 nt, Artificial Sequence
  Description of Artificial Sequence: Synthetic oligonucleotide
aggacaauuuucuaacaga

SEQ ID NO: 1769637 - RNA, 19 nt, Artificial Sequence
  Description of Artificial Sequence: Synthetic oligonucleotide
acucaaguacuccacuauc

SEQ ID NO: 1769638 - RNA, 19 nt, Artificial Sequence
  Description of Artificial Sequence: Synthetic oligonucleotide
aauauacagcaccgauauc

SEQ ID NO: 1769639 - RNA, 19 nt, Artificial Sequence
  Description of Artificial Sequence: Synthetic oligonucleotide
aagucaggaacuagauccc

SEQ ID NO: 1769640 - RNA, 19 nt, Artificial Sequence
  Description of Artificial Sequence: Synthetic oligonucleotide
agaggcgucgguaauauag

SEQ ID NO: 1769641 - RNA, 19 nt, Artificial Sequence
  Description of Artificial Sequence: Synthetic oligonucleotide
ugagccagcgauaguacug

SEQ ID NO: 1769642 - RNA, 19 nt, Artificial Sequence
  Description of Artificial Sequence: Synthetic oligonucleotide
uuucauuaguggaaaccac

SEQ ID NO: 1769643 - RNA, 19 nt, Artificial Sequence
  Description of Artificial Sequence: Synthetic oligonucleotide
aauucucggcagauggcgc

SEQ ID NO: 1769644 - RNA, 19 nt, Artificial Sequence
  Description of Artificial Sequence: Synthetic oligonucleotide
uguauggauucauuuucug

SEQ ID NO: 1769645 - RNA, 19 nt, Artificial Sequence
  Description of Artificial Sequence: Synthetic oligonucleotide
ucuuguauggauucauuuu

SEQ ID NO: 1769646 - RNA, 19 nt, Artificial Sequence
  Description of Artificial Sequence: Synthetic oligonucleotide
acaagacucaaguacucca

SEQ ID NO: 1769647 - RNA, 19 nt, Artificial Sequence
  Description of Artificial Sequence: Synthetic oligonucleotide
acuccgccauaguugagcc

SEQ ID NO: 1769648 - RNA, 19 nt, Artificial Sequence
  Description of Artificial Sequence: Synthetic oligonucleotide
gguuggaacaguaaauggg

SEQ ID NO: 1769649 - RNA, 19 nt, Artificial Sequence
  Description of Artificial Sequence: Synthetic oligonucleotide
acugguaucuaauguaaau

SEQ ID NO: 1769650 - RNA, 19 nt, Artificial Sequence
  Description of Artificial Sequence: Synthetic oligonucleotide
uccgccauaguugagccag

SEQ ID NO: 1769651 - RNA, 19 nt, Artificial Sequence
  Description of Artificial Sequence: Synthetic oligonucleotide
aacggcuccaugaagucag

SEQ ID NO: 1769652 - RNA, 19 nt, Artificial Sequence
  Description of Artificial Sequence: Synthetic oligonucleotide
uuuaggaugaacgcugaaa

SEQ ID NO: 1769653 - RNA, 19 nt, Artificial Sequence
  Description of Artificial Sequence: Synthetic oligonucleotide
uuagaacauaugucugcag

SEQ ID NO: 1769654 - RNA, 19 nt, Artificial Sequence
  Description of Artificial Sequence: Synthetic oligonucleotide
agugauugauuccuuugcu

SEQ ID NO: 1769655 - RNA, 19 nt, Artificial Sequence
  Description of Artificial Sequence: Synthetic oligonucleotide
uuaaauccaaaguccuccu

SEQ ID NO: 1769656 - RNA, 19 nt, Artificial Sequence
  Description of Artificial Sequence: Synthetic oligonucleotide
cucggcaggaucaaacggc

SEQ ID NO: 1769657 - RNA, 19 nt, Artificial Sequence
  Description of Artificial Sequence: Synthetic oligonucleotide
uucccgaguauacccagag

SEQ ID NO: 1769658 - RNA, 19 nt, Artificial Sequence
  Description of Artificial Sequence: Synthetic oligonucleotide
auagauuuccugacaaaag

SEQ ID NO: 1769659 - RNA, 19 nt, Artificial Sequence
  Description of Artificial Sequence: Synthetic oligonucleotide
auauucccagcguugaggu

SEQ ID NO: 1769660 - RNA, 19 nt, Artificial Sequence
  Description of Artificial Sequence: Synthetic oligonucleotide
uccacuaucccagaacgca

SEQ ID NO: 1769661 - RNA, 19 nt, Artificial Sequence
  Description of Artificial Sequence: Synthetic oligonucleotide
agaacauaugucugcagaa

SEQ ID NO: 1769662 - RNA, 19 nt, Artificial Sequence
  Description of Artificial Sequence: Synthetic oligonucleotide
ucuuucagugugaaugaaa

SEQ ID NO: 1769663 - RNA, 19 nt, Artificial Sequence
  Description of Artificial Sequence: Synthetic oligonucleotide
cugugaagccuuuggaagc

SEQ ID NO: 1769664 - RNA, 19 nt, Artificial Sequence
  Description of Artificial Sequence: Synthetic oligonucleotide
caugaagucaggaacuaga

SEQ ID NO: 1769665 - RNA, 19 nt, Artificial Sequence
  Description of Artificial Sequence: Synthetic oligonucleotide
augguuggaacaguaaaug

SEQ ID NO: 1769666 - RNA, 19 nt, Artificial Sequence
  Description of Artificial Sequence: Synthetic oligonucleotide
cauaugucugcagaacugc

SEQ ID NO: 1769667 - RNA, 19 nt, Artificial Sequence
  Description of Artificial Sequence: Synthetic oligonucleotide
uaucaaucuuguauggauu

SEQ ID NO: 1769668 - RNA, 19 nt, Artificial Sequence
  Description of Artificial Sequence: Synthetic oligonucleotide
uccagcacuuagaacauau

SEQ ID NO: 1769669 - RNA, 19 nt, Artificial Sequence
  Description of Artificial Sequence: Synthetic oligonucleotide
ugcgaccuguuuuaggaug

SEQ ID NO: 1769670 - RNA, 19 nt, Artificial Sequence
  Description of Artificial Sequence: Synthetic oligonucleotide
uauacagcaccgauaucaa

SEQ ID NO: 1769671 - RNA, 19 nt, Artificial Sequence
  Description of Artificial Sequence: Synthetic oligonucleotide
aauucacgguguugaaagu

SEQ ID NO: 1769672 - RNA, 19 nt, Artificial Sequence
  Description of Artificial Sequence: Synthetic oligonucleotide
ucaucguagucugucaugu

SEQ ID NO: 1769673 - RNA, 19 nt, Artificial Sequence
  Description of Artificial Sequence: Synthetic oligonucleotide
aaaauucacgguguugaaa

SEQ ID NO: 1769674 - RNA, 19 nt, Artificial Sequence
  Description of Artificial Sequence: Synthetic oligonucleotide
gauugauuccuuugcucac

SEQ ID NO: 1769675 - RNA, 19 nt, Artificial Sequence
  Description of Artificial Sequence: Synthetic oligonucleotide
ugaagucaggaacuagauc

SEQ ID NO: 1769676 - RNA, 19 nt, Artificial Sequence
  Description of Artificial Sequence: Synthetic oligonucleotide
agugaacgccucuccuucc

SEQ ID NO: 1769677 - RNA, 19 nt, Artificial Sequence
  Description of Artificial Sequence: Synthetic oligonucleotide
agauucaucacagacccaa

SEQ ID NO: 1769678 - RNA, 19 nt, Artificial Sequence
  Description of Artificial Sequence: Synthetic oligonucleotide
cuaauucucggcagauggc

SEQ ID NO: 1769679 - RNA, 19 nt, Artificial Sequence
  Description of Artificial Sequence: Synthetic oligonucleotide
agcucggcaggaucaaacg

SEQ ID NO: 1769680 - RNA, 19 nt, Artificial Sequence
  Description of Artificial Sequence: Synthetic oligonucleotide
uggaacaguaaauggguua

SEQ ID NO: 1769681 - RNA, 19 nt, Artificial Sequence
  Description of Artificial Sequence: Synthetic oligonucleotide
accacauuugucguucuuc

SEQ ID NO: 1769682 - RNA, 19 nt, Artificial Sequence
  Description of Artificial Sequence: Synthetic oligonucleotide
cacuuagaacauaugucug

SEQ ID NO: 1769683 - RNA, 19 nt, Artificial Sequence
  Description of Artificial Sequence: Synthetic oligonucleotide
cacaucuaauucucggcag

SEQ ID NO: 1769684 - RNA, 19 nt, Artificial Sequence
  Description of Artificial Sequence: Synthetic oligonucleotide
uaguggaaaccacaucuaa

SEQ ID NO: 1769685 - RNA, 19 nt, Artificial Sequence
  Description of Artificial Sequence: Synthetic oligonucleotide
uacuccacuaucccagaac

SEQ ID NO: 1769686 - RNA, 19 nt, Artificial Sequence
  Description of Artificial Sequence: Synthetic oligonucleotide
uggguuaaacugauccacu

SEQ ID NO: 1769687 - RNA, 19 nt, Artificial Sequence
  Description of Artificial Sequence: Synthetic oligonucleotide
aucaaacggcuccaugaag

SEQ ID NO: 1769688 - RNA, 19 nt, Artificial Sequence
  Description of Artificial Sequence: Synthetic oligonucleotide
ccagcgauaguacugggcg

SEQ ID NO: 1769689 - RNA, 19 nt, Artificial Sequence
  Description of Artificial Sequence: Synthetic oligonucleotide
gauggccaucgucaugagg

SEQ ID NO: 1769690 - RNA, 19 nt, Artificial Sequence
  Description of Artificial Sequence: Synthetic oligonucleotide
acaucuaauucucggcaga

SEQ ID NO: 1769691 - RNA, 19 nt, Artificial Sequence
  Description of Artificial Sequence: Synthetic oligonucleotide
gaacauaugucugcagaac

SEQ ID NO: 1769692 - RNA, 19 nt, Artificial Sequence
  Description of Artificial Sequence: Synthetic oligonucleotide
caguacugaaccaugaucu

SEQ ID NO: 1769693 - RNA, 19 nt, Artificial Sequence
  Description of Artificial Sequence: Synthetic oligonucleotide
ucuugaccacccuuuacaa

SEQ ID NO: 1769694 - RNA, 19 nt, Artificial Sequence
  Description of Artificial Sequence: Synthetic oligonucleotide
aaacaguacugaaccauga

SEQ ID NO: 1769695 - RNA, 19 nt, Artificial Sequence
  Description of Artificial Sequence: Synthetic oligonucleotide
uucacauauggugcuagac

SEQ ID NO: 1769696 - RNA, 19 nt, Artificial Sequence
  Description of Artificial Sequence: Synthetic oligonucleotide
cccgaguauacccagaggc

SEQ ID NO: 1769697 - RNA, 19 nt, Artificial Sequence
  Description of Artificial Sequence: Synthetic oligonucleotide
ugaacgccucuccuucccg

SEQ ID NO: 1769698 - RNA, 19 nt, Artificial Sequence
  Description of Artificial Sequence: Synthetic oligonucleotide
gauaucaaucuuguaugga

SEQ ID NO: 1769699 - RNA, 19 nt, Artificial Sequence
  Description of Artificial Sequence: Synthetic oligonucleotide
uauccaggcguggaaaaca

SEQ ID NO: 1769700 - RNA, 19 nt, Artificial Sequence
  Description of Artificial Sequence: Synthetic oligonucleotide
aucaucguagucugucaug

SEQ ID NO: 1769701 - RNA, 19 nt, Artificial Sequence
  Description of Artificial Sequence: Synthetic oligonucleotide
cugggcguagggaaagagg

SEQ ID NO: 1769702 - RNA, 19 nt, Artificial Sequence
  Description of Artificial Sequence: Synthetic oligonucleotide
aggcguggaaaacaguacu

SEQ ID NO: 1769703 - RNA, 19 nt, Artificial Sequence
  Description of Artificial Sequence: Synthetic oligonucleotide
ugaaagggcucuucaguaa

SEQ ID NO: 1769704 - RNA, 19 nt, Artificial Sequence
  Description of Artificial Sequence: Synthetic oligonucleotide
ugagaauauacagcaccga

SEQ ID NO: 1769705 - RNA, 19 nt, Artificial Sequence
  Description of Artificial Sequence: Synthetic oligonucleotide
ucgugaauggucucaggaa

SEQ ID NO: 1769706 - RNA, 19 nt, Artificial Sequence
  Description of Artificial Sequence: Synthetic oligonucleotide
ucuucgugaauggucucag

SEQ ID NO: 1769707 - RNA, 19 nt, Artificial Sequence
  Description of Artificial Sequence: Synthetic oligonucleotide
ccgauaucaaucuuguaug

SEQ ID NO: 1769708 - RNA, 19 nt, Artificial Sequence
  Description of Artificial Sequence: Synthetic oligonucleotide
auagcuucaguagcuccgg

SEQ ID NO: 1769709 - RNA, 19 nt, Artificial Sequence
  Description of Artificial Sequence: Synthetic oligonucleotide
acuaucccagaacgcacag

SEQ ID NO: 1769710 - RNA, 19 nt, Artificial Sequence
  Description of Artificial Sequence: Synthetic oligonucleotide
gagccagcgauaguacugg

SEQ ID NO: 1769711 - RNA, 19 nt, Artificial Sequence
  Description of Artificial Sequence: Synthetic oligonucleotide
ucgaugucaaagaccaguu

SEQ ID NO: 1769712 - RNA, 19 nt, Artificial Sequence
  Description of Artificial Sequence: Synthetic oligonucleotide
accacccuuuacaagacuc

SEQ ID NO: 1769713 - RNA, 19 nt, Artificial Sequence
  Description of Artificial Sequence: Synthetic oligonucleotide
gaacugugaagccuuugga

SEQ ID NO: 1769714 - RNA, 19 nt, Artificial Sequence
  Description of Artificial Sequence: Synthetic oligonucleotide
guagaaguucacuuccgga

SEQ ID NO: 1769715 - RNA, 19 nt, Artificial Sequence
  Description of Artificial Sequence: Synthetic oligonucleotide
ggcaggaucaaacggcucc

SEQ ID NO: 1769716 - RNA, 19 nt, Artificial Sequence
  Description of Artificial Sequence: Synthetic oligonucleotide
agauauucccagcguugag

SEQ ID NO: 1769717 - RNA, 19 nt, Artificial Sequence
  Description of Artificial Sequence: Synthetic oligonucleotide
gaacgcacagcagaggaca

SEQ ID NO: 1769718 - RNA, 19 nt, Artificial Sequence
  Description of Artificial Sequence: Synthetic oligonucleotide
ucccgaguauacccagagg

SEQ ID NO: 1769719 - RNA, 19 nt, Artificial Sequence
  Description of Artificial Sequence: Synthetic oligonucleotide
ucggcaggaucaaacggcu

SEQ ID NO: 1769720 - RNA, 19 nt, Artificial Sequence
  Description of Artificial Sequence: Synthetic oligonucleotide
ggaacaagggcuaaaaucu

SEQ ID NO: 1769721 - RNA, 19 nt, Artificial Sequence
  Description of Artificial Sequence: Synthetic oligonucleotide
ugcuagacuggucuucuua

SEQ ID NO: 1769722 - RNA, 19 nt, Artificial Sequence
  Description of Artificial Sequence: Synthetic oligonucleotide
ucgugcuccucuuuguccu

SEQ ID NO: 1769723 - RNA, 19 nt, Artificial Sequence
  Description of Artificial Sequence: Synthetic oligonucleotide
acauaugucugcagaacug

SEQ ID NO: 1769724 - RNA, 19 nt, Artificial Sequence
  Description of Artificial Sequence: Synthetic oligonucleotide
cacuuccggacuuauccag

SEQ ID NO: 1769725 - RNA, 19 nt, Artificial Sequence
  Description of Artificial Sequence: Synthetic oligonucleotide
cuuagaacauaugucugca

SEQ ID NO: 1769726 - RNA, 19 nt, Artificial Sequence
  Description of Artificial Sequence: Synthetic oligonucleotide
uccuuuucauuaguggaaa

SEQ ID NO: 1769727 - RNA, 19 nt, Artificial Sequence
  Description of Artificial Sequence: Synthetic oligonucleotide
acagaaaugcgaccuguuu

SEQ ID NO: 1769728 - RNA, 19 nt, Artificial Sequence
  Description of Artificial Sequence: Synthetic oligonucleotide
uauacccagaggcggugcu

SEQ ID NO: 1769729 - RNA, 19 nt, Artificial Sequence
  Description of Artificial Sequence: Synthetic oligonucleotide
gagaauauacagcaccgau

SEQ ID NO: 1769730 - RNA, 19 nt, Artificial Sequence
  Description of Artificial Sequence: Synthetic oligonucleotide
uaaauggguuaaacugauc

SEQ ID NO: 1769731 - RNA, 19 nt, Artificial Sequence
  Description of Artificial Sequence: Synthetic oligonucleotide
uccuucccgaguauaccca

SEQ ID NO: 1769732 - RNA, 19 nt, Artificial Sequence
  Description of Artificial Sequence: Synthetic oligonucleotide
ucgucaugaggguccagca

SEQ ID NO: 1769733 - RNA, 19 nt, Artificial Sequence
  Description of Artificial Sequence: Synthetic oligonucleotide
gaaaugcgaccuguuuuag

SEQ ID NO: 1769734 - RNA, 19 nt, Artificial Sequence
  Description of Artificial Sequence: Synthetic oligonucleotide
agucaggaacuagaucccg

SEQ ID NO: 1769735 - RNA, 19 nt, Artificial Sequence
  Description of Artificial Sequence: Synthetic oligonucleotide
agcuccggcagcucggcag

SEQ ID NO: 1769736 - RNA, 19 nt, Artificial Sequence
  Description of Artificial Sequence: Synthetic oligonucleotide
gucacuccgccauaguuga

SEQ ID NO: 1769737 - RNA, 19 nt, Artificial Sequence
  Description of Artificial Sequence: Synthetic oligonucleotide
caaugcccggucuaugaug

SEQ ID NO: 1769738 - RNA, 19 nt, Artificial Sequence
  Description of Artificial Sequence: Synthetic oligonucleotide
uuggaacaguaaauggguu

SEQ ID NO: 1769739 - RNA, 19 nt, Artificial Sequence
  Description of Artificial Sequence: Synthetic oligonucleotide
aggguccagcacuuagaac

SEQ ID NO: 1769740 - RNA, 19 nt, Artificial Sequence
  Description of Artificial Sequence: Synthetic oligonucleotide
uugcucacguugauaucca

SEQ ID NO: 1769741 - RNA, 19 nt, Artificial Sequence
  Description of Artificial Sequence: Synthetic oligonucleotide
ucacucagaugaacuuucu

SEQ ID NO: 1769742 - RNA, 19 nt, Artificial Sequence
  Description of Artificial Sequence: Synthetic oligonucleotide
ugcccggucuaugaugcgg

SEQ ID NO: 1769743 - RNA, 19 nt, Artificial Sequence
  Description of Artificial Sequence: Synthetic oligonucleotide
aaacggcuccaugaaguca

SEQ ID NO: 1769744 - RNA, 19 nt, Artificial Sequence
  Description of Artificial Sequence: Synthetic oligonucleotide
ucaaugcccggucuaugau

SEQ ID NO: 1769745 - RNA, 19 nt, Artificial Sequence
  Description of Artificial Sequence: Synthetic oligonucleotide
auucucggcagauggcgcu

SEQ ID NO: 1769746 - RNA, 19 nt, Artificial Sequence
  Description of Artificial Sequence: Synthetic oligonucleotide
uuugucacuccgccauagu

SEQ ID NO: 1769747 - RNA, 19 nt, Artificial Sequence
  Description of Artificial Sequence: Synthetic oligonucleotide
caacagugaacgccucucc

SEQ ID NO: 1769748 - RNA, 19 nt, Artificial Sequence
  Description of Artificial Sequence: Synthetic oligonucleotide
agaauauacagcaccgaua

SEQ ID NO: 1769749 - RNA, 19 nt, Artificial Sequence
  Description of Artificial Sequence: Synthetic oligonucleotide
gcacuuagaacauaugucu

SEQ ID NO: 1769750 - RNA, 19 nt, Artificial Sequence
  Description of Artificial Sequence: Synthetic oligonucleotide
agcucuucgugaauggucu

SEQ ID NO: 1769751 - RNA, 19 nt, Artificial Sequence
  Description of Artificial Sequence: Synthetic oligonucleotide
uagggaaagaggcgucggu

SEQ ID NO: 1769752 - RNA, 19 nt, Artificial Sequence
  Description of Artificial Sequence: Synthetic oligonucleotide
gaggcgucgguaauauagc

SEQ ID NO: 1769753 - RNA, 19 nt, Artificial Sequence
  Description of Artificial Sequence: Synthetic oligonucleotide
guuggaacaguaaaugggu

SEQ ID NO: 1769754 - RNA, 19 nt, Artificial Sequence
  Description of Artificial Sequence: Synthetic oligonucleotide
guauuguguugacuggguc

SEQ ID NO: 1769755 - RNA, 19 nt, Artificial Sequence
  Description of Artificial Sequence: Synthetic oligonucleotide
gcgucgguaauauagcuuc

SEQ ID NO: 1769756 - RNA, 19 nt, Artificial Sequence
  Description of Artificial Sequence: Synthetic oligonucleotide
agacuggucuucuuauaau

SEQ ID NO: 1769757 - RNA, 19 nt, Artificial Sequence
  Description of Artificial Sequence: Synthetic oligonucleotide
cuuauccagguuucaagaa

SEQ ID NO: 1769758 - RNA, 19 nt, Artificial Sequence
  Description of Artificial Sequence: Synthetic oligonucleotide
agacucaaguacuccacua

SEQ ID NO: 1769759 - RNA, 19 nt, Artificial Sequence
  Description of Artificial Sequence: Synthetic oligonucleotide
caggcguggaaaacaguac

SEQ ID NO: 1769760 - RNA, 19 nt, Artificial Sequence
  Description of Artificial Sequence: Synthetic oligonucleotide
cuucgugaauggucucagg

SEQ ID NO: 1769761 - RNA, 19 nt, Artificial Sequence
  Description of Artificial Sequence: Synthetic oligonucleotide
cuuaugguuggaacaguaa

SEQ ID NO: 1769762 - RNA, 19 nt, Artificial Sequence
  Description of Artificial Sequence: Synthetic oligonucleotide
cuuugucacuccgccauag

SEQ ID NO: 1769763 - RNA, 19 nt, Artificial Sequence
  Description of Artificial Sequence: Synthetic oligonucleotide
agucugucaugucgauguc

SEQ ID NO: 1769764 - RNA, 19 nt, Artificial Sequence
  Description of Artificial Sequence: Synthetic oligonucleotide
caguagcuccggcagcucg

SEQ ID NO: 1769765 - RNA, 19 nt, Artificial Sequence
  Description of Artificial Sequence: Synthetic oligonucleotide
uggggugugcugaucacuu

SEQ ID NO: 1769766 - RNA, 19 nt, Artificial Sequence
  Description of Artificial Sequence: Synthetic oligonucleotide
cuccacuaucccagaacgc

SEQ ID NO: 1769767 - RNA, 19 nt, Artificial Sequence
  Description of Artificial Sequence: Synthetic oligonucleotide
cacuccgccauaguugagc

SEQ ID NO: 1769768 - RNA, 19 nt, Artificial Sequence
  Description of Artificial Sequence: Synthetic oligonucleotide
caagggcuaaaaucuuauc

SEQ ID NO: 1769769 - RNA, 19 nt, Artificial Sequence
  Description of Artificial Sequence: Synthetic oligonucleotide
augaugcggauggccaucg

SEQ ID NO: 1769770 - RNA, 19 nt, Artificial Sequence
  Description of Artificial Sequence: Synthetic oligonucleotide
cagugaacgccucuccuuc

SEQ ID NO: 1769771 - RNA, 19 nt, Artificial Sequence
  Description of Artificial Sequence: Synthetic oligonucleotide
ucacgguguugaaaguaau

SEQ ID NO: 1769772 - RNA, 19 nt, Artificial Sequence
  Description of Artificial Sequence: Synthetic oligonucleotide
uggcgcuuaugguuggaac

SEQ ID NO: 1769773 - RNA, 19 nt, Artificial Sequence
  Description of Artificial Sequence: Synthetic oligonucleotide
aguacuccacuaucccaga

SEQ ID NO: 1769774 - RNA, 19 nt, Artificial Sequence
  Description of Artificial Sequence: Synthetic oligonucleotide
ugucgaugucaaagaccag

SEQ ID NO: 1769775 - RNA, 19 nt, Artificial Sequence
  Description of Artificial Sequence: Synthetic oligonucleotide
auaguacugggcguaggga

SEQ ID NO: 1769776 - RNA, 19 nt, Artificial Sequence
  Description of Artificial Sequence: Synthetic oligonucleotide
augaacgcugaaagggcuc

SEQ ID NO: 1769777 - RNA, 19 nt, Artificial Sequence
  Description of Artificial Sequence: Synthetic oligonucleotide
aguggaaaccacaucuaau

SEQ ID NO: 1769778 - RNA, 19 nt, Artificial Sequence
  Description of Artificial Sequence: Synthetic oligonucleotide
cauuugucguucuucauau

SEQ ID NO: 1769779 - RNA, 19 nt, Artificial Sequence
  Description of Artificial Sequence: Synthetic oligonucleotide
ggaaaccacaucuaauucu

SEQ ID NO: 1769780 - RNA, 19 nt, Artificial Sequence
  Description of Artificial Sequence: Synthetic oligonucleotide
cugaaagggcucuucagua

SEQ ID NO: 1769781 - RNA, 19 nt, Artificial Sequence
  Description of Artificial Sequence: Synthetic oligonucleotide
ccgaguauacccagaggcg

SEQ ID NO: 1769782 - RNA, 19 nt, Artificial Sequence
  Description of Artificial Sequence: Synthetic oligonucleotide
aggcgucgguaauauagcu

SEQ ID NO: 1769783 - RNA, 19 nt, Artificial Sequence
  Description of Artificial Sequence: Synthetic oligonucleotide
uccuucaaugcccggucua

SEQ ID NO: 1769784 - RNA, 19 nt, Artificial Sequence
  Description of Artificial Sequence: Synthetic oligonucleotide
cgauaucaaucuuguaugg

SEQ ID NO: 1769785 - RNA, 19 nt, Artificial Sequence
  Description of Artificial Sequence: Synthetic oligonucleotide
uaugaugcggauggccauc

SEQ ID NO: 1769786 - RNA, 19 nt, Artificial Sequence
  Description of Artificial Sequence: Synthetic oligonucleotide
ggcuaaaaucuuaucccag

SEQ ID NO: 1769787 - RNA, 19 nt, Artificial Sequence
  Description of Artificial Sequence: Synthetic oligonucleotide
aucuaauucucggcagaug

SEQ ID NO: 1769788 - RNA, 19 nt, Artificial Sequence
  Description of Artificial Sequence: Synthetic oligonucleotide
gggcuaaaaucuuauccca

SEQ ID NO: 1769789 - RNA, 19 nt, Artificial Sequence
  Description of Artificial Sequence: Synthetic oligonucleotide
agcguugaggugaacugug

SEQ ID NO: 1769790 - RNA, 19 nt, Artificial Sequence
  Description of Artificial Sequence: Synthetic oligonucleotide
auucacgguguugaaagua

SEQ ID NO: 1769791 - RNA, 19 nt, Artificial Sequence
  Description of Artificial Sequence: Synthetic oligonucleotide
cugguaucuaauguaaaua

SEQ ID NO: 1769792 - RNA, 19 nt, Artificial Sequence
  Description of Artificial Sequence: Synthetic oligonucleotide
ggcgcuuaugguuggaaca

SEQ ID NO: 1769793 - RNA, 19 nt, Artificial Sequence
  Description of Artificial Sequence: Synthetic oligonucleotide
aguauacccagaggcggug

SEQ ID NO: 1769794 - RNA, 19 nt, Artificial Sequence
  Description of Artificial Sequence: Synthetic oligonucleotide
ucacuguauuguguugacu

SEQ ID NO: 1769795 - RNA, 19 nt, Artificial Sequence
  Description of Artificial Sequence: Synthetic oligonucleotide
ugaucacuuuccucagaua

SEQ ID NO: 1769796 - RNA, 19 nt, Artificial Sequence
  Description of Artificial Sequence: Synthetic oligonucleotide
acgcugaaagggcucuuca

SEQ ID NO: 1769797 - RNA, 19 nt, Artificial Sequence
  Description of Artificial Sequence: Synthetic oligonucleotide
ggaacaguaaauggguuaa

SEQ ID NO: 1769798 - RNA, 19 nt, Artificial Sequence
  Description of Artificial Sequence: Synthetic oligonucleotide
gaggcggugcuuaaaucca

SEQ ID NO: 1769799 - RNA, 19 nt, Artificial Sequence
  Description of Artificial Sequence: Synthetic oligonucleotide
uuggccaacuaaggcauau

SEQ ID NO: 1769800 - RNA, 19 nt, Artificial Sequence
  Description of Artificial Sequence: Synthetic oligonucleotide
auccaggcguggaaaacag

SEQ ID NO: 1769801 - RNA, 19 nt, Artificial Sequence
  Description of Artificial Sequence: Synthetic oligonucleotide
uccuuacaucaucguaguc

SEQ ID NO: 1769802 - RNA, 19 nt, Artificial Sequence
  Description of Artificial Sequence: Synthetic oligonucleotide
cgugaauggucucaggaac

SEQ ID NO: 1769803 - RNA, 19 nt, Artificial Sequence
  Description of Artificial Sequence: Synthetic oligonucleotide
acccuuuacaagacucaag

SEQ ID NO: 1769804 - RNA, 19 nt, Artificial Sequence
  Description of Artificial Sequence: Synthetic oligonucleotide
guagucugucaugucgaug

SEQ ID NO: 1769805 - RNA, 19 nt, Artificial Sequence
  Description of Artificial Sequence: Synthetic oligonucleotide
cuaauguaaauaucaucuu

SEQ ID NO: 1769806 - RNA, 19 nt, Artificial Sequence
  Description of Artificial Sequence: Synthetic oligonucleotide
agccagcgauaguacuggg

SEQ ID NO: 1769807 - RNA, 19 nt, Artificial Sequence
  Description of Artificial Sequence: Synthetic oligonucleotide
auauggugcuagacugguc

SEQ ID NO: 1769808 - RNA, 19 nt, Artificial Sequence
  Description of Artificial Sequence: Synthetic oligonucleotide
gcuaaaaucuuaucccagu

SEQ ID NO: 1769809 - RNA, 19 nt, Artificial Sequence
  Description of Artificial Sequence: Synthetic oligonucleotide
gaaagaggcgucgguaaua

SEQ ID NO: 1769810 - RNA, 19 nt, Artificial Sequence
  Description of Artificial Sequence: Synthetic oligonucleotide
cuaucccagaacgcacagc

SEQ ID NO: 1769811 - RNA, 19 nt, Artificial Sequence
  Description of Artificial Sequence: Synthetic oligonucleotide
cagauauucccagcguuga

SEQ ID NO: 1769812 - RNA, 19 nt, Artificial Sequence
  Description of Artificial Sequence: Synthetic oligonucleotide
gggucugugagaauauaca

SEQ ID NO: 1769813 - RNA, 19 nt, Artificial Sequence
  Description of Artificial Sequence: Synthetic oligonucleotide
ggugugcugaucacuuucc

SEQ ID NO: 1769814 - RNA, 19 nt, Artificial Sequence
  Description of Artificial Sequence: Synthetic oligonucleotide
gcggugcuuaaauccaaag

SEQ ID NO: 1769815 - RNA, 19 nt, Artificial Sequence
  Description of Artificial Sequence: Synthetic oligonucleotide
cagacccaacagugaacgc

SEQ ID NO: 1769816 - RNA, 19 nt, Artificial Sequence
  Description of Artificial Sequence: Synthetic oligonucleotide
gaacgccucuccuucccga

SEQ ID NO: 1769817 - RNA, 19 nt, Artificial Sequence
  Description of Artificial Sequence: Synthetic oligonucleotide
uuccuuugcucacguugau

SEQ ID NO: 1769818 - RNA, 19 nt, Artificial Sequence
  Description of Artificial Sequence: Synthetic oligonucleotide
cccagaacgcacagcagag

SEQ ID NO: 1769819 - RNA, 19 nt, Artificial Sequence
  Description of Artificial Sequence: Synthetic oligonucleotide
caagaauaucuuggccaac

SEQ ID NO: 1769820 - RNA, 19 nt, Artificial Sequence
  Description of Artificial Sequence: Synthetic oligonucleotide
agcgauaguacugggcgua

SEQ ID NO: 1769821 - RNA, 19 nt, Artificial Sequence
  Description of Artificial Sequence: Synthetic oligonucleotide
uggccaucgucaugagggu

SEQ ID NO: 1769822 - RNA, 19 nt, Artificial Sequence
  Description of Artificial Sequence: Synthetic oligonucleotide
gaagccucucugaagcucu

SEQ ID NO: 1769823 - RNA, 19 nt, Artificial Sequence
  Description of Artificial Sequence: Synthetic oligonucleotide
guguugacugggucuguga

SEQ ID NO: 1769824 - RNA, 19 nt, Artificial Sequence
  Description of Artificial Sequence: Synthetic oligonucleotide
guaagugauugauuccuuu

SEQ ID NO: 1769825 - RNA, 19 nt, Artificial Sequence
  Description of Artificial Sequence: Synthetic oligonucleotide
ggcguggaaaacaguacug

SEQ ID NO: 1769826 - RNA, 19 nt, Artificial Sequence
  Description of Artificial Sequence: Synthetic oligonucleotide
uccugacaaaagggugaag

SEQ ID NO: 1769827 - RNA, 19 nt, Artificial Sequence
  Description of Artificial Sequence: Synthetic oligonucleotide
ucacuccgccauaguugag

SEQ ID NO: 1769828 - RNA, 19 nt, Artificial Sequence
  Description of Artificial Sequence: Synthetic oligonucleotide
gggugugcugaucacuuuc

SEQ ID NO: 1769829 - RNA, 19 nt, Artificial Sequence
  Description of Artificial Sequence: Synthetic oligonucleotide
gcgcuuaugguuggaacag

SEQ ID NO: 1769830 - RNA, 19 nt, Artificial Sequence
  Description of Artificial Sequence: Synthetic oligonucleotide
guauacccagaggcggugc

SEQ ID NO: 1769831 - RNA, 19 nt, Artificial Sequence
  Description of Artificial Sequence: Synthetic oligonucleotide
ggacaauuuucuaacagau

SEQ ID NO: 1769832 - RNA, 19 nt, Artificial Sequence
  Description of Artificial Sequence: Synthetic oligonucleotide
gacccaacagugaacgccu

SEQ ID NO: 1769833 - RNA, 19 nt, Artificial Sequence
  Description of Artificial Sequence: Synthetic oligonucleotide
augcgaccuguuuuaggau

SEQ ID NO: 1769834 - RNA, 19 nt, Artificial Sequence
  Description of Artificial Sequence: Synthetic oligonucleotide
gugaacugugaagccuuug

SEQ ID NO: 1769835 - RNA, 19 nt, Artificial Sequence
  Description of Artificial Sequence: Synthetic oligonucleotide
ggcacagaaaugcgaccug

SEQ ID NO: 1769836 - RNA, 19 nt, Artificial Sequence
  Description of Artificial Sequence: Synthetic oligonucleotide
gcugaaagggcucuucagu

SEQ ID NO: 1769837 - RNA, 19 nt, Artificial Sequence
  Description of Artificial Sequence: Synthetic oligonucleotide
uucccagcguugaggugaa

SEQ ID NO: 1769838 - RNA, 19 nt, Artificial Sequence
  Description of Artificial Sequence: Synthetic oligonucleotide
ccacaucuaauucucggca

SEQ ID NO: 1769839 - RNA, 19 nt, Artificial Sequence
  Description of Artificial Sequence: Synthetic oligonucleotide
cucuucgugaauggucuca

SEQ ID NO: 1769840 - RNA, 19 nt, Artificial Sequence
  Description of Artificial Sequence: Synthetic oligonucleotide
augcccggucuaugaugcg

SEQ ID NO: 1769841 - RNA, 19 nt, Artificial Sequence
  Description of Artificial Sequence: Synthetic oligonucleotide
cuccuuacaucaucguagu

SEQ ID NO: 1769842 - RNA, 19 nt, Artificial Sequence
  Description of Artificial Sequence: Synthetic oligonucleotide
uuccggacuuauccagguu

SEQ ID NO: 1769843 - RNA, 19 nt, Artificial Sequence
  Description of Artificial Sequence: Synthetic oligonucleotide
aaguucacuuccggacuua

SEQ ID NO: 1769844 - RNA, 19 nt, Artificial Sequence
  Description of Artificial Sequence: Synthetic oligonucleotide
aagaggcgucgguaauaua

SEQ ID NO: 1769845 - RNA, 19 nt, Artificial Sequence
  Description of Artificial Sequence: Synthetic oligonucleotide
aguucacuuccggacuuau

SEQ ID NO: 1769846 - RNA, 19 nt, Artificial Sequence
  Description of Artificial Sequence: Synthetic oligonucleotide
gacaauuuucuaacagauu

SEQ ID NO: 1769847 - RNA, 19 nt, Artificial Sequence
  Description of Artificial Sequence: Synthetic oligonucleotide
ccuuacaucaucguagucu

SEQ ID NO: 1769848 - RNA, 19 nt, Artificial Sequence
  Description of Artificial Sequence: Synthetic oligonucleotide
gcuuaaauccaaaguccuc

SEQ ID NO: 1769849 - RNA, 19 nt, Artificial Sequence
  Description of Artificial Sequence: Synthetic oligonucleotide
cugacaaaagggugaaguu

SEQ ID NO: 1769850 - RNA, 19 nt, Artificial Sequence
  Description of Artificial Sequence: Synthetic oligonucleotide
gguguugaaaguaauucuu

SEQ ID NO: 1769851 - RNA, 19 nt, Artificial Sequence
  Description of Artificial Sequence: Synthetic oligonucleotide
cagauucagccucgugcuc

SEQ ID NO: 1769852 - RNA, 19 nt, Artificial Sequence
  Description of Artificial Sequence: Synthetic oligonucleotide
ugauuccuuugcucacguu

SEQ ID NO: 1769853 - RNA, 19 nt, Artificial Sequence
  Description of Artificial Sequence: Synthetic oligonucleotide
agggaccacauuugucguu

SEQ ID NO: 1769854 - RNA, 19 nt, Artificial Sequence
  Description of Artificial Sequence: Synthetic oligonucleotide
cauauggugcuagacuggu

SEQ ID NO: 1769855 - RNA, 19 nt, Artificial Sequence
  Description of Artificial Sequence: Synthetic oligonucleotide
gaguauacccagaggcggu

SEQ ID NO: 1769856 - RNA, 19 nt, Artificial Sequence
  Description of Artificial Sequence: Synthetic oligonucleotide
cuuccggacuuauccaggu

SEQ ID NO: 1769857 - RNA, 19 nt, Artificial Sequence
  Description of Artificial Sequence: Synthetic oligonucleotide
guacuccacuaucccagaa

SEQ ID NO: 1769858 - RNA, 19 nt, Artificial Sequence
  Description of Artificial Sequence: Synthetic oligonucleotide
gcagauggcgcuuaugguu

SEQ ID NO: 1769859 - RNA, 19 nt, Artificial Sequence
  Description of Artificial Sequence: Synthetic oligonucleotide
gcguggaaaacaguacuga

SEQ ID NO: 1769860 - RNA, 19 nt, Artificial Sequence
  Description of Artificial Sequence: Synthetic oligonucleotide
guguuugaucucagauuca

SEQ ID NO: 1769861 - RNA, 19 nt, Artificial Sequence
  Description of Artificial Sequence: Synthetic oligonucleotide
ccugacaaaagggugaagu

SEQ ID NO: 1769862 - RNA, 19 nt, Artificial Sequence
  Description of Artificial Sequence: Synthetic oligonucleotide
caucaucguagucugucau

SEQ ID NO: 1769863 - RNA, 19 nt, Artificial Sequence
  Description of Artificial Sequence: Synthetic oligonucleotide
auggcgcuuaugguuggaa

SEQ ID NO: 1769864 - RNA, 19 nt, Artificial Sequence
  Description of Artificial Sequence: Synthetic oligonucleotide
cguagggaaagaggcgucg

SEQ ID NO: 1769865 - RNA, 19 nt, Artificial Sequence
  Description of Artificial Sequence: Synthetic oligonucleotide
gccagcgauaguacugggc

SEQ ID NO: 1769866 - RNA, 19 nt, Artificial Sequence
  Description of Artificial Sequence: Synthetic oligonucleotide
gaacaagggcuaaaaucuu

SEQ ID NO: 1769867 - RNA, 19 nt, Artificial Sequence
  Description of Artificial Sequence: Synthetic oligonucleotide
gauggcgcuuaugguugga

SEQ ID NO: 1769868 - RNA, 19 nt, Artificial Sequence
  Description of Artificial Sequence: Synthetic oligonucleotide
ggacuuauccagguuucaa

SEQ ID NO: 1769869 - RNA, 19 nt, Artificial Sequence
  Description of Artificial Sequence: Synthetic oligonucleotide
gcuuaugguuggaacagua

SEQ ID NO: 1769870 - RNA, 19 nt, Artificial Sequence
  Description of Artificial Sequence: Synthetic oligonucleotide
uggccaacuaaggcauauu

SEQ ID NO: 1769871 - RNA, 19 nt, Artificial Sequence
  Description of Artificial Sequence: Synthetic oligonucleotide
ccacccuuuacaagacuca

SEQ ID NO: 1769872 - RNA, 19 nt, Artificial Sequence
  Description of Artificial Sequence: Synthetic oligonucleotide
gaccacccuuuacaagacu

SEQ ID NO: 1769873 - RNA, 19 nt, Artificial Sequence
  Description of Artificial Sequence: Synthetic oligonucleotide
cacgguguugaaaguaauu

SEQ ID NO: 1769874 - RNA, 19 nt, Artificial Sequence
  Description of Artificial Sequence: Synthetic oligonucleotide
uucucggcagauggcgcuu

SEQ ID NO: 1769875 - RNA, 19 nt, Artificial Sequence
  Description of Artificial Sequence: Synthetic oligonucleotide
ggcguagggaaagaggcgu

SEQ ID NO: 1769876 - RNA, 19 nt, Artificial Sequence
  Description of Artificial Sequence: Synthetic oligonucleotide
acggcuccaugaagucagg

SEQ ID NO: 1769877 - RNA, 19 nt, Artificial Sequence
  Description of Artificial Sequence: Synthetic oligonucleotide
gccauaguugagccagcga

SEQ ID NO: 1769878 - RNA, 19 nt, Artificial Sequence
  Description of Artificial Sequence: Synthetic oligonucleotide
ugacugggucugugagaau

SEQ ID NO: 1769879 - RNA, 19 nt, Artificial Sequence
  Description of Artificial Sequence: Synthetic oligonucleotide
ggauggccaucgucaugag

SEQ ID NO: 1769880 - RNA, 19 nt, Artificial Sequence
  Description of Artificial Sequence: Synthetic oligonucleotide
caucuaauucucggcagau

SEQ ID NO: 1769881 - RNA, 19 nt, Artificial Sequence
  Description of Artificial Sequence: Synthetic oligonucleotide
gcgauaguacugggcguag

SEQ ID NO: 1769882 - RNA, 19 nt, Artificial Sequence
  Description of Artificial Sequence: Synthetic oligonucleotide
auacccagaggcggugcuu

SEQ ID NO: 1769883 - RNA, 19 nt, Artificial Sequence
  Description of Artificial Sequence: Synthetic oligonucleotide
gcaccgauaucaaucuugu

SEQ ID NO: 1769884 - RNA, 19 nt, Artificial Sequence
  Description of Artificial Sequence: Synthetic oligonucleotide
ggaaagaggcgucgguaau

SEQ ID NO: 1769885 - RNA, 19 nt, Artificial Sequence
  Description of Artificial Sequence: Synthetic oligonucleotide
cuccgccauaguugagcca

SEQ ID NO: 1769886 - RNA, 19 nt, Artificial Sequence
  Description of Artificial Sequence: Synthetic oligonucleotide
acgcacagcagaggacaau

SEQ ID NO: 1769887 - RNA, 19 nt, Artificial Sequence
  Description of Artificial Sequence: Synthetic oligonucleotide
cacagaaaugcgaccuguu

SEQ ID NO: 1769888 - RNA, 19 nt, Artificial Sequence
  Description of Artificial Sequence: Synthetic oligonucleotide
cuuggccaacuaaggcaua

SEQ ID NO: 1769889 - RNA, 19 nt, Artificial Sequence
  Description of Artificial Sequence: Synthetic oligonucleotide
aggcggugcuuaaauccaa

SEQ ID NO: 1769890 - RNA, 19 nt, Artificial Sequence
  Description of Artificial Sequence: Synthetic oligonucleotide
gcggauggccaucgucaug

SEQ ID NO: 1769891 - RNA, 19 nt, Artificial Sequence
  Description of Artificial Sequence: Synthetic oligonucleotide
caccgauaucaaucuugua

SEQ ID NO: 1769892 - RNA, 19 nt, Artificial Sequence
  Description of Artificial Sequence: Synthetic oligonucleotide
gcucuucgugaauggucuc

SEQ ID NO: 1769893 - RNA, 19 nt, Artificial Sequence
  Description of Artificial Sequence: Synthetic oligonucleotide
cgauaguacugggcguagg

SEQ ID NO: 1769894 - RNA, 19 nt, Artificial Sequence
  Description of Artificial Sequence: Synthetic oligonucleotide
cgguguugaaaguaauucu

SEQ ID NO: 1769895 - RNA, 19 nt, Artificial Sequence
  Description of Artificial Sequence: Synthetic oligonucleotide
ccggucuaugaugcggaug

SEQ ID NO: 1769896 - RNA, 19 nt, Artificial Sequence
  Description of Artificial Sequence: Synthetic oligonucleotide
cuggggugugcugaucacu

SEQ ID NO: 1769897 - RNA, 19 nt, Artificial Sequence
  Description of Artificial Sequence: Synthetic oligonucleotide
ggccaucgucaugaggguc

SEQ ID NO: 1769898 - RNA, 19 nt, Artificial Sequence
  Description of Artificial Sequence: Synthetic oligonucleotide
cguugaggugaacugugaa

SEQ ID NO: 1769899 - RNA, 19 nt, Artificial Sequence
  Description of Artificial Sequence: Synthetic oligonucleotide
ggcggugcuuaaauccaaa

SEQ ID NO: 1769900 - RNA, 19 nt, Artificial Sequence
  Description of Artificial Sequence: Synthetic oligonucleotide
ccgccauaguugagccagc

SEQ ID NO: 1769901 - RNA, 19 nt, Artificial Sequence
  Description of Artificial Sequence: Synthetic oligonucleotide
gugaagccuuuggaagccu

SEQ ID NO: 1769902 - RNA, 19 nt, Artificial Sequence
  Description of Artificial Sequence: Synthetic oligonucleotide
gcguagggaaagaggcguc

SEQ ID NO: 1769903 - RNA, 19 nt, Artificial Sequence
  Description of Artificial Sequence: Synthetic oligonucleotide
ccagaggcggugcuuaaau

SEQ ID NO: 1769904 - RNA, 19 nt, Artificial Sequence
  Description of Artificial Sequence: Synthetic oligonucleotide
ggaccacauuugucguucu

SEQ ID NO: 1769905 - RNA, 19 nt, Artificial Sequence
  Description of Artificial Sequence: Synthetic oligonucleotide
ggcgucgguaauauagcuu

SEQ ID NO: 1769906 - RNA, 19 nt, Artificial Sequence
  Description of Artificial Sequence: Synthetic oligonucleotide
gaacgcugaaagggcucuu

SEQ ID NO: 1769907 - RNA, 19 nt, Artificial Sequence
  Description of Artificial Sequence: Synthetic oligonucleotide
gugcuagacuggucuucuu

SEQ ID NO: 1769908 - RNA, 19 nt, Artificial Sequence
  Description of Artificial Sequence: Synthetic oligonucleotide
ggugaacugugaagccuuu

SEQ ID NO: 1769909 - RNA, 19 nt, Artificial Sequence
  Description of Artificial Sequence: Synthetic oligonucleotide
cucggcagauggcgcuuau

SEQ ID NO: 1769910 - RNA, 19 nt, Artificial Sequence
  Description of Artificial Sequence: Synthetic oligonucleotide
cggacuuauccagguuuca

SEQ ID NO: 1769911 - RNA, 19 nt, Artificial Sequence
  Description of Artificial Sequence: Synthetic oligonucleotide
ccucuccuucccgaguaua

SEQ ID NO: 1769912 - RNA, 19 nt, Artificial Sequence
  Description of Artificial Sequence: Synthetic oligonucleotide
gccucuccuucccgaguau

SEQ ID NO: 1769913 - RNA, 19 nt, Artificial Sequence
  Description of Artificial Sequence: Synthetic oligonucleotide
cccggucuaugaugcggau

SEQ ID NO: 1769914 - RNA, 19 nt, Artificial Sequence
  Description of Artificial Sequence: Synthetic oligonucleotide
cgcuuaugguuggaacagu

SEQ ID NO: 1769915 - RNA, 19 nt, Artificial Sequence
  Description of Artificial Sequence: Synthetic oligonucleotide
aaauaaacaucuuacaagc

SEQ ID NO: 1769916 - RNA, 19 nt, Artificial Sequence
  Description of Artificial Sequence: Synthetic oligonucleotide
ucuucuaggagacaaaagg

SEQ ID NO: 1769917 - RNA, 19 nt, Artificial Sequence
  Description of Artificial Sequence: Synthetic oligonucleotide
aacaucuggacccaggaac

SEQ ID NO: 1769918 - RNA, 19 nt, Artificial Sequence
  Description of Artificial Sequence: Synthetic oligonucleotide
ucugagggaagcuugaggg

SEQ ID NO: 1769919 - RNA, 19 nt, Artificial Sequence
  Description of Artificial Sequence: Synthetic oligonucleotide
uugagcaagaaguagacug

SEQ ID NO: 1769920 - RNA, 19 nt, Artificial Sequence
  Description of Artificial Sequence: Synthetic oligonucleotide
  modified_base (4)..(4): a, c, u, g, unknown or other
agancuauugugcugacug

SEQ ID NO: 1769921 - RNA, 19 nt, Artificial Sequence
  Description of Artificial Sequence: Synthetic oligonucleotide
uuauggaccuauuucacgg

SEQ ID NO: 1769922 - RNA, 19 nt, Artificial Sequence
  Description of Artificial Sequence: Synthetic oligonucleotide
cuacacacugucuagagcg

SEQ ID NO: 1769923 - RNA, 19 nt, Artificial Sequence
  Description of Artificial Sequence: Synthetic oligonucleotide
ucuuacaagcaucuuacag

SEQ ID NO: 1769924 - RNA, 19 nt, Artificial Sequence
  Description of Artificial Sequence: Synthetic oligonucleotide
gaaauggugaguaucaaag

SEQ ID NO: 1769925 - RNA, 19 nt, Artificial Sequence
  Description of Artificial Sequence: Synthetic oligonucleotide
acagguaggugacauagcc

SEQ ID NO: 1769926 - RNA, 19 nt, Artificial Sequence
  Description of Artificial Sequence: Synthetic oligonucleotide
ugaugagccaccauaacug

SEQ ID NO: 1769927 - RNA, 19 nt, Artificial Sequence
  Description of Artificial Sequence: Synthetic oligonucleotide
uuacaagcaucuuacaggc

SEQ ID NO: 1769928 - RNA, 19 nt, Artificial Sequence
  Description of Artificial Sequence: Synthetic oligonucleotide
caucuuacaggccagagag

SEQ ID NO: 1769929 - RNA, 19 nt, Artificial Sequence
  Description of Artificial Sequence: Synthetic oligonucleotide
agaggggcaaaauagagug

SEQ ID NO: 1769930 - RNA, 19 nt, Artificial Sequence
  Description of Artificial Sequence: Synthetic oligonucleotide
ugagcaaaggcauaggccu

SEQ ID NO: 1769931 - RNA, 19 nt, Artificial Sequence
  Description of Artificial Sequence: Synthetic oligonucleotide
uccaaugccagaaauggug

SEQ ID NO: 1769932 - RNA, 19 nt, Artificial Sequence
  Description of Artificial Sequence: Synthetic oligonucleotide
uuuauggaccuauuucacg

SEQ ID NO: 1769933 - RNA, 19 nt, Artificial Sequence
  Description of Artificial Sequence: Synthetic oligonucleotide
  modified_base (10)..(10): a, c, u, g, unknown or other
acugccagancuauugugc

SEQ ID NO: 1769934 - RNA, 19 nt, Artificial Sequence
  Description of Artificial Sequence: Synthetic oligonucleotide
accucccuaaugcagaagc

SEQ ID NO: 1769935 - RNA, 19 nt, Artificial Sequence
  Description of Artificial Sequence: Synthetic oligonucleotide
acucuuagaauaucugagg

SEQ ID NO: 1769936 - RNA, 19 nt, Artificial Sequence
  Description of Artificial Sequence: Synthetic oligonucleotide
cucuuagaauaucugaggg

SEQ ID NO: 1769937 - RNA, 19 nt, Artificial Sequence
  Description of Artificial Sequence: Synthetic oligonucleotide
ugucuagagcgccacaggg

SEQ ID NO: 1769938 - RNA, 19 nt, Artificial Sequence
  Description of Artificial Sequence: Synthetic oligonucleotide
ugagguacuggcuucuggg

SEQ ID NO: 1769939 - RNA, 19 nt, Artificial Sequence
  Description of Artificial Sequence: Synthetic oligonucleotide
cuugcuuaguuuuauggac

SEQ ID NO: 1769940 - RNA, 19 nt, Artificial Sequence
  Description of Artificial Sequence: Synthetic oligonucleotide
guuuuauggaccuauuuca

SEQ ID NO: 1769941 - RNA, 19 nt, Artificial Sequence
  Description of Artificial Sequence: Synthetic oligonucleotide
caucuuacaagcaucuuac

SEQ ID NO: 1769942 - RNA, 19 nt, Artificial Sequence
  Description of Artificial Sequence: Synthetic oligonucleotide
uucuaggagacaaaaggcu

SEQ ID NO: 1769943 - RNA, 19 nt, Artificial Sequence
  Description of Artificial Sequence: Synthetic oligonucleotide
gaaggagcggcgcuuaacg

SEQ ID NO: 1769944 - RNA, 19 nt, Artificial Sequence
  Description of Artificial Sequence: Synthetic oligonucleotide
uagacugucuugaaggugu

SEQ ID NO: 1769945 - RNA, 19 nt, Artificial Sequence
  Description of Artificial Sequence: Synthetic oligonucleotide
cagacugagaacuggagag

SEQ ID NO: 1769946 - RNA, 19 nt, Artificial Sequence
  Description of Artificial Sequence: Synthetic oligonucleotide
uagucugcaaagcugcucc

SEQ ID NO: 1769947 - RNA, 19 nt, Artificial Sequence
  Description of Artificial Sequence: Synthetic oligonucleotide
acaagcaucuuacaggcca

SEQ ID NO: 1769948 - RNA, 19 nt, Artificial Sequence
  Description of Artificial Sequence: Synthetic oligonucleotide
uguggcacacccagcaugg

SEQ ID NO: 1769949 - RNA, 19 nt, Artificial Sequence
  Description of Artificial Sequence: Synthetic oligonucleotide
cacucuuagaauaucugag

SEQ ID NO: 1769950 - RNA, 19 nt, Artificial Sequence
  Description of Artificial Sequence: Synthetic oligonucleotide
aaauggugaguaucaaagu

SEQ ID NO: 1769951 - RNA, 19 nt, Artificial Sequence
  Description of Artificial Sequence: Synthetic oligonucleotide
acuacacacugucuagagc

SEQ ID NO: 1769952 - RNA, 19 nt, Artificial Sequence
  Description of Artificial Sequence: Synthetic oligonucleotide
accuauuucacggucgggc

SEQ ID NO: 1769953 - RNA, 19 nt, Artificial Sequence
  Description of Artificial Sequence: Synthetic oligonucleotide
uuuuauggaccuauuucac

SEQ ID NO: 1769954 - RNA, 19 nt, Artificial Sequence
  Description of Artificial Sequence: Synthetic oligonucleotide
ugcaucuagaacaucugga

SEQ ID NO: 1769955 - RNA, 19 nt, Artificial Sequence
  Description of Artificial Sequence: Synthetic oligonucleotide
uugcuuaguuuuauggacc

SEQ ID NO: 1769956 - RNA, 19 nt, Artificial Sequence
  Description of Artificial Sequence: Synthetic oligonucleotide
cuaaugcagaagcacaggc

SEQ ID NO: 1769957 - RNA, 19 nt, Artificial Sequence
  Description of Artificial Sequence: Synthetic oligonucleotide
  modified_base (13)..(13): a, c, u, g, unknown or other
auaacugccagancuauug

SEQ ID NO: 1769958 - RNA, 19 nt, Artificial Sequence
  Description of Artificial Sequence: Synthetic oligonucleotide
agaggugcaccauugagca

SEQ ID NO: 1769959 - RNA, 19 nt, Artificial Sequence
  Description of Artificial Sequence: Synthetic oligonucleotide
ucuuagaauaucugaggga

SEQ ID NO: 1769960 - RNA, 19 nt, Artificial Sequence
  Description of Artificial Sequence: Synthetic oligonucleotide
ucuuuagccaucugaugag

SEQ ID NO: 1769961 - RNA, 19 nt, Artificial Sequence
  Description of Artificial Sequence: Synthetic oligonucleotide
ucuaggagacaaaaggcuc

SEQ ID NO: 1769962 - RNA, 19 nt, Artificial Sequence
  Description of Artificial Sequence: Synthetic oligonucleotide
gaggaagggacucagcgug

SEQ ID NO: 1769963 - RNA, 19 nt, Artificial Sequence
  Description of Artificial Sequence: Synthetic oligonucleotide
  modified_base (11)..(11): a, c, u, g, unknown or other
aacugccagancuauugug

SEQ ID NO: 1769964 - RNA, 19 nt, Artificial Sequence
  Description of Artificial Sequence: Synthetic oligonucleotide
ugccaagcauacaugaucu

SEQ ID NO: 1769965 - RNA, 19 nt, Artificial Sequence
  Description of Artificial Sequence: Synthetic oligonucleotide
uuuagccaucugaugagcc

SEQ ID NO: 1769966 - RNA, 19 nt, Artificial Sequence
  Description of Artificial Sequence: Synthetic oligonucleotide
uggaccuauuucacggucg

SEQ ID NO: 1769967 - RNA, 19 nt, Artificial Sequence
  Description of Artificial Sequence: Synthetic oligonucleotide
aagccaugacuacacacug

SEQ ID NO: 1769968 - RNA, 19 nt, Artificial Sequence
  Description of Artificial Sequence: Synthetic oligonucleotide
uucgauacagcuguggcac

SEQ ID NO: 1769969 - RNA, 19 nt, Artificial Sequence
  Description of Artificial Sequence: Synthetic oligonucleotide
uuagaauaucugagggaag

SEQ ID NO: 1769970 - RNA, 19 nt, Artificial Sequence
  Description of Artificial Sequence: Synthetic oligonucleotide
uaaggaucuguggagugcg

SEQ ID NO: 1769971 - RNA, 19 nt, Artificial Sequence
  Description of Artificial Sequence: Synthetic oligonucleotide
uggugaguaucaaagucca

SEQ ID NO: 1769972 - RNA, 19 nt, Artificial Sequence
  Description of Artificial Sequence: Synthetic oligonucleotide
caucuugaggcucaugccc

SEQ ID NO: 1769973 - RNA, 19 nt, Artificial Sequence
  Description of Artificial Sequence: Synthetic oligonucleotide
aggggcaaaauagagugac

SEQ ID NO: 1769974 - RNA, 19 nt, Artificial Sequence
  Description of Artificial Sequence: Synthetic oligonucleotide
agaacuggagaggugcacc

SEQ ID NO: 1769975 - RNA, 19 nt, Artificial Sequence
  Description of Artificial Sequence: Synthetic oligonucleotide
ugagcaagaaguagacugu

SEQ ID NO: 1769976 - RNA, 19 nt, Artificial Sequence
  Description of Artificial Sequence: Synthetic oligonucleotide
ucuagagcgccacaggguc

SEQ ID NO: 1769977 - RNA, 19 nt, Artificial Sequence
  Description of Artificial Sequence: Synthetic oligonucleotide
uucccuugaugccucagag

SEQ ID NO: 1769978 - RNA, 19 nt, Artificial Sequence
  Description of Artificial Sequence: Synthetic oligonucleotide
ucacacucuuagaauaucu

SEQ ID NO: 1769979 - RNA, 19 nt, Artificial Sequence
  Description of Artificial Sequence: Synthetic oligonucleotide
ucauccuuacugucugugg

SEQ ID NO: 1769980 - RNA, 19 nt, Artificial Sequence
  Description of Artificial Sequence: Synthetic oligonucleotide
uuacaggccagagaguaag

SEQ ID NO: 1769981 - RNA, 19 nt, Artificial Sequence
  Description of Artificial Sequence: Synthetic oligonucleotide
acacucuuagaauaucuga

SEQ ID NO: 1769982 - RNA, 19 nt, Artificial Sequence
  Description of Artificial Sequence: Synthetic oligonucleotide
ucgaagugccuuccgaacc

SEQ ID NO: 1769983 - RNA, 19 nt, Artificial Sequence
  Description of Artificial Sequence: Synthetic oligonucleotide
agcgucuccacaaacagag

SEQ ID NO: 1769984 - RNA, 19 nt, Artificial Sequence
  Description of Artificial Sequence: Synthetic oligonucleotide
cauugagcaagaaguagac

SEQ ID NO: 1769985 - RNA, 19 nt, Artificial Sequence
  Description of Artificial Sequence: Synthetic oligonucleotide
caagugucaggccagcacc

SEQ ID NO: 1769986 - RNA, 19 nt, Artificial Sequence
  Description of Artificial Sequence: Synthetic oligonucleotide
guuucgauacagcuguggc

SEQ ID NO: 1769987 - RNA, 19 nt, Artificial Sequence
  Description of Artificial Sequence: Synthetic oligonucleotide
aaacaucuuacaagcaucu

SEQ ID NO: 1769988 - RNA, 19 nt, Artificial Sequence
  Description of Artificial Sequence: Synthetic oligonucleotide
augacuacacacugucuag

SEQ ID NO: 1769989 - RNA, 19 nt, Artificial Sequence
  Description of Artificial Sequence: Synthetic oligonucleotide
uuucgauacagcuguggca

SEQ ID NO: 1769990 - RNA, 19 nt, Artificial Sequence
  Description of Artificial Sequence: Synthetic oligonucleotide
  modified_base (2)..(2): a, c, u, g, unknown or other
ancuauugugcugacugca

SEQ ID NO: 1769991 - RNA, 19 nt, Artificial Sequence
  Description of Artificial Sequence: Synthetic oligonucleotide
ucccuaaugcagaagcaca

SEQ ID NO: 1769992 - RNA, 19 nt, Artificial Sequence
  Description of Artificial Sequence: Synthetic oligonucleotide
cucuuuagccaucugauga

SEQ ID NO: 1769993 - RNA, 19 nt, Artificial Sequence
  Description of Artificial Sequence: Synthetic oligonucleotide
guaguuucgauacagcugu

SEQ ID NO: 1769994 - RNA, 19 nt, Artificial Sequence
  Description of Artificial Sequence: Synthetic oligonucleotide
acaucuuacaagcaucuua

SEQ ID NO: 1769995 - RNA, 19 nt, Artificial Sequence
  Description of Artificial Sequence: Synthetic oligonucleotide
ugugcugacugcaucuaga

SEQ ID NO: 1769996 - RNA, 19 nt, Artificial Sequence
  Description of Artificial Sequence: Synthetic oligonucleotide
aauaaacaucuuacaagca

SEQ ID NO: 1769997 - RNA, 19 nt, Artificial Sequence
  Description of Artificial Sequence: Synthetic oligonucleotide
cauccuuacugucuguggc

SEQ ID NO: 1769998 - RNA, 19 nt, Artificial Sequence
  Description of Artificial Sequence: Synthetic oligonucleotide
gaugagccaccauaacugc

SEQ ID NO: 1769999 - RNA, 19 nt, Artificial Sequence
  Description of Artificial Sequence: Synthetic oligonucleotide
  modified_base (3)..(3): a, c, u, g, unknown or other
gancuauugugcugacugc

SEQ ID NO: 1770000 - RNA, 19 nt, Artificial Sequence
  Description of Artificial Sequence: Synthetic oligonucleotide
acuaugcucugccacagga

SEQ ID NO: 1770001 - RNA, 19 nt, Artificial Sequence
  Description of Artificial Sequence: Synthetic oligonucleotide
ggagacaaaaggcucacug

SEQ ID NO: 1770002 - RNA, 19 nt, Artificial Sequence
  Description of Artificial Sequence: Synthetic oligonucleotide
ugcuccaaugccagaaaug

SEQ ID NO: 1770003 - RNA, 19 nt, Artificial Sequence
  Description of Artificial Sequence: Synthetic oligonucleotide
guaucaaaguccagguagg

SEQ ID NO: 1770004 - RNA, 19 nt, Artificial Sequence
  Description of Artificial Sequence: Synthetic oligonucleotide
acagacugagaacuggaga

SEQ ID NO: 1770005 - RNA, 19 nt, Artificial Sequence
  Description of Artificial Sequence: Synthetic oligonucleotide
aggagguaaggaucugugg

SEQ ID NO: 1770006 - RNA, 19 nt, Artificial Sequence
  Description of Artificial Sequence: Synthetic oligonucleotide
caagaaguagacugucuug

SEQ ID NO: 1770007 - RNA, 19 nt, Artificial Sequence
  Description of Artificial Sequence: Synthetic oligonucleotide
cugcacauagucugcaaag

SEQ ID NO: 1770008 - RNA, 19 nt, Artificial Sequence
  Description of Artificial Sequence: Synthetic oligonucleotide
caguguggacucuuuagcc

SEQ ID NO: 1770009 - RNA, 19 nt, Artificial Sequence
  Description of Artificial Sequence: Synthetic oligonucleotide
ucuuacaggccagagagua

SEQ ID NO: 1770010 - RNA, 19 nt, Artificial Sequence
  Description of Artificial Sequence: Synthetic oligonucleotide
gcgcuuaacguucagcucg

SEQ ID NO: 1770011 - RNA, 19 nt, Artificial Sequence
  Description of Artificial Sequence: Synthetic oligonucleotide
ugcuuaguuuuauggaccu

SEQ ID NO: 1770012 - RNA, 19 nt, Artificial Sequence
  Description of Artificial Sequence: Synthetic oligonucleotide
gagguacuggcuucugggg

SEQ ID NO: 1770013 - RNA, 19 nt, Artificial Sequence
  Description of Artificial Sequence: Synthetic oligonucleotide
aguguggacucuuuagcca

SEQ ID NO: 1770014 - RNA, 19 nt, Artificial Sequence
  Description of Artificial Sequence: Synthetic oligonucleotide
agaaauggugaguaucaaa

SEQ ID NO: 1770015 - RNA, 19 nt, Artificial Sequence
  Description of Artificial Sequence: Synthetic oligonucleotide
ucacauguccuugucuucc

SEQ ID NO: 1770016 - RNA, 19 nt, Artificial Sequence
  Description of Artificial Sequence: Synthetic oligonucleotide
auggaccuauuucacgguc

SEQ ID NO: 1770017 - RNA, 19 nt, Artificial Sequence
  Description of Artificial Sequence: Synthetic oligonucleotide
aucacuaugcucugccaca

SEQ ID NO: 1770018 - RNA, 19 nt, Artificial Sequence
  Description of Artificial Sequence: Synthetic oligonucleotide
acaugaguaccaucuugag

SEQ ID NO: 1770019 - RNA, 19 nt, Artificial Sequence
  Description of Artificial Sequence: Synthetic oligonucleotide
aguuucgauacagcugugg

SEQ ID NO: 1770020 - RNA, 19 nt, Artificial Sequence
  Description of Artificial Sequence: Synthetic oligonucleotide
cacacucuuagaauaucug

SEQ ID NO: 1770021 - RNA, 19 nt, Artificial Sequence
  Description of Artificial Sequence: Synthetic oligonucleotide
gugaugagcaaaggcauag

SEQ ID NO: 1770022 - RNA, 19 nt, Artificial Sequence
  Description of Artificial Sequence: Synthetic oligonucleotide
uagaccacagacugagaac

SEQ ID NO: 1770023 - RNA, 19 nt, Artificial Sequence
  Description of Artificial Sequence: Synthetic oligonucleotide
uauuucacggucgggccag

SEQ ID NO: 1770024 - RNA, 19 nt, Artificial Sequence
  Description of Artificial Sequence: Synthetic oligonucleotide
agcaaaggcauaggccugc

SEQ ID NO: 1770025 - RNA, 19 nt, Artificial Sequence
  Description of Artificial Sequence: Synthetic oligonucleotide
ugcacaaggcugccaagca

SEQ ID NO: 1770026 - RNA, 19 nt, Artificial Sequence
  Description of Artificial Sequence: Synthetic oligonucleotide
caucacuaugcucugccac

SEQ ID NO: 1770027 - RNA, 19 nt, Artificial Sequence
  Description of Artificial Sequence: Synthetic oligonucleotide
ucugaugagccaccauaac

SEQ ID NO: 1770028 - RNA, 19 nt, Artificial Sequence
  Description of Artificial Sequence: Synthetic oligonucleotide
acugucuagagcgccacag

SEQ ID NO: 1770029 - RNA, 19 nt, Artificial Sequence
  Description of Artificial Sequence: Synthetic oligonucleotide
gaaggugucaccacuuguc

SEQ ID NO: 1770030 - RNA, 19 nt, Artificial Sequence
  Description of Artificial Sequence: Synthetic oligonucleotide
cugccaagcauacaugauc

SEQ ID NO: 1770031 - RNA, 19 nt, Artificial Sequence
  Description of Artificial Sequence: Synthetic oligonucleotide
aaggcucacugagggaaac

SEQ ID NO: 1770032 - RNA, 19 nt, Artificial Sequence
  Description of Artificial Sequence: Synthetic oligonucleotide
uagccugccacaccuguga

SEQ ID NO: 1770033 - RNA, 19 nt, Artificial Sequence
  Description of Artificial Sequence: Synthetic oligonucleotide
ugaucucaugaugagcaga

SEQ ID NO: 1770034 - RNA, 19 nt, Artificial Sequence
  Description of Artificial Sequence: Synthetic oligonucleotide
cuaggagacaaaaggcuca

SEQ ID NO: 1770035 - RNA, 19 nt, Artificial Sequence
  Description of Artificial Sequence: Synthetic oligonucleotide
caauggacagguaggugac

SEQ ID NO: 1770036 - RNA, 19 nt, Artificial Sequence
  Description of Artificial Sequence: Synthetic oligonucleotide
cccuugaugccucagagag

SEQ ID NO: 1770037 - RNA, 19 nt, Artificial Sequence
  Description of Artificial Sequence: Synthetic oligonucleotide
auagagugacaagugucag

SEQ ID NO: 1770038 - RNA, 19 nt, Artificial Sequence
  Description of Artificial Sequence: Synthetic oligonucleotide
ggacucagcguguugcugg

SEQ ID NO: 1770039 - RNA, 19 nt, Artificial Sequence
  Description of Artificial Sequence: Synthetic oligonucleotide
augaucucaugaugagcag

SEQ ID NO: 1770040 - RNA, 19 nt, Artificial Sequence
  Description of Artificial Sequence: Synthetic oligonucleotide
cuaugcucugccacaggag

SEQ ID NO: 1770041 - RNA, 19 nt, Artificial Sequence
  Description of Artificial Sequence: Synthetic oligonucleotide
ugugaaggccaggacacac

SEQ ID NO: 1770042 - RNA, 19 nt, Artificial Sequence
  Description of Artificial Sequence: Synthetic oligonucleotide
gacauagccugccacaccu

SEQ ID NO: 1770043 - RNA, 19 nt, Artificial Sequence
  Description of Artificial Sequence: Synthetic oligonucleotide
caugacuacacacugucua

SEQ ID NO: 1770044 - RNA, 19 nt, Artificial Sequence
  Description of Artificial Sequence: Synthetic oligonucleotide
uauggaccuauuucacggu

SEQ ID NO: 1770045 - RNA, 19 nt, Artificial Sequence
  Description of Artificial Sequence: Synthetic oligonucleotide
auaggccugccccagaaua

SEQ ID NO: 1770046 - RNA, 19 nt, Artificial Sequence
  Description of Artificial Sequence: Synthetic oligonucleotide
uuaguuuuauggaccuauu

SEQ ID NO: 1770047 - RNA, 19 nt, Artificial Sequence
  Description of Artificial Sequence: Synthetic oligonucleotide
acugcacauagucugcaaa

SEQ ID NO: 1770048 - RNA, 19 nt, Artificial Sequence
  Description of Artificial Sequence: Synthetic oligonucleotide
gauuggucacauguccuug

SEQ ID NO: 1770049 - RNA, 19 nt, Artificial Sequence
  Description of Artificial Sequence: Synthetic oligonucleotide
ugacauagccugccacacc

SEQ ID NO: 1770050 - RNA, 19 nt, Artificial Sequence
  Description of Artificial Sequence: Synthetic oligonucleotide
caagcaucuuacaggccag

SEQ ID NO: 1770051 - RNA, 19 nt, Artificial Sequence
  Description of Artificial Sequence: Synthetic oligonucleotide
ucuagaacaucuggaccca

SEQ ID NO: 1770052 - RNA, 19 nt, Artificial Sequence
  Description of Artificial Sequence: Synthetic oligonucleotide
aaggagcggcgcuuaacgu

SEQ ID NO: 1770053 - RNA, 19 nt, Artificial Sequence
  Description of Artificial Sequence: Synthetic oligonucleotide
ucacuaugcucugccacag

SEQ ID NO: 1770054 - RNA, 19 nt, Artificial Sequence
  Description of Artificial Sequence: Synthetic oligonucleotide
aagcuugaggguggcacag

SEQ ID NO: 1770055 - RNA, 19 nt, Artificial Sequence
  Description of Artificial Sequence: Synthetic oligonucleotide
ugcucugccacaggagcgg

SEQ ID NO: 1770056 - RNA, 19 nt, Artificial Sequence
  Description of Artificial Sequence: Synthetic oligonucleotide
uggcugagaaggagcggcg

SEQ ID NO: 1770057 - RNA, 19 nt, Artificial Sequence
  Description of Artificial Sequence: Synthetic oligonucleotide
gguaguuucgauacagcug

SEQ ID NO: 1770058 - RNA, 19 nt, Artificial Sequence
  Description of Artificial Sequence: Synthetic oligonucleotide
ugauuggucacauguccuu

SEQ ID NO: 1770059 - RNA, 19 nt, Artificial Sequence
  Description of Artificial Sequence: Synthetic oligonucleotide
augagccaccauaacugcc

SEQ ID NO: 1770060 - RNA, 19 nt, Artificial Sequence
  Description of Artificial Sequence: Synthetic oligonucleotide
auccuuacugucuguggcu

SEQ ID NO: 1770061 - RNA, 19 nt, Artificial Sequence
  Description of Artificial Sequence: Synthetic oligonucleotide
  modified_base (8)..(8): a, c, u, g, unknown or other
ugccagancuauugugcug

SEQ ID NO: 1770062 - RNA, 19 nt, Artificial Sequence
  Description of Artificial Sequence: Synthetic oligonucleotide
uggucacauguccuugucu

SEQ ID NO: 1770063 - RNA, 19 nt, Artificial Sequence
  Description of Artificial Sequence: Synthetic oligonucleotide
uacaagcaucuuacaggcc

SEQ ID NO: 1770064 - RNA, 19 nt, Artificial Sequence
  Description of Artificial Sequence: Synthetic oligonucleotide
cugcaaagcugcuccaaug

SEQ ID NO: 1770065 - RNA, 19 nt, Artificial Sequence
  Description of Artificial Sequence: Synthetic oligonucleotide
ggagaggugcaccauugag

SEQ ID NO: 1770066 - RNA, 19 nt, Artificial Sequence
  Description of Artificial Sequence: Synthetic oligonucleotide
  modified_base (17)..(17): a, c, u, g, unknown or other
caccauaacugccagancu

SEQ ID NO: 1770067 - RNA, 19 nt, Artificial Sequence
  Description of Artificial Sequence: Synthetic oligonucleotide
acugucuguggcugagaag

SEQ ID NO: 1770068 - RNA, 19 nt, Artificial Sequence
  Description of Artificial Sequence: Synthetic oligonucleotide
gaagcuugaggguggcaca

SEQ ID NO: 1770069 - RNA, 19 nt, Artificial Sequence
  Description of Artificial Sequence: Synthetic oligonucleotide
ggaccuauuucacggucgg

SEQ ID NO: 1770070 - RNA, 19 nt, Artificial Sequence
  Description of Artificial Sequence: Synthetic oligonucleotide
ugacuacacacugucuaga

SEQ ID NO: 1770071 - RNA, 19 nt, Artificial Sequence
  Description of Artificial Sequence: Synthetic oligonucleotide
ugcaugagguacuggcuuc

SEQ ID NO: 1770072 - RNA, 19 nt, Artificial Sequence
  Description of Artificial Sequence: Synthetic oligonucleotide
ucaugcccuccguggagcg

SEQ ID NO: 1770073 - RNA, 19 nt, Artificial Sequence
  Description of Artificial Sequence: Synthetic oligonucleotide
cuuacugucuguggcugag

SEQ ID NO: 1770074 - RNA, 19 nt, Artificial Sequence
  Description of Artificial Sequence: Synthetic oligonucleotide
ugcugacugcaucuagaac

SEQ ID NO: 1770075 - RNA, 19 nt, Artificial Sequence
  Description of Artificial Sequence: Synthetic oligonucleotide
agaaggagcggcgcuuaac

SEQ ID NO: 1770076 - RNA, 19 nt, Artificial Sequence
  Description of Artificial Sequence: Synthetic oligonucleotide
cugucuagagcgccacagg

SEQ ID NO: 1770077 - RNA, 19 nt, Artificial Sequence
  Description of Artificial Sequence: Synthetic oligonucleotide
gaagccaugacuacacacu

SEQ ID NO: 1770078 - RNA, 19 nt, Artificial Sequence
  Description of Artificial Sequence: Synthetic oligonucleotide
agaauaucugagggaagcu

SEQ ID NO: 1770079 - RNA, 19 nt, Artificial Sequence
  Description of Artificial Sequence: Synthetic oligonucleotide
ugcccucuugcuuaguuuu

SEQ ID NO: 1770080 - RNA, 19 nt, Artificial Sequence
  Description of Artificial Sequence: Synthetic oligonucleotide
acgguaguuucgauacagc

SEQ ID NO: 1770081 - RNA, 19 nt, Artificial Sequence
  Description of Artificial Sequence: Synthetic oligonucleotide
guaggugacauagccugcc

SEQ ID NO: 1770082 - RNA, 19 nt, Artificial Sequence
  Description of Artificial Sequence: Synthetic oligonucleotide
gugcagcagacacacccgg

SEQ ID NO: 1770083 - RNA, 19 nt, Artificial Sequence
  Description of Artificial Sequence: Synthetic oligonucleotide
cucccuaaugcagaagcac

SEQ ID NO: 1770084 - RNA, 19 nt, Artificial Sequence
  Description of Artificial Sequence: Synthetic oligonucleotide
cuguggcacacccagcaug

SEQ ID NO: 1770085 - RNA, 19 nt, Artificial Sequence
  Description of Artificial Sequence: Synthetic oligonucleotide
caucugaugagccaccaua

SEQ ID NO: 1770086 - RNA, 19 nt, Artificial Sequence
  Description of Artificial Sequence: Synthetic oligonucleotide
ccugugaaggccaggacac

SEQ ID NO: 1770087 - RNA, 19 nt, Artificial Sequence
  Description of Artificial Sequence: Synthetic oligonucleotide
uggagaggugcaccauuga

SEQ ID NO: 1770088 - RNA, 19 nt, Artificial Sequence
  Description of Artificial Sequence: Synthetic oligonucleotide
cacucacacucuuagaaua

SEQ ID NO: 1770089 - RNA, 19 nt, Artificial Sequence
  Description of Artificial Sequence: Synthetic oligonucleotide
agcaucuuacaggccagag

SEQ ID NO: 1770090 - RNA, 19 nt, Artificial Sequence
  Description of Artificial Sequence: Synthetic oligonucleotide
gauacagcuguggcacacc

SEQ ID NO: 1770091 - RNA, 19 nt, Artificial Sequence
  Description of Artificial Sequence: Synthetic oligonucleotide
ucacggucgggccaguguu

SEQ ID NO: 1770092 - RNA, 19 nt, Artificial Sequence
  Description of Artificial Sequence: Synthetic oligonucleotide
gacucgaagugccuuccga

SEQ ID NO: 1770093 - RNA, 19 nt, Artificial Sequence
  Description of Artificial Sequence: Synthetic oligonucleotide
cagcucguuggccacgcgg

SEQ ID NO: 1770094 - RNA, 19 nt, Artificial Sequence
  Description of Artificial Sequence: Synthetic oligonucleotide
auugagcaagaaguagacu

SEQ ID NO: 1770095 - RNA, 19 nt, Artificial Sequence
  Description of Artificial Sequence: Synthetic oligonucleotide
cacauguccuugucuuccc

SEQ ID NO: 1770096 - RNA, 19 nt, Artificial Sequence
  Description of Artificial Sequence: Synthetic oligonucleotide
cccggugguacccacaggg

SEQ ID NO: 1770097 - RNA, 19 nt, Artificial Sequence
  Description of Artificial Sequence: Synthetic oligonucleotide
ccuauuucacggucgggcc

SEQ ID NO: 1770098 - RNA, 19 nt, Artificial Sequence
  Description of Artificial Sequence: Synthetic oligonucleotide
cuccguggagcggugacgg

SEQ ID NO: 1770099 - RNA, 19 nt, Artificial Sequence
  Description of Artificial Sequence: Synthetic oligonucleotide
acccagcgucuccacaaac

SEQ ID NO: 1770100 - RNA, 19 nt, Artificial Sequence
  Description of Artificial Sequence: Synthetic oligonucleotide
agggucuucuaggagacaa

SEQ ID NO: 1770101 - RNA, 19 nt, Artificial Sequence
  Description of Artificial Sequence: Synthetic oligonucleotide
ugucuucccuugaugccuc

SEQ ID NO: 1770102 - RNA, 19 nt, Artificial Sequence
  Description of Artificial Sequence: Synthetic oligonucleotide
ggugacauagccugccaca

SEQ ID NO: 1770103 - RNA, 19 nt, Artificial Sequence
  Description of Artificial Sequence: Synthetic oligonucleotide
gagugacaagugucaggcc

SEQ ID NO: 1770104 - RNA, 19 nt, Artificial Sequence
  Description of Artificial Sequence: Synthetic oligonucleotide
caccacuuguccacaugag

SEQ ID NO: 1770105 - RNA, 19 nt, Artificial Sequence
  Description of Artificial Sequence: Synthetic oligonucleotide
cugaugagccaccauaacu

SEQ ID NO: 1770106 - RNA, 19 nt, Artificial Sequence
  Description of Artificial Sequence: Synthetic oligonucleotide
gccaugacuacacacuguc

SEQ ID NO: 1770107 - RNA, 19 nt, Artificial Sequence
  Description of Artificial Sequence: Synthetic oligonucleotide
accagccagguucugcaca

SEQ ID NO: 1770108 - RNA, 19 nt, Artificial Sequence
  Description of Artificial Sequence: Synthetic oligonucleotide
ggaagcuugaggguggcac

SEQ ID NO: 1770109 - RNA, 19 nt, Artificial Sequence
  Description of Artificial Sequence: Synthetic oligonucleotide
ccagaaauggugaguauca

SEQ ID NO: 1770110 - RNA, 19 nt, Artificial Sequence
  Description of Artificial Sequence: Synthetic oligonucleotide
gcaccauugagcaagaagu

SEQ ID NO: 1770111 - RNA, 19 nt, Artificial Sequence
  Description of Artificial Sequence: Synthetic oligonucleotide
augccagaaauggugagua

SEQ ID NO: 1770112 - RNA, 19 nt, Artificial Sequence
  Description of Artificial Sequence: Synthetic oligonucleotide
agcggugacgguaguuucg

SEQ ID NO: 1770113 - RNA, 19 nt, Artificial Sequence
  Description of Artificial Sequence: Synthetic oligonucleotide
ugcagcagacacacccggu

SEQ ID NO: 1770114 - RNA, 19 nt, Artificial Sequence
  Description of Artificial Sequence: Synthetic oligonucleotide
cagaccucccuaaugcaga

SEQ ID NO: 1770115 - RNA, 19 nt, Artificial Sequence
  Description of Artificial Sequence: Synthetic oligonucleotide
cuuaguuuuauggaccuau

SEQ ID NO: 1770116 - RNA, 19 nt, Artificial Sequence
  Description of Artificial Sequence: Synthetic oligonucleotide
augcucugccacaggagcg

SEQ ID NO: 1770117 - RNA, 19 nt, Artificial Sequence
  Description of Artificial Sequence: Synthetic oligonucleotide
ucagcguguugcugggccu

SEQ ID NO: 1770118 - RNA, 19 nt, Artificial Sequence
  Description of Artificial Sequence: Synthetic oligonucleotide
auaucugagggaagcuuga

SEQ ID NO: 1770119 - RNA, 19 nt, Artificial Sequence
  Description of Artificial Sequence: Synthetic oligonucleotide
gugacauagccugccacac

SEQ ID NO: 1770120 - RNA, 19 nt, Artificial Sequence
  Description of Artificial Sequence: Synthetic oligonucleotide
gacacacccggugguaccc

SEQ ID NO: 1770121 - RNA, 19 nt, Artificial Sequence
  Description of Artificial Sequence: Synthetic oligonucleotide
cccuaaugcagaagcacag

SEQ ID NO: 1770122 - RNA, 19 nt, Artificial Sequence
  Description of Artificial Sequence: Synthetic oligonucleotide
gacagguaggugacauagc

SEQ ID NO: 1770123 - RNA, 19 nt, Artificial Sequence
  Description of Artificial Sequence: Synthetic oligonucleotide
ugccccagaauagccaggu

SEQ ID NO: 1770124 - RNA, 19 nt, Artificial Sequence
  Description of Artificial Sequence: Synthetic oligonucleotide
gacucuuuagccaucugau

SEQ ID NO: 1770125 - RNA, 19 nt, Artificial Sequence
  Description of Artificial Sequence: Synthetic oligonucleotide
aucugaugagccaccauaa

SEQ ID NO: 1770126 - RNA, 19 nt, Artificial Sequence
  Description of Artificial Sequence: Synthetic oligonucleotide
uaguuucgauacagcugug

SEQ ID NO: 1770127 - RNA, 19 nt, Artificial Sequence
  Description of Artificial Sequence: Synthetic oligonucleotide
aggagcggcgcuuaacguu

SEQ ID NO: 1770128 - RNA, 19 nt, Artificial Sequence
  Description of Artificial Sequence: Synthetic oligonucleotide
  modified_base (7)..(7): a, c, u, g, unknown or other
gccagancuauugugcuga

SEQ ID NO: 1770129 - RNA, 19 nt, Artificial Sequence
  Description of Artificial Sequence: Synthetic oligonucleotide
cacaaggcugccaagcaua

SEQ ID NO: 1770130 - RNA, 19 nt, Artificial Sequence
  Description of Artificial Sequence: Synthetic oligonucleotide
cagcacccaugacugauug

SEQ ID NO: 1770131 - RNA, 19 nt, Artificial Sequence
  Description of Artificial Sequence: Synthetic oligonucleotide
aacaucuuacaagcaucuu

SEQ ID NO: 1770132 - RNA, 19 nt, Artificial Sequence
  Description of Artificial Sequence: Synthetic oligonucleotide
  modified_base (16)..(16): a, c, u, g, unknown or other
accauaacugccagancua

SEQ ID NO: 1770133 - RNA, 19 nt, Artificial Sequence
  Description of Artificial Sequence: Synthetic oligonucleotide
ugcgcagggccagaccucc

SEQ ID NO: 1770134 - RNA, 19 nt, Artificial Sequence
  Description of Artificial Sequence: Synthetic oligonucleotide
gaccuauuucacggucggg

SEQ ID NO: 1770135 - RNA, 19 nt, Artificial Sequence
  Description of Artificial Sequence: Synthetic oligonucleotide
caaaggcauaggccugccc

SEQ ID NO: 1770136 - RNA, 19 nt, Artificial Sequence
  Description of Artificial Sequence: Synthetic oligonucleotide
ucagcacccaugacugauu

SEQ ID NO: 1770137 - RNA, 19 nt, Artificial Sequence
  Description of Artificial Sequence: Synthetic oligonucleotide
ugaggcucaugcccuccgu

SEQ ID NO: 1770138 - RNA, 19 nt, Artificial Sequence
  Description of Artificial Sequence: Synthetic oligonucleotide
aggguggcacaguguggac

SEQ ID NO: 1770139 - RNA, 19 nt, Artificial Sequence
  Description of Artificial Sequence: Synthetic oligonucleotide
cuauuucacggucgggcca

SEQ ID NO: 1770140 - RNA, 19 nt, Artificial Sequence
  Description of Artificial Sequence: Synthetic oligonucleotide
cacccggugguacccacag

SEQ ID NO: 1770141 - RNA, 19 nt, Artificial Sequence
  Description of Artificial Sequence: Synthetic oligonucleotide
cugagggaaacuggcugag

SEQ ID NO: 1770142 - RNA, 19 nt, Artificial Sequence
  Description of Artificial Sequence: Synthetic oligonucleotide
cucaugcccuccguggagc

SEQ ID NO: 1770143 - RNA, 19 nt, Artificial Sequence
  Description of Artificial Sequence: Synthetic oligonucleotide
ggugcagcagacacacccg

SEQ ID NO: 1770144 - RNA, 19 nt, Artificial Sequence
  Description of Artificial Sequence: Synthetic oligonucleotide
ccaucuugaggcucaugcc

SEQ ID NO: 1770145 - RNA, 19 nt, Artificial Sequence
  Description of Artificial Sequence: Synthetic oligonucleotide
gggcaaaauagagugacaa

SEQ ID NO: 1770146 - RNA, 19 nt, Artificial Sequence
  Description of Artificial Sequence: Synthetic oligonucleotide
aagcaucuuacaggccaga

SEQ ID NO: 1770147 - RNA, 19 nt, Artificial Sequence
  Description of Artificial Sequence: Synthetic oligonucleotide
ggcugccaagcauacauga

SEQ ID NO: 1770148 - RNA, 19 nt, Artificial Sequence
  Description of Artificial Sequence: Synthetic oligonucleotide
gagcggugacgguaguuuc

SEQ ID NO: 1770149 - RNA, 19 nt, Artificial Sequence
  Description of Artificial Sequence: Synthetic oligonucleotide
cacuaugcucugccacagg

SEQ ID NO: 1770150 - RNA, 19 nt, Artificial Sequence
  Description of Artificial Sequence: Synthetic oligonucleotide
ucgauacagcuguggcaca

SEQ ID NO: 1770151 - RNA, 19 nt, Artificial Sequence
  Description of Artificial Sequence: Synthetic oligonucleotide
gcuugaggguggcacagug

SEQ ID NO: 1770152 - RNA, 19 nt, Artificial Sequence
  Description of Artificial Sequence: Synthetic oligonucleotide
accugcaguagaccacaga

SEQ ID NO: 1770153 - RNA, 19 nt, Artificial Sequence
  Description of Artificial Sequence: Synthetic oligonucleotide
acucacacucuuagaauau

SEQ ID NO: 1770154 - RNA, 19 nt, Artificial Sequence
  Description of Artificial Sequence: Synthetic oligonucleotide
ccuaaugcagaagcacagg

SEQ ID NO: 1770155 - RNA, 19 nt, Artificial Sequence
  Description of Artificial Sequence: Synthetic oligonucleotide
agaccucccuaaugcagaa

SEQ ID NO: 1770156 - RNA, 19 nt, Artificial Sequence
  Description of Artificial Sequence: Synthetic oligonucleotide
gagaggggcaaaauagagu

SEQ ID NO: 1770157 - RNA, 19 nt, Artificial Sequence
  Description of Artificial Sequence: Synthetic oligonucleotide
gaaggagguaaggaucugu

SEQ ID NO: 1770158 - RNA, 19 nt, Artificial Sequence
  Description of Artificial Sequence: Synthetic oligonucleotide
cuagaacaucuggacccag

SEQ ID NO: 1770159 - RNA, 19 nt, Artificial Sequence
  Description of Artificial Sequence: Synthetic oligonucleotide
agcguguugcugggccugc

SEQ ID NO: 1770160 - RNA, 19 nt, Artificial Sequence
  Description of Artificial Sequence: Synthetic oligonucleotide
ugagaaggagcggcgcuua

SEQ ID NO: 1770161 - RNA, 19 nt, Artificial Sequence
  Description of Artificial Sequence: Synthetic oligonucleotide
ggugacgguaguuucgaua

SEQ ID NO: 1770162 - RNA, 19 nt, Artificial Sequence
  Description of Artificial Sequence: Synthetic oligonucleotide
ugccagaaauggugaguau

SEQ ID NO: 1770163 - RNA, 19 nt, Artificial Sequence
  Description of Artificial Sequence: Synthetic oligonucleotide
ggccacgcggaccucagug

SEQ ID NO: 1770164 - RNA, 19 nt, Artificial Sequence
  Description of Artificial Sequence: Synthetic oligonucleotide
gcaucuuacaggccagaga

SEQ ID NO: 1770165 - RNA, 19 nt, Artificial Sequence
  Description of Artificial Sequence: Synthetic oligonucleotide
cuuacaggccagagaguaa

SEQ ID NO: 1770166 - RNA, 19 nt, Artificial Sequence
  Description of Artificial Sequence: Synthetic oligonucleotide
caccauugagcaagaagua

SEQ ID NO: 1770167 - RNA, 19 nt, Artificial Sequence
  Description of Artificial Sequence: Synthetic oligonucleotide
uggacagguaggugacaua

SEQ ID NO: 1770168 - RNA, 19 nt, Artificial Sequence
  Description of Artificial Sequence: Synthetic oligonucleotide
ggaaccagccagguucugc

SEQ ID NO: 1770169 - RNA, 19 nt, Artificial Sequence
  Description of Artificial Sequence: Synthetic oligonucleotide
cccaugacugauuggucac

SEQ ID NO: 1770170 - RNA, 19 nt, Artificial Sequence
  Description of Artificial Sequence: Synthetic oligonucleotide
cacgcggaccucagugcag

SEQ ID NO: 1770171 - RNA, 19 nt, Artificial Sequence
  Description of Artificial Sequence: Synthetic oligonucleotide
ccaagcauacaugaucuca

SEQ ID NO: 1770172 - RNA, 19 nt, Artificial Sequence
  Description of Artificial Sequence: Synthetic oligonucleotide
ggacucgaagugccuuccg

SEQ ID NO: 1770173 - RNA, 19 nt, Artificial Sequence
  Description of Artificial Sequence: Synthetic oligonucleotide
gaggggcaaaauagaguga

SEQ ID NO: 1770174 - RNA, 19 nt, Artificial Sequence
  Description of Artificial Sequence: Synthetic oligonucleotide
ggucuucuaggagacaaaa

SEQ ID NO: 1770175 - RNA, 19 nt, Artificial Sequence
  Description of Artificial Sequence: Synthetic oligonucleotide
uuucacggucgggccagug

SEQ ID NO: 1770176 - RNA, 19 nt, Artificial Sequence
  Description of Artificial Sequence: Synthetic oligonucleotide
uagagcgccacagggucuu

SEQ ID NO: 1770177 - RNA, 19 nt, Artificial Sequence
  Description of Artificial Sequence: Synthetic oligonucleotide
  modified_base (9)..(9): a, c, u, g, unknown or other
cugccagancuauugugcu

SEQ ID NO: 1770178 - RNA, 19 nt, Artificial Sequence
  Description of Artificial Sequence: Synthetic oligonucleotide
cacaccugugaaggccagg

SEQ ID NO: 1770179 - RNA, 19 nt, Artificial Sequence
  Description of Artificial Sequence: Synthetic oligonucleotide
ggucacauguccuugucuu

SEQ ID NO: 1770180 - RNA, 19 nt, Artificial Sequence
  Description of Artificial Sequence: Synthetic oligonucleotide
gguacccacaggggagugg

SEQ ID NO: 1770181 - RNA, 19 nt, Artificial Sequence
  Description of Artificial Sequence: Synthetic oligonucleotide
gguaggugacauagccugc

SEQ ID NO: 1770182 - RNA, 19 nt, Artificial Sequence
  Description of Artificial Sequence: Synthetic oligonucleotide
cugcaguagaccacagacu

SEQ ID NO: 1770183 - RNA, 19 nt, Artificial Sequence
  Description of Artificial Sequence: Synthetic oligonucleotide
ggcgcuuaacguucagcuc

SEQ ID NO: 1770184 - RNA, 19 nt, Artificial Sequence
  Description of Artificial Sequence: Synthetic oligonucleotide
ggagcggcgcuuaacguuc

SEQ ID NO: 1770185 - RNA, 19 nt, Artificial Sequence
  Description of Artificial Sequence: Synthetic oligonucleotide
cagcgucuccacaaacaga

SEQ ID NO: 1770186 - RNA, 19 nt, Artificial Sequence
  Description of Artificial Sequence: Synthetic oligonucleotide
ggugaguaucaaaguccag

SEQ ID NO: 1770187 - RNA, 19 nt, Artificial Sequence
  Description of Artificial Sequence: Synthetic oligonucleotide
gcucaugcccuccguggag

SEQ ID NO: 1770188 - RNA, 19 nt, Artificial Sequence
  Description of Artificial Sequence: Synthetic oligonucleotide
aucuuacaggccagagagu

SEQ ID NO: 1770189 - RNA, 19 nt, Artificial Sequence
  Description of Artificial Sequence: Synthetic oligonucleotide
agggccagaccucccuaau

SEQ ID NO: 1770190 - RNA, 19 nt, Artificial Sequence
  Description of Artificial Sequence: Synthetic oligonucleotide
agcggcgcuuaacguucag

SEQ ID NO: 1770191 - RNA, 19 nt, Artificial Sequence
  Description of Artificial Sequence: Synthetic oligonucleotide
cauagccugccacaccugu

SEQ ID NO: 1770192 - RNA, 19 nt, Artificial Sequence
  Description of Artificial Sequence: Synthetic oligonucleotide
ggcagacaagccaucagaa

SEQ ID NO: 1770193 - RNA, 19 nt, Artificial Sequence
  Description of Artificial Sequence: Synthetic oligonucleotide
gaccugcaguagaccacag

SEQ ID NO: 1770194 - RNA, 19 nt, Artificial Sequence
  Description of Artificial Sequence: Synthetic oligonucleotide
cacacccggugguacccac

SEQ ID NO: 1770195 - RNA, 19 nt, Artificial Sequence
  Description of Artificial Sequence: Synthetic oligonucleotide
ccucuugcuuaguuuuaug

SEQ ID NO: 1770196 - RNA, 19 nt, Artificial Sequence
  Description of Artificial Sequence: Synthetic oligonucleotide
uaccaucuugaggcucaug

SEQ ID NO: 1770197 - RNA, 19 nt, Artificial Sequence
  Description of Artificial Sequence: Synthetic oligonucleotide
ugguacccacaggggagug

SEQ ID NO: 1770198 - RNA, 19 nt, Artificial Sequence
  Description of Artificial Sequence: Synthetic oligonucleotide
cucagagagccuuggcacu

SEQ ID NO: 1770199 - RNA, 19 nt, Artificial Sequence
  Description of Artificial Sequence: Synthetic oligonucleotide
agcgccacagggucuucua

SEQ ID NO: 1770200 - RNA, 19 nt, Artificial Sequence
  Description of Artificial Sequence: Synthetic oligonucleotide
cagguaggugacauagccu

SEQ ID NO: 1770201 - RNA, 19 nt, Artificial Sequence
  Description of Artificial Sequence: Synthetic oligonucleotide
aggagacaaaaggcucacu

SEQ ID NO: 1770202 - RNA, 19 nt, Artificial Sequence
  Description of Artificial Sequence: Synthetic oligonucleotide
gggccagaccucccuaaug

SEQ ID NO: 1770203 - RNA, 19 nt, Artificial Sequence
  Description of Artificial Sequence: Synthetic oligonucleotide
cuugaggguggcacagugu

SEQ ID NO: 1770204 - RNA, 19 nt, Artificial Sequence
  Description of Artificial Sequence: Synthetic oligonucleotide
cagaaauggugaguaucaa

SEQ ID NO: 1770205 - RNA, 19 nt, Artificial Sequence
  Description of Artificial Sequence: Synthetic oligonucleotide
cguggagcggugacgguag

SEQ ID NO: 1770206 - RNA, 19 nt, Artificial Sequence
  Description of Artificial Sequence: Synthetic oligonucleotide
ccggugguacccacagggg

SEQ ID NO: 1770207 - RNA, 19 nt, Artificial Sequence
  Description of Artificial Sequence: Synthetic oligonucleotide
aggcucacugagggaaacu

SEQ ID NO: 1770208 - RNA, 19 nt, Artificial Sequence
  Description of Artificial Sequence: Synthetic oligonucleotide
acauagccugccacaccug

SEQ ID NO: 1770209 - RNA, 19 nt, Artificial Sequence
  Description of Artificial Sequence: Synthetic oligonucleotide
aggaagggacucagcgugu

SEQ ID NO: 1770210 - RNA, 19 nt, Artificial Sequence
  Description of Artificial Sequence: Synthetic oligonucleotide
gagaaggagcggcgcuuaa

SEQ ID NO: 1770211 - RNA, 19 nt, Artificial Sequence
  Description of Artificial Sequence: Synthetic oligonucleotide
cuccaaugccagaaauggu

SEQ ID NO: 1770212 - RNA, 19 nt, Artificial Sequence
  Description of Artificial Sequence: Synthetic oligonucleotide
cagcguguugcugggccug

SEQ ID NO: 1770213 - RNA, 19 nt, Artificial Sequence
  Description of Artificial Sequence: Synthetic oligonucleotide
gaggugcaccauugagcaa

SEQ ID NO: 1770214 - RNA, 19 nt, Artificial Sequence
  Description of Artificial Sequence: Synthetic oligonucleotide
ggcucaugcccuccgugga

SEQ ID NO: 1770215 - RNA, 19 nt, Artificial Sequence
  Description of Artificial Sequence: Synthetic oligonucleotide
uccguggagcggugacggu

SEQ ID NO: 1770216 - RNA, 19 nt, Artificial Sequence
  Description of Artificial Sequence: Synthetic oligonucleotide
ggcugagaaggagcggcgc

SEQ ID NO: 1770217 - RNA, 19 nt, Artificial Sequence
  Description of Artificial Sequence: Synthetic oligonucleotide
gucuagagcgccacagggu

SEQ ID NO: 1770218 - RNA, 19 nt, Artificial Sequence
  Description of Artificial Sequence: Synthetic oligonucleotide
cacaggagcggggacucga

SEQ ID NO: 1770219 - RNA, 19 nt, Artificial Sequence
  Description of Artificial Sequence: Synthetic oligonucleotide
gcgccacagggucuucuag

SEQ ID NO: 1770220 - RNA, 19 nt, Artificial Sequence
  Description of Artificial Sequence: Synthetic oligonucleotide
  modified_base (6)..(6): a, c, u, g, unknown or other
ccagancuauugugcugac

SEQ ID NO: 1770221 - RNA, 19 nt, Artificial Sequence
  Description of Artificial Sequence: Synthetic oligonucleotide
ugcccuccguggagcggug

SEQ ID NO: 1770222 - RNA, 19 nt, Artificial Sequence
  Description of Artificial Sequence: Synthetic oligonucleotide
gggacucagcguguugcug

SEQ ID NO: 1770223 - RNA, 19 nt, Artificial Sequence
  Description of Artificial Sequence: Synthetic oligonucleotide
gccaagcauacaugaucuc

SEQ ID NO: 1770224 - RNA, 19 nt, Artificial Sequence
  Description of Artificial Sequence: Synthetic oligonucleotide
gggccugcccucuugcuua

SEQ ID NO: 1770225 - RNA, 19 nt, Artificial Sequence
  Description of Artificial Sequence: Synthetic oligonucleotide
cagggccagaccucccuaa

SEQ ID NO: 1770226 - RNA, 19 nt, Artificial Sequence
  Description of Artificial Sequence: Synthetic oligonucleotide
ccucccuaaugcagaagca

SEQ ID NO: 1770227 - RNA, 19 nt, Artificial Sequence
  Description of Artificial Sequence: Synthetic oligonucleotide
cagugcagagcuucagcau

SEQ ID NO: 1770228 - RNA, 19 nt, Artificial Sequence
  Description of Artificial Sequence: Synthetic oligonucleotide
  modified_base (18)..(18): a, c, u, g, unknown or other
ccaccauaacugccaganc

SEQ ID NO: 1770229 - RNA, 19 nt, Artificial Sequence
  Description of Artificial Sequence: Synthetic oligonucleotide
acggucgggccaguguuuu

SEQ ID NO: 1770230 - RNA, 19 nt, Artificial Sequence
  Description of Artificial Sequence: Synthetic oligonucleotide
cacugucuagagcgccaca

SEQ ID NO: 1770231 - RNA, 19 nt, Artificial Sequence
  Description of Artificial Sequence: Synthetic oligonucleotide
acacacccggugguaccca

SEQ ID NO: 1770232 - RNA, 19 nt, Artificial Sequence
  Description of Artificial Sequence: Synthetic oligonucleotide
guggcacacccagcauggc

SEQ ID NO: 1770233 - RNA, 19 nt, Artificial Sequence
  Description of Artificial Sequence: Synthetic oligonucleotide
gcugagaaggagcggcgcu

SEQ ID NO: 1770234 - RNA, 19 nt, Artificial Sequence
  Description of Artificial Sequence: Synthetic oligonucleotide
acaggagcggggacucgaa

SEQ ID NO: 1770235 - RNA, 19 nt, Artificial Sequence
  Description of Artificial Sequence: Synthetic oligonucleotide
ccuccguggagcggugacg

SEQ ID NO: 1770236 - RNA, 19 nt, Artificial Sequence
  Description of Artificial Sequence: Synthetic oligonucleotide
cugugaaggccaggacaca

SEQ ID NO: 1770237 - RNA, 19 nt, Artificial Sequence
  Description of Artificial Sequence: Synthetic oligonucleotide
auuucacggucgggccagu

SEQ ID NO: 1770238 - RNA, 19 nt, Artificial Sequence
  Description of Artificial Sequence: Synthetic oligonucleotide
acacccggugguacccaca

SEQ ID NO: 1770239 - RNA, 19 nt, Artificial Sequence
  Description of Artificial Sequence: Synthetic oligonucleotide
gcggugacgguaguuucga

SEQ ID NO: 1770240 - RNA, 19 nt, Artificial Sequence
  Description of Artificial Sequence: Synthetic oligonucleotide
  modified_base (5)..(5): a, c, u, g, unknown or other
cagancuauugugcugacu

SEQ ID NO: 1770241 - RNA, 19 nt, Artificial Sequence
  Description of Artificial Sequence: Synthetic oligonucleotide
ggugcaccauugagcaaga

SEQ ID NO: 1770242 - RNA, 19 nt, Artificial Sequence
  Description of Artificial Sequence: Synthetic oligonucleotide
cgguaguuucgauacagcu

SEQ ID NO: 1770243 - RNA, 19 nt, Artificial Sequence
  Description of Artificial Sequence: Synthetic oligonucleotide
gugguacccacaggggagu

SEQ ID NO: 1770244 - RNA, 19 nt, Artificial Sequence
  Description of Artificial Sequence: Synthetic oligonucleotide
ggagugcgcagggccagac

SEQ ID NO: 1770245 - RNA, 19 nt, Artificial Sequence
  Description of Artificial Sequence: Synthetic oligonucleotide
ggagcggugacgguaguuu

SEQ ID NO: 1770246 - RNA, 19 nt, Artificial Sequence
  Description of Artificial Sequence: Synthetic oligonucleotide
gccaucugaugagccacca

SEQ ID NO: 1770247 - RNA, 19 nt, Artificial Sequence
  Description of Artificial Sequence: Synthetic oligonucleotide
ccuuacugucuguggcuga

SEQ ID NO: 1770248 - RNA, 19 nt, Artificial Sequence
  Description of Artificial Sequence: Synthetic oligonucleotide
gagcggcgcuuaacguuca

SEQ ID NO: 1770249 - RNA, 19 nt, Artificial Sequence
  Description of Artificial Sequence: Synthetic oligonucleotide
ccacgcggaccucagugca

SEQ ID NO: 1770250 - RNA, 19 nt, Artificial Sequence
  Description of Artificial Sequence: Synthetic oligonucleotide
gggucuucuaggagacaaa

SEQ ID NO: 1770251 - RNA, 19 nt, Artificial Sequence
  Description of Artificial Sequence: Synthetic oligonucleotide
cggugguacccacagggga

SEQ ID NO: 1770252 - RNA, 19 nt, Artificial Sequence
  Description of Artificial Sequence: Synthetic oligonucleotide
cggcgcuuaacguucagcu

SEQ ID NO: 1770253 - RNA, 19 nt, Artificial Sequence
  Description of Artificial Sequence: Synthetic oligonucleotide
cauaggccugccccagaau

SEQ ID NO: 1770254 - RNA, 19 nt, Artificial Sequence
  Description of Artificial Sequence: Synthetic oligonucleotide
gcuuaguuuuauggaccua

SEQ ID NO: 1770255 - RNA, 19 nt, Artificial Sequence
  Description of Artificial Sequence: Synthetic oligonucleotide
ccaugacuacacacugucu

SEQ ID NO: 1770256 - RNA, 19 nt, Artificial Sequence
  Description of Artificial Sequence: Synthetic oligonucleotide
gccccagaauagccagguc

SEQ ID NO: 1770257 - RNA, 19 nt, Artificial Sequence
  Description of Artificial Sequence: Synthetic oligonucleotide
gggaagcuugaggguggca

SEQ ID NO: 1770258 - RNA, 19 nt, Artificial Sequence
  Description of Artificial Sequence: Synthetic oligonucleotide
  modified_base (15)..(15): a, c, u, g, unknown or other
ccauaacugccagancuau

SEQ ID NO: 1770259 - RNA, 19 nt, Artificial Sequence
  Description of Artificial Sequence: Synthetic oligonucleotide
cacggucgggccaguguuu

SEQ ID NO: 1770260 - RNA, 19 nt, Artificial Sequence
  Description of Artificial Sequence: Synthetic oligonucleotide
guaccaucuugaggcucau

SEQ ID NO: 1770261 - RNA, 19 nt, Artificial Sequence
  Description of Artificial Sequence: Synthetic oligonucleotide
ggaagggacucagcguguu

SEQ ID NO: 1770262 - RNA, 19 nt, Artificial Sequence
  Description of Artificial Sequence: Synthetic oligonucleotide
gcccucuugcuuaguuuua

SEQ ID NO: 1770263 - RNA, 19 nt, Artificial Sequence
  Description of Artificial Sequence: Synthetic oligonucleotide
ccguggagcggugacggua

SEQ ID NO: 1770264 - RNA, 19 nt, Artificial Sequence
  Description of Artificial Sequence: Synthetic oligonucleotide
cgcuuaacguucagcucgu

SEQ ID NO: 1770265 - RNA, 19 nt, Artificial Sequence
  Description of Artificial Sequence: Synthetic oligonucleotide
gccuuggcacugacagggu

SEQ ID NO: 1770266 - RNA, 19 nt, Artificial Sequence
  Description of Artificial Sequence: Synthetic oligonucleotide
gcggggacucgaagugccu

SEQ ID NO: 1770267 - RNA, 19 nt, Artificial Sequence
  Description of Artificial Sequence: Synthetic oligonucleotide
gcccuccguggagcgguga

SEQ ID NO: 1770268 - RNA, 19 nt, Artificial Sequence
  Description of Artificial Sequence: Synthetic oligonucleotide
gcuuaacguucagcucguu

SEQ ID NO: 1770269 - RNA, 19 nt, Artificial Sequence
  Description of Artificial Sequence: Synthetic oligonucleotide
cggugacgguaguuucgau

SEQ ID NO: 1770270 - RNA, 19 nt, Artificial Sequence
  Description of Artificial Sequence: Synthetic oligonucleotide
ugagaauuaaauaaucugg

SEQ ID NO: 1770271 - RNA, 19 nt, Artificial Sequence
  Description of Artificial Sequence: Synthetic oligonucleotide
aauuaaauaaucuggugag

SEQ ID NO: 1770272 - RNA, 19 nt, Artificial Sequence
  Description of Artificial Sequence: Synthetic oligonucleotide
uuuaaauaaaugcaaggag

SEQ ID NO: 1770273 - RNA, 19 nt, Artificial Sequence
  Description of Artificial Sequence: Synthetic oligonucleotide
aaauaaucuggugaggucc

SEQ ID NO: 1770274 - RNA, 19 nt, Artificial Sequence
  Description of Artificial Sequence: Synthetic oligonucleotide
uuuuacuacagccauauca

SEQ ID NO: 1770275 - RNA, 19 nt, Artificial Sequence
  Description of Artificial Sequence: Synthetic oligonucleotide
aauaaaugcaaggagagga

SEQ ID NO: 1770276 - RNA, 19 nt, Artificial Sequence
  Description of Artificial Sequence: Synthetic oligonucleotide
aauaagacaaucauaucuc

SEQ ID NO: 1770277 - RNA, 19 nt, Artificial Sequence
  Description of Artificial Sequence: Synthetic oligonucleotide
agcaagugggucuaaaugc

SEQ ID NO: 1770278 - RNA, 19 nt, Artificial Sequence
  Description of Artificial Sequence: Synthetic oligonucleotide
aaaugcauuucccucuccc

SEQ ID NO: 1770279 - RNA, 19 nt, Artificial Sequence
  Description of Artificial Sequence: Synthetic oligonucleotide
cuuuguuacaguuagcaag

SEQ ID NO: 1770280 - RNA, 19 nt, Artificial Sequence
  Description of Artificial Sequence: Synthetic oligonucleotide
ucugucaugguuuucuugg

SEQ ID NO: 1770281 - RNA, 19 nt, Artificial Sequence
  Description of Artificial Sequence: Synthetic oligonucleotide
gaauuaaauaaucugguga

SEQ ID NO: 1770282 - RNA, 19 nt, Artificial Sequence
  Description of Artificial Sequence: Synthetic oligonucleotide
aagaauaagacaaucauau

SEQ ID NO: 1770283 - RNA, 19 nt, Artificial Sequence
  Description of Artificial Sequence: Synthetic oligonucleotide
uuauaacugggguugacgg

SEQ ID NO: 1770284 - RNA, 19 nt, Artificial Sequence
  Description of Artificial Sequence: Synthetic oligonucleotide
aaugcauuucccucucccc

SEQ ID NO: 1770285 - RNA, 19 nt, Artificial Sequence
  Description of Artificial Sequence: Synthetic oligonucleotide
uuugagaauuaaauaaucu

SEQ ID NO: 1770286 - RNA, 19 nt, Artificial Sequence
  Description of Artificial Sequence: Synthetic oligonucleotide
uuggggauuacacagacac

SEQ ID NO: 1770287 - RNA, 19 nt, Artificial Sequence
  Description of Artificial Sequence: Synthetic oligonucleotide
acguggaucuucuucaucc

SEQ ID NO: 1770288 - RNA, 19 nt, Artificial Sequence
  Description of Artificial Sequence: Synthetic oligonucleotide
guuacaguuagcaaguggg

SEQ ID NO: 1770289 - RNA, 19 nt, Artificial Sequence
  Description of Artificial Sequence: Synthetic oligonucleotide
aucacuuuguuacaguuag

SEQ ID NO: 1770290 - RNA, 19 nt, Artificial Sequence
  Description of Artificial Sequence: Synthetic oligonucleotide
uaugguuuccaccaaguug

SEQ ID NO: 1770291 - RNA, 19 nt, Artificial Sequence
  Description of Artificial Sequence: Synthetic oligonucleotide
ucaguaaagcucaugugag

SEQ ID NO: 1770292 - RNA, 19 nt, Artificial Sequence
  Description of Artificial Sequence: Synthetic oligonucleotide
aguuugugaucuuucuucc

SEQ ID NO: 1770293 - RNA, 19 nt, Artificial Sequence
  Description of Artificial Sequence: Synthetic oligonucleotide
uuuguuacaguuagcaagu

SEQ ID NO: 1770294 - RNA, 19 nt, Artificial Sequence
  Description of Artificial Sequence: Synthetic oligonucleotide
aagacaaucauaucucuau

SEQ ID NO: 1770295 - RNA, 19 nt, Artificial Sequence
  Description of Artificial Sequence: Synthetic oligonucleotide
gucacaacgauacaagugc

SEQ ID NO: 1770296 - RNA, 19 nt, Artificial Sequence
  Description of Artificial Sequence: Synthetic oligonucleotide
uguuacaguuagcaagugg

SEQ ID NO: 1770297 - RNA, 19 nt, Artificial Sequence
  Description of Artificial Sequence: Synthetic oligonucleotide
auuacacagacacuuacca

SEQ ID NO: 1770298 - RNA, 19 nt, Artificial Sequence
  Description of Artificial Sequence: Synthetic oligonucleotide
uuaaauaaucuggugaggu

SEQ ID NO: 1770299 - RNA, 19 nt, Artificial Sequence
  Description of Artificial Sequence: Synthetic oligonucleotide
uaucucuauaacaauauuu

SEQ ID NO: 1770300 - RNA, 19 nt, Artificial Sequence
  Description of Artificial Sequence: Synthetic oligonucleotide
ucuaaaugcauuucccucu

SEQ ID NO: 1770301 - RNA, 19 nt, Artificial Sequence
  Description of Artificial Sequence: Synthetic oligonucleotide
uauaggcuguucgagagcg

SEQ ID NO: 1770302 - RNA, 19 nt, Artificial Sequence
  Description of Artificial Sequence: Synthetic oligonucleotide
aaauaaaugcaaggagagg

SEQ ID NO: 1770303 - RNA, 19 nt, Artificial Sequence
  Description of Artificial Sequence: Synthetic oligonucleotide
uuugguuaugguuuccacc

SEQ ID NO: 1770304 - RNA, 19 nt, Artificial Sequence
  Description of Artificial Sequence: Synthetic oligonucleotide
gaguucuacacauuuugag

SEQ ID NO: 1770305 - RNA, 19 nt, Artificial Sequence
  Description of Artificial Sequence: Synthetic oligonucleotide
ugucacaacgauacaagug

SEQ ID NO: 1770306 - RNA, 19 nt, Artificial Sequence
  Description of Artificial Sequence: Synthetic oligonucleotide
aagaauugugcccaagaau

SEQ ID NO: 1770307 - RNA, 19 nt, Artificial Sequence
  Description of Artificial Sequence: Synthetic oligonucleotide
aguucuacacauuuugaga

SEQ ID NO: 1770308 - RNA, 19 nt, Artificial Sequence
  Description of Artificial Sequence: Synthetic oligonucleotide
caugccacaccuaccaucg

SEQ ID NO: 1770309 - RNA, 19 nt, Artificial Sequence
  Description of Artificial Sequence: Synthetic oligonucleotide
augauaagcgcuuccucac

SEQ ID NO: 1770310 - RNA, 19 nt, Artificial Sequence
  Description of Artificial Sequence: Synthetic oligonucleotide
uagcaagugggucuaaaug

SEQ ID NO: 1770311 - RNA, 19 nt, Artificial Sequence
  Description of Artificial Sequence: Synthetic oligonucleotide
cugcuugucacaacgauac

SEQ ID NO: 1770312 - RNA, 19 nt, Artificial Sequence
  Description of Artificial Sequence: Synthetic oligonucleotide
acaaugucuacucaguaaa

SEQ ID NO: 1770313 - RNA, 19 nt, Artificial Sequence
  Description of Artificial Sequence: Synthetic oligonucleotide
agaauaagacaaucauauc

SEQ ID NO: 1770314 - RNA, 19 nt, Artificial Sequence
  Description of Artificial Sequence: Synthetic oligonucleotide
auaacugggguugacggcg

SEQ ID NO: 1770315 - RNA, 19 nt, Artificial Sequence
  Description of Artificial Sequence: Synthetic oligonucleotide
acgauacaagugcaugucc

SEQ ID NO: 1770316 - RNA, 19 nt, Artificial Sequence
  Description of Artificial Sequence: Synthetic oligonucleotide
gaaacuacaugccacaccu

SEQ ID NO: 1770317 - RNA, 19 nt, Artificial Sequence
  Description of Artificial Sequence: Synthetic oligonucleotide
ugggucuaaaugcauuucc

SEQ ID NO: 1770318 - RNA, 19 nt, Artificial Sequence
  Description of Artificial Sequence: Synthetic oligonucleotide
guuuuggugucugucaugg

SEQ ID NO: 1770319 - RNA, 19 nt, Artificial Sequence
  Description of Artificial Sequence: Synthetic oligonucleotide
ugaccuggcgcucagacaa

SEQ ID NO: 1770320 - RNA, 19 nt, Artificial Sequence
  Description of Artificial Sequence: Synthetic oligonucleotide
agguuguuccacuaggcag

SEQ ID NO: 1770321 - RNA, 19 nt, Artificial Sequence
  Description of Artificial Sequence: Synthetic oligonucleotide
accaaguugaauuuuguuu

SEQ ID NO: 1770322 - RNA, 19 nt, Artificial Sequence
  Description of Artificial Sequence: Synthetic oligonucleotide
gauacaagugcaugucccc

SEQ ID NO: 1770323 - RNA, 19 nt, Artificial Sequence
  Description of Artificial Sequence: Synthetic oligonucleotide
auuaaauaaucuggugagg

SEQ ID NO: 1770324 - RNA, 19 nt, Artificial Sequence
  Description of Artificial Sequence: Synthetic oligonucleotide
acaguuagcaagugggucu

SEQ ID NO: 1770325 - RNA, 19 nt, Artificial Sequence
  Description of Artificial Sequence: Synthetic oligonucleotide
uuggaagaucgcaucuugg

SEQ ID NO: 1770326 - RNA, 19 nt, Artificial Sequence
  Description of Artificial Sequence: Synthetic oligonucleotide
ugugcuguccugcugacuc

SEQ ID NO: 1770327 - RNA, 19 nt, Artificial Sequence
  Description of Artificial Sequence: Synthetic oligonucleotide
augucuacucaguaaagcu

SEQ ID NO: 1770328 - RNA, 19 nt, Artificial Sequence
  Description of Artificial Sequence: Synthetic oligonucleotide
aauuuuguuuuggugucug

SEQ ID NO: 1770329 - RNA, 19 nt, Artificial Sequence
  Description of Artificial Sequence: Synthetic oligonucleotide
gauaagcgcuuccucacag

SEQ ID NO: 1770330 - RNA, 19 nt, Artificial Sequence
  Description of Artificial Sequence: Synthetic oligonucleotide
ugucuacucaguaaagcuc

SEQ ID NO: 1770331 - RNA, 19 nt, Artificial Sequence
  Description of Artificial Sequence: Synthetic oligonucleotide
uuacacagacacuuaccag

SEQ ID NO: 1770332 - RNA, 19 nt, Artificial Sequence
  Description of Artificial Sequence: Synthetic oligonucleotide
guuauaacugggguugacg

SEQ ID NO: 1770333 - RNA, 19 nt, Artificial Sequence
  Description of Artificial Sequence: Synthetic oligonucleotide
aguagcagcgggcacgcgg

SEQ ID NO: 1770334 - RNA, 19 nt, Artificial Sequence
  Description of Artificial Sequence: Synthetic oligonucleotide
cuuaccagggauaauaucu

SEQ ID NO: 1770335 - RNA, 19 nt, Artificial Sequence
  Description of Artificial Sequence: Synthetic oligonucleotide
cuaccaucgaguucuacac

SEQ ID NO: 1770336 - RNA, 19 nt, Artificial Sequence
  Description of Artificial Sequence: Synthetic oligonucleotide
ugcaaggagaggaaacuac

SEQ ID NO: 1770337 - RNA, 19 nt, Artificial Sequence
  Description of Artificial Sequence: Synthetic oligonucleotide
agcagguuguuccacuagg

SEQ ID NO: 1770338 - RNA, 19 nt, Artificial Sequence
  Description of Artificial Sequence: Synthetic oligonucleotide
caaucauaucucuauaaca

SEQ ID NO: 1770339 - RNA, 19 nt, Artificial Sequence
  Description of Artificial Sequence: Synthetic oligonucleotide
agaauugugcccaagaaua

SEQ ID NO: 1770340 - RNA, 19 nt, Artificial Sequence
  Description of Artificial Sequence: Synthetic oligonucleotide
ugguccgccaguagcagcg

SEQ ID NO: 1770341 - RNA, 19 nt, Artificial Sequence
  Description of Artificial Sequence: Synthetic oligonucleotide
acaccuaccaucgaguucu

SEQ ID NO: 1770342 - RNA, 19 nt, Artificial Sequence
  Description of Artificial Sequence: Synthetic oligonucleotide
aaucuggugagguccacaa

SEQ ID NO: 1770343 - RNA, 19 nt, Artificial Sequence
  Description of Artificial Sequence: Synthetic oligonucleotide
ucaugguuuucuuggggag

SEQ ID NO: 1770344 - RNA, 19 nt, Artificial Sequence
  Description of Artificial Sequence: Synthetic oligonucleotide
guucuacacauuuugagaa

SEQ ID NO: 1770345 - RNA, 19 nt, Artificial Sequence
  Description of Artificial Sequence: Synthetic oligonucleotide
agggauaauaucuucuuuu

SEQ ID NO: 1770346 - RNA, 19 nt, Artificial Sequence
  Description of Artificial Sequence: Synthetic oligonucleotide
uaaauaaucuggugagguc

SEQ ID NO: 1770347 - RNA, 19 nt, Artificial Sequence
  Description of Artificial Sequence: Synthetic oligonucleotide
acaugccacaccuaccauc

SEQ ID NO: 1770348 - RNA, 19 nt, Artificial Sequence
  Description of Artificial Sequence: Synthetic oligonucleotide
gauuacacagacacuuacc

SEQ ID NO: 1770349 - RNA, 19 nt, Artificial Sequence
  Description of Artificial Sequence: Synthetic oligonucleotide
augugagcugccuuaaugu

SEQ ID NO: 1770350 - RNA, 19 nt, Artificial Sequence
  Description of Artificial Sequence: Synthetic oligonucleotide
uauaacugggguugacggc

SEQ ID NO: 1770351 - RNA, 19 nt, Artificial Sequence
  Description of Artificial Sequence: Synthetic oligonucleotide
acuuaccagggauaauauc

SEQ ID NO: 1770352 - RNA, 19 nt, Artificial Sequence
  Description of Artificial Sequence: Synthetic oligonucleotide
uccccagucagcaugugcu

SEQ ID NO: 1770353 - RNA, 19 nt, Artificial Sequence
  Description of Artificial Sequence: Synthetic oligonucleotide
uccacaaugucuacucagu

SEQ ID NO: 1770354 - RNA, 19 nt, Artificial Sequence
  Description of Artificial Sequence: Synthetic oligonucleotide
gacaaucauaucucuauaa

SEQ ID NO: 1770355 - RNA, 19 nt, Artificial Sequence
  Description of Artificial Sequence: Synthetic oligonucleotide
gaucgcaucuugguguugg

SEQ ID NO: 1770356 - RNA, 19 nt, Artificial Sequence
  Description of Artificial Sequence: Synthetic oligonucleotide
uggaagaucgcaucuuggu

SEQ ID NO: 1770357 - RNA, 19 nt, Artificial Sequence
  Description of Artificial Sequence: Synthetic oligonucleotide
cuugugcuuuuccaggcgg

SEQ ID NO: 1770358 - RNA, 19 nt, Artificial Sequence
  Description of Artificial Sequence: Synthetic oligonucleotide
uuccucacagguuuccacc

SEQ ID NO: 1770359 - RNA, 19 nt, Artificial Sequence
  Description of Artificial Sequence: Synthetic oligonucleotide
uuacaguuagcaagugggu

SEQ ID NO: 1770360 - RNA, 19 nt, Artificial Sequence
  Description of Artificial Sequence: Synthetic oligonucleotide
gaguggaugaggauaggag

SEQ ID NO: 1770361 - RNA, 19 nt, Artificial Sequence
  Description of Artificial Sequence: Synthetic oligonucleotide
gguauaggcuguucgagag

SEQ ID NO: 1770362 - RNA, 19 nt, Artificial Sequence
  Description of Artificial Sequence: Synthetic oligonucleotide
ugugcccaagaauaagaca

SEQ ID NO: 1770363 - RNA, 19 nt, Artificial Sequence
  Description of Artificial Sequence: Synthetic oligonucleotide
ucucuauaacaauauuuua

SEQ ID NO: 1770364 - RNA, 19 nt, Artificial Sequence
  Description of Artificial Sequence: Synthetic oligonucleotide
gaagaucgcaucuuggugu

SEQ ID NO: 1770365 - RNA, 19 nt, Artificial Sequence
  Description of Artificial Sequence: Synthetic oligonucleotide
cucgccuccguuauaacug

SEQ ID NO: 1770366 - RNA, 19 nt, Artificial Sequence
  Description of Artificial Sequence: Synthetic oligonucleotide
acuggaagcugggaaaggg

SEQ ID NO: 1770367 - RNA, 19 nt, Artificial Sequence
  Description of Artificial Sequence: Synthetic oligonucleotide
aggguuggaagaucgcauc

SEQ ID NO: 1770368 - RNA, 19 nt, Artificial Sequence
  Description of Artificial Sequence: Synthetic oligonucleotide
acagacacuuaccagggau

SEQ ID NO: 1770369 - RNA, 19 nt, Artificial Sequence
  Description of Artificial Sequence: Synthetic oligonucleotide
ugccacaccuaccaucgag

SEQ ID NO: 1770370 - RNA, 19 nt, Artificial Sequence
  Description of Artificial Sequence: Synthetic oligonucleotide
acaacgauacaagugcaug

SEQ ID NO: 1770371 - RNA, 19 nt, Artificial Sequence
  Description of Artificial Sequence: Synthetic oligonucleotide
uacuacagccauaucacuu

SEQ ID NO: 1770372 - RNA, 19 nt, Artificial Sequence
  Description of Artificial Sequence: Synthetic oligonucleotide
uuuugguuaugguuuccac

SEQ ID NO: 1770373 - RNA, 19 nt, Artificial Sequence
  Description of Artificial Sequence: Synthetic oligonucleotide
uacaagugcauguccccag

SEQ ID NO: 1770374 - RNA, 19 nt, Artificial Sequence
  Description of Artificial Sequence: Synthetic oligonucleotide
gucuaaaugcauuucccuc

SEQ ID NO: 1770375 - RNA, 19 nt, Artificial Sequence
  Description of Artificial Sequence: Synthetic oligonucleotide
ucacaacgauacaagugca

SEQ ID NO: 1770376 - RNA, 19 nt, Artificial Sequence
  Description of Artificial Sequence: Synthetic oligonucleotide
guccacaaugucuacucag

SEQ ID NO: 1770377 - RNA, 19 nt, Artificial Sequence
  Description of Artificial Sequence: Synthetic oligonucleotide
uaucacuuuguuacaguua

SEQ ID NO: 1770378 - RNA, 19 nt, Artificial Sequence
  Description of Artificial Sequence: Synthetic oligonucleotide
caggcguagggacaggagg

SEQ ID NO: 1770379 - RNA, 19 nt, Artificial Sequence
  Description of Artificial Sequence: Synthetic oligonucleotide
aauaaucuggugaggucca

SEQ ID NO: 1770380 - RNA, 19 nt, Artificial Sequence
  Description of Artificial Sequence: Synthetic oligonucleotide
auaagcgcuuccucacagg

SEQ ID NO: 1770381 - RNA, 19 nt, Artificial Sequence
  Description of Artificial Sequence: Synthetic oligonucleotide
gagaauuaaauaaucuggu

SEQ ID NO: 1770382 - RNA, 19 nt, Artificial Sequence
  Description of Artificial Sequence: Synthetic oligonucleotide
accaucgaguucuacacau

SEQ ID NO: 1770383 - RNA, 19 nt, Artificial Sequence
  Description of Artificial Sequence: Synthetic oligonucleotide
acuacaugccacaccuacc

SEQ ID NO: 1770384 - RNA, 19 nt, Artificial Sequence
  Description of Artificial Sequence: Synthetic oligonucleotide
uuguuuuggugucugucau

SEQ ID NO: 1770385 - RNA, 19 nt, Artificial Sequence
  Description of Artificial Sequence: Synthetic oligonucleotide
acuacagccauaucacuuu

SEQ ID NO: 1770386 - RNA, 19 nt, Artificial Sequence
  Description of Artificial Sequence: Synthetic oligonucleotide
uccucuuggggauuacaca

SEQ ID NO: 1770387 - RNA, 19 nt, Artificial Sequence
  Description of Artificial Sequence: Synthetic oligonucleotide
ugauaagcgcuuccucaca

SEQ ID NO: 1770388 - RNA, 19 nt, Artificial Sequence
  Description of Artificial Sequence: Synthetic oligonucleotide
caagaauaagacaaucaua

SEQ ID NO: 1770389 - RNA, 19 nt, Artificial Sequence
  Description of Artificial Sequence: Synthetic oligonucleotide
uuaccagggauaauaucuu

SEQ ID NO: 1770390 - RNA, 19 nt, Artificial Sequence
  Description of Artificial Sequence: Synthetic oligonucleotide
gacaagcagagcgugugag

SEQ ID NO: 1770391 - RNA, 19 nt, Artificial Sequence
  Description of Artificial Sequence: Synthetic oligonucleotide
uguuuuggugucugucaug

SEQ ID NO: 1770392 - RNA, 19 nt, Artificial Sequence
  Description of Artificial Sequence: Synthetic oligonucleotide
uacacauuuugagaauuaa

SEQ ID NO: 1770393 - RNA, 19 nt, Artificial Sequence
  Description of Artificial Sequence: Synthetic oligonucleotide
cacuuuguuacaguuagca

SEQ ID NO: 1770394 - RNA, 19 nt, Artificial Sequence
  Description of Artificial Sequence: Synthetic oligonucleotide
aguaggcggggccuggcgg

SEQ ID NO: 1770395 - RNA, 19 nt, Artificial Sequence
  Description of Artificial Sequence: Synthetic oligonucleotide
uucugcuugucacaacgau

SEQ ID NO: 1770396 - RNA, 19 nt, Artificial Sequence
  Description of Artificial Sequence: Synthetic oligonucleotide
uuacuacagccauaucacu

SEQ ID NO: 1770397 - RNA, 19 nt, Artificial Sequence
  Description of Artificial Sequence: Synthetic oligonucleotide
uccucacagguuuccaccc

SEQ ID NO: 1770398 - RNA, 19 nt, Artificial Sequence
  Description of Artificial Sequence: Synthetic oligonucleotide
uaaaugcaaggagaggaaa

SEQ ID NO: 1770399 - RNA, 19 nt, Artificial Sequence
  Description of Artificial Sequence: Synthetic oligonucleotide
cuacaugccacaccuacca

SEQ ID NO: 1770400 - RNA, 19 nt, Artificial Sequence
  Description of Artificial Sequence: Synthetic oligonucleotide
acuuuguuacaguuagcaa

SEQ ID NO: 1770401 - RNA, 19 nt, Artificial Sequence
  Description of Artificial Sequence: Synthetic oligonucleotide
cucacguggaucuucuuca

SEQ ID NO: 1770402 - RNA, 19 nt, Artificial Sequence
  Description of Artificial Sequence: Synthetic oligonucleotide
aaagcucaugugagcugcc

SEQ ID NO: 1770403 - RNA, 19 nt, Artificial Sequence
  Description of Artificial Sequence: Synthetic oligonucleotide
acacagacacuuaccaggg

SEQ ID NO: 1770404 - RNA, 19 nt, Artificial Sequence
  Description of Artificial Sequence: Synthetic oligonucleotide
guuuccaccccuggcaagg

SEQ ID NO: 1770405 - RNA, 19 nt, Artificial Sequence
  Description of Artificial Sequence: Synthetic oligonucleotide
agcgcuuccucacagguuu

SEQ ID NO: 1770406 - RNA, 19 nt, Artificial Sequence
  Description of Artificial Sequence: Synthetic oligonucleotide
uugugaucuuucuuccacu

SEQ ID NO: 1770407 - RNA, 19 nt, Artificial Sequence
  Description of Artificial Sequence: Synthetic oligonucleotide
uacaguuagcaaguggguc

SEQ ID NO: 1770408 - RNA, 19 nt, Artificial Sequence
  Description of Artificial Sequence: Synthetic oligonucleotide
agugggucuaaaugcauuu

SEQ ID NO: 1770409 - RNA, 19 nt, Artificial Sequence
  Description of Artificial Sequence: Synthetic oligonucleotide
ugcauguccccagucagca

SEQ ID NO: 1770410 - RNA, 19 nt, Artificial Sequence
  Description of Artificial Sequence: Synthetic oligonucleotide
ucaaagccauuccaugaua

SEQ ID NO: 1770411 - RNA, 19 nt, Artificial Sequence
  Description of Artificial Sequence: Synthetic oligonucleotide
uccaugauaagcgcuuccu

SEQ ID NO: 1770412 - RNA, 19 nt, Artificial Sequence
  Description of Artificial Sequence: Synthetic oligonucleotide
ucgccuccguuauaacugg

SEQ ID NO: 1770413 - RNA, 19 nt, Artificial Sequence
  Description of Artificial Sequence: Synthetic oligonucleotide
cuaaaugcauuucccucuc

SEQ ID NO: 1770414 - RNA, 19 nt, Artificial Sequence
  Description of Artificial Sequence: Synthetic oligonucleotide
cugucaugguuuucuuggg

SEQ ID NO: 1770415 - RNA, 19 nt, Artificial Sequence
  Description of Artificial Sequence: Synthetic oligonucleotide
agggguacaccacgggcuc

SEQ ID NO: 1770416 - RNA, 19 nt, Artificial Sequence
  Description of Artificial Sequence: Synthetic oligonucleotide
gucuacucaguaaagcuca

SEQ ID NO: 1770417 - RNA, 19 nt, Artificial Sequence
  Description of Artificial Sequence: Synthetic oligonucleotide
ccucuuggggauuacacag

SEQ ID NO: 1770418 - RNA, 19 nt, Artificial Sequence
  Description of Artificial Sequence: Synthetic oligonucleotide
aagaucgcaucuugguguu

SEQ ID NO: 1770419 - RNA, 19 nt, Artificial Sequence
  Description of Artificial Sequence: Synthetic oligonucleotide
ggaagaucgcaucuuggug

SEQ ID NO: 1770420 - RNA, 19 nt, Artificial Sequence
  Description of Artificial Sequence: Synthetic oligonucleotide
accccuggcaagguugucc

SEQ ID NO: 1770421 - RNA, 19 nt, Artificial Sequence
  Description of Artificial Sequence: Synthetic oligonucleotide
ugugagcugccuuaaugua

SEQ ID NO: 1770422 - RNA, 19 nt, Artificial Sequence
  Description of Artificial Sequence: Synthetic oligonucleotide
uucuacacauuuugagaau

SEQ ID NO: 1770423 - RNA, 19 nt, Artificial Sequence
  Description of Artificial Sequence: Synthetic oligonucleotide
ucacuuuguuacaguuagc

SEQ ID NO: 1770424 - RNA, 19 nt, Artificial Sequence
  Description of Artificial Sequence: Synthetic oligonucleotide
ggaaacuacaugccacacc

SEQ ID NO: 1770425 - RNA, 19 nt, Artificial Sequence
  Description of Artificial Sequence: Synthetic oligonucleotide
ggauuacacagacacuuac

SEQ ID NO: 1770426 - RNA, 19 nt, Artificial Sequence
  Description of Artificial Sequence: Synthetic oligonucleotide
gguguugggaaguuuguga

SEQ ID NO: 1770427 - RNA, 19 nt, Artificial Sequence
  Description of Artificial Sequence: Synthetic oligonucleotide
ggcaagguuguccagguca

SEQ ID NO: 1770428 - RNA, 19 nt, Artificial Sequence
  Description of Artificial Sequence: Synthetic oligonucleotide
uaguaggcggggccuggcg

SEQ ID NO: 1770429 - RNA, 19 nt, Artificial Sequence
  Description of Artificial Sequence: Synthetic oligonucleotide
aagaccugcugccggguau

SEQ ID NO: 1770430 - RNA, 19 nt, Artificial Sequence
  Description of Artificial Sequence: Synthetic oligonucleotide
uccacuaggcaguguccag

SEQ ID NO: 1770431 - RNA, 19 nt, Artificial Sequence
  Description of Artificial Sequence: Synthetic oligonucleotide
augcaggguuggaagaucg

SEQ ID NO: 1770432 - RNA, 19 nt, Artificial Sequence
  Description of Artificial Sequence: Synthetic oligonucleotide
guacuggaagcugggaaag

SEQ ID NO: 1770433 - RNA, 19 nt, Artificial Sequence
  Description of Artificial Sequence: Synthetic oligonucleotide
agacaaucauaucucuaua

SEQ ID NO: 1770434 - RNA, 19 nt, Artificial Sequence
  Description of Artificial Sequence: Synthetic oligonucleotide
uccgccaguagcagcgggc

SEQ ID NO: 1770435 - RNA, 19 nt, Artificial Sequence
  Description of Artificial Sequence: Synthetic oligonucleotide
caagaauugugcccaagaa

SEQ ID NO: 1770436 - RNA, 19 nt, Artificial Sequence
  Description of Artificial Sequence: Synthetic oligonucleotide
uugacggcgcucacgugga

SEQ ID NO: 1770437 - RNA, 19 nt, Artificial Sequence
  Description of Artificial Sequence: Synthetic oligonucleotide
auaaaugcaaggagaggaa

SEQ ID NO: 1770438 - RNA, 19 nt, Artificial Sequence
  Description of Artificial Sequence: Synthetic oligonucleotide
ugcccuucgggcccaccgg

SEQ ID NO: 1770439 - RNA, 19 nt, Artificial Sequence
  Description of Artificial Sequence: Synthetic oligonucleotide
guagcagcgggcacgcggg

SEQ ID NO: 1770440 - RNA, 19 nt, Artificial Sequence
  Description of Artificial Sequence: Synthetic oligonucleotide
aggauaggagcaggggagg

SEQ ID NO: 1770441 - RNA, 19 nt, Artificial Sequence
  Description of Artificial Sequence: Synthetic oligonucleotide
ugcugccggguauaggcug

SEQ ID NO: 1770442 - RNA, 19 nt, Artificial Sequence
  Description of Artificial Sequence: Synthetic oligonucleotide
cagacaagcagagcgugug

SEQ ID NO: 1770443 - RNA, 19 nt, Artificial Sequence
  Description of Artificial Sequence: Synthetic oligonucleotide
uaccagggauaauaucuuc

SEQ ID NO: 1770444 - RNA, 19 nt, Artificial Sequence
  Description of Artificial Sequence: Synthetic oligonucleotide
uggggauuacacagacacu

SEQ ID NO: 1770445 - RNA, 19 nt, Artificial Sequence
  Description of Artificial Sequence: Synthetic oligonucleotide
ugcaggguuggaagaucgc

SEQ ID NO: 1770446 - RNA, 19 nt, Artificial Sequence
  Description of Artificial Sequence: Synthetic oligonucleotide
gccuuaauguagaagagga

SEQ ID NO: 1770447 - RNA, 19 nt, Artificial Sequence
  Description of Artificial Sequence: Synthetic oligonucleotide
acaagugcauguccccagu

SEQ ID NO: 1770448 - RNA, 19 nt, Artificial Sequence
  Description of Artificial Sequence: Synthetic oligonucleotide
uaaucuggugagguccaca

SEQ ID NO: 1770449 - RNA, 19 nt, Artificial Sequence
  Description of Artificial Sequence: Synthetic oligonucleotide
ugcccaagaauaagacaau

SEQ ID NO: 1770450 - RNA, 19 nt, Artificial Sequence
  Description of Artificial Sequence: Synthetic oligonucleotide
augguuuucuuggggagga

SEQ ID NO: 1770451 - RNA, 19 nt, Artificial Sequence
  Description of Artificial Sequence: Synthetic oligonucleotide
auacaagugcaugucccca

SEQ ID NO: 1770452 - RNA, 19 nt, Artificial Sequence
  Description of Artificial Sequence: Synthetic oligonucleotide
aucgcaucuugguguuggg

SEQ ID NO: 1770453 - RNA, 19 nt, Artificial Sequence
  Description of Artificial Sequence: Synthetic oligonucleotide
gucgcgacagccggggugg

SEQ ID NO: 1770454 - RNA, 19 nt, Artificial Sequence
  Description of Artificial Sequence: Synthetic oligonucleotide
gguacuggaagcugggaaa

SEQ ID NO: 1770455 - RNA, 19 nt, Artificial Sequence
  Description of Artificial Sequence: Synthetic oligonucleotide
cgauacaagugcauguccc

SEQ ID NO: 1770456 - RNA, 19 nt, Artificial Sequence
  Description of Artificial Sequence: Synthetic oligonucleotide
ucuacucaguaaagcucau

SEQ ID NO: 1770457 - RNA, 19 nt, Artificial Sequence
  Description of Artificial Sequence: Synthetic oligonucleotide
gccgaugcaggguuggaag

SEQ ID NO: 1770458 - RNA, 19 nt, Artificial Sequence
  Description of Artificial Sequence: Synthetic oligonucleotide
uccuuuuacuacagccaua

SEQ ID NO: 1770459 - RNA, 19 nt, Artificial Sequence
  Description of Artificial Sequence: Synthetic oligonucleotide
gaauugugcccaagaauaa

SEQ ID NO: 1770460 - RNA, 19 nt, Artificial Sequence
  Description of Artificial Sequence: Synthetic oligonucleotide
gcagguucgggcuggcagg

SEQ ID NO: 1770461 - RNA, 19 nt, Artificial Sequence
  Description of Artificial Sequence: Synthetic oligonucleotide
uuguuacaguuagcaagug

SEQ ID NO: 1770462 - RNA, 19 nt, Artificial Sequence
  Description of Artificial Sequence: Synthetic oligonucleotide
aggaagguacuggaagcug

SEQ ID NO: 1770463 - RNA, 19 nt, Artificial Sequence
  Description of Artificial Sequence: Synthetic oligonucleotide
gccggguauaggcuguucg

SEQ ID NO: 1770464 - RNA, 19 nt, Artificial Sequence
  Description of Artificial Sequence: Synthetic oligonucleotide
aagugggucuaaaugcauu

SEQ ID NO: 1770465 - RNA, 19 nt, Artificial Sequence
  Description of Artificial Sequence: Synthetic oligonucleotide
ugcggggccgggcugggug

SEQ ID NO: 1770466 - RNA, 19 nt, Artificial Sequence
  Description of Artificial Sequence: Synthetic oligonucleotide
aagguacuggaagcuggga

SEQ ID NO: 1770467 - RNA, 19 nt, Artificial Sequence
  Description of Artificial Sequence: Synthetic oligonucleotide
ugguuaugguuuccaccaa

SEQ ID NO: 1770468 - RNA, 19 nt, Artificial Sequence
  Description of Artificial Sequence: Synthetic oligonucleotide
gugaucuuucuuccacuuc

SEQ ID NO: 1770469 - RNA, 19 nt, Artificial Sequence
  Description of Artificial Sequence: Synthetic oligonucleotide
ugagguccacaaugucuac

SEQ ID NO: 1770470 - RNA, 19 nt, Artificial Sequence
  Description of Artificial Sequence: Synthetic oligonucleotide
cuguucgagagcgcuuggg

SEQ ID NO: 1770471 - RNA, 19 nt, Artificial Sequence
  Description of Artificial Sequence: Synthetic oligonucleotide
gguucgggcuggcaggugc

SEQ ID NO: 1770472 - RNA, 19 nt, Artificial Sequence
  Description of Artificial Sequence: Synthetic oligonucleotide
ccuaccaucgaguucuaca

SEQ ID NO: 1770473 - RNA, 19 nt, Artificial Sequence
  Description of Artificial Sequence: Synthetic oligonucleotide
caacgauacaagugcaugu

SEQ ID NO: 1770474 - RNA, 19 nt, Artificial Sequence
  Description of Artificial Sequence: Synthetic oligonucleotide
uguccucuuggggauuaca

SEQ ID NO: 1770475 - RNA, 19 nt, Artificial Sequence
  Description of Artificial Sequence: Synthetic oligonucleotide
gccauuccaugauaagcgc

SEQ ID NO: 1770476 - RNA, 19 nt, Artificial Sequence
  Description of Artificial Sequence: Synthetic oligonucleotide
gugagguccacaaugucua

SEQ ID NO: 1770477 - RNA, 19 nt, Artificial Sequence
  Description of Artificial Sequence: Synthetic oligonucleotide
uucuucugcuugucacaac

SEQ ID NO: 1770478 - RNA, 19 nt, Artificial Sequence
  Description of Artificial Sequence: Synthetic oligonucleotide
uacaugccacaccuaccau

SEQ ID NO: 1770479 - RNA, 19 nt, Artificial Sequence
  Description of Artificial Sequence: Synthetic oligonucleotide
cacaccuaccaucgaguuc

SEQ ID NO: 1770480 - RNA, 19 nt, Artificial Sequence
  Description of Artificial Sequence: Synthetic oligonucleotide
gucugcucgggucgcgcgg

SEQ ID NO: 1770481 - RNA, 19 nt, Artificial Sequence
  Description of Artificial Sequence: Synthetic oligonucleotide
cauaucacuuuguuacagu

SEQ ID NO: 1770482 - RNA, 19 nt, Artificial Sequence
  Description of Artificial Sequence: Synthetic oligonucleotide
cuacucaguaaagcucaug

SEQ ID NO: 1770483 - RNA, 19 nt, Artificial Sequence
  Description of Artificial Sequence: Synthetic oligonucleotide
cagcagguuguuccacuag

SEQ ID NO: 1770484 - RNA, 19 nt, Artificial Sequence
  Description of Artificial Sequence: Synthetic oligonucleotide
gcuccuugcccuucgggcc

SEQ ID NO: 1770485 - RNA, 19 nt, Artificial Sequence
  Description of Artificial Sequence: Synthetic oligonucleotide
cugguccgccaguagcagc

SEQ ID NO: 1770486 - RNA, 19 nt, Artificial Sequence
  Description of Artificial Sequence: Synthetic oligonucleotide
ggguagcuggccucgcgcg

SEQ ID NO: 1770487 - RNA, 19 nt, Artificial Sequence
  Description of Artificial Sequence: Synthetic oligonucleotide
gccaguagcagcgggcacg

SEQ ID NO: 1770488 - RNA, 19 nt, Artificial Sequence
  Description of Artificial Sequence: Synthetic oligonucleotide
caagugcauguccccaguc

SEQ ID NO: 1770489 - RNA, 19 nt, Artificial Sequence
  Description of Artificial Sequence: Synthetic oligonucleotide
ggucuaaaugcauuucccu

SEQ ID NO: 1770490 - RNA, 19 nt, Artificial Sequence
  Description of Artificial Sequence: Synthetic oligonucleotide
aacugggguugacggcgcu

SEQ ID NO: 1770491 - RNA, 19 nt, Artificial Sequence
  Description of Artificial Sequence: Synthetic oligonucleotide
cacuaggcaguguccagga

SEQ ID NO: 1770492 - RNA, 19 nt, Artificial Sequence
  Description of Artificial Sequence: Synthetic oligonucleotide
gcucacguggaucuucuuc

SEQ ID NO: 1770493 - RNA, 19 nt, Artificial Sequence
  Description of Artificial Sequence: Synthetic oligonucleotide
cuuggggauuacacagaca

SEQ ID NO: 1770494 - RNA, 19 nt, Artificial Sequence
  Description of Artificial Sequence: Synthetic oligonucleotide
cauuccaugauaagcgcuu

SEQ ID NO: 1770495 - RNA, 19 nt, Artificial Sequence
  Description of Artificial Sequence: Synthetic oligonucleotide
gcuugucacaacgauacaa

SEQ ID NO: 1770496 - RNA, 19 nt, Artificial Sequence
  Description of Artificial Sequence: Synthetic oligonucleotide
ggguauaggcuguucgaga

SEQ ID NO: 1770497 - RNA, 19 nt, Artificial Sequence
  Description of Artificial Sequence: Synthetic oligonucleotide
uuuuccaggcgggccggca

SEQ ID NO: 1770498 - RNA, 19 nt, Artificial Sequence
  Description of Artificial Sequence: Synthetic oligonucleotide
cagacacuuaccagggaua

SEQ ID NO: 1770499 - RNA, 19 nt, Artificial Sequence
  Description of Artificial Sequence: Synthetic oligonucleotide
guacaccacgggcuccuug

SEQ ID NO: 1770500 - RNA, 19 nt, Artificial Sequence
  Description of Artificial Sequence: Synthetic oligonucleotide
acagccgggguggcagggc

SEQ ID NO: 1770501 - RNA, 19 nt, Artificial Sequence
  Description of Artificial Sequence: Synthetic oligonucleotide
gacagccgggguggcaggg

SEQ ID NO: 1770502 - RNA, 19 nt, Artificial Sequence
  Description of Artificial Sequence: Synthetic oligonucleotide
guucgggcuggcaggugcg

SEQ ID NO: 1770503 - RNA, 19 nt, Artificial Sequence
  Description of Artificial Sequence: Synthetic oligonucleotide
gcaaggagaggaaacuaca

SEQ ID NO: 1770504 - RNA, 19 nt, Artificial Sequence
  Description of Artificial Sequence: Synthetic oligonucleotide
ggaggaguggaugaggaua

SEQ ID NO: 1770505 - RNA, 19 nt, Artificial Sequence
  Description of Artificial Sequence: Synthetic oligonucleotide
ccaagaauugugcccaaga

SEQ ID NO: 1770506 - RNA, 19 nt, Artificial Sequence
  Description of Artificial Sequence: Synthetic oligonucleotide
gcaagugggucuaaaugca

SEQ ID NO: 1770507 - RNA, 19 nt, Artificial Sequence
  Description of Artificial Sequence: Synthetic oligonucleotide
cacguggaucuucuucauc

SEQ ID NO: 1770508 - RNA, 19 nt, Artificial Sequence
  Description of Artificial Sequence: Synthetic oligonucleotide
augcaaggagaggaaacua

SEQ ID NO: 1770509 - RNA, 19 nt, Artificial Sequence
  Description of Artificial Sequence: Synthetic oligonucleotide
cugggugcgcgccggggcc

SEQ ID NO: 1770510 - RNA, 19 nt, Artificial Sequence
  Description of Artificial Sequence: Synthetic oligonucleotide
accuaccaucgaguucuac

SEQ ID NO: 1770511 - RNA, 19 nt, Artificial Sequence
  Description of Artificial Sequence: Synthetic oligonucleotide
ggcuguucgagagcgcuug

SEQ ID NO: 1770512 - RNA, 19 nt, Artificial Sequence
  Description of Artificial Sequence: Synthetic oligonucleotide
guuagcaagugggucuaaa

SEQ ID NO: 1770513 - RNA, 19 nt, Artificial Sequence
  Description of Artificial Sequence: Synthetic oligonucleotide
gggaaguuugugaucuuuc

SEQ ID NO: 1770514 - RNA, 19 nt, Artificial Sequence
  Description of Artificial Sequence: Synthetic oligonucleotide
ugcuguccugcugacucaa

SEQ ID NO: 1770515 - RNA, 19 nt, Artificial Sequence
  Description of Artificial Sequence: Synthetic oligonucleotide
ggaguggaugaggauagga

SEQ ID NO: 1770516 - RNA, 19 nt, Artificial Sequence
  Description of Artificial Sequence: Synthetic oligonucleotide
caucgaguucuacacauuu

SEQ ID NO: 1770517 - RNA, 19 nt, Artificial Sequence
  Description of Artificial Sequence: Synthetic oligonucleotide
ggucugcucgggucgcgcg

SEQ ID NO: 1770518 - RNA, 19 nt, Artificial Sequence
  Description of Artificial Sequence: Synthetic oligonucleotide
gggguagcuggccucgcgc

SEQ ID NO: 1770519 - RNA, 19 nt, Artificial Sequence
  Description of Artificial Sequence: Synthetic oligonucleotide
cuucgggcccaccggcccc

SEQ ID NO: 1770520 - RNA, 19 nt, Artificial Sequence
  Description of Artificial Sequence: Synthetic oligonucleotide
aucgaguucuacacauuuu

SEQ ID NO: 1770521 - RNA, 19 nt, Artificial Sequence
  Description of Artificial Sequence: Synthetic oligonucleotide
ggcguagggacaggaggcg

SEQ ID NO: 1770522 - RNA, 19 nt, Artificial Sequence
  Description of Artificial Sequence: Synthetic oligonucleotide
gguuguuccacuaggcagu

SEQ ID NO: 1770523 - RNA, 19 nt, Artificial Sequence
  Description of Artificial Sequence: Synthetic oligonucleotide
ccacuaggcaguguccagg

SEQ ID NO: 1770524 - RNA, 19 nt, Artificial Sequence
  Description of Artificial Sequence: Synthetic oligonucleotide
gccauaucacuuuguuaca

SEQ ID NO: 1770525 - RNA, 19 nt, Artificial Sequence
  Description of Artificial Sequence: Synthetic oligonucleotide
ccaugauaagcgcuuccuc

SEQ ID NO: 1770526 - RNA, 19 nt, Artificial Sequence
  Description of Artificial Sequence: Synthetic oligonucleotide
aaacuacaugccacaccua

SEQ ID NO: 1770527 - RNA, 19 nt, Artificial Sequence
  Description of Artificial Sequence: Synthetic oligonucleotide
uggcgggcagcgugcaggu

SEQ ID NO: 1770528 - RNA, 19 nt, Artificial Sequence
  Description of Artificial Sequence: Synthetic oligonucleotide
gacggcgcucacguggauc

SEQ ID NO: 1770529 - RNA, 19 nt, Artificial Sequence
  Description of Artificial Sequence: Synthetic oligonucleotide
uugggaaguuugugaucuu

SEQ ID NO: 1770530 - RNA, 19 nt, Artificial Sequence
  Description of Artificial Sequence: Synthetic oligonucleotide
gcuguucgagagcgcuugg

SEQ ID NO: 1770531 - RNA, 19 nt, Artificial Sequence
  Description of Artificial Sequence: Synthetic oligonucleotide
cugggguugacggcgcuca

SEQ ID NO: 1770532 - RNA, 19 nt, Artificial Sequence
  Description of Artificial Sequence: Synthetic oligonucleotide
gcccgcggcgcguaguagg

SEQ ID NO: 1770533 - RNA, 19 nt, Artificial Sequence
  Description of Artificial Sequence: Synthetic oligonucleotide
gcaggguuggaagaucgca

SEQ ID NO: 1770534 - RNA, 19 nt, Artificial Sequence
  Description of Artificial Sequence: Synthetic oligonucleotide
guaguaggcggggccuggc

SEQ ID NO: 1770535 - RNA, 19 nt, Artificial Sequence
  Description of Artificial Sequence: Synthetic oligonucleotide
cacuuaccagggauaauau

SEQ ID NO: 1770536 - RNA, 19 nt, Artificial Sequence
  Description of Artificial Sequence: Synthetic oligonucleotide
gcgggcagcgugcagguuc

SEQ ID NO: 1770537 - RNA, 19 nt, Artificial Sequence
  Description of Artificial Sequence: Synthetic oligonucleotide
aagcgcuuccucacagguu

SEQ ID NO: 1770538 - RNA, 19 nt, Artificial Sequence
  Description of Artificial Sequence: Synthetic oligonucleotide
cacaacgauacaagugcau

SEQ ID NO: 1770539 - RNA, 19 nt, Artificial Sequence
  Description of Artificial Sequence: Synthetic oligonucleotide
ggcaguguccaggacaucu

SEQ ID NO: 1770540 - RNA, 19 nt, Artificial Sequence
  Description of Artificial Sequence: Synthetic oligonucleotide
ugggguugacggcgcucac

SEQ ID NO: 1770541 - RNA, 19 nt, Artificial Sequence
  Description of Artificial Sequence: Synthetic oligonucleotide
gggcgcgggguacaggccc

SEQ ID NO: 1770542 - RNA, 19 nt, Artificial Sequence
  Description of Artificial Sequence: Synthetic oligonucleotide
uuccaccccuggcaagguu

SEQ ID NO: 1770543 - RNA, 19 nt, Artificial Sequence
  Description of Artificial Sequence: Synthetic oligonucleotide
caggguuggaagaucgcau

SEQ ID NO: 1770544 - RNA, 19 nt, Artificial Sequence
  Description of Artificial Sequence: Synthetic oligonucleotide
ccuuaauguagaagaggaa

SEQ ID NO: 1770545 - RNA, 19 nt, Artificial Sequence
  Description of Artificial Sequence: Synthetic oligonucleotide
gaccuggcgcucagacaag

SEQ ID NO: 1770546 - RNA, 19 nt, Artificial Sequence
  Description of Artificial Sequence: Synthetic oligonucleotide
cucacagguuuccaccccu

SEQ ID NO: 1770547 - RNA, 19 nt, Artificial Sequence
  Description of Artificial Sequence: Synthetic oligonucleotide
ggggcgugugggcuugugc

SEQ ID NO: 1770548 - RNA, 19 nt, Artificial Sequence
  Description of Artificial Sequence: Synthetic oligonucleotide
agaucgcaucuugguguug

SEQ ID NO: 1770549 - RNA, 19 nt, Artificial Sequence
  Description of Artificial Sequence: Synthetic oligonucleotide
ggcagcgugcagguucggg

SEQ ID NO: 1770550 - RNA, 19 nt, Artificial Sequence
  Description of Artificial Sequence: Synthetic oligonucleotide
gcgacagccgggguggcag

SEQ ID NO: 1770551 - RNA, 19 nt, Artificial Sequence
  Description of Artificial Sequence: Synthetic oligonucleotide
ggguugacggcgcucacgu

SEQ ID NO: 1770552 - RNA, 19 nt, Artificial Sequence
  Description of Artificial Sequence: Synthetic oligonucleotide
cucaugugagcugccuuaa

SEQ ID NO: 1770553 - RNA, 19 nt, Artificial Sequence
  Description of Artificial Sequence: Synthetic oligonucleotide
caccaaguugaauuuuguu

SEQ ID NO: 1770554 - RNA, 19 nt, Artificial Sequence
  Description of Artificial Sequence: Synthetic oligonucleotide
cacagacacuuaccaggga

SEQ ID NO: 1770555 - RNA, 19 nt, Artificial Sequence
  Description of Artificial Sequence: Synthetic oligonucleotide
ccggggucugcucgggucg

SEQ ID NO: 1770556 - RNA, 19 nt, Artificial Sequence
  Description of Artificial Sequence: Synthetic oligonucleotide
gcguagggacaggaggcgg

SEQ ID NO: 1770557 - RNA, 19 nt, Artificial Sequence
  Description of Artificial Sequence: Synthetic oligonucleotide
cuuuuccaggcgggccggc

SEQ ID NO: 1770558 - RNA, 19 nt, Artificial Sequence
  Description of Artificial Sequence: Synthetic oligonucleotide
ggucgcgcgggcuggcgcc

SEQ ID NO: 1770559 - RNA, 19 nt, Artificial Sequence
  Description of Artificial Sequence: Synthetic oligonucleotide
ggguuggaagaucgcaucu

SEQ ID NO: 1770560 - RNA, 19 nt, Artificial Sequence
  Description of Artificial Sequence: Synthetic oligonucleotide
augccacaccuaccaucga

SEQ ID NO: 1770561 - RNA, 19 nt, Artificial Sequence
  Description of Artificial Sequence: Synthetic oligonucleotide
gggcgugugggcuugugcu

SEQ ID NO: 1770562 - RNA, 19 nt, Artificial Sequence
  Description of Artificial Sequence: Synthetic oligonucleotide
gcgcguaguaggcggggcc

SEQ ID NO: 1770563 - RNA, 19 nt, Artificial Sequence
  Description of Artificial Sequence: Synthetic oligonucleotide
cagggauaauaucuucuuu

SEQ ID NO: 1770564 - RNA, 19 nt, Artificial Sequence
  Description of Artificial Sequence: Synthetic oligonucleotide
cgcaucuugguguugggaa

SEQ ID NO: 1770565 - RNA, 19 nt, Artificial Sequence
  Description of Artificial Sequence: Synthetic oligonucleotide
ccaguagcagcgggcacgc

SEQ ID NO: 1770566 - RNA, 19 nt, Artificial Sequence
  Description of Artificial Sequence: Synthetic oligonucleotide
caguuagcaagugggucua

SEQ ID NO: 1770567 - RNA, 19 nt, Artificial Sequence
  Description of Artificial Sequence: Synthetic oligonucleotide
gcaggcguagggacaggag

SEQ ID NO: 1770568 - RNA, 19 nt, Artificial Sequence
  Description of Artificial Sequence: Synthetic oligonucleotide
ugcgcgccggggccggggu

SEQ ID NO: 1770569 - RNA, 19 nt, Artificial Sequence
  Description of Artificial Sequence: Synthetic oligonucleotide
cggagcgcagugccgaggg

SEQ ID NO: 1770570 - RNA, 19 nt, Artificial Sequence
  Description of Artificial Sequence: Synthetic oligonucleotide
gcggcaggcguagggacag

SEQ ID NO: 1770571 - RNA, 19 nt, Artificial Sequence
  Description of Artificial Sequence: Synthetic oligonucleotide
ggggccggggucugcucgg

SEQ ID NO: 1770572 - RNA, 19 nt, Artificial Sequence
  Description of Artificial Sequence: Synthetic oligonucleotide
cccaccggccccugguccg

SEQ ID NO: 1770573 - RNA, 19 nt, Artificial Sequence
  Description of Artificial Sequence: Synthetic oligonucleotide
uaggcggggccuggcgggc

SEQ ID NO: 1770574 - RNA, 19 nt, Artificial Sequence
  Description of Artificial Sequence: Synthetic oligonucleotide
ggauaggagcaggggagga

SEQ ID NO: 1770575 - RNA, 19 nt, Artificial Sequence
  Description of Artificial Sequence: Synthetic oligonucleotide
aguuagcaagugggucuaa

SEQ ID NO: 1770576 - RNA, 19 nt, Artificial Sequence
  Description of Artificial Sequence: Synthetic oligonucleotide
cggguauaggcuguucgag

SEQ ID NO: 1770577 - RNA, 19 nt, Artificial Sequence
  Description of Artificial Sequence: Synthetic oligonucleotide
ccggguauaggcuguucga

SEQ ID NO: 1770578 - RNA, 19 nt, Artificial Sequence
  Description of Artificial Sequence: Synthetic oligonucleotide
ggucagcagguuguuccac

SEQ ID NO: 1770579 - RNA, 19 nt, Artificial Sequence
  Description of Artificial Sequence: Synthetic oligonucleotide
ugcucgggucgcgcgggcu

SEQ ID NO: 1770580 - RNA, 19 nt, Artificial Sequence
  Description of Artificial Sequence: Synthetic oligonucleotide
ugacggcgcucacguggau

SEQ ID NO: 1770581 - RNA, 19 nt, Artificial Sequence
  Description of Artificial Sequence: Synthetic oligonucleotide
gcucgggucgcgcgggcug

SEQ ID NO: 1770582 - RNA, 19 nt, Artificial Sequence
  Description of Artificial Sequence: Synthetic oligonucleotide
gcccuucgggcccaccggc

SEQ ID NO: 1770583 - RNA, 19 nt, Artificial Sequence
  Description of Artificial Sequence: Synthetic oligonucleotide
cccaagaauugugcccaag

SEQ ID NO: 1770584 - RNA, 19 nt, Artificial Sequence
  Description of Artificial Sequence: Synthetic oligonucleotide
cccgcggcgcguaguaggc

SEQ ID NO: 1770585 - RNA, 19 nt, Artificial Sequence
  Description of Artificial Sequence: Synthetic oligonucleotide
ugccggguauaggcuguuc

SEQ ID NO: 1770586 - RNA, 19 nt, Artificial Sequence
  Description of Artificial Sequence: Synthetic oligonucleotide
ccauuccaugauaagcgcu

SEQ ID NO: 1770587 - RNA, 19 nt, Artificial Sequence
  Description of Artificial Sequence: Synthetic oligonucleotide
gcgugcagguucgggcugg

SEQ ID NO: 1770588 - RNA, 19 nt, Artificial Sequence
  Description of Artificial Sequence: Synthetic oligonucleotide
cuugcccuucgggcccacc

SEQ ID NO: 1770589 - RNA, 19 nt, Artificial Sequence
  Description of Artificial Sequence: Synthetic oligonucleotide
cccugguccgccaguagca

SEQ ID NO: 1770590 - RNA, 19 nt, Artificial Sequence
  Description of Artificial Sequence: Synthetic oligonucleotide
ccggcaggggccgaugcag

SEQ ID NO: 1770591 - RNA, 19 nt, Artificial Sequence
  Description of Artificial Sequence: Synthetic oligonucleotide
gacacuuaccagggauaau

SEQ ID NO: 1770592 - RNA, 19 nt, Artificial Sequence
  Description of Artificial Sequence: Synthetic oligonucleotide
caagaccugcugccgggua

SEQ ID NO: 1770593 - RNA, 19 nt, Artificial Sequence
  Description of Artificial Sequence: Synthetic oligonucleotide
cuguccucuuggggauuac

SEQ ID NO: 1770594 - RNA, 19 nt, Artificial Sequence
  Description of Artificial Sequence: Synthetic oligonucleotide
gcuggcgccgcggcaggcg

SEQ ID NO: 1770595 - RNA, 19 nt, Artificial Sequence
  Description of Artificial Sequence: Synthetic oligonucleotide
gguccgccaguagcagcgg

SEQ ID NO: 1770596 - RNA, 19 nt, Artificial Sequence
  Description of Artificial Sequence: Synthetic oligonucleotide
ggcugcggggccgggcugg

SEQ ID NO: 1770597 - RNA, 19 nt, Artificial Sequence
  Description of Artificial Sequence: Synthetic oligonucleotide
ggcaggcguagggacagga

SEQ ID NO: 1770598 - RNA, 19 nt, Artificial Sequence
  Description of Artificial Sequence: Synthetic oligonucleotide
cguuauaacugggguugac

SEQ ID NO: 1770599 - RNA, 19 nt, Artificial Sequence
  Description of Artificial Sequence: Synthetic oligonucleotide
gggucgcgcgggcuggcgc

SEQ ID NO: 1770600 - RNA, 19 nt, Artificial Sequence
  Description of Artificial Sequence: Synthetic oligonucleotide
augcggcgccgccggguca

SEQ ID NO: 1770601 - RNA, 19 nt, Artificial Sequence
  Description of Artificial Sequence: Synthetic oligonucleotide
agguucgggcuggcaggug

SEQ ID NO: 1770602 - RNA, 19 nt, Artificial Sequence
  Description of Artificial Sequence: Synthetic oligonucleotide
caguagcagcgggcacgcg

SEQ ID NO: 1770603 - RNA, 19 nt, Artificial Sequence
  Description of Artificial Sequence: Synthetic oligonucleotide
cccgggguagcuggccucg

SEQ ID NO: 1770604 - RNA, 19 nt, Artificial Sequence
  Description of Artificial Sequence: Synthetic oligonucleotide
ggcucgccuccguuauaac

SEQ ID NO: 1770605 - RNA, 19 nt, Artificial Sequence
  Description of Artificial Sequence: Synthetic oligonucleotide
gggguacaccacgggcucc

SEQ ID NO: 1770606 - RNA, 19 nt, Artificial Sequence
  Description of Artificial Sequence: Synthetic oligonucleotide
cgucgcgacagccggggug

SEQ ID NO: 1770607 - RNA, 19 nt, Artificial Sequence
  Description of Artificial Sequence: Synthetic oligonucleotide
gccacaccuaccaucgagu

SEQ ID NO: 1770608 - RNA, 19 nt, Artificial Sequence
  Description of Artificial Sequence: Synthetic oligonucleotide
cguaguaggcggggccugg

SEQ ID NO: 1770609 - RNA, 19 nt, Artificial Sequence
  Description of Artificial Sequence: Synthetic oligonucleotide
ccgcggcaggcguagggac

SEQ ID NO: 1770610 - RNA, 19 nt, Artificial Sequence
  Description of Artificial Sequence: Synthetic oligonucleotide
aggcuguucgagagcgcuu

SEQ ID NO: 1770611 - RNA, 19 nt, Artificial Sequence
  Description of Artificial Sequence: Synthetic oligonucleotide
gguuggaagaucgcaucuu

SEQ ID NO: 1770612 - RNA, 19 nt, Artificial Sequence
  Description of Artificial Sequence: Synthetic oligonucleotide
gcggcgcguaguaggcggg

SEQ ID NO: 1770613 - RNA, 19 nt, Artificial Sequence
  Description of Artificial Sequence: Synthetic oligonucleotide
gcggggccgggcugggugc

SEQ ID NO: 1770614 - RNA, 19 nt, Artificial Sequence
  Description of Artificial Sequence: Synthetic oligonucleotide
gugcgcgccggggccgggg

SEQ ID NO: 1770615 - RNA, 19 nt, Artificial Sequence
  Description of Artificial Sequence: Synthetic oligonucleotide
gccccugguccgccaguag

SEQ ID NO: 1770616 - RNA, 19 nt, Artificial Sequence
  Description of Artificial Sequence: Synthetic oligonucleotide
gcguaguaggcggggccug

SEQ ID NO: 1770617 - RNA, 19 nt, Artificial Sequence
  Description of Artificial Sequence: Synthetic oligonucleotide
ucgcgacagccgggguggc

SEQ ID NO: 1770618 - RNA, 19 nt, Artificial Sequence
  Description of Artificial Sequence: Synthetic oligonucleotide
cgccuccguuauaacuggg

SEQ ID NO: 1770619 - RNA, 19 nt, Artificial Sequence
  Description of Artificial Sequence: Synthetic oligonucleotide
ggggucugcucgggucgcg

SEQ ID NO: 1770620 - RNA, 19 nt, Artificial Sequence
  Description of Artificial Sequence: Synthetic oligonucleotide
cagcgggcacgcggggcgc

SEQ ID NO: 1770621 - RNA, 19 nt, Artificial Sequence
  Description of Artificial Sequence: Synthetic oligonucleotide
ggcccggagcgcagugccg

SEQ ID NO: 1770622 - RNA, 19 nt, Artificial Sequence
  Description of Artificial Sequence: Synthetic oligonucleotide
ggcgcgggguacaggcccc

SEQ ID NO: 1770623 - RNA, 19 nt, Artificial Sequence
  Description of Artificial Sequence: Synthetic oligonucleotide
ccggagcgcagugccgagg

SEQ ID NO: 1770624 - RNA, 19 nt, Artificial Sequence
  Description of Artificial Sequence: Synthetic oligonucleotide
gccggcaggggccgaugca

SEQ ID NO: 1770625 - RNA, 19 nt, Artificial Sequence
  Description of Artificial Sequence: Synthetic oligonucleotide
gccgcggcaggcguaggga

SEQ ID NO: 1770626 - RNA, 19 nt, Artificial Sequence
  Description of Artificial Sequence: Synthetic oligonucleotide
cccggagcgcagugccgag

SEQ ID NO: 1770627 - RNA, 19 nt, Artificial Sequence
  Description of Artificial Sequence: Synthetic oligonucleotide
ucgcgcgggcuggcgccgc

SEQ ID NO: 1770628 - RNA, 19 nt, Artificial Sequence
  Description of Artificial Sequence: Synthetic oligonucleotide
ggcccaccggccccugguc

SEQ ID NO: 1770629 - RNA, 19 nt, Artificial Sequence
  Description of Artificial Sequence: Synthetic oligonucleotide
cgacagccgggguggcagg

SEQ ID NO: 1770630 - RNA, 19 nt, Artificial Sequence
  Description of Artificial Sequence: Synthetic oligonucleotide
ggguacaccacgggcuccu

SEQ ID NO: 1770631 - RNA, 19 nt, Artificial Sequence
  Description of Artificial Sequence: Synthetic oligonucleotide
caccggccccugguccgcc

SEQ ID NO: 1770632 - RNA, 19 nt, Artificial Sequence
  Description of Artificial Sequence: Synthetic oligonucleotide
ccccgucgcgacagccggg

SEQ ID NO: 1770633 - RNA, 19 nt, Artificial Sequence
  Description of Artificial Sequence: Synthetic oligonucleotide
cgccgcggcaggcguaggg

SEQ ID NO: 1770634 - RNA, 19 nt, Artificial Sequence
  Description of Artificial Sequence: Synthetic oligonucleotide
ccgccaguagcagcgggca

SEQ ID NO: 1770635 - RNA, 19 nt, Artificial Sequence
  Description of Artificial Sequence: Synthetic oligonucleotide
ggcacgcggggcgcugccc

SEQ ID NO: 1770636 - RNA, 19 nt, Artificial Sequence
  Description of Artificial Sequence: Synthetic oligonucleotide
ggcgugugggcuugugcuu

SEQ ID NO: 1770637 - RNA, 19 nt, Artificial Sequence
  Description of Artificial Sequence: Synthetic oligonucleotide
gcugcggggccgggcuggg

SEQ ID NO: 1770638 - RNA, 19 nt, Artificial Sequence
  Description of Artificial Sequence: Synthetic oligonucleotide
cuggcgccgcggcaggcgu

SEQ ID NO: 1770639 - RNA, 19 nt, Artificial Sequence
  Description of Artificial Sequence: Synthetic oligonucleotide
caccuaccaucgaguucua

SEQ ID NO: 1770640 - RNA, 19 nt, Artificial Sequence
  Description of Artificial Sequence: Synthetic oligonucleotide
ccacaccuaccaucgaguu

SEQ ID NO: 1770641 - RNA, 19 nt, Artificial Sequence
  Description of Artificial Sequence: Synthetic oligonucleotide
cugcugacucaaagccauu

SEQ ID NO: 1770642 - RNA, 19 nt, Artificial Sequence
  Description of Artificial Sequence: Synthetic oligonucleotide
ccgcggcgcguaguaggcg

SEQ ID NO: 1770643 - RNA, 19 nt, Artificial Sequence
  Description of Artificial Sequence: Synthetic oligonucleotide
cgcggcaggcguagggaca

SEQ ID NO: 1770644 - RNA, 19 nt, Artificial Sequence
  Description of Artificial Sequence: Synthetic oligonucleotide
ggcggcgggcgcgggguac

SEQ ID NO: 1770645 - RNA, 19 nt, Artificial Sequence
  Description of Artificial Sequence: Synthetic oligonucleotide
gcgcucacguggaucuucu

SEQ ID NO: 1770646 - RNA, 19 nt, Artificial Sequence
  Description of Artificial Sequence: Synthetic oligonucleotide
ccaccggccccugguccgc

SEQ ID NO: 1770647 - RNA, 19 nt, Artificial Sequence
  Description of Artificial Sequence: Synthetic oligonucleotide
ccaucgaguucuacacauu

SEQ ID NO: 1770648 - RNA, 19 nt, Artificial Sequence
  Description of Artificial Sequence: Synthetic oligonucleotide
cggcgcguaguaggcgggg

SEQ ID NO: 1770649 - RNA, 19 nt, Artificial Sequence
  Description of Artificial Sequence: Synthetic oligonucleotide
gcgcgggcuggcgccgcgg

SEQ ID NO: 1770650 - RNA, 19 nt, Artificial Sequence
  Description of Artificial Sequence: Synthetic oligonucleotide
ggccccugguccgccagua

SEQ ID NO: 1770651 - RNA, 19 nt, Artificial Sequence
  Description of Artificial Sequence: Synthetic oligonucleotide
ccgggguagcuggccucgc

SEQ ID NO: 1770652 - RNA, 19 nt, Artificial Sequence
  Description of Artificial Sequence: Synthetic oligonucleotide
cggggucugcucgggucgc

SEQ ID NO: 1770653 - RNA, 19 nt, Artificial Sequence
  Description of Artificial Sequence: Synthetic oligonucleotide
ccaagaccugcugccgggu

SEQ ID NO: 1770654 - RNA, 19 nt, Artificial Sequence
  Description of Artificial Sequence: Synthetic oligonucleotide
gcggcgggcgcgggguaca

SEQ ID NO: 1770655 - RNA, 19 nt, Artificial Sequence
  Description of Artificial Sequence: Synthetic oligonucleotide
ggccggggucugcucgggu

SEQ ID NO: 1770656 - RNA, 19 nt, Artificial Sequence
  Description of Artificial Sequence: Synthetic oligonucleotide
cgcguaguaggcggggccu

SEQ ID NO: 1770657 - RNA, 19 nt, Artificial Sequence
  Description of Artificial Sequence: Synthetic oligonucleotide
gcgccgcggcaggcguagg

SEQ ID NO: 1770658 - RNA, 19 nt, Artificial Sequence
  Description of Artificial Sequence: Synthetic oligonucleotide
gcgcgcccgcggcgcguag

SEQ ID NO: 1770659 - RNA, 19 nt, Artificial Sequence
  Description of Artificial Sequence: Synthetic oligonucleotide
cugccggguauaggcuguu

SEQ ID NO: 1770660 - RNA, 19 nt, Artificial Sequence
  Description of Artificial Sequence: Synthetic oligonucleotide
gguacaccacgggcuccuu

SEQ ID NO: 1770661 - RNA, 19 nt, Artificial Sequence
  Description of Artificial Sequence: Synthetic oligonucleotide
gcgccggggccggggucug

SEQ ID NO: 1770662 - RNA, 19 nt, Artificial Sequence
  Description of Artificial Sequence: Synthetic oligonucleotide
cgugugggcuugugcuuuu

SEQ ID NO: 1770663 - RNA, 19 nt, Artificial Sequence
  Description of Artificial Sequence: Synthetic oligonucleotide
cggcgggcgcgggguacag

SEQ ID NO: 1770664 - RNA, 19 nt, Artificial Sequence
  Description of Artificial Sequence: Synthetic oligonucleotide
cugcggggccgggcugggu

SEQ ID NO: 1770665 - RNA, 19 nt, Artificial Sequence
  Description of Artificial Sequence: Synthetic oligonucleotide
ccgucgcgacagccggggu

SEQ ID NO: 1770666 - RNA, 19 nt, Artificial Sequence
  Description of Artificial Sequence: Synthetic oligonucleotide
cgcucacguggaucuucuu

SEQ ID NO: 1770667 - RNA, 19 nt, Artificial Sequence
  Description of Artificial Sequence: Synthetic oligonucleotide
cgcgcgcccgcggcgcgua

SEQ ID NO: 1770668 - RNA, 19 nt, Artificial Sequence
  Description of Artificial Sequence: Synthetic oligonucleotide
cgggccggcaggggccgau

SEQ ID NO: 1770669 - RNA, 19 nt, Artificial Sequence
  Description of Artificial Sequence: Synthetic oligonucleotide
cggcgcucacguggaucuu

SEQ ID NO: 1770670 - RNA, 19 nt, Artificial Sequence
  Description of Artificial Sequence: Synthetic oligonucleotide
ucgucagucaccaugaagg

SEQ ID NO: 1770671 - RNA, 19 nt, Artificial Sequence
  Description of Artificial Sequence: Synthetic oligonucleotide
uauaguaaaagacaucccu

SEQ ID NO: 1770672 - RNA, 19 nt, Artificial Sequence
  Description of Artificial Sequence: Synthetic oligonucleotide
agcaaaugaguccaaggcc

SEQ ID NO: 1770673 - RNA, 19 nt, Artificial Sequence
  Description of Artificial Sequence: Synthetic oligonucleotide
ucagcauuuugccagugcg

SEQ ID NO: 1770674 - RNA, 19 nt, Artificial Sequence
  Description of Artificial Sequence: Synthetic oligonucleotide
augucaaaggcgcucaagc

SEQ ID NO: 1770675 - RNA, 19 nt, Artificial Sequence
  Description of Artificial Sequence: Synthetic oligonucleotide
guaaaagacaucccugugg

SEQ ID NO: 1770676 - RNA, 19 nt, Artificial Sequence
  Description of Artificial Sequence: Synthetic oligonucleotide
ucugacaagcuccucggcg

SEQ ID NO: 1770677 - RNA, 19 nt, Artificial Sequence
  Description of Artificial Sequence: Synthetic oligonucleotide
aacauauccgccaucagug

SEQ ID NO: 1770678 - RNA, 19 nt, Artificial Sequence
  Description of Artificial Sequence: Synthetic oligonucleotide
aggauggagauccgcaucc

SEQ ID NO: 1770679 - RNA, 19 nt, Artificial Sequence
  Description of Artificial Sequence: Synthetic oligonucleotide
uuugccagugcggaaaucg

SEQ ID NO: 1770680 - RNA, 19 nt, Artificial Sequence
  Description of Artificial Sequence: Synthetic oligonucleotide
gagcaaaugaguccaaggc

SEQ ID NO: 1770681 - RNA, 19 nt, Artificial Sequence
  Description of Artificial Sequence: Synthetic oligonucleotide
gguuggaggagucauagcg

SEQ ID NO: 1770682 - RNA, 19 nt, Artificial Sequence
  Description of Artificial Sequence: Synthetic oligonucleotide
ugguuggugaucuugguca

SEQ ID NO: 1770683 - RNA, 19 nt, Artificial Sequence
  Description of Artificial Sequence: Synthetic oligonucleotide
cucuuauucaucuuguuca

SEQ ID NO: 1770684 - RNA, 19 nt, Artificial Sequence
  Description of Artificial Sequence: Synthetic oligonucleotide
gcuauaguaaaagacaucc

SEQ ID NO: 1770685 - RNA, 19 nt, Artificial Sequence
  Description of Artificial Sequence: Synthetic oligonucleotide
uguuuagccacacgccagg

SEQ ID NO: 1770686 - RNA, 19 nt, Artificial Sequence
  Description of Artificial Sequence: Synthetic oligonucleotide
ucaggcuugcccuugaccu

SEQ ID NO: 1770687 - RNA, 19 nt, Artificial Sequence
  Description of Artificial Sequence: Synthetic oligonucleotide
uggggcuauaguaaaagac

SEQ ID NO: 1770688 - RNA, 19 nt, Artificial Sequence
  Description of Artificial Sequence: Synthetic oligonucleotide
ucggcgaugucaaaggcgc

SEQ ID NO: 1770689 - RNA, 19 nt, Artificial Sequence
  Description of Artificial Sequence: Synthetic oligonucleotide
uaguaaaagacaucccugu

SEQ ID NO: 1770690 - RNA, 19 nt, Artificial Sequence
  Description of Artificial Sequence: Synthetic oligonucleotide
uugcccuugaccugguugg

SEQ ID NO: 1770691 - RNA, 19 nt, Artificial Sequence
  Description of Artificial Sequence: Synthetic oligonucleotide
ucagucaccaugaaggcuu

SEQ ID NO: 1770692 - RNA, 19 nt, Artificial Sequence
  Description of Artificial Sequence: Synthetic oligonucleotide
gugguguuuagccacacgc

SEQ ID NO: 1770693 - RNA, 19 nt, Artificial Sequence
  Description of Artificial Sequence: Synthetic oligonucleotide
ugugccaacauauccgcca

SEQ ID NO: 1770694 - RNA, 19 nt, Artificial Sequence
  Description of Artificial Sequence: Synthetic oligonucleotide
ugcuugaagauggaugcgg

SEQ ID NO: 1770695 - RNA, 19 nt, Artificial Sequence
  Description of Artificial Sequence: Synthetic oligonucleotide
ucaaaggcgcucaagccac

SEQ ID NO: 1770696 - RNA, 19 nt, Artificial Sequence
  Description of Artificial Sequence: Synthetic oligonucleotide
cuauaguaaaagacauccc

SEQ ID NO: 1770697 - RNA, 19 nt, Artificial Sequence
  Description of Artificial Sequence: Synthetic oligonucleotide
uuggugaucuuggucaccg

SEQ ID NO: 1770698 - RNA, 19 nt, Artificial Sequence
  Description of Artificial Sequence: Synthetic oligonucleotide
gauggaugcggucugccgc

SEQ ID NO: 1770699 - RNA, 19 nt, Artificial Sequence
  Description of Artificial Sequence: Synthetic oligonucleotide
gagugaaggagcaaaugag

SEQ ID NO: 1770700 - RNA, 19 nt, Artificial Sequence
  Description of Artificial Sequence: Synthetic oligonucleotide
aucagcauuuugccagugc

SEQ ID NO: 1770701 - RNA, 19 nt, Artificial Sequence
  Description of Artificial Sequence: Synthetic oligonucleotide
ugaucuuggucaccgguug

SEQ ID NO: 1770702 - RNA, 19 nt, Artificial Sequence
  Description of Artificial Sequence: Synthetic oligonucleotide
aauagccgacagcagcguc

SEQ ID NO: 1770703 - RNA, 19 nt, Artificial Sequence
  Description of Artificial Sequence: Synthetic oligonucleotide
ugucaaaggcgcucaagcc

SEQ ID NO: 1770704 - RNA, 19 nt, Artificial Sequence
  Description of Artificial Sequence: Synthetic oligonucleotide
acuggcaauagccgacagc

SEQ ID NO: 1770705 - RNA, 19 nt, Artificial Sequence
  Description of Artificial Sequence: Synthetic oligonucleotide
acauauccgccaucagugc

SEQ ID NO: 1770706 - RNA, 19 nt, Artificial Sequence
  Description of Artificial Sequence: Synthetic oligonucleotide
aguaaaagacaucccugug

SEQ ID NO: 1770707 - RNA, 19 nt, Artificial Sequence
  Description of Artificial Sequence: Synthetic oligonucleotide
uugcacaauggcugggugg

SEQ ID NO: 1770708 - RNA, 19 nt, Artificial Sequence
  Description of Artificial Sequence: Synthetic oligonucleotide
uccacgugugccaacauau

SEQ ID NO: 1770709 - RNA, 19 nt, Artificial Sequence
  Description of Artificial Sequence: Synthetic oligonucleotide
auaguaaaagacaucccug

SEQ ID NO: 1770710 - RNA, 19 nt, Artificial Sequence
  Description of Artificial Sequence: Synthetic oligonucleotide
gguucugacaagcuccucg

SEQ ID NO: 1770711 - RNA, 19 nt, Artificial Sequence
  Description of Artificial Sequence: Synthetic oligonucleotide
aaggcuuugcacaauggcu

SEQ ID NO: 1770712 - RNA, 19 nt, Artificial Sequence
  Description of Artificial Sequence: Synthetic oligonucleotide
aagauggaugcggucugcc

SEQ ID NO: 1770713 - RNA, 19 nt, Artificial Sequence
  Description of Artificial Sequence: Synthetic oligonucleotide
uuuccacggcugcagagag

SEQ ID NO: 1770714 - RNA, 19 nt, Artificial Sequence
  Description of Artificial Sequence: Synthetic oligonucleotide
gaaggagcaaaugagucca

SEQ ID NO: 1770715 - RNA, 19 nt, Artificial Sequence
  Description of Artificial Sequence: Synthetic oligonucleotide
uuggaggagucauagcgca

SEQ ID NO: 1770716 - RNA, 19 nt, Artificial Sequence
  Description of Artificial Sequence: Synthetic oligonucleotide
ugguguuuagccacacgcc

SEQ ID NO: 1770717 - RNA, 19 nt, Artificial Sequence
  Description of Artificial Sequence: Synthetic oligonucleotide
uuugccacccgcucggccc

SEQ ID NO: 1770718 - RNA, 19 nt, Artificial Sequence
  Description of Artificial Sequence: Synthetic oligonucleotide
uccucggcgaugucaaagg

SEQ ID NO: 1770719 - RNA, 19 nt, Artificial Sequence
  Description of Artificial Sequence: Synthetic oligonucleotide
uugaccuuguugcuggggu

SEQ ID NO: 1770720 - RNA, 19 nt, Artificial Sequence
  Description of Artificial Sequence: Synthetic oligonucleotide
ugguaugcagcgcacuggc

SEQ ID NO: 1770721 - RNA, 19 nt, Artificial Sequence
  Description of Artificial Sequence: Synthetic oligonucleotide
uuagccacacgccaggguu

SEQ ID NO: 1770722 - RNA, 19 nt, Artificial Sequence
  Description of Artificial Sequence: Synthetic oligonucleotide
agacccgggagcuagagaa

SEQ ID NO: 1770723 - RNA, 19 nt, Artificial Sequence
  Description of Artificial Sequence: Synthetic oligonucleotide
agcagcgucucaucuguac

SEQ ID NO: 1770724 - RNA, 19 nt, Artificial Sequence
  Description of Artificial Sequence: Synthetic oligonucleotide
cacgugugccaacauaucc

SEQ ID NO: 1770725 - RNA, 19 nt, Artificial Sequence
  Description of Artificial Sequence: Synthetic oligonucleotide
accgguugcuugaagaugg

SEQ ID NO: 1770726 - RNA, 19 nt, Artificial Sequence
  Description of Artificial Sequence: Synthetic oligonucleotide
uuugcacaauggcugggug

SEQ ID NO: 1770727 - RNA, 19 nt, Artificial Sequence
  Description of Artificial Sequence: Synthetic oligonucleotide
aucgucgccgucucgguuc

SEQ ID NO: 1770728 - RNA, 19 nt, Artificial Sequence
  Description of Artificial Sequence: Synthetic oligonucleotide
cucggcgaugucaaaggcg

SEQ ID NO: 1770729 - RNA, 19 nt, Artificial Sequence
  Description of Artificial Sequence: Synthetic oligonucleotide
ucgucgucagucaccauga

SEQ ID NO: 1770730 - RNA, 19 nt, Artificial Sequence
  Description of Artificial Sequence: Synthetic oligonucleotide
cagcgcacuggcaauagcc

SEQ ID NO: 1770731 - RNA, 19 nt, Artificial Sequence
  Description of Artificial Sequence: Synthetic oligonucleotide
gucgucgucagucaccaug

SEQ ID NO: 1770732 - RNA, 19 nt, Artificial Sequence
  Description of Artificial Sequence: Synthetic oligonucleotide
agauggaugcggucugccg

SEQ ID NO: 1770733 - RNA, 19 nt, Artificial Sequence
  Description of Artificial Sequence: Synthetic oligonucleotide
gcuacacacgcucagauuc

SEQ ID NO: 1770734 - RNA, 19 nt, Artificial Sequence
  Description of Artificial Sequence: Synthetic oligonucleotide
agauccgcauccugcuggc

SEQ ID NO: 1770735 - RNA, 19 nt, Artificial Sequence
  Description of Artificial Sequence: Synthetic oligonucleotide
gaugcggucugccgcacag

SEQ ID NO: 1770736 - RNA, 19 nt, Artificial Sequence
  Description of Artificial Sequence: Synthetic oligonucleotide
cauauccgccaucagugcc

SEQ ID NO: 1770737 - RNA, 19 nt, Artificial Sequence
  Description of Artificial Sequence: Synthetic oligonucleotide
acagcagcgucucaucugu

SEQ ID NO: 1770738 - RNA, 19 nt, Artificial Sequence
  Description of Artificial Sequence: Synthetic oligonucleotide
gcaaaugaguccaaggccc

SEQ ID NO: 1770739 - RNA, 19 nt, Artificial Sequence
  Description of Artificial Sequence: Synthetic oligonucleotide
auagcgcacgcgcuggcgg

SEQ ID NO: 1770740 - RNA, 19 nt, Artificial Sequence
  Description of Artificial Sequence: Synthetic oligonucleotide
ugguccacugccuucugug

SEQ ID NO: 1770741 - RNA, 19 nt, Artificial Sequence
  Description of Artificial Sequence: Synthetic oligonucleotide
aagaggauggagauccgca

SEQ ID NO: 1770742 - RNA, 19 nt, Artificial Sequence
  Description of Artificial Sequence: Synthetic oligonucleotide
aucacgggccagcuccucc

SEQ ID NO: 1770743 - RNA, 19 nt, Artificial Sequence
  Description of Artificial Sequence: Synthetic oligonucleotide
agggaaagucugcaaccgg

SEQ ID NO: 1770744 - RNA, 19 nt, Artificial Sequence
  Description of Artificial Sequence: Synthetic oligonucleotide
acgugugccaacauauccg

SEQ ID NO: 1770745 - RNA, 19 nt, Artificial Sequence
  Description of Artificial Sequence: Synthetic oligonucleotide
ucguccucagugcaggccu

SEQ ID NO: 1770746 - RNA, 19 nt, Artificial Sequence
  Description of Artificial Sequence: Synthetic oligonucleotide
ggagugaaggagcaaauga

SEQ ID NO: 1770747 - RNA, 19 nt, Artificial Sequence
  Description of Artificial Sequence: Synthetic oligonucleotide
agugaaggagcaaaugagu

SEQ ID NO: 1770748 - RNA, 19 nt, Artificial Sequence
  Description of Artificial Sequence: Synthetic oligonucleotide
ggagucauagcgcacgcgc

SEQ ID NO: 1770749 - RNA, 19 nt, Artificial Sequence
  Description of Artificial Sequence: Synthetic oligonucleotide
cauccugcuggccuggccc

SEQ ID NO: 1770750 - RNA, 19 nt, Artificial Sequence
  Description of Artificial Sequence: Synthetic oligonucleotide
cagcauuuugccagugcgg

SEQ ID NO: 1770751 - RNA, 19 nt, Artificial Sequence
  Description of Artificial Sequence: Synthetic oligonucleotide
gaugucaaaggcgcucaag

SEQ ID NO: 1770752 - RNA, 19 nt, Artificial Sequence
  Description of Artificial Sequence: Synthetic oligonucleotide
ugcggucugccgcacaggc

SEQ ID NO: 1770753 - RNA, 19 nt, Artificial Sequence
  Description of Artificial Sequence: Synthetic oligonucleotide
agcuagagaaggcccuggg

SEQ ID NO: 1770754 - RNA, 19 nt, Artificial Sequence
  Description of Artificial Sequence: Synthetic oligonucleotide
ucugugcuacacacgcuca

SEQ ID NO: 1770755 - RNA, 19 nt, Artificial Sequence
  Description of Artificial Sequence: Synthetic oligonucleotide
cagggugcugguaugcagc

SEQ ID NO: 1770756 - RNA, 19 nt, Artificial Sequence
  Description of Artificial Sequence: Synthetic oligonucleotide
gacagcagcgucucaucug

SEQ ID NO: 1770757 - RNA, 19 nt, Artificial Sequence
  Description of Artificial Sequence: Synthetic oligonucleotide
agggugcugguaugcagcg

SEQ ID NO: 1770758 - RNA, 19 nt, Artificial Sequence
  Description of Artificial Sequence: Synthetic oligonucleotide
cugguuggaggagucauag

SEQ ID NO: 1770759 - RNA, 19 nt, Artificial Sequence
  Description of Artificial Sequence: Synthetic oligonucleotide
gucgucagucaccaugaag

SEQ ID NO: 1770760 - RNA, 19 nt, Artificial Sequence
  Description of Artificial Sequence: Synthetic oligonucleotide
agcgucucaucuguacagc

SEQ ID NO: 1770761 - RNA, 19 nt, Artificial Sequence
  Description of Artificial Sequence: Synthetic oligonucleotide
ugcugcggaacuucuugcc

SEQ ID NO: 1770762 - RNA, 19 nt, Artificial Sequence
  Description of Artificial Sequence: Synthetic oligonucleotide
gcucaagccacucagcuuc

SEQ ID NO: 1770763 - RNA, 19 nt, Artificial Sequence
  Description of Artificial Sequence: Synthetic oligonucleotide
aaaggcgcucaagccacuc

SEQ ID NO: 1770764 - RNA, 19 nt, Artificial Sequence
  Description of Artificial Sequence: Synthetic oligonucleotide
guuggaggagucauagcgc

SEQ ID NO: 1770765 - RNA, 19 nt, Artificial Sequence
  Description of Artificial Sequence: Synthetic oligonucleotide
gugaaggagcaaaugaguc

SEQ ID NO: 1770766 - RNA, 19 nt, Artificial Sequence
  Description of Artificial Sequence: Synthetic oligonucleotide
ugaugucgucgucagucac

SEQ ID NO: 1770767 - RNA, 19 nt, Artificial Sequence
  Description of Artificial Sequence: Synthetic oligonucleotide
aggcgcucaagccacucag

SEQ ID NO: 1770768 - RNA, 19 nt, Artificial Sequence
  Description of Artificial Sequence: Synthetic oligonucleotide
cacgcucagauucuggcuc

SEQ ID NO: 1770769 - RNA, 19 nt, Artificial Sequence
  Description of Artificial Sequence: Synthetic oligonucleotide
gaucuuggucaccgguugc

SEQ ID NO: 1770770 - RNA, 19 nt, Artificial Sequence
  Description of Artificial Sequence: Synthetic oligonucleotide
cagcgucucaucuguacag

SEQ ID NO: 1770771 - RNA, 19 nt, Artificial Sequence
  Description of Artificial Sequence: Synthetic oligonucleotide
uugcugcggaacuucuugc

SEQ ID NO: 1770772 - RNA, 19 nt, Artificial Sequence
  Description of Artificial Sequence: Synthetic oligonucleotide
guaugcagcgcacuggcaa

SEQ ID NO: 1770773 - RNA, 19 nt, Artificial Sequence
  Description of Artificial Sequence: Synthetic oligonucleotide
ugaccuuguugcuggggug

SEQ ID NO: 1770774 - RNA, 19 nt, Artificial Sequence
  Description of Artificial Sequence: Synthetic oligonucleotide
cuuggucaccgguugcuug

SEQ ID NO: 1770775 - RNA, 19 nt, Artificial Sequence
  Description of Artificial Sequence: Synthetic oligonucleotide
cuuguucaucagcauuuug

SEQ ID NO: 1770776 - RNA, 19 nt, Artificial Sequence
  Description of Artificial Sequence: Synthetic oligonucleotide
uucugacaagcuccucggc

SEQ ID NO: 1770777 - RNA, 19 nt, Artificial Sequence
  Description of Artificial Sequence: Synthetic oligonucleotide
gucaccgguugcuugaaga

SEQ ID NO: 1770778 - RNA, 19 nt, Artificial Sequence
  Description of Artificial Sequence: Synthetic oligonucleotide
ggaggagucauagcgcacg

SEQ ID NO: 1770779 - RNA, 19 nt, Artificial Sequence
  Description of Artificial Sequence: Synthetic oligonucleotide
ucaccgguugcuugaagau

SEQ ID NO: 1770780 - RNA, 19 nt, Artificial Sequence
  Description of Artificial Sequence: Synthetic oligonucleotide
uguuccgacccacgggccu

SEQ ID NO: 1770781 - RNA, 19 nt, Artificial Sequence
  Description of Artificial Sequence: Synthetic oligonucleotide
uugccagugcggaaaucga

SEQ ID NO: 1770782 - RNA, 19 nt, Artificial Sequence
  Description of Artificial Sequence: Synthetic oligonucleotide
gaggauggagauccgcauc

SEQ ID NO: 1770783 - RNA, 19 nt, Artificial Sequence
  Description of Artificial Sequence: Synthetic oligonucleotide
ugugcuacacacgcucaga

SEQ ID NO: 1770784 - RNA, 19 nt, Artificial Sequence
  Description of Artificial Sequence: Synthetic oligonucleotide
aguguggggcuucuugcca

SEQ ID NO: 1770785 - RNA, 19 nt, Artificial Sequence
  Description of Artificial Sequence: Synthetic oligonucleotide
cagugcaguguucagguca

SEQ ID NO: 1770786 - RNA, 19 nt, Artificial Sequence
  Description of Artificial Sequence: Synthetic oligonucleotide
gcuguuccgacccacgggc

SEQ ID NO: 1770787 - RNA, 19 nt, Artificial Sequence
  Description of Artificial Sequence: Synthetic oligonucleotide
agcgcacuggcaauagccg

SEQ ID NO: 1770788 - RNA, 19 nt, Artificial Sequence
  Description of Artificial Sequence: Synthetic oligonucleotide
ggggcuauaguaaaagaca

SEQ ID NO: 1770789 - RNA, 19 nt, Artificial Sequence
  Description of Artificial Sequence: Synthetic oligonucleotide
uaugcagcgcacuggcaau

SEQ ID NO: 1770790 - RNA, 19 nt, Artificial Sequence
  Description of Artificial Sequence: Synthetic oligonucleotide
gcucuuauucaucuuguuc

SEQ ID NO: 1770791 - RNA, 19 nt, Artificial Sequence
  Description of Artificial Sequence: Synthetic oligonucleotide
gaggagucauagcgcacgc

SEQ ID NO: 1770792 - RNA, 19 nt, Artificial Sequence
  Description of Artificial Sequence: Synthetic oligonucleotide
uggcaauagccgacagcag

SEQ ID NO: 1770793 - RNA, 19 nt, Artificial Sequence
  Description of Artificial Sequence: Synthetic oligonucleotide
caguguggggcuucuugcc

SEQ ID NO: 1770794 - RNA, 19 nt, Artificial Sequence
  Description of Artificial Sequence: Synthetic oligonucleotide
cugacaagcuccucggcga

SEQ ID NO: 1770795 - RNA, 19 nt, Artificial Sequence
  Description of Artificial Sequence: Synthetic oligonucleotide
gcaaccgggacuugggcag

SEQ ID NO: 1770796 - RNA, 19 nt, Artificial Sequence
  Description of Artificial Sequence: Synthetic oligonucleotide
guccaugguucugacaagc

SEQ ID NO: 1770797 - RNA, 19 nt, Artificial Sequence
  Description of Artificial Sequence: Synthetic oligonucleotide
gucaggcuugcccuugacc

SEQ ID NO: 1770798 - RNA, 19 nt, Artificial Sequence
  Description of Artificial Sequence: Synthetic oligonucleotide
auccgcauccugcuggccu

SEQ ID NO: 1770799 - RNA, 19 nt, Artificial Sequence
  Description of Artificial Sequence: Synthetic oligonucleotide
cugguaugcagcgcacugg

SEQ ID NO: 1770800 - RNA, 19 nt, Artificial Sequence
  Description of Artificial Sequence: Synthetic oligonucleotide
cccaucacgggccagcucc

SEQ ID NO: 1770801 - RNA, 19 nt, Artificial Sequence
  Description of Artificial Sequence: Synthetic oligonucleotide
ugccagugcggaaaucgaa

SEQ ID NO: 1770802 - RNA, 19 nt, Artificial Sequence
  Description of Artificial Sequence: Synthetic oligonucleotide
uggcggcucuuauucaucu

SEQ ID NO: 1770803 - RNA, 19 nt, Artificial Sequence
  Description of Artificial Sequence: Synthetic oligonucleotide
aauggcugggugguguuua

SEQ ID NO: 1770804 - RNA, 19 nt, Artificial Sequence
  Description of Artificial Sequence: Synthetic oligonucleotide
agcggugccuccccaucac

SEQ ID NO: 1770805 - RNA, 19 nt, Artificial Sequence
  Description of Artificial Sequence: Synthetic oligonucleotide
guguuuagccacacgccag

SEQ ID NO: 1770806 - RNA, 19 nt, Artificial Sequence
  Description of Artificial Sequence: Synthetic oligonucleotide
cuccugggcacuucuuccc

SEQ ID NO: 1770807 - RNA, 19 nt, Artificial Sequence
  Description of Artificial Sequence: Synthetic oligonucleotide
uugaccugguuggaggagu

SEQ ID NO: 1770808 - RNA, 19 nt, Artificial Sequence
  Description of Artificial Sequence: Synthetic oligonucleotide
gucauagcgcacgcgcugg

SEQ ID NO: 1770809 - RNA, 19 nt, Artificial Sequence
  Description of Artificial Sequence: Synthetic oligonucleotide
gcugcggaacuucuugccg

SEQ ID NO: 1770810 - RNA, 19 nt, Artificial Sequence
  Description of Artificial Sequence: Synthetic oligonucleotide
cuugccagggagugaagga

SEQ ID NO: 1770811 - RNA, 19 nt, Artificial Sequence
  Description of Artificial Sequence: Synthetic oligonucleotide
gauucuggcucaucguccu

SEQ ID NO: 1770812 - RNA, 19 nt, Artificial Sequence
  Description of Artificial Sequence: Synthetic oligonucleotide
uccgcauccugcuggccug

SEQ ID NO: 1770813 - RNA, 19 nt, Artificial Sequence
  Description of Artificial Sequence: Synthetic oligonucleotide
ugccgcuggggcuauagua

SEQ ID NO: 1770814 - RNA, 19 nt, Artificial Sequence
  Description of Artificial Sequence: Synthetic oligonucleotide
cugugcuacacacgcucag

SEQ ID NO: 1770815 - RNA, 19 nt, Artificial Sequence
  Description of Artificial Sequence: Synthetic oligonucleotide
auuuugccagugcggaaau

SEQ ID NO: 1770816 - RNA, 19 nt, Artificial Sequence
  Description of Artificial Sequence: Synthetic oligonucleotide
gguaacgugccagcugugg

SEQ ID NO: 1770817 - RNA, 19 nt, Artificial Sequence
  Description of Artificial Sequence: Synthetic oligonucleotide
ccagugcggaaaucgaagg

SEQ ID NO: 1770818 - RNA, 19 nt, Artificial Sequence
  Description of Artificial Sequence: Synthetic oligonucleotide
ugccgcacaggcagugcag

SEQ ID NO: 1770819 - RNA, 19 nt, Artificial Sequence
  Description of Artificial Sequence: Synthetic oligonucleotide
uggugaucuuggucaccgg

SEQ ID NO: 1770820 - RNA, 19 nt, Artificial Sequence
  Description of Artificial Sequence: Synthetic oligonucleotide
ugcuuccugaugucgucgu

SEQ ID NO: 1770821 - RNA, 19 nt, Artificial Sequence
  Description of Artificial Sequence: Synthetic oligonucleotide
uccgccaucagugccuccu

SEQ ID NO: 1770822 - RNA, 19 nt, Artificial Sequence
  Description of Artificial Sequence: Synthetic oligonucleotide
guuuagccacacgccaggg

SEQ ID NO: 1770823 - RNA, 19 nt, Artificial Sequence
  Description of Artificial Sequence: Synthetic oligonucleotide
ugcggaacuucuugccgcu

SEQ ID NO: 1770824 - RNA, 19 nt, Artificial Sequence
  Description of Artificial Sequence: Synthetic oligonucleotide
acaucccuguggccggccg

SEQ ID NO: 1770825 - RNA, 19 nt, Artificial Sequence
  Description of Artificial Sequence: Synthetic oligonucleotide
ucauagcgcacgcgcuggc

SEQ ID NO: 1770826 - RNA, 19 nt, Artificial Sequence
  Description of Artificial Sequence: Synthetic oligonucleotide
auauccgccaucagugccu

SEQ ID NO: 1770827 - RNA, 19 nt, Artificial Sequence
  Description of Artificial Sequence: Synthetic oligonucleotide
ggcuuugccacccgcucgg

SEQ ID NO: 1770828 - RNA, 19 nt, Artificial Sequence
  Description of Artificial Sequence: Synthetic oligonucleotide
uccaucgcgccccggcucu

SEQ ID NO: 1770829 - RNA, 19 nt, Artificial Sequence
  Description of Artificial Sequence: Synthetic oligonucleotide
caaaugaguccaaggccca

SEQ ID NO: 1770830 - RNA, 19 nt, Artificial Sequence
  Description of Artificial Sequence: Synthetic oligonucleotide
gccacugccacucgccgcg

SEQ ID NO: 1770831 - RNA, 19 nt, Artificial Sequence
  Description of Artificial Sequence: Synthetic oligonucleotide
gcuggggcuauaguaaaag

SEQ ID NO: 1770832 - RNA, 19 nt, Artificial Sequence
  Description of Artificial Sequence: Synthetic oligonucleotide
cauuuugccagugcggaaa

SEQ ID NO: 1770833 - RNA, 19 nt, Artificial Sequence
  Description of Artificial Sequence: Synthetic oligonucleotide
ugaccugguuggaggaguc

SEQ ID NO: 1770834 - RNA, 19 nt, Artificial Sequence
  Description of Artificial Sequence: Synthetic oligonucleotide
gaaggcccugggaagagga

SEQ ID NO: 1770835 - RNA, 19 nt, Artificial Sequence
  Description of Artificial Sequence: Synthetic oligonucleotide
agcgccgggcacucccacc

SEQ ID NO: 1770836 - RNA, 19 nt, Artificial Sequence
  Description of Artificial Sequence: Synthetic oligonucleotide
ccugaugucgucgucaguc

SEQ ID NO: 1770837 - RNA, 19 nt, Artificial Sequence
  Description of Artificial Sequence: Synthetic oligonucleotide
uggaggagucauagcgcac

SEQ ID NO: 1770838 - RNA, 19 nt, Artificial Sequence
  Description of Artificial Sequence: Synthetic oligonucleotide
aggccuuguccagcggugc

SEQ ID NO: 1770839 - RNA, 19 nt, Artificial Sequence
  Description of Artificial Sequence: Synthetic oligonucleotide
ugcagcgcacuggcaauag

SEQ ID NO: 1770840 - RNA, 19 nt, Artificial Sequence
  Description of Artificial Sequence: Synthetic oligonucleotide
uucuugccagggagugaag

SEQ ID NO: 1770841 - RNA, 19 nt, Artificial Sequence
  Description of Artificial Sequence: Synthetic oligonucleotide
ggugguguuuagccacacg

SEQ ID NO: 1770842 - RNA, 19 nt, Artificial Sequence
  Description of Artificial Sequence: Synthetic oligonucleotide
ggugccuccccaucacggg

SEQ ID NO: 1770843 - RNA, 19 nt, Artificial Sequence
  Description of Artificial Sequence: Synthetic oligonucleotide
ugcuacacacgcucagauu

SEQ ID NO: 1770844 - RNA, 19 nt, Artificial Sequence
  Description of Artificial Sequence: Synthetic oligonucleotide
gcugguaugcagcgcacug

SEQ ID NO: 1770845 - RNA, 19 nt, Artificial Sequence
  Description of Artificial Sequence: Synthetic oligonucleotide
agccgcccagguaacgugc

SEQ ID NO: 1770846 - RNA, 19 nt, Artificial Sequence
  Description of Artificial Sequence: Synthetic oligonucleotide
gggcaucugugcuacacac

SEQ ID NO: 1770847 - RNA, 19 nt, Artificial Sequence
  Description of Artificial Sequence: Synthetic oligonucleotide
auggcugggugguguuuag

SEQ ID NO: 1770848 - RNA, 19 nt, Artificial Sequence
  Description of Artificial Sequence: Synthetic oligonucleotide
aggagucauagcgcacgcg

SEQ ID NO: 1770849 - RNA, 19 nt, Artificial Sequence
  Description of Artificial Sequence: Synthetic oligonucleotide
gagccgcccagguaacgug

SEQ ID NO: 1770850 - RNA, 19 nt, Artificial Sequence
  Description of Artificial Sequence: Synthetic oligonucleotide
cuucuugccagggagugaa

SEQ ID NO: 1770851 - RNA, 19 nt, Artificial Sequence
  Description of Artificial Sequence: Synthetic oligonucleotide
uguacagccugggcccacc

SEQ ID NO: 1770852 - RNA, 19 nt, Artificial Sequence
  Description of Artificial Sequence: Synthetic oligonucleotide
cuuccugaugucgucguca

SEQ ID NO: 1770853 - RNA, 19 nt, Artificial Sequence
  Description of Artificial Sequence: Synthetic oligonucleotide
cuggggcuauaguaaaaga

SEQ ID NO: 1770854 - RNA, 19 nt, Artificial Sequence
  Description of Artificial Sequence: Synthetic oligonucleotide
uccuccuccuccuccuccu

SEQ ID NO: 1770855 - RNA, 19 nt, Artificial Sequence
  Description of Artificial Sequence: Synthetic oligonucleotide
cauagcgcacgcgcuggcg

SEQ ID NO: 1770856 - RNA, 19 nt, Artificial Sequence
  Description of Artificial Sequence: Synthetic oligonucleotide
cuugccgcuggggcuauag

SEQ ID NO: 1770857 - RNA, 19 nt, Artificial Sequence
  Description of Artificial Sequence: Synthetic oligonucleotide
acgcucagauucuggcuca

SEQ ID NO: 1770858 - RNA, 19 nt, Artificial Sequence
  Description of Artificial Sequence: Synthetic oligonucleotide
cuguggccggccgacagcc

SEQ ID NO: 1770859 - RNA, 19 nt, Artificial Sequence
  Description of Artificial Sequence: Synthetic oligonucleotide
aaccgggacuugggcaggg

SEQ ID NO: 1770860 - RNA, 19 nt, Artificial Sequence
  Description of Artificial Sequence: Synthetic oligonucleotide
cucuccgcccgccuccggg

SEQ ID NO: 1770861 - RNA, 19 nt, Artificial Sequence
  Description of Artificial Sequence: Synthetic oligonucleotide
acacacgcucagauucugg

SEQ ID NO: 1770862 - RNA, 19 nt, Artificial Sequence
  Description of Artificial Sequence: Synthetic oligonucleotide
aacgugccagcuguggcuu

SEQ ID NO: 1770863 - RNA, 19 nt, Artificial Sequence
  Description of Artificial Sequence: Synthetic oligonucleotide
ucgucgccgucucgguucc

SEQ ID NO: 1770864 - RNA, 19 nt, Artificial Sequence
  Description of Artificial Sequence: Synthetic oligonucleotide
guucccuccgccgccacug

SEQ ID NO: 1770865 - RNA, 19 nt, Artificial Sequence
  Description of Artificial Sequence: Synthetic oligonucleotide
cugaugucgucgucaguca

SEQ ID NO: 1770866 - RNA, 19 nt, Artificial Sequence
  Description of Artificial Sequence: Synthetic oligonucleotide
gccagugcggaaaucgaag

SEQ ID NO: 1770867 - RNA, 19 nt, Artificial Sequence
  Description of Artificial Sequence: Synthetic oligonucleotide
cagguaacgugccagcugu

SEQ ID NO: 1770868 - RNA, 19 nt, Artificial Sequence
  Description of Artificial Sequence: Synthetic oligonucleotide
aggcccugggaagaggaug

SEQ ID NO: 1770869 - RNA, 19 nt, Artificial Sequence
  Description of Artificial Sequence: Synthetic oligonucleotide
cuguuccgacccacgggcc

SEQ ID NO: 1770870 - RNA, 19 nt, Artificial Sequence
  Description of Artificial Sequence: Synthetic oligonucleotide
cucgguucccuccgccgcc

SEQ ID NO: 1770871 - RNA, 19 nt, Artificial Sequence
  Description of Artificial Sequence: Synthetic oligonucleotide
augguucugacaagcuccu

SEQ ID NO: 1770872 - RNA, 19 nt, Artificial Sequence
  Description of Artificial Sequence: Synthetic oligonucleotide
caccgguugcuugaagaug

SEQ ID NO: 1770873 - RNA, 19 nt, Artificial Sequence
  Description of Artificial Sequence: Synthetic oligonucleotide
acaauggcugggugguguu

SEQ ID NO: 1770874 - RNA, 19 nt, Artificial Sequence
  Description of Artificial Sequence: Synthetic oligonucleotide
cacuggcaauagccgacag

SEQ ID NO: 1770875 - RNA, 19 nt, Artificial Sequence
  Description of Artificial Sequence: Synthetic oligonucleotide
gggagugaaggagcaaaug

SEQ ID NO: 1770876 - RNA, 19 nt, Artificial Sequence
  Description of Artificial Sequence: Synthetic oligonucleotide
guccuccuccuccuccucc

SEQ ID NO: 1770877 - RNA, 19 nt, Artificial Sequence
  Description of Artificial Sequence: Synthetic oligonucleotide
gguccaugguucugacaag

SEQ ID NO: 1770878 - RNA, 19 nt, Artificial Sequence
  Description of Artificial Sequence: Synthetic oligonucleotide
uccuccuccuccuccucau

SEQ ID NO: 1770879 - RNA, 19 nt, Artificial Sequence
  Description of Artificial Sequence: Synthetic oligonucleotide
uguucaggucaggcuugcc

SEQ ID NO: 1770880 - RNA, 19 nt, Artificial Sequence
  Description of Artificial Sequence: Synthetic oligonucleotide
cagggagugaaggagcaaa

SEQ ID NO: 1770881 - RNA, 19 nt, Artificial Sequence
  Description of Artificial Sequence: Synthetic oligonucleotide
uggagccgcccagguaacg

SEQ ID NO: 1770882 - RNA, 19 nt, Artificial Sequence
  Description of Artificial Sequence: Synthetic oligonucleotide
uccugaugucgucgucagu

SEQ ID NO: 1770883 - RNA, 19 nt, Artificial Sequence
  Description of Artificial Sequence: Synthetic oligonucleotide
cuuccgcuccaucgcgccc

SEQ ID NO: 1770884 - RNA, 19 nt, Artificial Sequence
  Description of Artificial Sequence: Synthetic oligonucleotide
guccauggagccgcccagg

SEQ ID NO: 1770885 - RNA, 19 nt, Artificial Sequence
  Description of Artificial Sequence: Synthetic oligonucleotide
uugccgcuggggcuauagu

SEQ ID NO: 1770886 - RNA, 19 nt, Artificial Sequence
  Description of Artificial Sequence: Synthetic oligonucleotide
gagacccgggagcuagaga

SEQ ID NO: 1770887 - RNA, 19 nt, Artificial Sequence
  Description of Artificial Sequence: Synthetic oligonucleotide
uuuugccagugcggaaauc

SEQ ID NO: 1770888 - RNA, 19 nt, Artificial Sequence
  Description of Artificial Sequence: Synthetic oligonucleotide
aucgcgccccggcucuccg

SEQ ID NO: 1770889 - RNA, 19 nt, Artificial Sequence
  Description of Artificial Sequence: Synthetic oligonucleotide
gcuagagaaggcccuggga

SEQ ID NO: 1770890 - RNA, 19 nt, Artificial Sequence
  Description of Artificial Sequence: Synthetic oligonucleotide
uagccgacagcagcgucuc

SEQ ID NO: 1770891 - RNA, 19 nt, Artificial Sequence
  Description of Artificial Sequence: Synthetic oligonucleotide
ucuuggucaccgguugcuu

SEQ ID NO: 1770892 - RNA, 19 nt, Artificial Sequence
  Description of Artificial Sequence: Synthetic oligonucleotide
guacagccugggcccaccc

SEQ ID NO: 1770893 - RNA, 19 nt, Artificial Sequence
  Description of Artificial Sequence: Synthetic oligonucleotide
ucccuccgccgccacugcc

SEQ ID NO: 1770894 - RNA, 19 nt, Artificial Sequence
  Description of Artificial Sequence: Synthetic oligonucleotide
cacucgccgcggcuguucc

SEQ ID NO: 1770895 - RNA, 19 nt, Artificial Sequence
  Description of Artificial Sequence: Synthetic oligonucleotide
ggagauccgcauccugcug

SEQ ID NO: 1770896 - RNA, 19 nt, Artificial Sequence
  Description of Artificial Sequence: Synthetic oligonucleotide
uguggccggccgacagccc

SEQ ID NO: 1770897 - RNA, 19 nt, Artificial Sequence
  Description of Artificial Sequence: Synthetic oligonucleotide
uucccuccgccgccacugc

SEQ ID NO: 1770898 - RNA, 19 nt, Artificial Sequence
  Description of Artificial Sequence: Synthetic oligonucleotide
accgggacuugggcagggc

SEQ ID NO: 1770899 - RNA, 19 nt, Artificial Sequence
  Description of Artificial Sequence: Synthetic oligonucleotide
guguucaggucaggcuugc

SEQ ID NO: 1770900 - RNA, 19 nt, Artificial Sequence
  Description of Artificial Sequence: Synthetic oligonucleotide
ccucuuccgcuccaucgcg

SEQ ID NO: 1770901 - RNA, 19 nt, Artificial Sequence
  Description of Artificial Sequence: Synthetic oligonucleotide
gugugccaacauauccgcc

SEQ ID NO: 1770902 - RNA, 19 nt, Artificial Sequence
  Description of Artificial Sequence: Synthetic oligonucleotide
uggcugggugguguuuagc

SEQ ID NO: 1770903 - RNA, 19 nt, Artificial Sequence
  Description of Artificial Sequence: Synthetic oligonucleotide
auggagccgcccagguaac

SEQ ID NO: 1770904 - RNA, 19 nt, Artificial Sequence
  Description of Artificial Sequence: Synthetic oligonucleotide
ccagguaacgugccagcug

SEQ ID NO: 1770905 - RNA, 19 nt, Artificial Sequence
  Description of Artificial Sequence: Synthetic oligonucleotide
agggagugaaggagcaaau

SEQ ID NO: 1770906 - RNA, 19 nt, Artificial Sequence
  Description of Artificial Sequence: Synthetic oligonucleotide
caucagcauuuugccagug

SEQ ID NO: 1770907 - RNA, 19 nt, Artificial Sequence
  Description of Artificial Sequence: Synthetic oligonucleotide
gcuuugcacaauggcuggg

SEQ ID NO: 1770908 - RNA, 19 nt, Artificial Sequence
  Description of Artificial Sequence: Synthetic oligonucleotide
gcggaaaucgaaggugcug

SEQ ID NO: 1770909 - RNA, 19 nt, Artificial Sequence
  Description of Artificial Sequence: Synthetic oligonucleotide
ggagcuagagaaggcccug

SEQ ID NO: 1770910 - RNA, 19 nt, Artificial Sequence
  Description of Artificial Sequence: Synthetic oligonucleotide
gcgcuggcggcucuuauuc

SEQ ID NO: 1770911 - RNA, 19 nt, Artificial Sequence
  Description of Artificial Sequence: Synthetic oligonucleotide
ccgaucgucgccgucucgg

SEQ ID NO: 1770912 - RNA, 19 nt, Artificial Sequence
  Description of Artificial Sequence: Synthetic oligonucleotide
ggcagggcaucugugcuac

SEQ ID NO: 1770913 - RNA, 19 nt, Artificial Sequence
  Description of Artificial Sequence: Synthetic oligonucleotide
cuacacacgcucagauucu

SEQ ID NO: 1770914 - RNA, 19 nt, Artificial Sequence
  Description of Artificial Sequence: Synthetic oligonucleotide
caaccgggacuugggcagg

SEQ ID NO: 1770915 - RNA, 19 nt, Artificial Sequence
  Description of Artificial Sequence: Synthetic oligonucleotide
caccugguccaggcaaggc

SEQ ID NO: 1770916 - RNA, 19 nt, Artificial Sequence
  Description of Artificial Sequence: Synthetic oligonucleotide
gggagcgccgggcacuccc

SEQ ID NO: 1770917 - RNA, 19 nt, Artificial Sequence
  Description of Artificial Sequence: Synthetic oligonucleotide
gauccgcauccugcuggcc

SEQ ID NO: 1770918 - RNA, 19 nt, Artificial Sequence
  Description of Artificial Sequence: Synthetic oligonucleotide
cuccaucgcgccccggcuc

SEQ ID NO: 1770919 - RNA, 19 nt, Artificial Sequence
  Description of Artificial Sequence: Synthetic oligonucleotide
gugcuacacacgcucagau

SEQ ID NO: 1770920 - RNA, 19 nt, Artificial Sequence
  Description of Artificial Sequence: Synthetic oligonucleotide
ugcccuugaccugguugga

SEQ ID NO: 1770921 - RNA, 19 nt, Artificial Sequence
  Description of Artificial Sequence: Synthetic oligonucleotide
gggcucccugcacugagac

SEQ ID NO: 1770922 - RNA, 19 nt, Artificial Sequence
  Description of Artificial Sequence: Synthetic oligonucleotide
gagucauagcgcacgcgcu

SEQ ID NO: 1770923 - RNA, 19 nt, Artificial Sequence
  Description of Artificial Sequence: Synthetic oligonucleotide
cugccgcacaggcagugca

SEQ ID NO: 1770924 - RNA, 19 nt, Artificial Sequence
  Description of Artificial Sequence: Synthetic oligonucleotide
gcaguguucaggucaggcu

SEQ ID NO: 1770925 - RNA, 19 nt, Artificial Sequence
  Description of Artificial Sequence: Synthetic oligonucleotide
cuuugcacaauggcugggu

SEQ ID NO: 1770926 - RNA, 19 nt, Artificial Sequence
  Description of Artificial Sequence: Synthetic oligonucleotide
gccgacagccccgaccucc

SEQ ID NO: 1770927 - RNA, 19 nt, Artificial Sequence
  Description of Artificial Sequence: Synthetic oligonucleotide
gucugccgcacaggcagug

SEQ ID NO: 1770928 - RNA, 19 nt, Artificial Sequence
  Description of Artificial Sequence: Synthetic oligonucleotide
gacaucccuguggccggcc

SEQ ID NO: 1770929 - RNA, 19 nt, Artificial Sequence
  Description of Artificial Sequence: Synthetic oligonucleotide
ccucggcgaugucaaaggc

SEQ ID NO: 1770930 - RNA, 19 nt, Artificial Sequence
  Description of Artificial Sequence: Synthetic oligonucleotide
caggucaggcuugcccuug

SEQ ID NO: 1770931 - RNA, 19 nt, Artificial Sequence
  Description of Artificial Sequence: Synthetic oligonucleotide
cccggugaugggcagggug

SEQ ID NO: 1770932 - RNA, 19 nt, Artificial Sequence
  Description of Artificial Sequence: Synthetic oligonucleotide
ggucaccgguugcuugaag

SEQ ID NO: 1770933 - RNA, 19 nt, Artificial Sequence
  Description of Artificial Sequence: Synthetic oligonucleotide
cagugcggaaaucgaaggu

SEQ ID NO: 1770934 - RNA, 19 nt, Artificial Sequence
  Description of Artificial Sequence: Synthetic oligonucleotide
cgcacuggcaauagccgac

SEQ ID NO: 1770935 - RNA, 19 nt, Artificial Sequence
  Description of Artificial Sequence: Synthetic oligonucleotide
cugccacucgccgcggcug

SEQ ID NO: 1770936 - RNA, 19 nt, Artificial Sequence
  Description of Artificial Sequence: Synthetic oligonucleotide
cggugccuccccaucacgg

SEQ ID NO: 1770937 - RNA, 19 nt, Artificial Sequence
  Description of Artificial Sequence: Synthetic oligonucleotide
uggucaccgguugcuugaa

SEQ ID NO: 1770938 - RNA, 19 nt, Artificial Sequence
  Description of Artificial Sequence: Synthetic oligonucleotide
cuccuccuccuccuccuca

SEQ ID NO: 1770939 - RNA, 19 nt, Artificial Sequence
  Description of Artificial Sequence: Synthetic oligonucleotide
gugcaguguucaggucagg

SEQ ID NO: 1770940 - RNA, 19 nt, Artificial Sequence
  Description of Artificial Sequence: Synthetic oligonucleotide
gcggugccuccccaucacg

SEQ ID NO: 1770941 - RNA, 19 nt, Artificial Sequence
  Description of Artificial Sequence: Synthetic oligonucleotide
gcgaugucaaaggcgcuca

SEQ ID NO: 1770942 - RNA, 19 nt, Artificial Sequence
  Description of Artificial Sequence: Synthetic oligonucleotide
gcgcacuggcaauagccga

SEQ ID NO: 1770943 - RNA, 19 nt, Artificial Sequence
  Description of Artificial Sequence: Synthetic oligonucleotide
cugcccggugaugggcagg

SEQ ID NO: 1770944 - RNA, 19 nt, Artificial Sequence
  Description of Artificial Sequence: Synthetic oligonucleotide
gugccaacauauccgccau

SEQ ID NO: 1770945 - RNA, 19 nt, Artificial Sequence
  Description of Artificial Sequence: Synthetic oligonucleotide
gagcgccgggcacucccac

SEQ ID NO: 1770946 - RNA, 19 nt, Artificial Sequence
  Description of Artificial Sequence: Synthetic oligonucleotide
cuccgcccgccuccgggcc

SEQ ID NO: 1770947 - RNA, 19 nt, Artificial Sequence
  Description of Artificial Sequence: Synthetic oligonucleotide
cagcggugccuccccauca

SEQ ID NO: 1770948 - RNA, 19 nt, Artificial Sequence
  Description of Artificial Sequence: Synthetic oligonucleotide
cucgccgcggcuguuccga

SEQ ID NO: 1770949 - RNA, 19 nt, Artificial Sequence
  Description of Artificial Sequence: Synthetic oligonucleotide
ccacgugugccaacauauc

SEQ ID NO: 1770950 - RNA, 19 nt, Artificial Sequence
  Description of Artificial Sequence: Synthetic oligonucleotide
gugaucuuggucaccgguu

SEQ ID NO: 1770951 - RNA, 19 nt, Artificial Sequence
  Description of Artificial Sequence: Synthetic oligonucleotide
agguaacgugccagcugug

SEQ ID NO: 1770952 - RNA, 19 nt, Artificial Sequence
  Description of Artificial Sequence: Synthetic oligonucleotide
uggaugcggucugccgcac

SEQ ID NO: 1770953 - RNA, 19 nt, Artificial Sequence
  Description of Artificial Sequence: Synthetic oligonucleotide
gccgcuggggcuauaguaa

SEQ ID NO: 1770954 - RNA, 19 nt, Artificial Sequence
  Description of Artificial Sequence: Synthetic oligonucleotide
ggcgcucaagccacucagc

SEQ ID NO: 1770955 - RNA, 19 nt, Artificial Sequence
  Description of Artificial Sequence: Synthetic oligonucleotide
caucccuguggccggccga

SEQ ID NO: 1770956 - RNA, 19 nt, Artificial Sequence
  Description of Artificial Sequence: Synthetic oligonucleotide
cacugccuucuguggguca

SEQ ID NO: 1770957 - RNA, 19 nt, Artificial Sequence
  Description of Artificial Sequence: Synthetic oligonucleotide
ccggccgacagccccgacc

SEQ ID NO: 1770958 - RNA, 19 nt, Artificial Sequence
  Description of Artificial Sequence: Synthetic oligonucleotide
caucgcgccccggcucucc

SEQ ID NO: 1770959 - RNA, 19 nt, Artificial Sequence
  Description of Artificial Sequence: Synthetic oligonucleotide
gcgcucaagccacucagcu

SEQ ID NO: 1770960 - RNA, 19 nt, Artificial Sequence
  Description of Artificial Sequence: Synthetic oligonucleotide
cuugggcagguccaugguu

SEQ ID NO: 1770961 - RNA, 19 nt, Artificial Sequence
  Description of Artificial Sequence: Synthetic oligonucleotide
gcugcccggugaugggcag

SEQ ID NO: 1770962 - RNA, 19 nt, Artificial Sequence
  Description of Artificial Sequence: Synthetic oligonucleotide
augcagcgcacuggcaaua

SEQ ID NO: 1770963 - RNA, 19 nt, Artificial Sequence
  Description of Artificial Sequence: Synthetic oligonucleotide
ugucgucgucagucaccau

SEQ ID NO: 1770964 - RNA, 19 nt, Artificial Sequence
  Description of Artificial Sequence: Synthetic oligonucleotide
uccgacccacgggccuccg

SEQ ID NO: 1770965 - RNA, 19 nt, Artificial Sequence
  Description of Artificial Sequence: Synthetic oligonucleotide
ccuguggccggccgacagc

SEQ ID NO: 1770966 - RNA, 19 nt, Artificial Sequence
  Description of Artificial Sequence: Synthetic oligonucleotide
gcuugaagauggaugcggu

SEQ ID NO: 1770967 - RNA, 19 nt, Artificial Sequence
  Description of Artificial Sequence: Synthetic oligonucleotide
cugagacccgggagcuaga

SEQ ID NO: 1770968 - RNA, 19 nt, Artificial Sequence
  Description of Artificial Sequence: Synthetic oligonucleotide
gcggcuguuccgacccacg

SEQ ID NO: 1770969 - RNA, 19 nt, Artificial Sequence
  Description of Artificial Sequence: Synthetic oligonucleotide
gaucgucgccgucucgguu

SEQ ID NO: 1770970 - RNA, 19 nt, Artificial Sequence
  Description of Artificial Sequence: Synthetic oligonucleotide
cccuguggccggccgacag

SEQ ID NO: 1770971 - RNA, 19 nt, Artificial Sequence
  Description of Artificial Sequence: Synthetic oligonucleotide
gguaugcagcgcacuggca

SEQ ID NO: 1770972 - RNA, 19 nt, Artificial Sequence
  Description of Artificial Sequence: Synthetic oligonucleotide
acgcgcuggcggcucuuau

SEQ ID NO: 1770973 - RNA, 19 nt, Artificial Sequence
  Description of Artificial Sequence: Synthetic oligonucleotide
cucaagccacucagcuucu

SEQ ID NO: 1770974 - RNA, 19 nt, Artificial Sequence
  Description of Artificial Sequence: Synthetic oligonucleotide
cggcuguuccgacccacgg

SEQ ID NO: 1770975 - RNA, 19 nt, Artificial Sequence
  Description of Artificial Sequence: Synthetic oligonucleotide
gcacuggcaauagccgaca

SEQ ID NO: 1770976 - RNA, 19 nt, Artificial Sequence
  Description of Artificial Sequence: Synthetic oligonucleotide
agucugcaaccgggacuug

SEQ ID NO: 1770977 - RNA, 19 nt, Artificial Sequence
  Description of Artificial Sequence: Synthetic oligonucleotide
agcgcacgcgcuggcggcu

SEQ ID NO: 1770978 - RNA, 19 nt, Artificial Sequence
  Description of Artificial Sequence: Synthetic oligonucleotide
caauagccgacagcagcgu

SEQ ID NO: 1770979 - RNA, 19 nt, Artificial Sequence
  Description of Artificial Sequence: Synthetic oligonucleotide
agccgacagcagcgucuca

SEQ ID NO: 1770980 - RNA, 19 nt, Artificial Sequence
  Description of Artificial Sequence: Synthetic oligonucleotide
cacucccaccucuuccgcu

SEQ ID NO: 1770981 - RNA, 19 nt, Artificial Sequence
  Description of Artificial Sequence: Synthetic oligonucleotide
ccgcacaggcagugcagug

SEQ ID NO: 1770982 - RNA, 19 nt, Artificial Sequence
  Description of Artificial Sequence: Synthetic oligonucleotide
ccuggccccaccuggucca

SEQ ID NO: 1770983 - RNA, 19 nt, Artificial Sequence
  Description of Artificial Sequence: Synthetic oligonucleotide
uucuugccgcuggggcuau

SEQ ID NO: 1770984 - RNA, 19 nt, Artificial Sequence
  Description of Artificial Sequence: Synthetic oligonucleotide
gcuugcgcaccugcugcac

SEQ ID NO: 1770985 - RNA, 19 nt, Artificial Sequence
  Description of Artificial Sequence: Synthetic oligonucleotide
ggcucuuauucaucuuguu

SEQ ID NO: 1770986 - RNA, 19 nt, Artificial Sequence
  Description of Artificial Sequence: Synthetic oligonucleotide
caugaaggcuuugcacaau

SEQ ID NO: 1770987 - RNA, 19 nt, Artificial Sequence
  Description of Artificial Sequence: Synthetic oligonucleotide
ccgccgccacucgagaccc

SEQ ID NO: 1770988 - RNA, 19 nt, Artificial Sequence
  Description of Artificial Sequence: Synthetic oligonucleotide
ggaugcggucugccgcaca

SEQ ID NO: 1770989 - RNA, 19 nt, Artificial Sequence
  Description of Artificial Sequence: Synthetic oligonucleotide
gccgcccagguaacgugcc

SEQ ID NO: 1770990 - RNA, 19 nt, Artificial Sequence
  Description of Artificial Sequence: Synthetic oligonucleotide
cgcgcgccggcuuugccac

SEQ ID NO: 1770991 - RNA, 19 nt, Artificial Sequence
  Description of Artificial Sequence: Synthetic oligonucleotide
cgcccagguaacgugccag

SEQ ID NO: 1770992 - RNA, 19 nt, Artificial Sequence
  Description of Artificial Sequence: Synthetic oligonucleotide
caaaggcgcucaagccacu

SEQ ID NO: 1770993 - RNA, 19 nt, Artificial Sequence
  Description of Artificial Sequence: Synthetic oligonucleotide
gucgccgucucgguucccu

SEQ ID NO: 1770994 - RNA, 19 nt, Artificial Sequence
  Description of Artificial Sequence: Synthetic oligonucleotide
ccugguuggaggagucaua

SEQ ID NO: 1770995 - RNA, 19 nt, Artificial Sequence
  Description of Artificial Sequence: Synthetic oligonucleotide
ggagccgcccagguaacgu

SEQ ID NO: 1770996 - RNA, 19 nt, Artificial Sequence
  Description of Artificial Sequence: Synthetic oligonucleotide
ccgggacuugggcagggca

SEQ ID NO: 1770997 - RNA, 19 nt, Artificial Sequence
  Description of Artificial Sequence: Synthetic oligonucleotide
cgccacugccacucgccgc

SEQ ID NO: 1770998 - RNA, 19 nt, Artificial Sequence
  Description of Artificial Sequence: Synthetic oligonucleotide
cccgaucgucgccgucucg

SEQ ID NO: 1770999 - RNA, 19 nt, Artificial Sequence
  Description of Artificial Sequence: Synthetic oligonucleotide
gcuuugccacccgcucggc

SEQ ID NO: 1771000 - RNA, 19 nt, Artificial Sequence
  Description of Artificial Sequence: Synthetic oligonucleotide
ccccaccugguccaggcaa

SEQ ID NO: 1771001 - RNA, 19 nt, Artificial Sequence
  Description of Artificial Sequence: Synthetic oligonucleotide
gcggaacuucuugccgcug

SEQ ID NO: 1771002 - RNA, 19 nt, Artificial Sequence
  Description of Artificial Sequence: Synthetic oligonucleotide
cugcagagagcugcccggu

SEQ ID NO: 1771003 - RNA, 19 nt, Artificial Sequence
  Description of Artificial Sequence: Synthetic oligonucleotide
ccgcuggggcuauaguaaa

SEQ ID NO: 1771004 - RNA, 19 nt, Artificial Sequence
  Description of Artificial Sequence: Synthetic oligonucleotide
gccgacagcagcgucucau

SEQ ID NO: 1771005 - RNA, 19 nt, Artificial Sequence
  Description of Artificial Sequence: Synthetic oligonucleotide
cagcagcgucucaucugua

SEQ ID NO: 1771006 - RNA, 19 nt, Artificial Sequence
  Description of Artificial Sequence: Synthetic oligonucleotide
ccgucucgguucccuccgc

SEQ ID NO: 1771007 - RNA, 19 nt, Artificial Sequence
  Description of Artificial Sequence: Synthetic oligonucleotide
cagucaccaugaaggcuuu

SEQ ID NO: 1771008 - RNA, 19 nt, Artificial Sequence
  Description of Artificial Sequence: Synthetic oligonucleotide
gcuccaucgcgccccggcu

SEQ ID NO: 1771009 - RNA, 19 nt, Artificial Sequence
  Description of Artificial Sequence: Synthetic oligonucleotide
ccgguugcuugaagaugga

SEQ ID NO: 1771010 - RNA, 19 nt, Artificial Sequence
  Description of Artificial Sequence: Synthetic oligonucleotide
gcgccggcuuugccacccg

SEQ ID NO: 1771011 - RNA, 19 nt, Artificial Sequence
  Description of Artificial Sequence: Synthetic oligonucleotide
ggacuugggcagggcaucu

SEQ ID NO: 1771012 - RNA, 19 nt, Artificial Sequence
  Description of Artificial Sequence: Synthetic oligonucleotide
ccgcauccugcuggccugg

SEQ ID NO: 1771013 - RNA, 19 nt, Artificial Sequence
  Description of Artificial Sequence: Synthetic oligonucleotide
ucuugccgcuggggcuaua

SEQ ID NO: 1771014 - RNA, 19 nt, Artificial Sequence
  Description of Artificial Sequence: Synthetic oligonucleotide
cugccuuggcugguccacu

SEQ ID NO: 1771015 - RNA, 19 nt, Artificial Sequence
  Description of Artificial Sequence: Synthetic oligonucleotide
ccuccuccuccuccuccuc

SEQ ID NO: 1771016 - RNA, 19 nt, Artificial Sequence
  Description of Artificial Sequence: Synthetic oligonucleotide
ccccgaucgucgccgucuc

SEQ ID NO: 1771017 - RNA, 19 nt, Artificial Sequence
  Description of Artificial Sequence: Synthetic oligonucleotide
gcggucugccgcacaggca

SEQ ID NO: 1771018 - RNA, 19 nt, Artificial Sequence
  Description of Artificial Sequence: Synthetic oligonucleotide
gccgggcacucccaccucu

SEQ ID NO: 1771019 - RNA, 19 nt, Artificial Sequence
  Description of Artificial Sequence: Synthetic oligonucleotide
gggcuucuugccagggagu

SEQ ID NO: 1771020 - RNA, 19 nt, Artificial Sequence
  Description of Artificial Sequence: Synthetic oligonucleotide
ccgacccacgggccuccgc

SEQ ID NO: 1771021 - RNA, 19 nt, Artificial Sequence
  Description of Artificial Sequence: Synthetic oligonucleotide
ccacucgccgcggcuguuc

SEQ ID NO: 1771022 - RNA, 19 nt, Artificial Sequence
  Description of Artificial Sequence: Synthetic oligonucleotide
gccccaccugguccaggca

SEQ ID NO: 1771023 - RNA, 19 nt, Artificial Sequence
  Description of Artificial Sequence: Synthetic oligonucleotide
cacugagacccgggagcua

SEQ ID NO: 1771024 - RNA, 19 nt, Artificial Sequence
  Description of Artificial Sequence: Synthetic oligonucleotide
gccgcacaggcagugcagu

SEQ ID NO: 1771025 - RNA, 19 nt, Artificial Sequence
  Description of Artificial Sequence: Synthetic oligonucleotide
caauggcugggugguguuu

SEQ ID NO: 1771026 - RNA, 19 nt, Artificial Sequence
  Description of Artificial Sequence: Synthetic oligonucleotide
ccauggagccgcccaggua

SEQ ID NO: 1771027 - RNA, 19 nt, Artificial Sequence
  Description of Artificial Sequence: Synthetic oligonucleotide
ggcggcucuuauucaucuu

SEQ ID NO: 1771028 - RNA, 19 nt, Artificial Sequence
  Description of Artificial Sequence: Synthetic oligonucleotide
cgcuggggcuauaguaaaa

SEQ ID NO: 1771029 - RNA, 19 nt, Artificial Sequence
  Description of Artificial Sequence: Synthetic oligonucleotide
ccgaccuccugggcacuuc

SEQ ID NO: 1771030 - RNA, 19 nt, Artificial Sequence
  Description of Artificial Sequence: Synthetic oligonucleotide
cggccgacagccccgaccu

SEQ ID NO: 1771031 - RNA, 19 nt, Artificial Sequence
  Description of Artificial Sequence: Synthetic oligonucleotide
cgccggcuuugccacccgc

SEQ ID NO: 1771032 - RNA, 19 nt, Artificial Sequence
  Description of Artificial Sequence: Synthetic oligonucleotide
cccagguaacgugccagcu

SEQ ID NO: 1771033 - RNA, 19 nt, Artificial Sequence
  Description of Artificial Sequence: Synthetic oligonucleotide
cgcuugcgcaccugcugca

SEQ ID NO: 1771034 - RNA, 19 nt, Artificial Sequence
  Description of Artificial Sequence: Synthetic oligonucleotide
cgcggcuguuccgacccac

SEQ ID NO: 1771035 - RNA, 19 nt, Artificial Sequence
  Description of Artificial Sequence: Synthetic oligonucleotide
gcgccccggcucuccgccc

SEQ ID NO: 1771036 - RNA, 19 nt, Artificial Sequence
  Description of Artificial Sequence: Synthetic oligonucleotide
gcccugcgggagcgccggg

SEQ ID NO: 1771037 - RNA, 19 nt, Artificial Sequence
  Description of Artificial Sequence: Synthetic oligonucleotide
cacgcgcuggcggcucuua

SEQ ID NO: 1771038 - RNA, 19 nt, Artificial Sequence
  Description of Artificial Sequence: Synthetic oligonucleotide
cccacgggccuccgcccuc

SEQ ID NO: 1771039 - RNA, 19 nt, Artificial Sequence
  Description of Artificial Sequence: Synthetic oligonucleotide
ccagggagugaaggagcaa

SEQ ID NO: 1771040 - RNA, 19 nt, Artificial Sequence
  Description of Artificial Sequence: Synthetic oligonucleotide
ggccgacagccccgaccuc

SEQ ID NO: 1771041 - RNA, 19 nt, Artificial Sequence
  Description of Artificial Sequence: Synthetic oligonucleotide
cgcuggcggcucuuauuca

SEQ ID NO: 1771042 - RNA, 19 nt, Artificial Sequence
  Description of Artificial Sequence: Synthetic oligonucleotide
cgaugucaaaggcgcucaa

SEQ ID NO: 1771043 - RNA, 19 nt, Artificial Sequence
  Description of Artificial Sequence: Synthetic oligonucleotide
ccgcccagguaacgugcca

SEQ ID NO: 1771044 - RNA, 19 nt, Artificial Sequence
  Description of Artificial Sequence: Synthetic oligonucleotide
cguccuccuccuccuccuc

SEQ ID NO: 1771045 - RNA, 19 nt, Artificial Sequence
  Description of Artificial Sequence: Synthetic oligonucleotide
gcgggagcgccgggcacuc

SEQ ID NO: 1771046 - RNA, 19 nt, Artificial Sequence
  Description of Artificial Sequence: Synthetic oligonucleotide
cgggacuugggcagggcau

SEQ ID NO: 1771047 - RNA, 19 nt, Artificial Sequence
  Description of Artificial Sequence: Synthetic oligonucleotide
gggcgcgcgccggcuuugc

SEQ ID NO: 1771048 - RNA, 19 nt, Artificial Sequence
  Description of Artificial Sequence: Synthetic oligonucleotide
ccccagccgggcgcgcgcc

SEQ ID NO: 1771049 - RNA, 19 nt, Artificial Sequence
  Description of Artificial Sequence: Synthetic oligonucleotide
cgcauccugcuggccuggc

SEQ ID NO: 1771050 - RNA, 19 nt, Artificial Sequence
  Description of Artificial Sequence: Synthetic oligonucleotide
ggccggccgacagccccga

SEQ ID NO: 1771051 - RNA, 19 nt, Artificial Sequence
  Description of Artificial Sequence: Synthetic oligonucleotide
cgaucgucgccgucucggu

SEQ ID NO: 1771052 - RNA, 19 nt, Artificial Sequence
  Description of Artificial Sequence: Synthetic oligonucleotide
gcgcacgcgcuggcggcuc

SEQ ID NO: 1771053 - RNA, 19 nt, Artificial Sequence
  Description of Artificial Sequence: Synthetic oligonucleotide
ccccggcucuccgcccgcc

SEQ ID NO: 1771054 - RNA, 19 nt, Artificial Sequence
  Description of Artificial Sequence: Synthetic oligonucleotide
gccggccgacagccccgac

SEQ ID NO: 1771055 - RNA, 19 nt, Artificial Sequence
  Description of Artificial Sequence: Synthetic oligonucleotide
cgccgccacucgagacccc

SEQ ID NO: 1771056 - RNA, 19 nt, Artificial Sequence
  Description of Artificial Sequence: Synthetic oligonucleotide
ccaucgcgccccggcucuc

SEQ ID NO: 1771057 - RNA, 19 nt, Artificial Sequence
  Description of Artificial Sequence: Synthetic oligonucleotide
ggcuugcccuugaccuggu

SEQ ID NO: 1771058 - RNA, 19 nt, Artificial Sequence
  Description of Artificial Sequence: Synthetic oligonucleotide
cgccgggcacucccaccuc

SEQ ID NO: 1771059 - RNA, 19 nt, Artificial Sequence
  Description of Artificial Sequence: Synthetic oligonucleotide
ccgcuccaucgcgccccgg

SEQ ID NO: 1771060 - RNA, 19 nt, Artificial Sequence
  Description of Artificial Sequence: Synthetic oligonucleotide
cgcgcuggcggcucuuauu

SEQ ID NO: 1771061 - RNA, 19 nt, Artificial Sequence
  Description of Artificial Sequence: Synthetic oligonucleotide
ccgggcacucccaccucuu

SEQ ID NO: 1771062 - RNA, 19 nt, Artificial Sequence
  Description of Artificial Sequence: Synthetic oligonucleotide
cgucgccgucucgguuccc

SEQ ID NO: 1771063 - RNA, 19 nt, Artificial Sequence
  Description of Artificial Sequence: Synthetic oligonucleotide
cccggcucuccgcccgccu

SEQ ID NO: 1771064 - RNA, 19 nt, Artificial Sequence
  Description of Artificial Sequence: Synthetic oligonucleotide
gcccggugaugggcagggu

SEQ ID NO: 1771065 - RNA, 19 nt, Artificial Sequence
  Description of Artificial Sequence: Synthetic oligonucleotide
cgcucagauucuggcucau

SEQ ID NO: 1771066 - RNA, 19 nt, Artificial Sequence
  Description of Artificial Sequence: Synthetic oligonucleotide
gcacgcgcuggcggcucuu

SEQ ID NO: 1771067 - RNA, 19 nt, Artificial Sequence
  Description of Artificial Sequence: Synthetic oligonucleotide
cgcacgcgcuggcggcucu

SEQ ID NO: 1771068 - RNA, 19 nt, Artificial Sequence
  Description of Artificial Sequence: Synthetic oligonucleotide
cccgaccuccugggcacuu

SEQ ID NO: 1771069 - RNA, 19 nt, Artificial Sequence
  Description of Artificial Sequence: Synthetic oligonucleotide
aacuauaucuggcuggucc

SEQ ID NO: 1771070 - RNA, 19 nt, Artificial Sequence
  Description of Artificial Sequence: Synthetic oligonucleotide
caaagggcaaauaagacag

SEQ ID NO: 1771071 - RNA, 19 nt, Artificial Sequence
  Description of Artificial Sequence: Synthetic oligonucleotide
aaccauugagcauucgagc

SEQ ID NO: 1771072 - RNA, 19 nt, Artificial Sequence
  Description of Artificial Sequence: Synthetic oligonucleotide
agggauuuuagguaagacc

SEQ ID NO: 1771073 - RNA, 19 nt, Artificial Sequence
  Description of Artificial Sequence: Synthetic oligonucleotide
ucagagauguaugugagcg

SEQ ID NO: 1771074 - RNA, 19 nt, Artificial Sequence
  Description of Artificial Sequence: Synthetic oligonucleotide
uuuaggacuacacuagccc

SEQ ID NO: 1771075 - RNA, 19 nt, Artificial Sequence
  Description of Artificial Sequence: Synthetic oligonucleotide
aaagccaagcaacacaaca

SEQ ID NO: 1771076 - RNA, 19 nt, Artificial Sequence
  Description of Artificial Sequence: Synthetic oligonucleotide
ucauuuaggacuacacuag

SEQ ID NO: 1771077 - RNA, 19 nt, Artificial Sequence
  Description of Artificial Sequence: Synthetic oligonucleotide
aagguuguucugaauaucc

SEQ ID NO: 1771078 - RNA, 19 nt, Artificial Sequence
  Description of Artificial Sequence: Synthetic oligonucleotide
aacagaagcaaucaggcuu

SEQ ID NO: 1771079 - RNA, 19 nt, Artificial Sequence
  Description of Artificial Sequence: Synthetic oligonucleotide
cauucgagcaucuaccugg

SEQ ID NO: 1771080 - RNA, 19 nt, Artificial Sequence
  Description of Artificial Sequence: Synthetic oligonucleotide
uuagguaagaccccucaag

SEQ ID NO: 1771081 - RNA, 19 nt, Artificial Sequence
  Description of Artificial Sequence: Synthetic oligonucleotide
uagguaagaccccucaagg

SEQ ID NO: 1771082 - RNA, 19 nt, Artificial Sequence
  Description of Artificial Sequence: Synthetic oligonucleotide
augauaguaagcuugccug

SEQ ID NO: 1771083 - RNA, 19 nt, Artificial Sequence
  Description of Artificial Sequence: Synthetic oligonucleotide
agaaguaggaccccuguuc

SEQ ID NO: 1771084 - RNA, 19 nt, Artificial Sequence
  Description of Artificial Sequence: Synthetic oligonucleotide
aaggugugcaaccauugag

SEQ ID NO: 1771085 - RNA, 19 nt, Artificial Sequence
  Description of Artificial Sequence: Synthetic oligonucleotide
caaauaagacaggagaucc

SEQ ID NO: 1771086 - RNA, 19 nt, Artificial Sequence
  Description of Artificial Sequence: Synthetic oligonucleotide
uucaguuggagguccaggg

SEQ ID NO: 1771087 - RNA, 19 nt, Artificial Sequence
  Description of Artificial Sequence: Synthetic oligonucleotide
aagacaggagauccucggc

SEQ ID NO: 1771088 - RNA, 19 nt, Artificial Sequence
  Description of Artificial Sequence: Synthetic oligonucleotide
ucauuuguaauccuuccuc

SEQ ID NO: 1771089 - RNA, 19 nt, Artificial Sequence
  Description of Artificial Sequence: Synthetic oligonucleotide
ucaggcuucacucaggaua

SEQ ID NO: 1771090 - RNA, 19 nt, Artificial Sequence
  Description of Artificial Sequence: Synthetic oligonucleotide
auaccuggggcuuugagug

SEQ ID NO: 1771091 - RNA, 19 nt, Artificial Sequence
  Description of Artificial Sequence: Synthetic oligonucleotide
ucgaacuauaucuggcugg

SEQ ID NO: 1771092 - RNA, 19 nt, Artificial Sequence
  Description of Artificial Sequence: Synthetic oligonucleotide
auccagaacuuccuggggc

SEQ ID NO: 1771093 - RNA, 19 nt, Artificial Sequence
  Description of Artificial Sequence: Synthetic oligonucleotide
gaugcaaaggugugcaacc

SEQ ID NO: 1771094 - RNA, 19 nt, Artificial Sequence
  Description of Artificial Sequence: Synthetic oligonucleotide
uaagacaggagauccucgg

SEQ ID NO: 1771095 - RNA, 19 nt, Artificial Sequence
  Description of Artificial Sequence: Synthetic oligonucleotide
uccagguaggagaaguagg

SEQ ID NO: 1771096 - RNA, 19 nt, Artificial Sequence
  Description of Artificial Sequence: Synthetic oligonucleotide
uuuuagguaagaccccuca

SEQ ID NO: 1771097 - RNA, 19 nt, Artificial Sequence
  Description of Artificial Sequence: Synthetic oligonucleotide
uucaggucaucaaagggca

SEQ ID NO: 1771098 - RNA, 19 nt, Artificial Sequence
  Description of Artificial Sequence: Synthetic oligonucleotide
ugugcuggcaggaagcuac

SEQ ID NO: 1771099 - RNA, 19 nt, Artificial Sequence
  Description of Artificial Sequence: Synthetic oligonucleotide
ugagcauucgagcaucuac

SEQ ID NO: 1771100 - RNA, 19 nt, Artificial Sequence
  Description of Artificial Sequence: Synthetic oligonucleotide
ugaauauccagaacuuccu

SEQ ID NO: 1771101 - RNA, 19 nt, Artificial Sequence
  Description of Artificial Sequence: Synthetic oligonucleotide
uacaugauaguaagcuugc

SEQ ID NO: 1771102 - RNA, 19 nt, Artificial Sequence
  Description of Artificial Sequence: Synthetic oligonucleotide
ugagugucuuucaagacuc

SEQ ID NO: 1771103 - RNA, 19 nt, Artificial Sequence
  Description of Artificial Sequence: Synthetic oligonucleotide
caagcaacacaacagcacc

SEQ ID NO: 1771104 - RNA, 19 nt, Artificial Sequence
  Description of Artificial Sequence: Synthetic oligonucleotide
ucaugaaucacugccaggu

SEQ ID NO: 1771105 - RNA, 19 nt, Artificial Sequence
  Description of Artificial Sequence: Synthetic oligonucleotide
gggauuuuagguaagaccc

SEQ ID NO: 1771106 - RNA, 19 nt, Artificial Sequence
  Description of Artificial Sequence: Synthetic oligonucleotide
uucccagagauuuucaggu

SEQ ID NO: 1771107 - RNA, 19 nt, Artificial Sequence
  Description of Artificial Sequence: Synthetic oligonucleotide
aauucuaugaguggcuggu

SEQ ID NO: 1771108 - RNA, 19 nt, Artificial Sequence
  Description of Artificial Sequence: Synthetic oligonucleotide
agcugugucaccauguugg

SEQ ID NO: 1771109 - RNA, 19 nt, Artificial Sequence
  Description of Artificial Sequence: Synthetic oligonucleotide
ucucauuuaggacuacacu

SEQ ID NO: 1771110 - RNA, 19 nt, Artificial Sequence
  Description of Artificial Sequence: Synthetic oligonucleotide
agugcugucugguaaaggu

SEQ ID NO: 1771111 - RNA, 19 nt, Artificial Sequence
  Description of Artificial Sequence: Synthetic oligonucleotide
uuaggacuacacuagcccc

SEQ ID NO: 1771112 - RNA, 19 nt, Artificial Sequence
  Description of Artificial Sequence: Synthetic oligonucleotide
auguugguccugcaguacc

SEQ ID NO: 1771113 - RNA, 19 nt, Artificial Sequence
  Description of Artificial Sequence: Synthetic oligonucleotide
auuuaggacuacacuagcc

SEQ ID NO: 1771114 - RNA, 19 nt, Artificial Sequence
  Description of Artificial Sequence: Synthetic oligonucleotide
caaccauugagcauucgag

SEQ ID NO: 1771115 - RNA, 19 nt, Artificial Sequence
  Description of Artificial Sequence: Synthetic oligonucleotide
aaagguuguucugaauauc

SEQ ID NO: 1771116 - RNA, 19 nt, Artificial Sequence
  Description of Artificial Sequence: Synthetic oligonucleotide
ugugcauugauguccgcgc

SEQ ID NO: 1771117 - RNA, 19 nt, Artificial Sequence
  Description of Artificial Sequence: Synthetic oligonucleotide
gucacaagcacacucagga

SEQ ID NO: 1771118 - RNA, 19 nt, Artificial Sequence
  Description of Artificial Sequence: Synthetic oligonucleotide
uguaugugagcgcuucgag

SEQ ID NO: 1771119 - RNA, 19 nt, Artificial Sequence
  Description of Artificial Sequence: Synthetic oligonucleotide
uccucagagauguauguga

SEQ ID NO: 1771120 - RNA, 19 nt, Artificial Sequence
  Description of Artificial Sequence: Synthetic oligonucleotide
caucaaagggcaaauaaga

SEQ ID NO: 1771121 - RNA, 19 nt, Artificial Sequence
  Description of Artificial Sequence: Synthetic oligonucleotide
ucuaugaguggcugguucc

SEQ ID NO: 1771122 - RNA, 19 nt, Artificial Sequence
  Description of Artificial Sequence: Synthetic oligonucleotide
aauuucugcccaugucauc

SEQ ID NO: 1771123 - RNA, 19 nt, Artificial Sequence
  Description of Artificial Sequence: Synthetic oligonucleotide
ugggcauuuccacaugaag

SEQ ID NO: 1771124 - RNA, 19 nt, Artificial Sequence
  Description of Artificial Sequence: Synthetic oligonucleotide
uucaagacucuccauccug

SEQ ID NO: 1771125 - RNA, 19 nt, Artificial Sequence
  Description of Artificial Sequence: Synthetic oligonucleotide
aaucaggcuucacucagga

SEQ ID NO: 1771126 - RNA, 19 nt, Artificial Sequence
  Description of Artificial Sequence: Synthetic oligonucleotide
cacaacagcaccgaugggg

SEQ ID NO: 1771127 - RNA, 19 nt, Artificial Sequence
  Description of Artificial Sequence: Synthetic oligonucleotide
agcuacaugauaguaagcu

SEQ ID NO: 1771128 - RNA, 19 nt, Artificial Sequence
  Description of Artificial Sequence: Synthetic oligonucleotide
gacuacacuagccccaggc

SEQ ID NO: 1771129 - RNA, 19 nt, Artificial Sequence
  Description of Artificial Sequence: Synthetic oligonucleotide
acugcaccaggcuauguuc

SEQ ID NO: 1771130 - RNA, 19 nt, Artificial Sequence
  Description of Artificial Sequence: Synthetic oligonucleotide
uaugugagcgcuucgaguu

SEQ ID NO: 1771131 - RNA, 19 nt, Artificial Sequence
  Description of Artificial Sequence: Synthetic oligonucleotide
aucaaagggcaaauaagac

SEQ ID NO: 1771132 - RNA, 19 nt, Artificial Sequence
  Description of Artificial Sequence: Synthetic oligonucleotide
ugaaucacugccaggugga

SEQ ID NO: 1771133 - RNA, 19 nt, Artificial Sequence
  Description of Artificial Sequence: Synthetic oligonucleotide
ucugaagcagcaauucuau

SEQ ID NO: 1771134 - RNA, 19 nt, Artificial Sequence
  Description of Artificial Sequence: Synthetic oligonucleotide
ugauaguaagcuugccugc

SEQ ID NO: 1771135 - RNA, 19 nt, Artificial Sequence
  Description of Artificial Sequence: Synthetic oligonucleotide
cuuugagugucuuucaaga

SEQ ID NO: 1771136 - RNA, 19 nt, Artificial Sequence
  Description of Artificial Sequence: Synthetic oligonucleotide
aggugugcaaccauugagc

SEQ ID NO: 1771137 - RNA, 19 nt, Artificial Sequence
  Description of Artificial Sequence: Synthetic oligonucleotide
agaguggaugaaaugcugc

SEQ ID NO: 1771138 - RNA, 19 nt, Artificial Sequence
  Description of Artificial Sequence: Synthetic oligonucleotide
aagccaagcaacacaacag

SEQ ID NO: 1771139 - RNA, 19 nt, Artificial Sequence
  Description of Artificial Sequence: Synthetic oligonucleotide
uaaagguuguucugaauau

SEQ ID NO: 1771140 - RNA, 19 nt, Artificial Sequence
  Description of Artificial Sequence: Synthetic oligonucleotide
ucuccauccucagagaugu

SEQ ID NO: 1771141 - RNA, 19 nt, Artificial Sequence
  Description of Artificial Sequence: Synthetic oligonucleotide
accauugagcauucgagca

SEQ ID NO: 1771142 - RNA, 19 nt, Artificial Sequence
  Description of Artificial Sequence: Synthetic oligonucleotide
guaaagguuguucugaaua

SEQ ID NO: 1771143 - RNA, 19 nt, Artificial Sequence
  Description of Artificial Sequence: Synthetic oligonucleotide
aggcucuagguucaacccc

SEQ ID NO: 1771144 - RNA, 19 nt, Artificial Sequence
  Description of Artificial Sequence: Synthetic oligonucleotide
aaaggugugcaaccauuga

SEQ ID NO: 1771145 - RNA, 19 nt, Artificial Sequence
  Description of Artificial Sequence: Synthetic oligonucleotide
ugcucgaacuauaucuggc

SEQ ID NO: 1771146 - RNA, 19 nt, Artificial Sequence
  Description of Artificial Sequence: Synthetic oligonucleotide
cucauuuaggacuacacua

SEQ ID NO: 1771147 - RNA, 19 nt, Artificial Sequence
  Description of Artificial Sequence: Synthetic oligonucleotide
agcguggcgauguggagac

SEQ ID NO: 1771148 - RNA, 19 nt, Artificial Sequence
  Description of Artificial Sequence: Synthetic oligonucleotide
uuugagugucuuucaagac

SEQ ID NO: 1771149 - RNA, 19 nt, Artificial Sequence
  Description of Artificial Sequence: Synthetic oligonucleotide
uucaugaaucacugccagg

SEQ ID NO: 1771150 - RNA, 19 nt, Artificial Sequence
  Description of Artificial Sequence: Synthetic oligonucleotide
uaagcuugccugccauugg

SEQ ID NO: 1771151 - RNA, 19 nt, Artificial Sequence
  Description of Artificial Sequence: Synthetic oligonucleotide
aguaggaccccuguucugg

SEQ ID NO: 1771152 - RNA, 19 nt, Artificial Sequence
  Description of Artificial Sequence: Synthetic oligonucleotide
gucggcaccagcuucacac

SEQ ID NO: 1771153 - RNA, 19 nt, Artificial Sequence
  Description of Artificial Sequence: Synthetic oligonucleotide
cucucauuuaggacuacac

SEQ ID NO: 1771154 - RNA, 19 nt, Artificial Sequence
  Description of Artificial Sequence: Synthetic oligonucleotide
uccucauuuguaauccuuc

SEQ ID NO: 1771155 - RNA, 19 nt, Artificial Sequence
  Description of Artificial Sequence: Synthetic oligonucleotide
acaagcacacucaggaggg

SEQ ID NO: 1771156 - RNA, 19 nt, Artificial Sequence
  Description of Artificial Sequence: Synthetic oligonucleotide
uggggcuucaugaaucacu

SEQ ID NO: 1771157 - RNA, 19 nt, Artificial Sequence
  Description of Artificial Sequence: Synthetic oligonucleotide
gauguaugugagcgcuucg

SEQ ID NO: 1771158 - RNA, 19 nt, Artificial Sequence
  Description of Artificial Sequence: Synthetic oligonucleotide
agcagcaauucuaugagug

SEQ ID NO: 1771159 - RNA, 19 nt, Artificial Sequence
  Description of Artificial Sequence: Synthetic oligonucleotide
uggcaagcuacaugcagag

SEQ ID NO: 1771160 - RNA, 19 nt, Artificial Sequence
  Description of Artificial Sequence: Synthetic oligonucleotide
gauaguaagcuugccugcc

SEQ ID NO: 1771161 - RNA, 19 nt, Artificial Sequence
  Description of Artificial Sequence: Synthetic oligonucleotide
ggugagauggcucucugcc

SEQ ID NO: 1771162 - RNA, 19 nt, Artificial Sequence
  Description of Artificial Sequence: Synthetic oligonucleotide
uucuaugaguggcugguuc

SEQ ID NO: 1771163 - RNA, 19 nt, Artificial Sequence
  Description of Artificial Sequence: Synthetic oligonucleotide
aagcaacacaacagcaccg

SEQ ID NO: 1771164 - RNA, 19 nt, Artificial Sequence
  Description of Artificial Sequence: Synthetic oligonucleotide
agagauguaugugagcgcu

SEQ ID NO: 1771165 - RNA, 19 nt, Artificial Sequence
  Description of Artificial Sequence: Synthetic oligonucleotide
ucuggcgcuggcaagcuac

SEQ ID NO: 1771166 - RNA, 19 nt, Artificial Sequence
  Description of Artificial Sequence: Synthetic oligonucleotide
acagaagcaaucaggcuuc

SEQ ID NO: 1771167 - RNA, 19 nt, Artificial Sequence
  Description of Artificial Sequence: Synthetic oligonucleotide
caauucuaugaguggcugg

SEQ ID NO: 1771168 - RNA, 19 nt, Artificial Sequence
  Description of Artificial Sequence: Synthetic oligonucleotide
ugucugugcuggcaggaag

SEQ ID NO: 1771169 - RNA, 19 nt, Artificial Sequence
  Description of Artificial Sequence: Synthetic oligonucleotide
gguuguucugaauauccag

SEQ ID NO: 1771170 - RNA, 19 nt, Artificial Sequence
  Description of Artificial Sequence: Synthetic oligonucleotide
cauuuaggacuacacuagc

SEQ ID NO: 1771171 - RNA, 19 nt, Artificial Sequence
  Description of Artificial Sequence: Synthetic oligonucleotide
acuauaucuggcuggucca

SEQ ID NO: 1771172 - RNA, 19 nt, Artificial Sequence
  Description of Artificial Sequence: Synthetic oligonucleotide
guugcuugggccccaacug

SEQ ID NO: 1771173 - RNA, 19 nt, Artificial Sequence
  Description of Artificial Sequence: Synthetic oligonucleotide
uaggacuacacuagcccca

SEQ ID NO: 1771174 - RNA, 19 nt, Artificial Sequence
  Description of Artificial Sequence: Synthetic oligonucleotide
guccgcgccauucugaagc

SEQ ID NO: 1771175 - RNA, 19 nt, Artificial Sequence
  Description of Artificial Sequence: Synthetic oligonucleotide
uuuagguaagaccccucaa

SEQ ID NO: 1771176 - RNA, 19 nt, Artificial Sequence
  Description of Artificial Sequence: Synthetic oligonucleotide
gaccuugccaguucuucag

SEQ ID NO: 1771177 - RNA, 19 nt, Artificial Sequence
  Description of Artificial Sequence: Synthetic oligonucleotide
aagcuacaugauaguaagc

SEQ ID NO: 1771178 - RNA, 19 nt, Artificial Sequence
  Description of Artificial Sequence: Synthetic oligonucleotide
cuugccugccauugggagg

SEQ ID NO: 1771179 - RNA, 19 nt, Artificial Sequence
  Description of Artificial Sequence: Synthetic oligonucleotide
guaagaccccucaaggucc

SEQ ID NO: 1771180 - RNA, 19 nt, Artificial Sequence
  Description of Artificial Sequence: Synthetic oligonucleotide
uccagaacuuccuggggca

SEQ ID NO: 1771181 - RNA, 19 nt, Artificial Sequence
  Description of Artificial Sequence: Synthetic oligonucleotide
gaugaacagcaagaugaag

SEQ ID NO: 1771182 - RNA, 19 nt, Artificial Sequence
  Description of Artificial Sequence: Synthetic oligonucleotide
gcagucuuuccacuggucg

SEQ ID NO: 1771183 - RNA, 19 nt, Artificial Sequence
  Description of Artificial Sequence: Synthetic oligonucleotide
agcgcuucgaguugcugag

SEQ ID NO: 1771184 - RNA, 19 nt, Artificial Sequence
  Description of Artificial Sequence: Synthetic oligonucleotide
uuucaagacucuccauccu

SEQ ID NO: 1771185 - RNA, 19 nt, Artificial Sequence
  Description of Artificial Sequence: Synthetic oligonucleotide
gggcaaauaagacaggaga

SEQ ID NO: 1771186 - RNA, 19 nt, Artificial Sequence
  Description of Artificial Sequence: Synthetic oligonucleotide
aaauaagacaggagauccu

SEQ ID NO: 1771187 - RNA, 19 nt, Artificial Sequence
  Description of Artificial Sequence: Synthetic oligonucleotide
gagauuuucaggucaucaa

SEQ ID NO: 1771188 - RNA, 19 nt, Artificial Sequence
  Description of Artificial Sequence: Synthetic oligonucleotide
uggaugaaaugcugcuaag

SEQ ID NO: 1771189 - RNA, 19 nt, Artificial Sequence
  Description of Artificial Sequence: Synthetic oligonucleotide
gauucuggcgcuggcaagc

SEQ ID NO: 1771190 - RNA, 19 nt, Artificial Sequence
  Description of Artificial Sequence: Synthetic oligonucleotide
cuucacacagaguggauga

SEQ ID NO: 1771191 - RNA, 19 nt, Artificial Sequence
  Description of Artificial Sequence: Synthetic oligonucleotide
cuuccucucauuuaggacu

SEQ ID NO: 1771192 - RNA, 19 nt, Artificial Sequence
  Description of Artificial Sequence: Synthetic oligonucleotide
cuaccugggccccagcccg

SEQ ID NO: 1771193 - RNA, 19 nt, Artificial Sequence
  Description of Artificial Sequence: Synthetic oligonucleotide
ucugaauauccagaacuuc

SEQ ID NO: 1771194 - RNA, 19 nt, Artificial Sequence
  Description of Artificial Sequence: Synthetic oligonucleotide
acaugauaguaagcuugcc

SEQ ID NO: 1771195 - RNA, 19 nt, Artificial Sequence
  Description of Artificial Sequence: Synthetic oligonucleotide
agugucuuucaagacucuc

SEQ ID NO: 1771196 - RNA, 19 nt, Artificial Sequence
  Description of Artificial Sequence: Synthetic oligonucleotide
aguugcugagggcucagca

SEQ ID NO: 1771197 - RNA, 19 nt, Artificial Sequence
  Description of Artificial Sequence: Synthetic oligonucleotide
cuugccaguucuucaguug

SEQ ID NO: 1771198 - RNA, 19 nt, Artificial Sequence
  Description of Artificial Sequence: Synthetic oligonucleotide
uguugguccugcaguaccu

SEQ ID NO: 1771199 - RNA, 19 nt, Artificial Sequence
  Description of Artificial Sequence: Synthetic oligonucleotide
gugcucgaacuauaucugg

SEQ ID NO: 1771200 - RNA, 19 nt, Artificial Sequence
  Description of Artificial Sequence: Synthetic oligonucleotide
gguaagaccccucaagguc

SEQ ID NO: 1771201 - RNA, 19 nt, Artificial Sequence
  Description of Artificial Sequence: Synthetic oligonucleotide
aguggcuucccagagauuu

SEQ ID NO: 1771202 - RNA, 19 nt, Artificial Sequence
  Description of Artificial Sequence: Synthetic oligonucleotide
cucgaacuauaucuggcug

SEQ ID NO: 1771203 - RNA, 19 nt, Artificial Sequence
  Description of Artificial Sequence: Synthetic oligonucleotide
agguaagaccccucaaggu

SEQ ID NO: 1771204 - RNA, 19 nt, Artificial Sequence
  Description of Artificial Sequence: Synthetic oligonucleotide
guaagcuugccugccauug

SEQ ID NO: 1771205 - RNA, 19 nt, Artificial Sequence
  Description of Artificial Sequence: Synthetic oligonucleotide
acuacacuagccccaggcu

SEQ ID NO: 1771206 - RNA, 19 nt, Artificial Sequence
  Description of Artificial Sequence: Synthetic oligonucleotide
ggaggcucuagguucaacc

SEQ ID NO: 1771207 - RNA, 19 nt, Artificial Sequence
  Description of Artificial Sequence: Synthetic oligonucleotide
aguacacagcaguggcuuc

SEQ ID NO: 1771208 - RNA, 19 nt, Artificial Sequence
  Description of Artificial Sequence: Synthetic oligonucleotide
cuuccuuccggacugucuc

SEQ ID NO: 1771209 - RNA, 19 nt, Artificial Sequence
  Description of Artificial Sequence: Synthetic oligonucleotide
uccuguuugcucaucccuc

SEQ ID NO: 1771210 - RNA, 19 nt, Artificial Sequence
  Description of Artificial Sequence: Synthetic oligonucleotide
gaaguucuuccuuccggac

SEQ ID NO: 1771211 - RNA, 19 nt, Artificial Sequence
  Description of Artificial Sequence: Synthetic oligonucleotide
aaguaggaccccuguucug

SEQ ID NO: 1771212 - RNA, 19 nt, Artificial Sequence
  Description of Artificial Sequence: Synthetic oligonucleotide
ugucucuuccucauuugua

SEQ ID NO: 1771213 - RNA, 19 nt, Artificial Sequence
  Description of Artificial Sequence: Synthetic oligonucleotide
cagaggggcauguugcuug

SEQ ID NO: 1771214 - RNA, 19 nt, Artificial Sequence
  Description of Artificial Sequence: Synthetic oligonucleotide
agcauucgagcaucuaccu

SEQ ID NO: 1771215 - RNA, 19 nt, Artificial Sequence
  Description of Artificial Sequence: Synthetic oligonucleotide
uaauccuuccucucauuua

SEQ ID NO: 1771216 - RNA, 19 nt, Artificial Sequence
  Description of Artificial Sequence: Synthetic oligonucleotide
gggaaguucuuccuuccgg

SEQ ID NO: 1771217 - RNA, 19 nt, Artificial Sequence
  Description of Artificial Sequence: Synthetic oligonucleotide
cugugcauugauguccgcg

SEQ ID NO: 1771218 - RNA, 19 nt, Artificial Sequence
  Description of Artificial Sequence: Synthetic oligonucleotide
gcaggcacaggccagauuc

SEQ ID NO: 1771219 - RNA, 19 nt, Artificial Sequence
  Description of Artificial Sequence: Synthetic oligonucleotide
cacauucagcagcagggag

SEQ ID NO: 1771220 - RNA, 19 nt, Artificial Sequence
  Description of Artificial Sequence: Synthetic oligonucleotide
cagugcucgaacuauaucu

SEQ ID NO: 1771221 - RNA, 19 nt, Artificial Sequence
  Description of Artificial Sequence: Synthetic oligonucleotide
cugcaccaggcuauguucc

SEQ ID NO: 1771222 - RNA, 19 nt, Artificial Sequence
  Description of Artificial Sequence: Synthetic oligonucleotide
gauaccuggggcuuugagu

SEQ ID NO: 1771223 - RNA, 19 nt, Artificial Sequence
  Description of Artificial Sequence: Synthetic oligonucleotide
gcccaugucaucuucaaca

SEQ ID NO: 1771224 - RNA, 19 nt, Artificial Sequence
  Description of Artificial Sequence: Synthetic oligonucleotide
caccaggcuauguuccugg

SEQ ID NO: 1771225 - RNA, 19 nt, Artificial Sequence
  Description of Artificial Sequence: Synthetic oligonucleotide
auaguaagcuugccugcca

SEQ ID NO: 1771226 - RNA, 19 nt, Artificial Sequence
  Description of Artificial Sequence: Synthetic oligonucleotide
gguccagaugaacagcaag

SEQ ID NO: 1771227 - RNA, 19 nt, Artificial Sequence
  Description of Artificial Sequence: Synthetic oligonucleotide
gauggggcuucaugaauca

SEQ ID NO: 1771228 - RNA, 19 nt, Artificial Sequence
  Description of Artificial Sequence: Synthetic oligonucleotide
agugcucgaacuauaucug

SEQ ID NO: 1771229 - RNA, 19 nt, Artificial Sequence
  Description of Artificial Sequence: Synthetic oligonucleotide
ugguaaagguuguucugaa

SEQ ID NO: 1771230 - RNA, 19 nt, Artificial Sequence
  Description of Artificial Sequence: Synthetic oligonucleotide
agaggggcauguugcuugg

SEQ ID NO: 1771231 - RNA, 19 nt, Artificial Sequence
  Description of Artificial Sequence: Synthetic oligonucleotide
uugggaggcucuagguuca

SEQ ID NO: 1771232 - RNA, 19 nt, Artificial Sequence
  Description of Artificial Sequence: Synthetic oligonucleotide
uauguuccuggguuuccac

SEQ ID NO: 1771233 - RNA, 19 nt, Artificial Sequence
  Description of Artificial Sequence: Synthetic oligonucleotide
gcuuugagugucuuucaag

SEQ ID NO: 1771234 - RNA, 19 nt, Artificial Sequence
  Description of Artificial Sequence: Synthetic oligonucleotide
cagagauguaugugagcgc

SEQ ID NO: 1771235 - RNA, 19 nt, Artificial Sequence
  Description of Artificial Sequence: Synthetic oligonucleotide
gaaguaggaccccuguucu

SEQ ID NO: 1771236 - RNA, 19 nt, Artificial Sequence
  Description of Artificial Sequence: Synthetic oligonucleotide
uaucuggcugguccagaug

SEQ ID NO: 1771237 - RNA, 19 nt, Artificial Sequence
  Description of Artificial Sequence: Synthetic oligonucleotide
uaguaagcuugccugccau

SEQ ID NO: 1771238 - RNA, 19 nt, Artificial Sequence
  Description of Artificial Sequence: Synthetic oligonucleotide
agaccuugccaguucuuca

SEQ ID NO: 1771239 - RNA, 19 nt, Artificial Sequence
  Description of Artificial Sequence: Synthetic oligonucleotide
agauucuggcgcuggcaag

SEQ ID NO: 1771240 - RNA, 19 nt, Artificial Sequence
  Description of Artificial Sequence: Synthetic oligonucleotide
ugcuugggccccaacugca

SEQ ID NO: 1771241 - RNA, 19 nt, Artificial Sequence
  Description of Artificial Sequence: Synthetic oligonucleotide
aaaugcugcuaaggccccg

SEQ ID NO: 1771242 - RNA, 19 nt, Artificial Sequence
  Description of Artificial Sequence: Synthetic oligonucleotide
cacucaggagggauuuuag

SEQ ID NO: 1771243 - RNA, 19 nt, Artificial Sequence
  Description of Artificial Sequence: Synthetic oligonucleotide
ugugagcgcuucgaguugc

SEQ ID NO: 1771244 - RNA, 19 nt, Artificial Sequence
  Description of Artificial Sequence: Synthetic oligonucleotide
uuccucucauuuaggacua

SEQ ID NO: 1771245 - RNA, 19 nt, Artificial Sequence
  Description of Artificial Sequence: Synthetic oligonucleotide
cucccuucagcaccagugc

SEQ ID NO: 1771246 - RNA, 19 nt, Artificial Sequence
  Description of Artificial Sequence: Synthetic oligonucleotide
auuuuagguaagaccccuc

SEQ ID NO: 1771247 - RNA, 19 nt, Artificial Sequence
  Description of Artificial Sequence: Synthetic oligonucleotide
ugcugcuaaggccccggcc

SEQ ID NO: 1771248 - RNA, 19 nt, Artificial Sequence
  Description of Artificial Sequence: Synthetic oligonucleotide
cucaggagggauuuuaggu

SEQ ID NO: 1771249 - RNA, 19 nt, Artificial Sequence
  Description of Artificial Sequence: Synthetic oligonucleotide
cuggcaagcuacaugcaga

SEQ ID NO: 1771250 - RNA, 19 nt, Artificial Sequence
  Description of Artificial Sequence: Synthetic oligonucleotide
gcgcuggcaagcuacaugc

SEQ ID NO: 1771251 - RNA, 19 nt, Artificial Sequence
  Description of Artificial Sequence: Synthetic oligonucleotide
cauugagcauucgagcauc

SEQ ID NO: 1771252 - RNA, 19 nt, Artificial Sequence
  Description of Artificial Sequence: Synthetic oligonucleotide
ugaguggcugguuccucug

SEQ ID NO: 1771253 - RNA, 19 nt, Artificial Sequence
  Description of Artificial Sequence: Synthetic oligonucleotide
agggcaaauaagacaggag

SEQ ID NO: 1771254 - RNA, 19 nt, Artificial Sequence
  Description of Artificial Sequence: Synthetic oligonucleotide
gcuggcaagcuacaugcag

SEQ ID NO: 1771255 - RNA, 19 nt, Artificial Sequence
  Description of Artificial Sequence: Synthetic oligonucleotide
ugugucugugcuggcagga

SEQ ID NO: 1771256 - RNA, 19 nt, Artificial Sequence
  Description of Artificial Sequence: Synthetic oligonucleotide
ccagcugccagaugcaaag

SEQ ID NO: 1771257 - RNA, 19 nt, Artificial Sequence
  Description of Artificial Sequence: Synthetic oligonucleotide
uucgaguugcugagggcuc

SEQ ID NO: 1771258 - RNA, 19 nt, Artificial Sequence
  Description of Artificial Sequence: Synthetic oligonucleotide
uaagaccccucaagguccu

SEQ ID NO: 1771259 - RNA, 19 nt, Artificial Sequence
  Description of Artificial Sequence: Synthetic oligonucleotide
ccucauuuguaauccuucc

SEQ ID NO: 1771260 - RNA, 19 nt, Artificial Sequence
  Description of Artificial Sequence: Synthetic oligonucleotide
ggcaggaaagccaagcaac

SEQ ID NO: 1771261 - RNA, 19 nt, Artificial Sequence
  Description of Artificial Sequence: Synthetic oligonucleotide
gucaccauguugguccugc

SEQ ID NO: 1771262 - RNA, 19 nt, Artificial Sequence
  Description of Artificial Sequence: Synthetic oligonucleotide
ggcugguuccucugcagcg

SEQ ID NO: 1771263 - RNA, 19 nt, Artificial Sequence
  Description of Artificial Sequence: Synthetic oligonucleotide
uggcgauguggagacaggc

SEQ ID NO: 1771264 - RNA, 19 nt, Artificial Sequence
  Description of Artificial Sequence: Synthetic oligonucleotide
ggugugcaaccauugagca

SEQ ID NO: 1771265 - RNA, 19 nt, Artificial Sequence
  Description of Artificial Sequence: Synthetic oligonucleotide
ggaaguucuuccuuccgga

SEQ ID NO: 1771266 - RNA, 19 nt, Artificial Sequence
  Description of Artificial Sequence: Synthetic oligonucleotide
cuggggugucucaucuucc

SEQ ID NO: 1771267 - RNA, 19 nt, Artificial Sequence
  Description of Artificial Sequence: Synthetic oligonucleotide
auucgagcaucuaccuggg

SEQ ID NO: 1771268 - RNA, 19 nt, Artificial Sequence
  Description of Artificial Sequence: Synthetic oligonucleotide
ucggccagguccuggggug

SEQ ID NO: 1771269 - RNA, 19 nt, Artificial Sequence
  Description of Artificial Sequence: Synthetic oligonucleotide
accaggcuauguuccuggg

SEQ ID NO: 1771270 - RNA, 19 nt, Artificial Sequence
  Description of Artificial Sequence: Synthetic oligonucleotide
uucuucaguuggaggucca

SEQ ID NO: 1771271 - RNA, 19 nt, Artificial Sequence
  Description of Artificial Sequence: Synthetic oligonucleotide
gcaaauaagacaggagauc

SEQ ID NO: 1771272 - RNA, 19 nt, Artificial Sequence
  Description of Artificial Sequence: Synthetic oligonucleotide
caggagggauuuuagguaa

SEQ ID NO: 1771273 - RNA, 19 nt, Artificial Sequence
  Description of Artificial Sequence: Synthetic oligonucleotide
agaagcaaucaggcuucac

SEQ ID NO: 1771274 - RNA, 19 nt, Artificial Sequence
  Description of Artificial Sequence: Synthetic oligonucleotide
cuauaucuggcugguccag

SEQ ID NO: 1771275 - RNA, 19 nt, Artificial Sequence
  Description of Artificial Sequence: Synthetic oligonucleotide
caccauguugguccugcag

SEQ ID NO: 1771276 - RNA, 19 nt, Artificial Sequence
  Description of Artificial Sequence: Synthetic oligonucleotide
augcugcuaaggccccggc

SEQ ID NO: 1771277 - RNA, 19 nt, Artificial Sequence
  Description of Artificial Sequence: Synthetic oligonucleotide
caccgauggggcuucauga

SEQ ID NO: 1771278 - RNA, 19 nt, Artificial Sequence
  Description of Artificial Sequence: Synthetic oligonucleotide
acuggucgccuccugugca

SEQ ID NO: 1771279 - RNA, 19 nt, Artificial Sequence
  Description of Artificial Sequence: Synthetic oligonucleotide
uguaauccuuccucucauu

SEQ ID NO: 1771280 - RNA, 19 nt, Artificial Sequence
  Description of Artificial Sequence: Synthetic oligonucleotide
ccucagagauguaugugag

SEQ ID NO: 1771281 - RNA, 19 nt, Artificial Sequence
  Description of Artificial Sequence: Synthetic oligonucleotide
agcaccucuguguggggca

SEQ ID NO: 1771282 - RNA, 19 nt, Artificial Sequence
  Description of Artificial Sequence: Synthetic oligonucleotide
uccuggguuuccacagcca

SEQ ID NO: 1771283 - RNA, 19 nt, Artificial Sequence
  Description of Artificial Sequence: Synthetic oligonucleotide
augugagcgcuucgaguug

SEQ ID NO: 1771284 - RNA, 19 nt, Artificial Sequence
  Description of Artificial Sequence: Synthetic oligonucleotide
gcaaccauugagcauucga

SEQ ID NO: 1771285 - RNA, 19 nt, Artificial Sequence
  Description of Artificial Sequence: Synthetic oligonucleotide
aagcacacucaggagggau

SEQ ID NO: 1771286 - RNA, 19 nt, Artificial Sequence
  Description of Artificial Sequence: Synthetic oligonucleotide
ugcaccaggcuauguuccu

SEQ ID NO: 1771287 - RNA, 19 nt, Artificial Sequence
  Description of Artificial Sequence: Synthetic oligonucleotide
aggacuacacuagccccag

SEQ ID NO: 1771288 - RNA, 19 nt, Artificial Sequence
  Description of Artificial Sequence: Synthetic oligonucleotide
agaacuuccuggggcagga

SEQ ID NO: 1771289 - RNA, 19 nt, Artificial Sequence
  Description of Artificial Sequence: Synthetic oligonucleotide
gaaucacugccagguggag

SEQ ID NO: 1771290 - RNA, 19 nt, Artificial Sequence
  Description of Artificial Sequence: Synthetic oligonucleotide
agaugugucugugcuggca

SEQ ID NO: 1771291 - RNA, 19 nt, Artificial Sequence
  Description of Artificial Sequence: Synthetic oligonucleotide
ggauuuuagguaagacccc

SEQ ID NO: 1771292 - RNA, 19 nt, Artificial Sequence
  Description of Artificial Sequence: Synthetic oligonucleotide
gcugcuaaggccccggcca

SEQ ID NO: 1771293 - RNA, 19 nt, Artificial Sequence
  Description of Artificial Sequence: Synthetic oligonucleotide
ucccagagauuuucagguc

SEQ ID NO: 1771294 - RNA, 19 nt, Artificial Sequence
  Description of Artificial Sequence: Synthetic oligonucleotide
gcgauguggagacaggcca

SEQ ID NO: 1771295 - RNA, 19 nt, Artificial Sequence
  Description of Artificial Sequence: Synthetic oligonucleotide
guuccuggguuuccacagc

SEQ ID NO: 1771296 - RNA, 19 nt, Artificial Sequence
  Description of Artificial Sequence: Synthetic oligonucleotide
guaggaccccuguucuggc

SEQ ID NO: 1771297 - RNA, 19 nt, Artificial Sequence
  Description of Artificial Sequence: Synthetic oligonucleotide
ggaagcuacaugauaguaa

SEQ ID NO: 1771298 - RNA, 19 nt, Artificial Sequence
  Description of Artificial Sequence: Synthetic oligonucleotide
guaugugagcgcuucgagu

SEQ ID NO: 1771299 - RNA, 19 nt, Artificial Sequence
  Description of Artificial Sequence: Synthetic oligonucleotide
agaugaacagcaagaugaa

SEQ ID NO: 1771300 - RNA, 19 nt, Artificial Sequence
  Description of Artificial Sequence: Synthetic oligonucleotide
ucggcaccagcuucacaca

SEQ ID NO: 1771301 - RNA, 19 nt, Artificial Sequence
  Description of Artificial Sequence: Synthetic oligonucleotide
aggagcgugucuccauccu

SEQ ID NO: 1771302 - RNA, 19 nt, Artificial Sequence
  Description of Artificial Sequence: Synthetic oligonucleotide
cacuggucgccuccugugc

SEQ ID NO: 1771303 - RNA, 19 nt, Artificial Sequence
  Description of Artificial Sequence: Synthetic oligonucleotide
ugcaaccauugagcauucg

SEQ ID NO: 1771304 - RNA, 19 nt, Artificial Sequence
  Description of Artificial Sequence: Synthetic oligonucleotide
gcaauucuaugaguggcug

SEQ ID NO: 1771305 - RNA, 19 nt, Artificial Sequence
  Description of Artificial Sequence: Synthetic oligonucleotide
cagaccuugccaguucuuc

SEQ ID NO: 1771306 - RNA, 19 nt, Artificial Sequence
  Description of Artificial Sequence: Synthetic oligonucleotide
aguaagcuugccugccauu

SEQ ID NO: 1771307 - RNA, 19 nt, Artificial Sequence
  Description of Artificial Sequence: Synthetic oligonucleotide
uccucugcagcguggcgau

SEQ ID NO: 1771308 - RNA, 19 nt, Artificial Sequence
  Description of Artificial Sequence: Synthetic oligonucleotide
auggggcuucaugaaucac

SEQ ID NO: 1771309 - RNA, 19 nt, Artificial Sequence
  Description of Artificial Sequence: Synthetic oligonucleotide
ucgaguugcugagggcuca

SEQ ID NO: 1771310 - RNA, 19 nt, Artificial Sequence
  Description of Artificial Sequence: Synthetic oligonucleotide
gcuucacacagaguggaug

SEQ ID NO: 1771311 - RNA, 19 nt, Artificial Sequence
  Description of Artificial Sequence: Synthetic oligonucleotide
ggggcuuugagugucuuuc

SEQ ID NO: 1771312 - RNA, 19 nt, Artificial Sequence
  Description of Artificial Sequence: Synthetic oligonucleotide
auguccgcgccauucugaa

SEQ ID NO: 1771313 - RNA, 19 nt, Artificial Sequence
  Description of Artificial Sequence: Synthetic oligonucleotide
uguccgcgccauucugaag

SEQ ID NO: 1771314 - RNA, 19 nt, Artificial Sequence
  Description of Artificial Sequence: Synthetic oligonucleotide
ccuggguuuccacagccag

SEQ ID NO: 1771315 - RNA, 19 nt, Artificial Sequence
  Description of Artificial Sequence: Synthetic oligonucleotide
ccuuccucucauuuaggac

SEQ ID NO: 1771316 - RNA, 19 nt, Artificial Sequence
  Description of Artificial Sequence: Synthetic oligonucleotide
ggcaauuucugcccauguc

SEQ ID NO: 1771317 - RNA, 19 nt, Artificial Sequence
  Description of Artificial Sequence: Synthetic oligonucleotide
uccgcgccauucugaagca

SEQ ID NO: 1771318 - RNA, 19 nt, Artificial Sequence
  Description of Artificial Sequence: Synthetic oligonucleotide
ggauaccuggggcuuugag

SEQ ID NO: 1771319 - RNA, 19 nt, Artificial Sequence
  Description of Artificial Sequence: Synthetic oligonucleotide
agauccucggccagguccu

SEQ ID NO: 1771320 - RNA, 19 nt, Artificial Sequence
  Description of Artificial Sequence: Synthetic oligonucleotide
auguugcuugggccccaac

SEQ ID NO: 1771321 - RNA, 19 nt, Artificial Sequence
  Description of Artificial Sequence: Synthetic oligonucleotide
gguccuguuugcucauccc

SEQ ID NO: 1771322 - RNA, 19 nt, Artificial Sequence
  Description of Artificial Sequence: Synthetic oligonucleotide
uuccugauguuuggcaauu

SEQ ID NO: 1771323 - RNA, 19 nt, Artificial Sequence
  Description of Artificial Sequence: Synthetic oligonucleotide
auccuuccucucauuuagg

SEQ ID NO: 1771324 - RNA, 19 nt, Artificial Sequence
  Description of Artificial Sequence: Synthetic oligonucleotide
cauccucagagauguaugu

SEQ ID NO: 1771325 - RNA, 19 nt, Artificial Sequence
  Description of Artificial Sequence: Synthetic oligonucleotide
cuucgaguugcugagggcu

SEQ ID NO: 1771326 - RNA, 19 nt, Artificial Sequence
  Description of Artificial Sequence: Synthetic oligonucleotide
cugcuaaggccccggccag

SEQ ID NO: 1771327 - RNA, 19 nt, Artificial Sequence
  Description of Artificial Sequence: Synthetic oligonucleotide
uaggaccccuguucuggcu

SEQ ID NO: 1771328 - RNA, 19 nt, Artificial Sequence
  Description of Artificial Sequence: Synthetic oligonucleotide
gcauucgagcaucuaccug

SEQ ID NO: 1771329 - RNA, 19 nt, Artificial Sequence
  Description of Artificial Sequence: Synthetic oligonucleotide
cuggcugguccagaugaac

SEQ ID NO: 1771330 - RNA, 19 nt, Artificial Sequence
  Description of Artificial Sequence: Synthetic oligonucleotide
ugagcgcuucgaguugcug

SEQ ID NO: 1771331 - RNA, 19 nt, Artificial Sequence
  Description of Artificial Sequence: Synthetic oligonucleotide
uuuccacuggucgccuccu

SEQ ID NO: 1771332 - RNA, 19 nt, Artificial Sequence
  Description of Artificial Sequence: Synthetic oligonucleotide
caauuucugcccaugucau

SEQ ID NO: 1771333 - RNA, 19 nt, Artificial Sequence
  Description of Artificial Sequence: Synthetic oligonucleotide
aggaccccuguucuggcuu

SEQ ID NO: 1771334 - RNA, 19 nt, Artificial Sequence
  Description of Artificial Sequence: Synthetic oligonucleotide
aggagggauuuuagguaag

SEQ ID NO: 1771335 - RNA, 19 nt, Artificial Sequence
  Description of Artificial Sequence: Synthetic oligonucleotide
gcuucaugaaucacugcca

SEQ ID NO: 1771336 - RNA, 19 nt, Artificial Sequence
  Description of Artificial Sequence: Synthetic oligonucleotide
uuccacuggucgccuccug

SEQ ID NO: 1771337 - RNA, 19 nt, Artificial Sequence
  Description of Artificial Sequence: Synthetic oligonucleotide
guggcgauguggagacagg

SEQ ID NO: 1771338 - RNA, 19 nt, Artificial Sequence
  Description of Artificial Sequence: Synthetic oligonucleotide
auugagcauucgagcaucu

SEQ ID NO: 1771339 - RNA, 19 nt, Artificial Sequence
  Description of Artificial Sequence: Synthetic oligonucleotide
gagcaucuaccugggcccc

SEQ ID NO: 1771340 - RNA, 19 nt, Artificial Sequence
  Description of Artificial Sequence: Synthetic oligonucleotide
caggcuauguuccuggguu

SEQ ID NO: 1771341 - RNA, 19 nt, Artificial Sequence
  Description of Artificial Sequence: Synthetic oligonucleotide
gcuucacucaggauaccug

SEQ ID NO: 1771342 - RNA, 19 nt, Artificial Sequence
  Description of Artificial Sequence: Synthetic oligonucleotide
cccagagauuuucagguca

SEQ ID NO: 1771343 - RNA, 19 nt, Artificial Sequence
  Description of Artificial Sequence: Synthetic oligonucleotide
aggcuauguuccuggguuu

SEQ ID NO: 1771344 - RNA, 19 nt, Artificial Sequence
  Description of Artificial Sequence: Synthetic oligonucleotide
gcaccgauggggcuucaug

SEQ ID NO: 1771345 - RNA, 19 nt, Artificial Sequence
  Description of Artificial Sequence: Synthetic oligonucleotide
agaccccucaagguccugu

SEQ ID NO: 1771346 - RNA, 19 nt, Artificial Sequence
  Description of Artificial Sequence: Synthetic oligonucleotide
ggcgauguggagacaggcc

SEQ ID NO: 1771347 - RNA, 19 nt, Artificial Sequence
  Description of Artificial Sequence: Synthetic oligonucleotide
accagugcucgaacuauau

SEQ ID NO: 1771348 - RNA, 19 nt, Artificial Sequence
  Description of Artificial Sequence: Synthetic oligonucleotide
caacagaagcaaucaggcu

SEQ ID NO: 1771349 - RNA, 19 nt, Artificial Sequence
  Description of Artificial Sequence: Synthetic oligonucleotide
agggagucggcaccagcuu

SEQ ID NO: 1771350 - RNA, 19 nt, Artificial Sequence
  Description of Artificial Sequence: Synthetic oligonucleotide
gaacuauaucuggcugguc

SEQ ID NO: 1771351 - RNA, 19 nt, Artificial Sequence
  Description of Artificial Sequence: Synthetic oligonucleotide
gcuucgaguugcugagggc

SEQ ID NO: 1771352 - RNA, 19 nt, Artificial Sequence
  Description of Artificial Sequence: Synthetic oligonucleotide
uugagcauucgagcaucua

SEQ ID NO: 1771353 - RNA, 19 nt, Artificial Sequence
  Description of Artificial Sequence: Synthetic oligonucleotide
guuugcucaucccucuuuu

SEQ ID NO: 1771354 - RNA, 19 nt, Artificial Sequence
  Description of Artificial Sequence: Synthetic oligonucleotide
gaguugcugagggcucagc

SEQ ID NO: 1771355 - RNA, 19 nt, Artificial Sequence
  Description of Artificial Sequence: Synthetic oligonucleotide
ucgccuccugugcauugau

SEQ ID NO: 1771356 - RNA, 19 nt, Artificial Sequence
  Description of Artificial Sequence: Synthetic oligonucleotide
cugcagcguggcgaugugg

SEQ ID NO: 1771357 - RNA, 19 nt, Artificial Sequence
  Description of Artificial Sequence: Synthetic oligonucleotide
auucuggcgcuggcaagcu

SEQ ID NO: 1771358 - RNA, 19 nt, Artificial Sequence
  Description of Artificial Sequence: Synthetic oligonucleotide
cgauggggcuucaugaauc

SEQ ID NO: 1771359 - RNA, 19 nt, Artificial Sequence
  Description of Artificial Sequence: Synthetic oligonucleotide
cagggagucggcaccagcu

SEQ ID NO: 1771360 - RNA, 19 nt, Artificial Sequence
  Description of Artificial Sequence: Synthetic oligonucleotide
ccagaugcaaaggugugca

SEQ ID NO: 1771361 - RNA, 19 nt, Artificial Sequence
  Description of Artificial Sequence: Synthetic oligonucleotide
gagaaguaggaccccuguu

SEQ ID NO: 1771362 - RNA, 19 nt, Artificial Sequence
  Description of Artificial Sequence: Synthetic oligonucleotide
caggauaccuggggcuuug

SEQ ID NO: 1771363 - RNA, 19 nt, Artificial Sequence
  Description of Artificial Sequence: Synthetic oligonucleotide
gggcaggaaagccaagcaa

SEQ ID NO: 1771364 - RNA, 19 nt, Artificial Sequence
  Description of Artificial Sequence: Synthetic oligonucleotide
ugcuaaggccccggccagc

SEQ ID NO: 1771365 - RNA, 19 nt, Artificial Sequence
  Description of Artificial Sequence: Synthetic oligonucleotide
ucaggauaccuggggcuuu

SEQ ID NO: 1771366 - RNA, 19 nt, Artificial Sequence
  Description of Artificial Sequence: Synthetic oligonucleotide
gcucgaacuauaucuggcu

SEQ ID NO: 1771367 - RNA, 19 nt, Artificial Sequence
  Description of Artificial Sequence: Synthetic oligonucleotide
ggcauguugcuugggcccc

SEQ ID NO: 1771368 - RNA, 19 nt, Artificial Sequence
  Description of Artificial Sequence: Synthetic oligonucleotide
agucggcaccagcuucaca

SEQ ID NO: 1771369 - RNA, 19 nt, Artificial Sequence
  Description of Artificial Sequence: Synthetic oligonucleotide
ggagcgugucuccauccuc

SEQ ID NO: 1771370 - RNA, 19 nt, Artificial Sequence
  Description of Artificial Sequence: Synthetic oligonucleotide
cuuccacauucagcagcag

SEQ ID NO: 1771371 - RNA, 19 nt, Artificial Sequence
  Description of Artificial Sequence: Synthetic oligonucleotide
ggagaaguaggaccccugu

SEQ ID NO: 1771372 - RNA, 19 nt, Artificial Sequence
  Description of Artificial Sequence: Synthetic oligonucleotide
gugagauggcucucugccu

SEQ ID NO: 1771373 - RNA, 19 nt, Artificial Sequence
  Description of Artificial Sequence: Synthetic oligonucleotide
agcacacucaggagggauu

SEQ ID NO: 1771374 - RNA, 19 nt, Artificial Sequence
  Description of Artificial Sequence: Synthetic oligonucleotide
uucuggcgcuggcaagcua

SEQ ID NO: 1771375 - RNA, 19 nt, Artificial Sequence
  Description of Artificial Sequence: Synthetic oligonucleotide
gcaguggcuucccagagau

SEQ ID NO: 1771376 - RNA, 19 nt, Artificial Sequence
  Description of Artificial Sequence: Synthetic oligonucleotide
caguaccuggcuggcuccc

SEQ ID NO: 1771377 - RNA, 19 nt, Artificial Sequence
  Description of Artificial Sequence: Synthetic oligonucleotide
uccugauguuuggcaauuu

SEQ ID NO: 1771378 - RNA, 19 nt, Artificial Sequence
  Description of Artificial Sequence: Synthetic oligonucleotide
caucuaccugggccccagc

SEQ ID NO: 1771379 - RNA, 19 nt, Artificial Sequence
  Description of Artificial Sequence: Synthetic oligonucleotide
cagcguggcgauguggaga

SEQ ID NO: 1771380 - RNA, 19 nt, Artificial Sequence
  Description of Artificial Sequence: Synthetic oligonucleotide
cauugggaggcucuagguu

SEQ ID NO: 1771381 - RNA, 19 nt, Artificial Sequence
  Description of Artificial Sequence: Synthetic oligonucleotide
gcuacaugauaguaagcuu

SEQ ID NO: 1771382 - RNA, 19 nt, Artificial Sequence
  Description of Artificial Sequence: Synthetic oligonucleotide
cguggcgauguggagacag

SEQ ID NO: 1771383 - RNA, 19 nt, Artificial Sequence
  Description of Artificial Sequence: Synthetic oligonucleotide
ggccagauucuggcgcugg

SEQ ID NO: 1771384 - RNA, 19 nt, Artificial Sequence
  Description of Artificial Sequence: Synthetic oligonucleotide
aagaccccucaagguccug

SEQ ID NO: 1771385 - RNA, 19 nt, Artificial Sequence
  Description of Artificial Sequence: Synthetic oligonucleotide
gauggcucucugccuggcu

SEQ ID NO: 1771386 - RNA, 19 nt, Artificial Sequence
  Description of Artificial Sequence: Synthetic oligonucleotide
ggagucggcaccagcuuca

SEQ ID NO: 1771387 - RNA, 19 nt, Artificial Sequence
  Description of Artificial Sequence: Synthetic oligonucleotide
ggacuacacuagccccagg

SEQ ID NO: 1771388 - RNA, 19 nt, Artificial Sequence
  Description of Artificial Sequence: Synthetic oligonucleotide
ccagugcucgaacuauauc

SEQ ID NO: 1771389 - RNA, 19 nt, Artificial Sequence
  Description of Artificial Sequence: Synthetic oligonucleotide
ggcuauguuccuggguuuc

SEQ ID NO: 1771390 - RNA, 19 nt, Artificial Sequence
  Description of Artificial Sequence: Synthetic oligonucleotide
accccucaagguccuguuu

SEQ ID NO: 1771391 - RNA, 19 nt, Artificial Sequence
  Description of Artificial Sequence: Synthetic oligonucleotide
uccucucauuuaggacuac

SEQ ID NO: 1771392 - RNA, 19 nt, Artificial Sequence
  Description of Artificial Sequence: Synthetic oligonucleotide
ggucgccuccugugcauug

SEQ ID NO: 1771393 - RNA, 19 nt, Artificial Sequence
  Description of Artificial Sequence: Synthetic oligonucleotide
gguaaagguuguucugaau

SEQ ID NO: 1771394 - RNA, 19 nt, Artificial Sequence
  Description of Artificial Sequence: Synthetic oligonucleotide
acacuagccccaggcucug

SEQ ID NO: 1771395 - RNA, 19 nt, Artificial Sequence
  Description of Artificial Sequence: Synthetic oligonucleotide
cagaugcaaaggugugcaa

SEQ ID NO: 1771396 - RNA, 19 nt, Artificial Sequence
  Description of Artificial Sequence: Synthetic oligonucleotide
gagucggcaccagcuucac

SEQ ID NO: 1771397 - RNA, 19 nt, Artificial Sequence
  Description of Artificial Sequence: Synthetic oligonucleotide
gugcagucuuuccacuggu

SEQ ID NO: 1771398 - RNA, 19 nt, Artificial Sequence
  Description of Artificial Sequence: Synthetic oligonucleotide
cuaaggccccggccagcug

SEQ ID NO: 1771399 - RNA, 19 nt, Artificial Sequence
  Description of Artificial Sequence: Synthetic oligonucleotide
uccuggggugucucaucuu

SEQ ID NO: 1771400 - RNA, 19 nt, Artificial Sequence
  Description of Artificial Sequence: Synthetic oligonucleotide
gugugcaaccauugagcau

SEQ ID NO: 1771401 - RNA, 19 nt, Artificial Sequence
  Description of Artificial Sequence: Synthetic oligonucleotide
caguacacagcaguggcuu

SEQ ID NO: 1771402 - RNA, 19 nt, Artificial Sequence
  Description of Artificial Sequence: Synthetic oligonucleotide
gcaucuaccugggccccag

SEQ ID NO: 1771403 - RNA, 19 nt, Artificial Sequence
  Description of Artificial Sequence: Synthetic oligonucleotide
agcuucacacagaguggau

SEQ ID NO: 1771404 - RNA, 19 nt, Artificial Sequence
  Description of Artificial Sequence: Synthetic oligonucleotide
caccagugcucgaacuaua

SEQ ID NO: 1771405 - RNA, 19 nt, Artificial Sequence
  Description of Artificial Sequence: Synthetic oligonucleotide
gguccuggggugucucauc

SEQ ID NO: 1771406 - RNA, 19 nt, Artificial Sequence
  Description of Artificial Sequence: Synthetic oligonucleotide
agcaucuaccugggcccca

SEQ ID NO: 1771407 - RNA, 19 nt, Artificial Sequence
  Description of Artificial Sequence: Synthetic oligonucleotide
gauccucggccagguccug

SEQ ID NO: 1771408 - RNA, 19 nt, Artificial Sequence
  Description of Artificial Sequence: Synthetic oligonucleotide
cagcaagaugaagugcugu

SEQ ID NO: 1771409 - RNA, 19 nt, Artificial Sequence
  Description of Artificial Sequence: Synthetic oligonucleotide
gucgccuccugugcauuga

SEQ ID NO: 1771410 - RNA, 19 nt, Artificial Sequence
  Description of Artificial Sequence: Synthetic oligonucleotide
aggccagaccuugccaguu

SEQ ID NO: 1771411 - RNA, 19 nt, Artificial Sequence
  Description of Artificial Sequence: Synthetic oligonucleotide
ggaccccuguucuggcuuc

SEQ ID NO: 1771412 - RNA, 19 nt, Artificial Sequence
  Description of Artificial Sequence: Synthetic oligonucleotide
ggcuucacucaggauaccu

SEQ ID NO: 1771413 - RNA, 19 nt, Artificial Sequence
  Description of Artificial Sequence: Synthetic oligonucleotide
caagcacacucaggaggga

SEQ ID NO: 1771414 - RNA, 19 nt, Artificial Sequence
  Description of Artificial Sequence: Synthetic oligonucleotide
caccucuguguggggcagc

SEQ ID NO: 1771415 - RNA, 19 nt, Artificial Sequence
  Description of Artificial Sequence: Synthetic oligonucleotide
gaccccucaagguccuguu

SEQ ID NO: 1771416 - RNA, 19 nt, Artificial Sequence
  Description of Artificial Sequence: Synthetic oligonucleotide
gugucugugcuggcaggaa

SEQ ID NO: 1771417 - RNA, 19 nt, Artificial Sequence
  Description of Artificial Sequence: Synthetic oligonucleotide
cagcaccagugcucgaacu

SEQ ID NO: 1771418 - RNA, 19 nt, Artificial Sequence
  Description of Artificial Sequence: Synthetic oligonucleotide
ugggaggcucuagguucaa

SEQ ID NO: 1771419 - RNA, 19 nt, Artificial Sequence
  Description of Artificial Sequence: Synthetic oligonucleotide
cagaagcaaucaggcuuca

SEQ ID NO: 1771420 - RNA, 19 nt, Artificial Sequence
  Description of Artificial Sequence: Synthetic oligonucleotide
ccuguuugcucaucccucu

SEQ ID NO: 1771421 - RNA, 19 nt, Artificial Sequence
  Description of Artificial Sequence: Synthetic oligonucleotide
gcagugcagucuuuccacu

SEQ ID NO: 1771422 - RNA, 19 nt, Artificial Sequence
  Description of Artificial Sequence: Synthetic oligonucleotide
gccagaccuugccaguucu

SEQ ID NO: 1771423 - RNA, 19 nt, Artificial Sequence
  Description of Artificial Sequence: Synthetic oligonucleotide
ccacauucagcagcaggga

SEQ ID NO: 1771424 - RNA, 19 nt, Artificial Sequence
  Description of Artificial Sequence: Synthetic oligonucleotide
gagauguaugugagcgcuu

SEQ ID NO: 1771425 - RNA, 19 nt, Artificial Sequence
  Description of Artificial Sequence: Synthetic oligonucleotide
caacagcaccgauggggcu

SEQ ID NO: 1771426 - RNA, 19 nt, Artificial Sequence
  Description of Artificial Sequence: Synthetic oligonucleotide
agcaccgauggggcuucau

SEQ ID NO: 1771427 - RNA, 19 nt, Artificial Sequence
  Description of Artificial Sequence: Synthetic oligonucleotide
gugcuggcaggaagcuaca

SEQ ID NO: 1771428 - RNA, 19 nt, Artificial Sequence
  Description of Artificial Sequence: Synthetic oligonucleotide
ccauucugaagcagcaauu

SEQ ID NO: 1771429 - RNA, 19 nt, Artificial Sequence
  Description of Artificial Sequence: Synthetic oligonucleotide
cauguugcuugggccccaa

SEQ ID NO: 1771430 - RNA, 19 nt, Artificial Sequence
  Description of Artificial Sequence: Synthetic oligonucleotide
gcauugauguccgcgccau

SEQ ID NO: 1771431 - RNA, 19 nt, Artificial Sequence
  Description of Artificial Sequence: Synthetic oligonucleotide
guaccuggcuggcucccuu

SEQ ID NO: 1771432 - RNA, 19 nt, Artificial Sequence
  Description of Artificial Sequence: Synthetic oligonucleotide
gcugguuccucugcagcgu

SEQ ID NO: 1771433 - RNA, 19 nt, Artificial Sequence
  Description of Artificial Sequence: Synthetic oligonucleotide
gcaccagugcucgaacuau

SEQ ID NO: 1771434 - RNA, 19 nt, Artificial Sequence
  Description of Artificial Sequence: Synthetic oligonucleotide
gcuaaggccccggccagcu

SEQ ID NO: 1771435 - RNA, 19 nt, Artificial Sequence
  Description of Artificial Sequence: Synthetic oligonucleotide
cgaacuauaucuggcuggu

SEQ ID NO: 1771436 - RNA, 19 nt, Artificial Sequence
  Description of Artificial Sequence: Synthetic oligonucleotide
ugccuggcucuggcugcuc

SEQ ID NO: 1771437 - RNA, 19 nt, Artificial Sequence
  Description of Artificial Sequence: Synthetic oligonucleotide
ggccccaacugcagcagcu

SEQ ID NO: 1771438 - RNA, 19 nt, Artificial Sequence
  Description of Artificial Sequence: Synthetic oligonucleotide
ggccccagcccggagcaaa

SEQ ID NO: 1771439 - RNA, 19 nt, Artificial Sequence
  Description of Artificial Sequence: Synthetic oligonucleotide
guggcuucccagagauuuu

SEQ ID NO: 1771440 - RNA, 19 nt, Artificial Sequence
  Description of Artificial Sequence: Synthetic oligonucleotide
gcauguugcuugggcccca

SEQ ID NO: 1771441 - RNA, 19 nt, Artificial Sequence
  Description of Artificial Sequence: Synthetic oligonucleotide
ggccagcugccagaugcaa

SEQ ID NO: 1771442 - RNA, 19 nt, Artificial Sequence
  Description of Artificial Sequence: Synthetic oligonucleotide
cugucugguaaagguuguu

SEQ ID NO: 1771443 - RNA, 19 nt, Artificial Sequence
  Description of Artificial Sequence: Synthetic oligonucleotide
cgaguugcugagggcucag

SEQ ID NO: 1771444 - RNA, 19 nt, Artificial Sequence
  Description of Artificial Sequence: Synthetic oligonucleotide
ccaggcuauguuccugggu

SEQ ID NO: 1771445 - RNA, 19 nt, Artificial Sequence
  Description of Artificial Sequence: Synthetic oligonucleotide
cuccauccucagagaugua

SEQ ID NO: 1771446 - RNA, 19 nt, Artificial Sequence
  Description of Artificial Sequence: Synthetic oligonucleotide
cauugauguccgcgccauu

SEQ ID NO: 1771447 - RNA, 19 nt, Artificial Sequence
  Description of Artificial Sequence: Synthetic oligonucleotide
ccgauggggcuucaugaau

SEQ ID NO: 1771448 - RNA, 19 nt, Artificial Sequence
  Description of Artificial Sequence: Synthetic oligonucleotide
ggacugucucuuccucauu

SEQ ID NO: 1771449 - RNA, 19 nt, Artificial Sequence
  Description of Artificial Sequence: Synthetic oligonucleotide
cgcuggcaagcuacaugca

SEQ ID NO: 1771450 - RNA, 19 nt, Artificial Sequence
  Description of Artificial Sequence: Synthetic oligonucleotide
caguggcuucccagagauu

SEQ ID NO: 1771451 - RNA, 19 nt, Artificial Sequence
  Description of Artificial Sequence: Synthetic oligonucleotide
gccccagcccggagcaaaa

SEQ ID NO: 1771452 - RNA, 19 nt, Artificial Sequence
  Description of Artificial Sequence: Synthetic oligonucleotide
ccagaccuugccaguucuu

SEQ ID NO: 1771453 - RNA, 19 nt, Artificial Sequence
  Description of Artificial Sequence: Synthetic oligonucleotide
gcguggcgauguggagaca

SEQ ID NO: 1771454 - RNA, 19 nt, Artificial Sequence
  Description of Artificial Sequence: Synthetic oligonucleotide
uugauaaauagaaauaacc

SEQ ID NO: 1771455 - RNA, 19 nt, Artificial Sequence
  Description of Artificial Sequence: Synthetic oligonucleotide
uuaaaauuccuuuagcuug

SEQ ID NO: 1771456 - RNA, 19 nt, Artificial Sequence
  Description of Artificial Sequence: Synthetic oligonucleotide
aauuccuuuagcuugauaa

SEQ ID NO: 1771457 - RNA, 19 nt, Artificial Sequence
  Description of Artificial Sequence: Synthetic oligonucleotide
ucuacuguuauaauaagca

SEQ ID NO: 1771458 - RNA, 19 nt, Artificial Sequence
  Description of Artificial Sequence: Synthetic oligonucleotide
ugauaaauagaaauaaccu

SEQ ID NO: 1771459 - RNA, 19 nt, Artificial Sequence
  Description of Artificial Sequence: Synthetic oligonucleotide
uuuagcuugauaaauagaa

SEQ ID NO: 1771460 - RNA, 19 nt, Artificial Sequence
  Description of Artificial Sequence: Synthetic oligonucleotide
agugauauagauaauaucu

SEQ ID NO: 1771461 - RNA, 19 nt, Artificial Sequence
  Description of Artificial Sequence: Synthetic oligonucleotide
aaguuuaggcaucaaagca

SEQ ID NO: 1771462 - RNA, 19 nt, Artificial Sequence
  Description of Artificial Sequence: Synthetic oligonucleotide
gguucaaauguauacagcg

SEQ ID NO: 1771463 - RNA, 19 nt, Artificial Sequence
  Description of Artificial Sequence: Synthetic oligonucleotide
aaagcaaaagaaguuuagg

SEQ ID NO: 1771464 - RNA, 19 nt, Artificial Sequence
  Description of Artificial Sequence: Synthetic oligonucleotide
uuuggaauggcaaaagcaa

SEQ ID NO: 1771465 - RNA, 19 nt, Artificial Sequence
  Description of Artificial Sequence: Synthetic oligonucleotide
aauggauucugccugcuca

SEQ ID NO: 1771466 - RNA, 19 nt, Artificial Sequence
  Description of Artificial Sequence: Synthetic oligonucleotide
ucggaaucaguccuguucg

SEQ ID NO: 1771467 - RNA, 19 nt, Artificial Sequence
  Description of Artificial Sequence: Synthetic oligonucleotide
agaaugguuaucaauacuc

SEQ ID NO: 1771468 - RNA, 19 nt, Artificial Sequence
  Description of Artificial Sequence: Synthetic oligonucleotide
acucaugucagugauauag

SEQ ID NO: 1771469 - RNA, 19 nt, Artificial Sequence
  Description of Artificial Sequence: Synthetic oligonucleotide
uugaaaaccccacucaaac

SEQ ID NO: 1771470 - RNA, 19 nt, Artificial Sequence
  Description of Artificial Sequence: Synthetic oligonucleotide
aaguuauuaaaauuccuuu

SEQ ID NO: 1771471 - RNA, 19 nt, Artificial Sequence
  Description of Artificial Sequence: Synthetic oligonucleotide
ucacuuauuggcaagucac

SEQ ID NO: 1771472 - RNA, 19 nt, Artificial Sequence
  Description of Artificial Sequence: Synthetic oligonucleotide
aaucacugaugccacgccg

SEQ ID NO: 1771473 - RNA, 19 nt, Artificial Sequence
  Description of Artificial Sequence: Synthetic oligonucleotide
ugcucuacuguuauaauaa

SEQ ID NO: 1771474 - RNA, 19 nt, Artificial Sequence
  Description of Artificial Sequence: Synthetic oligonucleotide
uuugccaguagcaacugca

SEQ ID NO: 1771475 - RNA, 19 nt, Artificial Sequence
  Description of Artificial Sequence: Synthetic oligonucleotide
uuauuggcaagucacgggu

SEQ ID NO: 1771476 - RNA, 19 nt, Artificial Sequence
  Description of Artificial Sequence: Synthetic oligonucleotide
cuugauaaauagaaauaac

SEQ ID NO: 1771477 - RNA, 19 nt, Artificial Sequence
  Description of Artificial Sequence: Synthetic oligonucleotide
aaaguaucccaucacuuau

SEQ ID NO: 1771478 - RNA, 19 nt, Artificial Sequence
  Description of Artificial Sequence: Synthetic oligonucleotide
aaacagaaccuccacuaug

SEQ ID NO: 1771479 - RNA, 19 nt, Artificial Sequence
  Description of Artificial Sequence: Synthetic oligonucleotide
guucauauggacuuuaaaa

SEQ ID NO: 1771480 - RNA, 19 nt, Artificial Sequence
  Description of Artificial Sequence: Synthetic oligonucleotide
aguugcucggaaucagucc

SEQ ID NO: 1771481 - RNA, 19 nt, Artificial Sequence
  Description of Artificial Sequence: Synthetic oligonucleotide
ucuucgucaauguaguccu

SEQ ID NO: 1771482 - RNA, 19 nt, Artificial Sequence
  Description of Artificial Sequence: Synthetic oligonucleotide
uuauacagcaaaguauccc

SEQ ID NO: 1771483 - RNA, 19 nt, Artificial Sequence
  Description of Artificial Sequence: Synthetic oligonucleotide
aagaaugguuaucaauacu

SEQ ID NO: 1771484 - RNA, 19 nt, Artificial Sequence
  Description of Artificial Sequence: Synthetic oligonucleotide
acaaccaagguuuuggaau

SEQ ID NO: 1771485 - RNA, 19 nt, Artificial Sequence
  Description of Artificial Sequence: Synthetic oligonucleotide
agaaucacugaugccacgc

SEQ ID NO: 1771486 - RNA, 19 nt, Artificial Sequence
  Description of Artificial Sequence: Synthetic oligonucleotide
aaaaguuauuaaaauuccu

SEQ ID NO: 1771487 - RNA, 19 nt, Artificial Sequence
  Description of Artificial Sequence: Synthetic oligonucleotide
uacuguuauaauaagcauu

SEQ ID NO: 1771488 - RNA, 19 nt, Artificial Sequence
  Description of Artificial Sequence: Synthetic oligonucleotide
cuuauuggcaagucacggg

SEQ ID NO: 1771489 - RNA, 19 nt, Artificial Sequence
  Description of Artificial Sequence: Synthetic oligonucleotide
aagaaguuuaggcaucaaa

SEQ ID NO: 1771490 - RNA, 19 nt, Artificial Sequence
  Description of Artificial Sequence: Synthetic oligonucleotide
ucacgggugagaaucacug

SEQ ID NO: 1771491 - RNA, 19 nt, Artificial Sequence
  Description of Artificial Sequence: Synthetic oligonucleotide
uauucuguugacaguuuug

SEQ ID NO: 1771492 - RNA, 19 nt, Artificial Sequence
  Description of Artificial Sequence: Synthetic oligonucleotide
uguucuacacuggugaaca

SEQ ID NO: 1771493 - RNA, 19 nt, Artificial Sequence
  Description of Artificial Sequence: Synthetic oligonucleotide
ucuccuucuucaaaguaca

SEQ ID NO: 1771494 - RNA, 19 nt, Artificial Sequence
  Description of Artificial Sequence: Synthetic oligonucleotide
uugcuuaacguucgcaccc

SEQ ID NO: 1771495 - RNA, 19 nt, Artificial Sequence
  Description of Artificial Sequence: Synthetic oligonucleotide
uuuucaggagugaugcaca

SEQ ID NO: 1771496 - RNA, 19 nt, Artificial Sequence
  Description of Artificial Sequence: Synthetic oligonucleotide
uuuugcucuacuguuauaa

SEQ ID NO: 1771497 - RNA, 19 nt, Artificial Sequence
  Description of Artificial Sequence: Synthetic oligonucleotide
cucuacuguuauaauaagc

SEQ ID NO: 1771498 - RNA, 19 nt, Artificial Sequence
  Description of Artificial Sequence: Synthetic oligonucleotide
auggauugucaauggauuc

SEQ ID NO: 1771499 - RNA, 19 nt, Artificial Sequence
  Description of Artificial Sequence: Synthetic oligonucleotide
uuuacacccacucgguugu

SEQ ID NO: 1771500 - RNA, 19 nt, Artificial Sequence
  Description of Artificial Sequence: Synthetic oligonucleotide
caaugccacguucauaugg

SEQ ID NO: 1771501 - RNA, 19 nt, Artificial Sequence
  Description of Artificial Sequence: Synthetic oligonucleotide
agcggcuaggcucagccgc

SEQ ID NO: 1771502 - RNA, 19 nt, Artificial Sequence
  Description of Artificial Sequence: Synthetic oligonucleotide
aacaucccauuccuugagg

SEQ ID NO: 1771503 - RNA, 19 nt, Artificial Sequence
  Description of Artificial Sequence: Synthetic oligonucleotide
gaaucaguccuguucggcc

SEQ ID NO: 1771504 - RNA, 19 nt, Artificial Sequence
  Description of Artificial Sequence: Synthetic oligonucleotide
uuucucaagucuguccucg

SEQ ID NO: 1771505 - RNA, 19 nt, Artificial Sequence
  Description of Artificial Sequence: Synthetic oligonucleotide
uuccuugagguaaagaauu

SEQ ID NO: 1771506 - RNA, 19 nt, Artificial Sequence
  Description of Artificial Sequence: Synthetic oligonucleotide
ugccugcucagccacauag

SEQ ID NO: 1771507 - RNA, 19 nt, Artificial Sequence
  Description of Artificial Sequence: Synthetic oligonucleotide
aaugguuaucaauacucuu

SEQ ID NO: 1771508 - RNA, 19 nt, Artificial Sequence
  Description of Artificial Sequence: Synthetic oligonucleotide
aaauguauacagcgcucug

SEQ ID NO: 1771509 - RNA, 19 nt, Artificial Sequence
  Description of Artificial Sequence: Synthetic oligonucleotide
accuuuugccaguagcaac

SEQ ID NO: 1771510 - RNA, 19 nt, Artificial Sequence
  Description of Artificial Sequence: Synthetic oligonucleotide
acuuauuggcaagucacgg

SEQ ID NO: 1771511 - RNA, 19 nt, Artificial Sequence
  Description of Artificial Sequence: Synthetic oligonucleotide
ucaaagcagcuccuggaag

SEQ ID NO: 1771512 - RNA, 19 nt, Artificial Sequence
  Description of Artificial Sequence: Synthetic oligonucleotide
gucugcauaacccuuccag

SEQ ID NO: 1771513 - RNA, 19 nt, Artificial Sequence
  Description of Artificial Sequence: Synthetic oligonucleotide
aguaucccaucacuuauug

SEQ ID NO: 1771514 - RNA, 19 nt, Artificial Sequence
  Description of Artificial Sequence: Synthetic oligonucleotide
aagguuuuggaauggcaaa

SEQ ID NO: 1771515 - RNA, 19 nt, Artificial Sequence
  Description of Artificial Sequence: Synthetic oligonucleotide
gguuugaccgguuugggag

SEQ ID NO: 1771516 - RNA, 19 nt, Artificial Sequence
  Description of Artificial Sequence: Synthetic oligonucleotide
ucaucacagaccacagugc

SEQ ID NO: 1771517 - RNA, 19 nt, Artificial Sequence
  Description of Artificial Sequence: Synthetic oligonucleotide
guuuacacccacucgguug

SEQ ID NO: 1771518 - RNA, 19 nt, Artificial Sequence
  Description of Artificial Sequence: Synthetic oligonucleotide
aacagaaccuccacuaugu

SEQ ID NO: 1771519 - RNA, 19 nt, Artificial Sequence
  Description of Artificial Sequence: Synthetic oligonucleotide
aacuugcccugguuugacc

SEQ ID NO: 1771520 - RNA, 19 nt, Artificial Sequence
  Description of Artificial Sequence: Synthetic oligonucleotide
aaucaguccuguucggccu

SEQ ID NO: 1771521 - RNA, 19 nt, Artificial Sequence
  Description of Artificial Sequence: Synthetic oligonucleotide
agcaaaguaucccaucacu

SEQ ID NO: 1771522 - RNA, 19 nt, Artificial Sequence
  Description of Artificial Sequence: Synthetic oligonucleotide
cauuccuugagguaaagaa

SEQ ID NO: 1771523 - RNA, 19 nt, Artificial Sequence
  Description of Artificial Sequence: Synthetic oligonucleotide
aaaagaaguuuaggcauca

SEQ ID NO: 1771524 - RNA, 19 nt, Artificial Sequence
  Description of Artificial Sequence: Synthetic oligonucleotide
cugcauaacccuuccaggc

SEQ ID NO: 1771525 - RNA, 19 nt, Artificial Sequence
  Description of Artificial Sequence: Synthetic oligonucleotide
acucaaacaucccauuccu

SEQ ID NO: 1771526 - RNA, 19 nt, Artificial Sequence
  Description of Artificial Sequence: Synthetic oligonucleotide
gugagaaucacugaugcca

SEQ ID NO: 1771527 - RNA, 19 nt, Artificial Sequence
  Description of Artificial Sequence: Synthetic oligonucleotide
aauggauugucaauggauu

SEQ ID NO: 1771528 - RNA, 19 nt, Artificial Sequence
  Description of Artificial Sequence: Synthetic oligonucleotide
guugcuuaacguucgcacc

SEQ ID NO: 1771529 - RNA, 19 nt, Artificial Sequence
  Description of Artificial Sequence: Synthetic oligonucleotide
caagucacgggugagaauc

SEQ ID NO: 1771530 - RNA, 19 nt, Artificial Sequence
  Description of Artificial Sequence: Synthetic oligonucleotide
uuggaauggcaaaagcaaa

SEQ ID NO: 1771531 - RNA, 19 nt, Artificial Sequence
  Description of Artificial Sequence: Synthetic oligonucleotide
ugcauaacccuuccaggca

SEQ ID NO: 1771532 - RNA, 19 nt, Artificial Sequence
  Description of Artificial Sequence: Synthetic oligonucleotide
ucacucaugucagugauau

SEQ ID NO: 1771533 - RNA, 19 nt, Artificial Sequence
  Description of Artificial Sequence: Synthetic oligonucleotide
aucacuuauuggcaaguca

SEQ ID NO: 1771534 - RNA, 19 nt, Artificial Sequence
  Description of Artificial Sequence: Synthetic oligonucleotide
cacuuauuggcaagucacg

SEQ ID NO: 1771535 - RNA, 19 nt, Artificial Sequence
  Description of Artificial Sequence: Synthetic oligonucleotide
ucucucaaccagcucaagu

SEQ ID NO: 1771536 - RNA, 19 nt, Artificial Sequence
  Description of Artificial Sequence: Synthetic oligonucleotide
uuaacguucgcaccccauc

SEQ ID NO: 1771537 - RNA, 19 nt, Artificial Sequence
  Description of Artificial Sequence: Synthetic oligonucleotide
uccucggcguugcuuaacg

SEQ ID NO: 1771538 - RNA, 19 nt, Artificial Sequence
  Description of Artificial Sequence: Synthetic oligonucleotide
uguccucgcaccuuuugcc

SEQ ID NO: 1771539 - RNA, 19 nt, Artificial Sequence
  Description of Artificial Sequence: Synthetic oligonucleotide
uggcaauacaaccaagguu

SEQ ID NO: 1771540 - RNA, 19 nt, Artificial Sequence
  Description of Artificial Sequence: Synthetic oligonucleotide
acugaugccacgccggacu

SEQ ID NO: 1771541 - RNA, 19 nt, Artificial Sequence
  Description of Artificial Sequence: Synthetic oligonucleotide
uccuuuagcuugauaaaua

SEQ ID NO: 1771542 - RNA, 19 nt, Artificial Sequence
  Description of Artificial Sequence: Synthetic oligonucleotide
uaacguucgcaccccaucu

SEQ ID NO: 1771543 - RNA, 19 nt, Artificial Sequence
  Description of Artificial Sequence: Synthetic oligonucleotide
ugacaguuuugcucuacug

SEQ ID NO: 1771544 - RNA, 19 nt, Artificial Sequence
  Description of Artificial Sequence: Synthetic oligonucleotide
guagcaacugcacaauguc

SEQ ID NO: 1771545 - RNA, 19 nt, Artificial Sequence
  Description of Artificial Sequence: Synthetic oligonucleotide
aaugccacguucauaugga

SEQ ID NO: 1771546 - RNA, 19 nt, Artificial Sequence
  Description of Artificial Sequence: Synthetic oligonucleotide
cugacaauauucuguugac

SEQ ID NO: 1771547 - RNA, 19 nt, Artificial Sequence
  Description of Artificial Sequence: Synthetic oligonucleotide
cagcauuuauacagcaaag

SEQ ID NO: 1771548 - RNA, 19 nt, Artificial Sequence
  Description of Artificial Sequence: Synthetic oligonucleotide
cagugauauagauaauauc

SEQ ID NO: 1771549 - RNA, 19 nt, Artificial Sequence
  Description of Artificial Sequence: Synthetic oligonucleotide
uaaacagaaccuccacuau

SEQ ID NO: 1771550 - RNA, 19 nt, Artificial Sequence
  Description of Artificial Sequence: Synthetic oligonucleotide
agcauuuauacagcaaagu

SEQ ID NO: 1771551 - RNA, 19 nt, Artificial Sequence
  Description of Artificial Sequence: Synthetic oligonucleotide
gccguuuacacccacucgg

SEQ ID NO: 1771552 - RNA, 19 nt, Artificial Sequence
  Description of Artificial Sequence: Synthetic oligonucleotide
uguauacagcgcucugaag

SEQ ID NO: 1771553 - RNA, 19 nt, Artificial Sequence
  Description of Artificial Sequence: Synthetic oligonucleotide
guuugaccgguuugggagg

SEQ ID NO: 1771554 - RNA, 19 nt, Artificial Sequence
  Description of Artificial Sequence: Synthetic oligonucleotide
aguuuugcucuacuguuau

SEQ ID NO: 1771555 - RNA, 19 nt, Artificial Sequence
  Description of Artificial Sequence: Synthetic oligonucleotide
uauuggcaagucacgggug

SEQ ID NO: 1771556 - RNA, 19 nt, Artificial Sequence
  Description of Artificial Sequence: Synthetic oligonucleotide
uucgcaccccaucuguugc

SEQ ID NO: 1771557 - RNA, 19 nt, Artificial Sequence
  Description of Artificial Sequence: Synthetic oligonucleotide
aggccguuuacacccacuc

SEQ ID NO: 1771558 - RNA, 19 nt, Artificial Sequence
  Description of Artificial Sequence: Synthetic oligonucleotide
uugcucuacuguuauaaua

SEQ ID NO: 1771559 - RNA, 19 nt, Artificial Sequence
  Description of Artificial Sequence: Synthetic oligonucleotide
ucggcguugcuuaacguuc

SEQ ID NO: 1771560 - RNA, 19 nt, Artificial Sequence
  Description of Artificial Sequence: Synthetic oligonucleotide
gaaucacugaugccacgcc

SEQ ID NO: 1771561 - RNA, 19 nt, Artificial Sequence
  Description of Artificial Sequence: Synthetic oligonucleotide
acaucccauuccuugaggu

SEQ ID NO: 1771562 - RNA, 19 nt, Artificial Sequence
  Description of Artificial Sequence: Synthetic oligonucleotide
uuuugccaguagcaacugc

SEQ ID NO: 1771563 - RNA, 19 nt, Artificial Sequence
  Description of Artificial Sequence: Synthetic oligonucleotide
gugauauagauaauaucuc

SEQ ID NO: 1771564 - RNA, 19 nt, Artificial Sequence
  Description of Artificial Sequence: Synthetic oligonucleotide
ugccacgccggacucauca

SEQ ID NO: 1771565 - RNA, 19 nt, Artificial Sequence
  Description of Artificial Sequence: Synthetic oligonucleotide
uucuacacuggugaacaca

SEQ ID NO: 1771566 - RNA, 19 nt, Artificial Sequence
  Description of Artificial Sequence: Synthetic oligonucleotide
ugcaugugccuuuccacca

SEQ ID NO: 1771567 - RNA, 19 nt, Artificial Sequence
  Description of Artificial Sequence: Synthetic oligonucleotide
uuaggcaucaaagcagcuc

SEQ ID NO: 1771568 - RNA, 19 nt, Artificial Sequence
  Description of Artificial Sequence: Synthetic oligonucleotide
gaugcgggacacucggacc

SEQ ID NO: 1771569 - RNA, 19 nt, Artificial Sequence
  Description of Artificial Sequence: Synthetic oligonucleotide
aggcggagcggcuaggcuc

SEQ ID NO: 1771570 - RNA, 19 nt, Artificial Sequence
  Description of Artificial Sequence: Synthetic oligonucleotide
aacguucgcaccccaucug

SEQ ID NO: 1771571 - RNA, 19 nt, Artificial Sequence
  Description of Artificial Sequence: Synthetic oligonucleotide
guaucccaucacuuauugg

SEQ ID NO: 1771572 - RNA, 19 nt, Artificial Sequence
  Description of Artificial Sequence: Synthetic oligonucleotide
ugccacguucauauggacu

SEQ ID NO: 1771573 - RNA, 19 nt, Artificial Sequence
  Description of Artificial Sequence: Synthetic oligonucleotide
uucuggcaauacaaccaag

SEQ ID NO: 1771574 - RNA, 19 nt, Artificial Sequence
  Description of Artificial Sequence: Synthetic oligonucleotide
gggugagaaucacugaugc

SEQ ID NO: 1771575 - RNA, 19 nt, Artificial Sequence
  Description of Artificial Sequence: Synthetic oligonucleotide
cauggcgcuaggcggagcg

SEQ ID NO: 1771576 - RNA, 19 nt, Artificial Sequence
  Description of Artificial Sequence: Synthetic oligonucleotide
uccuguucggccuuugcau

SEQ ID NO: 1771577 - RNA, 19 nt, Artificial Sequence
  Description of Artificial Sequence: Synthetic oligonucleotide
cacgcagacgggaacuggg

SEQ ID NO: 1771578 - RNA, 19 nt, Artificial Sequence
  Description of Artificial Sequence: Synthetic oligonucleotide
ugugucucccagcuuguuc

SEQ ID NO: 1771579 - RNA, 19 nt, Artificial Sequence
  Description of Artificial Sequence: Synthetic oligonucleotide
auacaaccaagguuuugga

SEQ ID NO: 1771580 - RNA, 19 nt, Artificial Sequence
  Description of Artificial Sequence: Synthetic oligonucleotide
uuguccaagcacucucuca

SEQ ID NO: 1771581 - RNA, 19 nt, Artificial Sequence
  Description of Artificial Sequence: Synthetic oligonucleotide
cuuuagcuugauaaauaga

SEQ ID NO: 1771582 - RNA, 19 nt, Artificial Sequence
  Description of Artificial Sequence: Synthetic oligonucleotide
acgggugagaaucacugau

SEQ ID NO: 1771583 - RNA, 19 nt, Artificial Sequence
  Description of Artificial Sequence: Synthetic oligonucleotide
ugaccgguuugggaggugg

SEQ ID NO: 1771584 - RNA, 19 nt, Artificial Sequence
  Description of Artificial Sequence: Synthetic oligonucleotide
aucacugaugccacgccgg

SEQ ID NO: 1771585 - RNA, 19 nt, Artificial Sequence
  Description of Artificial Sequence: Synthetic oligonucleotide
uucuguugacaguuuugcu

SEQ ID NO: 1771586 - RNA, 19 nt, Artificial Sequence
  Description of Artificial Sequence: Synthetic oligonucleotide
aucaaagcagcuccuggaa

SEQ ID NO: 1771587 - RNA, 19 nt, Artificial Sequence
  Description of Artificial Sequence: Synthetic oligonucleotide
uuuaggcaucaaagcagcu

SEQ ID NO: 1771588 - RNA, 19 nt, Artificial Sequence
  Description of Artificial Sequence: Synthetic oligonucleotide
gauucugccugcucagcca

SEQ ID NO: 1771589 - RNA, 19 nt, Artificial Sequence
  Description of Artificial Sequence: Synthetic oligonucleotide
aagaaucagucugagucuu

SEQ ID NO: 1771590 - RNA, 19 nt, Artificial Sequence
  Description of Artificial Sequence: Synthetic oligonucleotide
uuugcucuacuguuauaau

SEQ ID NO: 1771591 - RNA, 19 nt, Artificial Sequence
  Description of Artificial Sequence: Synthetic oligonucleotide
cuaggcucagccgcgagag

SEQ ID NO: 1771592 - RNA, 19 nt, Artificial Sequence
  Description of Artificial Sequence: Synthetic oligonucleotide
cauaguugcucggaaucag

SEQ ID NO: 1771593 - RNA, 19 nt, Artificial Sequence
  Description of Artificial Sequence: Synthetic oligonucleotide
gaccacagugcaacaaugc

SEQ ID NO: 1771594 - RNA, 19 nt, Artificial Sequence
  Description of Artificial Sequence: Synthetic oligonucleotide
uugccaguagcaacugcac

SEQ ID NO: 1771595 - RNA, 19 nt, Artificial Sequence
  Description of Artificial Sequence: Synthetic oligonucleotide
uacagcgcucugaagacuu

SEQ ID NO: 1771596 - RNA, 19 nt, Artificial Sequence
  Description of Artificial Sequence: Synthetic oligonucleotide
ucaauacucuucuggcaau

SEQ ID NO: 1771597 - RNA, 19 nt, Artificial Sequence
  Description of Artificial Sequence: Synthetic oligonucleotide
ugccuuuccaccagcuggu

SEQ ID NO: 1771598 - RNA, 19 nt, Artificial Sequence
  Description of Artificial Sequence: Synthetic oligonucleotide
ugcacaaugucugcauaac

SEQ ID NO: 1771599 - RNA, 19 nt, Artificial Sequence
  Description of Artificial Sequence: Synthetic oligonucleotide
ugguuugaccgguuuggga

SEQ ID NO: 1771600 - RNA, 19 nt, Artificial Sequence
  Description of Artificial Sequence: Synthetic oligonucleotide
gaacugggcgccaagccug

SEQ ID NO: 1771601 - RNA, 19 nt, Artificial Sequence
  Description of Artificial Sequence: Synthetic oligonucleotide
agguggcuuggacauggcg

SEQ ID NO: 1771602 - RNA, 19 nt, Artificial Sequence
  Description of Artificial Sequence: Synthetic oligonucleotide
aaccccacucaaacauccc

SEQ ID NO: 1771603 - RNA, 19 nt, Artificial Sequence
  Description of Artificial Sequence: Synthetic oligonucleotide
caaacaucccauuccuuga

SEQ ID NO: 1771604 - RNA, 19 nt, Artificial Sequence
  Description of Artificial Sequence: Synthetic oligonucleotide
uucggccuuugcaugugcc

SEQ ID NO: 1771605 - RNA, 19 nt, Artificial Sequence
  Description of Artificial Sequence: Synthetic oligonucleotide
augccacguucauauggac

SEQ ID NO: 1771606 - RNA, 19 nt, Artificial Sequence
  Description of Artificial Sequence: Synthetic oligonucleotide
ggacacucggaccagcgag

SEQ ID NO: 1771607 - RNA, 19 nt, Artificial Sequence
  Description of Artificial Sequence: Synthetic oligonucleotide
caucaaagcagcuccugga

SEQ ID NO: 1771608 - RNA, 19 nt, Artificial Sequence
  Description of Artificial Sequence: Synthetic oligonucleotide
cuugcccugguuugaccgg

SEQ ID NO: 1771609 - RNA, 19 nt, Artificial Sequence
  Description of Artificial Sequence: Synthetic oligonucleotide
uccuugagguaaagaauua

SEQ ID NO: 1771610 - RNA, 19 nt, Artificial Sequence
  Description of Artificial Sequence: Synthetic oligonucleotide
cuuugcaugugccuuucca

SEQ ID NO: 1771611 - RNA, 19 nt, Artificial Sequence
  Description of Artificial Sequence: Synthetic oligonucleotide
acauaguugcucggaauca

SEQ ID NO: 1771612 - RNA, 19 nt, Artificial Sequence
  Description of Artificial Sequence: Synthetic oligonucleotide
caucacagaccacagugca

SEQ ID NO: 1771613 - RNA, 19 nt, Artificial Sequence
  Description of Artificial Sequence: Synthetic oligonucleotide
cacucgguuguccaagcac

SEQ ID NO: 1771614 - RNA, 19 nt, Artificial Sequence
  Description of Artificial Sequence: Synthetic oligonucleotide
cacgccggacucaucacag

SEQ ID NO: 1771615 - RNA, 19 nt, Artificial Sequence
  Description of Artificial Sequence: Synthetic oligonucleotide
gguggcuuggacauggcgc

SEQ ID NO: 1771616 - RNA, 19 nt, Artificial Sequence
  Description of Artificial Sequence: Synthetic oligonucleotide
guucgcaccccaucuguug

SEQ ID NO: 1771617 - RNA, 19 nt, Artificial Sequence
  Description of Artificial Sequence: Synthetic oligonucleotide
guugcucggaaucaguccu

SEQ ID NO: 1771618 - RNA, 19 nt, Artificial Sequence
  Description of Artificial Sequence: Synthetic oligonucleotide
cauaacccuuccaggcagc

SEQ ID NO: 1771619 - RNA, 19 nt, Artificial Sequence
  Description of Artificial Sequence: Synthetic oligonucleotide
ggcaauacaaccaagguuu

SEQ ID NO: 1771620 - RNA, 19 nt, Artificial Sequence
  Description of Artificial Sequence: Synthetic oligonucleotide
ucacugaugccacgccgga

SEQ ID NO: 1771621 - RNA, 19 nt, Artificial Sequence
  Description of Artificial Sequence: Synthetic oligonucleotide
ucccaucacuuauuggcaa

SEQ ID NO: 1771622 - RNA, 19 nt, Artificial Sequence
  Description of Artificial Sequence: Synthetic oligonucleotide
gaaugguuaucaauacucu

SEQ ID NO: 1771623 - RNA, 19 nt, Artificial Sequence
  Description of Artificial Sequence: Synthetic oligonucleotide
uucucaagucuguccucgc

SEQ ID NO: 1771624 - RNA, 19 nt, Artificial Sequence
  Description of Artificial Sequence: Synthetic oligonucleotide
aacugggcgccaagccugc

SEQ ID NO: 1771625 - RNA, 19 nt, Artificial Sequence
  Description of Artificial Sequence: Synthetic oligonucleotide
acucgguuguccaagcacu

SEQ ID NO: 1771626 - RNA, 19 nt, Artificial Sequence
  Description of Artificial Sequence: Synthetic oligonucleotide
ggagcggcuaggcucagcc

SEQ ID NO: 1771627 - RNA, 19 nt, Artificial Sequence
  Description of Artificial Sequence: Synthetic oligonucleotide
agcugguaucacucauguc

SEQ ID NO: 1771628 - RNA, 19 nt, Artificial Sequence
  Description of Artificial Sequence: Synthetic oligonucleotide
ugucugcauaacccuucca

SEQ ID NO: 1771629 - RNA, 19 nt, Artificial Sequence
  Description of Artificial Sequence: Synthetic oligonucleotide
caguacagggcugugcuuc

SEQ ID NO: 1771630 - RNA, 19 nt, Artificial Sequence
  Description of Artificial Sequence: Synthetic oligonucleotide
ugggcgccaagccugcgcu

SEQ ID NO: 1771631 - RNA, 19 nt, Artificial Sequence
  Description of Artificial Sequence: Synthetic oligonucleotide
uccuggguucaaauguaua

SEQ ID NO: 1771632 - RNA, 19 nt, Artificial Sequence
  Description of Artificial Sequence: Synthetic oligonucleotide
uugcucggaaucaguccug

SEQ ID NO: 1771633 - RNA, 19 nt, Artificial Sequence
  Description of Artificial Sequence: Synthetic oligonucleotide
acagugcaacaaugccacg

SEQ ID NO: 1771634 - RNA, 19 nt, Artificial Sequence
  Description of Artificial Sequence: Synthetic oligonucleotide
acguucgcaccccaucugu

SEQ ID NO: 1771635 - RNA, 19 nt, Artificial Sequence
  Description of Artificial Sequence: Synthetic oligonucleotide
agucacgggugagaaucac

SEQ ID NO: 1771636 - RNA, 19 nt, Artificial Sequence
  Description of Artificial Sequence: Synthetic oligonucleotide
gacacucggaccagcgagc

SEQ ID NO: 1771637 - RNA, 19 nt, Artificial Sequence
  Description of Artificial Sequence: Synthetic oligonucleotide
gcacaaugucugcauaacc

SEQ ID NO: 1771638 - RNA, 19 nt, Artificial Sequence
  Description of Artificial Sequence: Synthetic oligonucleotide
ugcuuaacguucgcacccc

SEQ ID NO: 1771639 - RNA, 19 nt, Artificial Sequence
  Description of Artificial Sequence: Synthetic oligonucleotide
cacguuuggcugaguaaac

SEQ ID NO: 1771640 - RNA, 19 nt, Artificial Sequence
  Description of Artificial Sequence: Synthetic oligonucleotide
accgcccugccuucccacc

SEQ ID NO: 1771641 - RNA, 19 nt, Artificial Sequence
  Description of Artificial Sequence: Synthetic oligonucleotide
acacccacucgguugucca

SEQ ID NO: 1771642 - RNA, 19 nt, Artificial Sequence
  Description of Artificial Sequence: Synthetic oligonucleotide
aaagaaguuuaggcaucaa

SEQ ID NO: 1771643 - RNA, 19 nt, Artificial Sequence
  Description of Artificial Sequence: Synthetic oligonucleotide
ggauugucaauggauucug

SEQ ID NO: 1771644 - RNA, 19 nt, Artificial Sequence
  Description of Artificial Sequence: Synthetic oligonucleotide
ggacucaucacagaccaca

SEQ ID NO: 1771645 - RNA, 19 nt, Artificial Sequence
  Description of Artificial Sequence: Synthetic oligonucleotide
acaaugccacguucauaug

SEQ ID NO: 1771646 - RNA, 19 nt, Artificial Sequence
  Description of Artificial Sequence: Synthetic oligonucleotide
uuggcaagucacgggugag

SEQ ID NO: 1771647 - RNA, 19 nt, Artificial Sequence
  Description of Artificial Sequence: Synthetic oligonucleotide
gccgaugcgggacacucgg

SEQ ID NO: 1771648 - RNA, 19 nt, Artificial Sequence
  Description of Artificial Sequence: Synthetic oligonucleotide
cugguuugaccgguuuggg

SEQ ID NO: 1771649 - RNA, 19 nt, Artificial Sequence
  Description of Artificial Sequence: Synthetic oligonucleotide
acguuuggcugaguaaaca

SEQ ID NO: 1771650 - RNA, 19 nt, Artificial Sequence
  Description of Artificial Sequence: Synthetic oligonucleotide
uuugaccgguuugggaggu

SEQ ID NO: 1771651 - RNA, 19 nt, Artificial Sequence
  Description of Artificial Sequence: Synthetic oligonucleotide
acgcagacgggaacugggc

SEQ ID NO: 1771652 - RNA, 19 nt, Artificial Sequence
  Description of Artificial Sequence: Synthetic oligonucleotide
ccugguuugaccgguuugg

SEQ ID NO: 1771653 - RNA, 19 nt, Artificial Sequence
  Description of Artificial Sequence: Synthetic oligonucleotide
agaaucagucugagucuuc

SEQ ID NO: 1771654 - RNA, 19 nt, Artificial Sequence
  Description of Artificial Sequence: Synthetic oligonucleotide
guuucucaagucuguccuc

SEQ ID NO: 1771655 - RNA, 19 nt, Artificial Sequence
  Description of Artificial Sequence: Synthetic oligonucleotide
guuguccaagcacucucuc

SEQ ID NO: 1771656 - RNA, 19 nt, Artificial Sequence
  Description of Artificial Sequence: Synthetic oligonucleotide
gaaucagucugagucuucu

SEQ ID NO: 1771657 - RNA, 19 nt, Artificial Sequence
  Description of Artificial Sequence: Synthetic oligonucleotide
cagagcugugucucccagc

SEQ ID NO: 1771658 - RNA, 19 nt, Artificial Sequence
  Description of Artificial Sequence: Synthetic oligonucleotide
gagcggcuaggcucagccg

SEQ ID NO: 1771659 - RNA, 19 nt, Artificial Sequence
  Description of Artificial Sequence: Synthetic oligonucleotide
cuuuguccaggccguuuac

SEQ ID NO: 1771660 - RNA, 19 nt, Artificial Sequence
  Description of Artificial Sequence: Synthetic oligonucleotide
uacacccacucgguugucc

SEQ ID NO: 1771661 - RNA, 19 nt, Artificial Sequence
  Description of Artificial Sequence: Synthetic oligonucleotide
auaguugcucggaaucagu

SEQ ID NO: 1771662 - RNA, 19 nt, Artificial Sequence
  Description of Artificial Sequence: Synthetic oligonucleotide
ggagugaugcacaggcugc

SEQ ID NO: 1771663 - RNA, 19 nt, Artificial Sequence
  Description of Artificial Sequence: Synthetic oligonucleotide
ucccauuccuugagguaaa

SEQ ID NO: 1771664 - RNA, 19 nt, Artificial Sequence
  Description of Artificial Sequence: Synthetic oligonucleotide
cguugcuuaacguucgcac

SEQ ID NO: 1771665 - RNA, 19 nt, Artificial Sequence
  Description of Artificial Sequence: Synthetic oligonucleotide
cguuuggcugaguaaacag

SEQ ID NO: 1771666 - RNA, 19 nt, Artificial Sequence
  Description of Artificial Sequence: Synthetic oligonucleotide
gcagacgggaacugggcgc

SEQ ID NO: 1771667 - RNA, 19 nt, Artificial Sequence
  Description of Artificial Sequence: Synthetic oligonucleotide
caauauucuguugacaguu

SEQ ID NO: 1771668 - RNA, 19 nt, Artificial Sequence
  Description of Artificial Sequence: Synthetic oligonucleotide
cuacuguuauaauaagcau

SEQ ID NO: 1771669 - RNA, 19 nt, Artificial Sequence
  Description of Artificial Sequence: Synthetic oligonucleotide
cagacgggaacugggcgcc

SEQ ID NO: 1771670 - RNA, 19 nt, Artificial Sequence
  Description of Artificial Sequence: Synthetic oligonucleotide
cuuuugccaguagcaacug

SEQ ID NO: 1771671 - RNA, 19 nt, Artificial Sequence
  Description of Artificial Sequence: Synthetic oligonucleotide
uguucggccuuugcaugug

SEQ ID NO: 1771672 - RNA, 19 nt, Artificial Sequence
  Description of Artificial Sequence: Synthetic oligonucleotide
acacgcagacgggaacugg

SEQ ID NO: 1771673 - RNA, 19 nt, Artificial Sequence
  Description of Artificial Sequence: Synthetic oligonucleotide
cucgguuguccaagcacuc

SEQ ID NO: 1771674 - RNA, 19 nt, Artificial Sequence
  Description of Artificial Sequence: Synthetic oligonucleotide
ggccguuuacacccacucg

SEQ ID NO: 1771675 - RNA, 19 nt, Artificial Sequence
  Description of Artificial Sequence: Synthetic oligonucleotide
caucacuuauuggcaaguc

SEQ ID NO: 1771676 - RNA, 19 nt, Artificial Sequence
  Description of Artificial Sequence: Synthetic oligonucleotide
cauuguuucucaagucugu

SEQ ID NO: 1771677 - RNA, 19 nt, Artificial Sequence
  Description of Artificial Sequence: Synthetic oligonucleotide
ggaaucaguccuguucggc

SEQ ID NO: 1771678 - RNA, 19 nt, Artificial Sequence
  Description of Artificial Sequence: Synthetic oligonucleotide
uaggcggagcggcuaggcu

SEQ ID NO: 1771679 - RNA, 19 nt, Artificial Sequence
  Description of Artificial Sequence: Synthetic oligonucleotide
aagucacgggugagaauca

SEQ ID NO: 1771680 - RNA, 19 nt, Artificial Sequence
  Description of Artificial Sequence: Synthetic oligonucleotide
ggguucaaauguauacagc

SEQ ID NO: 1771681 - RNA, 19 nt, Artificial Sequence
  Description of Artificial Sequence: Synthetic oligonucleotide
ucgguuguccaagcacucu

SEQ ID NO: 1771682 - RNA, 19 nt, Artificial Sequence
  Description of Artificial Sequence: Synthetic oligonucleotide
gggaacugggcgccaagcc

SEQ ID NO: 1771683 - RNA, 19 nt, Artificial Sequence
  Description of Artificial Sequence: Synthetic oligonucleotide
ucgcaccccaucuguugcc

SEQ ID NO: 1771684 - RNA, 19 nt, Artificial Sequence
  Description of Artificial Sequence: Synthetic oligonucleotide
caauggauucugccugcuc

SEQ ID NO: 1771685 - RNA, 19 nt, Artificial Sequence
  Description of Artificial Sequence: Synthetic oligonucleotide
uccgcagaccgcccugccu

SEQ ID NO: 1771686 - RNA, 19 nt, Artificial Sequence
  Description of Artificial Sequence: Synthetic oligonucleotide
guucuacacuggugaacac

SEQ ID NO: 1771687 - RNA, 19 nt, Artificial Sequence
  Description of Artificial Sequence: Synthetic oligonucleotide
acagaccacagugcaacaa

SEQ ID NO: 1771688 - RNA, 19 nt, Artificial Sequence
  Description of Artificial Sequence: Synthetic oligonucleotide
gugcaacaaugccacguuc

SEQ ID NO: 1771689 - RNA, 19 nt, Artificial Sequence
  Description of Artificial Sequence: Synthetic oligonucleotide
cuaggcggagcggcuaggc

SEQ ID NO: 1771690 - RNA, 19 nt, Artificial Sequence
  Description of Artificial Sequence: Synthetic oligonucleotide
auacagcaaaguaucccau

SEQ ID NO: 1771691 - RNA, 19 nt, Artificial Sequence
  Description of Artificial Sequence: Synthetic oligonucleotide
gacuuuaacuugcccuggu

SEQ ID NO: 1771692 - RNA, 19 nt, Artificial Sequence
  Description of Artificial Sequence: Synthetic oligonucleotide
guucggccuuugcaugugc

SEQ ID NO: 1771693 - RNA, 19 nt, Artificial Sequence
  Description of Artificial Sequence: Synthetic oligonucleotide
auacagcgcucugaagacu

SEQ ID NO: 1771694 - RNA, 19 nt, Artificial Sequence
  Description of Artificial Sequence: Synthetic oligonucleotide
cugggcgccaagccugcgc

SEQ ID NO: 1771695 - RNA, 19 nt, Artificial Sequence
  Description of Artificial Sequence: Synthetic oligonucleotide
cccaucacuuauuggcaag

SEQ ID NO: 1771696 - RNA, 19 nt, Artificial Sequence
  Description of Artificial Sequence: Synthetic oligonucleotide
gacauggcgcuaggcggag

SEQ ID NO: 1771697 - RNA, 19 nt, Artificial Sequence
  Description of Artificial Sequence: Synthetic oligonucleotide
caguuuugcucuacuguua

SEQ ID NO: 1771698 - RNA, 19 nt, Artificial Sequence
  Description of Artificial Sequence: Synthetic oligonucleotide
uccaggccguuuacaccca

SEQ ID NO: 1771699 - RNA, 19 nt, Artificial Sequence
  Description of Artificial Sequence: Synthetic oligonucleotide
acgggaacugggcgccaag

SEQ ID NO: 1771700 - RNA, 19 nt, Artificial Sequence
  Description of Artificial Sequence: Synthetic oligonucleotide
gcaugugccuuuccaccag

SEQ ID NO: 1771701 - RNA, 19 nt, Artificial Sequence
  Description of Artificial Sequence: Synthetic oligonucleotide
ccuguucggccuuugcaug

SEQ ID NO: 1771702 - RNA, 19 nt, Artificial Sequence
  Description of Artificial Sequence: Synthetic oligonucleotide
ccggacucaucacagacca

SEQ ID NO: 1771703 - RNA, 19 nt, Artificial Sequence
  Description of Artificial Sequence: Synthetic oligonucleotide
acacucggaccagcgagcu

SEQ ID NO: 1771704 - RNA, 19 nt, Artificial Sequence
  Description of Artificial Sequence: Synthetic oligonucleotide
agcuccgcagaccgcccug

SEQ ID NO: 1771705 - RNA, 19 nt, Artificial Sequence
  Description of Artificial Sequence: Synthetic oligonucleotide
aguccuggguucaaaugua

SEQ ID NO: 1771706 - RNA, 19 nt, Artificial Sequence
  Description of Artificial Sequence: Synthetic oligonucleotide
accgguuugggagguggcu

SEQ ID NO: 1771707 - RNA, 19 nt, Artificial Sequence
  Description of Artificial Sequence: Synthetic oligonucleotide
cugaugccacgccggacuc

SEQ ID NO: 1771708 - RNA, 19 nt, Artificial Sequence
  Description of Artificial Sequence: Synthetic oligonucleotide
caucccauuccuugaggua

SEQ ID NO: 1771709 - RNA, 19 nt, Artificial Sequence
  Description of Artificial Sequence: Synthetic oligonucleotide
cagccgaugcgggacacuc

SEQ ID NO: 1771710 - RNA, 19 nt, Artificial Sequence
  Description of Artificial Sequence: Synthetic oligonucleotide
acauggcgcuaggcggagc

SEQ ID NO: 1771711 - RNA, 19 nt, Artificial Sequence
  Description of Artificial Sequence: Synthetic oligonucleotide
ggcgccaagccugcgcugg

SEQ ID NO: 1771712 - RNA, 19 nt, Artificial Sequence
  Description of Artificial Sequence: Synthetic oligonucleotide
ggcaucaaagcagcuccug

SEQ ID NO: 1771713 - RNA, 19 nt, Artificial Sequence
  Description of Artificial Sequence: Synthetic oligonucleotide
cagcuccuggaagaaucag

SEQ ID NO: 1771714 - RNA, 19 nt, Artificial Sequence
  Description of Artificial Sequence: Synthetic oligonucleotide
cagcugguaucacucaugu

SEQ ID NO: 1771715 - RNA, 19 nt, Artificial Sequence
  Description of Artificial Sequence: Synthetic oligonucleotide
gaccgguuugggagguggc

SEQ ID NO: 1771716 - RNA, 19 nt, Artificial Sequence
  Description of Artificial Sequence: Synthetic oligonucleotide
cacgggugagaaucacuga

SEQ ID NO: 1771717 - RNA, 19 nt, Artificial Sequence
  Description of Artificial Sequence: Synthetic oligonucleotide
gccgcgagagccccacacg

SEQ ID NO: 1771718 - RNA, 19 nt, Artificial Sequence
  Description of Artificial Sequence: Synthetic oligonucleotide
gccacguucauauggacuu

SEQ ID NO: 1771719 - RNA, 19 nt, Artificial Sequence
  Description of Artificial Sequence: Synthetic oligonucleotide
cacacgcagacgggaacug

SEQ ID NO: 1771720 - RNA, 19 nt, Artificial Sequence
  Description of Artificial Sequence: Synthetic oligonucleotide
ggcuuggacauggcgcuag

SEQ ID NO: 1771721 - RNA, 19 nt, Artificial Sequence
  Description of Artificial Sequence: Synthetic oligonucleotide
ccuugaaaaccccacucaa

SEQ ID NO: 1771722 - RNA, 19 nt, Artificial Sequence
  Description of Artificial Sequence: Synthetic oligonucleotide
ggaacugggcgccaagccu

SEQ ID NO: 1771723 - RNA, 19 nt, Artificial Sequence
  Description of Artificial Sequence: Synthetic oligonucleotide
gccacucgggacccgcgcg

SEQ ID NO: 1771724 - RNA, 19 nt, Artificial Sequence
  Description of Artificial Sequence: Synthetic oligonucleotide
cagaccgcccugccuuccc

SEQ ID NO: 1771725 - RNA, 19 nt, Artificial Sequence
  Description of Artificial Sequence: Synthetic oligonucleotide
cuccacguuuggcugagua

SEQ ID NO: 1771726 - RNA, 19 nt, Artificial Sequence
  Description of Artificial Sequence: Synthetic oligonucleotide
gaccgcccugccuucccac

SEQ ID NO: 1771727 - RNA, 19 nt, Artificial Sequence
  Description of Artificial Sequence: Synthetic oligonucleotide
agccgaugcgggacacucg

SEQ ID NO: 1771728 - RNA, 19 nt, Artificial Sequence
  Description of Artificial Sequence: Synthetic oligonucleotide
cagugcaacaaugccacgu

SEQ ID NO: 1771729 - RNA, 19 nt, Artificial Sequence
  Description of Artificial Sequence: Synthetic oligonucleotide
agaccgcccugccuuccca

SEQ ID NO: 1771730 - RNA, 19 nt, Artificial Sequence
  Description of Artificial Sequence: Synthetic oligonucleotide
auggcgcuaggcggagcgg

SEQ ID NO: 1771731 - RNA, 19 nt, Artificial Sequence
  Description of Artificial Sequence: Synthetic oligonucleotide
cacuggugaacacagcauu

SEQ ID NO: 1771732 - RNA, 19 nt, Artificial Sequence
  Description of Artificial Sequence: Synthetic oligonucleotide
acucgggacccgcgcgcag

SEQ ID NO: 1771733 - RNA, 19 nt, Artificial Sequence
  Description of Artificial Sequence: Synthetic oligonucleotide
acguucauauggacuuuaa

SEQ ID NO: 1771734 - RNA, 19 nt, Artificial Sequence
  Description of Artificial Sequence: Synthetic oligonucleotide
gcgcucugaagacuuuaac

SEQ ID NO: 1771735 - RNA, 19 nt, Artificial Sequence
  Description of Artificial Sequence: Synthetic oligonucleotide
cagaccacagugcaacaau

SEQ ID NO: 1771736 - RNA, 19 nt, Artificial Sequence
  Description of Artificial Sequence: Synthetic oligonucleotide
ccgcgagagccccacacgc

SEQ ID NO: 1771737 - RNA, 19 nt, Artificial Sequence
  Description of Artificial Sequence: Synthetic oligonucleotide
gaccagcgagcuccgcaga

SEQ ID NO: 1771738 - RNA, 19 nt, Artificial Sequence
  Description of Artificial Sequence: Synthetic oligonucleotide
acgccggacucaucacaga

SEQ ID NO: 1771739 - RNA, 19 nt, Artificial Sequence
  Description of Artificial Sequence: Synthetic oligonucleotide
caaugucugcauaacccuu

SEQ ID NO: 1771740 - RNA, 19 nt, Artificial Sequence
  Description of Artificial Sequence: Synthetic oligonucleotide
ggcaagucacgggugagaa

SEQ ID NO: 1771741 - RNA, 19 nt, Artificial Sequence
  Description of Artificial Sequence: Synthetic oligonucleotide
gaugccacgccggacucau

SEQ ID NO: 1771742 - RNA, 19 nt, Artificial Sequence
  Description of Artificial Sequence: Synthetic oligonucleotide
gccggacucaucacagacc

SEQ ID NO: 1771743 - RNA, 19 nt, Artificial Sequence
  Description of Artificial Sequence: Synthetic oligonucleotide
ggcguugcuuaacguucgc

SEQ ID NO: 1771744 - RNA, 19 nt, Artificial Sequence
  Description of Artificial Sequence: Synthetic oligonucleotide
cuuaacguucgcaccccau

SEQ ID NO: 1771745 - RNA, 19 nt, Artificial Sequence
  Description of Artificial Sequence: Synthetic oligonucleotide
uugaccgguuugggaggug

SEQ ID NO: 1771746 - RNA, 19 nt, Artificial Sequence
  Description of Artificial Sequence: Synthetic oligonucleotide
cgcagacgggaacugggcg

SEQ ID NO: 1771747 - RNA, 19 nt, Artificial Sequence
  Description of Artificial Sequence: Synthetic oligonucleotide
cacugaugccacgccggac

SEQ ID NO: 1771748 - RNA, 19 nt, Artificial Sequence
  Description of Artificial Sequence: Synthetic oligonucleotide
cucggcguugcuuaacguu

SEQ ID NO: 1771749 - RNA, 19 nt, Artificial Sequence
  Description of Artificial Sequence: Synthetic oligonucleotide
ccacguuuggcugaguaaa

SEQ ID NO: 1771750 - RNA, 19 nt, Artificial Sequence
  Description of Artificial Sequence: Synthetic oligonucleotide
cuccgcagaccgcccugcc

SEQ ID NO: 1771751 - RNA, 19 nt, Artificial Sequence
  Description of Artificial Sequence: Synthetic oligonucleotide
cagucugagucuucuucgu

SEQ ID NO: 1771752 - RNA, 19 nt, Artificial Sequence
  Description of Artificial Sequence: Synthetic oligonucleotide
agcuuuguccaggccguuu

SEQ ID NO: 1771753 - RNA, 19 nt, Artificial Sequence
  Description of Artificial Sequence: Synthetic oligonucleotide
gcuaggcucagccgcgaga

SEQ ID NO: 1771754 - RNA, 19 nt, Artificial Sequence
  Description of Artificial Sequence: Synthetic oligonucleotide
caagucuguccucgcaccu

SEQ ID NO: 1771755 - RNA, 19 nt, Artificial Sequence
  Description of Artificial Sequence: Synthetic oligonucleotide
cccugguuugaccgguuug

SEQ ID NO: 1771756 - RNA, 19 nt, Artificial Sequence
  Description of Artificial Sequence: Synthetic oligonucleotide
cacguucauauggacuuua

SEQ ID NO: 1771757 - RNA, 19 nt, Artificial Sequence
  Description of Artificial Sequence: Synthetic oligonucleotide
cggcguugcuuaacguucg

SEQ ID NO: 1771758 - RNA, 19 nt, Artificial Sequence
  Description of Artificial Sequence: Synthetic oligonucleotide
gggacacucggaccagcga

SEQ ID NO: 1771759 - RNA, 19 nt, Artificial Sequence
  Description of Artificial Sequence: Synthetic oligonucleotide
ccuugagguaaagaauuaa

SEQ ID NO: 1771760 - RNA, 19 nt, Artificial Sequence
  Description of Artificial Sequence: Synthetic oligonucleotide
gcggcuaggcucagccgcg

SEQ ID NO: 1771761 - RNA, 19 nt, Artificial Sequence
  Description of Artificial Sequence: Synthetic oligonucleotide
ggcuaggcucagccgcgag

SEQ ID NO: 1771762 - RNA, 19 nt, Artificial Sequence
  Description of Artificial Sequence: Synthetic oligonucleotide
gcuuaacguucgcacccca

SEQ ID NO: 1771763 - RNA, 19 nt, Artificial Sequence
  Description of Artificial Sequence: Synthetic oligonucleotide
gucacgggugagaaucacu

SEQ ID NO: 1771764 - RNA, 19 nt, Artificial Sequence
  Description of Artificial Sequence: Synthetic oligonucleotide
ggccacucgggacccgcgc

SEQ ID NO: 1771765 - RNA, 19 nt, Artificial Sequence
  Description of Artificial Sequence: Synthetic oligonucleotide
cgccggacucaucacagac

SEQ ID NO: 1771766 - RNA, 19 nt, Artificial Sequence
  Description of Artificial Sequence: Synthetic oligonucleotide
uuacacccacucgguuguc

SEQ ID NO: 1771767 - RNA, 19 nt, Artificial Sequence
  Description of Artificial Sequence: Synthetic oligonucleotide
cccacacgcagacgggaac

SEQ ID NO: 1771768 - RNA, 19 nt, Artificial Sequence
  Description of Artificial Sequence: Synthetic oligonucleotide
caauguaguccucggcguu

SEQ ID NO: 1771769 - RNA, 19 nt, Artificial Sequence
  Description of Artificial Sequence: Synthetic oligonucleotide
cacucggaccagcgagcuc

SEQ ID NO: 1771770 - RNA, 19 nt, Artificial Sequence
  Description of Artificial Sequence: Synthetic oligonucleotide
ggcggagcggcuaggcuca

SEQ ID NO: 1771771 - RNA, 19 nt, Artificial Sequence
  Description of Artificial Sequence: Synthetic oligonucleotide
caggagugaugcacaggcu

SEQ ID NO: 1771772 - RNA, 19 nt, Artificial Sequence
  Description of Artificial Sequence: Synthetic oligonucleotide
gacgggaacugggcgccaa

SEQ ID NO: 1771773 - RNA, 19 nt, Artificial Sequence
  Description of Artificial Sequence: Synthetic oligonucleotide
ccacucgggacccgcgcgc

SEQ ID NO: 1771774 - RNA, 19 nt, Artificial Sequence
  Description of Artificial Sequence: Synthetic oligonucleotide
cguucauauggacuuuaaa

SEQ ID NO: 1771775 - RNA, 19 nt, Artificial Sequence
  Description of Artificial Sequence: Synthetic oligonucleotide
gguuguccaagcacucucu

SEQ ID NO: 1771776 - RNA, 19 nt, Artificial Sequence
  Description of Artificial Sequence: Synthetic oligonucleotide
gcuaggcggagcggcuagg

SEQ ID NO: 1771777 - RNA, 19 nt, Artificial Sequence
  Description of Artificial Sequence: Synthetic oligonucleotide
guccucggcguugcuuaac

SEQ ID NO: 1771778 - RNA, 19 nt, Artificial Sequence
  Description of Artificial Sequence: Synthetic oligonucleotide
cugguucagcuccacguuu

SEQ ID NO: 1771779 - RNA, 19 nt, Artificial Sequence
  Description of Artificial Sequence: Synthetic oligonucleotide
gcaccccaucuguugccug

SEQ ID NO: 1771780 - RNA, 19 nt, Artificial Sequence
  Description of Artificial Sequence: Synthetic oligonucleotide
ccagcuuuguccaggccgu

SEQ ID NO: 1771781 - RNA, 19 nt, Artificial Sequence
  Description of Artificial Sequence: Synthetic oligonucleotide
uggcuuggacauggcgcua

SEQ ID NO: 1771782 - RNA, 19 nt, Artificial Sequence
  Description of Artificial Sequence: Synthetic oligonucleotide
gggacccgcgcgcagccga

SEQ ID NO: 1771783 - RNA, 19 nt, Artificial Sequence
  Description of Artificial Sequence: Synthetic oligonucleotide
caguccuguucggccuuug

SEQ ID NO: 1771784 - RNA, 19 nt, Artificial Sequence
  Description of Artificial Sequence: Synthetic oligonucleotide
gcguugcuuaacguucgca

SEQ ID NO: 1771785 - RNA, 19 nt, Artificial Sequence
  Description of Artificial Sequence: Synthetic oligonucleotide
gccacgccggacucaucac

SEQ ID NO: 1771786 - RNA, 19 nt, Artificial Sequence
  Description of Artificial Sequence: Synthetic oligonucleotide
ccauuccuugagguaaaga

SEQ ID NO: 1771787 - RNA, 19 nt, Artificial Sequence
  Description of Artificial Sequence: Synthetic oligonucleotide
gcucagccgcgagagcccc

SEQ ID NO: 1771788 - RNA, 19 nt, Artificial Sequence
  Description of Artificial Sequence: Synthetic oligonucleotide
cacucaugucagugauaua

SEQ ID NO: 1771789 - RNA, 19 nt, Artificial Sequence
  Description of Artificial Sequence: Synthetic oligonucleotide
cccauuccuugagguaaag

SEQ ID NO: 1771790 - RNA, 19 nt, Artificial Sequence
  Description of Artificial Sequence: Synthetic oligonucleotide
caggccguuuacacccacu

SEQ ID NO: 1771791 - RNA, 19 nt, Artificial Sequence
  Description of Artificial Sequence: Synthetic oligonucleotide
gacccgcgcgcagccgaug

SEQ ID NO: 1771792 - RNA, 19 nt, Artificial Sequence
  Description of Artificial Sequence: Synthetic oligonucleotide
acagcgcucugaagacuuu

SEQ ID NO: 1771793 - RNA, 19 nt, Artificial Sequence
  Description of Artificial Sequence: Synthetic oligonucleotide
ccgcgcgcagccgaugcgg

SEQ ID NO: 1771794 - RNA, 19 nt, Artificial Sequence
  Description of Artificial Sequence: Synthetic oligonucleotide
gcagccucaugcaauggau

SEQ ID NO: 1771795 - RNA, 19 nt, Artificial Sequence
  Description of Artificial Sequence: Synthetic oligonucleotide
cugcgcuggcugcggccac

SEQ ID NO: 1771796 - RNA, 19 nt, Artificial Sequence
  Description of Artificial Sequence: Synthetic oligonucleotide
agacgggaacugggcgcca

SEQ ID NO: 1771797 - RNA, 19 nt, Artificial Sequence
  Description of Artificial Sequence: Synthetic oligonucleotide
gcuccgcagaccgcccugc

SEQ ID NO: 1771798 - RNA, 19 nt, Artificial Sequence
  Description of Artificial Sequence: Synthetic oligonucleotide
ccacgccggacucaucaca

SEQ ID NO: 1771799 - RNA, 19 nt, Artificial Sequence
  Description of Artificial Sequence: Synthetic oligonucleotide
cucagccgcgagagcccca

SEQ ID NO: 1771800 - RNA, 19 nt, Artificial Sequence
  Description of Artificial Sequence: Synthetic oligonucleotide
ccguggcaggcccaguaca

SEQ ID NO: 1771801 - RNA, 19 nt, Artificial Sequence
  Description of Artificial Sequence: Synthetic oligonucleotide
cacucgggacccgcgcgca

SEQ ID NO: 1771802 - RNA, 19 nt, Artificial Sequence
  Description of Artificial Sequence: Synthetic oligonucleotide
augccacgccggacucauc

SEQ ID NO: 1771803 - RNA, 19 nt, Artificial Sequence
  Description of Artificial Sequence: Synthetic oligonucleotide
cgggaacugggcgccaagc

SEQ ID NO: 1771804 - RNA, 19 nt, Artificial Sequence
  Description of Artificial Sequence: Synthetic oligonucleotide
ccaggccguuuacacccac

SEQ ID NO: 1771805 - RNA, 19 nt, Artificial Sequence
  Description of Artificial Sequence: Synthetic oligonucleotide
gggagguggcuuggacaug

SEQ ID NO: 1771806 - RNA, 19 nt, Artificial Sequence
  Description of Artificial Sequence: Synthetic oligonucleotide
gccucaugcaauggauugu

SEQ ID NO: 1771807 - RNA, 19 nt, Artificial Sequence
  Description of Artificial Sequence: Synthetic oligonucleotide
cucgcaccuuuugccagua

SEQ ID NO: 1771808 - RNA, 19 nt, Artificial Sequence
  Description of Artificial Sequence: Synthetic oligonucleotide
gcagaccgcccugccuucc

SEQ ID NO: 1771809 - RNA, 19 nt, Artificial Sequence
  Description of Artificial Sequence: Synthetic oligonucleotide
ccguuuacacccacucggu

SEQ ID NO: 1771810 - RNA, 19 nt, Artificial Sequence
  Description of Artificial Sequence: Synthetic oligonucleotide
gggcgccaagccugcgcug

SEQ ID NO: 1771811 - RNA, 19 nt, Artificial Sequence
  Description of Artificial Sequence: Synthetic oligonucleotide
cgcgcgcagccgaugcggg

SEQ ID NO: 1771812 - RNA, 19 nt, Artificial Sequence
  Description of Artificial Sequence: Synthetic oligonucleotide
ccacucgguuguccaagca

SEQ ID NO: 1771813 - RNA, 19 nt, Artificial Sequence
  Description of Artificial Sequence: Synthetic oligonucleotide
gcgccaagccugcgcuggc

SEQ ID NO: 1771814 - RNA, 19 nt, Artificial Sequence
  Description of Artificial Sequence: Synthetic oligonucleotide
gcggccacucgggacccgc

SEQ ID NO: 1771815 - RNA, 19 nt, Artificial Sequence
  Description of Artificial Sequence: Synthetic oligonucleotide
cgcgcagccgaugcgggac

SEQ ID NO: 1771816 - RNA, 19 nt, Artificial Sequence
  Description of Artificial Sequence: Synthetic oligonucleotide
gcaagucacgggugagaau

SEQ ID NO: 1771817 - RNA, 19 nt, Artificial Sequence
  Description of Artificial Sequence: Synthetic oligonucleotide
gcaauacaaccaagguuuu

SEQ ID NO: 1771818 - RNA, 19 nt, Artificial Sequence
  Description of Artificial Sequence: Synthetic oligonucleotide
gcugugucucccagcuugu

SEQ ID NO: 1771819 - RNA, 19 nt, Artificial Sequence
  Description of Artificial Sequence: Synthetic oligonucleotide
cugccugcucagccacaua

SEQ ID NO: 1771820 - RNA, 19 nt, Artificial Sequence
  Description of Artificial Sequence: Synthetic oligonucleotide
ccccacacgcagacgggaa

SEQ ID NO: 1771821 - RNA, 19 nt, Artificial Sequence
  Description of Artificial Sequence: Synthetic oligonucleotide
cccacucaaacaucccauu

SEQ ID NO: 1771822 - RNA, 19 nt, Artificial Sequence
  Description of Artificial Sequence: Synthetic oligonucleotide
cgcgagagccccacacgca

SEQ ID NO: 1771823 - RNA, 19 nt, Artificial Sequence
  Description of Artificial Sequence: Synthetic oligonucleotide
ccacacgcagacgggaacu

SEQ ID NO: 1771824 - RNA, 19 nt, Artificial Sequence
  Description of Artificial Sequence: Synthetic oligonucleotide
cggccacucgggacccgcg

SEQ ID NO: 1771825 - RNA, 19 nt, Artificial Sequence
  Description of Artificial Sequence: Synthetic oligonucleotide
ccgaugcgggacacucgga

SEQ ID NO: 1771826 - RNA, 19 nt, Artificial Sequence
  Description of Artificial Sequence: Synthetic oligonucleotide
ccgcccugccuucccacca

SEQ ID NO: 1771827 - RNA, 19 nt, Artificial Sequence
  Description of Artificial Sequence: Synthetic oligonucleotide
ccgcagaccgcccugccuu

SEQ ID NO: 1771828 - RNA, 19 nt, Artificial Sequence
  Description of Artificial Sequence: Synthetic oligonucleotide
ggcgcuaggcggagcggcu

SEQ ID NO: 1771829 - RNA, 19 nt, Artificial Sequence
  Description of Artificial Sequence: Synthetic oligonucleotide
ccccguggcaggcccagua

SEQ ID NO: 1771830 - RNA, 19 nt, Artificial Sequence
  Description of Artificial Sequence: Synthetic oligonucleotide
ccucggcguugcuuaacgu

SEQ ID NO: 1771831 - RNA, 19 nt, Artificial Sequence
  Description of Artificial Sequence: Synthetic oligonucleotide
gcucggaaucaguccuguu

SEQ ID NO: 1771832 - RNA, 19 nt, Artificial Sequence
  Description of Artificial Sequence: Synthetic oligonucleotide
gcccugguuugaccgguuu

SEQ ID NO: 1771833 - RNA, 19 nt, Artificial Sequence
  Description of Artificial Sequence: Synthetic oligonucleotide
cguuuacacccacucgguu

SEQ ID NO: 1771834 - RNA, 19 nt, Artificial Sequence
  Description of Artificial Sequence: Synthetic oligonucleotide
gcgcuaggcggagcggcua

SEQ ID NO: 1771835 - RNA, 19 nt, Artificial Sequence
  Description of Artificial Sequence: Synthetic oligonucleotide
gcggagcggcuaggcucag

SEQ ID NO: 1771836 - RNA, 19 nt, Artificial Sequence
  Description of Artificial Sequence: Synthetic oligonucleotide
cggagcggcuaggcucagc

SEQ ID NO: 1771837 - RNA, 19 nt, Artificial Sequence
  Description of Artificial Sequence: Synthetic oligonucleotide
cguucgcaccccaucuguu

SEQ ID NO: 1771838 - RNA, 19 nt, Artificial Sequence
  Description of Artificial Sequence: Synthetic oligonucleotide
cagcuuuguccaggccguu

SEQ ID NO: 1771839 - RNA, 19 nt, Artificial Sequence
  Description of Artificial Sequence: Synthetic oligonucleotide
ccacguucauauggacuuu

SEQ ID NO: 1771840 - RNA, 19 nt, Artificial Sequence
  Description of Artificial Sequence: Synthetic oligonucleotide
ggacccgcgcgcagccgau

SEQ ID NO: 1771841 - RNA, 19 nt, Artificial Sequence
  Description of Artificial Sequence: Synthetic oligonucleotide
cggcuaggcucagccgcga

SEQ ID NO: 1771842 - RNA, 19 nt, Artificial Sequence
  Description of Artificial Sequence: Synthetic oligonucleotide
cccuuccaggcagcugcau

SEQ ID NO: 1771843 - RNA, 19 nt, Artificial Sequence
  Description of Artificial Sequence: Synthetic oligonucleotide
uuuacgaggacuaaauugg

SEQ ID NO: 1771844 - RNA, 19 nt, Artificial Sequence
  Description of Artificial Sequence: Synthetic oligonucleotide
agaaauuccacucacaaag

SEQ ID NO: 1771845 - RNA, 19 nt, Artificial Sequence
  Description of Artificial Sequence: Synthetic oligonucleotide
aauggaagcauucaauaac

SEQ ID NO: 1771846 - RNA, 19 nt, Artificial Sequence
  Description of Artificial Sequence: Synthetic oligonucleotide
cauucaauaacaauuuugg

SEQ ID NO: 1771847 - RNA, 19 nt, Artificial Sequence
  Description of Artificial Sequence: Synthetic oligonucleotide
auaacuaaguuguaccucc

SEQ ID NO: 1771848 - RNA, 19 nt, Artificial Sequence
  Description of Artificial Sequence: Synthetic oligonucleotide
agacugaacacuuaggugg

SEQ ID NO: 1771849 - RNA, 19 nt, Artificial Sequence
  Description of Artificial Sequence: Synthetic oligonucleotide
uuucacuuauucaaaauag

SEQ ID NO: 1771850 - RNA, 19 nt, Artificial Sequence
  Description of Artificial Sequence: Synthetic oligonucleotide
augaacuugacuuaaaaca

SEQ ID NO: 1771851 - RNA, 19 nt, Artificial Sequence
  Description of Artificial Sequence: Synthetic oligonucleotide
ugaacuugacuuaaaacag

SEQ ID NO: 1771852 - RNA, 19 nt, Artificial Sequence
  Description of Artificial Sequence: Synthetic oligonucleotide
cauaucauggguaauuugg

SEQ ID NO: 1771853 - RNA, 19 nt, Artificial Sequence
  Description of Artificial Sequence: Synthetic oligonucleotide
aaagcaacauuucuccacg

SEQ ID NO: 1771854 - RNA, 19 nt, Artificial Sequence
  Description of Artificial Sequence: Synthetic oligonucleotide
uguaccucccuaaagaaag

SEQ ID NO: 1771855 - RNA, 19 nt, Artificial Sequence
  Description of Artificial Sequence: Synthetic oligonucleotide
cuuaucagaaaucagcuag

SEQ ID NO: 1771856 - RNA, 19 nt, Artificial Sequence
  Description of Artificial Sequence: Synthetic oligonucleotide
uuugcuaucucuaugccug

SEQ ID NO: 1771857 - RNA, 19 nt, Artificial Sequence
  Description of Artificial Sequence: Synthetic oligonucleotide
aaaucuaguacagaaucac

SEQ ID NO: 1771858 - RNA, 19 nt, Artificial Sequence
  Description of Artificial Sequence: Synthetic oligonucleotide
aauacugauagaaucgaac

SEQ ID NO: 1771859 - RNA, 19 nt, Artificial Sequence
  Description of Artificial Sequence: Synthetic oligonucleotide
auacugauagaaucgaacg

SEQ ID NO: 1771860 - RNA, 19 nt, Artificial Sequence
  Description of Artificial Sequence: Synthetic oligonucleotide
uuuaccagaauauuggcac

SEQ ID NO: 1771861 - RNA, 19 nt, Artificial Sequence
  Description of Artificial Sequence: Synthetic oligonucleotide
ucaacuuucauacguagca

SEQ ID NO: 1771862 - RNA, 19 nt, Artificial Sequence
  Description of Artificial Sequence: Synthetic oligonucleotide
auacuuaucagaaaucagc

SEQ ID NO: 1771863 - RNA, 19 nt, Artificial Sequence
  Description of Artificial Sequence: Synthetic oligonucleotide
ugauacucuauaaauaaac

SEQ ID NO: 1771864 - RNA, 19 nt, Artificial Sequence
  Description of Artificial Sequence: Synthetic oligonucleotide
uaauuugggauuaaacagc

SEQ ID NO: 1771865 - RNA, 19 nt, Artificial Sequence
  Description of Artificial Sequence: Synthetic oligonucleotide
acugauagaaucgaacgcc

SEQ ID NO: 1771866 - RNA, 19 nt, Artificial Sequence
  Description of Artificial Sequence: Synthetic oligonucleotide
auaaauaaaccauucugga

SEQ ID NO: 1771867 - RNA, 19 nt, Artificial Sequence
  Description of Artificial Sequence: Synthetic oligonucleotide
guuuacgaggacuaaauug

SEQ ID NO: 1771868 - RNA, 19 nt, Artificial Sequence
  Description of Artificial Sequence: Synthetic oligonucleotide
auauaucucuuuuaaacca

SEQ ID NO: 1771869 - RNA, 19 nt, Artificial Sequence
  Description of Artificial Sequence: Synthetic oligonucleotide
gauugaaggauacaugaac

SEQ ID NO: 1771870 - RNA, 19 nt, Artificial Sequence
  Description of Artificial Sequence: Synthetic oligonucleotide
uuaucagaaaucagcuagg

SEQ ID NO: 1771871 - RNA, 19 nt, Artificial Sequence
  Description of Artificial Sequence: Synthetic oligonucleotide
acauuuauacacaagagca

SEQ ID NO: 1771872 - RNA, 19 nt, Artificial Sequence
  Description of Artificial Sequence: Synthetic oligonucleotide
uuucauacguagcagguac

SEQ ID NO: 1771873 - RNA, 19 nt, Artificial Sequence
  Description of Artificial Sequence: Synthetic oligonucleotide
aaucgaacgccccacaagu

SEQ ID NO: 1771874 - RNA, 19 nt, Artificial Sequence
  Description of Artificial Sequence: Synthetic oligonucleotide
cacauaacuaaguuguacc

SEQ ID NO: 1771875 - RNA, 19 nt, Artificial Sequence
  Description of Artificial Sequence: Synthetic oligonucleotide
caaaagacaaauauaucuc

SEQ ID NO: 1771876 - RNA, 19 nt, Artificial Sequence
  Description of Artificial Sequence: Synthetic oligonucleotide
uacuuaucagaaaucagcu

SEQ ID NO: 1771877 - RNA, 19 nt, Artificial Sequence
  Description of Artificial Sequence: Synthetic oligonucleotide
aaccauuagauggucuugc

SEQ ID NO: 1771878 - RNA, 19 nt, Artificial Sequence
  Description of Artificial Sequence: Synthetic oligonucleotide
aauagucauguuaagauaa

SEQ ID NO: 1771879 - RNA, 19 nt, Artificial Sequence
  Description of Artificial Sequence: Synthetic oligonucleotide
gauacucuauaaauaaacc

SEQ ID NO: 1771880 - RNA, 19 nt, Artificial Sequence
  Description of Artificial Sequence: Synthetic oligonucleotide
ugucagacaauauagguuu

SEQ ID NO: 1771881 - RNA, 19 nt, Artificial Sequence
  Description of Artificial Sequence: Synthetic oligonucleotide
uugggcacuacaaaagcag

SEQ ID NO: 1771882 - RNA, 19 nt, Artificial Sequence
  Description of Artificial Sequence: Synthetic oligonucleotide
uaguacagaaucacaauac

SEQ ID NO: 1771883 - RNA, 19 nt, Artificial Sequence
  Description of Artificial Sequence: Synthetic oligonucleotide
aaaucagauugaaggauac

SEQ ID NO: 1771884 - RNA, 19 nt, Artificial Sequence
  Description of Artificial Sequence: Synthetic oligonucleotide
ucaagaaaucagauugaag

SEQ ID NO: 1771885 - RNA, 19 nt, Artificial Sequence
  Description of Artificial Sequence: Synthetic oligonucleotide
gcuggcaaccauuagaugg

SEQ ID NO: 1771886 - RNA, 19 nt, Artificial Sequence
  Description of Artificial Sequence: Synthetic oligonucleotide
agcacacgcacacacacac

SEQ ID NO: 1771887 - RNA, 19 nt, Artificial Sequence
  Description of Artificial Sequence: Synthetic oligonucleotide
aguuguaccucccuaaaga

SEQ ID NO: 1771888 - RNA, 19 nt, Artificial Sequence
  Description of Artificial Sequence: Synthetic oligonucleotide
uacugauagaaucgaacgc

SEQ ID NO: 1771889 - RNA, 19 nt, Artificial Sequence
  Description of Artificial Sequence: Synthetic oligonucleotide
aaucagcuaggccauagga

SEQ ID NO: 1771890 - RNA, 19 nt, Artificial Sequence
  Description of Artificial Sequence: Synthetic oligonucleotide
aaauugggcacuacaaaag

SEQ ID NO: 1771891 - RNA, 19 nt, Artificial Sequence
  Description of Artificial Sequence: Synthetic oligonucleotide
cuuagucucagcaagcauc

SEQ ID NO: 1771892 - RNA, 19 nt, Artificial Sequence
  Description of Artificial Sequence: Synthetic oligonucleotide
aguucacauaacuaaguug

SEQ ID NO: 1771893 - RNA, 19 nt, Artificial Sequence
  Description of Artificial Sequence: Synthetic oligonucleotide
aauacuuaucagaaaucag

SEQ ID NO: 1771894 - RNA, 19 nt, Artificial Sequence
  Description of Artificial Sequence: Synthetic oligonucleotide
aguuucgaagacugaacac

SEQ ID NO: 1771895 - RNA, 19 nt, Artificial Sequence
  Description of Artificial Sequence: Synthetic oligonucleotide
uucacuuauucaaaauaga

SEQ ID NO: 1771896 - RNA, 19 nt, Artificial Sequence
  Description of Artificial Sequence: Synthetic oligonucleotide
uaguuucgaagacugaaca

SEQ ID NO: 1771897 - RNA, 19 nt, Artificial Sequence
  Description of Artificial Sequence: Synthetic oligonucleotide
aaaucagcuaggccauagg

SEQ ID NO: 1771898 - RNA, 19 nt, Artificial Sequence
  Description of Artificial Sequence: Synthetic oligonucleotide
uaauacauaucauggguaa

SEQ ID NO: 1771899 - RNA, 19 nt, Artificial Sequence
  Description of Artificial Sequence: Synthetic oligonucleotide
cauuagauggucuugcuca

SEQ ID NO: 1771900 - RNA, 19 nt, Artificial Sequence
  Description of Artificial Sequence: Synthetic oligonucleotide
auaaagaacaauggaagca

SEQ ID NO: 1771901 - RNA, 19 nt, Artificial Sequence
  Description of Artificial Sequence: Synthetic oligonucleotide
ucaaugcauaguuucgaag

SEQ ID NO: 1771902 - RNA, 19 nt, Artificial Sequence
  Description of Artificial Sequence: Synthetic oligonucleotide
aacaguucacauaacuaag

SEQ ID NO: 1771903 - RNA, 19 nt, Artificial Sequence
  Description of Artificial Sequence: Synthetic oligonucleotide
ugacuaagaaauuccacuc

SEQ ID NO: 1771904 - RNA, 19 nt, Artificial Sequence
  Description of Artificial Sequence: Synthetic oligonucleotide
uugacuuaaaacaguucac

SEQ ID NO: 1771905 - RNA, 19 nt, Artificial Sequence
  Description of Artificial Sequence: Synthetic oligonucleotide
auuucugucagacaauaua

SEQ ID NO: 1771906 - RNA, 19 nt, Artificial Sequence
  Description of Artificial Sequence: Synthetic oligonucleotide
aaguuguaccucccuaaag

SEQ ID NO: 1771907 - RNA, 19 nt, Artificial Sequence
  Description of Artificial Sequence: Synthetic oligonucleotide
ugaaggauacaugaacuug

SEQ ID NO: 1771908 - RNA, 19 nt, Artificial Sequence
  Description of Artificial Sequence: Synthetic oligonucleotide
accacaaagguguuuacga

SEQ ID NO: 1771909 - RNA, 19 nt, Artificial Sequence
  Description of Artificial Sequence: Synthetic oligonucleotide
acaugucucaguuuaccag

SEQ ID NO: 1771910 - RNA, 19 nt, Artificial Sequence
  Description of Artificial Sequence: Synthetic oligonucleotide
agguacacgaacaugcugg

SEQ ID NO: 1771911 - RNA, 19 nt, Artificial Sequence
  Description of Artificial Sequence: Synthetic oligonucleotide
uuacgaggacuaaauuggg

SEQ ID NO: 1771912 - RNA, 19 nt, Artificial Sequence
  Description of Artificial Sequence: Synthetic oligonucleotide
agucucagcaagcaucuag

SEQ ID NO: 1771913 - RNA, 19 nt, Artificial Sequence
  Description of Artificial Sequence: Synthetic oligonucleotide
ugguaguauaaaauaaaua

SEQ ID NO: 1771914 - RNA, 19 nt, Artificial Sequence
  Description of Artificial Sequence: Synthetic oligonucleotide
acgaggacuaaauugggca

SEQ ID NO: 1771915 - RNA, 19 nt, Artificial Sequence
  Description of Artificial Sequence: Synthetic oligonucleotide
acauaacuaaguuguaccu

SEQ ID NO: 1771916 - RNA, 19 nt, Artificial Sequence
  Description of Artificial Sequence: Synthetic oligonucleotide
aaaccacaaagguguuuac

SEQ ID NO: 1771917 - RNA, 19 nt, Artificial Sequence
  Description of Artificial Sequence: Synthetic oligonucleotide
aagaaagcuuguaaacauc

SEQ ID NO: 1771918 - RNA, 19 nt, Artificial Sequence
  Description of Artificial Sequence: Synthetic oligonucleotide
gagcaaauuaauucuuaac

SEQ ID NO: 1771919 - RNA, 19 nt, Artificial Sequence
  Description of Artificial Sequence: Synthetic oligonucleotide
uucaauaaaagaagcccua

SEQ ID NO: 1771920 - RNA, 19 nt, Artificial Sequence
  Description of Artificial Sequence: Synthetic oligonucleotide
augaucaagacuaugacua

SEQ ID NO: 1771921 - RNA, 19 nt, Artificial Sequence
  Description of Artificial Sequence: Synthetic oligonucleotide
aaauuaauucuuaacucua

SEQ ID NO: 1771922 - RNA, 19 nt, Artificial Sequence
  Description of Artificial Sequence: Synthetic oligonucleotide
cauuucuccacgagcacgc

SEQ ID NO: 1771923 - RNA, 19 nt, Artificial Sequence
  Description of Artificial Sequence: Synthetic oligonucleotide
gaauauuggcacuguuugc

SEQ ID NO: 1771924 - RNA, 19 nt, Artificial Sequence
  Description of Artificial Sequence: Synthetic oligonucleotide
auugaaggauacaugaacu

SEQ ID NO: 1771925 - RNA, 19 nt, Artificial Sequence
  Description of Artificial Sequence: Synthetic oligonucleotide
gaguccaaaggauuaauaa

SEQ ID NO: 1771926 - RNA, 19 nt, Artificial Sequence
  Description of Artificial Sequence: Synthetic oligonucleotide
agacaauauagguuuauuu

SEQ ID NO: 1771927 - RNA, 19 nt, Artificial Sequence
  Description of Artificial Sequence: Synthetic oligonucleotide
auaguuucgaagacugaac

SEQ ID NO: 1771928 - RNA, 19 nt, Artificial Sequence
  Description of Artificial Sequence: Synthetic oligonucleotide
ucaagacuaugacuaagaa

SEQ ID NO: 1771929 - RNA, 19 nt, Artificial Sequence
  Description of Artificial Sequence: Synthetic oligonucleotide
uguccuuuucccacaaaac

SEQ ID NO: 1771930 - RNA, 19 nt, Artificial Sequence
  Description of Artificial Sequence: Synthetic oligonucleotide
cacacacacacacacacac

SEQ ID NO: 1771931 - RNA, 19 nt, Artificial Sequence
  Description of Artificial Sequence: Synthetic oligonucleotide
ucuagcauuucuguuuuca

SEQ ID NO: 1771932 - RNA, 19 nt, Artificial Sequence
  Description of Artificial Sequence: Synthetic oligonucleotide
aggauuaauaauacauauc

SEQ ID NO: 1771933 - RNA, 19 nt, Artificial Sequence
  Description of Artificial Sequence: Synthetic oligonucleotide
agccaaguguuucacaugu

SEQ ID NO: 1771934 - RNA, 19 nt, Artificial Sequence
  Description of Artificial Sequence: Synthetic oligonucleotide
guaauagucauguuaagau

SEQ ID NO: 1771935 - RNA, 19 nt, Artificial Sequence
  Description of Artificial Sequence: Synthetic oligonucleotide
cugauagaaucgaacgccc

SEQ ID NO: 1771936 - RNA, 19 nt, Artificial Sequence
  Description of Artificial Sequence: Synthetic oligonucleotide
caauauagguuuauuuuca

SEQ ID NO: 1771937 - RNA, 19 nt, Artificial Sequence
  Description of Artificial Sequence: Synthetic oligonucleotide
gaaucgaacgccccacaag

SEQ ID NO: 1771938 - RNA, 19 nt, Artificial Sequence
  Description of Artificial Sequence: Synthetic oligonucleotide
aaaacccauacagaagagu

SEQ ID NO: 1771939 - RNA, 19 nt, Artificial Sequence
  Description of Artificial Sequence: Synthetic oligonucleotide
uaucauggguaauuuggga

SEQ ID NO: 1771940 - RNA, 19 nt, Artificial Sequence
  Description of Artificial Sequence: Synthetic oligonucleotide
auaucauggguaauuuggg

SEQ ID NO: 1771941 - RNA, 19 nt, Artificial Sequence
  Description of Artificial Sequence: Synthetic oligonucleotide
auaaagccaaguguuucac

SEQ ID NO: 1771942 - RNA, 19 nt, Artificial Sequence
  Description of Artificial Sequence: Synthetic oligonucleotide
ucgaacgccccacaagugc

SEQ ID NO: 1771943 - RNA, 19 nt, Artificial Sequence
  Description of Artificial Sequence: Synthetic oligonucleotide
ugauagaaucgaacgcccc

SEQ ID NO: 1771944 - RNA, 19 nt, Artificial Sequence
  Description of Artificial Sequence: Synthetic oligonucleotide
uugauacucuauaaauaaa

SEQ ID NO: 1771945 - RNA, 19 nt, Artificial Sequence
  Description of Artificial Sequence: Synthetic oligonucleotide
acuacaaaagcagaggguu

SEQ ID NO: 1771946 - RNA, 19 nt, Artificial Sequence
  Description of Artificial Sequence: Synthetic oligonucleotide
aucauggguaauuugggau

SEQ ID NO: 1771947 - RNA, 19 nt, Artificial Sequence
  Description of Artificial Sequence: Synthetic oligonucleotide
gcaaauuaauucuuaacuc

SEQ ID NO: 1771948 - RNA, 19 nt, Artificial Sequence
  Description of Artificial Sequence: Synthetic oligonucleotide
auagaaucgaacgccccac

SEQ ID NO: 1771949 - RNA, 19 nt, Artificial Sequence
  Description of Artificial Sequence: Synthetic oligonucleotide
uacgaggacuaaauugggc

SEQ ID NO: 1771950 - RNA, 19 nt, Artificial Sequence
  Description of Artificial Sequence: Synthetic oligonucleotide
caaauuaauucuuaacucu

SEQ ID NO: 1771951 - RNA, 19 nt, Artificial Sequence
  Description of Artificial Sequence: Synthetic oligonucleotide
gauacaugaacuugacuua

SEQ ID NO: 1771952 - RNA, 19 nt, Artificial Sequence
  Description of Artificial Sequence: Synthetic oligonucleotide
ucacauaacuaaguuguac

SEQ ID NO: 1771953 - RNA, 19 nt, Artificial Sequence
  Description of Artificial Sequence: Synthetic oligonucleotide
aaccauucuggaggaaaac

SEQ ID NO: 1771954 - RNA, 19 nt, Artificial Sequence
  Description of Artificial Sequence: Synthetic oligonucleotide
agagcaaauuaauucuuaa

SEQ ID NO: 1771955 - RNA, 19 nt, Artificial Sequence
  Description of Artificial Sequence: Synthetic oligonucleotide
auuggcacuguuugcuauc

SEQ ID NO: 1771956 - RNA, 19 nt, Artificial Sequence
  Description of Artificial Sequence: Synthetic oligonucleotide
uuaaaccaguggcaaccag

SEQ ID NO: 1771957 - RNA, 19 nt, Artificial Sequence
  Description of Artificial Sequence: Synthetic oligonucleotide
uaaaccauucuggaggaaa

SEQ ID NO: 1771958 - RNA, 19 nt, Artificial Sequence
  Description of Artificial Sequence: Synthetic oligonucleotide
gaaaucagcuaggccauag

SEQ ID NO: 1771959 - RNA, 19 nt, Artificial Sequence
  Description of Artificial Sequence: Synthetic oligonucleotide
uuucgaagacugaacacuu

SEQ ID NO: 1771960 - RNA, 19 nt, Artificial Sequence
  Description of Artificial Sequence: Synthetic oligonucleotide
aaaccaguggcaaccaggu

SEQ ID NO: 1771961 - RNA, 19 nt, Artificial Sequence
  Description of Artificial Sequence: Synthetic oligonucleotide
gacuugauacucuauaaau

SEQ ID NO: 1771962 - RNA, 19 nt, Artificial Sequence
  Description of Artificial Sequence: Synthetic oligonucleotide
uaaguuguaccucccuaaa

SEQ ID NO: 1771963 - RNA, 19 nt, Artificial Sequence
  Description of Artificial Sequence: Synthetic oligonucleotide
acacgaacaugcuggcaac

SEQ ID NO: 1771964 - RNA, 19 nt, Artificial Sequence
  Description of Artificial Sequence: Synthetic oligonucleotide
agaacaauggaagcauuca

SEQ ID NO: 1771965 - RNA, 19 nt, Artificial Sequence
  Description of Artificial Sequence: Synthetic oligonucleotide
aaucuaguacagaaucaca

SEQ ID NO: 1771966 - RNA, 19 nt, Artificial Sequence
  Description of Artificial Sequence: Synthetic oligonucleotide
acaccuuucagacuugaua

SEQ ID NO: 1771967 - RNA, 19 nt, Artificial Sequence
  Description of Artificial Sequence: Synthetic oligonucleotide
cuaguucaacuuucauacg

SEQ ID NO: 1771968 - RNA, 19 nt, Artificial Sequence
  Description of Artificial Sequence: Synthetic oligonucleotide
cacacgcacacacacacac

SEQ ID NO: 1771969 - RNA, 19 nt, Artificial Sequence
  Description of Artificial Sequence: Synthetic oligonucleotide
agcacgcgcgagcacacgc

SEQ ID NO: 1771970 - RNA, 19 nt, Artificial Sequence
  Description of Artificial Sequence: Synthetic oligonucleotide
cuaugacuaagaaauucca

SEQ ID NO: 1771971 - RNA, 19 nt, Artificial Sequence
  Description of Artificial Sequence: Synthetic oligonucleotide
cacgcacacacacacacac

SEQ ID NO: 1771972 - RNA, 19 nt, Artificial Sequence
  Description of Artificial Sequence: Synthetic oligonucleotide
aguggcaaccagguaauag

SEQ ID NO: 1771973 - RNA, 19 nt, Artificial Sequence
  Description of Artificial Sequence: Synthetic oligonucleotide
uaacuaaguuguaccuccc

SEQ ID NO: 1771974 - RNA, 19 nt, Artificial Sequence
  Description of Artificial Sequence: Synthetic oligonucleotide
acaauacugauagaaucga

SEQ ID NO: 1771975 - RNA, 19 nt, Artificial Sequence
  Description of Artificial Sequence: Synthetic oligonucleotide
acaaagguguuuacgagga

SEQ ID NO: 1771976 - RNA, 19 nt, Artificial Sequence
  Description of Artificial Sequence: Synthetic oligonucleotide
cuuagguggggccagguca

SEQ ID NO: 1771977 - RNA, 19 nt, Artificial Sequence
  Description of Artificial Sequence: Synthetic oligonucleotide
caugucucaguuuaccaga

SEQ ID NO: 1771978 - RNA, 19 nt, Artificial Sequence
  Description of Artificial Sequence: Synthetic oligonucleotide
auggaagcauucaauaaca

SEQ ID NO: 1771979 - RNA, 19 nt, Artificial Sequence
  Description of Artificial Sequence: Synthetic oligonucleotide
cuucaauaaaagaagcccu

SEQ ID NO: 1771980 - RNA, 19 nt, Artificial Sequence
  Description of Artificial Sequence: Synthetic oligonucleotide
ucaauaaaagaagcccuau

SEQ ID NO: 1771981 - RNA, 19 nt, Artificial Sequence
  Description of Artificial Sequence: Synthetic oligonucleotide
aauacauaucauggguaau

SEQ ID NO: 1771982 - RNA, 19 nt, Artificial Sequence
  Description of Artificial Sequence: Synthetic oligonucleotide
acguagcagguacacgaac

SEQ ID NO: 1771983 - RNA, 19 nt, Artificial Sequence
  Description of Artificial Sequence: Synthetic oligonucleotide
uaaagccaaguguuucaca

SEQ ID NO: 1771984 - RNA, 19 nt, Artificial Sequence
  Description of Artificial Sequence: Synthetic oligonucleotide
aucuaguacagaaucacaa

SEQ ID NO: 1771985 - RNA, 19 nt, Artificial Sequence
  Description of Artificial Sequence: Synthetic oligonucleotide
cacacacacacacaacuuc

SEQ ID NO: 1771986 - RNA, 19 nt, Artificial Sequence
  Description of Artificial Sequence: Synthetic oligonucleotide
cuaguacagaaucacaaua

SEQ ID NO: 1771987 - RNA, 19 nt, Artificial Sequence
  Description of Artificial Sequence: Synthetic oligonucleotide
ucacuaguccuuagucuca

SEQ ID NO: 1771988 - RNA, 19 nt, Artificial Sequence
  Description of Artificial Sequence: Synthetic oligonucleotide
agguaauagucauguuaag

SEQ ID NO: 1771989 - RNA, 19 nt, Artificial Sequence
  Description of Artificial Sequence: Synthetic oligonucleotide
uuuaaaccaguggcaacca

SEQ ID NO: 1771990 - RNA, 19 nt, Artificial Sequence
  Description of Artificial Sequence: Synthetic oligonucleotide
cauaacuaaguuguaccuc

SEQ ID NO: 1771991 - RNA, 19 nt, Artificial Sequence
  Description of Artificial Sequence: Synthetic oligonucleotide
uucauacguagcagguaca

SEQ ID NO: 1771992 - RNA, 19 nt, Artificial Sequence
  Description of Artificial Sequence: Synthetic oligonucleotide
gugguaucgguccauagaa

SEQ ID NO: 1771993 - RNA, 19 nt, Artificial Sequence
  Description of Artificial Sequence: Synthetic oligonucleotide
cucagcaagcaucuaguuc

SEQ ID NO: 1771994 - RNA, 19 nt, Artificial Sequence
  Description of Artificial Sequence: Synthetic oligonucleotide
ugauuucugucagacaaua

SEQ ID NO: 1771995 - RNA, 19 nt, Artificial Sequence
  Description of Artificial Sequence: Synthetic oligonucleotide
augguaguauaaaauaaau

SEQ ID NO: 1771996 - RNA, 19 nt, Artificial Sequence
  Description of Artificial Sequence: Synthetic oligonucleotide
acuaguccuuagucucagc

SEQ ID NO: 1771997 - RNA, 19 nt, Artificial Sequence
  Description of Artificial Sequence: Synthetic oligonucleotide
auaauacauaucaugggua

SEQ ID NO: 1771998 - RNA, 19 nt, Artificial Sequence
  Description of Artificial Sequence: Synthetic oligonucleotide
aucaagacuaugacuaaga

SEQ ID NO: 1771999 - RNA, 19 nt, Artificial Sequence
  Description of Artificial Sequence: Synthetic oligonucleotide
cuaaauugggcacuacaaa

SEQ ID NO: 1772000 - RNA, 19 nt, Artificial Sequence
  Description of Artificial Sequence: Synthetic oligonucleotide
caagacuaugacuaagaaa

SEQ ID NO: 1772001 - RNA, 19 nt, Artificial Sequence
  Description of Artificial Sequence: Synthetic oligonucleotide
ucauacguagcagguacac

SEQ ID NO: 1772002 - RNA, 19 nt, Artificial Sequence
  Description of Artificial Sequence: Synthetic oligonucleotide
gaaaucagauugaaggaua

SEQ ID NO: 1772003 - RNA, 19 nt, Artificial Sequence
  Description of Artificial Sequence: Synthetic oligonucleotide
cugguuuugagauggcaca

SEQ ID NO: 1772004 - RNA, 19 nt, Artificial Sequence
  Description of Artificial Sequence: Synthetic oligonucleotide
acuuagguggggccagguc

SEQ ID NO: 1772005 - RNA, 19 nt, Artificial Sequence
  Description of Artificial Sequence: Synthetic oligonucleotide
ugggauuaaacagcccaug

SEQ ID NO: 1772006 - RNA, 19 nt, Artificial Sequence
  Description of Artificial Sequence: Synthetic oligonucleotide
acuugacuuaaaacaguuc

SEQ ID NO: 1772007 - RNA, 19 nt, Artificial Sequence
  Description of Artificial Sequence: Synthetic oligonucleotide
uggaagcauucaauaacaa

SEQ ID NO: 1772008 - RNA, 19 nt, Artificial Sequence
  Description of Artificial Sequence: Synthetic oligonucleotide
ugaucaagacuaugacuaa

SEQ ID NO: 1772009 - RNA, 19 nt, Artificial Sequence
  Description of Artificial Sequence: Synthetic oligonucleotide
uccacgagcacgcgcgagc

SEQ ID NO: 1772010 - RNA, 19 nt, Artificial Sequence
  Description of Artificial Sequence: Synthetic oligonucleotide
auuugggauuaaacagccc

SEQ ID NO: 1772011 - RNA, 19 nt, Artificial Sequence
  Description of Artificial Sequence: Synthetic oligonucleotide
cuaagaaauuccacucaca

SEQ ID NO: 1772012 - RNA, 19 nt, Artificial Sequence
  Description of Artificial Sequence: Synthetic oligonucleotide
uccauacagaaaacaggau

SEQ ID NO: 1772013 - RNA, 19 nt, Artificial Sequence
  Description of Artificial Sequence: Synthetic oligonucleotide
acuugauacucuauaaaua

SEQ ID NO: 1772014 - RNA, 19 nt, Artificial Sequence
  Description of Artificial Sequence: Synthetic oligonucleotide
aaaccauucuggaggaaaa

SEQ ID NO: 1772015 - RNA, 19 nt, Artificial Sequence
  Description of Artificial Sequence: Synthetic oligonucleotide
acccauacagaagagucca

SEQ ID NO: 1772016 - RNA, 19 nt, Artificial Sequence
  Description of Artificial Sequence: Synthetic oligonucleotide
cuaaguuguaccucccuaa

SEQ ID NO: 1772017 - RNA, 19 nt, Artificial Sequence
  Description of Artificial Sequence: Synthetic oligonucleotide
gguaauagucauguuaaga

SEQ ID NO: 1772018 - RNA, 19 nt, Artificial Sequence
  Description of Artificial Sequence: Synthetic oligonucleotide
uaguccuuagucucagcaa

SEQ ID NO: 1772019 - RNA, 19 nt, Artificial Sequence
  Description of Artificial Sequence: Synthetic oligonucleotide
guuuaccagaauauuggca

SEQ ID NO: 1772020 - RNA, 19 nt, Artificial Sequence
  Description of Artificial Sequence: Synthetic oligonucleotide
uccuuagucucagcaagca

SEQ ID NO: 1772021 - RNA, 19 nt, Artificial Sequence
  Description of Artificial Sequence: Synthetic oligonucleotide
guuguaccucccuaaagaa

SEQ ID NO: 1772022 - RNA, 19 nt, Artificial Sequence
  Description of Artificial Sequence: Synthetic oligonucleotide
gaaauuccacucacaaaga

SEQ ID NO: 1772023 - RNA, 19 nt, Artificial Sequence
  Description of Artificial Sequence: Synthetic oligonucleotide
uagaaucgaacgccccaca

SEQ ID NO: 1772024 - RNA, 19 nt, Artificial Sequence
  Description of Artificial Sequence: Synthetic oligonucleotide
acuuucauacguagcaggu

SEQ ID NO: 1772025 - RNA, 19 nt, Artificial Sequence
  Description of Artificial Sequence: Synthetic oligonucleotide
caacuuucauacguagcag

SEQ ID NO: 1772026 - RNA, 19 nt, Artificial Sequence
  Description of Artificial Sequence: Synthetic oligonucleotide
aagcaacauuucuccacga

SEQ ID NO: 1772027 - RNA, 19 nt, Artificial Sequence
  Description of Artificial Sequence: Synthetic oligonucleotide
cauacguagcagguacacg

SEQ ID NO: 1772028 - RNA, 19 nt, Artificial Sequence
  Description of Artificial Sequence: Synthetic oligonucleotide
cacacacacacacacacaa

SEQ ID NO: 1772029 - RNA, 19 nt, Artificial Sequence
  Description of Artificial Sequence: Synthetic oligonucleotide
aggauacaugaacuugacu

SEQ ID NO: 1772030 - RNA, 19 nt, Artificial Sequence
  Description of Artificial Sequence: Synthetic oligonucleotide
uacauaucauggguaauuu

SEQ ID NO: 1772031 - RNA, 19 nt, Artificial Sequence
  Description of Artificial Sequence: Synthetic oligonucleotide
agaaaacaggauagcagcu

SEQ ID NO: 1772032 - RNA, 19 nt, Artificial Sequence
  Description of Artificial Sequence: Synthetic oligonucleotide
gugucaacagugguaucgg

SEQ ID NO: 1772033 - RNA, 19 nt, Artificial Sequence
  Description of Artificial Sequence: Synthetic oligonucleotide
aagguguuuacgaggacua

SEQ ID NO: 1772034 - RNA, 19 nt, Artificial Sequence
  Description of Artificial Sequence: Synthetic oligonucleotide
uaucgguccauagaacuua

SEQ ID NO: 1772035 - RNA, 19 nt, Artificial Sequence
  Description of Artificial Sequence: Synthetic oligonucleotide
ccucccuaaagaaagcuug

SEQ ID NO: 1772036 - RNA, 19 nt, Artificial Sequence
  Description of Artificial Sequence: Synthetic oligonucleotide
ggcaauacuuaucagaaau

SEQ ID NO: 1772037 - RNA, 19 nt, Artificial Sequence
  Description of Artificial Sequence: Synthetic oligonucleotide
uugcucaagaaaucagauu

SEQ ID NO: 1772038 - RNA, 19 nt, Artificial Sequence
  Description of Artificial Sequence: Synthetic oligonucleotide
ugguaucgguccauagaac

SEQ ID NO: 1772039 - RNA, 19 nt, Artificial Sequence
  Description of Artificial Sequence: Synthetic oligonucleotide
aacaggauagcagcugguu

SEQ ID NO: 1772040 - RNA, 19 nt, Artificial Sequence
  Description of Artificial Sequence: Synthetic oligonucleotide
auugggcacuacaaaagca

SEQ ID NO: 1772041 - RNA, 19 nt, Artificial Sequence
  Description of Artificial Sequence: Synthetic oligonucleotide
uccauacacuggcaauacu

SEQ ID NO: 1772042 - RNA, 19 nt, Artificial Sequence
  Description of Artificial Sequence: Synthetic oligonucleotide
agaggguuggccugcacua

SEQ ID NO: 1772043 - RNA, 19 nt, Artificial Sequence
  Description of Artificial Sequence: Synthetic oligonucleotide
agaaucgaacgccccacaa

SEQ ID NO: 1772044 - RNA, 19 nt, Artificial Sequence
  Description of Artificial Sequence: Synthetic oligonucleotide
uucccacaaaacccauaca

SEQ ID NO: 1772045 - RNA, 19 nt, Artificial Sequence
  Description of Artificial Sequence: Synthetic oligonucleotide
acacacacacacaacuucu

SEQ ID NO: 1772046 - RNA, 19 nt, Artificial Sequence
  Description of Artificial Sequence: Synthetic oligonucleotide
gagggacuuccauacagaa

SEQ ID NO: 1772047 - RNA, 19 nt, Artificial Sequence
  Description of Artificial Sequence: Synthetic oligonucleotide
gucuugcucaagaaaucag

SEQ ID NO: 1772048 - RNA, 19 nt, Artificial Sequence
  Description of Artificial Sequence: Synthetic oligonucleotide
cauacacuggcaauacuua

SEQ ID NO: 1772049 - RNA, 19 nt, Artificial Sequence
  Description of Artificial Sequence: Synthetic oligonucleotide
cacaugucucaguuuacca

SEQ ID NO: 1772050 - RNA, 19 nt, Artificial Sequence
  Description of Artificial Sequence: Synthetic oligonucleotide
cacacacacacacacaacu

SEQ ID NO: 1772051 - RNA, 19 nt, Artificial Sequence
  Description of Artificial Sequence: Synthetic oligonucleotide
uaccucccuaaagaaagcu

SEQ ID NO: 1772052 - RNA, 19 nt, Artificial Sequence
  Description of Artificial Sequence: Synthetic oligonucleotide
guucacuaguccuuagucu

SEQ ID NO: 1772053 - RNA, 19 nt, Artificial Sequence
  Description of Artificial Sequence: Synthetic oligonucleotide
cacacacaacuucuuguuc

SEQ ID NO: 1772054 - RNA, 19 nt, Artificial Sequence
  Description of Artificial Sequence: Synthetic oligonucleotide
guggcaaccagguaauagu

SEQ ID NO: 1772055 - RNA, 19 nt, Artificial Sequence
  Description of Artificial Sequence: Synthetic oligonucleotide
aaacaggauagcagcuggu

SEQ ID NO: 1772056 - RNA, 19 nt, Artificial Sequence
  Description of Artificial Sequence: Synthetic oligonucleotide
acacacacacacacacaac

SEQ ID NO: 1772057 - RNA, 19 nt, Artificial Sequence
  Description of Artificial Sequence: Synthetic oligonucleotide
gguaucgguccauagaacu

SEQ ID NO: 1772058 - RNA, 19 nt, Artificial Sequence
  Description of Artificial Sequence: Synthetic oligonucleotide
ugguuuugagauggcacaa

SEQ ID NO: 1772059 - RNA, 19 nt, Artificial Sequence
  Description of Artificial Sequence: Synthetic oligonucleotide
ugcuggcaaccauuagaug

SEQ ID NO: 1772060 - RNA, 19 nt, Artificial Sequence
  Description of Artificial Sequence: Synthetic oligonucleotide
uuggcacuguuugcuaucu

SEQ ID NO: 1772061 - RNA, 19 nt, Artificial Sequence
  Description of Artificial Sequence: Synthetic oligonucleotide
gaaucacaauacugauaga

SEQ ID NO: 1772062 - RNA, 19 nt, Artificial Sequence
  Description of Artificial Sequence: Synthetic oligonucleotide
uuccacucacaaagaggcu

SEQ ID NO: 1772063 - RNA, 19 nt, Artificial Sequence
  Description of Artificial Sequence: Synthetic oligonucleotide
ggguaauuugggauuaaac

SEQ ID NO: 1772064 - RNA, 19 nt, Artificial Sequence
  Description of Artificial Sequence: Synthetic oligonucleotide
guuugcuaucucuaugccu

SEQ ID NO: 1772065 - RNA, 19 nt, Artificial Sequence
  Description of Artificial Sequence: Synthetic oligonucleotide
acucucuagcauuucuguu

SEQ ID NO: 1772066 - RNA, 19 nt, Artificial Sequence
  Description of Artificial Sequence: Synthetic oligonucleotide
gguacacgaacaugcuggc

SEQ ID NO: 1772067 - RNA, 19 nt, Artificial Sequence
  Description of Artificial Sequence: Synthetic oligonucleotide
caaccauuagauggucuug

SEQ ID NO: 1772068 - RNA, 19 nt, Artificial Sequence
  Description of Artificial Sequence: Synthetic oligonucleotide
uggguaauuugggauuaaa

SEQ ID NO: 1772069 - RNA, 19 nt, Artificial Sequence
  Description of Artificial Sequence: Synthetic oligonucleotide
cucaaugcauaguuucgaa

SEQ ID NO: 1772070 - RNA, 19 nt, Artificial Sequence
  Description of Artificial Sequence: Synthetic oligonucleotide
aucagcuaggccauaggaa

SEQ ID NO: 1772071 - RNA, 19 nt, Artificial Sequence
  Description of Artificial Sequence: Synthetic oligonucleotide
aggaaacauaaaacaagaa

SEQ ID NO: 1772072 - RNA, 19 nt, Artificial Sequence
  Description of Artificial Sequence: Synthetic oligonucleotide
aguucaacuuucauacgua

SEQ ID NO: 1772073 - RNA, 19 nt, Artificial Sequence
  Description of Artificial Sequence: Synthetic oligonucleotide
cagugguaucgguccauag

SEQ ID NO: 1772074 - RNA, 19 nt, Artificial Sequence
  Description of Artificial Sequence: Synthetic oligonucleotide
caauacugauagaaucgaa

SEQ ID NO: 1772075 - RNA, 19 nt, Artificial Sequence
  Description of Artificial Sequence: Synthetic oligonucleotide
ugucucaguuuaccagaau

SEQ ID NO: 1772076 - RNA, 19 nt, Artificial Sequence
  Description of Artificial Sequence: Synthetic oligonucleotide
gcaagcaucuaguucaacu

SEQ ID NO: 1772077 - RNA, 19 nt, Artificial Sequence
  Description of Artificial Sequence: Synthetic oligonucleotide
gaacuugacuuaaaacagu

SEQ ID NO: 1772078 - RNA, 19 nt, Artificial Sequence
  Description of Artificial Sequence: Synthetic oligonucleotide
acgaacaugcuggcaacca

SEQ ID NO: 1772079 - RNA, 19 nt, Artificial Sequence
  Description of Artificial Sequence: Synthetic oligonucleotide
cuaugccugucucaaugca

SEQ ID NO: 1772080 - RNA, 19 nt, Artificial Sequence
  Description of Artificial Sequence: Synthetic oligonucleotide
cacuggcaauacuuaucag

SEQ ID NO: 1772081 - RNA, 19 nt, Artificial Sequence
  Description of Artificial Sequence: Synthetic oligonucleotide
gcugguuuugagauggcac

SEQ ID NO: 1772082 - RNA, 19 nt, Artificial Sequence
  Description of Artificial Sequence: Synthetic oligonucleotide
gaggcugcgugcucugaca

SEQ ID NO: 1772083 - RNA, 19 nt, Artificial Sequence
  Description of Artificial Sequence: Synthetic oligonucleotide
cuagugucaacagugguau

SEQ ID NO: 1772084 - RNA, 19 nt, Artificial Sequence
  Description of Artificial Sequence: Synthetic oligonucleotide
auagucauguuaagauaau

SEQ ID NO: 1772085 - RNA, 19 nt, Artificial Sequence
  Description of Artificial Sequence: Synthetic oligonucleotide
cacuaguccuuagucucag

SEQ ID NO: 1772086 - RNA, 19 nt, Artificial Sequence
  Description of Artificial Sequence: Synthetic oligonucleotide
uugcuaucucuaugccugu

SEQ ID NO: 1772087 - RNA, 19 nt, Artificial Sequence
  Description of Artificial Sequence: Synthetic oligonucleotide
agcaagcaucuaguucaac

SEQ ID NO: 1772088 - RNA, 19 nt, Artificial Sequence
  Description of Artificial Sequence: Synthetic oligonucleotide
aggguuggccugcacuagu

SEQ ID NO: 1772089 - RNA, 19 nt, Artificial Sequence
  Description of Artificial Sequence: Synthetic oligonucleotide
ucccuaaagaaagcuugua

SEQ ID NO: 1772090 - RNA, 19 nt, Artificial Sequence
  Description of Artificial Sequence: Synthetic oligonucleotide
guccauacacuggcaauac

SEQ ID NO: 1772091 - RNA, 19 nt, Artificial Sequence
  Description of Artificial Sequence: Synthetic oligonucleotide
gugcucugacaccuuucag

SEQ ID NO: 1772092 - RNA, 19 nt, Artificial Sequence
  Description of Artificial Sequence: Synthetic oligonucleotide
cuguucugcucagaaacca

SEQ ID NO: 1772093 - RNA, 19 nt, Artificial Sequence
  Description of Artificial Sequence: Synthetic oligonucleotide
agaguccaaaggauuaaua

SEQ ID NO: 1772094 - RNA, 19 nt, Artificial Sequence
  Description of Artificial Sequence: Synthetic oligonucleotide
cucucuagcauuucuguuu

SEQ ID NO: 1772095 - RNA, 19 nt, Artificial Sequence
  Description of Artificial Sequence: Synthetic oligonucleotide
gcaauacuuaucagaaauc

SEQ ID NO: 1772096 - RNA, 19 nt, Artificial Sequence
  Description of Artificial Sequence: Synthetic oligonucleotide
gaggguuggccugcacuag

SEQ ID NO: 1772097 - RNA, 19 nt, Artificial Sequence
  Description of Artificial Sequence: Synthetic oligonucleotide
cacgaacaugcuggcaacc

SEQ ID NO: 1772098 - RNA, 19 nt, Artificial Sequence
  Description of Artificial Sequence: Synthetic oligonucleotide
guaccucccuaaagaaagc

SEQ ID NO: 1772099 - RNA, 19 nt, Artificial Sequence
  Description of Artificial Sequence: Synthetic oligonucleotide
aggaauggggagggacuuc

SEQ ID NO: 1772100 - RNA, 19 nt, Artificial Sequence
  Description of Artificial Sequence: Synthetic oligonucleotide
ccugcacuagugucaacag

SEQ ID NO: 1772101 - RNA, 19 nt, Artificial Sequence
  Description of Artificial Sequence: Synthetic oligonucleotide
cacuacaaaagcagagggu

SEQ ID NO: 1772102 - RNA, 19 nt, Artificial Sequence
  Description of Artificial Sequence: Synthetic oligonucleotide
cgcacacacacacacacac

SEQ ID NO: 1772103 - RNA, 19 nt, Artificial Sequence
  Description of Artificial Sequence: Synthetic oligonucleotide
ucucuaugccugucucaau

SEQ ID NO: 1772104 - RNA, 19 nt, Artificial Sequence
  Description of Artificial Sequence: Synthetic oligonucleotide
agaaaccacaaagguguuu

SEQ ID NO: 1772105 - RNA, 19 nt, Artificial Sequence
  Description of Artificial Sequence: Synthetic oligonucleotide
ucuccacgagcacgcgcga

SEQ ID NO: 1772106 - RNA, 19 nt, Artificial Sequence
  Description of Artificial Sequence: Synthetic oligonucleotide
gaggacuaaauugggcacu

SEQ ID NO: 1772107 - RNA, 19 nt, Artificial Sequence
  Description of Artificial Sequence: Synthetic oligonucleotide
ucgguccauagaacuuaaa

SEQ ID NO: 1772108 - RNA, 19 nt, Artificial Sequence
  Description of Artificial Sequence: Synthetic oligonucleotide
guguuuacgaggacuaaau

SEQ ID NO: 1772109 - RNA, 19 nt, Artificial Sequence
  Description of Artificial Sequence: Synthetic oligonucleotide
aggacuaaauugggcacua

SEQ ID NO: 1772110 - RNA, 19 nt, Artificial Sequence
  Description of Artificial Sequence: Synthetic oligonucleotide
gaagcccuaucuucuguau

SEQ ID NO: 1772111 - RNA, 19 nt, Artificial Sequence
  Description of Artificial Sequence: Synthetic oligonucleotide
aucgaacgccccacaagug

SEQ ID NO: 1772112 - RNA, 19 nt, Artificial Sequence
  Description of Artificial Sequence: Synthetic oligonucleotide
acacacacacacacaacuu

SEQ ID NO: 1772113 - RNA, 19 nt, Artificial Sequence
  Description of Artificial Sequence: Synthetic oligonucleotide
gguuuugagauggcacaac

SEQ ID NO: 1772114 - RNA, 19 nt, Artificial Sequence
  Description of Artificial Sequence: Synthetic oligonucleotide
acacacacacacacacaca

SEQ ID NO: 1772115 - RNA, 19 nt, Artificial Sequence
  Description of Artificial Sequence: Synthetic oligonucleotide
cccacaaaacccauacaga

SEQ ID NO: 1772116 - RNA, 19 nt, Artificial Sequence
  Description of Artificial Sequence: Synthetic oligonucleotide
cauggguaauuugggauua

SEQ ID NO: 1772117 - RNA, 19 nt, Artificial Sequence
  Description of Artificial Sequence: Synthetic oligonucleotide
uagugucaacagugguauc

SEQ ID NO: 1772118 - RNA, 19 nt, Artificial Sequence
  Description of Artificial Sequence: Synthetic oligonucleotide
acacuuagguggggccagg

SEQ ID NO: 1772119 - RNA, 19 nt, Artificial Sequence
  Description of Artificial Sequence: Synthetic oligonucleotide
cuuucauacguagcaggua

SEQ ID NO: 1772120 - RNA, 19 nt, Artificial Sequence
  Description of Artificial Sequence: Synthetic oligonucleotide
uggccugcacuagugucaa

SEQ ID NO: 1772121 - RNA, 19 nt, Artificial Sequence
  Description of Artificial Sequence: Synthetic oligonucleotide
ugcuaucucuaugccuguc

SEQ ID NO: 1772122 - RNA, 19 nt, Artificial Sequence
  Description of Artificial Sequence: Synthetic oligonucleotide
cacgcgcgagcacacgcac

SEQ ID NO: 1772123 - RNA, 19 nt, Artificial Sequence
  Description of Artificial Sequence: Synthetic oligonucleotide
augucucaguuuaccagaa

SEQ ID NO: 1772124 - RNA, 19 nt, Artificial Sequence
  Description of Artificial Sequence: Synthetic oligonucleotide
cgaacgccccacaagugcc

SEQ ID NO: 1772125 - RNA, 19 nt, Artificial Sequence
  Description of Artificial Sequence: Synthetic oligonucleotide
cccuaaagaaagcuuguaa

SEQ ID NO: 1772126 - RNA, 19 nt, Artificial Sequence
  Description of Artificial Sequence: Synthetic oligonucleotide
uggcacuguuugcuaucuc

SEQ ID NO: 1772127 - RNA, 19 nt, Artificial Sequence
  Description of Artificial Sequence: Synthetic oligonucleotide
cguagcagguacacgaaca

SEQ ID NO: 1772128 - RNA, 19 nt, Artificial Sequence
  Description of Artificial Sequence: Synthetic oligonucleotide
auaaaccauucuggaggaa

SEQ ID NO: 1772129 - RNA, 19 nt, Artificial Sequence
  Description of Artificial Sequence: Synthetic oligonucleotide
ggcaaccagguaauaguca

SEQ ID NO: 1772130 - RNA, 19 nt, Artificial Sequence
  Description of Artificial Sequence: Synthetic oligonucleotide
gcaaccauuagauggucuu

SEQ ID NO: 1772131 - RNA, 19 nt, Artificial Sequence
  Description of Artificial Sequence: Synthetic oligonucleotide
guacacgaacaugcuggca

SEQ ID NO: 1772132 - RNA, 19 nt, Artificial Sequence
  Description of Artificial Sequence: Synthetic oligonucleotide
acacgcacacacacacaca

SEQ ID NO: 1772133 - RNA, 19 nt, Artificial Sequence
  Description of Artificial Sequence: Synthetic oligonucleotide
gagcacgcgcgagcacacg

SEQ ID NO: 1772134 - RNA, 19 nt, Artificial Sequence
  Description of Artificial Sequence: Synthetic oligonucleotide
acagugguaucgguccaua

SEQ ID NO: 1772135 - RNA, 19 nt, Artificial Sequence
  Description of Artificial Sequence: Synthetic oligonucleotide
cagaggguuggccugcacu

SEQ ID NO: 1772136 - RNA, 19 nt, Artificial Sequence
  Description of Artificial Sequence: Synthetic oligonucleotide
aucgguccauagaacuuaa

SEQ ID NO: 1772137 - RNA, 19 nt, Artificial Sequence
  Description of Artificial Sequence: Synthetic oligonucleotide
aacgccccacaagugccuu

SEQ ID NO: 1772138 - RNA, 19 nt, Artificial Sequence
  Description of Artificial Sequence: Synthetic oligonucleotide
auggguaauuugggauuaa

SEQ ID NO: 1772139 - RNA, 19 nt, Artificial Sequence
  Description of Artificial Sequence: Synthetic oligonucleotide
ggacuuccauacagaaaac

SEQ ID NO: 1772140 - RNA, 19 nt, Artificial Sequence
  Description of Artificial Sequence: Synthetic oligonucleotide
cuccacgagcacgcgcgag

SEQ ID NO: 1772141 - RNA, 19 nt, Artificial Sequence
  Description of Artificial Sequence: Synthetic oligonucleotide
acgcacacacacacacaca

SEQ ID NO: 1772142 - RNA, 19 nt, Artificial Sequence
  Description of Artificial Sequence: Synthetic oligonucleotide
ggguuggccugcacuagug

SEQ ID NO: 1772143 - RNA, 19 nt, Artificial Sequence
  Description of Artificial Sequence: Synthetic oligonucleotide
cugcacuagugucaacagu

SEQ ID NO: 1772144 - RNA, 19 nt, Artificial Sequence
  Description of Artificial Sequence: Synthetic oligonucleotide
agaaaucagcuaggccaua

SEQ ID NO: 1772145 - RNA, 19 nt, Artificial Sequence
  Description of Artificial Sequence: Synthetic oligonucleotide
guaucgguccauagaacuu

SEQ ID NO: 1772146 - RNA, 19 nt, Artificial Sequence
  Description of Artificial Sequence: Synthetic oligonucleotide
cagcaagcaucuaguucaa

SEQ ID NO: 1772147 - RNA, 19 nt, Artificial Sequence
  Description of Artificial Sequence: Synthetic oligonucleotide
cacgagcacgcgcgagcac

SEQ ID NO: 1772148 - RNA, 19 nt, Artificial Sequence
  Description of Artificial Sequence: Synthetic oligonucleotide
gcugcgugcucugacaccu

SEQ ID NO: 1772149 - RNA, 19 nt, Artificial Sequence
  Description of Artificial Sequence: Synthetic oligonucleotide
cacacacacacaacuucuu

SEQ ID NO: 1772150 - RNA, 19 nt, Artificial Sequence
  Description of Artificial Sequence: Synthetic oligonucleotide
cgcgcgagcacacgcacac

SEQ ID NO: 1772151 - RNA, 19 nt, Artificial Sequence
  Description of Artificial Sequence: Synthetic oligonucleotide
ggacuaaauugggcacuac

SEQ ID NO: 1772152 - RNA, 19 nt, Artificial Sequence
  Description of Artificial Sequence: Synthetic oligonucleotide
gaacgccccacaagugccu

SEQ ID NO: 1772153 - RNA, 19 nt, Artificial Sequence
  Description of Artificial Sequence: Synthetic oligonucleotide
gcacacacacacacacaca

SEQ ID NO: 1772154 - RNA, 19 nt, Artificial Sequence
  Description of Artificial Sequence: Synthetic oligonucleotide
ggcaaccauuagauggucu

SEQ ID NO: 1772155 - RNA, 19 nt, Artificial Sequence
  Description of Artificial Sequence: Synthetic oligonucleotide
acgcgcgagcacacgcaca

SEQ ID NO: 1772156 - RNA, 19 nt, Artificial Sequence
  Description of Artificial Sequence: Synthetic oligonucleotide
cagaaaccacaaagguguu

SEQ ID NO: 1772157 - RNA, 19 nt, Artificial Sequence
  Description of Artificial Sequence: Synthetic oligonucleotide
ccaguggcaaccagguaau

SEQ ID NO: 1772158 - RNA, 19 nt, Artificial Sequence
  Description of Artificial Sequence: Synthetic oligonucleotide
cgagcacgcgcgagcacac

SEQ ID NO: 1772159 - RNA, 19 nt, Artificial Sequence
  Description of Artificial Sequence: Synthetic oligonucleotide
gguggggccaggucauuuu

SEQ ID NO: 1772160 - RNA, 19 nt, Artificial Sequence
  Description of Artificial Sequence: Synthetic oligonucleotide
gcgugcucugacaccuuuc

SEQ ID NO: 1772161 - RNA, 19 nt, Artificial Sequence
  Description of Artificial Sequence: Synthetic oligonucleotide
gcacacgcacacacacaca

SEQ ID NO: 1772162 - RNA, 19 nt, Artificial Sequence
  Description of Artificial Sequence: Synthetic oligonucleotide
cccauacagaagaguccaa

SEQ ID NO: 1772163 - RNA, 19 nt, Artificial Sequence
  Description of Artificial Sequence: Synthetic oligonucleotide
cacuuagguggggccaggu

SEQ ID NO: 1772164 - RNA, 19 nt, Artificial Sequence
  Description of Artificial Sequence: Synthetic oligonucleotide
ccacgagcacgcgcgagca

SEQ ID NO: 1772165 - RNA, 19 nt, Artificial Sequence
  Description of Artificial Sequence: Synthetic oligonucleotide
ccagaauauuggcacuguu

SEQ ID NO: 1772166 - RNA, 19 nt, Artificial Sequence
  Description of Artificial Sequence: Synthetic oligonucleotide
caguggcaaccagguaaua

SEQ ID NO: 1772167 - RNA, 19 nt, Artificial Sequence
  Description of Artificial Sequence: Synthetic oligonucleotide
cgaacaugcuggcaaccau

SEQ ID NO: 1772168 - RNA, 19 nt, Artificial Sequence
  Description of Artificial Sequence: Synthetic oligonucleotide
gcgcgagcacacgcacaca

SEQ ID NO: 1772169 - RNA, 19 nt, Artificial Sequence
  Description of Artificial Sequence: Synthetic oligonucleotide
caagacaugaucaagauuc

SEQ ID NO: 1772170 - RNA, 19 nt, Artificial Sequence
  Description of Artificial Sequence: Synthetic oligonucleotide
aaaucaguggacugguccc

SEQ ID NO: 1772171 - RNA, 19 nt, Artificial Sequence
  Description of Artificial Sequence: Synthetic oligonucleotide
uuaacaugcuguucgaugg

SEQ ID NO: 1772172 - RNA, 19 nt, Artificial Sequence
  Description of Artificial Sequence: Synthetic oligonucleotide
cucauuaacaugcuguucg

SEQ ID NO: 1772173 - RNA, 19 nt, Artificial Sequence
  Description of Artificial Sequence: Synthetic oligonucleotide
aauuaaaaucaguggacug

SEQ ID NO: 1772174 - RNA, 19 nt, Artificial Sequence
  Description of Artificial Sequence: Synthetic oligonucleotide
auuaaaaucaguggacugg

SEQ ID NO: 1772175 - RNA, 19 nt, Artificial Sequence
  Description of Artificial Sequence: Synthetic oligonucleotide
uugagaucagaaaaguagc

SEQ ID NO: 1772176 - RNA, 19 nt, Artificial Sequence
  Description of Artificial Sequence: Synthetic oligonucleotide
agaucagaaaaguagcaag

SEQ ID NO: 1772177 - RNA, 19 nt, Artificial Sequence
  Description of Artificial Sequence: Synthetic oligonucleotide
aaggccgcugucaagaugc

SEQ ID NO: 1772178 - RNA, 19 nt, Artificial Sequence
  Description of Artificial Sequence: Synthetic oligonucleotide
ucuuccgaagcccugaagc

SEQ ID NO: 1772179 - RNA, 19 nt, Artificial Sequence
  Description of Artificial Sequence: Synthetic oligonucleotide
ucagaaaaguagcaagugc

SEQ ID NO: 1772180 - RNA, 19 nt, Artificial Sequence
  Description of Artificial Sequence: Synthetic oligonucleotide
ugcauguugucaaagcucc

SEQ ID NO: 1772181 - RNA, 19 nt, Artificial Sequence
  Description of Artificial Sequence: Synthetic oligonucleotide
auuaauccgguuuuccagg

SEQ ID NO: 1772182 - RNA, 19 nt, Artificial Sequence
  Description of Artificial Sequence: Synthetic oligonucleotide
aaaagauuggggaggcugc

SEQ ID NO: 1772183 - RNA, 19 nt, Artificial Sequence
  Description of Artificial Sequence: Synthetic oligonucleotide
aacaaagugcagaaucagc

SEQ ID NO: 1772184 - RNA, 19 nt, Artificial Sequence
  Description of Artificial Sequence: Synthetic oligonucleotide
aucaagauucccgugagac

SEQ ID NO: 1772185 - RNA, 19 nt, Artificial Sequence
  Description of Artificial Sequence: Synthetic oligonucleotide
ugguaugaggaacugaaga

SEQ ID NO: 1772186 - RNA, 19 nt, Artificial Sequence
  Description of Artificial Sequence: Synthetic oligonucleotide
ugcauugugguuuccagcc

SEQ ID NO: 1772187 - RNA, 19 nt, Artificial Sequence
  Description of Artificial Sequence: Synthetic oligonucleotide
aguaucuucaaagucuggg

SEQ ID NO: 1772188 - RNA, 19 nt, Artificial Sequence
  Description of Artificial Sequence: Synthetic oligonucleotide
auuaacaugcuguucgaug

SEQ ID NO: 1772189 - RNA, 19 nt, Artificial Sequence
  Description of Artificial Sequence: Synthetic oligonucleotide
caauuugagaucagaaaag

SEQ ID NO: 1772190 - RNA, 19 nt, Artificial Sequence
  Description of Artificial Sequence: Synthetic oligonucleotide
aauuugagaucagaaaagu

SEQ ID NO: 1772191 - RNA, 19 nt, Artificial Sequence
  Description of Artificial Sequence: Synthetic oligonucleotide
agagaguaguucuaagguc

SEQ ID NO: 1772192 - RNA, 19 nt, Artificial Sequence
  Description of Artificial Sequence: Synthetic oligonucleotide
ucaauguaggggaucagca

SEQ ID NO: 1772193 - RNA, 19 nt, Artificial Sequence
  Description of Artificial Sequence: Synthetic oligonucleotide
acucucaccguccucuucc

SEQ ID NO: 1772194 - RNA, 19 nt, Artificial Sequence
  Description of Artificial Sequence: Synthetic oligonucleotide
aggcacaaacucuaaggcc

SEQ ID NO: 1772195 - RNA, 19 nt, Artificial Sequence
  Description of Artificial Sequence: Synthetic oligonucleotide
uguaccaauuaaaaucagu

SEQ ID NO: 1772196 - RNA, 19 nt, Artificial Sequence
  Description of Artificial Sequence: Synthetic oligonucleotide
cauuaauccgguuuuccag

SEQ ID NO: 1772197 - RNA, 19 nt, Artificial Sequence
  Description of Artificial Sequence: Synthetic oligonucleotide
agacccaaggacuuggcuc

SEQ ID NO: 1772198 - RNA, 19 nt, Artificial Sequence
  Description of Artificial Sequence: Synthetic oligonucleotide
aacucuguuguguuguaga

SEQ ID NO: 1772199 - RNA, 19 nt, Artificial Sequence
  Description of Artificial Sequence: Synthetic oligonucleotide
auugucagaggugaucggc

SEQ ID NO: 1772200 - RNA, 19 nt, Artificial Sequence
  Description of Artificial Sequence: Synthetic oligonucleotide
aauguaggggaucagcauu

SEQ ID NO: 1772201 - RNA, 19 nt, Artificial Sequence
  Description of Artificial Sequence: Synthetic oligonucleotide
ugucucagaaugccgauga

SEQ ID NO: 1772202 - RNA, 19 nt, Artificial Sequence
  Description of Artificial Sequence: Synthetic oligonucleotide
uguugucaaagcuccuucg

SEQ ID NO: 1772203 - RNA, 19 nt, Artificial Sequence
  Description of Artificial Sequence: Synthetic oligonucleotide
agucacacagcugcaaugc

SEQ ID NO: 1772204 - RNA, 19 nt, Artificial Sequence
  Description of Artificial Sequence: Synthetic oligonucleotide
aaguggcccaauuugagau

SEQ ID NO: 1772205 - RNA, 19 nt, Artificial Sequence
  Description of Artificial Sequence: Synthetic oligonucleotide
acgccaaguaucuucaaag

SEQ ID NO: 1772206 - RNA, 19 nt, Artificial Sequence
  Description of Artificial Sequence: Synthetic oligonucleotide
uguguuguagaugccagcc

SEQ ID NO: 1772207 - RNA, 19 nt, Artificial Sequence
  Description of Artificial Sequence: Synthetic oligonucleotide
ucccgugagaccauggcag

SEQ ID NO: 1772208 - RNA, 19 nt, Artificial Sequence
  Description of Artificial Sequence: Synthetic oligonucleotide
ugaucaagauucccgugag

SEQ ID NO: 1772209 - RNA, 19 nt, Artificial Sequence
  Description of Artificial Sequence: Synthetic oligonucleotide
uggcuugaaagcuuggaug

SEQ ID NO: 1772210 - RNA, 19 nt, Artificial Sequence
  Description of Artificial Sequence: Synthetic oligonucleotide
uaguucuaaggucaagaca

SEQ ID NO: 1772211 - RNA, 19 nt, Artificial Sequence
  Description of Artificial Sequence: Synthetic oligonucleotide
ucauuaauccgguuuucca

SEQ ID NO: 1772212 - RNA, 19 nt, Artificial Sequence
  Description of Artificial Sequence: Synthetic oligonucleotide
gaugcgaugcugcaacugc

SEQ ID NO: 1772213 - RNA, 19 nt, Artificial Sequence
  Description of Artificial Sequence: Synthetic oligonucleotide
gcuccuuccagguacaugg

SEQ ID NO: 1772214 - RNA, 19 nt, Artificial Sequence
  Description of Artificial Sequence: Synthetic oligonucleotide
caugcuguucgauggacgg

SEQ ID NO: 1772215 - RNA, 19 nt, Artificial Sequence
  Description of Artificial Sequence: Synthetic oligonucleotide
caaagucuggggaagaguc

SEQ ID NO: 1772216 - RNA, 19 nt, Artificial Sequence
  Description of Artificial Sequence: Synthetic oligonucleotide
aagacaugaucaagauucc

SEQ ID NO: 1772217 - RNA, 19 nt, Artificial Sequence
  Description of Artificial Sequence: Synthetic oligonucleotide
aaagucuggggaagagucc

SEQ ID NO: 1772218 - RNA, 19 nt, Artificial Sequence
  Description of Artificial Sequence: Synthetic oligonucleotide
uugaaagcuuggauguaag

SEQ ID NO: 1772219 - RNA, 19 nt, Artificial Sequence
  Description of Artificial Sequence: Synthetic oligonucleotide
ggguguaccaauuaaaauc

SEQ ID NO: 1772220 - RNA, 19 nt, Artificial Sequence
  Description of Artificial Sequence: Synthetic oligonucleotide
auucccgugagaccauggc

SEQ ID NO: 1772221 - RNA, 19 nt, Artificial Sequence
  Description of Artificial Sequence: Synthetic oligonucleotide
cuaaggucaagacaugauc

SEQ ID NO: 1772222 - RNA, 19 nt, Artificial Sequence
  Description of Artificial Sequence: Synthetic oligonucleotide
auugcacuggguaacaaag

SEQ ID NO: 1772223 - RNA, 19 nt, Artificial Sequence
  Description of Artificial Sequence: Synthetic oligonucleotide
ucuaaggccgcugucaaga

SEQ ID NO: 1772224 - RNA, 19 nt, Artificial Sequence
  Description of Artificial Sequence: Synthetic oligonucleotide
aguagcaagugcauugugg

SEQ ID NO: 1772225 - RNA, 19 nt, Artificial Sequence
  Description of Artificial Sequence: Synthetic oligonucleotide
agcaagcucaggcugggcg

SEQ ID NO: 1772226 - RNA, 19 nt, Artificial Sequence
  Description of Artificial Sequence: Synthetic oligonucleotide
aagguacgcauugucagag

SEQ ID NO: 1772227 - RNA, 19 nt, Artificial Sequence
  Description of Artificial Sequence: Synthetic oligonucleotide
ggcacaaacucuaaggccg

SEQ ID NO: 1772228 - RNA, 19 nt, Artificial Sequence
  Description of Artificial Sequence: Synthetic oligonucleotide
ucauaguaacuccaacuuc

SEQ ID NO: 1772229 - RNA, 19 nt, Artificial Sequence
  Description of Artificial Sequence: Synthetic oligonucleotide
cugacgaggaaacucggcc

SEQ ID NO: 1772230 - RNA, 19 nt, Artificial Sequence
  Description of Artificial Sequence: Synthetic oligonucleotide
cauaaugccacaugucauc

SEQ ID NO: 1772231 - RNA, 19 nt, Artificial Sequence
  Description of Artificial Sequence: Synthetic oligonucleotide
acaugaucaagauucccgu

SEQ ID NO: 1772232 - RNA, 19 nt, Artificial Sequence
  Description of Artificial Sequence: Synthetic oligonucleotide
uuagcuguauggcccaugu

SEQ ID NO: 1772233 - RNA, 19 nt, Artificial Sequence
  Description of Artificial Sequence: Synthetic oligonucleotide
gagaguaguucuaagguca

SEQ ID NO: 1772234 - RNA, 19 nt, Artificial Sequence
  Description of Artificial Sequence: Synthetic oligonucleotide
caugccaaguuccuguggc

SEQ ID NO: 1772235 - RNA, 19 nt, Artificial Sequence
  Description of Artificial Sequence: Synthetic oligonucleotide
uacgcauugucagagguga

SEQ ID NO: 1772236 - RNA, 19 nt, Artificial Sequence
  Description of Artificial Sequence: Synthetic oligonucleotide
aagaguccugcaucaucac

SEQ ID NO: 1772237 - RNA, 19 nt, Artificial Sequence
  Description of Artificial Sequence: Synthetic oligonucleotide
guaugaggaacugaagaag

SEQ ID NO: 1772238 - RNA, 19 nt, Artificial Sequence
  Description of Artificial Sequence: Synthetic oligonucleotide
caagaugcgaugcugcaac

SEQ ID NO: 1772239 - RNA, 19 nt, Artificial Sequence
  Description of Artificial Sequence: Synthetic oligonucleotide
agucaugccaaguuccugu

SEQ ID NO: 1772240 - RNA, 19 nt, Artificial Sequence
  Description of Artificial Sequence: Synthetic oligonucleotide
uuuggucuguguaccuggg

SEQ ID NO: 1772241 - RNA, 19 nt, Artificial Sequence
  Description of Artificial Sequence: Synthetic oligonucleotide
aaacucuaaggccgcuguc

SEQ ID NO: 1772242 - RNA, 19 nt, Artificial Sequence
  Description of Artificial Sequence: Synthetic oligonucleotide
ucuucaaagucuggggaag

SEQ ID NO: 1772243 - RNA, 19 nt, Artificial Sequence
  Description of Artificial Sequence: Synthetic oligonucleotide
agguucuugagcgugacug

SEQ ID NO: 1772244 - RNA, 19 nt, Artificial Sequence
  Description of Artificial Sequence: Synthetic oligonucleotide
aaagcuccuucgcuccuuc

SEQ ID NO: 1772245 - RNA, 19 nt, Artificial Sequence
  Description of Artificial Sequence: Synthetic oligonucleotide
ucaagauucccgugagacc

SEQ ID NO: 1772246 - RNA, 19 nt, Artificial Sequence
  Description of Artificial Sequence: Synthetic oligonucleotide
agcauucucagucugguuu

SEQ ID NO: 1772247 - RNA, 19 nt, Artificial Sequence
  Description of Artificial Sequence: Synthetic oligonucleotide
cugcuuagcuguauggccc

SEQ ID NO: 1772248 - RNA, 19 nt, Artificial Sequence
  Description of Artificial Sequence: Synthetic oligonucleotide
aaaguagcaagugcauugu

SEQ ID NO: 1772249 - RNA, 19 nt, Artificial Sequence
  Description of Artificial Sequence: Synthetic oligonucleotide
accugucagguucuugagc

SEQ ID NO: 1772250 - RNA, 19 nt, Artificial Sequence
  Description of Artificial Sequence: Synthetic oligonucleotide
ucuaaggucaagacaugau

SEQ ID NO: 1772251 - RNA, 19 nt, Artificial Sequence
  Description of Artificial Sequence: Synthetic oligonucleotide
uugucaaagcuccuucgcu

SEQ ID NO: 1772252 - RNA, 19 nt, Artificial Sequence
  Description of Artificial Sequence: Synthetic oligonucleotide
ugcaguccagccaugggca

SEQ ID NO: 1772253 - RNA, 19 nt, Artificial Sequence
  Description of Artificial Sequence: Synthetic oligonucleotide
aaggucaagacaugaucaa

SEQ ID NO: 1772254 - RNA, 19 nt, Artificial Sequence
  Description of Artificial Sequence: Synthetic oligonucleotide
uagaugccagccagcaccg

SEQ ID NO: 1772255 - RNA, 19 nt, Artificial Sequence
  Description of Artificial Sequence: Synthetic oligonucleotide
ggaagguacgcauugucag

SEQ ID NO: 1772256 - RNA, 19 nt, Artificial Sequence
  Description of Artificial Sequence: Synthetic oligonucleotide
guaguucuaaggucaagac

SEQ ID NO: 1772257 - RNA, 19 nt, Artificial Sequence
  Description of Artificial Sequence: Synthetic oligonucleotide
cugguccccagcauaaugc

SEQ ID NO: 1772258 - RNA, 19 nt, Artificial Sequence
  Description of Artificial Sequence: Synthetic oligonucleotide
agacaugaucaagauuccc

SEQ ID NO: 1772259 - RNA, 19 nt, Artificial Sequence
  Description of Artificial Sequence: Synthetic oligonucleotide
gaagaguccugcaucauca

SEQ ID NO: 1772260 - RNA, 19 nt, Artificial Sequence
  Description of Artificial Sequence: Synthetic oligonucleotide
aacucuaaggccgcuguca

SEQ ID NO: 1772261 - RNA, 19 nt, Artificial Sequence
  Description of Artificial Sequence: Synthetic oligonucleotide
ucauggcaucauuaauccg

SEQ ID NO: 1772262 - RNA, 19 nt, Artificial Sequence
  Description of Artificial Sequence: Synthetic oligonucleotide
cuuccgaagcccugaagcc

SEQ ID NO: 1772263 - RNA, 19 nt, Artificial Sequence
  Description of Artificial Sequence: Synthetic oligonucleotide
aacgccaaguaucuucaaa

SEQ ID NO: 1772264 - RNA, 19 nt, Artificial Sequence
  Description of Artificial Sequence: Synthetic oligonucleotide
cauaguaacuccaacuucu

SEQ ID NO: 1772265 - RNA, 19 nt, Artificial Sequence
  Description of Artificial Sequence: Synthetic oligonucleotide
uugucagaggugaucggca

SEQ ID NO: 1772266 - RNA, 19 nt, Artificial Sequence
  Description of Artificial Sequence: Synthetic oligonucleotide
accggcgcugguuuagacc

SEQ ID NO: 1772267 - RNA, 19 nt, Artificial Sequence
  Description of Artificial Sequence: Synthetic oligonucleotide
aagugcagaaucagcucac

SEQ ID NO: 1772268 - RNA, 19 nt, Artificial Sequence
  Description of Artificial Sequence: Synthetic oligonucleotide
ucauuaacaugcuguucga

SEQ ID NO: 1772269 - RNA, 19 nt, Artificial Sequence
  Description of Artificial Sequence: Synthetic oligonucleotide
ucggcaucgggccacgggc

SEQ ID NO: 1772270 - RNA, 19 nt, Artificial Sequence
  Description of Artificial Sequence: Synthetic oligonucleotide
uccaggaaacgccaaguau

SEQ ID NO: 1772271 - RNA, 19 nt, Artificial Sequence
  Description of Artificial Sequence: Synthetic oligonucleotide
ugagcgugacugcugcucc

SEQ ID NO: 1772272 - RNA, 19 nt, Artificial Sequence
  Description of Artificial Sequence: Synthetic oligonucleotide
aaguagcaagugcauugug

SEQ ID NO: 1772273 - RNA, 19 nt, Artificial Sequence
  Description of Artificial Sequence: Synthetic oligonucleotide
uucuaaggucaagacauga

SEQ ID NO: 1772274 - RNA, 19 nt, Artificial Sequence
  Description of Artificial Sequence: Synthetic oligonucleotide
aggaacugaagaaguggcc

SEQ ID NO: 1772275 - RNA, 19 nt, Artificial Sequence
  Description of Artificial Sequence: Synthetic oligonucleotide
caagauucccgugagacca

SEQ ID NO: 1772276 - RNA, 19 nt, Artificial Sequence
  Description of Artificial Sequence: Synthetic oligonucleotide
uuaauccgguuuuccagga

SEQ ID NO: 1772277 - RNA, 19 nt, Artificial Sequence
  Description of Artificial Sequence: Synthetic oligonucleotide
caucauucccaaacaugcc

SEQ ID NO: 1772278 - RNA, 19 nt, Artificial Sequence
  Description of Artificial Sequence: Synthetic oligonucleotide
cucaauguaggggaucagc

SEQ ID NO: 1772279 - RNA, 19 nt, Artificial Sequence
  Description of Artificial Sequence: Synthetic oligonucleotide
uucucauuaacaugcuguu

SEQ ID NO: 1772280 - RNA, 19 nt, Artificial Sequence
  Description of Artificial Sequence: Synthetic oligonucleotide
cuucgcuccuuccagguac

SEQ ID NO: 1772281 - RNA, 19 nt, Artificial Sequence
  Description of Artificial Sequence: Synthetic oligonucleotide
agaggugaucggcaucggg

SEQ ID NO: 1772282 - RNA, 19 nt, Artificial Sequence
  Description of Artificial Sequence: Synthetic oligonucleotide
guuguguuguagaugccag

SEQ ID NO: 1772283 - RNA, 19 nt, Artificial Sequence
  Description of Artificial Sequence: Synthetic oligonucleotide
caaagugcagaaucagcuc

SEQ ID NO: 1772284 - RNA, 19 nt, Artificial Sequence
  Description of Artificial Sequence: Synthetic oligonucleotide
gguguaccaauuaaaauca

SEQ ID NO: 1772285 - RNA, 19 nt, Artificial Sequence
  Description of Artificial Sequence: Synthetic oligonucleotide
gggaucagcauucucaguc

SEQ ID NO: 1772286 - RNA, 19 nt, Artificial Sequence
  Description of Artificial Sequence: Synthetic oligonucleotide
ugcuguucgauggacggug

SEQ ID NO: 1772287 - RNA, 19 nt, Artificial Sequence
  Description of Artificial Sequence: Synthetic oligonucleotide
gcauugucagaggugaucg

SEQ ID NO: 1772288 - RNA, 19 nt, Artificial Sequence
  Description of Artificial Sequence: Synthetic oligonucleotide
ggaaacgccaaguaucuuc

SEQ ID NO: 1772289 - RNA, 19 nt, Artificial Sequence
  Description of Artificial Sequence: Synthetic oligonucleotide
uccgguuuuccaggaaacg

SEQ ID NO: 1772290 - RNA, 19 nt, Artificial Sequence
  Description of Artificial Sequence: Synthetic oligonucleotide
gguuaccaugccuagcucc

SEQ ID NO: 1772291 - RNA, 19 nt, Artificial Sequence
  Description of Artificial Sequence: Synthetic oligonucleotide
gaaacgccaaguaucuuca

SEQ ID NO: 1772292 - RNA, 19 nt, Artificial Sequence
  Description of Artificial Sequence: Synthetic oligonucleotide
cuuguaccagugcuucucc

SEQ ID NO: 1772293 - RNA, 19 nt, Artificial Sequence
  Description of Artificial Sequence: Synthetic oligonucleotide
aacaugccggcugcugcgc

SEQ ID NO: 1772294 - RNA, 19 nt, Artificial Sequence
  Description of Artificial Sequence: Synthetic oligonucleotide
uuguguuguagaugccagc

SEQ ID NO: 1772295 - RNA, 19 nt, Artificial Sequence
  Description of Artificial Sequence: Synthetic oligonucleotide
agcccugaagcccacagaa

SEQ ID NO: 1772296 - RNA, 19 nt, Artificial Sequence
  Description of Artificial Sequence: Synthetic oligonucleotide
uaacaugcuguucgaugga

SEQ ID NO: 1772297 - RNA, 19 nt, Artificial Sequence
  Description of Artificial Sequence: Synthetic oligonucleotide
gaggcgagcauugcacugg

SEQ ID NO: 1772298 - RNA, 19 nt, Artificial Sequence
  Description of Artificial Sequence: Synthetic oligonucleotide
gaagguacgcauugucaga

SEQ ID NO: 1772299 - RNA, 19 nt, Artificial Sequence
  Description of Artificial Sequence: Synthetic oligonucleotide
caugaucaagauucccgug

SEQ ID NO: 1772300 - RNA, 19 nt, Artificial Sequence
  Description of Artificial Sequence: Synthetic oligonucleotide
uguauggcccauguucaug

SEQ ID NO: 1772301 - RNA, 19 nt, Artificial Sequence
  Description of Artificial Sequence: Synthetic oligonucleotide
guuaccaugccuagcuccc

SEQ ID NO: 1772302 - RNA, 19 nt, Artificial Sequence
  Description of Artificial Sequence: Synthetic oligonucleotide
ugaggcgagcauugcacug

SEQ ID NO: 1772303 - RNA, 19 nt, Artificial Sequence
  Description of Artificial Sequence: Synthetic oligonucleotide
ccaauuugagaucagaaaa

SEQ ID NO: 1772304 - RNA, 19 nt, Artificial Sequence
  Description of Artificial Sequence: Synthetic oligonucleotide
uguggcuugaaagcuugga

SEQ ID NO: 1772305 - RNA, 19 nt, Artificial Sequence
  Description of Artificial Sequence: Synthetic oligonucleotide
aaacucggccccugugucu

SEQ ID NO: 1772306 - RNA, 19 nt, Artificial Sequence
  Description of Artificial Sequence: Synthetic oligonucleotide
ccaggaaacgccaaguauc

SEQ ID NO: 1772307 - RNA, 19 nt, Artificial Sequence
  Description of Artificial Sequence: Synthetic oligonucleotide
cauugucagaggugaucgg

SEQ ID NO: 1772308 - RNA, 19 nt, Artificial Sequence
  Description of Artificial Sequence: Synthetic oligonucleotide
aaagauuggggaggcugcu

SEQ ID NO: 1772309 - RNA, 19 nt, Artificial Sequence
  Description of Artificial Sequence: Synthetic oligonucleotide
guagcaagugcauuguggu

SEQ ID NO: 1772310 - RNA, 19 nt, Artificial Sequence
  Description of Artificial Sequence: Synthetic oligonucleotide
uaaggccgcugucaagaug

SEQ ID NO: 1772311 - RNA, 19 nt, Artificial Sequence
  Description of Artificial Sequence: Synthetic oligonucleotide
cugguaugaggaacugaag

SEQ ID NO: 1772312 - RNA, 19 nt, Artificial Sequence
  Description of Artificial Sequence: Synthetic oligonucleotide
gaucagaaaaguagcaagu

SEQ ID NO: 1772313 - RNA, 19 nt, Artificial Sequence
  Description of Artificial Sequence: Synthetic oligonucleotide
uucacgguguucucauuaa

SEQ ID NO: 1772314 - RNA, 19 nt, Artificial Sequence
  Description of Artificial Sequence: Synthetic oligonucleotide
aagaugcgaugcugcaacu

SEQ ID NO: 1772315 - RNA, 19 nt, Artificial Sequence
  Description of Artificial Sequence: Synthetic oligonucleotide
uaaaaucaguggacugguc

SEQ ID NO: 1772316 - RNA, 19 nt, Artificial Sequence
  Description of Artificial Sequence: Synthetic oligonucleotide
cauugugguuuccagccuc

SEQ ID NO: 1772317 - RNA, 19 nt, Artificial Sequence
  Description of Artificial Sequence: Synthetic oligonucleotide
cacgguguucucauuaaca

SEQ ID NO: 1772318 - RNA, 19 nt, Artificial Sequence
  Description of Artificial Sequence: Synthetic oligonucleotide
ugagcaagcucaggcuggg

SEQ ID NO: 1772319 - RNA, 19 nt, Artificial Sequence
  Description of Artificial Sequence: Synthetic oligonucleotide
ggcuccuucagcaauggcc

SEQ ID NO: 1772320 - RNA, 19 nt, Artificial Sequence
  Description of Artificial Sequence: Synthetic oligonucleotide
cugucauaguaacuccaac

SEQ ID NO: 1772321 - RNA, 19 nt, Artificial Sequence
  Description of Artificial Sequence: Synthetic oligonucleotide
uggacggugcauguuguca

SEQ ID NO: 1772322 - RNA, 19 nt, Artificial Sequence
  Description of Artificial Sequence: Synthetic oligonucleotide
accaacucuguuguguugu

SEQ ID NO: 1772323 - RNA, 19 nt, Artificial Sequence
  Description of Artificial Sequence: Synthetic oligonucleotide
gccccugugucucagaaug

SEQ ID NO: 1772324 - RNA, 19 nt, Artificial Sequence
  Description of Artificial Sequence: Synthetic oligonucleotide
auggccucugcaguccagc

SEQ ID NO: 1772325 - RNA, 19 nt, Artificial Sequence
  Description of Artificial Sequence: Synthetic oligonucleotide
uggcagucaugccaaguuc

SEQ ID NO: 1772326 - RNA, 19 nt, Artificial Sequence
  Description of Artificial Sequence: Synthetic oligonucleotide
uucgauggacggugcaugu

SEQ ID NO: 1772327 - RNA, 19 nt, Artificial Sequence
  Description of Artificial Sequence: Synthetic oligonucleotide
gaugccagccagcaccgca

SEQ ID NO: 1772328 - RNA, 19 nt, Artificial Sequence
  Description of Artificial Sequence: Synthetic oligonucleotide
uuccaguacaugggugagg

SEQ ID NO: 1772329 - RNA, 19 nt, Artificial Sequence
  Description of Artificial Sequence: Synthetic oligonucleotide
ccugcuuagcuguauggcc

SEQ ID NO: 1772330 - RNA, 19 nt, Artificial Sequence
  Description of Artificial Sequence: Synthetic oligonucleotide
acaugcuguucgauggacg

SEQ ID NO: 1772331 - RNA, 19 nt, Artificial Sequence
  Description of Artificial Sequence: Synthetic oligonucleotide
gauucccgugagaccaugg

SEQ ID NO: 1772332 - RNA, 19 nt, Artificial Sequence
  Description of Artificial Sequence: Synthetic oligonucleotide
uggauguaagucucauuuu

SEQ ID NO: 1772333 - RNA, 19 nt, Artificial Sequence
  Description of Artificial Sequence: Synthetic oligonucleotide
gaacuggucugucuuccuc

SEQ ID NO: 1772334 - RNA, 19 nt, Artificial Sequence
  Description of Artificial Sequence: Synthetic oligonucleotide
uuccuguggcuugaaagcu

SEQ ID NO: 1772335 - RNA, 19 nt, Artificial Sequence
  Description of Artificial Sequence: Synthetic oligonucleotide
agguacgcauugucagagg

SEQ ID NO: 1772336 - RNA, 19 nt, Artificial Sequence
  Description of Artificial Sequence: Synthetic oligonucleotide
ccacaugucauccaccaug

SEQ ID NO: 1772337 - RNA, 19 nt, Artificial Sequence
  Description of Artificial Sequence: Synthetic oligonucleotide
caguacaugggugaggcga

SEQ ID NO: 1772338 - RNA, 19 nt, Artificial Sequence
  Description of Artificial Sequence: Synthetic oligonucleotide
aguacaugggugaggcgag

SEQ ID NO: 1772339 - RNA, 19 nt, Artificial Sequence
  Description of Artificial Sequence: Synthetic oligonucleotide
ugugucucagaaugccgau

SEQ ID NO: 1772340 - RNA, 19 nt, Artificial Sequence
  Description of Artificial Sequence: Synthetic oligonucleotide
cagagaguaguucuaaggu

SEQ ID NO: 1772341 - RNA, 19 nt, Artificial Sequence
  Description of Artificial Sequence: Synthetic oligonucleotide
ucaccaacucuguuguguu

SEQ ID NO: 1772342 - RNA, 19 nt, Artificial Sequence
  Description of Artificial Sequence: Synthetic oligonucleotide
agcuccuucgcuccuucca

SEQ ID NO: 1772343 - RNA, 19 nt, Artificial Sequence
  Description of Artificial Sequence: Synthetic oligonucleotide
aagauuggggaggcugcug

SEQ ID NO: 1772344 - RNA, 19 nt, Artificial Sequence
  Description of Artificial Sequence: Synthetic oligonucleotide
cagcauaaugccacauguc

SEQ ID NO: 1772345 - RNA, 19 nt, Artificial Sequence
  Description of Artificial Sequence: Synthetic oligonucleotide
guucgauggacggugcaug

SEQ ID NO: 1772346 - RNA, 19 nt, Artificial Sequence
  Description of Artificial Sequence: Synthetic oligonucleotide
ugucagaggugaucggcau

SEQ ID NO: 1772347 - RNA, 19 nt, Artificial Sequence
  Description of Artificial Sequence: Synthetic oligonucleotide
ucaagaugcgaugcugcaa

SEQ ID NO: 1772348 - RNA, 19 nt, Artificial Sequence
  Description of Artificial Sequence: Synthetic oligonucleotide
cagaaaggcaucaggaggu

SEQ ID NO: 1772349 - RNA, 19 nt, Artificial Sequence
  Description of Artificial Sequence: Synthetic oligonucleotide
gcaagcucaggcugggcgg

SEQ ID NO: 1772350 - RNA, 19 nt, Artificial Sequence
  Description of Artificial Sequence: Synthetic oligonucleotide
gugcagaaucagcucacug

SEQ ID NO: 1772351 - RNA, 19 nt, Artificial Sequence
  Description of Artificial Sequence: Synthetic oligonucleotide
caguuguaccagcuucugc

SEQ ID NO: 1772352 - RNA, 19 nt, Artificial Sequence
  Description of Artificial Sequence: Synthetic oligonucleotide
gagcauugcacuggguaac

SEQ ID NO: 1772353 - RNA, 19 nt, Artificial Sequence
  Description of Artificial Sequence: Synthetic oligonucleotide
gaaguguggaagguacgca

SEQ ID NO: 1772354 - RNA, 19 nt, Artificial Sequence
  Description of Artificial Sequence: Synthetic oligonucleotide
uuguaccagugcuucucca

SEQ ID NO: 1772355 - RNA, 19 nt, Artificial Sequence
  Description of Artificial Sequence: Synthetic oligonucleotide
guggaagguacgcauuguc

SEQ ID NO: 1772356 - RNA, 19 nt, Artificial Sequence
  Description of Artificial Sequence: Synthetic oligonucleotide
uugagcgugacugcugcuc

SEQ ID NO: 1772357 - RNA, 19 nt, Artificial Sequence
  Description of Artificial Sequence: Synthetic oligonucleotide
acucuaaggccgcugucaa

SEQ ID NO: 1772358 - RNA, 19 nt, Artificial Sequence
  Description of Artificial Sequence: Synthetic oligonucleotide
auggacggugcauguuguc

SEQ ID NO: 1772359 - RNA, 19 nt, Artificial Sequence
  Description of Artificial Sequence: Synthetic oligonucleotide
caauuaaaaucaguggacu

SEQ ID NO: 1772360 - RNA, 19 nt, Artificial Sequence
  Description of Artificial Sequence: Synthetic oligonucleotide
gucaugccaaguuccugug

SEQ ID NO: 1772361 - RNA, 19 nt, Artificial Sequence
  Description of Artificial Sequence: Synthetic oligonucleotide
aggcgagcauugcacuggg

SEQ ID NO: 1772362 - RNA, 19 nt, Artificial Sequence
  Description of Artificial Sequence: Synthetic oligonucleotide
aacugaagaaguggcccaa

SEQ ID NO: 1772363 - RNA, 19 nt, Artificial Sequence
  Description of Artificial Sequence: Synthetic oligonucleotide
gccaaguaucuucaaaguc

SEQ ID NO: 1772364 - RNA, 19 nt, Artificial Sequence
  Description of Artificial Sequence: Synthetic oligonucleotide
gucaagaugcgaugcugca

SEQ ID NO: 1772365 - RNA, 19 nt, Artificial Sequence
  Description of Artificial Sequence: Synthetic oligonucleotide
cuccaguggacuucaccug

SEQ ID NO: 1772366 - RNA, 19 nt, Artificial Sequence
  Description of Artificial Sequence: Synthetic oligonucleotide
aggaaacucggccccugug

SEQ ID NO: 1772367 - RNA, 19 nt, Artificial Sequence
  Description of Artificial Sequence: Synthetic oligonucleotide
cuuucucucaccggcgcug

SEQ ID NO: 1772368 - RNA, 19 nt, Artificial Sequence
  Description of Artificial Sequence: Synthetic oligonucleotide
uguucgauggacggugcau

SEQ ID NO: 1772369 - RNA, 19 nt, Artificial Sequence
  Description of Artificial Sequence: Synthetic oligonucleotide
ccaaguaucuucaaagucu

SEQ ID NO: 1772370 - RNA, 19 nt, Artificial Sequence
  Description of Artificial Sequence: Synthetic oligonucleotide
gaucaagauucccgugaga

SEQ ID NO: 1772371 - RNA, 19 nt, Artificial Sequence
  Description of Artificial Sequence: Synthetic oligonucleotide
uaauccgguuuuccaggaa

SEQ ID NO: 1772372 - RNA, 19 nt, Artificial Sequence
  Description of Artificial Sequence: Synthetic oligonucleotide
uguggaagguacgcauugu

SEQ ID NO: 1772373 - RNA, 19 nt, Artificial Sequence
  Description of Artificial Sequence: Synthetic oligonucleotide
gaguaguucuaaggucaag

SEQ ID NO: 1772374 - RNA, 19 nt, Artificial Sequence
  Description of Artificial Sequence: Synthetic oligonucleotide
gguucuugagcgugacugc

SEQ ID NO: 1772375 - RNA, 19 nt, Artificial Sequence
  Description of Artificial Sequence: Synthetic oligonucleotide
agaugcgaugcugcaacug

SEQ ID NO: 1772376 - RNA, 19 nt, Artificial Sequence
  Description of Artificial Sequence: Synthetic oligonucleotide
ugggcgggauguugugagg

SEQ ID NO: 1772377 - RNA, 19 nt, Artificial Sequence
  Description of Artificial Sequence: Synthetic oligonucleotide
aguggacuucaccugcuua

SEQ ID NO: 1772378 - RNA, 19 nt, Artificial Sequence
  Description of Artificial Sequence: Synthetic oligonucleotide
augccacaugucauccacc

SEQ ID NO: 1772379 - RNA, 19 nt, Artificial Sequence
  Description of Artificial Sequence: Synthetic oligonucleotide
aaacgccaaguaucuucaa

SEQ ID NO: 1772380 - RNA, 19 nt, Artificial Sequence
  Description of Artificial Sequence: Synthetic oligonucleotide
ggcuugaaagcuuggaugu

SEQ ID NO: 1772381 - RNA, 19 nt, Artificial Sequence
  Description of Artificial Sequence: Synthetic oligonucleotide
cuggacagacccaaggacu

SEQ ID NO: 1772382 - RNA, 19 nt, Artificial Sequence
  Description of Artificial Sequence: Synthetic oligonucleotide
cagugcuucuccaguggac

SEQ ID NO: 1772383 - RNA, 19 nt, Artificial Sequence
  Description of Artificial Sequence: Synthetic oligonucleotide
ccugugucucagaaugccg

SEQ ID NO: 1772384 - RNA, 19 nt, Artificial Sequence
  Description of Artificial Sequence: Synthetic oligonucleotide
ugcgcuggacagacccaag

SEQ ID NO: 1772385 - RNA, 19 nt, Artificial Sequence
  Description of Artificial Sequence: Synthetic oligonucleotide
guacgcauugucagaggug

SEQ ID NO: 1772386 - RNA, 19 nt, Artificial Sequence
  Description of Artificial Sequence: Synthetic oligonucleotide
ggugaggcgagcauugcac

SEQ ID NO: 1772387 - RNA, 19 nt, Artificial Sequence
  Description of Artificial Sequence: Synthetic oligonucleotide
ccugguaugaggaacugaa

SEQ ID NO: 1772388 - RNA, 19 nt, Artificial Sequence
  Description of Artificial Sequence: Synthetic oligonucleotide
gucaagacaugaucaagau

SEQ ID NO: 1772389 - RNA, 19 nt, Artificial Sequence
  Description of Artificial Sequence: Synthetic oligonucleotide
cucuaaggccgcugucaag

SEQ ID NO: 1772390 - RNA, 19 nt, Artificial Sequence
  Description of Artificial Sequence: Synthetic oligonucleotide
guucuaaggucaagacaug

SEQ ID NO: 1772391 - RNA, 19 nt, Artificial Sequence
  Description of Artificial Sequence: Synthetic oligonucleotide
caucauuaauccgguuuuc

SEQ ID NO: 1772392 - RNA, 19 nt, Artificial Sequence
  Description of Artificial Sequence: Synthetic oligonucleotide
augggugaggcgagcauug

SEQ ID NO: 1772393 - RNA, 19 nt, Artificial Sequence
  Description of Artificial Sequence: Synthetic oligonucleotide
acggugcauguugucaaag

SEQ ID NO: 1772394 - RNA, 19 nt, Artificial Sequence
  Description of Artificial Sequence: Synthetic oligonucleotide
ggugcauguugucaaagcu

SEQ ID NO: 1772395 - RNA, 19 nt, Artificial Sequence
  Description of Artificial Sequence: Synthetic oligonucleotide
caggaaacgccaaguaucu

SEQ ID NO: 1772396 - RNA, 19 nt, Artificial Sequence
  Description of Artificial Sequence: Synthetic oligonucleotide
gcacuggguaacaaagugc

SEQ ID NO: 1772397 - RNA, 19 nt, Artificial Sequence
  Description of Artificial Sequence: Synthetic oligonucleotide
uagaccugucagguucuug

SEQ ID NO: 1772398 - RNA, 19 nt, Artificial Sequence
  Description of Artificial Sequence: Synthetic oligonucleotide
ugcuccucacucucaccgu

SEQ ID NO: 1772399 - RNA, 19 nt, Artificial Sequence
  Description of Artificial Sequence: Synthetic oligonucleotide
gagcgugacugcugcuccc

SEQ ID NO: 1772400 - RNA, 19 nt, Artificial Sequence
  Description of Artificial Sequence: Synthetic oligonucleotide
acuggguaacaaagugcag

SEQ ID NO: 1772401 - RNA, 19 nt, Artificial Sequence
  Description of Artificial Sequence: Synthetic oligonucleotide
ccuguggcuugaaagcuug

SEQ ID NO: 1772402 - RNA, 19 nt, Artificial Sequence
  Description of Artificial Sequence: Synthetic oligonucleotide
cucuuccgaagcccugaag

SEQ ID NO: 1772403 - RNA, 19 nt, Artificial Sequence
  Description of Artificial Sequence: Synthetic oligonucleotide
agugcagaaucagcucacu

SEQ ID NO: 1772404 - RNA, 19 nt, Artificial Sequence
  Description of Artificial Sequence: Synthetic oligonucleotide
cuuagcuguauggcccaug

SEQ ID NO: 1772405 - RNA, 19 nt, Artificial Sequence
  Description of Artificial Sequence: Synthetic oligonucleotide
agcauugcacuggguaaca

SEQ ID NO: 1772406 - RNA, 19 nt, Artificial Sequence
  Description of Artificial Sequence: Synthetic oligonucleotide
ggggaagaguccugcauca

SEQ ID NO: 1772407 - RNA, 19 nt, Artificial Sequence
  Description of Artificial Sequence: Synthetic oligonucleotide
ucgggccacgggcaggcac

SEQ ID NO: 1772408 - RNA, 19 nt, Artificial Sequence
  Description of Artificial Sequence: Synthetic oligonucleotide
ugaucggcaucgggccacg

SEQ ID NO: 1772409 - RNA, 19 nt, Artificial Sequence
  Description of Artificial Sequence: Synthetic oligonucleotide
ccgguuuuccaggaaacgc

SEQ ID NO: 1772410 - RNA, 19 nt, Artificial Sequence
  Description of Artificial Sequence: Synthetic oligonucleotide
gugucucagaaugccgaug

SEQ ID NO: 1772411 - RNA, 19 nt, Artificial Sequence
  Description of Artificial Sequence: Synthetic oligonucleotide
guaacuccaacuucuucuu

SEQ ID NO: 1772412 - RNA, 19 nt, Artificial Sequence
  Description of Artificial Sequence: Synthetic oligonucleotide
gcgcuggacagacccaagg

SEQ ID NO: 1772413 - RNA, 19 nt, Artificial Sequence
  Description of Artificial Sequence: Synthetic oligonucleotide
gcuguauggcccauguuca

SEQ ID NO: 1772414 - RNA, 19 nt, Artificial Sequence
  Description of Artificial Sequence: Synthetic oligonucleotide
uucaccugcuuagcuguau

SEQ ID NO: 1772415 - RNA, 19 nt, Artificial Sequence
  Description of Artificial Sequence: Synthetic oligonucleotide
gguacgcauugucagaggu

SEQ ID NO: 1772416 - RNA, 19 nt, Artificial Sequence
  Description of Artificial Sequence: Synthetic oligonucleotide
auaguaacuccaacuucuu

SEQ ID NO: 1772417 - RNA, 19 nt, Artificial Sequence
  Description of Artificial Sequence: Synthetic oligonucleotide
gccaaguuccuguggcuug

SEQ ID NO: 1772418 - RNA, 19 nt, Artificial Sequence
  Description of Artificial Sequence: Synthetic oligonucleotide
caucgggccacgggcaggc

SEQ ID NO: 1772419 - RNA, 19 nt, Artificial Sequence
  Description of Artificial Sequence: Synthetic oligonucleotide
gcgaugcugcaacugcucc

SEQ ID NO: 1772420 - RNA, 19 nt, Artificial Sequence
  Description of Artificial Sequence: Synthetic oligonucleotide
agaguaguucuaaggucaa

SEQ ID NO: 1772421 - RNA, 19 nt, Artificial Sequence
  Description of Artificial Sequence: Synthetic oligonucleotide
gacggugcauguugucaaa

SEQ ID NO: 1772422 - RNA, 19 nt, Artificial Sequence
  Description of Artificial Sequence: Synthetic oligonucleotide
cucaccggcgcugguuuag

SEQ ID NO: 1772423 - RNA, 19 nt, Artificial Sequence
  Description of Artificial Sequence: Synthetic oligonucleotide
caugccuagcucccagaga

SEQ ID NO: 1772424 - RNA, 19 nt, Artificial Sequence
  Description of Artificial Sequence: Synthetic oligonucleotide
cgggauguugugaggaagc

SEQ ID NO: 1772425 - RNA, 19 nt, Artificial Sequence
  Description of Artificial Sequence: Synthetic oligonucleotide
caucaccaacucuguugug

SEQ ID NO: 1772426 - RNA, 19 nt, Artificial Sequence
  Description of Artificial Sequence: Synthetic oligonucleotide
agauucccgugagaccaug

SEQ ID NO: 1772427 - RNA, 19 nt, Artificial Sequence
  Description of Artificial Sequence: Synthetic oligonucleotide
caggccuuguaccagugcu

SEQ ID NO: 1772428 - RNA, 19 nt, Artificial Sequence
  Description of Artificial Sequence: Synthetic oligonucleotide
cagucaugccaaguuccug

SEQ ID NO: 1772429 - RNA, 19 nt, Artificial Sequence
  Description of Artificial Sequence: Synthetic oligonucleotide
cuagcucccagagaguagu

SEQ ID NO: 1772430 - RNA, 19 nt, Artificial Sequence
  Description of Artificial Sequence: Synthetic oligonucleotide
augcgaugcugcaacugcu

SEQ ID NO: 1772431 - RNA, 19 nt, Artificial Sequence
  Description of Artificial Sequence: Synthetic oligonucleotide
gcgagcauugcacugggua

SEQ ID NO: 1772432 - RNA, 19 nt, Artificial Sequence
  Description of Artificial Sequence: Synthetic oligonucleotide
ugggugaggcgagcauugc

SEQ ID NO: 1772433 - RNA, 19 nt, Artificial Sequence
  Description of Artificial Sequence: Synthetic oligonucleotide
cccagagaguaguucuaag

SEQ ID NO: 1772434 - RNA, 19 nt, Artificial Sequence
  Description of Artificial Sequence: Synthetic oligonucleotide
gugaucggcaucgggccac

SEQ ID NO: 1772435 - RNA, 19 nt, Artificial Sequence
  Description of Artificial Sequence: Synthetic oligonucleotide
ccaugccuagcucccagag

SEQ ID NO: 1772436 - RNA, 19 nt, Artificial Sequence
  Description of Artificial Sequence: Synthetic oligonucleotide
ucuucacgguguucucauu

SEQ ID NO: 1772437 - RNA, 19 nt, Artificial Sequence
  Description of Artificial Sequence: Synthetic oligonucleotide
ggaaacucggccccugugu

SEQ ID NO: 1772438 - RNA, 19 nt, Artificial Sequence
  Description of Artificial Sequence: Synthetic oligonucleotide
caauguaggggaucagcau

SEQ ID NO: 1772439 - RNA, 19 nt, Artificial Sequence
  Description of Artificial Sequence: Synthetic oligonucleotide
cugccuggcccaguuguac

SEQ ID NO: 1772440 - RNA, 19 nt, Artificial Sequence
  Description of Artificial Sequence: Synthetic oligonucleotide
ggacggugcauguugucaa

SEQ ID NO: 1772441 - RNA, 19 nt, Artificial Sequence
  Description of Artificial Sequence: Synthetic oligonucleotide
cgauggacggugcauguug

SEQ ID NO: 1772442 - RNA, 19 nt, Artificial Sequence
  Description of Artificial Sequence: Synthetic oligonucleotide
aagauucccgugagaccau

SEQ ID NO: 1772443 - RNA, 19 nt, Artificial Sequence
  Description of Artificial Sequence: Synthetic oligonucleotide
gcugcugcgcuggacagac

SEQ ID NO: 1772444 - RNA, 19 nt, Artificial Sequence
  Description of Artificial Sequence: Synthetic oligonucleotide
ucucucaccggcgcugguu

SEQ ID NO: 1772445 - RNA, 19 nt, Artificial Sequence
  Description of Artificial Sequence: Synthetic oligonucleotide
gauggacggugcauguugu

SEQ ID NO: 1772446 - RNA, 19 nt, Artificial Sequence
  Description of Artificial Sequence: Synthetic oligonucleotide
agcgugacugcugcuccca

SEQ ID NO: 1772447 - RNA, 19 nt, Artificial Sequence
  Description of Artificial Sequence: Synthetic oligonucleotide
acggcggguguaccaauua

SEQ ID NO: 1772448 - RNA, 19 nt, Artificial Sequence
  Description of Artificial Sequence: Synthetic oligonucleotide
ccuuguaccagugcuucuc

SEQ ID NO: 1772449 - RNA, 19 nt, Artificial Sequence
  Description of Artificial Sequence: Synthetic oligonucleotide
augcuguucgauggacggu

SEQ ID NO: 1772450 - RNA, 19 nt, Artificial Sequence
  Description of Artificial Sequence: Synthetic oligonucleotide
ggcugacgaggaaacucgg

SEQ ID NO: 1772451 - RNA, 19 nt, Artificial Sequence
  Description of Artificial Sequence: Synthetic oligonucleotide
aucaggccuuguaccagug

SEQ ID NO: 1772452 - RNA, 19 nt, Artificial Sequence
  Description of Artificial Sequence: Synthetic oligonucleotide
gcaaugcagaaaggcauca

SEQ ID NO: 1772453 - RNA, 19 nt, Artificial Sequence
  Description of Artificial Sequence: Synthetic oligonucleotide
uucucucaccggcgcuggu

SEQ ID NO: 1772454 - RNA, 19 nt, Artificial Sequence
  Description of Artificial Sequence: Synthetic oligonucleotide
cacgggcaggcaccgcagc

SEQ ID NO: 1772455 - RNA, 19 nt, Artificial Sequence
  Description of Artificial Sequence: Synthetic oligonucleotide
gcgggauguugugaggaag

SEQ ID NO: 1772456 - RNA, 19 nt, Artificial Sequence
  Description of Artificial Sequence: Synthetic oligonucleotide
cucugccuggcccaguugu

SEQ ID NO: 1772457 - RNA, 19 nt, Artificial Sequence
  Description of Artificial Sequence: Synthetic oligonucleotide
cggugcauguugucaaagc

SEQ ID NO: 1772458 - RNA, 19 nt, Artificial Sequence
  Description of Artificial Sequence: Synthetic oligonucleotide
caagugcauugugguuucc

SEQ ID NO: 1772459 - RNA, 19 nt, Artificial Sequence
  Description of Artificial Sequence: Synthetic oligonucleotide
gugaggcgagcauugcacu

SEQ ID NO: 1772460 - RNA, 19 nt, Artificial Sequence
  Description of Artificial Sequence: Synthetic oligonucleotide
ucaccggcgcugguuuaga

SEQ ID NO: 1772461 - RNA, 19 nt, Artificial Sequence
  Description of Artificial Sequence: Synthetic oligonucleotide
gcacaaacucuaaggccgc

SEQ ID NO: 1772462 - RNA, 19 nt, Artificial Sequence
  Description of Artificial Sequence: Synthetic oligonucleotide
cuguucgauggacggugca

SEQ ID NO: 1772463 - RNA, 19 nt, Artificial Sequence
  Description of Artificial Sequence: Synthetic oligonucleotide
gcggguguaccaauuaaaa

SEQ ID NO: 1772464 - RNA, 19 nt, Artificial Sequence
  Description of Artificial Sequence: Synthetic oligonucleotide
ggcaucgggccacgggcag

SEQ ID NO: 1772465 - RNA, 19 nt, Artificial Sequence
  Description of Artificial Sequence: Synthetic oligonucleotide
agucuggggaagaguccug

SEQ ID NO: 1772466 - RNA, 19 nt, Artificial Sequence
  Description of Artificial Sequence: Synthetic oligonucleotide
ucgauggacggugcauguu

SEQ ID NO: 1772467 - RNA, 19 nt, Artificial Sequence
  Description of Artificial Sequence: Synthetic oligonucleotide
uagcucccagagaguaguu

SEQ ID NO: 1772468 - RNA, 19 nt, Artificial Sequence
  Description of Artificial Sequence: Synthetic oligonucleotide
gaucggcaucgggccacgg

SEQ ID NO: 1772469 - RNA, 19 nt, Artificial Sequence
  Description of Artificial Sequence: Synthetic oligonucleotide
caccggcgcugguuuagac

SEQ ID NO: 1772470 - RNA, 19 nt, Artificial Sequence
  Description of Artificial Sequence: Synthetic oligonucleotide
uggcaucauuaauccgguu

SEQ ID NO: 1772471 - RNA, 19 nt, Artificial Sequence
  Description of Artificial Sequence: Synthetic oligonucleotide
cccuuucucucaccggcgc

SEQ ID NO: 1772472 - RNA, 19 nt, Artificial Sequence
  Description of Artificial Sequence: Synthetic oligonucleotide
ccccuuucucucaccggcg

SEQ ID NO: 1772473 - RNA, 19 nt, Artificial Sequence
  Description of Artificial Sequence: Synthetic oligonucleotide
gaggaaacucggccccugu

SEQ ID NO: 1772474 - RNA, 19 nt, Artificial Sequence
  Description of Artificial Sequence: Synthetic oligonucleotide
gggugaggcgagcauugca

SEQ ID NO: 1772475 - RNA, 19 nt, Artificial Sequence
  Description of Artificial Sequence: Synthetic oligonucleotide
gggauguugugaggaagca

SEQ ID NO: 1772476 - RNA, 19 nt, Artificial Sequence
  Description of Artificial Sequence: Synthetic oligonucleotide
ccaguacaugggugaggcg

SEQ ID NO: 1772477 - RNA, 19 nt, Artificial Sequence
  Description of Artificial Sequence: Synthetic oligonucleotide
ucucaccggcgcugguuua

SEQ ID NO: 1772478 - RNA, 19 nt, Artificial Sequence
  Description of Artificial Sequence: Synthetic oligonucleotide
uuagaccugucagguucuu

SEQ ID NO: 1772479 - RNA, 19 nt, Artificial Sequence
  Description of Artificial Sequence: Synthetic oligonucleotide
cccaucaggccuuguacca

SEQ ID NO: 1772480 - RNA, 19 nt, Artificial Sequence
  Description of Artificial Sequence: Synthetic oligonucleotide
acgaggaaacucggccccu

SEQ ID NO: 1772481 - RNA, 19 nt, Artificial Sequence
  Description of Artificial Sequence: Synthetic oligonucleotide
cuuggauguaagucucauu

SEQ ID NO: 1772482 - RNA, 19 nt, Artificial Sequence
  Description of Artificial Sequence: Synthetic oligonucleotide
aagcucaggcugggcggga

SEQ ID NO: 1772483 - RNA, 19 nt, Artificial Sequence
  Description of Artificial Sequence: Synthetic oligonucleotide
ggcggguguaccaauuaaa

SEQ ID NO: 1772484 - RNA, 19 nt, Artificial Sequence
  Description of Artificial Sequence: Synthetic oligonucleotide
ccaucaggccuuguaccag

SEQ ID NO: 1772485 - RNA, 19 nt, Artificial Sequence
  Description of Artificial Sequence: Synthetic oligonucleotide
ucggccccugugucucaga

SEQ ID NO: 1772486 - RNA, 19 nt, Artificial Sequence
  Description of Artificial Sequence: Synthetic oligonucleotide
ccccugugucucagaaugc

SEQ ID NO: 1772487 - RNA, 19 nt, Artificial Sequence
  Description of Artificial Sequence: Synthetic oligonucleotide
cugaagaaguggcccaauu

SEQ ID NO: 1772488 - RNA, 19 nt, Artificial Sequence
  Description of Artificial Sequence: Synthetic oligonucleotide
gcuguucgauggacggugc

SEQ ID NO: 1772489 - RNA, 19 nt, Artificial Sequence
  Description of Artificial Sequence: Synthetic oligonucleotide
aggaaacgccaaguaucuu

SEQ ID NO: 1772490 - RNA, 19 nt, Artificial Sequence
  Description of Artificial Sequence: Synthetic oligonucleotide
gggcgggauguugugagga

SEQ ID NO: 1772491 - RNA, 19 nt, Artificial Sequence
  Description of Artificial Sequence: Synthetic oligonucleotide
aggccuuguaccagugcuu

SEQ ID NO: 1772492 - RNA, 19 nt, Artificial Sequence
  Description of Artificial Sequence: Synthetic oligonucleotide
ccgcugucaagaugcgaug

SEQ ID NO: 1772493 - RNA, 19 nt, Artificial Sequence
  Description of Artificial Sequence: Synthetic oligonucleotide
aggccgcugucaagaugcg

SEQ ID NO: 1772494 - RNA, 19 nt, Artificial Sequence
  Description of Artificial Sequence: Synthetic oligonucleotide
cucggccccugugucucag

SEQ ID NO: 1772495 - RNA, 19 nt, Artificial Sequence
  Description of Artificial Sequence: Synthetic oligonucleotide
gcccugaagcccacagaag

SEQ ID NO: 1772496 - RNA, 19 nt, Artificial Sequence
  Description of Artificial Sequence: Synthetic oligonucleotide
ccggcgcugguuuagaccu

SEQ ID NO: 1772497 - RNA, 19 nt, Artificial Sequence
  Description of Artificial Sequence: Synthetic oligonucleotide
cuucaccugcuuagcugua

SEQ ID NO: 1772498 - RNA, 19 nt, Artificial Sequence
  Description of Artificial Sequence: Synthetic oligonucleotide
cugcugcgcuggacagacc

SEQ ID NO: 1772499 - RNA, 19 nt, Artificial Sequence
  Description of Artificial Sequence: Synthetic oligonucleotide
cugcgcuggacagacccaa

SEQ ID NO: 1772500 - RNA, 19 nt, Artificial Sequence
  Description of Artificial Sequence: Synthetic oligonucleotide
acucggccccugugucuca

SEQ ID NO: 1772501 - RNA, 19 nt, Artificial Sequence
  Description of Artificial Sequence: Synthetic oligonucleotide
guguucucauuaacaugcu

SEQ ID NO: 1772502 - RNA, 19 nt, Artificial Sequence
  Description of Artificial Sequence: Synthetic oligonucleotide
gccgcugucaagaugcgau

SEQ ID NO: 1772503 - RNA, 19 nt, Artificial Sequence
  Description of Artificial Sequence: Synthetic oligonucleotide
gccuagcucccagagagua

SEQ ID NO: 1772504 - RNA, 19 nt, Artificial Sequence
  Description of Artificial Sequence: Synthetic oligonucleotide
ccagguacaugggcucccc

SEQ ID NO: 1772505 - RNA, 19 nt, Artificial Sequence
  Description of Artificial Sequence: Synthetic oligonucleotide
ggcgggauguugugaggaa

SEQ ID NO: 1772506 - RNA, 19 nt, Artificial Sequence
  Description of Artificial Sequence: Synthetic oligonucleotide
cuaaggccgcugucaagau

SEQ ID NO: 1772507 - RNA, 19 nt, Artificial Sequence
  Description of Artificial Sequence: Synthetic oligonucleotide
ggccugguaugaggaacug

SEQ ID NO: 1772508 - RNA, 19 nt, Artificial Sequence
  Description of Artificial Sequence: Synthetic oligonucleotide
caugggugaggcgagcauu

SEQ ID NO: 1772509 - RNA, 19 nt, Artificial Sequence
  Description of Artificial Sequence: Synthetic oligonucleotide
cuugagcgugacugcugcu

SEQ ID NO: 1772510 - RNA, 19 nt, Artificial Sequence
  Description of Artificial Sequence: Synthetic oligonucleotide
cuguauggcccauguucau

SEQ ID NO: 1772511 - RNA, 19 nt, Artificial Sequence
  Description of Artificial Sequence: Synthetic oligonucleotide
agcucaggcugggcgggau

SEQ ID NO: 1772512 - RNA, 19 nt, Artificial Sequence
  Description of Artificial Sequence: Synthetic oligonucleotide
cagcaccgcacggcgggug

SEQ ID NO: 1772513 - RNA, 19 nt, Artificial Sequence
  Description of Artificial Sequence: Synthetic oligonucleotide
gguuuagaccugucagguu

SEQ ID NO: 1772514 - RNA, 19 nt, Artificial Sequence
  Description of Artificial Sequence: Synthetic oligonucleotide
gcauugugguuuccagccu

SEQ ID NO: 1772515 - RNA, 19 nt, Artificial Sequence
  Description of Artificial Sequence: Synthetic oligonucleotide
cccaguuguaccagcuucu

SEQ ID NO: 1772516 - RNA, 19 nt, Artificial Sequence
  Description of Artificial Sequence: Synthetic oligonucleotide
gccugguaugaggaacuga

SEQ ID NO: 1772517 - RNA, 19 nt, Artificial Sequence
  Description of Artificial Sequence: Synthetic oligonucleotide
acgcauugucagaggugau

SEQ ID NO: 1772518 - RNA, 19 nt, Artificial Sequence
  Description of Artificial Sequence: Synthetic oligonucleotide
cgcugguuuagaccuguca

SEQ ID NO: 1772519 - RNA, 19 nt, Artificial Sequence
  Description of Artificial Sequence: Synthetic oligonucleotide
gggccacgggcaggcaccg

SEQ ID NO: 1772520 - RNA, 19 nt, Artificial Sequence
  Description of Artificial Sequence: Synthetic oligonucleotide
gcugggcgggauguuguga

SEQ ID NO: 1772521 - RNA, 19 nt, Artificial Sequence
  Description of Artificial Sequence: Synthetic oligonucleotide
gcucuuccgaagcccugaa

SEQ ID NO: 1772522 - RNA, 19 nt, Artificial Sequence
  Description of Artificial Sequence: Synthetic oligonucleotide
caaguuccuguggcuugaa

SEQ ID NO: 1772523 - RNA, 19 nt, Artificial Sequence
  Description of Artificial Sequence: Synthetic oligonucleotide
cacaaacucuaaggccgcu

SEQ ID NO: 1772524 - RNA, 19 nt, Artificial Sequence
  Description of Artificial Sequence: Synthetic oligonucleotide
cgccaaguaucuucaaagu

SEQ ID NO: 1772525 - RNA, 19 nt, Artificial Sequence
  Description of Artificial Sequence: Synthetic oligonucleotide
gacugguccccagcauaau

SEQ ID NO: 1772526 - RNA, 19 nt, Artificial Sequence
  Description of Artificial Sequence: Synthetic oligonucleotide
ccgugagaccauggcaguc

SEQ ID NO: 1772527 - RNA, 19 nt, Artificial Sequence
  Description of Artificial Sequence: Synthetic oligonucleotide
agccaugggcaggcacaaa

SEQ ID NO: 1772528 - RNA, 19 nt, Artificial Sequence
  Description of Artificial Sequence: Synthetic oligonucleotide
gcugcgcuggacagaccca

SEQ ID NO: 1772529 - RNA, 19 nt, Artificial Sequence
  Description of Artificial Sequence: Synthetic oligonucleotide
ggcgcugguuuagaccugu

SEQ ID NO: 1772530 - RNA, 19 nt, Artificial Sequence
  Description of Artificial Sequence: Synthetic oligonucleotide
ccaacucuguuguguugua

SEQ ID NO: 1772531 - RNA, 19 nt, Artificial Sequence
  Description of Artificial Sequence: Synthetic oligonucleotide
cacggcggguguaccaauu

SEQ ID NO: 1772532 - RNA, 19 nt, Artificial Sequence
  Description of Artificial Sequence: Synthetic oligonucleotide
cggguguaccaauuaaaau

SEQ ID NO: 1772533 - RNA, 19 nt, Artificial Sequence
  Description of Artificial Sequence: Synthetic oligonucleotide
cgaggaaacucggccccug

SEQ ID NO: 1772534 - RNA, 19 nt, Artificial Sequence
  Description of Artificial Sequence: Synthetic oligonucleotide
ggcccggggccagugcuca

SEQ ID NO: 1772535 - RNA, 19 nt, Artificial Sequence
  Description of Artificial Sequence: Synthetic oligonucleotide
aucgggccacgggcaggca

SEQ ID NO: 1772536 - RNA, 19 nt, Artificial Sequence
  Description of Artificial Sequence: Synthetic oligonucleotide
ccauguucauggcaucauu

SEQ ID NO: 1772537 - RNA, 19 nt, Artificial Sequence
  Description of Artificial Sequence: Synthetic oligonucleotide
ccuucgcuccuuccaggua

SEQ ID NO: 1772538 - RNA, 19 nt, Artificial Sequence
  Description of Artificial Sequence: Synthetic oligonucleotide
cccgugagaccauggcagu

SEQ ID NO: 1772539 - RNA, 19 nt, Artificial Sequence
  Description of Artificial Sequence: Synthetic oligonucleotide
ggccccugugucucagaau

SEQ ID NO: 1772540 - RNA, 19 nt, Artificial Sequence
  Description of Artificial Sequence: Synthetic oligonucleotide
ccgcacggcggguguacca

SEQ ID NO: 1772541 - RNA, 19 nt, Artificial Sequence
  Description of Artificial Sequence: Synthetic oligonucleotide
gggaagaguccugcaucau

SEQ ID NO: 1772542 - RNA, 19 nt, Artificial Sequence
  Description of Artificial Sequence: Synthetic oligonucleotide
cggcggguguaccaauuaa

SEQ ID NO: 1772543 - RNA, 19 nt, Artificial Sequence
  Description of Artificial Sequence: Synthetic oligonucleotide
cggcaucgggccacgggca

SEQ ID NO: 1772544 - RNA, 19 nt, Artificial Sequence
  Description of Artificial Sequence: Synthetic oligonucleotide
ggcaggcaccgcagcugca

SEQ ID NO: 1772545 - RNA, 19 nt, Artificial Sequence
  Description of Artificial Sequence: Synthetic oligonucleotide
gcgcugguuuagaccuguc

SEQ ID NO: 1772546 - RNA, 19 nt, Artificial Sequence
  Description of Artificial Sequence: Synthetic oligonucleotide
gcacggcggguguaccaau

SEQ ID NO: 1772547 - RNA, 19 nt, Artificial Sequence
  Description of Artificial Sequence: Synthetic oligonucleotide
gcgugacugcugcucccau

SEQ ID NO: 1772548 - RNA, 19 nt, Artificial Sequence
  Description of Artificial Sequence: Synthetic oligonucleotide
gcuuagcuguauggcccau

SEQ ID NO: 1772549 - RNA, 19 nt, Artificial Sequence
  Description of Artificial Sequence: Synthetic oligonucleotide
ggcgagcauugcacugggu

SEQ ID NO: 1772550 - RNA, 19 nt, Artificial Sequence
  Description of Artificial Sequence: Synthetic oligonucleotide
cgcacggcggguguaccaa

SEQ ID NO: 1772551 - RNA, 19 nt, Artificial Sequence
  Description of Artificial Sequence: Synthetic oligonucleotide
ccccagcauaaugccacau

SEQ ID NO: 1772552 - RNA, 19 nt, Artificial Sequence
  Description of Artificial Sequence: Synthetic oligonucleotide
gcccggggccagugcucaa

SEQ ID NO: 1772553 - RNA, 19 nt, Artificial Sequence
  Description of Artificial Sequence: Synthetic oligonucleotide
cccggggccagugcucaau

SEQ ID NO: 1772554 - RNA, 19 nt, Artificial Sequence
  Description of Artificial Sequence: Synthetic oligonucleotide
aauaugagcauccagagag

SEQ ID NO: 1772555 - RNA, 19 nt, Artificial Sequence
  Description of Artificial Sequence: Synthetic oligonucleotide
agaaugaagaucuaaaggc

SEQ ID NO: 1772556 - RNA, 19 nt, Artificial Sequence
  Description of Artificial Sequence: Synthetic oligonucleotide
aauuuacuacaauauaugc

SEQ ID NO: 1772557 - RNA, 19 nt, Artificial Sequence
  Description of Artificial Sequence: Synthetic oligonucleotide
uuuacauuaaaauaggagc

SEQ ID NO: 1772558 - RNA, 19 nt, Artificial Sequence
  Description of Artificial Sequence: Synthetic oligonucleotide
uuuaagugugcuuaggagg

SEQ ID NO: 1772559 - RNA, 19 nt, Artificial Sequence
  Description of Artificial Sequence: Synthetic oligonucleotide
uguuguacaucauagaucu

SEQ ID NO: 1772560 - RNA, 19 nt, Artificial Sequence
  Description of Artificial Sequence: Synthetic oligonucleotide
uaaccaagaaugaagaucu

SEQ ID NO: 1772561 - RNA, 19 nt, Artificial Sequence
  Description of Artificial Sequence: Synthetic oligonucleotide
uuaagugugcuuaggaggg

SEQ ID NO: 1772562 - RNA, 19 nt, Artificial Sequence
  Description of Artificial Sequence: Synthetic oligonucleotide
cuuauuauaguguaucuac

SEQ ID NO: 1772563 - RNA, 19 nt, Artificial Sequence
  Description of Artificial Sequence: Synthetic oligonucleotide
aaauaggagcagcauuucc

SEQ ID NO: 1772564 - RNA, 19 nt, Artificial Sequence
  Description of Artificial Sequence: Synthetic oligonucleotide
aaaccuuuacacuuuuguc

SEQ ID NO: 1772565 - RNA, 19 nt, Artificial Sequence
  Description of Artificial Sequence: Synthetic oligonucleotide
uauuuuacuccccaaaccu

SEQ ID NO: 1772566 - RNA, 19 nt, Artificial Sequence
  Description of Artificial Sequence: Synthetic oligonucleotide
uuaaauugggcagucauag

SEQ ID NO: 1772567 - RNA, 19 nt, Artificial Sequence
  Description of Artificial Sequence: Synthetic oligonucleotide
auagacuugaucugcuugc

SEQ ID NO: 1772568 - RNA, 19 nt, Artificial Sequence
  Description of Artificial Sequence: Synthetic oligonucleotide
uccauuauauuuuacuccc

SEQ ID NO: 1772569 - RNA, 19 nt, Artificial Sequence
  Description of Artificial Sequence: Synthetic oligonucleotide
aggaaugucaugaucaacc

SEQ ID NO: 1772570 - RNA, 19 nt, Artificial Sequence
  Description of Artificial Sequence: Synthetic oligonucleotide
aguuccuguggccagauac

SEQ ID NO: 1772571 - RNA, 19 nt, Artificial Sequence
  Description of Artificial Sequence: Synthetic oligonucleotide
aaggguguggcugaugucc

SEQ ID NO: 1772572 - RNA, 19 nt, Artificial Sequence
  Description of Artificial Sequence: Synthetic oligonucleotide
uccuuaaccaagaaugaag

SEQ ID NO: 1772573 - RNA, 19 nt, Artificial Sequence
  Description of Artificial Sequence: Synthetic oligonucleotide
aauaaaacaggaaacacuu

SEQ ID NO: 1772574 - RNA, 19 nt, Artificial Sequence
  Description of Artificial Sequence: Synthetic oligonucleotide
gagaauacuguacugguug

SEQ ID NO: 1772575 - RNA, 19 nt, Artificial Sequence
  Description of Artificial Sequence: Synthetic oligonucleotide
uguaucuacaaaauuuacu

SEQ ID NO: 1772576 - RNA, 19 nt, Artificial Sequence
  Description of Artificial Sequence: Synthetic oligonucleotide
uuauaguguaucuacaaaa

SEQ ID NO: 1772577 - RNA, 19 nt, Artificial Sequence
  Description of Artificial Sequence: Synthetic oligonucleotide
uaugcuguauuuuaagugu

SEQ ID NO: 1772578 - RNA, 19 nt, Artificial Sequence
  Description of Artificial Sequence: Synthetic oligonucleotide
uaaaauaggagcagcauuu

SEQ ID NO: 1772579 - RNA, 19 nt, Artificial Sequence
  Description of Artificial Sequence: Synthetic oligonucleotide
uugaagagaauacuguacu

SEQ ID NO: 1772580 - RNA, 19 nt, Artificial Sequence
  Description of Artificial Sequence: Synthetic oligonucleotide
gaugaauuuuccucuagug

SEQ ID NO: 1772581 - RNA, 19 nt, Artificial Sequence
  Description of Artificial Sequence: Synthetic oligonucleotide
accaacgaccaccauaccc

SEQ ID NO: 1772582 - RNA, 19 nt, Artificial Sequence
  Description of Artificial Sequence: Synthetic oligonucleotide
auaugcuguauuuuaagug

SEQ ID NO: 1772583 - RNA, 19 nt, Artificial Sequence
  Description of Artificial Sequence: Synthetic oligonucleotide
acuauaugcaauacuaagg

SEQ ID NO: 1772584 - RNA, 19 nt, Artificial Sequence
  Description of Artificial Sequence: Synthetic oligonucleotide
ugaccaaauggcaucauca

SEQ ID NO: 1772585 - RNA, 19 nt, Artificial Sequence
  Description of Artificial Sequence: Synthetic oligonucleotide
ucauagaucuugauguagc

SEQ ID NO: 1772586 - RNA, 19 nt, Artificial Sequence
  Description of Artificial Sequence: Synthetic oligonucleotide
aauacuaaggaugaauuuu

SEQ ID NO: 1772587 - RNA, 19 nt, Artificial Sequence
  Description of Artificial Sequence: Synthetic oligonucleotide
uccaguugcaauaucaaaa

SEQ ID NO: 1772588 - RNA, 19 nt, Artificial Sequence
  Description of Artificial Sequence: Synthetic oligonucleotide
agcaguaccaacgaccacc

SEQ ID NO: 1772589 - RNA, 19 nt, Artificial Sequence
  Description of Artificial Sequence: Synthetic oligonucleotide
cuaaggaugaauuuuccuc

SEQ ID NO: 1772590 - RNA, 19 nt, Artificial Sequence
  Description of Artificial Sequence: Synthetic oligonucleotide
aaauauugaugaucccauc

SEQ ID NO: 1772591 - RNA, 19 nt, Artificial Sequence
  Description of Artificial Sequence: Synthetic oligonucleotide
uguauuuuaagugugcuua

SEQ ID NO: 1772592 - RNA, 19 nt, Artificial Sequence
  Description of Artificial Sequence: Synthetic oligonucleotide
ugguguuuaaauugggcag

SEQ ID NO: 1772593 - RNA, 19 nt, Artificial Sequence
  Description of Artificial Sequence: Synthetic oligonucleotide
uuuugauccauuuccauua

SEQ ID NO: 1772594 - RNA, 19 nt, Artificial Sequence
  Description of Artificial Sequence: Synthetic oligonucleotide
uaaggaugaauuuuccucu

SEQ ID NO: 1772595 - RNA, 19 nt, Artificial Sequence
  Description of Artificial Sequence: Synthetic oligonucleotide
aucuaaaggccagacagcc

SEQ ID NO: 1772596 - RNA, 19 nt, Artificial Sequence
  Description of Artificial Sequence: Synthetic oligonucleotide
uuaaccaagaaugaagauc

SEQ ID NO: 1772597 - RNA, 19 nt, Artificial Sequence
  Description of Artificial Sequence: Synthetic oligonucleotide
aauacuguacugguugguc

SEQ ID NO: 1772598 - RNA, 19 nt, Artificial Sequence
  Description of Artificial Sequence: Synthetic oligonucleotide
uauaguguaucuacaaaau

SEQ ID NO: 1772599 - RNA, 19 nt, Artificial Sequence
  Description of Artificial Sequence: Synthetic oligonucleotide
caggcaacugaccaaaugg

SEQ ID NO: 1772600 - RNA, 19 nt, Artificial Sequence
  Description of Artificial Sequence: Synthetic oligonucleotide
uauuuacauuaaaauagga

SEQ ID NO: 1772601 - RNA, 19 nt, Artificial Sequence
  Description of Artificial Sequence: Synthetic oligonucleotide
uuauuauaguguaucuaca

SEQ ID NO: 1772602 - RNA, 19 nt, Artificial Sequence
  Description of Artificial Sequence: Synthetic oligonucleotide
acauuaaaauaggagcagc

SEQ ID NO: 1772603 - RNA, 19 nt, Artificial Sequence
  Description of Artificial Sequence: Synthetic oligonucleotide
guaucuacaaaauuuacua

SEQ ID NO: 1772604 - RNA, 19 nt, Artificial Sequence
  Description of Artificial Sequence: Synthetic oligonucleotide
ccaaauggcaucaucaugg

SEQ ID NO: 1772605 - RNA, 19 nt, Artificial Sequence
  Description of Artificial Sequence: Synthetic oligonucleotide
auaugcaauacuaaggaug

SEQ ID NO: 1772606 - RNA, 19 nt, Artificial Sequence
  Description of Artificial Sequence: Synthetic oligonucleotide
uuaaaauaggagcagcauu

SEQ ID NO: 1772607 - RNA, 19 nt, Artificial Sequence
  Description of Artificial Sequence: Synthetic oligonucleotide
uuuuacuccccaaaccuga

SEQ ID NO: 1772608 - RNA, 19 nt, Artificial Sequence
  Description of Artificial Sequence: Synthetic oligonucleotide
uauaugcuguauuuuaagu

SEQ ID NO: 1772609 - RNA, 19 nt, Artificial Sequence
  Description of Artificial Sequence: Synthetic oligonucleotide
uauuauaguguaucuacaa

SEQ ID NO: 1772610 - RNA, 19 nt, Artificial Sequence
  Description of Artificial Sequence: Synthetic oligonucleotide
cuugccauuuuccaagucc

SEQ ID NO: 1772611 - RNA, 19 nt, Artificial Sequence
  Description of Artificial Sequence: Synthetic oligonucleotide
aaacacuuauuauagugua

SEQ ID NO: 1772612 - RNA, 19 nt, Artificial Sequence
  Description of Artificial Sequence: Synthetic oligonucleotide
uggugaucaaagaaggugu

SEQ ID NO: 1772613 - RNA, 19 nt, Artificial Sequence
  Description of Artificial Sequence: Synthetic oligonucleotide
gaaugaagaucuaaaggcc

SEQ ID NO: 1772614 - RNA, 19 nt, Artificial Sequence
  Description of Artificial Sequence: Synthetic oligonucleotide
acacuuauuauaguguauc

SEQ ID NO: 1772615 - RNA, 19 nt, Artificial Sequence
  Description of Artificial Sequence: Synthetic oligonucleotide
auuuuaagugugcuuagga

SEQ ID NO: 1772616 - RNA, 19 nt, Artificial Sequence
  Description of Artificial Sequence: Synthetic oligonucleotide
ucuugcuugaagagaauac

SEQ ID NO: 1772617 - RNA, 19 nt, Artificial Sequence
  Description of Artificial Sequence: Synthetic oligonucleotide
uguggcauggcccggaaga

SEQ ID NO: 1772618 - RNA, 19 nt, Artificial Sequence
  Description of Artificial Sequence: Synthetic oligonucleotide
ggugcuugcauuaagaaug

SEQ ID NO: 1772619 - RNA, 19 nt, Artificial Sequence
  Description of Artificial Sequence: Synthetic oligonucleotide
cauccagagagcuggaugc

SEQ ID NO: 1772620 - RNA, 19 nt, Artificial Sequence
  Description of Artificial Sequence: Synthetic oligonucleotide
ugguccugcaucuauagac

SEQ ID NO: 1772621 - RNA, 19 nt, Artificial Sequence
  Description of Artificial Sequence: Synthetic oligonucleotide
uguacaucauagaucuuga

SEQ ID NO: 1772622 - RNA, 19 nt, Artificial Sequence
  Description of Artificial Sequence: Synthetic oligonucleotide
uuuccuuaaccaagaauga

SEQ ID NO: 1772623 - RNA, 19 nt, Artificial Sequence
  Description of Artificial Sequence: Synthetic oligonucleotide
aauaggagcagcauuucca

SEQ ID NO: 1772624 - RNA, 19 nt, Artificial Sequence
  Description of Artificial Sequence: Synthetic oligonucleotide
uacauuaaaauaggagcag

SEQ ID NO: 1772625 - RNA, 19 nt, Artificial Sequence
  Description of Artificial Sequence: Synthetic oligonucleotide
ugaucaacccugcauacuc

SEQ ID NO: 1772626 - RNA, 19 nt, Artificial Sequence
  Description of Artificial Sequence: Synthetic oligonucleotide
ucaugaucaacccugcaua

SEQ ID NO: 1772627 - RNA, 19 nt, Artificial Sequence
  Description of Artificial Sequence: Synthetic oligonucleotide
agaauacuguacugguugg

SEQ ID NO: 1772628 - RNA, 19 nt, Artificial Sequence
  Description of Artificial Sequence: Synthetic oligonucleotide
uccucuaguguccaaagaa

SEQ ID NO: 1772629 - RNA, 19 nt, Artificial Sequence
  Description of Artificial Sequence: Synthetic oligonucleotide
aacaggaaacacuuauuau

SEQ ID NO: 1772630 - RNA, 19 nt, Artificial Sequence
  Description of Artificial Sequence: Synthetic oligonucleotide
aaugggaaggguguggcug

SEQ ID NO: 1772631 - RNA, 19 nt, Artificial Sequence
  Description of Artificial Sequence: Synthetic oligonucleotide
agguauuucccaucaggac

SEQ ID NO: 1772632 - RNA, 19 nt, Artificial Sequence
  Description of Artificial Sequence: Synthetic oligonucleotide
ugcuugaagagaauacugu

SEQ ID NO: 1772633 - RNA, 19 nt, Artificial Sequence
  Description of Artificial Sequence: Synthetic oligonucleotide
ugggcagucauagacauga

SEQ ID NO: 1772634 - RNA, 19 nt, Artificial Sequence
  Description of Artificial Sequence: Synthetic oligonucleotide
uauuuuaagugugcuuagg

SEQ ID NO: 1772635 - RNA, 19 nt, Artificial Sequence
  Description of Artificial Sequence: Synthetic oligonucleotide
acguucagcacccaggaug

SEQ ID NO: 1772636 - RNA, 19 nt, Artificial Sequence
  Description of Artificial Sequence: Synthetic oligonucleotide
caaagugagugucaucagg

SEQ ID NO: 1772637 - RNA, 19 nt, Artificial Sequence
  Description of Artificial Sequence: Synthetic oligonucleotide
uacucuguggcauggcccg

SEQ ID NO: 1772638 - RNA, 19 nt, Artificial Sequence
  Description of Artificial Sequence: Synthetic oligonucleotide
ugcguggccacucagugug

SEQ ID NO: 1772639 - RNA, 19 nt, Artificial Sequence
  Description of Artificial Sequence: Synthetic oligonucleotide
aaagugagugucaucagga

SEQ ID NO: 1772640 - RNA, 19 nt, Artificial Sequence
  Description of Artificial Sequence: Synthetic oligonucleotide
ucuaguguccaaagaauau

SEQ ID NO: 1772641 - RNA, 19 nt, Artificial Sequence
  Description of Artificial Sequence: Synthetic oligonucleotide
cacaguuucaguguuuugc

SEQ ID NO: 1772642 - RNA, 19 nt, Artificial Sequence
  Description of Artificial Sequence: Synthetic oligonucleotide
auuauaguguaucuacaaa

SEQ ID NO: 1772643 - RNA, 19 nt, Artificial Sequence
  Description of Artificial Sequence: Synthetic oligonucleotide
gaauuuccuggucaucucc

SEQ ID NO: 1772644 - RNA, 19 nt, Artificial Sequence
  Description of Artificial Sequence: Synthetic oligonucleotide
ucaggggaaaaggucaagg

SEQ ID NO: 1772645 - RNA, 19 nt, Artificial Sequence
  Description of Artificial Sequence: Synthetic oligonucleotide
uuuaaauugggcagucaua

SEQ ID NO: 1772646 - RNA, 19 nt, Artificial Sequence
  Description of Artificial Sequence: Synthetic oligonucleotide
cuuguucuugcuugaagag

SEQ ID NO: 1772647 - RNA, 19 nt, Artificial Sequence
  Description of Artificial Sequence: Synthetic oligonucleotide
cauagaucuugauguagcc

SEQ ID NO: 1772648 - RNA, 19 nt, Artificial Sequence
  Description of Artificial Sequence: Synthetic oligonucleotide
ucauagacaugaauuuccu

SEQ ID NO: 1772649 - RNA, 19 nt, Artificial Sequence
  Description of Artificial Sequence: Synthetic oligonucleotide
gacaugaauuuccugguca

SEQ ID NO: 1772650 - RNA, 19 nt, Artificial Sequence
  Description of Artificial Sequence: Synthetic oligonucleotide
uacuaaggaugaauuuucc

SEQ ID NO: 1772651 - RNA, 19 nt, Artificial Sequence
  Description of Artificial Sequence: Synthetic oligonucleotide
acacuuuugucagaugaac

SEQ ID NO: 1772652 - RNA, 19 nt, Artificial Sequence
  Description of Artificial Sequence: Synthetic oligonucleotide
gucauagacaugaauuucc

SEQ ID NO: 1772653 - RNA, 19 nt, Artificial Sequence
  Description of Artificial Sequence: Synthetic oligonucleotide
aaccuucacuaggucaucc

SEQ ID NO: 1772654 - RNA, 19 nt, Artificial Sequence
  Description of Artificial Sequence: Synthetic oligonucleotide
aacgcgacguucagcaccc

SEQ ID NO: 1772655 - RNA, 19 nt, Artificial Sequence
  Description of Artificial Sequence: Synthetic oligonucleotide
aucgcauggccuuccagcg

SEQ ID NO: 1772656 - RNA, 19 nt, Artificial Sequence
  Description of Artificial Sequence: Synthetic oligonucleotide
gacgaauaugagcauccag

SEQ ID NO: 1772657 - RNA, 19 nt, Artificial Sequence
  Description of Artificial Sequence: Synthetic oligonucleotide
ugaucaaagaaggugugaa

SEQ ID NO: 1772658 - RNA, 19 nt, Artificial Sequence
  Description of Artificial Sequence: Synthetic oligonucleotide
acuaaggaugaauuuuccu

SEQ ID NO: 1772659 - RNA, 19 nt, Artificial Sequence
  Description of Artificial Sequence: Synthetic oligonucleotide
gcaucuauagacuugaucu

SEQ ID NO: 1772660 - RNA, 19 nt, Artificial Sequence
  Description of Artificial Sequence: Synthetic oligonucleotide
ugcuguauuuuaagugugc

SEQ ID NO: 1772661 - RNA, 19 nt, Artificial Sequence
  Description of Artificial Sequence: Synthetic oligonucleotide
uuacuacaauauaugcugu

SEQ ID NO: 1772662 - RNA, 19 nt, Artificial Sequence
  Description of Artificial Sequence: Synthetic oligonucleotide
gaacgcgacguucagcacc

SEQ ID NO: 1772663 - RNA, 19 nt, Artificial Sequence
  Description of Artificial Sequence: Synthetic oligonucleotide
ugcaucuauagacuugauc

SEQ ID NO: 1772664 - RNA, 19 nt, Artificial Sequence
  Description of Artificial Sequence: Synthetic oligonucleotide
uuccaaaccuucacuaggu

SEQ ID NO: 1772665 - RNA, 19 nt, Artificial Sequence
  Description of Artificial Sequence: Synthetic oligonucleotide
auguuguacaucauagauc

SEQ ID NO: 1772666 - RNA, 19 nt, Artificial Sequence
  Description of Artificial Sequence: Synthetic oligonucleotide
gagacgaauaugagcaucc

SEQ ID NO: 1772667 - RNA, 19 nt, Artificial Sequence
  Description of Artificial Sequence: Synthetic oligonucleotide
acgaauaugagcauccaga

SEQ ID NO: 1772668 - RNA, 19 nt, Artificial Sequence
  Description of Artificial Sequence: Synthetic oligonucleotide
gucaucugaagcugugacg

SEQ ID NO: 1772669 - RNA, 19 nt, Artificial Sequence
  Description of Artificial Sequence: Synthetic oligonucleotide
gaugcguggccacucagug

SEQ ID NO: 1772670 - RNA, 19 nt, Artificial Sequence
  Description of Artificial Sequence: Synthetic oligonucleotide
aaccugauccuggugauca

SEQ ID NO: 1772671 - RNA, 19 nt, Artificial Sequence
  Description of Artificial Sequence: Synthetic oligonucleotide
uuccaagucccagagacga

SEQ ID NO: 1772672 - RNA, 19 nt, Artificial Sequence
  Description of Artificial Sequence: Synthetic oligonucleotide
uauaugcaauacuaaggau

SEQ ID NO: 1772673 - RNA, 19 nt, Artificial Sequence
  Description of Artificial Sequence: Synthetic oligonucleotide
acgaccaccauacccaacu

SEQ ID NO: 1772674 - RNA, 19 nt, Artificial Sequence
  Description of Artificial Sequence: Synthetic oligonucleotide
cugguguuuaaauugggca

SEQ ID NO: 1772675 - RNA, 19 nt, Artificial Sequence
  Description of Artificial Sequence: Synthetic oligonucleotide
aucaggacagaacgcgacg

SEQ ID NO: 1772676 - RNA, 19 nt, Artificial Sequence
  Description of Artificial Sequence: Synthetic oligonucleotide
aguaccaacgaccaccaua

SEQ ID NO: 1772677 - RNA, 19 nt, Artificial Sequence
  Description of Artificial Sequence: Synthetic oligonucleotide
cuggugaucaaagaaggug

SEQ ID NO: 1772678 - RNA, 19 nt, Artificial Sequence
  Description of Artificial Sequence: Synthetic oligonucleotide
ugcagaagcuuuccaguug

SEQ ID NO: 1772679 - RNA, 19 nt, Artificial Sequence
  Description of Artificial Sequence: Synthetic oligonucleotide
agagacgaauaugagcauc

SEQ ID NO: 1772680 - RNA, 19 nt, Artificial Sequence
  Description of Artificial Sequence: Synthetic oligonucleotide
aggucaaggagcgaauggg

SEQ ID NO: 1772681 - RNA, 19 nt, Artificial Sequence
  Description of Artificial Sequence: Synthetic oligonucleotide
ugcugguguuuaaauuggg

SEQ ID NO: 1772682 - RNA, 19 nt, Artificial Sequence
  Description of Artificial Sequence: Synthetic oligonucleotide
guaccaacgaccaccauac

SEQ ID NO: 1772683 - RNA, 19 nt, Artificial Sequence
  Description of Artificial Sequence: Synthetic oligonucleotide
caucuauagacuugaucug

SEQ ID NO: 1772684 - RNA, 19 nt, Artificial Sequence
  Description of Artificial Sequence: Synthetic oligonucleotide
agacaugaauuuccugguc

SEQ ID NO: 1772685 - RNA, 19 nt, Artificial Sequence
  Description of Artificial Sequence: Synthetic oligonucleotide
aucauagaucuugauguag

SEQ ID NO: 1772686 - RNA, 19 nt, Artificial Sequence
  Description of Artificial Sequence: Synthetic oligonucleotide
agguccuuguuccaacauc

SEQ ID NO: 1772687 - RNA, 19 nt, Artificial Sequence
  Description of Artificial Sequence: Synthetic oligonucleotide
uccuuguuccaacauccca

SEQ ID NO: 1772688 - RNA, 19 nt, Artificial Sequence
  Description of Artificial Sequence: Synthetic oligonucleotide
aaaggucaaggagcgaaug

SEQ ID NO: 1772689 - RNA, 19 nt, Artificial Sequence
  Description of Artificial Sequence: Synthetic oligonucleotide
acugguccugcaucuauag

SEQ ID NO: 1772690 - RNA, 19 nt, Artificial Sequence
  Description of Artificial Sequence: Synthetic oligonucleotide
guacugguuggucauuucc

SEQ ID NO: 1772691 - RNA, 19 nt, Artificial Sequence
  Description of Artificial Sequence: Synthetic oligonucleotide
aucccaaaccuuuacacuu

SEQ ID NO: 1772692 - RNA, 19 nt, Artificial Sequence
  Description of Artificial Sequence: Synthetic oligonucleotide
ucagcacccaggaugcgug

SEQ ID NO: 1772693 - RNA, 19 nt, Artificial Sequence
  Description of Artificial Sequence: Synthetic oligonucleotide
guuggucauuuccuuaacc

SEQ ID NO: 1772694 - RNA, 19 nt, Artificial Sequence
  Description of Artificial Sequence: Synthetic oligonucleotide
uacacuuuugucagaugaa

SEQ ID NO: 1772695 - RNA, 19 nt, Artificial Sequence
  Description of Artificial Sequence: Synthetic oligonucleotide
ugcauuaagaaugcuuuau

SEQ ID NO: 1772696 - RNA, 19 nt, Artificial Sequence
  Description of Artificial Sequence: Synthetic oligonucleotide
ccagagacgaauaugagca

SEQ ID NO: 1772697 - RNA, 19 nt, Artificial Sequence
  Description of Artificial Sequence: Synthetic oligonucleotide
auugggcagucauagacau

SEQ ID NO: 1772698 - RNA, 19 nt, Artificial Sequence
  Description of Artificial Sequence: Synthetic oligonucleotide
acccugcauacucuguggc

SEQ ID NO: 1772699 - RNA, 19 nt, Artificial Sequence
  Description of Artificial Sequence: Synthetic oligonucleotide
cugauccuggugaucaaag

SEQ ID NO: 1772700 - RNA, 19 nt, Artificial Sequence
  Description of Artificial Sequence: Synthetic oligonucleotide
gaaugggcaucgcauggcc

SEQ ID NO: 1772701 - RNA, 19 nt, Artificial Sequence
  Description of Artificial Sequence: Synthetic oligonucleotide
aggacuauaugcaauacua

SEQ ID NO: 1772702 - RNA, 19 nt, Artificial Sequence
  Description of Artificial Sequence: Synthetic oligonucleotide
uggucauuuccuuaaccaa

SEQ ID NO: 1772703 - RNA, 19 nt, Artificial Sequence
  Description of Artificial Sequence: Synthetic oligonucleotide
caugaucaacccugcauac

SEQ ID NO: 1772704 - RNA, 19 nt, Artificial Sequence
  Description of Artificial Sequence: Synthetic oligonucleotide
ucaucaggacagaacgcga

SEQ ID NO: 1772705 - RNA, 19 nt, Artificial Sequence
  Description of Artificial Sequence: Synthetic oligonucleotide
aucugaagcugugacgagg

SEQ ID NO: 1772706 - RNA, 19 nt, Artificial Sequence
  Description of Artificial Sequence: Synthetic oligonucleotide
ucaucaugccauuuccaaa

SEQ ID NO: 1772707 - RNA, 19 nt, Artificial Sequence
  Description of Artificial Sequence: Synthetic oligonucleotide
gaaggugugaacacagguc

SEQ ID NO: 1772708 - RNA, 19 nt, Artificial Sequence
  Description of Artificial Sequence: Synthetic oligonucleotide
cugauguccacugacacca

SEQ ID NO: 1772709 - RNA, 19 nt, Artificial Sequence
  Description of Artificial Sequence: Synthetic oligonucleotide
ucaugccauuuccaaaccu

SEQ ID NO: 1772710 - RNA, 19 nt, Artificial Sequence
  Description of Artificial Sequence: Synthetic oligonucleotide
gaauaugagcauccagaga

SEQ ID NO: 1772711 - RNA, 19 nt, Artificial Sequence
  Description of Artificial Sequence: Synthetic oligonucleotide
gaaacacuuauuauagugu

SEQ ID NO: 1772712 - RNA, 19 nt, Artificial Sequence
  Description of Artificial Sequence: Synthetic oligonucleotide
ggcauguuguacaucauag

SEQ ID NO: 1772713 - RNA, 19 nt, Artificial Sequence
  Description of Artificial Sequence: Synthetic oligonucleotide
gaucuaaaggccagacagc

SEQ ID NO: 1772714 - RNA, 19 nt, Artificial Sequence
  Description of Artificial Sequence: Synthetic oligonucleotide
auaggagcagcauuuccaa

SEQ ID NO: 1772715 - RNA, 19 nt, Artificial Sequence
  Description of Artificial Sequence: Synthetic oligonucleotide
aauuuccuggucaucucca

SEQ ID NO: 1772716 - RNA, 19 nt, Artificial Sequence
  Description of Artificial Sequence: Synthetic oligonucleotide
ggggaaaaggucaaggagc

SEQ ID NO: 1772717 - RNA, 19 nt, Artificial Sequence
  Description of Artificial Sequence: Synthetic oligonucleotide
aucaggacuauaugcaaua

SEQ ID NO: 1772718 - RNA, 19 nt, Artificial Sequence
  Description of Artificial Sequence: Synthetic oligonucleotide
acuacaauauaugcuguau

SEQ ID NO: 1772719 - RNA, 19 nt, Artificial Sequence
  Description of Artificial Sequence: Synthetic oligonucleotide
agcugugacgaggagcugg

SEQ ID NO: 1772720 - RNA, 19 nt, Artificial Sequence
  Description of Artificial Sequence: Synthetic oligonucleotide
aacugaccaaauggcauca

SEQ ID NO: 1772721 - RNA, 19 nt, Artificial Sequence
  Description of Artificial Sequence: Synthetic oligonucleotide
aucaacccugcauacucug

SEQ ID NO: 1772722 - RNA, 19 nt, Artificial Sequence
  Description of Artificial Sequence: Synthetic oligonucleotide
cauuuccaauaaaacagga

SEQ ID NO: 1772723 - RNA, 19 nt, Artificial Sequence
  Description of Artificial Sequence: Synthetic oligonucleotide
acuuuccccacgugaguuc

SEQ ID NO: 1772724 - RNA, 19 nt, Artificial Sequence
  Description of Artificial Sequence: Synthetic oligonucleotide
ugaugucccuccaggcucc

SEQ ID NO: 1772725 - RNA, 19 nt, Artificial Sequence
  Description of Artificial Sequence: Synthetic oligonucleotide
caucaggacagaacgcgac

SEQ ID NO: 1772726 - RNA, 19 nt, Artificial Sequence
  Description of Artificial Sequence: Synthetic oligonucleotide
agcgaaugggcaucgcaug

SEQ ID NO: 1772727 - RNA, 19 nt, Artificial Sequence
  Description of Artificial Sequence: Synthetic oligonucleotide
aaguuggcauguuguacau

SEQ ID NO: 1772728 - RNA, 19 nt, Artificial Sequence
  Description of Artificial Sequence: Synthetic oligonucleotide
agacaaagugagugucauc

SEQ ID NO: 1772729 - RNA, 19 nt, Artificial Sequence
  Description of Artificial Sequence: Synthetic oligonucleotide
uccagcguaugcagaagcu

SEQ ID NO: 1772730 - RNA, 19 nt, Artificial Sequence
  Description of Artificial Sequence: Synthetic oligonucleotide
uacuacaauauaugcugua

SEQ ID NO: 1772731 - RNA, 19 nt, Artificial Sequence
  Description of Artificial Sequence: Synthetic oligonucleotide
aggacagaacgcgacguuc

SEQ ID NO: 1772732 - RNA, 19 nt, Artificial Sequence
  Description of Artificial Sequence: Synthetic oligonucleotide
auuuuacuccccaaaccug

SEQ ID NO: 1772733 - RNA, 19 nt, Artificial Sequence
  Description of Artificial Sequence: Synthetic oligonucleotide
guuuaaauugggcagucau

SEQ ID NO: 1772734 - RNA, 19 nt, Artificial Sequence
  Description of Artificial Sequence: Synthetic oligonucleotide
ugaauuuccuggucaucuc

SEQ ID NO: 1772735 - RNA, 19 nt, Artificial Sequence
  Description of Artificial Sequence: Synthetic oligonucleotide
acuuauuauaguguaucua

SEQ ID NO: 1772736 - RNA, 19 nt, Artificial Sequence
  Description of Artificial Sequence: Synthetic oligonucleotide
aaggagcgaaugggcaucg

SEQ ID NO: 1772737 - RNA, 19 nt, Artificial Sequence
  Description of Artificial Sequence: Synthetic oligonucleotide
aacacuuauuauaguguau

SEQ ID NO: 1772738 - RNA, 19 nt, Artificial Sequence
  Description of Artificial Sequence: Synthetic oligonucleotide
aucuauggcuccgcuggcc

SEQ ID NO: 1772739 - RNA, 19 nt, Artificial Sequence
  Description of Artificial Sequence: Synthetic oligonucleotide
cauuuccaaaccuucacua

SEQ ID NO: 1772740 - RNA, 19 nt, Artificial Sequence
  Description of Artificial Sequence: Synthetic oligonucleotide
ugaagaucuaaaggccaga

SEQ ID NO: 1772741 - RNA, 19 nt, Artificial Sequence
  Description of Artificial Sequence: Synthetic oligonucleotide
uacuguacugguuggucau

SEQ ID NO: 1772742 - RNA, 19 nt, Artificial Sequence
  Description of Artificial Sequence: Synthetic oligonucleotide
augucaugaucaacccugc

SEQ ID NO: 1772743 - RNA, 19 nt, Artificial Sequence
  Description of Artificial Sequence: Synthetic oligonucleotide
ucaggacagaacgcgacgu

SEQ ID NO: 1772744 - RNA, 19 nt, Artificial Sequence
  Description of Artificial Sequence: Synthetic oligonucleotide
ugucaugaucaacccugca

SEQ ID NO: 1772745 - RNA, 19 nt, Artificial Sequence
  Description of Artificial Sequence: Synthetic oligonucleotide
uguuuaaauugggcaguca

SEQ ID NO: 1772746 - RNA, 19 nt, Artificial Sequence
  Description of Artificial Sequence: Synthetic oligonucleotide
acuaggucauccagggauc

SEQ ID NO: 1772747 - RNA, 19 nt, Artificial Sequence
  Description of Artificial Sequence: Synthetic oligonucleotide
agggagcaguaccaacgac

SEQ ID NO: 1772748 - RNA, 19 nt, Artificial Sequence
  Description of Artificial Sequence: Synthetic oligonucleotide
ucacccgucuccccguccc

SEQ ID NO: 1772749 - RNA, 19 nt, Artificial Sequence
  Description of Artificial Sequence: Synthetic oligonucleotide
accauacccaacugcccag

SEQ ID NO: 1772750 - RNA, 19 nt, Artificial Sequence
  Description of Artificial Sequence: Synthetic oligonucleotide
uucuugcuugaagagaaua

SEQ ID NO: 1772751 - RNA, 19 nt, Artificial Sequence
  Description of Artificial Sequence: Synthetic oligonucleotide
gguaaggaaugucaugauc

SEQ ID NO: 1772752 - RNA, 19 nt, Artificial Sequence
  Description of Artificial Sequence: Synthetic oligonucleotide
caacccugcauacucugug

SEQ ID NO: 1772753 - RNA, 19 nt, Artificial Sequence
  Description of Artificial Sequence: Synthetic oligonucleotide
agaacgcgacguucagcac

SEQ ID NO: 1772754 - RNA, 19 nt, Artificial Sequence
  Description of Artificial Sequence: Synthetic oligonucleotide
uuuacuccccaaaccugau

SEQ ID NO: 1772755 - RNA, 19 nt, Artificial Sequence
  Description of Artificial Sequence: Synthetic oligonucleotide
ucaggacuauaugcaauac

SEQ ID NO: 1772756 - RNA, 19 nt, Artificial Sequence
  Description of Artificial Sequence: Synthetic oligonucleotide
cucaucaugccauuuccaa

SEQ ID NO: 1772757 - RNA, 19 nt, Artificial Sequence
  Description of Artificial Sequence: Synthetic oligonucleotide
aaaaggucaaggagcgaau

SEQ ID NO: 1772758 - RNA, 19 nt, Artificial Sequence
  Description of Artificial Sequence: Synthetic oligonucleotide
accaagaaugaagaucuaa

SEQ ID NO: 1772759 - RNA, 19 nt, Artificial Sequence
  Description of Artificial Sequence: Synthetic oligonucleotide
caacaucccaaaccuuuac

SEQ ID NO: 1772760 - RNA, 19 nt, Artificial Sequence
  Description of Artificial Sequence: Synthetic oligonucleotide
ccuuaaccaagaaugaaga

SEQ ID NO: 1772761 - RNA, 19 nt, Artificial Sequence
  Description of Artificial Sequence: Synthetic oligonucleotide
agucccagagacgaauaug

SEQ ID NO: 1772762 - RNA, 19 nt, Artificial Sequence
  Description of Artificial Sequence: Synthetic oligonucleotide
guguaucuacaaaauuuac

SEQ ID NO: 1772763 - RNA, 19 nt, Artificial Sequence
  Description of Artificial Sequence: Synthetic oligonucleotide
cuuuccccacgugaguucc

SEQ ID NO: 1772764 - RNA, 19 nt, Artificial Sequence
  Description of Artificial Sequence: Synthetic oligonucleotide
cauuaagaaugcuuuauuu

SEQ ID NO: 1772765 - RNA, 19 nt, Artificial Sequence
  Description of Artificial Sequence: Synthetic oligonucleotide
uguggcugauguccacuga

SEQ ID NO: 1772766 - RNA, 19 nt, Artificial Sequence
  Description of Artificial Sequence: Synthetic oligonucleotide
ugccauuuuccaaguccca

SEQ ID NO: 1772767 - RNA, 19 nt, Artificial Sequence
  Description of Artificial Sequence: Synthetic oligonucleotide
cgaauaugagcauccagag

SEQ ID NO: 1772768 - RNA, 19 nt, Artificial Sequence
  Description of Artificial Sequence: Synthetic oligonucleotide
cugaccaaauggcaucauc

SEQ ID NO: 1772769 - RNA, 19 nt, Artificial Sequence
  Description of Artificial Sequence: Synthetic oligonucleotide
uccaggcguccacuggucc

SEQ ID NO: 1772770 - RNA, 19 nt, Artificial Sequence
  Description of Artificial Sequence: Synthetic oligonucleotide
gggagcaguaccaacgacc

SEQ ID NO: 1772771 - RNA, 19 nt, Artificial Sequence
  Description of Artificial Sequence: Synthetic oligonucleotide
ucccacuuuccacaccaaa

SEQ ID NO: 1772772 - RNA, 19 nt, Artificial Sequence
  Description of Artificial Sequence: Synthetic oligonucleotide
uccccgucccggcagggag

SEQ ID NO: 1772773 - RNA, 19 nt, Artificial Sequence
  Description of Artificial Sequence: Synthetic oligonucleotide
uguacugguuggucauuuc

SEQ ID NO: 1772774 - RNA, 19 nt, Artificial Sequence
  Description of Artificial Sequence: Synthetic oligonucleotide
agcguaugcagaagcuuuc

SEQ ID NO: 1772775 - RNA, 19 nt, Artificial Sequence
  Description of Artificial Sequence: Synthetic oligonucleotide
uucagcacccaggaugcgu

SEQ ID NO: 1772776 - RNA, 19 nt, Artificial Sequence
  Description of Artificial Sequence: Synthetic oligonucleotide
uuacuccccaaaccugauc

SEQ ID NO: 1772777 - RNA, 19 nt, Artificial Sequence
  Description of Artificial Sequence: Synthetic oligonucleotide
caaaccuucacuaggucau

SEQ ID NO: 1772778 - RNA, 19 nt, Artificial Sequence
  Description of Artificial Sequence: Synthetic oligonucleotide
cuaggucauccagggaucc

SEQ ID NO: 1772779 - RNA, 19 nt, Artificial Sequence
  Description of Artificial Sequence: Synthetic oligonucleotide
ugcugucgcggccuccaag

SEQ ID NO: 1772780 - RNA, 19 nt, Artificial Sequence
  Description of Artificial Sequence: Synthetic oligonucleotide
gaaugucaugaucaacccu

SEQ ID NO: 1772781 - RNA, 19 nt, Artificial Sequence
  Description of Artificial Sequence: Synthetic oligonucleotide
ugucgcggccuccaagccu

SEQ ID NO: 1772782 - RNA, 19 nt, Artificial Sequence
  Description of Artificial Sequence: Synthetic oligonucleotide
acagguccuuguuccaaca

SEQ ID NO: 1772783 - RNA, 19 nt, Artificial Sequence
  Description of Artificial Sequence: Synthetic oligonucleotide
gcgaaugggcaucgcaugg

SEQ ID NO: 1772784 - RNA, 19 nt, Artificial Sequence
  Description of Artificial Sequence: Synthetic oligonucleotide
ugggcuuguucuugcuuga

SEQ ID NO: 1772785 - RNA, 19 nt, Artificial Sequence
  Description of Artificial Sequence: Synthetic oligonucleotide
ucccaaaccuuuacacuuu

SEQ ID NO: 1772786 - RNA, 19 nt, Artificial Sequence
  Description of Artificial Sequence: Synthetic oligonucleotide
aacgaccaccauacccaac

SEQ ID NO: 1772787 - RNA, 19 nt, Artificial Sequence
  Description of Artificial Sequence: Synthetic oligonucleotide
cacgugaguuccuguggcc

SEQ ID NO: 1772788 - RNA, 19 nt, Artificial Sequence
  Description of Artificial Sequence: Synthetic oligonucleotide
aaugggcaucgcauggccu

SEQ ID NO: 1772789 - RNA, 19 nt, Artificial Sequence
  Description of Artificial Sequence: Synthetic oligonucleotide
ucacuaggucauccaggga

SEQ ID NO: 1772790 - RNA, 19 nt, Artificial Sequence
  Description of Artificial Sequence: Synthetic oligonucleotide
uagccgucaucugaagcug

SEQ ID NO: 1772791 - RNA, 19 nt, Artificial Sequence
  Description of Artificial Sequence: Synthetic oligonucleotide
cuccaagccucccuuguuc

SEQ ID NO: 1772792 - RNA, 19 nt, Artificial Sequence
  Description of Artificial Sequence: Synthetic oligonucleotide
agccaaguuggcauguugu

SEQ ID NO: 1772793 - RNA, 19 nt, Artificial Sequence
  Description of Artificial Sequence: Synthetic oligonucleotide
ccaacgaccaccauaccca

SEQ ID NO: 1772794 - RNA, 19 nt, Artificial Sequence
  Description of Artificial Sequence: Synthetic oligonucleotide
aucccaucuauggcuccgc

SEQ ID NO: 1772795 - RNA, 19 nt, Artificial Sequence
  Description of Artificial Sequence: Synthetic oligonucleotide
ccaagaaugaagaucuaaa

SEQ ID NO: 1772796 - RNA, 19 nt, Artificial Sequence
  Description of Artificial Sequence: Synthetic oligonucleotide
caccauacccaacugccca

SEQ ID NO: 1772797 - RNA, 19 nt, Artificial Sequence
  Description of Artificial Sequence: Synthetic oligonucleotide
gucaugaucaacccugcau

SEQ ID NO: 1772798 - RNA, 19 nt, Artificial Sequence
  Description of Artificial Sequence: Synthetic oligonucleotide
gugcuuaggaggguaagga

SEQ ID NO: 1772799 - RNA, 19 nt, Artificial Sequence
  Description of Artificial Sequence: Synthetic oligonucleotide
auguagccgucaucugaag

SEQ ID NO: 1772800 - RNA, 19 nt, Artificial Sequence
  Description of Artificial Sequence: Synthetic oligonucleotide
cacuaggucauccagggau

SEQ ID NO: 1772801 - RNA, 19 nt, Artificial Sequence
  Description of Artificial Sequence: Synthetic oligonucleotide
uggccagauacugggaguc

SEQ ID NO: 1772802 - RNA, 19 nt, Artificial Sequence
  Description of Artificial Sequence: Synthetic oligonucleotide
aaggccagacagcccugcu

SEQ ID NO: 1772803 - RNA, 19 nt, Artificial Sequence
  Description of Artificial Sequence: Synthetic oligonucleotide
agaagcuuuccaguugcaa

SEQ ID NO: 1772804 - RNA, 19 nt, Artificial Sequence
  Description of Artificial Sequence: Synthetic oligonucleotide
aagugugcuuaggagggua

SEQ ID NO: 1772805 - RNA, 19 nt, Artificial Sequence
  Description of Artificial Sequence: Synthetic oligonucleotide
gccauuuccaaaccuucac

SEQ ID NO: 1772806 - RNA, 19 nt, Artificial Sequence
  Description of Artificial Sequence: Synthetic oligonucleotide
aguuggcauguuguacauc

SEQ ID NO: 1772807 - RNA, 19 nt, Artificial Sequence
  Description of Artificial Sequence: Synthetic oligonucleotide
ucaugggcuuguucuugcu

SEQ ID NO: 1772808 - RNA, 19 nt, Artificial Sequence
  Description of Artificial Sequence: Synthetic oligonucleotide
augaucaacccugcauacu

SEQ ID NO: 1772809 - RNA, 19 nt, Artificial Sequence
  Description of Artificial Sequence: Synthetic oligonucleotide
aggaugcguggccacucag

SEQ ID NO: 1772810 - RNA, 19 nt, Artificial Sequence
  Description of Artificial Sequence: Synthetic oligonucleotide
ugacgaggagcugggaguc

SEQ ID NO: 1772811 - RNA, 19 nt, Artificial Sequence
  Description of Artificial Sequence: Synthetic oligonucleotide
gcugguguuuaaauugggc

SEQ ID NO: 1772812 - RNA, 19 nt, Artificial Sequence
  Description of Artificial Sequence: Synthetic oligonucleotide
cacuuauuauaguguaucu

SEQ ID NO: 1772813 - RNA, 19 nt, Artificial Sequence
  Description of Artificial Sequence: Synthetic oligonucleotide
ggugaucaaagaaggugug

SEQ ID NO: 1772814 - RNA, 19 nt, Artificial Sequence
  Description of Artificial Sequence: Synthetic oligonucleotide
caaggagcgaaugggcauc

SEQ ID NO: 1772815 - RNA, 19 nt, Artificial Sequence
  Description of Artificial Sequence: Synthetic oligonucleotide
ccuucacuaggucauccag

SEQ ID NO: 1772816 - RNA, 19 nt, Artificial Sequence
  Description of Artificial Sequence: Synthetic oligonucleotide
ggagcaguaccaacgacca

SEQ ID NO: 1772817 - RNA, 19 nt, Artificial Sequence
  Description of Artificial Sequence: Synthetic oligonucleotide
ggucaaggagcgaaugggc

SEQ ID NO: 1772818 - RNA, 19 nt, Artificial Sequence
  Description of Artificial Sequence: Synthetic oligonucleotide
acgaggagcugggagucag

SEQ ID NO: 1772819 - RNA, 19 nt, Artificial Sequence
  Description of Artificial Sequence: Synthetic oligonucleotide
gaugaacuggagacaaagu

SEQ ID NO: 1772820 - RNA, 19 nt, Artificial Sequence
  Description of Artificial Sequence: Synthetic oligonucleotide
ccagugaccacaguuucag

SEQ ID NO: 1772821 - RNA, 19 nt, Artificial Sequence
  Description of Artificial Sequence: Synthetic oligonucleotide
acgugaguuccuguggcca

SEQ ID NO: 1772822 - RNA, 19 nt, Artificial Sequence
  Description of Artificial Sequence: Synthetic oligonucleotide
gugaucaaagaagguguga

SEQ ID NO: 1772823 - RNA, 19 nt, Artificial Sequence
  Description of Artificial Sequence: Synthetic oligonucleotide
uaggaggguaaggaauguc

SEQ ID NO: 1772824 - RNA, 19 nt, Artificial Sequence
  Description of Artificial Sequence: Synthetic oligonucleotide
caggugcuugcauuaagaa

SEQ ID NO: 1772825 - RNA, 19 nt, Artificial Sequence
  Description of Artificial Sequence: Synthetic oligonucleotide
auccagggauccagugacc

SEQ ID NO: 1772826 - RNA, 19 nt, Artificial Sequence
  Description of Artificial Sequence: Synthetic oligonucleotide
cacucagugugccagccaa

SEQ ID NO: 1772827 - RNA, 19 nt, Artificial Sequence
  Description of Artificial Sequence: Synthetic oligonucleotide
uccaagucccagagacgaa

SEQ ID NO: 1772828 - RNA, 19 nt, Artificial Sequence
  Description of Artificial Sequence: Synthetic oligonucleotide
agacgaauaugagcaucca

SEQ ID NO: 1772829 - RNA, 19 nt, Artificial Sequence
  Description of Artificial Sequence: Synthetic oligonucleotide
cagggauccagugaccaca

SEQ ID NO: 1772830 - RNA, 19 nt, Artificial Sequence
  Description of Artificial Sequence: Synthetic oligonucleotide
uaccaacgaccaccauacc

SEQ ID NO: 1772831 - RNA, 19 nt, Artificial Sequence
  Description of Artificial Sequence: Synthetic oligonucleotide
uaagugugcuuaggagggu

SEQ ID NO: 1772832 - RNA, 19 nt, Artificial Sequence
  Description of Artificial Sequence: Synthetic oligonucleotide
gugugcuuaggaggguaag

SEQ ID NO: 1772833 - RNA, 19 nt, Artificial Sequence
  Description of Artificial Sequence: Synthetic oligonucleotide
gcauguuguacaucauaga

SEQ ID NO: 1772834 - RNA, 19 nt, Artificial Sequence
  Description of Artificial Sequence: Synthetic oligonucleotide
gcgacguucagcacccagg

SEQ ID NO: 1772835 - RNA, 19 nt, Artificial Sequence
  Description of Artificial Sequence: Synthetic oligonucleotide
cuuaaccaagaaugaagau

SEQ ID NO: 1772836 - RNA, 19 nt, Artificial Sequence
  Description of Artificial Sequence: Synthetic oligonucleotide
cauuuccuuaaccaagaau

SEQ ID NO: 1772837 - RNA, 19 nt, Artificial Sequence
  Description of Artificial Sequence: Synthetic oligonucleotide
gagacaaagugagugucau

SEQ ID NO: 1772838 - RNA, 19 nt, Artificial Sequence
  Description of Artificial Sequence: Synthetic oligonucleotide
gauccagugaccacaguuu

SEQ ID NO: 1772839 - RNA, 19 nt, Artificial Sequence
  Description of Artificial Sequence: Synthetic oligonucleotide
augcguggccacucagugu

SEQ ID NO: 1772840 - RNA, 19 nt, Artificial Sequence
  Description of Artificial Sequence: Synthetic oligonucleotide
augagcauccagagagcug

SEQ ID NO: 1772841 - RNA, 19 nt, Artificial Sequence
  Description of Artificial Sequence: Synthetic oligonucleotide
uggcauggcccggaagaug

SEQ ID NO: 1772842 - RNA, 19 nt, Artificial Sequence
  Description of Artificial Sequence: Synthetic oligonucleotide
agggauccagugaccacag

SEQ ID NO: 1772843 - RNA, 19 nt, Artificial Sequence
  Description of Artificial Sequence: Synthetic oligonucleotide
ggagcgaaugggcaucgca

SEQ ID NO: 1772844 - RNA, 19 nt, Artificial Sequence
  Description of Artificial Sequence: Synthetic oligonucleotide
cauggcccggaagaugcug

SEQ ID NO: 1772845 - RNA, 19 nt, Artificial Sequence
  Description of Artificial Sequence: Synthetic oligonucleotide
cagggagcaguaccaacga

SEQ ID NO: 1772846 - RNA, 19 nt, Artificial Sequence
  Description of Artificial Sequence: Synthetic oligonucleotide
gaauacuguacugguuggu

SEQ ID NO: 1772847 - RNA, 19 nt, Artificial Sequence
  Description of Artificial Sequence: Synthetic oligonucleotide
guccuuguuccaacauccc

SEQ ID NO: 1772848 - RNA, 19 nt, Artificial Sequence
  Description of Artificial Sequence: Synthetic oligonucleotide
ccaacugcccagcacacca

SEQ ID NO: 1772849 - RNA, 19 nt, Artificial Sequence
  Description of Artificial Sequence: Synthetic oligonucleotide
cccacgugaguuccugugg

SEQ ID NO: 1772850 - RNA, 19 nt, Artificial Sequence
  Description of Artificial Sequence: Synthetic oligonucleotide
cagcacccaggaugcgugg

SEQ ID NO: 1772851 - RNA, 19 nt, Artificial Sequence
  Description of Artificial Sequence: Synthetic oligonucleotide
caggacuauaugcaauacu

SEQ ID NO: 1772852 - RNA, 19 nt, Artificial Sequence
  Description of Artificial Sequence: Synthetic oligonucleotide
ugcuugcauuaagaaugcu

SEQ ID NO: 1772853 - RNA, 19 nt, Artificial Sequence
  Description of Artificial Sequence: Synthetic oligonucleotide
aggagcgaaugggcaucgc

SEQ ID NO: 1772854 - RNA, 19 nt, Artificial Sequence
  Description of Artificial Sequence: Synthetic oligonucleotide
uucccacuuuccacaccaa

SEQ ID NO: 1772855 - RNA, 19 nt, Artificial Sequence
  Description of Artificial Sequence: Synthetic oligonucleotide
ccaccauacccaacugccc

SEQ ID NO: 1772856 - RNA, 19 nt, Artificial Sequence
  Description of Artificial Sequence: Synthetic oligonucleotide
gguguuuaaauugggcagu

SEQ ID NO: 1772857 - RNA, 19 nt, Artificial Sequence
  Description of Artificial Sequence: Synthetic oligonucleotide
cauacccaacugcccagca

SEQ ID NO: 1772858 - RNA, 19 nt, Artificial Sequence
  Description of Artificial Sequence: Synthetic oligonucleotide
ggacuauaugcaauacuaa

SEQ ID NO: 1772859 - RNA, 19 nt, Artificial Sequence
  Description of Artificial Sequence: Synthetic oligonucleotide
agucaggggaaaaggucaa

SEQ ID NO: 1772860 - RNA, 19 nt, Artificial Sequence
  Description of Artificial Sequence: Synthetic oligonucleotide
acucagugugccagccaag

SEQ ID NO: 1772861 - RNA, 19 nt, Artificial Sequence
  Description of Artificial Sequence: Synthetic oligonucleotide
cgucaucugaagcugugac

SEQ ID NO: 1772862 - RNA, 19 nt, Artificial Sequence
  Description of Artificial Sequence: Synthetic oligonucleotide
caagucccagagacgaaua

SEQ ID NO: 1772863 - RNA, 19 nt, Artificial Sequence
  Description of Artificial Sequence: Synthetic oligonucleotide
gaucaacccugcauacucu

SEQ ID NO: 1772864 - RNA, 19 nt, Artificial Sequence
  Description of Artificial Sequence: Synthetic oligonucleotide
gcaauacuaaggaugaauu

SEQ ID NO: 1772865 - RNA, 19 nt, Artificial Sequence
  Description of Artificial Sequence: Synthetic oligonucleotide
aggugugaacacagguccu

SEQ ID NO: 1772866 - RNA, 19 nt, Artificial Sequence
  Description of Artificial Sequence: Synthetic oligonucleotide
cuguggcauggcccggaag

SEQ ID NO: 1772867 - RNA, 19 nt, Artificial Sequence
  Description of Artificial Sequence: Synthetic oligonucleotide
agccucccuuguucacccg

SEQ ID NO: 1772868 - RNA, 19 nt, Artificial Sequence
  Description of Artificial Sequence: Synthetic oligonucleotide
cccggcagggagcaguacc

SEQ ID NO: 1772869 - RNA, 19 nt, Artificial Sequence
  Description of Artificial Sequence: Synthetic oligonucleotide
caggcguccacugguccug

SEQ ID NO: 1772870 - RNA, 19 nt, Artificial Sequence
  Description of Artificial Sequence: Synthetic oligonucleotide
aggcguccacugguccugc

SEQ ID NO: 1772871 - RNA, 19 nt, Artificial Sequence
  Description of Artificial Sequence: Synthetic oligonucleotide
cagcguaugcagaagcuuu

SEQ ID NO: 1772872 - RNA, 19 nt, Artificial Sequence
  Description of Artificial Sequence: Synthetic oligonucleotide
guucagcacccaggaugcg

SEQ ID NO: 1772873 - RNA, 19 nt, Artificial Sequence
  Description of Artificial Sequence: Synthetic oligonucleotide
gcguaugcagaagcuuucc

SEQ ID NO: 1772874 - RNA, 19 nt, Artificial Sequence
  Description of Artificial Sequence: Synthetic oligonucleotide
guacaucauagaucuugau

SEQ ID NO: 1772875 - RNA, 19 nt, Artificial Sequence
  Description of Artificial Sequence: Synthetic oligonucleotide
gcacccaggaugcguggcc

SEQ ID NO: 1772876 - RNA, 19 nt, Artificial Sequence
  Description of Artificial Sequence: Synthetic oligonucleotide
acccgucuccccgucccgg

SEQ ID NO: 1772877 - RNA, 19 nt, Artificial Sequence
  Description of Artificial Sequence: Synthetic oligonucleotide
caacgaccaccauacccaa

SEQ ID NO: 1772878 - RNA, 19 nt, Artificial Sequence
  Description of Artificial Sequence: Synthetic oligonucleotide
guggccagauacugggagu

SEQ ID NO: 1772879 - RNA, 19 nt, Artificial Sequence
  Description of Artificial Sequence: Synthetic oligonucleotide
gcuguauuuuaagugugcu

SEQ ID NO: 1772880 - RNA, 19 nt, Artificial Sequence
  Description of Artificial Sequence: Synthetic oligonucleotide
accugauccuggugaucaa

SEQ ID NO: 1772881 - RNA, 19 nt, Artificial Sequence
  Description of Artificial Sequence: Synthetic oligonucleotide
ugggcaucgcauggccuuc

SEQ ID NO: 1772882 - RNA, 19 nt, Artificial Sequence
  Description of Artificial Sequence: Synthetic oligonucleotide
gcaguaccaacgaccacca

SEQ ID NO: 1772883 - RNA, 19 nt, Artificial Sequence
  Description of Artificial Sequence: Synthetic oligonucleotide
cacccgucuccccgucccg

SEQ ID NO: 1772884 - RNA, 19 nt, Artificial Sequence
  Description of Artificial Sequence: Synthetic oligonucleotide
cauggccuuccagcguaug

SEQ ID NO: 1772885 - RNA, 19 nt, Artificial Sequence
  Description of Artificial Sequence: Synthetic oligonucleotide
ccccacgugaguuccugug

SEQ ID NO: 1772886 - RNA, 19 nt, Artificial Sequence
  Description of Artificial Sequence: Synthetic oligonucleotide
gugaguuccuguggccaga

SEQ ID NO: 1772887 - RNA, 19 nt, Artificial Sequence
  Description of Artificial Sequence: Synthetic oligonucleotide
gcuugcauuaagaaugcuu

SEQ ID NO: 1772888 - RNA, 19 nt, Artificial Sequence
  Description of Artificial Sequence: Synthetic oligonucleotide
agccgucaucugaagcugu

SEQ ID NO: 1772889 - RNA, 19 nt, Artificial Sequence
  Description of Artificial Sequence: Synthetic oligonucleotide
guucacccgucuccccguc

SEQ ID NO: 1772890 - RNA, 19 nt, Artificial Sequence
  Description of Artificial Sequence: Synthetic oligonucleotide
gacgaggagcugggaguca

SEQ ID NO: 1772891 - RNA, 19 nt, Artificial Sequence
  Description of Artificial Sequence: Synthetic oligonucleotide
ccauacccaacugcccagc

SEQ ID NO: 1772892 - RNA, 19 nt, Artificial Sequence
  Description of Artificial Sequence: Synthetic oligonucleotide
caaugggaaggguguggcu

SEQ ID NO: 1772893 - RNA, 19 nt, Artificial Sequence
  Description of Artificial Sequence: Synthetic oligonucleotide
caaaguccaggcguccacu

SEQ ID NO: 1772894 - RNA, 19 nt, Artificial Sequence
  Description of Artificial Sequence: Synthetic oligonucleotide
cgaaugggcaucgcauggc

SEQ ID NO: 1772895 - RNA, 19 nt, Artificial Sequence
  Description of Artificial Sequence: Synthetic oligonucleotide
gacguucagcacccaggau

SEQ ID NO: 1772896 - RNA, 19 nt, Artificial Sequence
  Description of Artificial Sequence: Synthetic oligonucleotide
ccucuaguguccaaagaau

SEQ ID NO: 1772897 - RNA, 19 nt, Artificial Sequence
  Description of Artificial Sequence: Synthetic oligonucleotide
caguuucaguguuuugcuu

SEQ ID NO: 1772898 - RNA, 19 nt, Artificial Sequence
  Description of Artificial Sequence: Synthetic oligonucleotide
ggccaaaguccaggcgucc

SEQ ID NO: 1772899 - RNA, 19 nt, Artificial Sequence
  Description of Artificial Sequence: Synthetic oligonucleotide
gggagucaggggaaaaggu

SEQ ID NO: 1772900 - RNA, 19 nt, Artificial Sequence
  Description of Artificial Sequence: Synthetic oligonucleotide
ccggcagggagcaguacca

SEQ ID NO: 1772901 - RNA, 19 nt, Artificial Sequence
  Description of Artificial Sequence: Synthetic oligonucleotide
guccaggcguccacugguc

SEQ ID NO: 1772902 - RNA, 19 nt, Artificial Sequence
  Description of Artificial Sequence: Synthetic oligonucleotide
cagagacgaauaugagcau

SEQ ID NO: 1772903 - RNA, 19 nt, Artificial Sequence
  Description of Artificial Sequence: Synthetic oligonucleotide
cguaugcagaagcuuucca

SEQ ID NO: 1772904 - RNA, 19 nt, Artificial Sequence
  Description of Artificial Sequence: Synthetic oligonucleotide
gaugucccuccaggcucca

SEQ ID NO: 1772905 - RNA, 19 nt, Artificial Sequence
  Description of Artificial Sequence: Synthetic oligonucleotide
cgacguucagcacccagga

SEQ ID NO: 1772906 - RNA, 19 nt, Artificial Sequence
  Description of Artificial Sequence: Synthetic oligonucleotide
ggguaaggaaugucaugau

SEQ ID NO: 1772907 - RNA, 19 nt, Artificial Sequence
  Description of Artificial Sequence: Synthetic oligonucleotide
ggcaucgcauggccuucca

SEQ ID NO: 1772908 - RNA, 19 nt, Artificial Sequence
  Description of Artificial Sequence: Synthetic oligonucleotide
ggcccggaagaugcuggug

SEQ ID NO: 1772909 - RNA, 19 nt, Artificial Sequence
  Description of Artificial Sequence: Synthetic oligonucleotide
guucuugcuugaagagaau

SEQ ID NO: 1772910 - RNA, 19 nt, Artificial Sequence
  Description of Artificial Sequence: Synthetic oligonucleotide
cgcgacguucagcacccag

SEQ ID NO: 1772911 - RNA, 19 nt, Artificial Sequence
  Description of Artificial Sequence: Synthetic oligonucleotide
ggugugaacacagguccuu

SEQ ID NO: 1772912 - RNA, 19 nt, Artificial Sequence
  Description of Artificial Sequence: Synthetic oligonucleotide
gggcaucgcauggccuucc

SEQ ID NO: 1772913 - RNA, 19 nt, Artificial Sequence
  Description of Artificial Sequence: Synthetic oligonucleotide
cguggccacucagugugcc

SEQ ID NO: 1772914 - RNA, 19 nt, Artificial Sequence
  Description of Artificial Sequence: Synthetic oligonucleotide
ggaugcguggccacucagu

SEQ ID NO: 1772915 - RNA, 19 nt, Artificial Sequence
  Description of Artificial Sequence: Synthetic oligonucleotide
ccugauccuggugaucaaa

SEQ ID NO: 1772916 - RNA, 19 nt, Artificial Sequence
  Description of Artificial Sequence: Synthetic oligonucleotide
gccagacagcccugcuguc

SEQ ID NO: 1772917 - RNA, 19 nt, Artificial Sequence
  Description of Artificial Sequence: Synthetic oligonucleotide
cugugacgaggagcuggga

SEQ ID NO: 1772918 - RNA, 19 nt, Artificial Sequence
  Description of Artificial Sequence: Synthetic oligonucleotide
cugcaucuauagacuugau

SEQ ID NO: 1772919 - RNA, 19 nt, Artificial Sequence
  Description of Artificial Sequence: Synthetic oligonucleotide
ccaagucccagagacgaau

SEQ ID NO: 1772920 - RNA, 19 nt, Artificial Sequence
  Description of Artificial Sequence: Synthetic oligonucleotide
ccacucagugugccagcca

SEQ ID NO: 1772921 - RNA, 19 nt, Artificial Sequence
  Description of Artificial Sequence: Synthetic oligonucleotide
cccuccaggcuccacugua

SEQ ID NO: 1772922 - RNA, 19 nt, Artificial Sequence
  Description of Artificial Sequence: Synthetic oligonucleotide
ggcguccacugguccugca

SEQ ID NO: 1772923 - RNA, 19 nt, Artificial Sequence
  Description of Artificial Sequence: Synthetic oligonucleotide
ccaggcguccacugguccu

SEQ ID NO: 1772924 - RNA, 19 nt, Artificial Sequence
  Description of Artificial Sequence: Synthetic oligonucleotide
gcguggccacucagugugc

SEQ ID NO: 1772925 - RNA, 19 nt, Artificial Sequence
  Description of Artificial Sequence: Synthetic oligonucleotide
gcguccacugguccugcau

SEQ ID NO: 1772926 - RNA, 19 nt, Artificial Sequence
  Description of Artificial Sequence: Synthetic oligonucleotide
cugcugucgcggccuccaa

SEQ ID NO: 1772927 - RNA, 19 nt, Artificial Sequence
  Description of Artificial Sequence: Synthetic oligonucleotide
ccccaaaccugauccuggu

SEQ ID NO: 1772928 - RNA, 19 nt, Artificial Sequence
  Description of Artificial Sequence: Synthetic oligonucleotide
gccagccaaguuggcaugu

SEQ ID NO: 1772929 - RNA, 19 nt, Artificial Sequence
  Description of Artificial Sequence: Synthetic oligonucleotide
ccacugguccugcaucuau

SEQ ID NO: 1772930 - RNA, 19 nt, Artificial Sequence
  Description of Artificial Sequence: Synthetic oligonucleotide
acgcgacguucagcaccca

SEQ ID NO: 1772931 - RNA, 19 nt, Artificial Sequence
  Description of Artificial Sequence: Synthetic oligonucleotide
ccagcguaugcagaagcuu

SEQ ID NO: 1772932 - RNA, 19 nt, Artificial Sequence
  Description of Artificial Sequence: Synthetic oligonucleotide
caguaccaacgaccaccau

SEQ ID NO: 1772933 - RNA, 19 nt, Artificial Sequence
  Description of Artificial Sequence: Synthetic oligonucleotide
cccgucccggcagggagca

SEQ ID NO: 1772934 - RNA, 19 nt, Artificial Sequence
  Description of Artificial Sequence: Synthetic oligonucleotide
ccgucuccccgucccggca

SEQ ID NO: 1772935 - RNA, 19 nt, Artificial Sequence
  Description of Artificial Sequence: Synthetic oligonucleotide
cccaggcaacugaccaaau

SEQ ID NO: 1772936 - RNA, 19 nt, Artificial Sequence
  Description of Artificial Sequence: Synthetic oligonucleotide
gcauggccuuccagcguau

SEQ ID NO: 1772937 - RNA, 19 nt, Artificial Sequence
  Description of Artificial Sequence: Synthetic oligonucleotide
ccgucccggcagggagcag

SEQ ID NO: 1772938 - RNA, 19 nt, Artificial Sequence
  Description of Artificial Sequence: Synthetic oligonucleotide
ucugauaacauccagauag

SEQ ID NO: 1772939 - RNA, 19 nt, Artificial Sequence
  Description of Artificial Sequence: Synthetic oligonucleotide
uauuguaacaaccagauga

SEQ ID NO: 1772940 - RNA, 19 nt, Artificial Sequence
  Description of Artificial Sequence: Synthetic oligonucleotide
aaaagcacgacuuucaucu

SEQ ID NO: 1772941 - RNA, 19 nt, Artificial Sequence
  Description of Artificial Sequence: Synthetic oligonucleotide
uaagauaaccugaaaaugg

SEQ ID NO: 1772942 - RNA, 19 nt, Artificial Sequence
  Description of Artificial Sequence: Synthetic oligonucleotide
uucgauaucagccaaaucu

SEQ ID NO: 1772943 - RNA, 19 nt, Artificial Sequence
  Description of Artificial Sequence: Synthetic oligonucleotide
aaacucugguccuuaaucc

SEQ ID NO: 1772944 - RNA, 19 nt, Artificial Sequence
  Description of Artificial Sequence: Synthetic oligonucleotide
aaguaaaacuuucagaaga

SEQ ID NO: 1772945 - RNA, 19 nt, Artificial Sequence
  Description of Artificial Sequence: Synthetic oligonucleotide
aacaaccaaaguuggaggc

SEQ ID NO: 1772946 - RNA, 19 nt, Artificial Sequence
  Description of Artificial Sequence: Synthetic oligonucleotide
aaccagaugaagaacaacc

SEQ ID NO: 1772947 - RNA, 19 nt, Artificial Sequence
  Description of Artificial Sequence: Synthetic oligonucleotide
gaagauacagguuuagucc

SEQ ID NO: 1772948 - RNA, 19 nt, Artificial Sequence
  Description of Artificial Sequence: Synthetic oligonucleotide
cuuaguacugacuugacug

SEQ ID NO: 1772949 - RNA, 19 nt, Artificial Sequence
  Description of Artificial Sequence: Synthetic oligonucleotide
guuuccauuacacagagac

SEQ ID NO: 1772950 - RNA, 19 nt, Artificial Sequence
  Description of Artificial Sequence: Synthetic oligonucleotide
cuuaaucccacaaaguccc

SEQ ID NO: 1772951 - RNA, 19 nt, Artificial Sequence
  Description of Artificial Sequence: Synthetic oligonucleotide
aaaguacucguccagucuc

SEQ ID NO: 1772952 - RNA, 19 nt, Artificial Sequence
  Description of Artificial Sequence: Synthetic oligonucleotide
ugccuaaccauuuugcugg

SEQ ID NO: 1772953 - RNA, 19 nt, Artificial Sequence
  Description of Artificial Sequence: Synthetic oligonucleotide
aaucagaaauaucagucug

SEQ ID NO: 1772954 - RNA, 19 nt, Artificial Sequence
  Description of Artificial Sequence: Synthetic oligonucleotide
uccagacagaucaagaugc

SEQ ID NO: 1772955 - RNA, 19 nt, Artificial Sequence
  Description of Artificial Sequence: Synthetic oligonucleotide
ugaaugaccacaauaugca

SEQ ID NO: 1772956 - RNA, 19 nt, Artificial Sequence
  Description of Artificial Sequence: Synthetic oligonucleotide
augaaugaccacaauaugc

SEQ ID NO: 1772957 - RNA, 19 nt, Artificial Sequence
  Description of Artificial Sequence: Synthetic oligonucleotide
ugugcaagcaggcauacug

SEQ ID NO: 1772958 - RNA, 19 nt, Artificial Sequence
  Description of Artificial Sequence: Synthetic oligonucleotide
auaaccugaaaauggacag

SEQ ID NO: 1772959 - RNA, 19 nt, Artificial Sequence
  Description of Artificial Sequence: Synthetic oligonucleotide
aucagucuggguaagaucc

SEQ ID NO: 1772960 - RNA, 19 nt, Artificial Sequence
  Description of Artificial Sequence: Synthetic oligonucleotide
agaaucagaaauaucaguc

SEQ ID NO: 1772961 - RNA, 19 nt, Artificial Sequence
  Description of Artificial Sequence: Synthetic oligonucleotide
aaacuuucagaagauacag

SEQ ID NO: 1772962 - RNA, 19 nt, Artificial Sequence
  Description of Artificial Sequence: Synthetic oligonucleotide
guuaaauugugcaagcagg

SEQ ID NO: 1772963 - RNA, 19 nt, Artificial Sequence
  Description of Artificial Sequence: Synthetic oligonucleotide
auaccagucaccucuggcc

SEQ ID NO: 1772964 - RNA, 19 nt, Artificial Sequence
  Description of Artificial Sequence: Synthetic oligonucleotide
cuagaaaucuucucuagag

SEQ ID NO: 1772965 - RNA, 19 nt, Artificial Sequence
  Description of Artificial Sequence: Synthetic oligonucleotide
ugaggauuaagauaaccug

SEQ ID NO: 1772966 - RNA, 19 nt, Artificial Sequence
  Description of Artificial Sequence: Synthetic oligonucleotide
aguuaaauugugcaagcag

SEQ ID NO: 1772967 - RNA, 19 nt, Artificial Sequence
  Description of Artificial Sequence: Synthetic oligonucleotide
uguaugcuaacacuaaagu

SEQ ID NO: 1772968 - RNA, 19 nt, Artificial Sequence
  Description of Artificial Sequence: Synthetic oligonucleotide
aaaauggacagcauuaccu

SEQ ID NO: 1772969 - RNA, 19 nt, Artificial Sequence
  Description of Artificial Sequence: Synthetic oligonucleotide
uugaggauuaagauaaccu

SEQ ID NO: 1772970 - RNA, 19 nt, Artificial Sequence
  Description of Artificial Sequence: Synthetic oligonucleotide
agcaucuucgauaucagcc

SEQ ID NO: 1772971 - RNA, 19 nt, Artificial Sequence
  Description of Artificial Sequence: Synthetic oligonucleotide
acaaagucccuauuguaac

SEQ ID NO: 1772972 - RNA, 19 nt, Artificial Sequence
  Description of Artificial Sequence: Synthetic oligonucleotide
agagguaccaacauauggc

SEQ ID NO: 1772973 - RNA, 19 nt, Artificial Sequence
  Description of Artificial Sequence: Synthetic oligonucleotide
aucaagaugccgaagauuc

SEQ ID NO: 1772974 - RNA, 19 nt, Artificial Sequence
  Description of Artificial Sequence: Synthetic oligonucleotide
ugucuuuauuuauccaugg

SEQ ID NO: 1772975 - RNA, 19 nt, Artificial Sequence
  Description of Artificial Sequence: Synthetic oligonucleotide
cugugaucugauaacaucc

SEQ ID NO: 1772976 - RNA, 19 nt, Artificial Sequence
  Description of Artificial Sequence: Synthetic oligonucleotide
uccuuaaucccacaaaguc

SEQ ID NO: 1772977 - RNA, 19 nt, Artificial Sequence
  Description of Artificial Sequence: Synthetic oligonucleotide
gaacaaccaaaguuggagg

SEQ ID NO: 1772978 - RNA, 19 nt, Artificial Sequence
  Description of Artificial Sequence: Synthetic oligonucleotide
uacucguccagucucuugg

SEQ ID NO: 1772979 - RNA, 19 nt, Artificial Sequence
  Description of Artificial Sequence: Synthetic oligonucleotide
ucagaaauaucagucuggg

SEQ ID NO: 1772980 - RNA, 19 nt, Artificial Sequence
  Description of Artificial Sequence: Synthetic oligonucleotide
aagucuuuugcccuaggca

SEQ ID NO: 1772981 - RNA, 19 nt, Artificial Sequence
  Description of Artificial Sequence: Synthetic oligonucleotide
agaacaaccaaaguuggag

SEQ ID NO: 1772982 - RNA, 19 nt, Artificial Sequence
  Description of Artificial Sequence: Synthetic oligonucleotide
ucuagcauccacacguaag

SEQ ID NO: 1772983 - RNA, 19 nt, Artificial Sequence
  Description of Artificial Sequence: Synthetic oligonucleotide
uuauccauggagcugaauu

SEQ ID NO: 1772984 - RNA, 19 nt, Artificial Sequence
  Description of Artificial Sequence: Synthetic oligonucleotide
aaaaguacucguccagucu

SEQ ID NO: 1772985 - RNA, 19 nt, Artificial Sequence
  Description of Artificial Sequence: Synthetic oligonucleotide
cagguuuaguccaagagug

SEQ ID NO: 1772986 - RNA, 19 nt, Artificial Sequence
  Description of Artificial Sequence: Synthetic oligonucleotide
gagacuuucaacauuucug

SEQ ID NO: 1772987 - RNA, 19 nt, Artificial Sequence
  Description of Artificial Sequence: Synthetic oligonucleotide
acugcaucgacacaauucu

SEQ ID NO: 1772988 - RNA, 19 nt, Artificial Sequence
  Description of Artificial Sequence: Synthetic oligonucleotide
ugaucugauaacauccaga

SEQ ID NO: 1772989 - RNA, 19 nt, Artificial Sequence
  Description of Artificial Sequence: Synthetic oligonucleotide
accaacauauggcagaaca

SEQ ID NO: 1772990 - RNA, 19 nt, Artificial Sequence
  Description of Artificial Sequence: Synthetic oligonucleotide
ugaauuaagccauggagua

SEQ ID NO: 1772991 - RNA, 19 nt, Artificial Sequence
  Description of Artificial Sequence: Synthetic oligonucleotide
ugcaucgacacaauucuug

SEQ ID NO: 1772992 - RNA, 19 nt, Artificial Sequence
  Description of Artificial Sequence: Synthetic oligonucleotide
acaggguaaagauguuucc

SEQ ID NO: 1772993 - RNA, 19 nt, Artificial Sequence
  Description of Artificial Sequence: Synthetic oligonucleotide
agacuuucaacauuucugu

SEQ ID NO: 1772994 - RNA, 19 nt, Artificial Sequence
  Description of Artificial Sequence: Synthetic oligonucleotide
caaagcucuaaaaucugcc

SEQ ID NO: 1772995 - RNA, 19 nt, Artificial Sequence
  Description of Artificial Sequence: Synthetic oligonucleotide
uccauuugugcaaugcuga

SEQ ID NO: 1772996 - RNA, 19 nt, Artificial Sequence
  Description of Artificial Sequence: Synthetic oligonucleotide
uuuugcuggagacugcaga

SEQ ID NO: 1772997 - RNA, 19 nt, Artificial Sequence
  Description of Artificial Sequence: Synthetic oligonucleotide
augucagcacuccaagagc

SEQ ID NO: 1772998 - RNA, 19 nt, Artificial Sequence
  Description of Artificial Sequence: Synthetic oligonucleotide
ggaacaaaaguacucgucc

SEQ ID NO: 1772999 - RNA, 19 nt, Artificial Sequence
  Description of Artificial Sequence: Synthetic oligonucleotide
auaucagccaaaucuucag

SEQ ID NO: 1773000 - RNA, 19 nt, Artificial Sequence
  Description of Artificial Sequence: Synthetic oligonucleotide
cuacacauuguagaagucg

SEQ ID NO: 1773001 - RNA, 19 nt, Artificial Sequence
  Description of Artificial Sequence: Synthetic oligonucleotide
cuguaugcuaacacuaaag

SEQ ID NO: 1773002 - RNA, 19 nt, Artificial Sequence
  Description of Artificial Sequence: Synthetic oligonucleotide
gauaaccugaaaauggaca

SEQ ID NO: 1773003 - RNA, 19 nt, Artificial Sequence
  Description of Artificial Sequence: Synthetic oligonucleotide
uaagucuuuugcccuaggc

SEQ ID NO: 1773004 - RNA, 19 nt, Artificial Sequence
  Description of Artificial Sequence: Synthetic oligonucleotide
aaccugaaaauggacagca

SEQ ID NO: 1773005 - RNA, 19 nt, Artificial Sequence
  Description of Artificial Sequence: Synthetic oligonucleotide
agauggguuauaccugugg

SEQ ID NO: 1773006 - RNA, 19 nt, Artificial Sequence
  Description of Artificial Sequence: Synthetic oligonucleotide
uucacucccaaaauaaauu

SEQ ID NO: 1773007 - RNA, 19 nt, Artificial Sequence
  Description of Artificial Sequence: Synthetic oligonucleotide
agucccuauuguaacaacc

SEQ ID NO: 1773008 - RNA, 19 nt, Artificial Sequence
  Description of Artificial Sequence: Synthetic oligonucleotide
ugugaucugauaacaucca

SEQ ID NO: 1773009 - RNA, 19 nt, Artificial Sequence
  Description of Artificial Sequence: Synthetic oligonucleotide
agcugagaccacuuaguac

SEQ ID NO: 1773010 - RNA, 19 nt, Artificial Sequence
  Description of Artificial Sequence: Synthetic oligonucleotide
cagacauaguccuuagagc

SEQ ID NO: 1773011 - RNA, 19 nt, Artificial Sequence
  Description of Artificial Sequence: Synthetic oligonucleotide
augaauuaagccauggagu

SEQ ID NO: 1773012 - RNA, 19 nt, Artificial Sequence
  Description of Artificial Sequence: Synthetic oligonucleotide
ugucagcacuccaagagcu

SEQ ID NO: 1773013 - RNA, 19 nt, Artificial Sequence
  Description of Artificial Sequence: Synthetic oligonucleotide
agagcuguaugcuaacacu

SEQ ID NO: 1773014 - RNA, 19 nt, Artificial Sequence
  Description of Artificial Sequence: Synthetic oligonucleotide
ugggagugcagacauaguc

SEQ ID NO: 1773015 - RNA, 19 nt, Artificial Sequence
  Description of Artificial Sequence: Synthetic oligonucleotide
aaugcugauagcaaucgau

SEQ ID NO: 1773016 - RNA, 19 nt, Artificial Sequence
  Description of Artificial Sequence: Synthetic oligonucleotide
cauuguagaagucgcuggg

SEQ ID NO: 1773017 - RNA, 19 nt, Artificial Sequence
  Description of Artificial Sequence: Synthetic oligonucleotide
gacuugacugcaucgacac

SEQ ID NO: 1773018 - RNA, 19 nt, Artificial Sequence
  Description of Artificial Sequence: Synthetic oligonucleotide
auaugcaaaggcuggagaa

SEQ ID NO: 1773019 - RNA, 19 nt, Artificial Sequence
  Description of Artificial Sequence: Synthetic oligonucleotide
ucccuauuguaacaaccag

SEQ ID NO: 1773020 - RNA, 19 nt, Artificial Sequence
  Description of Artificial Sequence: Synthetic oligonucleotide
uuuucacucccaaaauaaa

SEQ ID NO: 1773021 - RNA, 19 nt, Artificial Sequence
  Description of Artificial Sequence: Synthetic oligonucleotide
uagcaaucgauuccucugc

SEQ ID NO: 1773022 - RNA, 19 nt, Artificial Sequence
  Description of Artificial Sequence: Synthetic oligonucleotide
aucagaaauaucagucugg

SEQ ID NO: 1773023 - RNA, 19 nt, Artificial Sequence
  Description of Artificial Sequence: Synthetic oligonucleotide
acgacuuucaucuuuccua

SEQ ID NO: 1773024 - RNA, 19 nt, Artificial Sequence
  Description of Artificial Sequence: Synthetic oligonucleotide
cuugaggauuaagauaacc

SEQ ID NO: 1773025 - RNA, 19 nt, Artificial Sequence
  Description of Artificial Sequence: Synthetic oligonucleotide
accauuuugcuggagacug

SEQ ID NO: 1773026 - RNA, 19 nt, Artificial Sequence
  Description of Artificial Sequence: Synthetic oligonucleotide
cauauggcagaacauuaug

SEQ ID NO: 1773027 - RNA, 19 nt, Artificial Sequence
  Description of Artificial Sequence: Synthetic oligonucleotide
uggguuauaccuguggagu

SEQ ID NO: 1773028 - RNA, 19 nt, Artificial Sequence
  Description of Artificial Sequence: Synthetic oligonucleotide
aucugccuaaccauuuugc

SEQ ID NO: 1773029 - RNA, 19 nt, Artificial Sequence
  Description of Artificial Sequence: Synthetic oligonucleotide
uuggucagacuuuucacuc

SEQ ID NO: 1773030 - RNA, 19 nt, Artificial Sequence
  Description of Artificial Sequence: Synthetic oligonucleotide
ucgauaucagccaaaucuu

SEQ ID NO: 1773031 - RNA, 19 nt, Artificial Sequence
  Description of Artificial Sequence: Synthetic oligonucleotide
uaccagucaccucuggccc

SEQ ID NO: 1773032 - RNA, 19 nt, Artificial Sequence
  Description of Artificial Sequence: Synthetic oligonucleotide
gagguaccaacauauggca

SEQ ID NO: 1773033 - RNA, 19 nt, Artificial Sequence
  Description of Artificial Sequence: Synthetic oligonucleotide
uuuccauuacacagagacu

SEQ ID NO: 1773034 - RNA, 19 nt, Artificial Sequence
  Description of Artificial Sequence: Synthetic oligonucleotide
acguaaggagaaguaaaac

SEQ ID NO: 1773035 - RNA, 19 nt, Artificial Sequence
  Description of Artificial Sequence: Synthetic oligonucleotide
guagaagucgcugggagug

SEQ ID NO: 1773036 - RNA, 19 nt, Artificial Sequence
  Description of Artificial Sequence: Synthetic oligonucleotide
ucuggguaagauccagaug

SEQ ID NO: 1773037 - RNA, 19 nt, Artificial Sequence
  Description of Artificial Sequence: Synthetic oligonucleotide
gcugaauuggccuugccug

SEQ ID NO: 1773038 - RNA, 19 nt, Artificial Sequence
  Description of Artificial Sequence: Synthetic oligonucleotide
ucugccuaaccauuuugcu

SEQ ID NO: 1773039 - RNA, 19 nt, Artificial Sequence
  Description of Artificial Sequence: Synthetic oligonucleotide
gaucugauaacauccagau

SEQ ID NO: 1773040 - RNA, 19 nt, Artificial Sequence
  Description of Artificial Sequence: Synthetic oligonucleotide
uuccagguuaggacaaagc

SEQ ID NO: 1773041 - RNA, 19 nt, Artificial Sequence
  Description of Artificial Sequence: Synthetic oligonucleotide
agauaaccugaaaauggac

SEQ ID NO: 1773042 - RNA, 19 nt, Artificial Sequence
  Description of Artificial Sequence: Synthetic oligonucleotide
aguaucaaguucaguggcg

SEQ ID NO: 1773043 - RNA, 19 nt, Artificial Sequence
  Description of Artificial Sequence: Synthetic oligonucleotide
gaaaagcacgacuuucauc

SEQ ID NO: 1773044 - RNA, 19 nt, Artificial Sequence
  Description of Artificial Sequence: Synthetic oligonucleotide
acuuaguacugacuugacu

SEQ ID NO: 1773045 - RNA, 19 nt, Artificial Sequence
  Description of Artificial Sequence: Synthetic oligonucleotide
ugcugauagcaaucgauuc

SEQ ID NO: 1773046 - RNA, 19 nt, Artificial Sequence
  Description of Artificial Sequence: Synthetic oligonucleotide
gaugagaugucagcacucc

SEQ ID NO: 1773047 - RNA, 19 nt, Artificial Sequence
  Description of Artificial Sequence: Synthetic oligonucleotide
ccuuaaucccacaaagucc

SEQ ID NO: 1773048 - RNA, 19 nt, Artificial Sequence
  Description of Artificial Sequence: Synthetic oligonucleotide
aguggcgggaccacuauac

SEQ ID NO: 1773049 - RNA, 19 nt, Artificial Sequence
  Description of Artificial Sequence: Synthetic oligonucleotide
aaauaucagucuggguaag

SEQ ID NO: 1773050 - RNA, 19 nt, Artificial Sequence
  Description of Artificial Sequence: Synthetic oligonucleotide
uaaauugugcaagcaggca

SEQ ID NO: 1773051 - RNA, 19 nt, Artificial Sequence
  Description of Artificial Sequence: Synthetic oligonucleotide
caaaaguacucguccaguc

SEQ ID NO: 1773052 - RNA, 19 nt, Artificial Sequence
  Description of Artificial Sequence: Synthetic oligonucleotide
cucuaaaaucugccuaacc

SEQ ID NO: 1773053 - RNA, 19 nt, Artificial Sequence
  Description of Artificial Sequence: Synthetic oligonucleotide
agcucuaaaaucugccuaa

SEQ ID NO: 1773054 - RNA, 19 nt, Artificial Sequence
  Description of Artificial Sequence: Synthetic oligonucleotide
uauaccuguggaguguucu

SEQ ID NO: 1773055 - RNA, 19 nt, Artificial Sequence
  Description of Artificial Sequence: Synthetic oligonucleotide
agcugaauuggccuugccu

SEQ ID NO: 1773056 - RNA, 19 nt, Artificial Sequence
  Description of Artificial Sequence: Synthetic oligonucleotide
aaagucccuauuguaacaa

SEQ ID NO: 1773057 - RNA, 19 nt, Artificial Sequence
  Description of Artificial Sequence: Synthetic oligonucleotide
aguccaagagugaucauug

SEQ ID NO: 1773058 - RNA, 19 nt, Artificial Sequence
  Description of Artificial Sequence: Synthetic oligonucleotide
cuuugucaguuaaauugug

SEQ ID NO: 1773059 - RNA, 19 nt, Artificial Sequence
  Description of Artificial Sequence: Synthetic oligonucleotide
uggucugugaucugauaac

SEQ ID NO: 1773060 - RNA, 19 nt, Artificial Sequence
  Description of Artificial Sequence: Synthetic oligonucleotide
uguagaagucgcugggagu

SEQ ID NO: 1773061 - RNA, 19 nt, Artificial Sequence
  Description of Artificial Sequence: Synthetic oligonucleotide
cugccuaaccauuuugcug

SEQ ID NO: 1773062 - RNA, 19 nt, Artificial Sequence
  Description of Artificial Sequence: Synthetic oligonucleotide
gcugauagcaaucgauucc

SEQ ID NO: 1773063 - RNA, 19 nt, Artificial Sequence
  Description of Artificial Sequence: Synthetic oligonucleotide
gagaccacuuaguacugac

SEQ ID NO: 1773064 - RNA, 19 nt, Artificial Sequence
  Description of Artificial Sequence: Synthetic oligonucleotide
aaaucugccuaaccauuuu

SEQ ID NO: 1773065 - RNA, 19 nt, Artificial Sequence
  Description of Artificial Sequence: Synthetic oligonucleotide
uccauggagcugaauuggc

SEQ ID NO: 1773066 - RNA, 19 nt, Artificial Sequence
  Description of Artificial Sequence: Synthetic oligonucleotide
uugcccuaggcaauguagu

SEQ ID NO: 1773067 - RNA, 19 nt, Artificial Sequence
  Description of Artificial Sequence: Synthetic oligonucleotide
agacagaucaagaugccga

SEQ ID NO: 1773068 - RNA, 19 nt, Artificial Sequence
  Description of Artificial Sequence: Synthetic oligonucleotide
auagacugaggaacaaaag

SEQ ID NO: 1773069 - RNA, 19 nt, Artificial Sequence
  Description of Artificial Sequence: Synthetic oligonucleotide
ugauaacauccagauagac

SEQ ID NO: 1773070 - RNA, 19 nt, Artificial Sequence
  Description of Artificial Sequence: Synthetic oligonucleotide
gacugcaucgacacaauuc

SEQ ID NO: 1773071 - RNA, 19 nt, Artificial Sequence
  Description of Artificial Sequence: Synthetic oligonucleotide
gacaaagcucuaaaaucug

SEQ ID NO: 1773072 - RNA, 19 nt, Artificial Sequence
  Description of Artificial Sequence: Synthetic oligonucleotide
ugaugagaugucagcacuc

SEQ ID NO: 1773073 - RNA, 19 nt, Artificial Sequence
  Description of Artificial Sequence: Synthetic oligonucleotide
cagguuaggacaaagcucu

SEQ ID NO: 1773074 - RNA, 19 nt, Artificial Sequence
  Description of Artificial Sequence: Synthetic oligonucleotide
uuacagagguaccaacaua

SEQ ID NO: 1773075 - RNA, 19 nt, Artificial Sequence
  Description of Artificial Sequence: Synthetic oligonucleotide
gugaucugauaacauccag

SEQ ID NO: 1773076 - RNA, 19 nt, Artificial Sequence
  Description of Artificial Sequence: Synthetic oligonucleotide
ugguaaugucuuuauuuau

SEQ ID NO: 1773077 - RNA, 19 nt, Artificial Sequence
  Description of Artificial Sequence: Synthetic oligonucleotide
uaucagucuggguaagauc

SEQ ID NO: 1773078 - RNA, 19 nt, Artificial Sequence
  Description of Artificial Sequence: Synthetic oligonucleotide
gauacagguuuaguccaag

SEQ ID NO: 1773079 - RNA, 19 nt, Artificial Sequence
  Description of Artificial Sequence: Synthetic oligonucleotide
uccuacuucucacccacuc

SEQ ID NO: 1773080 - RNA, 19 nt, Artificial Sequence
  Description of Artificial Sequence: Synthetic oligonucleotide
cagaucaagaugccgaaga

SEQ ID NO: 1773081 - RNA, 19 nt, Artificial Sequence
  Description of Artificial Sequence: Synthetic oligonucleotide
augucuuuauuuauccaug

SEQ ID NO: 1773082 - RNA, 19 nt, Artificial Sequence
  Description of Artificial Sequence: Synthetic oligonucleotide
uuccuacacauuguagaag

SEQ ID NO: 1773083 - RNA, 19 nt, Artificial Sequence
  Description of Artificial Sequence: Synthetic oligonucleotide
gauaacauccagauagacu

SEQ ID NO: 1773084 - RNA, 19 nt, Artificial Sequence
  Description of Artificial Sequence: Synthetic oligonucleotide
aauaucagucuggguaaga

SEQ ID NO: 1773085 - RNA, 19 nt, Artificial Sequence
  Description of Artificial Sequence: Synthetic oligonucleotide
auugugcaagcaggcauac

SEQ ID NO: 1773086 - RNA, 19 nt, Artificial Sequence
  Description of Artificial Sequence: Synthetic oligonucleotide
ucgauuccucugcagacuc

SEQ ID NO: 1773087 - RNA, 19 nt, Artificial Sequence
  Description of Artificial Sequence: Synthetic oligonucleotide
agagugaucauugucuauu

SEQ ID NO: 1773088 - RNA, 19 nt, Artificial Sequence
  Description of Artificial Sequence: Synthetic oligonucleotide
gguaccaacauauggcaga

SEQ ID NO: 1773089 - RNA, 19 nt, Artificial Sequence
  Description of Artificial Sequence: Synthetic oligonucleotide
ugcaugguaaugucuuuau

SEQ ID NO: 1773090 - RNA, 19 nt, Artificial Sequence
  Description of Artificial Sequence: Synthetic oligonucleotide
auuguaacaaccagaugaa

SEQ ID NO: 1773091 - RNA, 19 nt, Artificial Sequence
  Description of Artificial Sequence: Synthetic oligonucleotide
cagagcuguaugcuaacac

SEQ ID NO: 1773092 - RNA, 19 nt, Artificial Sequence
  Description of Artificial Sequence: Synthetic oligonucleotide
ugguccuuaaucccacaaa

SEQ ID NO: 1773093 - RNA, 19 nt, Artificial Sequence
  Description of Artificial Sequence: Synthetic oligonucleotide
gcugagaccacuuaguacu

SEQ ID NO: 1773094 - RNA, 19 nt, Artificial Sequence
  Description of Artificial Sequence: Synthetic oligonucleotide
uccacacguaaggagaagu

SEQ ID NO: 1773095 - RNA, 19 nt, Artificial Sequence
  Description of Artificial Sequence: Synthetic oligonucleotide
aaccauuuugcuggagacu

SEQ ID NO: 1773096 - RNA, 19 nt, Artificial Sequence
  Description of Artificial Sequence: Synthetic oligonucleotide
cuugacugcaucgacacaa

SEQ ID NO: 1773097 - RNA, 19 nt, Artificial Sequence
  Description of Artificial Sequence: Synthetic oligonucleotide
caucgacacaauucuugag

SEQ ID NO: 1773098 - RNA, 19 nt, Artificial Sequence
  Description of Artificial Sequence: Synthetic oligonucleotide
uggcccaaugaacagggua

SEQ ID NO: 1773099 - RNA, 19 nt, Artificial Sequence
  Description of Artificial Sequence: Synthetic oligonucleotide
agcacgacuuucaucuuuc

SEQ ID NO: 1773100 - RNA, 19 nt, Artificial Sequence
  Description of Artificial Sequence: Synthetic oligonucleotide
acugaggaacaaaaguacu

SEQ ID NO: 1773101 - RNA, 19 nt, Artificial Sequence
  Description of Artificial Sequence: Synthetic oligonucleotide
uggcgggaccacuauacca

SEQ ID NO: 1773102 - RNA, 19 nt, Artificial Sequence
  Description of Artificial Sequence: Synthetic oligonucleotide
uggaggauugcaugguaau

SEQ ID NO: 1773103 - RNA, 19 nt, Artificial Sequence
  Description of Artificial Sequence: Synthetic oligonucleotide
ccacucuacagcaucuucg

SEQ ID NO: 1773104 - RNA, 19 nt, Artificial Sequence
  Description of Artificial Sequence: Synthetic oligonucleotide
uccacucuacagcaucuuc

SEQ ID NO: 1773105 - RNA, 19 nt, Artificial Sequence
  Description of Artificial Sequence: Synthetic oligonucleotide
aagaacaaccaaaguugga

SEQ ID NO: 1773106 - RNA, 19 nt, Artificial Sequence
  Description of Artificial Sequence: Synthetic oligonucleotide
cuauuguaacaaccagaug

SEQ ID NO: 1773107 - RNA, 19 nt, Artificial Sequence
  Description of Artificial Sequence: Synthetic oligonucleotide
ugagaccauggucugugau

SEQ ID NO: 1773108 - RNA, 19 nt, Artificial Sequence
  Description of Artificial Sequence: Synthetic oligonucleotide
aggcucaguaucaaguuca

SEQ ID NO: 1773109 - RNA, 19 nt, Artificial Sequence
  Description of Artificial Sequence: Synthetic oligonucleotide
aucaaguucaguggcggga

SEQ ID NO: 1773110 - RNA, 19 nt, Artificial Sequence
  Description of Artificial Sequence: Synthetic oligonucleotide
cugacuugacugcaucgac

SEQ ID NO: 1773111 - RNA, 19 nt, Artificial Sequence
  Description of Artificial Sequence: Synthetic oligonucleotide
aggauuaagauaaccugaa

SEQ ID NO: 1773112 - RNA, 19 nt, Artificial Sequence
  Description of Artificial Sequence: Synthetic oligonucleotide
gucuuuauuuauccaugga

SEQ ID NO: 1773113 - RNA, 19 nt, Artificial Sequence
  Description of Artificial Sequence: Synthetic oligonucleotide
gacagaucaagaugccgaa

SEQ ID NO: 1773114 - RNA, 19 nt, Artificial Sequence
  Description of Artificial Sequence: Synthetic oligonucleotide
auaucagucuggguaagau

SEQ ID NO: 1773115 - RNA, 19 nt, Artificial Sequence
  Description of Artificial Sequence: Synthetic oligonucleotide
accagaugaagaacaacca

SEQ ID NO: 1773116 - RNA, 19 nt, Artificial Sequence
  Description of Artificial Sequence: Synthetic oligonucleotide
auuaagccauggaguaaac

SEQ ID NO: 1773117 - RNA, 19 nt, Artificial Sequence
  Description of Artificial Sequence: Synthetic oligonucleotide
gaggauugcaugguaaugu

SEQ ID NO: 1773118 - RNA, 19 nt, Artificial Sequence
  Description of Artificial Sequence: Synthetic oligonucleotide
acaaccaaaguuggaggcu

SEQ ID NO: 1773119 - RNA, 19 nt, Artificial Sequence
  Description of Artificial Sequence: Synthetic oligonucleotide
cuauaccagucaccucugg

SEQ ID NO: 1773120 - RNA, 19 nt, Artificial Sequence
  Description of Artificial Sequence: Synthetic oligonucleotide
caaagucccuauuguaaca

SEQ ID NO: 1773121 - RNA, 19 nt, Artificial Sequence
  Description of Artificial Sequence: Synthetic oligonucleotide
uuugugcaaugcugauagc

SEQ ID NO: 1773122 - RNA, 19 nt, Artificial Sequence
  Description of Artificial Sequence: Synthetic oligonucleotide
cacguaaggagaaguaaaa

SEQ ID NO: 1773123 - RNA, 19 nt, Artificial Sequence
  Description of Artificial Sequence: Synthetic oligonucleotide
auuguagaagucgcuggga

SEQ ID NO: 1773124 - RNA, 19 nt, Artificial Sequence
  Description of Artificial Sequence: Synthetic oligonucleotide
aggagaaguaaaacuuuca

SEQ ID NO: 1773125 - RNA, 19 nt, Artificial Sequence
  Description of Artificial Sequence: Synthetic oligonucleotide
acacguaaggagaaguaaa

SEQ ID NO: 1773126 - RNA, 19 nt, Artificial Sequence
  Description of Artificial Sequence: Synthetic oligonucleotide
gaccacuuaguacugacuu

SEQ ID NO: 1773127 - RNA, 19 nt, Artificial Sequence
  Description of Artificial Sequence: Synthetic oligonucleotide
uccugaaaagcacgacuuu

SEQ ID NO: 1773128 - RNA, 19 nt, Artificial Sequence
  Description of Artificial Sequence: Synthetic oligonucleotide
uucaguggcgggaccacua

SEQ ID NO: 1773129 - RNA, 19 nt, Artificial Sequence
  Description of Artificial Sequence: Synthetic oligonucleotide
uccauuacacagagacuuu

SEQ ID NO: 1773130 - RNA, 19 nt, Artificial Sequence
  Description of Artificial Sequence: Synthetic oligonucleotide
ucgcugggagugcagacau

SEQ ID NO: 1773131 - RNA, 19 nt, Artificial Sequence
  Description of Artificial Sequence: Synthetic oligonucleotide
guaugcuaacacuaaaguu

SEQ ID NO: 1773132 - RNA, 19 nt, Artificial Sequence
  Description of Artificial Sequence: Synthetic oligonucleotide
cacucuacagcaucuucga

SEQ ID NO: 1773133 - RNA, 19 nt, Artificial Sequence
  Description of Artificial Sequence: Synthetic oligonucleotide
gaccacuauaccagucacc

SEQ ID NO: 1773134 - RNA, 19 nt, Artificial Sequence
  Description of Artificial Sequence: Synthetic oligonucleotide
agugaucauugucuauuuu

SEQ ID NO: 1773135 - RNA, 19 nt, Artificial Sequence
  Description of Artificial Sequence: Synthetic oligonucleotide
ugauagcaaucgauuccuc

SEQ ID NO: 1773136 - RNA, 19 nt, Artificial Sequence
  Description of Artificial Sequence: Synthetic oligonucleotide
guacugacuugacugcauc

SEQ ID NO: 1773137 - RNA, 19 nt, Artificial Sequence
  Description of Artificial Sequence: Synthetic oligonucleotide
gauugcaugguaaugucuu

SEQ ID NO: 1773138 - RNA, 19 nt, Artificial Sequence
  Description of Artificial Sequence: Synthetic oligonucleotide
gagaagcacaaugcugcug

SEQ ID NO: 1773139 - RNA, 19 nt, Artificial Sequence
  Description of Artificial Sequence: Synthetic oligonucleotide
uugacugcaucgacacaau

SEQ ID NO: 1773140 - RNA, 19 nt, Artificial Sequence
  Description of Artificial Sequence: Synthetic oligonucleotide
guuuaguccaagagugauc

SEQ ID NO: 1773141 - RNA, 19 nt, Artificial Sequence
  Description of Artificial Sequence: Synthetic oligonucleotide
acauauggcagaacauuau

SEQ ID NO: 1773142 - RNA, 19 nt, Artificial Sequence
  Description of Artificial Sequence: Synthetic oligonucleotide
augcuaacacuaaaguuuu

SEQ ID NO: 1773143 - RNA, 19 nt, Artificial Sequence
  Description of Artificial Sequence: Synthetic oligonucleotide
ugaacaggguaaagauguu

SEQ ID NO: 1773144 - RNA, 19 nt, Artificial Sequence
  Description of Artificial Sequence: Synthetic oligonucleotide
aaagcacgacuuucaucuu

SEQ ID NO: 1773145 - RNA, 19 nt, Artificial Sequence
  Description of Artificial Sequence: Synthetic oligonucleotide
caaccagaugaagaacaac

SEQ ID NO: 1773146 - RNA, 19 nt, Artificial Sequence
  Description of Artificial Sequence: Synthetic oligonucleotide
ggguuauaccuguggagug

SEQ ID NO: 1773147 - RNA, 19 nt, Artificial Sequence
  Description of Artificial Sequence: Synthetic oligonucleotide
gaauuaagccauggaguaa

SEQ ID NO: 1773148 - RNA, 19 nt, Artificial Sequence
  Description of Artificial Sequence: Synthetic oligonucleotide
cacuuaguacugacuugac

SEQ ID NO: 1773149 - RNA, 19 nt, Artificial Sequence
  Description of Artificial Sequence: Synthetic oligonucleotide
gugcaagcaggcauacugc

SEQ ID NO: 1773150 - RNA, 19 nt, Artificial Sequence
  Description of Artificial Sequence: Synthetic oligonucleotide
aucgauuccucugcagacu

SEQ ID NO: 1773151 - RNA, 19 nt, Artificial Sequence
  Description of Artificial Sequence: Synthetic oligonucleotide
gagcuguaugcuaacacua

SEQ ID NO: 1773152 - RNA, 19 nt, Artificial Sequence
  Description of Artificial Sequence: Synthetic oligonucleotide
ggcgggaccacuauaccag

SEQ ID NO: 1773153 - RNA, 19 nt, Artificial Sequence
  Description of Artificial Sequence: Synthetic oligonucleotide
agccaagaccaacugucaa

SEQ ID NO: 1773154 - RNA, 19 nt, Artificial Sequence
  Description of Artificial Sequence: Synthetic oligonucleotide
agguaccaacauauggcag

SEQ ID NO: 1773155 - RNA, 19 nt, Artificial Sequence
  Description of Artificial Sequence: Synthetic oligonucleotide
aagauggguuauaccugug

SEQ ID NO: 1773156 - RNA, 19 nt, Artificial Sequence
  Description of Artificial Sequence: Synthetic oligonucleotide
acacaauucuugaggauua

SEQ ID NO: 1773157 - RNA, 19 nt, Artificial Sequence
  Description of Artificial Sequence: Synthetic oligonucleotide
ggguaaagauguuuccaca

SEQ ID NO: 1773158 - RNA, 19 nt, Artificial Sequence
  Description of Artificial Sequence: Synthetic oligonucleotide
ucaguggcgggaccacuau

SEQ ID NO: 1773159 - RNA, 19 nt, Artificial Sequence
  Description of Artificial Sequence: Synthetic oligonucleotide
aucugauaacauccagaua

SEQ ID NO: 1773160 - RNA, 19 nt, Artificial Sequence
  Description of Artificial Sequence: Synthetic oligonucleotide
cuacuucucacccacuccu

SEQ ID NO: 1773161 - RNA, 19 nt, Artificial Sequence
  Description of Artificial Sequence: Synthetic oligonucleotide
guacucguccagucucuug

SEQ ID NO: 1773162 - RNA, 19 nt, Artificial Sequence
  Description of Artificial Sequence: Synthetic oligonucleotide
uaaucccacaaagucccua

SEQ ID NO: 1773163 - RNA, 19 nt, Artificial Sequence
  Description of Artificial Sequence: Synthetic oligonucleotide
ugacugcaucgacacaauu

SEQ ID NO: 1773164 - RNA, 19 nt, Artificial Sequence
  Description of Artificial Sequence: Synthetic oligonucleotide
cugaugagaugucagcacu

SEQ ID NO: 1773165 - RNA, 19 nt, Artificial Sequence
  Description of Artificial Sequence: Synthetic oligonucleotide
acuauaccagucaccucug

SEQ ID NO: 1773166 - RNA, 19 nt, Artificial Sequence
  Description of Artificial Sequence: Synthetic oligonucleotide
gggaccacuauaccaguca

SEQ ID NO: 1773167 - RNA, 19 nt, Artificial Sequence
  Description of Artificial Sequence: Synthetic oligonucleotide
ggaccacuauaccagucac

SEQ ID NO: 1773168 - RNA, 19 nt, Artificial Sequence
  Description of Artificial Sequence: Synthetic oligonucleotide
acaaccagaugaagaacaa

SEQ ID NO: 1773169 - RNA, 19 nt, Artificial Sequence
  Description of Artificial Sequence: Synthetic oligonucleotide
cagcauuaccugaggagga

SEQ ID NO: 1773170 - RNA, 19 nt, Artificial Sequence
  Description of Artificial Sequence: Synthetic oligonucleotide
cagcagaaugaaugaccac

SEQ ID NO: 1773171 - RNA, 19 nt, Artificial Sequence
  Description of Artificial Sequence: Synthetic oligonucleotide
accaacugucaaaugcaga

SEQ ID NO: 1773172 - RNA, 19 nt, Artificial Sequence
  Description of Artificial Sequence: Synthetic oligonucleotide
acuugacugcaucgacaca

SEQ ID NO: 1773173 - RNA, 19 nt, Artificial Sequence
  Description of Artificial Sequence: Synthetic oligonucleotide
uagaagucgcugggagugc

SEQ ID NO: 1773174 - RNA, 19 nt, Artificial Sequence
  Description of Artificial Sequence: Synthetic oligonucleotide
ccuacuucucacccacucc

SEQ ID NO: 1773175 - RNA, 19 nt, Artificial Sequence
  Description of Artificial Sequence: Synthetic oligonucleotide
cauccagacagaucaagau

SEQ ID NO: 1773176 - RNA, 19 nt, Artificial Sequence
  Description of Artificial Sequence: Synthetic oligonucleotide
ccaaugaacaggguaaaga

SEQ ID NO: 1773177 - RNA, 19 nt, Artificial Sequence
  Description of Artificial Sequence: Synthetic oligonucleotide
aaccaaaguuggaggcugu

SEQ ID NO: 1773178 - RNA, 19 nt, Artificial Sequence
  Description of Artificial Sequence: Synthetic oligonucleotide
cacacguaaggagaaguaa

SEQ ID NO: 1773179 - RNA, 19 nt, Artificial Sequence
  Description of Artificial Sequence: Synthetic oligonucleotide
cccuauuguaacaaccaga

SEQ ID NO: 1773180 - RNA, 19 nt, Artificial Sequence
  Description of Artificial Sequence: Synthetic oligonucleotide
agaccacuuaguacugacu

SEQ ID NO: 1773181 - RNA, 19 nt, Artificial Sequence
  Description of Artificial Sequence: Synthetic oligonucleotide
gagcugaauuggccuugcc

SEQ ID NO: 1773182 - RNA, 19 nt, Artificial Sequence
  Description of Artificial Sequence: Synthetic oligonucleotide
aguacugacuugacugcau

SEQ ID NO: 1773183 - RNA, 19 nt, Artificial Sequence
  Description of Artificial Sequence: Synthetic oligonucleotide
agcuguaugcuaacacuaa

SEQ ID NO: 1773184 - RNA, 19 nt, Artificial Sequence
  Description of Artificial Sequence: Synthetic oligonucleotide
accagucaccucuggccca

SEQ ID NO: 1773185 - RNA, 19 nt, Artificial Sequence
  Description of Artificial Sequence: Synthetic oligonucleotide
uuccuacuucucacccacu

SEQ ID NO: 1773186 - RNA, 19 nt, Artificial Sequence
  Description of Artificial Sequence: Synthetic oligonucleotide
caaugcugauagcaaucga

SEQ ID NO: 1773187 - RNA, 19 nt, Artificial Sequence
  Description of Artificial Sequence: Synthetic oligonucleotide
guaccaacauauggcagaa

SEQ ID NO: 1773188 - RNA, 19 nt, Artificial Sequence
  Description of Artificial Sequence: Synthetic oligonucleotide
uuuauccauggagcugaau

SEQ ID NO: 1773189 - RNA, 19 nt, Artificial Sequence
  Description of Artificial Sequence: Synthetic oligonucleotide
auccacacguaaggagaag

SEQ ID NO: 1773190 - RNA, 19 nt, Artificial Sequence
  Description of Artificial Sequence: Synthetic oligonucleotide
gcuguaugcuaacacuaaa

SEQ ID NO: 1773191 - RNA, 19 nt, Artificial Sequence
  Description of Artificial Sequence: Synthetic oligonucleotide
gagugaucauugucuauuu

SEQ ID NO: 1773192 - RNA, 19 nt, Artificial Sequence
  Description of Artificial Sequence: Synthetic oligonucleotide
uguuccagguuaggacaaa

SEQ ID NO: 1773193 - RNA, 19 nt, Artificial Sequence
  Description of Artificial Sequence: Synthetic oligonucleotide
gccaagaccaacugucaaa

SEQ ID NO: 1773194 - RNA, 19 nt, Artificial Sequence
  Description of Artificial Sequence: Synthetic oligonucleotide
gcccuaggcaauguagucc

SEQ ID NO: 1773195 - RNA, 19 nt, Artificial Sequence
  Description of Artificial Sequence: Synthetic oligonucleotide
ggcccaaugaacaggguaa

SEQ ID NO: 1773196 - RNA, 19 nt, Artificial Sequence
  Description of Artificial Sequence: Synthetic oligonucleotide
agucuggguaagauccaga

SEQ ID NO: 1773197 - RNA, 19 nt, Artificial Sequence
  Description of Artificial Sequence: Synthetic oligonucleotide
cugguccuuaaucccacaa

SEQ ID NO: 1773198 - RNA, 19 nt, Artificial Sequence
  Description of Artificial Sequence: Synthetic oligonucleotide
gaccauggucugugaucug

SEQ ID NO: 1773199 - RNA, 19 nt, Artificial Sequence
  Description of Artificial Sequence: Synthetic oligonucleotide
agauacagguuuaguccaa

SEQ ID NO: 1773200 - RNA, 19 nt, Artificial Sequence
  Description of Artificial Sequence: Synthetic oligonucleotide
cauaguccuuagagcuguc

SEQ ID NO: 1773201 - RNA, 19 nt, Artificial Sequence
  Description of Artificial Sequence: Synthetic oligonucleotide
cauuugugcaaugcugaua

SEQ ID NO: 1773202 - RNA, 19 nt, Artificial Sequence
  Description of Artificial Sequence: Synthetic oligonucleotide
uugugcaagcaggcauacu

SEQ ID NO: 1773203 - RNA, 19 nt, Artificial Sequence
  Description of Artificial Sequence: Synthetic oligonucleotide
uaccaacauauggcagaac

SEQ ID NO: 1773204 - RNA, 19 nt, Artificial Sequence
  Description of Artificial Sequence: Synthetic oligonucleotide
ccauuacacagagacuuuc

SEQ ID NO: 1773205 - RNA, 19 nt, Artificial Sequence
  Description of Artificial Sequence: Synthetic oligonucleotide
cagcugagaccacuuagua

SEQ ID NO: 1773206 - RNA, 19 nt, Artificial Sequence
  Description of Artificial Sequence: Synthetic oligonucleotide
ggguaagauccagauguuc

SEQ ID NO: 1773207 - RNA, 19 nt, Artificial Sequence
  Description of Artificial Sequence: Synthetic oligonucleotide
aucccacaaagucccuauu

SEQ ID NO: 1773208 - RNA, 19 nt, Artificial Sequence
  Description of Artificial Sequence: Synthetic oligonucleotide
cacgacuuucaucuuuccu

SEQ ID NO: 1773209 - RNA, 19 nt, Artificial Sequence
  Description of Artificial Sequence: Synthetic oligonucleotide
cauggucugugaucugaua

SEQ ID NO: 1773210 - RNA, 19 nt, Artificial Sequence
  Description of Artificial Sequence: Synthetic oligonucleotide
gcucuaaaaucugccuaac

SEQ ID NO: 1773211 - RNA, 19 nt, Artificial Sequence
  Description of Artificial Sequence: Synthetic oligonucleotide
gcacgacuuucaucuuucc

SEQ ID NO: 1773212 - RNA, 19 nt, Artificial Sequence
  Description of Artificial Sequence: Synthetic oligonucleotide
gucagcacuccaagagcuc

SEQ ID NO: 1773213 - RNA, 19 nt, Artificial Sequence
  Description of Artificial Sequence: Synthetic oligonucleotide
ggagcugaauuggccuugc

SEQ ID NO: 1773214 - RNA, 19 nt, Artificial Sequence
  Description of Artificial Sequence: Synthetic oligonucleotide
cagauagacugaggaacaa

SEQ ID NO: 1773215 - RNA, 19 nt, Artificial Sequence
  Description of Artificial Sequence: Synthetic oligonucleotide
gguuauaccuguggagugu

SEQ ID NO: 1773216 - RNA, 19 nt, Artificial Sequence
  Description of Artificial Sequence: Synthetic oligonucleotide
auuuauccauggagcugaa

SEQ ID NO: 1773217 - RNA, 19 nt, Artificial Sequence
  Description of Artificial Sequence: Synthetic oligonucleotide
cacaauucuugaggauuaa

SEQ ID NO: 1773218 - RNA, 19 nt, Artificial Sequence
  Description of Artificial Sequence: Synthetic oligonucleotide
guuauaccuguggaguguu

SEQ ID NO: 1773219 - RNA, 19 nt, Artificial Sequence
  Description of Artificial Sequence: Synthetic oligonucleotide
cuacagcaucuucgauauc

SEQ ID NO: 1773220 - RNA, 19 nt, Artificial Sequence
  Description of Artificial Sequence: Synthetic oligonucleotide
ggauugcaugguaaugucu

SEQ ID NO: 1773221 - RNA, 19 nt, Artificial Sequence
  Description of Artificial Sequence: Synthetic oligonucleotide
ggagaagcacaaugcugcu

SEQ ID NO: 1773222 - RNA, 19 nt, Artificial Sequence
  Description of Artificial Sequence: Synthetic oligonucleotide
cccuaggcaauguaguccu

SEQ ID NO: 1773223 - RNA, 19 nt, Artificial Sequence
  Description of Artificial Sequence: Synthetic oligonucleotide
gcagagcuguaugcuaaca

SEQ ID NO: 1773224 - RNA, 19 nt, Artificial Sequence
  Description of Artificial Sequence: Synthetic oligonucleotide
ccaagagcucuagaaaucu

SEQ ID NO: 1773225 - RNA, 19 nt, Artificial Sequence
  Description of Artificial Sequence: Synthetic oligonucleotide
gucuuuugcccuaggcaau

SEQ ID NO: 1773226 - RNA, 19 nt, Artificial Sequence
  Description of Artificial Sequence: Synthetic oligonucleotide
ccuaaccauuuugcuggag

SEQ ID NO: 1773227 - RNA, 19 nt, Artificial Sequence
  Description of Artificial Sequence: Synthetic oligonucleotide
ccacacguaaggagaagua

SEQ ID NO: 1773228 - RNA, 19 nt, Artificial Sequence
  Description of Artificial Sequence: Synthetic oligonucleotide
gccgaagauucuggcagca

SEQ ID NO: 1773229 - RNA, 19 nt, Artificial Sequence
  Description of Artificial Sequence: Synthetic oligonucleotide
gcaaccaagccaagaccaa

SEQ ID NO: 1773230 - RNA, 19 nt, Artificial Sequence
  Description of Artificial Sequence: Synthetic oligonucleotide
ccaagaccaacugucaaau

SEQ ID NO: 1773231 - RNA, 19 nt, Artificial Sequence
  Description of Artificial Sequence: Synthetic oligonucleotide
gccuaaccauuuugcugga

SEQ ID NO: 1773232 - RNA, 19 nt, Artificial Sequence
  Description of Artificial Sequence: Synthetic oligonucleotide
cuuuugcccuaggcaaugu

SEQ ID NO: 1773233 - RNA, 19 nt, Artificial Sequence
  Description of Artificial Sequence: Synthetic oligonucleotide
guucaguggcgggaccacu

SEQ ID NO: 1773234 - RNA, 19 nt, Artificial Sequence
  Description of Artificial Sequence: Synthetic oligonucleotide
gcaugguaaugucuuuauu

SEQ ID NO: 1773235 - RNA, 19 nt, Artificial Sequence
  Description of Artificial Sequence: Synthetic oligonucleotide
caguggcgggaccacuaua

SEQ ID NO: 1773236 - RNA, 19 nt, Artificial Sequence
  Description of Artificial Sequence: Synthetic oligonucleotide
ggccuugccugcacuuuuc

SEQ ID NO: 1773237 - RNA, 19 nt, Artificial Sequence
  Description of Artificial Sequence: Synthetic oligonucleotide
cugcaucgacacaauucuu

SEQ ID NO: 1773238 - RNA, 19 nt, Artificial Sequence
  Description of Artificial Sequence: Synthetic oligonucleotide
cgggaccacuauaccaguc

SEQ ID NO: 1773239 - RNA, 19 nt, Artificial Sequence
  Description of Artificial Sequence: Synthetic oligonucleotide
gcgggaccacuauaccagu

SEQ ID NO: 1773240 - RNA, 19 nt, Artificial Sequence
  Description of Artificial Sequence: Synthetic oligonucleotide
ccgaagauucuggcagcaa

SEQ ID NO: 1773241 - RNA, 19 nt, Artificial Sequence
  Description of Artificial Sequence: Synthetic oligonucleotide
ggcauacugcuuggaggau

SEQ ID NO: 1773242 - RNA, 19 nt, Artificial Sequence
  Description of Artificial Sequence: Synthetic oligonucleotide
ccuaggcaauguaguccuu

SEQ ID NO: 1773243 - RNA, 19 nt, Artificial Sequence
  Description of Artificial Sequence: Synthetic oligonucleotide
aaacauuuaccccagaagc

SEQ ID NO: 1773244 - RNA, 19 nt, Artificial Sequence
  Description of Artificial Sequence: Synthetic oligonucleotide
uauuauaugauccagguuc

SEQ ID NO: 1773245 - RNA, 19 nt, Artificial Sequence
  Description of Artificial Sequence: Synthetic oligonucleotide
uuugcaguggaaaugaagg

SEQ ID NO: 1773246 - RNA, 19 nt, Artificial Sequence
  Description of Artificial Sequence: Synthetic oligonucleotide
acugaugucacucacauag

SEQ ID NO: 1773247 - RNA, 19 nt, Artificial Sequence
  Description of Artificial Sequence: Synthetic oligonucleotide
acagauuugagcuucuggc

SEQ ID NO: 1773248 - RNA, 19 nt, Artificial Sequence
  Description of Artificial Sequence: Synthetic oligonucleotide
aagauaaugccccagucag

SEQ ID NO: 1773249 - RNA, 19 nt, Artificial Sequence
  Description of Artificial Sequence: Synthetic oligonucleotide
aaacuaauacauaccaucc

SEQ ID NO: 1773250 - RNA, 19 nt, Artificial Sequence
  Description of Artificial Sequence: Synthetic oligonucleotide
aacuaauacauaccauccc

SEQ ID NO: 1773251 - RNA, 19 nt, Artificial Sequence
  Description of Artificial Sequence: Synthetic oligonucleotide
acaggcauucauuuuaacc

SEQ ID NO: 1773252 - RNA, 19 nt, Artificial Sequence
  Description of Artificial Sequence: Synthetic oligonucleotide
ugauucaagauaaugcccc

SEQ ID NO: 1773253 - RNA, 19 nt, Artificial Sequence
  Description of Artificial Sequence: Synthetic oligonucleotide
aagacuucucaccuucugc

SEQ ID NO: 1773254 - RNA, 19 nt, Artificial Sequence
  Description of Artificial Sequence: Synthetic oligonucleotide
ucuucguacaagcacagcc

SEQ ID NO: 1773255 - RNA, 19 nt, Artificial Sequence
  Description of Artificial Sequence: Synthetic oligonucleotide
caggcauucauuuuaaccc

SEQ ID NO: 1773256 - RNA, 19 nt, Artificial Sequence
  Description of Artificial Sequence: Synthetic oligonucleotide
ugacucaugagauucauga

SEQ ID NO: 1773257 - RNA, 19 nt, Artificial Sequence
  Description of Artificial Sequence: Synthetic oligonucleotide
aaaacaguucagcagagaa

SEQ ID NO: 1773258 - RNA, 19 nt, Artificial Sequence
  Description of Artificial Sequence: Synthetic oligonucleotide
ucuauuauaugauccaggu

SEQ ID NO: 1773259 - RNA, 19 nt, Artificial Sequence
  Description of Artificial Sequence: Synthetic oligonucleotide
uacuucacagauuugagcu

SEQ ID NO: 1773260 - RNA, 19 nt, Artificial Sequence
  Description of Artificial Sequence: Synthetic oligonucleotide
aagacagcuauccauguca

SEQ ID NO: 1773261 - RNA, 19 nt, Artificial Sequence
  Description of Artificial Sequence: Synthetic oligonucleotide
caaacuaauacauaccauc

SEQ ID NO: 1773262 - RNA, 19 nt, Artificial Sequence
  Description of Artificial Sequence: Synthetic oligonucleotide
aaaaccagccuucuggagu

SEQ ID NO: 1773263 - RNA, 19 nt, Artificial Sequence
  Description of Artificial Sequence: Synthetic oligonucleotide
uuaaacacacugaggaagc

SEQ ID NO: 1773264 - RNA, 19 nt, Artificial Sequence
  Description of Artificial Sequence: Synthetic oligonucleotide
gaaauaucagugcugacuc

SEQ ID NO: 1773265 - RNA, 19 nt, Artificial Sequence
  Description of Artificial Sequence: Synthetic oligonucleotide
aaagcugaggcacaaacua

SEQ ID NO: 1773266 - RNA, 19 nt, Artificial Sequence
  Description of Artificial Sequence: Synthetic oligonucleotide
uaaaagcugaggcacaaac

SEQ ID NO: 1773267 - RNA, 19 nt, Artificial Sequence
  Description of Artificial Sequence: Synthetic oligonucleotide
uggcucauuaaacacacug

SEQ ID NO: 1773268 - RNA, 19 nt, Artificial Sequence
  Description of Artificial Sequence: Synthetic oligonucleotide
acuaauacauaccaucccu

SEQ ID NO: 1773269 - RNA, 19 nt, Artificial Sequence
  Description of Artificial Sequence: Synthetic oligonucleotide
uagaaguacucccaguuca

SEQ ID NO: 1773270 - RNA, 19 nt, Artificial Sequence
  Description of Artificial Sequence: Synthetic oligonucleotide
auaugauccagguuccagg

SEQ ID NO: 1773271 - RNA, 19 nt, Artificial Sequence
  Description of Artificial Sequence: Synthetic oligonucleotide
aaugaaggccauaaaagcu

SEQ ID NO: 1773272 - RNA, 19 nt, Artificial Sequence
  Description of Artificial Sequence: Synthetic oligonucleotide
auuauaugauccagguucc

SEQ ID NO: 1773273 - RNA, 19 nt, Artificial Sequence
  Description of Artificial Sequence: Synthetic oligonucleotide
acucaugagauucaugaca

SEQ ID NO: 1773274 - RNA, 19 nt, Artificial Sequence
  Description of Artificial Sequence: Synthetic oligonucleotide
cucuauuauaugauccagg

SEQ ID NO: 1773275 - RNA, 19 nt, Artificial Sequence
  Description of Artificial Sequence: Synthetic oligonucleotide
gcaguuauaucucagccgg

SEQ ID NO: 1773276 - RNA, 19 nt, Artificial Sequence
  Description of Artificial Sequence: Synthetic oligonucleotide
uucguacaagcacagccgg

SEQ ID NO: 1773277 - RNA, 19 nt, Artificial Sequence
  Description of Artificial Sequence: Synthetic oligonucleotide
aaacaguucagcagagaac

SEQ ID NO: 1773278 - RNA, 19 nt, Artificial Sequence
  Description of Artificial Sequence: Synthetic oligonucleotide
augauucaagauaaugccc

SEQ ID NO: 1773279 - RNA, 19 nt, Artificial Sequence
  Description of Artificial Sequence: Synthetic oligonucleotide
cuucguacaagcacagccg

SEQ ID NO: 1773280 - RNA, 19 nt, Artificial Sequence
  Description of Artificial Sequence: Synthetic oligonucleotide
accucucucagguacgccc

SEQ ID NO: 1773281 - RNA, 19 nt, Artificial Sequence
  Description of Artificial Sequence: Synthetic oligonucleotide
uuauaucucagccggcaug

SEQ ID NO: 1773282 - RNA, 19 nt, Artificial Sequence
  Description of Artificial Sequence: Synthetic oligonucleotide
uucuggagugcagagacgg

SEQ ID NO: 1773283 - RNA, 19 nt, Artificial Sequence
  Description of Artificial Sequence: Synthetic oligonucleotide
uguagaaguacucccaguu

SEQ ID NO: 1773284 - RNA, 19 nt, Artificial Sequence
  Description of Artificial Sequence: Synthetic oligonucleotide
acauuuaccccagaagcac

SEQ ID NO: 1773285 - RNA, 19 nt, Artificial Sequence
  Description of Artificial Sequence: Synthetic oligonucleotide
aguucagcagagaacauuc

SEQ ID NO: 1773286 - RNA, 19 nt, Artificial Sequence
  Description of Artificial Sequence: Synthetic oligonucleotide
ggaacuaaggacccgcucg

SEQ ID NO: 1773287 - RNA, 19 nt, Artificial Sequence
  Description of Artificial Sequence: Synthetic oligonucleotide
uccuuagaaaugcaaacau

SEQ ID NO: 1773288 - RNA, 19 nt, Artificial Sequence
  Description of Artificial Sequence: Synthetic oligonucleotide
ucgcaguuauaucucagcc

SEQ ID NO: 1773289 - RNA, 19 nt, Artificial Sequence
  Description of Artificial Sequence: Synthetic oligonucleotide
ucgaauucuccucgggccg

SEQ ID NO: 1773290 - RNA, 19 nt, Artificial Sequence
  Description of Artificial Sequence: Synthetic oligonucleotide
agugcuuggaaagacagcu

SEQ ID NO: 1773291 - RNA, 19 nt, Artificial Sequence
  Description of Artificial Sequence: Synthetic oligonucleotide
ucagguacgccccggauac

SEQ ID NO: 1773292 - RNA, 19 nt, Artificial Sequence
  Description of Artificial Sequence: Synthetic oligonucleotide
ggcacaaacuaauacauac

SEQ ID NO: 1773293 - RNA, 19 nt, Artificial Sequence
  Description of Artificial Sequence: Synthetic oligonucleotide
uggcucauggaacuaagga

SEQ ID NO: 1773294 - RNA, 19 nt, Artificial Sequence
  Description of Artificial Sequence: Synthetic oligonucleotide
uaucagugcugacucauga

SEQ ID NO: 1773295 - RNA, 19 nt, Artificial Sequence
  Description of Artificial Sequence: Synthetic oligonucleotide
uucaagauaaugccccagu

SEQ ID NO: 1773296 - RNA, 19 nt, Artificial Sequence
  Description of Artificial Sequence: Synthetic oligonucleotide
cucgaauucuccucgggcc

SEQ ID NO: 1773297 - RNA, 19 nt, Artificial Sequence
  Description of Artificial Sequence: Synthetic oligonucleotide
aauacauaccaucccucau

SEQ ID NO: 1773298 - RNA, 19 nt, Artificial Sequence
  Description of Artificial Sequence: Synthetic oligonucleotide
cacaaacuaauacauacca

SEQ ID NO: 1773299 - RNA, 19 nt, Artificial Sequence
  Description of Artificial Sequence: Synthetic oligonucleotide
ucucuauuauaugauccag

SEQ ID NO: 1773300 - RNA, 19 nt, Artificial Sequence
  Description of Artificial Sequence: Synthetic oligonucleotide
uauaugauccagguuccag

SEQ ID NO: 1773301 - RNA, 19 nt, Artificial Sequence
  Description of Artificial Sequence: Synthetic oligonucleotide
agagguguaagcacucacc

SEQ ID NO: 1773302 - RNA, 19 nt, Artificial Sequence
  Description of Artificial Sequence: Synthetic oligonucleotide
aauguagucagagcugcca

SEQ ID NO: 1773303 - RNA, 19 nt, Artificial Sequence
  Description of Artificial Sequence: Synthetic oligonucleotide
aguacucccaguucaccuc

SEQ ID NO: 1773304 - RNA, 19 nt, Artificial Sequence
  Description of Artificial Sequence: Synthetic oligonucleotide
cauguggcucauuaaacac

SEQ ID NO: 1773305 - RNA, 19 nt, Artificial Sequence
  Description of Artificial Sequence: Synthetic oligonucleotide
aauaucagugcugacucau

SEQ ID NO: 1773306 - RNA, 19 nt, Artificial Sequence
  Description of Artificial Sequence: Synthetic oligonucleotide
guagucgucggucaccucc

SEQ ID NO: 1773307 - RNA, 19 nt, Artificial Sequence
  Description of Artificial Sequence: Synthetic oligonucleotide
gacaccgggagcuggaagc

SEQ ID NO: 1773308 - RNA, 19 nt, Artificial Sequence
  Description of Artificial Sequence: Synthetic oligonucleotide
aacuugacgcucuuggguu

SEQ ID NO: 1773309 - RNA, 19 nt, Artificial Sequence
  Description of Artificial Sequence: Synthetic oligonucleotide
aggaguucggcgucguugg

SEQ ID NO: 1773310 - RNA, 19 nt, Artificial Sequence
  Description of Artificial Sequence: Synthetic oligonucleotide
ucaagauaaugccccaguc

SEQ ID NO: 1773311 - RNA, 19 nt, Artificial Sequence
  Description of Artificial Sequence: Synthetic oligonucleotide
gucaaaggggcccuggcag

SEQ ID NO: 1773312 - RNA, 19 nt, Artificial Sequence
  Description of Artificial Sequence: Synthetic oligonucleotide
cuaauacauaccaucccuc

SEQ ID NO: 1773313 - RNA, 19 nt, Artificial Sequence
  Description of Artificial Sequence: Synthetic oligonucleotide
acagccgggagccggacac

SEQ ID NO: 1773314 - RNA, 19 nt, Artificial Sequence
  Description of Artificial Sequence: Synthetic oligonucleotide
uauaucucagccggcaugu

SEQ ID NO: 1773315 - RNA, 19 nt, Artificial Sequence
  Description of Artificial Sequence: Synthetic oligonucleotide
aaauaucagugcugacuca

SEQ ID NO: 1773316 - RNA, 19 nt, Artificial Sequence
  Description of Artificial Sequence: Synthetic oligonucleotide
cuugcacucgcuguggagg

SEQ ID NO: 1773317 - RNA, 19 nt, Artificial Sequence
  Description of Artificial Sequence: Synthetic oligonucleotide
gaugucacucacauagccc

SEQ ID NO: 1773318 - RNA, 19 nt, Artificial Sequence
  Description of Artificial Sequence: Synthetic oligonucleotide
cucauggaacuaaggaccc

SEQ ID NO: 1773319 - RNA, 19 nt, Artificial Sequence
  Description of Artificial Sequence: Synthetic oligonucleotide
aacauucuccauuuuccuu

SEQ ID NO: 1773320 - RNA, 19 nt, Artificial Sequence
  Description of Artificial Sequence: Synthetic oligonucleotide
augacaggcauucauuuua

SEQ ID NO: 1773321 - RNA, 19 nt, Artificial Sequence
  Description of Artificial Sequence: Synthetic oligonucleotide
ugcaccccugucaaaguag

SEQ ID NO: 1773322 - RNA, 19 nt, Artificial Sequence
  Description of Artificial Sequence: Synthetic oligonucleotide
augucaaaggggcccuggc

SEQ ID NO: 1773323 - RNA, 19 nt, Artificial Sequence
  Description of Artificial Sequence: Synthetic oligonucleotide
ucccaguucaccucccucc

SEQ ID NO: 1773324 - RNA, 19 nt, Artificial Sequence
  Description of Artificial Sequence: Synthetic oligonucleotide
gaaaaccagccuucuggag

SEQ ID NO: 1773325 - RNA, 19 nt, Artificial Sequence
  Description of Artificial Sequence: Synthetic oligonucleotide
gugaaaagcaggcuguaga

SEQ ID NO: 1773326 - RNA, 19 nt, Artificial Sequence
  Description of Artificial Sequence: Synthetic oligonucleotide
cugaggcacaaacuaauac

SEQ ID NO: 1773327 - RNA, 19 nt, Artificial Sequence
  Description of Artificial Sequence: Synthetic oligonucleotide
augaaggccauaaaagcug

SEQ ID NO: 1773328 - RNA, 19 nt, Artificial Sequence
  Description of Artificial Sequence: Synthetic oligonucleotide
cuucuuggaccguuucugg

SEQ ID NO: 1773329 - RNA, 19 nt, Artificial Sequence
  Description of Artificial Sequence: Synthetic oligonucleotide
ucgucggucaccuccgugc

SEQ ID NO: 1773330 - RNA, 19 nt, Artificial Sequence
  Description of Artificial Sequence: Synthetic oligonucleotide
agcgacugaugucacucac

SEQ ID NO: 1773331 - RNA, 19 nt, Artificial Sequence
  Description of Artificial Sequence: Synthetic oligonucleotide
auuugcaguggaaaugaag

SEQ ID NO: 1773332 - RNA, 19 nt, Artificial Sequence
  Description of Artificial Sequence: Synthetic oligonucleotide
cauuuaccccagaagcacc

SEQ ID NO: 1773333 - RNA, 19 nt, Artificial Sequence
  Description of Artificial Sequence: Synthetic oligonucleotide
ucaugagauucaugacagg

SEQ ID NO: 1773334 - RNA, 19 nt, Artificial Sequence
  Description of Artificial Sequence: Synthetic oligonucleotide
ucucgcaguuauaucucag

SEQ ID NO: 1773335 - RNA, 19 nt, Artificial Sequence
  Description of Artificial Sequence: Synthetic oligonucleotide
cugccguuguacuucacag

SEQ ID NO: 1773336 - RNA, 19 nt, Artificial Sequence
  Description of Artificial Sequence: Synthetic oligonucleotide
uacaagcacagccgggagc

SEQ ID NO: 1773337 - RNA, 19 nt, Artificial Sequence
  Description of Artificial Sequence: Synthetic oligonucleotide
caucccucauaccacagug

SEQ ID NO: 1773338 - RNA, 19 nt, Artificial Sequence
  Description of Artificial Sequence: Synthetic oligonucleotide
cuccgugccaucuucguac

SEQ ID NO: 1773339 - RNA, 19 nt, Artificial Sequence
  Description of Artificial Sequence: Synthetic oligonucleotide
ugucaaaggggcccuggca

SEQ ID NO: 1773340 - RNA, 19 nt, Artificial Sequence
  Description of Artificial Sequence: Synthetic oligonucleotide
gagcacagcacacauugca

SEQ ID NO: 1773341 - RNA, 19 nt, Artificial Sequence
  Description of Artificial Sequence: Synthetic oligonucleotide
uagucgucggucaccuccg

SEQ ID NO: 1773342 - RNA, 19 nt, Artificial Sequence
  Description of Artificial Sequence: Synthetic oligonucleotide
uauccaugucaaaggggcc

SEQ ID NO: 1773343 - RNA, 19 nt, Artificial Sequence
  Description of Artificial Sequence: Synthetic oligonucleotide
aggcauucauuuuaaccca

SEQ ID NO: 1773344 - RNA, 19 nt, Artificial Sequence
  Description of Artificial Sequence: Synthetic oligonucleotide
cauggaacuaaggacccgc

SEQ ID NO: 1773345 - RNA, 19 nt, Artificial Sequence
  Description of Artificial Sequence: Synthetic oligonucleotide
gacgcucuuggguuugcgg

SEQ ID NO: 1773346 - RNA, 19 nt, Artificial Sequence
  Description of Artificial Sequence: Synthetic oligonucleotide
ucccuguugccauaggggu

SEQ ID NO: 1773347 - RNA, 19 nt, Artificial Sequence
  Description of Artificial Sequence: Synthetic oligonucleotide
gaagcaccauuucucucag

SEQ ID NO: 1773348 - RNA, 19 nt, Artificial Sequence
  Description of Artificial Sequence: Synthetic oligonucleotide
gaagcgacugaugucacuc

SEQ ID NO: 1773349 - RNA, 19 nt, Artificial Sequence
  Description of Artificial Sequence: Synthetic oligonucleotide
auacauaccaucccucaua

SEQ ID NO: 1773350 - RNA, 19 nt, Artificial Sequence
  Description of Artificial Sequence: Synthetic oligonucleotide
ucguacaagcacagccggg

SEQ ID NO: 1773351 - RNA, 19 nt, Artificial Sequence
  Description of Artificial Sequence: Synthetic oligonucleotide
agcagcaggaguucggcgu

SEQ ID NO: 1773352 - RNA, 19 nt, Artificial Sequence
  Description of Artificial Sequence: Synthetic oligonucleotide
uugcacucgcuguggaggg

SEQ ID NO: 1773353 - RNA, 19 nt, Artificial Sequence
  Description of Artificial Sequence: Synthetic oligonucleotide
gagggcucgcaacuugacg

SEQ ID NO: 1773354 - RNA, 19 nt, Artificial Sequence
  Description of Artificial Sequence: Synthetic oligonucleotide
uuugcggagcacagcacac

SEQ ID NO: 1773355 - RNA, 19 nt, Artificial Sequence
  Description of Artificial Sequence: Synthetic oligonucleotide
caagauaaugccccaguca

SEQ ID NO: 1773356 - RNA, 19 nt, Artificial Sequence
  Description of Artificial Sequence: Synthetic oligonucleotide
agguguaagcacucaccuc

SEQ ID NO: 1773357 - RNA, 19 nt, Artificial Sequence
  Description of Artificial Sequence: Synthetic oligonucleotide
gacaccgugagcaccuucc

SEQ ID NO: 1773358 - RNA, 19 nt, Artificial Sequence
  Description of Artificial Sequence: Synthetic oligonucleotide
gauucaagauaaugcccca

SEQ ID NO: 1773359 - RNA, 19 nt, Artificial Sequence
  Description of Artificial Sequence: Synthetic oligonucleotide
cuuggaccguuucuggggc

SEQ ID NO: 1773360 - RNA, 19 nt, Artificial Sequence
  Description of Artificial Sequence: Synthetic oligonucleotide
uaccacaguggccaaguuc

SEQ ID NO: 1773361 - RNA, 19 nt, Artificial Sequence
  Description of Artificial Sequence: Synthetic oligonucleotide
uaaggacccgcucgaauuc

SEQ ID NO: 1773362 - RNA, 19 nt, Artificial Sequence
  Description of Artificial Sequence: Synthetic oligonucleotide
ggaaagacagcuauccaug

SEQ ID NO: 1773363 - RNA, 19 nt, Artificial Sequence
  Description of Artificial Sequence: Synthetic oligonucleotide
agaaguacucccaguucac

SEQ ID NO: 1773364 - RNA, 19 nt, Artificial Sequence
  Description of Artificial Sequence: Synthetic oligonucleotide
gugccaucuucguacaagc

SEQ ID NO: 1773365 - RNA, 19 nt, Artificial Sequence
  Description of Artificial Sequence: Synthetic oligonucleotide
uuccgagcaggccacuucu

SEQ ID NO: 1773366 - RNA, 19 nt, Artificial Sequence
  Description of Artificial Sequence: Synthetic oligonucleotide
acgccgaacuugcacucgc

SEQ ID NO: 1773367 - RNA, 19 nt, Artificial Sequence
  Description of Artificial Sequence: Synthetic oligonucleotide
caucuucguacaagcacag

SEQ ID NO: 1773368 - RNA, 19 nt, Artificial Sequence
  Description of Artificial Sequence: Synthetic oligonucleotide
agugaaaagcaggcuguag

SEQ ID NO: 1773369 - RNA, 19 nt, Artificial Sequence
  Description of Artificial Sequence: Synthetic oligonucleotide
ggaauguagucagagcugc

SEQ ID NO: 1773370 - RNA, 19 nt, Artificial Sequence
  Description of Artificial Sequence: Synthetic oligonucleotide
gaacuugcacucgcugugg

SEQ ID NO: 1773371 - RNA, 19 nt, Artificial Sequence
  Description of Artificial Sequence: Synthetic oligonucleotide
guagaaguacucccaguuc

SEQ ID NO: 1773372 - RNA, 19 nt, Artificial Sequence
  Description of Artificial Sequence: Synthetic oligonucleotide
cuggcucauggaacuaagg

SEQ ID NO: 1773373 - RNA, 19 nt, Artificial Sequence
  Description of Artificial Sequence: Synthetic oligonucleotide
uguaagcacucaccucucu

SEQ ID NO: 1773374 - RNA, 19 nt, Artificial Sequence
  Description of Artificial Sequence: Synthetic oligonucleotide
gguguaagcacucaccucu

SEQ ID NO: 1773375 - RNA, 19 nt, Artificial Sequence
  Description of Artificial Sequence: Synthetic oligonucleotide
guuugcggagcacagcaca

SEQ ID NO: 1773376 - RNA, 19 nt, Artificial Sequence
  Description of Artificial Sequence: Synthetic oligonucleotide
acagggacaccgugagcac

SEQ ID NO: 1773377 - RNA, 19 nt, Artificial Sequence
  Description of Artificial Sequence: Synthetic oligonucleotide
ugccauuugcaguggaaau

SEQ ID NO: 1773378 - RNA, 19 nt, Artificial Sequence
  Description of Artificial Sequence: Synthetic oligonucleotide
ucauggaacuaaggacccg

SEQ ID NO: 1773379 - RNA, 19 nt, Artificial Sequence
  Description of Artificial Sequence: Synthetic oligonucleotide
cacacugaggaagcgacug

SEQ ID NO: 1773380 - RNA, 19 nt, Artificial Sequence
  Description of Artificial Sequence: Synthetic oligonucleotide
uaccaucccucauaccaca

SEQ ID NO: 1773381 - RNA, 19 nt, Artificial Sequence
  Description of Artificial Sequence: Synthetic oligonucleotide
gagguguaagcacucaccu

SEQ ID NO: 1773382 - RNA, 19 nt, Artificial Sequence
  Description of Artificial Sequence: Synthetic oligonucleotide
agcacucaccucucucagg

SEQ ID NO: 1773383 - RNA, 19 nt, Artificial Sequence
  Description of Artificial Sequence: Synthetic oligonucleotide
aggucuggccagcagcgag

SEQ ID NO: 1773384 - RNA, 19 nt, Artificial Sequence
  Description of Artificial Sequence: Synthetic oligonucleotide
ggagugcuuggaaagacag

SEQ ID NO: 1773385 - RNA, 19 nt, Artificial Sequence
  Description of Artificial Sequence: Synthetic oligonucleotide
guacucccaguucaccucc

SEQ ID NO: 1773386 - RNA, 19 nt, Artificial Sequence
  Description of Artificial Sequence: Synthetic oligonucleotide
agcaccuuccgagcaggcc

SEQ ID NO: 1773387 - RNA, 19 nt, Artificial Sequence
  Description of Artificial Sequence: Synthetic oligonucleotide
gaguucggcgucguugggg

SEQ ID NO: 1773388 - RNA, 19 nt, Artificial Sequence
  Description of Artificial Sequence: Synthetic oligonucleotide
uggagggcucgcaacuuga

SEQ ID NO: 1773389 - RNA, 19 nt, Artificial Sequence
  Description of Artificial Sequence: Synthetic oligonucleotide
uggaacuaaggacccgcuc

SEQ ID NO: 1773390 - RNA, 19 nt, Artificial Sequence
  Description of Artificial Sequence: Synthetic oligonucleotide
ugccaucuucguacaagca

SEQ ID NO: 1773391 - RNA, 19 nt, Artificial Sequence
  Description of Artificial Sequence: Synthetic oligonucleotide
aggaauguagucagagcug

SEQ ID NO: 1773392 - RNA, 19 nt, Artificial Sequence
  Description of Artificial Sequence: Synthetic oligonucleotide
guggaaaugaaggccauaa

SEQ ID NO: 1773393 - RNA, 19 nt, Artificial Sequence
  Description of Artificial Sequence: Synthetic oligonucleotide
acuaaggacccgcucgaau

SEQ ID NO: 1773394 - RNA, 19 nt, Artificial Sequence
  Description of Artificial Sequence: Synthetic oligonucleotide
guaagcacucaccucucuc

SEQ ID NO: 1773395 - RNA, 19 nt, Artificial Sequence
  Description of Artificial Sequence: Synthetic oligonucleotide
acaccgugagcaccuuccg

SEQ ID NO: 1773396 - RNA, 19 nt, Artificial Sequence
  Description of Artificial Sequence: Synthetic oligonucleotide
accccugucaaaguagcug

SEQ ID NO: 1773397 - RNA, 19 nt, Artificial Sequence
  Description of Artificial Sequence: Synthetic oligonucleotide
acugaagccuguguguggu

SEQ ID NO: 1773398 - RNA, 19 nt, Artificial Sequence
  Description of Artificial Sequence: Synthetic oligonucleotide
aucuucguacaagcacagc

SEQ ID NO: 1773399 - RNA, 19 nt, Artificial Sequence
  Description of Artificial Sequence: Synthetic oligonucleotide
ugcggagcacagcacacau

SEQ ID NO: 1773400 - RNA, 19 nt, Artificial Sequence
  Description of Artificial Sequence: Synthetic oligonucleotide
agguacgccccggauacgg

SEQ ID NO: 1773401 - RNA, 19 nt, Artificial Sequence
  Description of Artificial Sequence: Synthetic oligonucleotide
gagacccgggaaguagucg

SEQ ID NO: 1773402 - RNA, 19 nt, Artificial Sequence
  Description of Artificial Sequence: Synthetic oligonucleotide
guagauccugcugugguca

SEQ ID NO: 1773403 - RNA, 19 nt, Artificial Sequence
  Description of Artificial Sequence: Synthetic oligonucleotide
acaaacuaauacauaccau

SEQ ID NO: 1773404 - RNA, 19 nt, Artificial Sequence
  Description of Artificial Sequence: Synthetic oligonucleotide
gauggagugcuuggaaaga

SEQ ID NO: 1773405 - RNA, 19 nt, Artificial Sequence
  Description of Artificial Sequence: Synthetic oligonucleotide
guacaagcacagccgggag

SEQ ID NO: 1773406 - RNA, 19 nt, Artificial Sequence
  Description of Artificial Sequence: Synthetic oligonucleotide
aagccuguguguggucuuc

SEQ ID NO: 1773407 - RNA, 19 nt, Artificial Sequence
  Description of Artificial Sequence: Synthetic oligonucleotide
cagagguguaagcacucac

SEQ ID NO: 1773408 - RNA, 19 nt, Artificial Sequence
  Description of Artificial Sequence: Synthetic oligonucleotide
gacgcagcccuugugcagc

SEQ ID NO: 1773409 - RNA, 19 nt, Artificial Sequence
  Description of Artificial Sequence: Synthetic oligonucleotide
ugcgccucuucucuauuau

SEQ ID NO: 1773410 - RNA, 19 nt, Artificial Sequence
  Description of Artificial Sequence: Synthetic oligonucleotide
cugacucaugagauucaug

SEQ ID NO: 1773411 - RNA, 19 nt, Artificial Sequence
  Description of Artificial Sequence: Synthetic oligonucleotide
uguagucagagcugccauu

SEQ ID NO: 1773412 - RNA, 19 nt, Artificial Sequence
  Description of Artificial Sequence: Synthetic oligonucleotide
ggcgaugugcaccagcuuc

SEQ ID NO: 1773413 - RNA, 19 nt, Artificial Sequence
  Description of Artificial Sequence: Synthetic oligonucleotide
gcuguucucaccaggagac

SEQ ID NO: 1773414 - RNA, 19 nt, Artificial Sequence
  Description of Artificial Sequence: Synthetic oligonucleotide
gcauguggcucauuaaaca

SEQ ID NO: 1773415 - RNA, 19 nt, Artificial Sequence
  Description of Artificial Sequence: Synthetic oligonucleotide
gcuauccaugucaaagggg

SEQ ID NO: 1773416 - RNA, 19 nt, Artificial Sequence
  Description of Artificial Sequence: Synthetic oligonucleotide
ucugcaccccugucaaagu

SEQ ID NO: 1773417 - RNA, 19 nt, Artificial Sequence
  Description of Artificial Sequence: Synthetic oligonucleotide
gaggcacaaacuaauacau

SEQ ID NO: 1773418 - RNA, 19 nt, Artificial Sequence
  Description of Artificial Sequence: Synthetic oligonucleotide
gaauguagucagagcugcc

SEQ ID NO: 1773419 - RNA, 19 nt, Artificial Sequence
  Description of Artificial Sequence: Synthetic oligonucleotide
caguuauaucucagccggc

SEQ ID NO: 1773420 - RNA, 19 nt, Artificial Sequence
  Description of Artificial Sequence: Synthetic oligonucleotide
caggaguucggcgucguug

SEQ ID NO: 1773421 - RNA, 19 nt, Artificial Sequence
  Description of Artificial Sequence: Synthetic oligonucleotide
aucccucauaccacagugg

SEQ ID NO: 1773422 - RNA, 19 nt, Artificial Sequence
  Description of Artificial Sequence: Synthetic oligonucleotide
gcacaaacuaauacauacc

SEQ ID NO: 1773423 - RNA, 19 nt, Artificial Sequence
  Description of Artificial Sequence: Synthetic oligonucleotide
ucuggggccgguagauccu

SEQ ID NO: 1773424 - RNA, 19 nt, Artificial Sequence
  Description of Artificial Sequence: Synthetic oligonucleotide
ccccugucaaaguagcugc

SEQ ID NO: 1773425 - RNA, 19 nt, Artificial Sequence
  Description of Artificial Sequence: Synthetic oligonucleotide
gagugcuuggaaagacagc

SEQ ID NO: 1773426 - RNA, 19 nt, Artificial Sequence
  Description of Artificial Sequence: Synthetic oligonucleotide
cauuuuccuuagaaaugca

SEQ ID NO: 1773427 - RNA, 19 nt, Artificial Sequence
  Description of Artificial Sequence: Synthetic oligonucleotide
cgcaguuauaucucagccg

SEQ ID NO: 1773428 - RNA, 19 nt, Artificial Sequence
  Description of Artificial Sequence: Synthetic oligonucleotide
uuucucucagaggaaugua

SEQ ID NO: 1773429 - RNA, 19 nt, Artificial Sequence
  Description of Artificial Sequence: Synthetic oligonucleotide
gcucgaauucuccucgggc

SEQ ID NO: 1773430 - RNA, 19 nt, Artificial Sequence
  Description of Artificial Sequence: Synthetic oligonucleotide
cacucacauagcccuggcc

SEQ ID NO: 1773431 - RNA, 19 nt, Artificial Sequence
  Description of Artificial Sequence: Synthetic oligonucleotide
aaccagccuucuggagugc

SEQ ID NO: 1773432 - RNA, 19 nt, Artificial Sequence
  Description of Artificial Sequence: Synthetic oligonucleotide
ccggauacggcucucgcag

SEQ ID NO: 1773433 - RNA, 19 nt, Artificial Sequence
  Description of Artificial Sequence: Synthetic oligonucleotide
acaccgggagcuggaagcg

SEQ ID NO: 1773434 - RNA, 19 nt, Artificial Sequence
  Description of Artificial Sequence: Synthetic oligonucleotide
ggguuugcggagcacagca

SEQ ID NO: 1773435 - RNA, 19 nt, Artificial Sequence
  Description of Artificial Sequence: Synthetic oligonucleotide
ucucucagguacgccccgg

SEQ ID NO: 1773436 - RNA, 19 nt, Artificial Sequence
  Description of Artificial Sequence: Synthetic oligonucleotide
auacggcucucgcaguuau

SEQ ID NO: 1773437 - RNA, 19 nt, Artificial Sequence
  Description of Artificial Sequence: Synthetic oligonucleotide
ccaucuucguacaagcaca

SEQ ID NO: 1773438 - RNA, 19 nt, Artificial Sequence
  Description of Artificial Sequence: Synthetic oligonucleotide
aaggacccgcucgaauucu

SEQ ID NO: 1773439 - RNA, 19 nt, Artificial Sequence
  Description of Artificial Sequence: Synthetic oligonucleotide
acggcucucgcaguuauau

SEQ ID NO: 1773440 - RNA, 19 nt, Artificial Sequence
  Description of Artificial Sequence: Synthetic oligonucleotide
gaagcggacgcagcccuug

SEQ ID NO: 1773441 - RNA, 19 nt, Artificial Sequence
  Description of Artificial Sequence: Synthetic oligonucleotide
ucccucccguccuggauug

SEQ ID NO: 1773442 - RNA, 19 nt, Artificial Sequence
  Description of Artificial Sequence: Synthetic oligonucleotide
uucggcgucguuggggaga

SEQ ID NO: 1773443 - RNA, 19 nt, Artificial Sequence
  Description of Artificial Sequence: Synthetic oligonucleotide
ggcucucgcaguuauaucu

SEQ ID NO: 1773444 - RNA, 19 nt, Artificial Sequence
  Description of Artificial Sequence: Synthetic oligonucleotide
acccgggaaguagucgucg

SEQ ID NO: 1773445 - RNA, 19 nt, Artificial Sequence
  Description of Artificial Sequence: Synthetic oligonucleotide
ucucagguacgccccggau

SEQ ID NO: 1773446 - RNA, 19 nt, Artificial Sequence
  Description of Artificial Sequence: Synthetic oligonucleotide
uccgugccaucuucguaca

SEQ ID NO: 1773447 - RNA, 19 nt, Artificial Sequence
  Description of Artificial Sequence: Synthetic oligonucleotide
gucagagcugccauuugca

SEQ ID NO: 1773448 - RNA, 19 nt, Artificial Sequence
  Description of Artificial Sequence: Synthetic oligonucleotide
ugacgcucuuggguuugcg

SEQ ID NO: 1773449 - RNA, 19 nt, Artificial Sequence
  Description of Artificial Sequence: Synthetic oligonucleotide
gagacaucuggaagacuuc

SEQ ID NO: 1773450 - RNA, 19 nt, Artificial Sequence
  Description of Artificial Sequence: Synthetic oligonucleotide
uacucccaguucaccuccc

SEQ ID NO: 1773451 - RNA, 19 nt, Artificial Sequence
  Description of Artificial Sequence: Synthetic oligonucleotide
cagcuguucucaccaggag

SEQ ID NO: 1773452 - RNA, 19 nt, Artificial Sequence
  Description of Artificial Sequence: Synthetic oligonucleotide
uuggaccguuucuggggcc

SEQ ID NO: 1773453 - RNA, 19 nt, Artificial Sequence
  Description of Artificial Sequence: Synthetic oligonucleotide
ucucaccaggagacaucug

SEQ ID NO: 1773454 - RNA, 19 nt, Artificial Sequence
  Description of Artificial Sequence: Synthetic oligonucleotide
aaggggcccuggcaggaaa

SEQ ID NO: 1773455 - RNA, 19 nt, Artificial Sequence
  Description of Artificial Sequence: Synthetic oligonucleotide
cucucucagguacgccccg

SEQ ID NO: 1773456 - RNA, 19 nt, Artificial Sequence
  Description of Artificial Sequence: Synthetic oligonucleotide
gcuccuggcagcuccgugc

SEQ ID NO: 1773457 - RNA, 19 nt, Artificial Sequence
  Description of Artificial Sequence: Synthetic oligonucleotide
ccucauaccacaguggcca

SEQ ID NO: 1773458 - RNA, 19 nt, Artificial Sequence
  Description of Artificial Sequence: Synthetic oligonucleotide
aguucagcccaggagccau

SEQ ID NO: 1773459 - RNA, 19 nt, Artificial Sequence
  Description of Artificial Sequence: Synthetic oligonucleotide
uggguuugcggagcacagc

SEQ ID NO: 1773460 - RNA, 19 nt, Artificial Sequence
  Description of Artificial Sequence: Synthetic oligonucleotide
caccacagagguguaagca

SEQ ID NO: 1773461 - RNA, 19 nt, Artificial Sequence
  Description of Artificial Sequence: Synthetic oligonucleotide
ucucagccggcauguggcu

SEQ ID NO: 1773462 - RNA, 19 nt, Artificial Sequence
  Description of Artificial Sequence: Synthetic oligonucleotide
uagcugccguuguacuuca

SEQ ID NO: 1773463 - RNA, 19 nt, Artificial Sequence
  Description of Artificial Sequence: Synthetic oligonucleotide
aagcggacgcagcccuugu

SEQ ID NO: 1773464 - RNA, 19 nt, Artificial Sequence
  Description of Artificial Sequence: Synthetic oligonucleotide
uacgccccggauacggcuc

SEQ ID NO: 1773465 - RNA, 19 nt, Artificial Sequence
  Description of Artificial Sequence: Synthetic oligonucleotide
aggaagcgacugaugucac

SEQ ID NO: 1773466 - RNA, 19 nt, Artificial Sequence
  Description of Artificial Sequence: Synthetic oligonucleotide
gaagaggauccggcucucc

SEQ ID NO: 1773467 - RNA, 19 nt, Artificial Sequence
  Description of Artificial Sequence: Synthetic oligonucleotide
acuugacgcucuuggguuu

SEQ ID NO: 1773468 - RNA, 19 nt, Artificial Sequence
  Description of Artificial Sequence: Synthetic oligonucleotide
ggcgucguuggggagaccc

SEQ ID NO: 1773469 - RNA, 19 nt, Artificial Sequence
  Description of Artificial Sequence: Synthetic oligonucleotide
cucuucucuauuauaugau

SEQ ID NO: 1773470 - RNA, 19 nt, Artificial Sequence
  Description of Artificial Sequence: Synthetic oligonucleotide
auaaaagcugaggcacaaa

SEQ ID NO: 1773471 - RNA, 19 nt, Artificial Sequence
  Description of Artificial Sequence: Synthetic oligonucleotide
cccgcucgaauucuccucg

SEQ ID NO: 1773472 - RNA, 19 nt, Artificial Sequence
  Description of Artificial Sequence: Synthetic oligonucleotide
ccugucaaaguagcugccg

SEQ ID NO: 1773473 - RNA, 19 nt, Artificial Sequence
  Description of Artificial Sequence: Synthetic oligonucleotide
aacuaaggacccgcucgaa

SEQ ID NO: 1773474 - RNA, 19 nt, Artificial Sequence
  Description of Artificial Sequence: Synthetic oligonucleotide
agccgggagccggacaccg

SEQ ID NO: 1773475 - RNA, 19 nt, Artificial Sequence
  Description of Artificial Sequence: Synthetic oligonucleotide
gcggacgcagcccuugugc

SEQ ID NO: 1773476 - RNA, 19 nt, Artificial Sequence
  Description of Artificial Sequence: Synthetic oligonucleotide
caccuuccgagcaggccac

SEQ ID NO: 1773477 - RNA, 19 nt, Artificial Sequence
  Description of Artificial Sequence: Synthetic oligonucleotide
gacagcuauccaugucaaa

SEQ ID NO: 1773478 - RNA, 19 nt, Artificial Sequence
  Description of Artificial Sequence: Synthetic oligonucleotide
ccauuugcaguggaaauga

SEQ ID NO: 1773479 - RNA, 19 nt, Artificial Sequence
  Description of Artificial Sequence: Synthetic oligonucleotide
gggguugauggagugcuug

SEQ ID NO: 1773480 - RNA, 19 nt, Artificial Sequence
  Description of Artificial Sequence: Synthetic oligonucleotide
cacgccgaacuugcacucg

SEQ ID NO: 1773481 - RNA, 19 nt, Artificial Sequence
  Description of Artificial Sequence: Synthetic oligonucleotide
agacagcuauccaugucaa

SEQ ID NO: 1773482 - RNA, 19 nt, Artificial Sequence
  Description of Artificial Sequence: Synthetic oligonucleotide
uuuaccccagaagcaccau

SEQ ID NO: 1773483 - RNA, 19 nt, Artificial Sequence
  Description of Artificial Sequence: Synthetic oligonucleotide
guuauaucucagccggcau

SEQ ID NO: 1773484 - RNA, 19 nt, Artificial Sequence
  Description of Artificial Sequence: Synthetic oligonucleotide
agcggacgcagcccuugug

SEQ ID NO: 1773485 - RNA, 19 nt, Artificial Sequence
  Description of Artificial Sequence: Synthetic oligonucleotide
gcuucugcaccccugucaa

SEQ ID NO: 1773486 - RNA, 19 nt, Artificial Sequence
  Description of Artificial Sequence: Synthetic oligonucleotide
ggagacaucuggaagacuu

SEQ ID NO: 1773487 - RNA, 19 nt, Artificial Sequence
  Description of Artificial Sequence: Synthetic oligonucleotide
auggaacuaaggacccgcu

SEQ ID NO: 1773488 - RNA, 19 nt, Artificial Sequence
  Description of Artificial Sequence: Synthetic oligonucleotide
gcugccguuguacuucaca

SEQ ID NO: 1773489 - RNA, 19 nt, Artificial Sequence
  Description of Artificial Sequence: Synthetic oligonucleotide
cugccacagggacaccgug

SEQ ID NO: 1773490 - RNA, 19 nt, Artificial Sequence
  Description of Artificial Sequence: Synthetic oligonucleotide
gucacacugaagccugugu

SEQ ID NO: 1773491 - RNA, 19 nt, Artificial Sequence
  Description of Artificial Sequence: Synthetic oligonucleotide
ugaagaggauccggcucuc

SEQ ID NO: 1773492 - RNA, 19 nt, Artificial Sequence
  Description of Artificial Sequence: Synthetic oligonucleotide
cucagguacgccccggaua

SEQ ID NO: 1773493 - RNA, 19 nt, Artificial Sequence
  Description of Artificial Sequence: Synthetic oligonucleotide
cugucaaaguagcugccgu

SEQ ID NO: 1773494 - RNA, 19 nt, Artificial Sequence
  Description of Artificial Sequence: Synthetic oligonucleotide
caaaguagcugccguugua

SEQ ID NO: 1773495 - RNA, 19 nt, Artificial Sequence
  Description of Artificial Sequence: Synthetic oligonucleotide
ggacgcagcccuugugcag

SEQ ID NO: 1773496 - RNA, 19 nt, Artificial Sequence
  Description of Artificial Sequence: Synthetic oligonucleotide
uggggccgguagauccugc

SEQ ID NO: 1773497 - RNA, 19 nt, Artificial Sequence
  Description of Artificial Sequence: Synthetic oligonucleotide
cuauuauaugauccagguu

SEQ ID NO: 1773498 - RNA, 19 nt, Artificial Sequence
  Description of Artificial Sequence: Synthetic oligonucleotide
ggggagacccgggaaguag

SEQ ID NO: 1773499 - RNA, 19 nt, Artificial Sequence
  Description of Artificial Sequence: Synthetic oligonucleotide
ucggcgucguuggggagac

SEQ ID NO: 1773500 - RNA, 19 nt, Artificial Sequence
  Description of Artificial Sequence: Synthetic oligonucleotide
gccguuguacuucacagau

SEQ ID NO: 1773501 - RNA, 19 nt, Artificial Sequence
  Description of Artificial Sequence: Synthetic oligonucleotide
ggacaccgggagcuggaag

SEQ ID NO: 1773502 - RNA, 19 nt, Artificial Sequence
  Description of Artificial Sequence: Synthetic oligonucleotide
ugccgccacgccgaacuug

SEQ ID NO: 1773503 - RNA, 19 nt, Artificial Sequence
  Description of Artificial Sequence: Synthetic oligonucleotide
cucgcuguggagggcucgc

SEQ ID NO: 1773504 - RNA, 19 nt, Artificial Sequence
  Description of Artificial Sequence: Synthetic oligonucleotide
aggacccgcucgaauucuc

SEQ ID NO: 1773505 - RNA, 19 nt, Artificial Sequence
  Description of Artificial Sequence: Synthetic oligonucleotide
gcacucaccucucucaggu

SEQ ID NO: 1773506 - RNA, 19 nt, Artificial Sequence
  Description of Artificial Sequence: Synthetic oligonucleotide
guagucagagcugccauuu

SEQ ID NO: 1773507 - RNA, 19 nt, Artificial Sequence
  Description of Artificial Sequence: Synthetic oligonucleotide
auaucucagccggcaugug

SEQ ID NO: 1773508 - RNA, 19 nt, Artificial Sequence
  Description of Artificial Sequence: Synthetic oligonucleotide
gauacggcucucgcaguua

SEQ ID NO: 1773509 - RNA, 19 nt, Artificial Sequence
  Description of Artificial Sequence: Synthetic oligonucleotide
gccgcugcauccaccacag

SEQ ID NO: 1773510 - RNA, 19 nt, Artificial Sequence
  Description of Artificial Sequence: Synthetic oligonucleotide
ggaguucggcgucguuggg

SEQ ID NO: 1773511 - RNA, 19 nt, Artificial Sequence
  Description of Artificial Sequence: Synthetic oligonucleotide
guucggcgucguuggggag

SEQ ID NO: 1773512 - RNA, 19 nt, Artificial Sequence
  Description of Artificial Sequence: Synthetic oligonucleotide
aggagacaucuggaagacu

SEQ ID NO: 1773513 - RNA, 19 nt, Artificial Sequence
  Description of Artificial Sequence: Synthetic oligonucleotide
gacccgcucgaauucuccu

SEQ ID NO: 1773514 - RNA, 19 nt, Artificial Sequence
  Description of Artificial Sequence: Synthetic oligonucleotide
cagcaggaguucggcgucg

SEQ ID NO: 1773515 - RNA, 19 nt, Artificial Sequence
  Description of Artificial Sequence: Synthetic oligonucleotide
uccgagcaggccacuucuu

SEQ ID NO: 1773516 - RNA, 19 nt, Artificial Sequence
  Description of Artificial Sequence: Synthetic oligonucleotide
cccugucaaaguagcugcc

SEQ ID NO: 1773517 - RNA, 19 nt, Artificial Sequence
  Description of Artificial Sequence: Synthetic oligonucleotide
aggcacaaacuaauacaua

SEQ ID NO: 1773518 - RNA, 19 nt, Artificial Sequence
  Description of Artificial Sequence: Synthetic oligonucleotide
uacggcucucgcaguuaua

SEQ ID NO: 1773519 - RNA, 19 nt, Artificial Sequence
  Description of Artificial Sequence: Synthetic oligonucleotide
gcaccccugucaaaguagc

SEQ ID NO: 1773520 - RNA, 19 nt, Artificial Sequence
  Description of Artificial Sequence: Synthetic oligonucleotide
gagccggacaccgggagcu

SEQ ID NO: 1773521 - RNA, 19 nt, Artificial Sequence
  Description of Artificial Sequence: Synthetic oligonucleotide
guguaagcacucaccucuc

SEQ ID NO: 1773522 - RNA, 19 nt, Artificial Sequence
  Description of Artificial Sequence: Synthetic oligonucleotide
ucucaccuucugccauuua

SEQ ID NO: 1773523 - RNA, 19 nt, Artificial Sequence
  Description of Artificial Sequence: Synthetic oligonucleotide
gccgguagauccugcugug

SEQ ID NO: 1773524 - RNA, 19 nt, Artificial Sequence
  Description of Artificial Sequence: Synthetic oligonucleotide
caugacaggcauucauuuu

SEQ ID NO: 1773525 - RNA, 19 nt, Artificial Sequence
  Description of Artificial Sequence: Synthetic oligonucleotide
ggucacacugaagccugug

SEQ ID NO: 1773526 - RNA, 19 nt, Artificial Sequence
  Description of Artificial Sequence: Synthetic oligonucleotide
agucgucggucaccuccgu

SEQ ID NO: 1773527 - RNA, 19 nt, Artificial Sequence
  Description of Artificial Sequence: Synthetic oligonucleotide
acaguucagcagagaacau

SEQ ID NO: 1773528 - RNA, 19 nt, Artificial Sequence
  Description of Artificial Sequence: Synthetic oligonucleotide
gcagcaggaguucggcguc

SEQ ID NO: 1773529 - RNA, 19 nt, Artificial Sequence
  Description of Artificial Sequence: Synthetic oligonucleotide
gacccgggaaguagucguc

SEQ ID NO: 1773530 - RNA, 19 nt, Artificial Sequence
  Description of Artificial Sequence: Synthetic oligonucleotide
gcgagcagcaggaguucgg

SEQ ID NO: 1773531 - RNA, 19 nt, Artificial Sequence
  Description of Artificial Sequence: Synthetic oligonucleotide
gggccgguagauccugcug

SEQ ID NO: 1773532 - RNA, 19 nt, Artificial Sequence
  Description of Artificial Sequence: Synthetic oligonucleotide
guacgccccggauacggcu

SEQ ID NO: 1773533 - RNA, 19 nt, Artificial Sequence
  Description of Artificial Sequence: Synthetic oligonucleotide
ggccgguagauccugcugu

SEQ ID NO: 1773534 - RNA, 19 nt, Artificial Sequence
  Description of Artificial Sequence: Synthetic oligonucleotide
caccucucucagguacgcc

SEQ ID NO: 1773535 - RNA, 19 nt, Artificial Sequence
  Description of Artificial Sequence: Synthetic oligonucleotide
gcucuuggguuugcggagc

SEQ ID NO: 1773536 - RNA, 19 nt, Artificial Sequence
  Description of Artificial Sequence: Synthetic oligonucleotide
acgccccggauacggcucu

SEQ ID NO: 1773537 - RNA, 19 nt, Artificial Sequence
  Description of Artificial Sequence: Synthetic oligonucleotide
gccgccacgccgaacuugc

SEQ ID NO: 1773538 - RNA, 19 nt, Artificial Sequence
  Description of Artificial Sequence: Synthetic oligonucleotide
cacggugcgccucuucucu

SEQ ID NO: 1773539 - RNA, 19 nt, Artificial Sequence
  Description of Artificial Sequence: Synthetic oligonucleotide
cugcaccccugucaaagua

SEQ ID NO: 1773540 - RNA, 19 nt, Artificial Sequence
  Description of Artificial Sequence: Synthetic oligonucleotide
ggacccgcucgaauucucc

SEQ ID NO: 1773541 - RNA, 19 nt, Artificial Sequence
  Description of Artificial Sequence: Synthetic oligonucleotide
gcucucgcaguuauaucuc

SEQ ID NO: 1773542 - RNA, 19 nt, Artificial Sequence
  Description of Artificial Sequence: Synthetic oligonucleotide
cgcucuuggguuugcggag

SEQ ID NO: 1773543 - RNA, 19 nt, Artificial Sequence
  Description of Artificial Sequence: Synthetic oligonucleotide
guucagcccaggagccaug

SEQ ID NO: 1773544 - RNA, 19 nt, Artificial Sequence
  Description of Artificial Sequence: Synthetic oligonucleotide
agcaggaguucggcgucgu

SEQ ID NO: 1773545 - RNA, 19 nt, Artificial Sequence
  Description of Artificial Sequence: Synthetic oligonucleotide
acgcagcccuugugcagca

SEQ ID NO: 1773546 - RNA, 19 nt, Artificial Sequence
  Description of Artificial Sequence: Synthetic oligonucleotide
gccggcauguggcucauua

SEQ ID NO: 1773547 - RNA, 19 nt, Artificial Sequence
  Description of Artificial Sequence: Synthetic oligonucleotide
ucgcuguggagggcucgca

SEQ ID NO: 1773548 - RNA, 19 nt, Artificial Sequence
  Description of Artificial Sequence: Synthetic oligonucleotide
gcgaugugcaccagcuuca

SEQ ID NO: 1773549 - RNA, 19 nt, Artificial Sequence
  Description of Artificial Sequence: Synthetic oligonucleotide
cuggggccgguagauccug

SEQ ID NO: 1773550 - RNA, 19 nt, Artificial Sequence
  Description of Artificial Sequence: Synthetic oligonucleotide
gccacgccgaacuugcacu

SEQ ID NO: 1773551 - RNA, 19 nt, Artificial Sequence
  Description of Artificial Sequence: Synthetic oligonucleotide
gguuugcggagcacagcac

SEQ ID NO: 1773552 - RNA, 19 nt, Artificial Sequence
  Description of Artificial Sequence: Synthetic oligonucleotide
gcucucccuguugccauag

SEQ ID NO: 1773553 - RNA, 19 nt, Artificial Sequence
  Description of Artificial Sequence: Synthetic oligonucleotide
ugggcaccacggugcgccu

SEQ ID NO: 1773554 - RNA, 19 nt, Artificial Sequence
  Description of Artificial Sequence: Synthetic oligonucleotide
cguacaagcacagccggga

SEQ ID NO: 1773555 - RNA, 19 nt, Artificial Sequence
  Description of Artificial Sequence: Synthetic oligonucleotide
cagguacgccccggauacg

SEQ ID NO: 1773556 - RNA, 19 nt, Artificial Sequence
  Description of Artificial Sequence: Synthetic oligonucleotide
cuguucucaccaggagaca

SEQ ID NO: 1773557 - RNA, 19 nt, Artificial Sequence
  Description of Artificial Sequence: Synthetic oligonucleotide
cagcgagcagcaggaguuc

SEQ ID NO: 1773558 - RNA, 19 nt, Artificial Sequence
  Description of Artificial Sequence: Synthetic oligonucleotide
cgcucgaauucuccucggg

SEQ ID NO: 1773559 - RNA, 19 nt, Artificial Sequence
  Description of Artificial Sequence: Synthetic oligonucleotide
caguucagcagagaacauu

SEQ ID NO: 1773560 - RNA, 19 nt, Artificial Sequence
  Description of Artificial Sequence: Synthetic oligonucleotide
cgucguuggggagacccgg

SEQ ID NO: 1773561 - RNA, 19 nt, Artificial Sequence
  Description of Artificial Sequence: Synthetic oligonucleotide
ggaccguuucuggggccgg

SEQ ID NO: 1773562 - RNA, 19 nt, Artificial Sequence
  Description of Artificial Sequence: Synthetic oligonucleotide
agcugccguuguacuucac

SEQ ID NO: 1773563 - RNA, 19 nt, Artificial Sequence
  Description of Artificial Sequence: Synthetic oligonucleotide
gcgacugaugucacucaca

SEQ ID NO: 1773564 - RNA, 19 nt, Artificial Sequence
  Description of Artificial Sequence: Synthetic oligonucleotide
ggagggcucgcaacuugac

SEQ ID NO: 1773565 - RNA, 19 nt, Artificial Sequence
  Description of Artificial Sequence: Synthetic oligonucleotide
ccacgccgaacuugcacuc

SEQ ID NO: 1773566 - RNA, 19 nt, Artificial Sequence
  Description of Artificial Sequence: Synthetic oligonucleotide
gaauucuccucgggccgcu

SEQ ID NO: 1773567 - RNA, 19 nt, Artificial Sequence
  Description of Artificial Sequence: Synthetic oligonucleotide
ccgcucgaauucuccucgg

SEQ ID NO: 1773568 - RNA, 19 nt, Artificial Sequence
  Description of Artificial Sequence: Synthetic oligonucleotide
gcgucguuggggagacccg

SEQ ID NO: 1773569 - RNA, 19 nt, Artificial Sequence
  Description of Artificial Sequence: Synthetic oligonucleotide
cacugaggaagcgacugau

SEQ ID NO: 1773570 - RNA, 19 nt, Artificial Sequence
  Description of Artificial Sequence: Synthetic oligonucleotide
cuucugcaccccugucaaa

SEQ ID NO: 1773571 - RNA, 19 nt, Artificial Sequence
  Description of Artificial Sequence: Synthetic oligonucleotide
uccgugccgccacgccgaa

SEQ ID NO: 1773572 - RNA, 19 nt, Artificial Sequence
  Description of Artificial Sequence: Synthetic oligonucleotide
ggacaccgugagcaccuuc

SEQ ID NO: 1773573 - RNA, 19 nt, Artificial Sequence
  Description of Artificial Sequence: Synthetic oligonucleotide
gagugcagagacggcugcu

SEQ ID NO: 1773574 - RNA, 19 nt, Artificial Sequence
  Description of Artificial Sequence: Synthetic oligonucleotide
ggaagcgacugaugucacu

SEQ ID NO: 1773575 - RNA, 19 nt, Artificial Sequence
  Description of Artificial Sequence: Synthetic oligonucleotide
cuggaagacuucucaccuu

SEQ ID NO: 1773576 - RNA, 19 nt, Artificial Sequence
  Description of Artificial Sequence: Synthetic oligonucleotide
accguuucuggggccggua

SEQ ID NO: 1773577 - RNA, 19 nt, Artificial Sequence
  Description of Artificial Sequence: Synthetic oligonucleotide
ccgaacuugcacucgcugu

SEQ ID NO: 1773578 - RNA, 19 nt, Artificial Sequence
  Description of Artificial Sequence: Synthetic oligonucleotide
cgaauucuccucgggccgc

SEQ ID NO: 1773579 - RNA, 19 nt, Artificial Sequence
  Description of Artificial Sequence: Synthetic oligonucleotide
ccguccuggauugcuucag

SEQ ID NO: 1773580 - RNA, 19 nt, Artificial Sequence
  Description of Artificial Sequence: Synthetic oligonucleotide
ccccggauacggcucucgc

SEQ ID NO: 1773581 - RNA, 19 nt, Artificial Sequence
  Description of Artificial Sequence: Synthetic oligonucleotide
cagcuccgugccgccacgc

SEQ ID NO: 1773582 - RNA, 19 nt, Artificial Sequence
  Description of Artificial Sequence: Synthetic oligonucleotide
cacagccgggagccggaca

SEQ ID NO: 1773583 - RNA, 19 nt, Artificial Sequence
  Description of Artificial Sequence: Synthetic oligonucleotide
cagccgggagccggacacc

SEQ ID NO: 1773584 - RNA, 19 nt, Artificial Sequence
  Description of Artificial Sequence: Synthetic oligonucleotide
ccacagggacaccgugagc

SEQ ID NO: 1773585 - RNA, 19 nt, Artificial Sequence
  Description of Artificial Sequence: Synthetic oligonucleotide
cccggauacggcucucgca

SEQ ID NO: 1773586 - RNA, 19 nt, Artificial Sequence
  Description of Artificial Sequence: Synthetic oligonucleotide
aggggcccuggcaggaaaa

SEQ ID NO: 1773587 - RNA, 19 nt, Artificial Sequence
  Description of Artificial Sequence: Synthetic oligonucleotide
cacauagcccuggccaggu

SEQ ID NO: 1773588 - RNA, 19 nt, Artificial Sequence
  Description of Artificial Sequence: Synthetic oligonucleotide
cacucaccucucucaggua

SEQ ID NO: 1773589 - RNA, 19 nt, Artificial Sequence
  Description of Artificial Sequence: Synthetic oligonucleotide
gccccggauacggcucucg

SEQ ID NO: 1773590 - RNA, 19 nt, Artificial Sequence
  Description of Artificial Sequence: Synthetic oligonucleotide
agccggacaccgggagcug

SEQ ID NO: 1773591 - RNA, 19 nt, Artificial Sequence
  Description of Artificial Sequence: Synthetic oligonucleotide
ggauacggcucucgcaguu

SEQ ID NO: 1773592 - RNA, 19 nt, Artificial Sequence
  Description of Artificial Sequence: Synthetic oligonucleotide
cgugagcaccuuccgagca

SEQ ID NO: 1773593 - RNA, 19 nt, Artificial Sequence
  Description of Artificial Sequence: Synthetic oligonucleotide
cagcagugaaaagcaggcu

SEQ ID NO: 1773594 - RNA, 19 nt, Artificial Sequence
  Description of Artificial Sequence: Synthetic oligonucleotide
gucaccuccgugccaucuu

SEQ ID NO: 1773595 - RNA, 19 nt, Artificial Sequence
  Description of Artificial Sequence: Synthetic oligonucleotide
ggcucgcaacuugacgcuc

SEQ ID NO: 1773596 - RNA, 19 nt, Artificial Sequence
  Description of Artificial Sequence: Synthetic oligonucleotide
cgccacgccgaacuugcac

SEQ ID NO: 1773597 - RNA, 19 nt, Artificial Sequence
  Description of Artificial Sequence: Synthetic oligonucleotide
cgccucuucucuauuauau

SEQ ID NO: 1773598 - RNA, 19 nt, Artificial Sequence
  Description of Artificial Sequence: Synthetic oligonucleotide
gcugacucaugagauucau

SEQ ID NO: 1773599 - RNA, 19 nt, Artificial Sequence
  Description of Artificial Sequence: Synthetic oligonucleotide
gcgccucuucucuauuaua

SEQ ID NO: 1773600 - RNA, 19 nt, Artificial Sequence
  Description of Artificial Sequence: Synthetic oligonucleotide
agggguugauggagugcuu

SEQ ID NO: 1773601 - RNA, 19 nt, Artificial Sequence
  Description of Artificial Sequence: Synthetic oligonucleotide
gggagacccgggaaguagu

SEQ ID NO: 1773602 - RNA, 19 nt, Artificial Sequence
  Description of Artificial Sequence: Synthetic oligonucleotide
cgugccgccacgccgaacu

SEQ ID NO: 1773603 - RNA, 19 nt, Artificial Sequence
  Description of Artificial Sequence: Synthetic oligonucleotide
gaccguuucuggggccggu

SEQ ID NO: 1773604 - RNA, 19 nt, Artificial Sequence
  Description of Artificial Sequence: Synthetic oligonucleotide
ccggcauguggcucauuaa

SEQ ID NO: 1773605 - RNA, 19 nt, Artificial Sequence
  Description of Artificial Sequence: Synthetic oligonucleotide
cggacgcagcccuugugca

SEQ ID NO: 1773606 - RNA, 19 nt, Artificial Sequence
  Description of Artificial Sequence: Synthetic oligonucleotide
ggggccgguagauccugcu

SEQ ID NO: 1773607 - RNA, 19 nt, Artificial Sequence
  Description of Artificial Sequence: Synthetic oligonucleotide
gccgggagccggacaccgg

SEQ ID NO: 1773608 - RNA, 19 nt, Artificial Sequence
  Description of Artificial Sequence: Synthetic oligonucleotide
gcucgcaacuugacgcucu

SEQ ID NO: 1773609 - RNA, 19 nt, Artificial Sequence
  Description of Artificial Sequence: Synthetic oligonucleotide
cucgcaacuugacgcucuu

SEQ ID NO: 1773610 - RNA, 19 nt, Artificial Sequence
  Description of Artificial Sequence: Synthetic oligonucleotide
cggcucucgcaguuauauc

SEQ ID NO: 1773611 - RNA, 19 nt, Artificial Sequence
  Description of Artificial Sequence: Synthetic oligonucleotide
cgguagauccugcuguggu

SEQ ID NO: 1773612 - RNA, 19 nt, Artificial Sequence
  Description of Artificial Sequence: Synthetic oligonucleotide
gggccgcugcauccaccac

SEQ ID NO: 1773613 - RNA, 19 nt, Artificial Sequence
  Description of Artificial Sequence: Synthetic oligonucleotide
ggauugcuucagccagcgu

SEQ ID NO: 1773614 - RNA, 19 nt, Artificial Sequence
  Description of Artificial Sequence: Synthetic oligonucleotide
gcugccacagggacaccgu

SEQ ID NO: 1773615 - RNA, 19 nt, Artificial Sequence
  Description of Artificial Sequence: Synthetic oligonucleotide
cagagacggcugcuggcuu

SEQ ID NO: 1773616 - RNA, 19 nt, Artificial Sequence
  Description of Artificial Sequence: Synthetic oligonucleotide
ggauccggcucucccuguu

SEQ ID NO: 1773617 - RNA, 19 nt, Artificial Sequence
  Description of Artificial Sequence: Synthetic oligonucleotide
gggcaccacggugcgccuc

SEQ ID NO: 1773618 - RNA, 19 nt, Artificial Sequence
  Description of Artificial Sequence: Synthetic oligonucleotide
ccguuguacuucacagauu

SEQ ID NO: 1773619 - RNA, 19 nt, Artificial Sequence
  Description of Artificial Sequence: Synthetic oligonucleotide
cgcuguggagggcucgcaa

SEQ ID NO: 1773620 - RNA, 19 nt, Artificial Sequence
  Description of Artificial Sequence: Synthetic oligonucleotide
gugccgccacgccgaacuu

SEQ ID NO: 1773621 - RNA, 19 nt, Artificial Sequence
  Description of Artificial Sequence: Synthetic oligonucleotide
cccucccguccuggauugc

SEQ ID NO: 1773622 - RNA, 19 nt, Artificial Sequence
  Description of Artificial Sequence: Synthetic oligonucleotide
agccggcauguggcucauu

SEQ ID NO: 1773623 - RNA, 19 nt, Artificial Sequence
  Description of Artificial Sequence: Synthetic oligonucleotide
cggauacggcucucgcagu

SEQ ID NO: 1773624 - RNA, 19 nt, Artificial Sequence
  Description of Artificial Sequence: Synthetic oligonucleotide
ccgccacgccgaacuugca

SEQ ID NO: 1773625 - RNA, 19 nt, Artificial Sequence
  Description of Artificial Sequence: Synthetic oligonucleotide
ccgugccgccacgccgaac

SEQ ID NO: 1773626 - RNA, 19 nt, Artificial Sequence
  Description of Artificial Sequence: Synthetic oligonucleotide
ccuuccgagcaggccacuu

SEQ ID NO: 1773627 - RNA, 19 nt, Artificial Sequence
  Description of Artificial Sequence: Synthetic oligonucleotide
cggacaccgggagcuggaa

SEQ ID NO: 1773628 - RNA, 19 nt, Artificial Sequence
  Description of Artificial Sequence: Synthetic oligonucleotide
gggacaccgugagcaccuu

SEQ ID NO: 1773629 - RNA, 19 nt, Artificial Sequence
  Description of Artificial Sequence: Synthetic oligonucleotide
cgccccggauacggcucuc

SEQ ID NO: 1773630 - RNA, 19 nt, Artificial Sequence
  Description of Artificial Sequence: Synthetic oligonucleotide
aauuucuuauccuaucugg

SEQ ID NO: 1773631 - RNA, 19 nt, Artificial Sequence
  Description of Artificial Sequence: Synthetic oligonucleotide
ucuuugauagacaaaagca

SEQ ID NO: 1773632 - RNA, 19 nt, Artificial Sequence
  Description of Artificial Sequence: Synthetic oligonucleotide
auucucaagaaauucaccg

SEQ ID NO: 1773633 - RNA, 19 nt, Artificial Sequence
  Description of Artificial Sequence: Synthetic oligonucleotide
aauaaacuaguacccauuc

SEQ ID NO: 1773634 - RNA, 19 nt, Artificial Sequence
  Description of Artificial Sequence: Synthetic oligonucleotide
uucaaugucgcauccaucg

SEQ ID NO: 1773635 - RNA, 19 nt, Artificial Sequence
  Description of Artificial Sequence: Synthetic oligonucleotide
gaaaacggaauacaugagg

SEQ ID NO: 1773636 - RNA, 19 nt, Artificial Sequence
  Description of Artificial Sequence: Synthetic oligonucleotide
aacuaguacccauuccucc

SEQ ID NO: 1773637 - RNA, 19 nt, Artificial Sequence
  Description of Artificial Sequence: Synthetic oligonucleotide
uaaacuaguacccauuccu

SEQ ID NO: 1773638 - RNA, 19 nt, Artificial Sequence
  Description of Artificial Sequence: Synthetic oligonucleotide
aaacggaauacaugagggc

SEQ ID NO: 1773639 - RNA, 19 nt, Artificial Sequence
  Description of Artificial Sequence: Synthetic oligonucleotide
uaagguaacuuuaguauag

SEQ ID NO: 1773640 - RNA, 19 nt, Artificial Sequence
  Description of Artificial Sequence: Synthetic oligonucleotide
ucuaagguaacuuuaguau

SEQ ID NO: 1773641 - RNA, 19 nt, Artificial Sequence
  Description of Artificial Sequence: Synthetic oligonucleotide
auaaacuucaaccuggaau

SEQ ID NO: 1773642 - RNA, 19 nt, Artificial Sequence
  Description of Artificial Sequence: Synthetic oligonucleotide
uagagagcaaauuaaccag

SEQ ID NO: 1773643 - RNA, 19 nt, Artificial Sequence
  Description of Artificial Sequence: Synthetic oligonucleotide
ucuucuaagguaacuuuag

SEQ ID NO: 1773644 - RNA, 19 nt, Artificial Sequence
  Description of Artificial Sequence: Synthetic oligonucleotide
agaguuguaaauaaacuag

SEQ ID NO: 1773645 - RNA, 19 nt, Artificial Sequence
  Description of Artificial Sequence: Synthetic oligonucleotide
aaauacaccucaucauaag

SEQ ID NO: 1773646 - RNA, 19 nt, Artificial Sequence
  Description of Artificial Sequence: Synthetic oligonucleotide
aaccacaccggccauggac

SEQ ID NO: 1773647 - RNA, 19 nt, Artificial Sequence
  Description of Artificial Sequence: Synthetic oligonucleotide
gugaaaacggaauacauga

SEQ ID NO: 1773648 - RNA, 19 nt, Artificial Sequence
  Description of Artificial Sequence: Synthetic oligonucleotide
cucuaaaacagagagcgcg

SEQ ID NO: 1773649 - RNA, 19 nt, Artificial Sequence
  Description of Artificial Sequence: Synthetic oligonucleotide
uaaaacagagagcgcgucg

SEQ ID NO: 1773650 - RNA, 19 nt, Artificial Sequence
  Description of Artificial Sequence: Synthetic oligonucleotide
caccgaauaaaucaaacac

SEQ ID NO: 1773651 - RNA, 19 nt, Artificial Sequence
  Description of Artificial Sequence: Synthetic oligonucleotide
aauacaugagggcuagagu

SEQ ID NO: 1773652 - RNA, 19 nt, Artificial Sequence
  Description of Artificial Sequence: Synthetic oligonucleotide
aauucuagggcaccucucu

SEQ ID NO: 1773653 - RNA, 19 nt, Artificial Sequence
  Description of Artificial Sequence: Synthetic oligonucleotide
auaaaucaaacacaguguu

SEQ ID NO: 1773654 - RNA, 19 nt, Artificial Sequence
  Description of Artificial Sequence: Synthetic oligonucleotide
uucagguugaacaaguguu

SEQ ID NO: 1773655 - RNA, 19 nt, Artificial Sequence
  Description of Artificial Sequence: Synthetic oligonucleotide
ucgaaaggaaaccucgggc

SEQ ID NO: 1773656 - RNA, 19 nt, Artificial Sequence
  Description of Artificial Sequence: Synthetic oligonucleotide
cacagaguuguaaauaaac

SEQ ID NO: 1773657 - RNA, 19 nt, Artificial Sequence
  Description of Artificial Sequence: Synthetic oligonucleotide
aacggaauacaugagggcu

SEQ ID NO: 1773658 - RNA, 19 nt, Artificial Sequence
  Description of Artificial Sequence: Synthetic oligonucleotide
gaauuucuuauccuaucug

SEQ ID NO: 1773659 - RNA, 19 nt, Artificial Sequence
  Description of Artificial Sequence: Synthetic oligonucleotide
caucgacuuaaccacaccg

SEQ ID NO: 1773660 - RNA, 19 nt, Artificial Sequence
  Description of Artificial Sequence: Synthetic oligonucleotide
cuguucagaucuuuggccg

SEQ ID NO: 1773661 - RNA, 19 nt, Artificial Sequence
  Description of Artificial Sequence: Synthetic oligonucleotide
uauccuaucuggaguaggc

SEQ ID NO: 1773662 - RNA, 19 nt, Artificial Sequence
  Description of Artificial Sequence: Synthetic oligonucleotide
uucuuauccuaucuggagu

SEQ ID NO: 1773663 - RNA, 19 nt, Artificial Sequence
  Description of Artificial Sequence: Synthetic oligonucleotide
caauuauagucuuucuuug

SEQ ID NO: 1773664 - RNA, 19 nt, Artificial Sequence
  Description of Artificial Sequence: Synthetic oligonucleotide
ugaaaacggaauacaugag

SEQ ID NO: 1773665 - RNA, 19 nt, Artificial Sequence
  Description of Artificial Sequence: Synthetic oligonucleotide
uguaagacgacuguucggu

SEQ ID NO: 1773666 - RNA, 19 nt, Artificial Sequence
  Description of Artificial Sequence: Synthetic oligonucleotide
cauccaucgacuuaaccac

SEQ ID NO: 1773667 - RNA, 19 nt, Artificial Sequence
  Description of Artificial Sequence: Synthetic oligonucleotide
uuagugaaaacggaauaca

SEQ ID NO: 1773668 - RNA, 19 nt, Artificial Sequence
  Description of Artificial Sequence: Synthetic oligonucleotide
ucuauguaucaucaacaac

SEQ ID NO: 1773669 - RNA, 19 nt, Artificial Sequence
  Description of Artificial Sequence: Synthetic oligonucleotide
ucagccgaagccacgcucg

SEQ ID NO: 1773670 - RNA, 19 nt, Artificial Sequence
  Description of Artificial Sequence: Synthetic oligonucleotide
uucaaccuggaauucuuag

SEQ ID NO: 1773671 - RNA, 19 nt, Artificial Sequence
  Description of Artificial Sequence: Synthetic oligonucleotide
uucuaagguaacuuuagua

SEQ ID NO: 1773672 - RNA, 19 nt, Artificial Sequence
  Description of Artificial Sequence: Synthetic oligonucleotide
aagaacuuuaaaauccagu

SEQ ID NO: 1773673 - RNA, 19 nt, Artificial Sequence
  Description of Artificial Sequence: Synthetic oligonucleotide
acagagagcgcgucgaaag

SEQ ID NO: 1773674 - RNA, 19 nt, Artificial Sequence
  Description of Artificial Sequence: Synthetic oligonucleotide
cauuccuccucauuuaaug

SEQ ID NO: 1773675 - RNA, 19 nt, Artificial Sequence
  Description of Artificial Sequence: Synthetic oligonucleotide
auuauagucuuucuuugau

SEQ ID NO: 1773676 - RNA, 19 nt, Artificial Sequence
  Description of Artificial Sequence: Synthetic oligonucleotide
ucgacuuaaccacaccggc

SEQ ID NO: 1773677 - RNA, 19 nt, Artificial Sequence
  Description of Artificial Sequence: Synthetic oligonucleotide
aaaggaaaccucgggcugg

SEQ ID NO: 1773678 - RNA, 19 nt, Artificial Sequence
  Description of Artificial Sequence: Synthetic oligonucleotide
ucuuagugaaaacggaaua

SEQ ID NO: 1773679 - RNA, 19 nt, Artificial Sequence
  Description of Artificial Sequence: Synthetic oligonucleotide
ucuaaaacagagagcgcgu

SEQ ID NO: 1773680 - RNA, 19 nt, Artificial Sequence
  Description of Artificial Sequence: Synthetic oligonucleotide
aagguaacuuuaguauagg

SEQ ID NO: 1773681 - RNA, 19 nt, Artificial Sequence
  Description of Artificial Sequence: Synthetic oligonucleotide
uguuggacagggucgugcg

SEQ ID NO: 1773682 - RNA, 19 nt, Artificial Sequence
  Description of Artificial Sequence: Synthetic oligonucleotide
aaaucuucuaagguaacuu

SEQ ID NO: 1773683 - RNA, 19 nt, Artificial Sequence
  Description of Artificial Sequence: Synthetic oligonucleotide
ugcuaggcauguaacagga

SEQ ID NO: 1773684 - RNA, 19 nt, Artificial Sequence
  Description of Artificial Sequence: Synthetic oligonucleotide
ugguucugcagucagacuu

SEQ ID NO: 1773685 - RNA, 19 nt, Artificial Sequence
  Description of Artificial Sequence: Synthetic oligonucleotide
gacuguucgguauucuggc

SEQ ID NO: 1773686 - RNA, 19 nt, Artificial Sequence
  Description of Artificial Sequence: Synthetic oligonucleotide
ccgaauaaaucaaacacag

SEQ ID NO: 1773687 - RNA, 19 nt, Artificial Sequence
  Description of Artificial Sequence: Synthetic oligonucleotide
gacuuaaccacaccggcca

SEQ ID NO: 1773688 - RNA, 19 nt, Artificial Sequence
  Description of Artificial Sequence: Synthetic oligonucleotide
uccaccgaauaaaucaaac

SEQ ID NO: 1773689 - RNA, 19 nt, Artificial Sequence
  Description of Artificial Sequence: Synthetic oligonucleotide
uagggcaccucucuaaaac

SEQ ID NO: 1773690 - RNA, 19 nt, Artificial Sequence
  Description of Artificial Sequence: Synthetic oligonucleotide
aaaacagagagcgcgucga

SEQ ID NO: 1773691 - RNA, 19 nt, Artificial Sequence
  Description of Artificial Sequence: Synthetic oligonucleotide
agguuaugagaauaaauua

SEQ ID NO: 1773692 - RNA, 19 nt, Artificial Sequence
  Description of Artificial Sequence: Synthetic oligonucleotide
cacucuauguaucaucaac

SEQ ID NO: 1773693 - RNA, 19 nt, Artificial Sequence
  Description of Artificial Sequence: Synthetic oligonucleotide
accgcuugguucuucuggc

SEQ ID NO: 1773694 - RNA, 19 nt, Artificial Sequence
  Description of Artificial Sequence: Synthetic oligonucleotide
uuuucggcguguauccuug

SEQ ID NO: 1773695 - RNA, 19 nt, Artificial Sequence
  Description of Artificial Sequence: Synthetic oligonucleotide
augcuaggcauguaacagg

SEQ ID NO: 1773696 - RNA, 19 nt, Artificial Sequence
  Description of Artificial Sequence: Synthetic oligonucleotide
uagugaaaacggaauacau

SEQ ID NO: 1773697 - RNA, 19 nt, Artificial Sequence
  Description of Artificial Sequence: Synthetic oligonucleotide
uuuccaccgaauaaaucaa

SEQ ID NO: 1773698 - RNA, 19 nt, Artificial Sequence
  Description of Artificial Sequence: Synthetic oligonucleotide
cacugaaccggucuggccc

SEQ ID NO: 1773699 - RNA, 19 nt, Artificial Sequence
  Description of Artificial Sequence: Synthetic oligonucleotide
ucuuauccuaucuggagua

SEQ ID NO: 1773700 - RNA, 19 nt, Artificial Sequence
  Description of Artificial Sequence: Synthetic oligonucleotide
ucaaccuggaauucuuagu

SEQ ID NO: 1773701 - RNA, 19 nt, Artificial Sequence
  Description of Artificial Sequence: Synthetic oligonucleotide
gucgaaaggaaaccucggg

SEQ ID NO: 1773702 - RNA, 19 nt, Artificial Sequence
  Description of Artificial Sequence: Synthetic oligonucleotide
agaucuuuggccgcgaacu

SEQ ID NO: 1773703 - RNA, 19 nt, Artificial Sequence
  Description of Artificial Sequence: Synthetic oligonucleotide
cagggucucaaacuggugc

SEQ ID NO: 1773704 - RNA, 19 nt, Artificial Sequence
  Description of Artificial Sequence: Synthetic oligonucleotide
agugaaaacggaauacaug

SEQ ID NO: 1773705 - RNA, 19 nt, Artificial Sequence
  Description of Artificial Sequence: Synthetic oligonucleotide
gucgucguacugcucaucg

SEQ ID NO: 1773706 - RNA, 19 nt, Artificial Sequence
  Description of Artificial Sequence: Synthetic oligonucleotide
uacaccucaucauaagcaa

SEQ ID NO: 1773707 - RNA, 19 nt, Artificial Sequence
  Description of Artificial Sequence: Synthetic oligonucleotide
acuaguacccauuccuccu

SEQ ID NO: 1773708 - RNA, 19 nt, Artificial Sequence
  Description of Artificial Sequence: Synthetic oligonucleotide
aaacuucaaccuggaauuc

SEQ ID NO: 1773709 - RNA, 19 nt, Artificial Sequence
  Description of Artificial Sequence: Synthetic oligonucleotide
guacagaaagaguauuuuc

SEQ ID NO: 1773710 - RNA, 19 nt, Artificial Sequence
  Description of Artificial Sequence: Synthetic oligonucleotide
cauuugcugcgucuggacg

SEQ ID NO: 1773711 - RNA, 19 nt, Artificial Sequence
  Description of Artificial Sequence: Synthetic oligonucleotide
acagaguuguaaauaaacu

SEQ ID NO: 1773712 - RNA, 19 nt, Artificial Sequence
  Description of Artificial Sequence: Synthetic oligonucleotide
ugcaacuuccauguugccc

SEQ ID NO: 1773713 - RNA, 19 nt, Artificial Sequence
  Description of Artificial Sequence: Synthetic oligonucleotide
gcuguaagacgacuguucg

SEQ ID NO: 1773714 - RNA, 19 nt, Artificial Sequence
  Description of Artificial Sequence: Synthetic oligonucleotide
uuuggccgcgaacuucagg

SEQ ID NO: 1773715 - RNA, 19 nt, Artificial Sequence
  Description of Artificial Sequence: Synthetic oligonucleotide
aacuuuaguauagguuaug

SEQ ID NO: 1773716 - RNA, 19 nt, Artificial Sequence
  Description of Artificial Sequence: Synthetic oligonucleotide
ugucacucuauguaucauc

SEQ ID NO: 1773717 - RNA, 19 nt, Artificial Sequence
  Description of Artificial Sequence: Synthetic oligonucleotide
acuuuaguauagguuauga

SEQ ID NO: 1773718 - RNA, 19 nt, Artificial Sequence
  Description of Artificial Sequence: Synthetic oligonucleotide
accgaauaaaucaaacaca

SEQ ID NO: 1773719 - RNA, 19 nt, Artificial Sequence
  Description of Artificial Sequence: Synthetic oligonucleotide
auguuggacagggucgugc

SEQ ID NO: 1773720 - RNA, 19 nt, Artificial Sequence
  Description of Artificial Sequence: Synthetic oligonucleotide
aucgacuuaaccacaccgg

SEQ ID NO: 1773721 - RNA, 19 nt, Artificial Sequence
  Description of Artificial Sequence: Synthetic oligonucleotide
acucuauguaucaucaaca

SEQ ID NO: 1773722 - RNA, 19 nt, Artificial Sequence
  Description of Artificial Sequence: Synthetic oligonucleotide
uaggcuguaagacgacugu

SEQ ID NO: 1773723 - RNA, 19 nt, Artificial Sequence
  Description of Artificial Sequence: Synthetic oligonucleotide
aaugucgcauccaucgacu

SEQ ID NO: 1773724 - RNA, 19 nt, Artificial Sequence
  Description of Artificial Sequence: Synthetic oligonucleotide
ugcggcagcuccauguuga

SEQ ID NO: 1773725 - RNA, 19 nt, Artificial Sequence
  Description of Artificial Sequence: Synthetic oligonucleotide
uggaauucuuagugaaaac

SEQ ID NO: 1773726 - RNA, 19 nt, Artificial Sequence
  Description of Artificial Sequence: Synthetic oligonucleotide
gcauccaucgacuuaacca

SEQ ID NO: 1773727 - RNA, 19 nt, Artificial Sequence
  Description of Artificial Sequence: Synthetic oligonucleotide
agcgcgucgaaaggaaacc

SEQ ID NO: 1773728 - RNA, 19 nt, Artificial Sequence
  Description of Artificial Sequence: Synthetic oligonucleotide
uguucagaucuuuggccgc

SEQ ID NO: 1773729 - RNA, 19 nt, Artificial Sequence
  Description of Artificial Sequence: Synthetic oligonucleotide
uguucgguauucuggcaca

SEQ ID NO: 1773730 - RNA, 19 nt, Artificial Sequence
  Description of Artificial Sequence: Synthetic oligonucleotide
ucucuaaaacagagagcgc

SEQ ID NO: 1773731 - RNA, 19 nt, Artificial Sequence
  Description of Artificial Sequence: Synthetic oligonucleotide
gcgaacuucagguugaaca

SEQ ID NO: 1773732 - RNA, 19 nt, Artificial Sequence
  Description of Artificial Sequence: Synthetic oligonucleotide
uaagacgacuguucgguau

SEQ ID NO: 1773733 - RNA, 19 nt, Artificial Sequence
  Description of Artificial Sequence: Synthetic oligonucleotide
cuguaagacgacuguucgg

SEQ ID NO: 1773734 - RNA, 19 nt, Artificial Sequence
  Description of Artificial Sequence: Synthetic oligonucleotide
accgcauccacccgcgcac

SEQ ID NO: 1773735 - RNA, 19 nt, Artificial Sequence
  Description of Artificial Sequence: Synthetic oligonucleotide
agguaacuuuaguauaggu

SEQ ID NO: 1773736 - RNA, 19 nt, Artificial Sequence
  Description of Artificial Sequence: Synthetic oligonucleotide
ucgguauucuggcacaauu

SEQ ID NO: 1773737 - RNA, 19 nt, Artificial Sequence
  Description of Artificial Sequence: Synthetic oligonucleotide
uccaucgacuuaaccacac

SEQ ID NO: 1773738 - RNA, 19 nt, Artificial Sequence
  Description of Artificial Sequence: Synthetic oligonucleotide
uggacucuggcagccaccg

SEQ ID NO: 1773739 - RNA, 19 nt, Artificial Sequence
  Description of Artificial Sequence: Synthetic oligonucleotide
agacuugaucccgaaggcg

SEQ ID NO: 1773740 - RNA, 19 nt, Artificial Sequence
  Description of Artificial Sequence: Synthetic oligonucleotide
cagacuugaucccgaaggc

SEQ ID NO: 1773741 - RNA, 19 nt, Artificial Sequence
  Description of Artificial Sequence: Synthetic oligonucleotide
gaguauuuuccaccgaaua

SEQ ID NO: 1773742 - RNA, 19 nt, Artificial Sequence
  Description of Artificial Sequence: Synthetic oligonucleotide
cuaagguaacuuuaguaua

SEQ ID NO: 1773743 - RNA, 19 nt, Artificial Sequence
  Description of Artificial Sequence: Synthetic oligonucleotide
caaugucgcauccaucgac

SEQ ID NO: 1773744 - RNA, 19 nt, Artificial Sequence
  Description of Artificial Sequence: Synthetic oligonucleotide
ucuagggcaccucucuaaa

SEQ ID NO: 1773745 - RNA, 19 nt, Artificial Sequence
  Description of Artificial Sequence: Synthetic oligonucleotide
agggacaccggcucaagga

SEQ ID NO: 1773746 - RNA, 19 nt, Artificial Sequence
  Description of Artificial Sequence: Synthetic oligonucleotide
aagacgacuguucgguauu

SEQ ID NO: 1773747 - RNA, 19 nt, Artificial Sequence
  Description of Artificial Sequence: Synthetic oligonucleotide
agguugaacaaguguuucu

SEQ ID NO: 1773748 - RNA, 19 nt, Artificial Sequence
  Description of Artificial Sequence: Synthetic oligonucleotide
cuguucgguauucuggcac

SEQ ID NO: 1773749 - RNA, 19 nt, Artificial Sequence
  Description of Artificial Sequence: Synthetic oligonucleotide
aggacuuauuuugacaaaa

SEQ ID NO: 1773750 - RNA, 19 nt, Artificial Sequence
  Description of Artificial Sequence: Synthetic oligonucleotide
acgacuguucgguauucug

SEQ ID NO: 1773751 - RNA, 19 nt, Artificial Sequence
  Description of Artificial Sequence: Synthetic oligonucleotide
agggucucaaacuggugcu

SEQ ID NO: 1773752 - RNA, 19 nt, Artificial Sequence
  Description of Artificial Sequence: Synthetic oligonucleotide
caccgcuugguucuucugg

SEQ ID NO: 1773753 - RNA, 19 nt, Artificial Sequence
  Description of Artificial Sequence: Synthetic oligonucleotide
gcauuuucggcguguaucc

SEQ ID NO: 1773754 - RNA, 19 nt, Artificial Sequence
  Description of Artificial Sequence: Synthetic oligonucleotide
cucguucccacugaaccgg

SEQ ID NO: 1773755 - RNA, 19 nt, Artificial Sequence
  Description of Artificial Sequence: Synthetic oligonucleotide
auucuuagugaaaacggaa

SEQ ID NO: 1773756 - RNA, 19 nt, Artificial Sequence
  Description of Artificial Sequence: Synthetic oligonucleotide
gaaguggaggaaaacugga

SEQ ID NO: 1773757 - RNA, 19 nt, Artificial Sequence
  Description of Artificial Sequence: Synthetic oligonucleotide
uggaggaaaacuggaauuu

SEQ ID NO: 1773758 - RNA, 19 nt, Artificial Sequence
  Description of Artificial Sequence: Synthetic oligonucleotide
gucacucuauguaucauca

SEQ ID NO: 1773759 - RNA, 19 nt, Artificial Sequence
  Description of Artificial Sequence: Synthetic oligonucleotide
cuggugcucgaacuugucc

SEQ ID NO: 1773760 - RNA, 19 nt, Artificial Sequence
  Description of Artificial Sequence: Synthetic oligonucleotide
gacguccagggucucaaac

SEQ ID NO: 1773761 - RNA, 19 nt, Artificial Sequence
  Description of Artificial Sequence: Synthetic oligonucleotide
ucaucgugucuuccauuug

SEQ ID NO: 1773762 - RNA, 19 nt, Artificial Sequence
  Description of Artificial Sequence: Synthetic oligonucleotide
aguuguaaauaaacuagua

SEQ ID NO: 1773763 - RNA, 19 nt, Artificial Sequence
  Description of Artificial Sequence: Synthetic oligonucleotide
aaccggucuggcccugcgg

SEQ ID NO: 1773764 - RNA, 19 nt, Artificial Sequence
  Description of Artificial Sequence: Synthetic oligonucleotide
guuagaaguggaggaaaac

SEQ ID NO: 1773765 - RNA, 19 nt, Artificial Sequence
  Description of Artificial Sequence: Synthetic oligonucleotide
uccacccgcgcacucauuc

SEQ ID NO: 1773766 - RNA, 19 nt, Artificial Sequence
  Description of Artificial Sequence: Synthetic oligonucleotide
agggcaccucucuaaaaca

SEQ ID NO: 1773767 - RNA, 19 nt, Artificial Sequence
  Description of Artificial Sequence: Synthetic oligonucleotide
agggucgugcggcuucggc

SEQ ID NO: 1773768 - RNA, 19 nt, Artificial Sequence
  Description of Artificial Sequence: Synthetic oligonucleotide
aucuuuggccgcgaacuuc

SEQ ID NO: 1773769 - RNA, 19 nt, Artificial Sequence
  Description of Artificial Sequence: Synthetic oligonucleotide
ucggcguguauccuugcaa

SEQ ID NO: 1773770 - RNA, 19 nt, Artificial Sequence
  Description of Artificial Sequence: Synthetic oligonucleotide
guaggcuguaagacgacug

SEQ ID NO: 1773771 - RNA, 19 nt, Artificial Sequence
  Description of Artificial Sequence: Synthetic oligonucleotide
uuccaccgaauaaaucaaa

SEQ ID NO: 1773772 - RNA, 19 nt, Artificial Sequence
  Description of Artificial Sequence: Synthetic oligonucleotide
guucagaucuuuggccgcg

SEQ ID NO: 1773773 - RNA, 19 nt, Artificial Sequence
  Description of Artificial Sequence: Synthetic oligonucleotide
cagagagcgcgucgaaagg

SEQ ID NO: 1773774 - RNA, 19 nt, Artificial Sequence
  Description of Artificial Sequence: Synthetic oligonucleotide
aguguucacagaguuguaa

SEQ ID NO: 1773775 - RNA, 19 nt, Artificial Sequence
  Description of Artificial Sequence: Synthetic oligonucleotide
gaaaccucgggcugguucu

SEQ ID NO: 1773776 - RNA, 19 nt, Artificial Sequence
  Description of Artificial Sequence: Synthetic oligonucleotide
uggcacaauucuagggcac

SEQ ID NO: 1773777 - RNA, 19 nt, Artificial Sequence
  Description of Artificial Sequence: Synthetic oligonucleotide
auuuucggcguguauccuu

SEQ ID NO: 1773778 - RNA, 19 nt, Artificial Sequence
  Description of Artificial Sequence: Synthetic oligonucleotide
aaacagagagcgcgucgaa

SEQ ID NO: 1773779 - RNA, 19 nt, Artificial Sequence
  Description of Artificial Sequence: Synthetic oligonucleotide
gaguuguaaauaaacuagu

SEQ ID NO: 1773780 - RNA, 19 nt, Artificial Sequence
  Description of Artificial Sequence: Synthetic oligonucleotide
uucaccgcuugguucuucu

SEQ ID NO: 1773781 - RNA, 19 nt, Artificial Sequence
  Description of Artificial Sequence: Synthetic oligonucleotide
guguucacagaguuguaaa

SEQ ID NO: 1773782 - RNA, 19 nt, Artificial Sequence
  Description of Artificial Sequence: Synthetic oligonucleotide
uucggcguguauccuugca

SEQ ID NO: 1773783 - RNA, 19 nt, Artificial Sequence
  Description of Artificial Sequence: Synthetic oligonucleotide
caccucaucauaagcaaaa

SEQ ID NO: 1773784 - RNA, 19 nt, Artificial Sequence
  Description of Artificial Sequence: Synthetic oligonucleotide
gucagacuugaucccgaag

SEQ ID NO: 1773785 - RNA, 19 nt, Artificial Sequence
  Description of Artificial Sequence: Synthetic oligonucleotide
cuuauccuaucuggaguag

SEQ ID NO: 1773786 - RNA, 19 nt, Artificial Sequence
  Description of Artificial Sequence: Synthetic oligonucleotide
cuaaaacagagagcgcguc

SEQ ID NO: 1773787 - RNA, 19 nt, Artificial Sequence
  Description of Artificial Sequence: Synthetic oligonucleotide
gucaccgcggucuggacuc

SEQ ID NO: 1773788 - RNA, 19 nt, Artificial Sequence
  Description of Artificial Sequence: Synthetic oligonucleotide
gcucguucccacugaaccg

SEQ ID NO: 1773789 - RNA, 19 nt, Artificial Sequence
  Description of Artificial Sequence: Synthetic oligonucleotide
acaugagggcuagaguucu

SEQ ID NO: 1773790 - RNA, 19 nt, Artificial Sequence
  Description of Artificial Sequence: Synthetic oligonucleotide
gguugaacaaguguuucuc

SEQ ID NO: 1773791 - RNA, 19 nt, Artificial Sequence
  Description of Artificial Sequence: Synthetic oligonucleotide
ccucauuuaauguuuugca

SEQ ID NO: 1773792 - RNA, 19 nt, Artificial Sequence
  Description of Artificial Sequence: Synthetic oligonucleotide
aacagagagcgcgucgaaa

SEQ ID NO: 1773793 - RNA, 19 nt, Artificial Sequence
  Description of Artificial Sequence: Synthetic oligonucleotide
acuguucgguauucuggca

SEQ ID NO: 1773794 - RNA, 19 nt, Artificial Sequence
  Description of Artificial Sequence: Synthetic oligonucleotide
gcgucgaaaggaaaccucg

SEQ ID NO: 1773795 - RNA, 19 nt, Artificial Sequence
  Description of Artificial Sequence: Synthetic oligonucleotide
cuaguacccauuccuccuc

SEQ ID NO: 1773796 - RNA, 19 nt, Artificial Sequence
  Description of Artificial Sequence: Synthetic oligonucleotide
gaaccggucuggcccugcg

SEQ ID NO: 1773797 - RNA, 19 nt, Artificial Sequence
  Description of Artificial Sequence: Synthetic oligonucleotide
gguauucuggcacaauucu

SEQ ID NO: 1773798 - RNA, 19 nt, Artificial Sequence
  Description of Artificial Sequence: Synthetic oligonucleotide
ggaauuucuuauccuaucu

SEQ ID NO: 1773799 - RNA, 19 nt, Artificial Sequence
  Description of Artificial Sequence: Synthetic oligonucleotide
agagagcgcgucgaaagga

SEQ ID NO: 1773800 - RNA, 19 nt, Artificial Sequence
  Description of Artificial Sequence: Synthetic oligonucleotide
ugcggcuucggcggagugg

SEQ ID NO: 1773801 - RNA, 19 nt, Artificial Sequence
  Description of Artificial Sequence: Synthetic oligonucleotide
ggucucaaacuggugcucg

SEQ ID NO: 1773802 - RNA, 19 nt, Artificial Sequence
  Description of Artificial Sequence: Synthetic oligonucleotide
gucgcauccaucgacuuaa

SEQ ID NO: 1773803 - RNA, 19 nt, Artificial Sequence
  Description of Artificial Sequence: Synthetic oligonucleotide
gggacaccggcucaaggag

SEQ ID NO: 1773804 - RNA, 19 nt, Artificial Sequence
  Description of Artificial Sequence: Synthetic oligonucleotide
ucguacugcucaucguguc

SEQ ID NO: 1773805 - RNA, 19 nt, Artificial Sequence
  Description of Artificial Sequence: Synthetic oligonucleotide
ggcaaugcuaggcauguaa

SEQ ID NO: 1773806 - RNA, 19 nt, Artificial Sequence
  Description of Artificial Sequence: Synthetic oligonucleotide
gggucgugcggcuucggcg

SEQ ID NO: 1773807 - RNA, 19 nt, Artificial Sequence
  Description of Artificial Sequence: Synthetic oligonucleotide
cagguugaacaaguguuuc

SEQ ID NO: 1773808 - RNA, 19 nt, Artificial Sequence
  Description of Artificial Sequence: Synthetic oligonucleotide
cagaucuuuggccgcgaac

SEQ ID NO: 1773809 - RNA, 19 nt, Artificial Sequence
  Description of Artificial Sequence: Synthetic oligonucleotide
gagcgcgucgaaaggaaac

SEQ ID NO: 1773810 - RNA, 19 nt, Artificial Sequence
  Description of Artificial Sequence: Synthetic oligonucleotide
guagcauauccacuuggcu

SEQ ID NO: 1773811 - RNA, 19 nt, Artificial Sequence
  Description of Artificial Sequence: Synthetic oligonucleotide
ucagaucuuuggccgcgaa

SEQ ID NO: 1773812 - RNA, 19 nt, Artificial Sequence
  Description of Artificial Sequence: Synthetic oligonucleotide
cgacuguucgguauucugg

SEQ ID NO: 1773813 - RNA, 19 nt, Artificial Sequence
  Description of Artificial Sequence: Synthetic oligonucleotide
gacagggucgugcggcuuc

SEQ ID NO: 1773814 - RNA, 19 nt, Artificial Sequence
  Description of Artificial Sequence: Synthetic oligonucleotide
ggaaaccucgggcugguuc

SEQ ID NO: 1773815 - RNA, 19 nt, Artificial Sequence
  Description of Artificial Sequence: Synthetic oligonucleotide
cuucagguugaacaagugu

SEQ ID NO: 1773816 - RNA, 19 nt, Artificial Sequence
  Description of Artificial Sequence: Synthetic oligonucleotide
agacgacuguucgguauuc

SEQ ID NO: 1773817 - RNA, 19 nt, Artificial Sequence
  Description of Artificial Sequence: Synthetic oligonucleotide
cuuaaccacaccggccaug

SEQ ID NO: 1773818 - RNA, 19 nt, Artificial Sequence
  Description of Artificial Sequence: Synthetic oligonucleotide
caccggcucaaggaggucc

SEQ ID NO: 1773819 - RNA, 19 nt, Artificial Sequence
  Description of Artificial Sequence: Synthetic oligonucleotide
ugcccaucgucaccgcggu

SEQ ID NO: 1773820 - RNA, 19 nt, Artificial Sequence
  Description of Artificial Sequence: Synthetic oligonucleotide
uuucggcguguauccuugc

SEQ ID NO: 1773821 - RNA, 19 nt, Artificial Sequence
  Description of Artificial Sequence: Synthetic oligonucleotide
gucucugggacaguucauc

SEQ ID NO: 1773822 - RNA, 19 nt, Artificial Sequence
  Description of Artificial Sequence: Synthetic oligonucleotide
ucgucguacugcucaucgu

SEQ ID NO: 1773823 - RNA, 19 nt, Artificial Sequence
  Description of Artificial Sequence: Synthetic oligonucleotide
auccuaucuggaguaggcu

SEQ ID NO: 1773824 - RNA, 19 nt, Artificial Sequence
  Description of Artificial Sequence: Synthetic oligonucleotide
cgcucguucccacugaacc

SEQ ID NO: 1773825 - RNA, 19 nt, Artificial Sequence
  Description of Artificial Sequence: Synthetic oligonucleotide
agucagacuugaucccgaa

SEQ ID NO: 1773826 - RNA, 19 nt, Artificial Sequence
  Description of Artificial Sequence: Synthetic oligonucleotide
ccggccauggacuugguca

SEQ ID NO: 1773827 - RNA, 19 nt, Artificial Sequence
  Description of Artificial Sequence: Synthetic oligonucleotide
ccaccgaauaaaucaaaca

SEQ ID NO: 1773828 - RNA, 19 nt, Artificial Sequence
  Description of Artificial Sequence: Synthetic oligonucleotide
gggcaccucucuaaaacag

SEQ ID NO: 1773829 - RNA, 19 nt, Artificial Sequence
  Description of Artificial Sequence: Synthetic oligonucleotide
gguaacuuuaguauagguu

SEQ ID NO: 1773830 - RNA, 19 nt, Artificial Sequence
  Description of Artificial Sequence: Synthetic oligonucleotide
aaaccucgggcugguucug

SEQ ID NO: 1773831 - RNA, 19 nt, Artificial Sequence
  Description of Artificial Sequence: Synthetic oligonucleotide
gcaaugcuaggcauguaac

SEQ ID NO: 1773832 - RNA, 19 nt, Artificial Sequence
  Description of Artificial Sequence: Synthetic oligonucleotide
ggccgcgaacuucagguug

SEQ ID NO: 1773833 - RNA, 19 nt, Artificial Sequence
  Description of Artificial Sequence: Synthetic oligonucleotide
cuagaguucugccaauuuu

SEQ ID NO: 1773834 - RNA, 19 nt, Artificial Sequence
  Description of Artificial Sequence: Synthetic oligonucleotide
uacugcucaucgugucuuc

SEQ ID NO: 1773835 - RNA, 19 nt, Artificial Sequence
  Description of Artificial Sequence: Synthetic oligonucleotide
uggcauuuucggcguguau

SEQ ID NO: 1773836 - RNA, 19 nt, Artificial Sequence
  Description of Artificial Sequence: Synthetic oligonucleotide
uucagaucuuuggccgcga

SEQ ID NO: 1773837 - RNA, 19 nt, Artificial Sequence
  Description of Artificial Sequence: Synthetic oligonucleotide
ggaggaaaacuggaauuuc

SEQ ID NO: 1773838 - RNA, 19 nt, Artificial Sequence
  Description of Artificial Sequence: Synthetic oligonucleotide
ggcuguaagacgacuguuc

SEQ ID NO: 1773839 - RNA, 19 nt, Artificial Sequence
  Description of Artificial Sequence: Synthetic oligonucleotide
ggcacaauucuagggcacc

SEQ ID NO: 1773840 - RNA, 19 nt, Artificial Sequence
  Description of Artificial Sequence: Synthetic oligonucleotide
aguacccauuccuccucau

SEQ ID NO: 1773841 - RNA, 19 nt, Artificial Sequence
  Description of Artificial Sequence: Synthetic oligonucleotide
gcggcuucggcggaguggg

SEQ ID NO: 1773842 - RNA, 19 nt, Artificial Sequence
  Description of Artificial Sequence: Synthetic oligonucleotide
gucucaaacuggugcucga

SEQ ID NO: 1773843 - RNA, 19 nt, Artificial Sequence
  Description of Artificial Sequence: Synthetic oligonucleotide
ggacaccggcucaaggagg

SEQ ID NO: 1773844 - RNA, 19 nt, Artificial Sequence
  Description of Artificial Sequence: Synthetic oligonucleotide
cgacuuaaccacaccggcc

SEQ ID NO: 1773845 - RNA, 19 nt, Artificial Sequence
  Description of Artificial Sequence: Synthetic oligonucleotide
augucgcauccaucgacuu

SEQ ID NO: 1773846 - RNA, 19 nt, Artificial Sequence
  Description of Artificial Sequence: Synthetic oligonucleotide
caggacuuauuuugacaaa

SEQ ID NO: 1773847 - RNA, 19 nt, Artificial Sequence
  Description of Artificial Sequence: Synthetic oligonucleotide
gagagcgcgucgaaaggaa

SEQ ID NO: 1773848 - RNA, 19 nt, Artificial Sequence
  Description of Artificial Sequence: Synthetic oligonucleotide
cgucgaaaggaaaccucgg

SEQ ID NO: 1773849 - RNA, 19 nt, Artificial Sequence
  Description of Artificial Sequence: Synthetic oligonucleotide
ggaccaaaucagcaguucu

SEQ ID NO: 1773850 - RNA, 19 nt, Artificial Sequence
  Description of Artificial Sequence: Synthetic oligonucleotide
ugucuuccauuugcugcgu

SEQ ID NO: 1773851 - RNA, 19 nt, Artificial Sequence
  Description of Artificial Sequence: Synthetic oligonucleotide
cgucguacugcucaucgug

SEQ ID NO: 1773852 - RNA, 19 nt, Artificial Sequence
  Description of Artificial Sequence: Synthetic oligonucleotide
cuucaaccuggaauucuua

SEQ ID NO: 1773853 - RNA, 19 nt, Artificial Sequence
  Description of Artificial Sequence: Synthetic oligonucleotide
uucgguauucuggcacaau

SEQ ID NO: 1773854 - RNA, 19 nt, Artificial Sequence
  Description of Artificial Sequence: Synthetic oligonucleotide
auccaucgacuuaaccaca

SEQ ID NO: 1773855 - RNA, 19 nt, Artificial Sequence
  Description of Artificial Sequence: Synthetic oligonucleotide
cacccgcgcacucauucuc

SEQ ID NO: 1773856 - RNA, 19 nt, Artificial Sequence
  Description of Artificial Sequence: Synthetic oligonucleotide
guaagacgacuguucggua

SEQ ID NO: 1773857 - RNA, 19 nt, Artificial Sequence
  Description of Artificial Sequence: Synthetic oligonucleotide
ucgcauccaucgacuuaac

SEQ ID NO: 1773858 - RNA, 19 nt, Artificial Sequence
  Description of Artificial Sequence: Synthetic oligonucleotide
acgcucguucccacugaac

SEQ ID NO: 1773859 - RNA, 19 nt, Artificial Sequence
  Description of Artificial Sequence: Synthetic oligonucleotide
ggcucaaggagguccgcuc

SEQ ID NO: 1773860 - RNA, 19 nt, Artificial Sequence
  Description of Artificial Sequence: Synthetic oligonucleotide
agcuccauguugaggucga

SEQ ID NO: 1773861 - RNA, 19 nt, Artificial Sequence
  Description of Artificial Sequence: Synthetic oligonucleotide
gaccaaaucagcaguucuu

SEQ ID NO: 1773862 - RNA, 19 nt, Artificial Sequence
  Description of Artificial Sequence: Synthetic oligonucleotide
gacaccggcucaaggaggu

SEQ ID NO: 1773863 - RNA, 19 nt, Artificial Sequence
  Description of Artificial Sequence: Synthetic oligonucleotide
ugaaccggucuggcccugc

SEQ ID NO: 1773864 - RNA, 19 nt, Artificial Sequence
  Description of Artificial Sequence: Synthetic oligonucleotide
cgguauucuggcacaauuc

SEQ ID NO: 1773865 - RNA, 19 nt, Artificial Sequence
  Description of Artificial Sequence: Synthetic oligonucleotide
gccacgcucguucccacug

SEQ ID NO: 1773866 - RNA, 19 nt, Artificial Sequence
  Description of Artificial Sequence: Synthetic oligonucleotide
ccaucgacuuaaccacacc

SEQ ID NO: 1773867 - RNA, 19 nt, Artificial Sequence
  Description of Artificial Sequence: Synthetic oligonucleotide
aggcuguaagacgacuguu

SEQ ID NO: 1773868 - RNA, 19 nt, Artificial Sequence
  Description of Artificial Sequence: Synthetic oligonucleotide
cuucggcggagugggcccg

SEQ ID NO: 1773869 - RNA, 19 nt, Artificial Sequence
  Description of Artificial Sequence: Synthetic oligonucleotide
cguguauccuugcaacuuc

SEQ ID NO: 1773870 - RNA, 19 nt, Artificial Sequence
  Description of Artificial Sequence: Synthetic oligonucleotide
ggcuucggcggagugggcc

SEQ ID NO: 1773871 - RNA, 19 nt, Artificial Sequence
  Description of Artificial Sequence: Synthetic oligonucleotide
cauguuggacagggucgug

SEQ ID NO: 1773872 - RNA, 19 nt, Artificial Sequence
  Description of Artificial Sequence: Synthetic oligonucleotide
caccgcauccacccgcgca

SEQ ID NO: 1773873 - RNA, 19 nt, Artificial Sequence
  Description of Artificial Sequence: Synthetic oligonucleotide
gaucuuuggccgcgaacuu

SEQ ID NO: 1773874 - RNA, 19 nt, Artificial Sequence
  Description of Artificial Sequence: Synthetic oligonucleotide
agccacgcucguucccacu

SEQ ID NO: 1773875 - RNA, 19 nt, Artificial Sequence
  Description of Artificial Sequence: Synthetic oligonucleotide
cccggcaagcagcagggac

SEQ ID NO: 1773876 - RNA, 19 nt, Artificial Sequence
  Description of Artificial Sequence: Synthetic oligonucleotide
uucggcggagugggcccgg

SEQ ID NO: 1773877 - RNA, 19 nt, Artificial Sequence
  Description of Artificial Sequence: Synthetic oligonucleotide
caucgucaccgcggucugg

SEQ ID NO: 1773878 - RNA, 19 nt, Artificial Sequence
  Description of Artificial Sequence: Synthetic oligonucleotide
ggcaccucucuaaaacaga

SEQ ID NO: 1773879 - RNA, 19 nt, Artificial Sequence
  Description of Artificial Sequence: Synthetic oligonucleotide
ucgucaccgcggucuggac

SEQ ID NO: 1773880 - RNA, 19 nt, Artificial Sequence
  Description of Artificial Sequence: Synthetic oligonucleotide
uggccgcgaacuucagguu

SEQ ID NO: 1773881 - RNA, 19 nt, Artificial Sequence
  Description of Artificial Sequence: Synthetic oligonucleotide
agagcgcgucgaaaggaaa

SEQ ID NO: 1773882 - RNA, 19 nt, Artificial Sequence
  Description of Artificial Sequence: Synthetic oligonucleotide
cggcguguauccuugcaac

SEQ ID NO: 1773883 - RNA, 19 nt, Artificial Sequence
  Description of Artificial Sequence: Synthetic oligonucleotide
ccgcuugguucuucuggcg

SEQ ID NO: 1773884 - RNA, 19 nt, Artificial Sequence
  Description of Artificial Sequence: Synthetic oligonucleotide
cagccaccgcauccacccg

SEQ ID NO: 1773885 - RNA, 19 nt, Artificial Sequence
  Description of Artificial Sequence: Synthetic oligonucleotide
cgcgcacucauucucaaga

SEQ ID NO: 1773886 - RNA, 19 nt, Artificial Sequence
  Description of Artificial Sequence: Synthetic oligonucleotide
gucguacugcucaucgugu

SEQ ID NO: 1773887 - RNA, 19 nt, Artificial Sequence
  Description of Artificial Sequence: Synthetic oligonucleotide
gcggagugggcccggcaag

SEQ ID NO: 1773888 - RNA, 19 nt, Artificial Sequence
  Description of Artificial Sequence: Synthetic oligonucleotide
acaccggcucaaggagguc

SEQ ID NO: 1773889 - RNA, 19 nt, Artificial Sequence
  Description of Artificial Sequence: Synthetic oligonucleotide
cggaauacaugagggcuag

SEQ ID NO: 1773890 - RNA, 19 nt, Artificial Sequence
  Description of Artificial Sequence: Synthetic oligonucleotide
guucgguauucuggcacaa

SEQ ID NO: 1773891 - RNA, 19 nt, Artificial Sequence
  Description of Artificial Sequence: Synthetic oligonucleotide
ucgugcggcuucggcggag

SEQ ID NO: 1773892 - RNA, 19 nt, Artificial Sequence
  Description of Artificial Sequence: Synthetic oligonucleotide
gucuggacguccagggucu

SEQ ID NO: 1773893 - RNA, 19 nt, Artificial Sequence
  Description of Artificial Sequence: Synthetic oligonucleotide
agucucugggacaguucau

SEQ ID NO: 1773894 - RNA, 19 nt, Artificial Sequence
  Description of Artificial Sequence: Synthetic oligonucleotide
acccgcgcacucauucuca

SEQ ID NO: 1773895 - RNA, 19 nt, Artificial Sequence
  Description of Artificial Sequence: Synthetic oligonucleotide
gacgacuguucgguauucu

SEQ ID NO: 1773896 - RNA, 19 nt, Artificial Sequence
  Description of Artificial Sequence: Synthetic oligonucleotide
cucgggcugguucugcagu

SEQ ID NO: 1773897 - RNA, 19 nt, Artificial Sequence
  Description of Artificial Sequence: Synthetic oligonucleotide
cgcgucgaaaggaaaccuc

SEQ ID NO: 1773898 - RNA, 19 nt, Artificial Sequence
  Description of Artificial Sequence: Synthetic oligonucleotide
guacugcucaucgugucuu

SEQ ID NO: 1773899 - RNA, 19 nt, Artificial Sequence
  Description of Artificial Sequence: Synthetic oligonucleotide
ucccgaaggcgggccaguc

SEQ ID NO: 1773900 - RNA, 19 nt, Artificial Sequence
  Description of Artificial Sequence: Synthetic oligonucleotide
cacgcucguucccacugaa

SEQ ID NO: 1773901 - RNA, 19 nt, Artificial Sequence
  Description of Artificial Sequence: Synthetic oligonucleotide
ccaguuagaaguggaggaa

SEQ ID NO: 1773902 - RNA, 19 nt, Artificial Sequence
  Description of Artificial Sequence: Synthetic oligonucleotide
ucuggacguccagggucuc

SEQ ID NO: 1773903 - RNA, 19 nt, Artificial Sequence
  Description of Artificial Sequence: Synthetic oligonucleotide
gugcggcuucggcggagug

SEQ ID NO: 1773904 - RNA, 19 nt, Artificial Sequence
  Description of Artificial Sequence: Synthetic oligonucleotide
gcuagaguucugccaauuu

SEQ ID NO: 1773905 - RNA, 19 nt, Artificial Sequence
  Description of Artificial Sequence: Synthetic oligonucleotide
cagcagggacaccggcuca

SEQ ID NO: 1773906 - RNA, 19 nt, Artificial Sequence
  Description of Artificial Sequence: Synthetic oligonucleotide
ccaucgucaccgcggucug

SEQ ID NO: 1773907 - RNA, 19 nt, Artificial Sequence
  Description of Artificial Sequence: Synthetic oligonucleotide
cauuuucggcguguauccu

SEQ ID NO: 1773908 - RNA, 19 nt, Artificial Sequence
  Description of Artificial Sequence: Synthetic oligonucleotide
cugaaccggucuggcccug

SEQ ID NO: 1773909 - RNA, 19 nt, Artificial Sequence
  Description of Artificial Sequence: Synthetic oligonucleotide
cagggucgugcggcuucgg

SEQ ID NO: 1773910 - RNA, 19 nt, Artificial Sequence
  Description of Artificial Sequence: Synthetic oligonucleotide
ccgcgcacucauucucaag

SEQ ID NO: 1773911 - RNA, 19 nt, Artificial Sequence
  Description of Artificial Sequence: Synthetic oligonucleotide
cuggacguccagggucuca

SEQ ID NO: 1773912 - RNA, 19 nt, Artificial Sequence
  Description of Artificial Sequence: Synthetic oligonucleotide
cauccacccgcgcacucau

SEQ ID NO: 1773913 - RNA, 19 nt, Artificial Sequence
  Description of Artificial Sequence: Synthetic oligonucleotide
ggaauacaugagggcuaga

SEQ ID NO: 1773914 - RNA, 19 nt, Artificial Sequence
  Description of Artificial Sequence: Synthetic oligonucleotide
ggcauguaacaggacuuau

SEQ ID NO: 1773915 - RNA, 19 nt, Artificial Sequence
  Description of Artificial Sequence: Synthetic oligonucleotide
agccgaagccacgcucguu

SEQ ID NO: 1773916 - RNA, 19 nt, Artificial Sequence
  Description of Artificial Sequence: Synthetic oligonucleotide
gcguguauccuugcaacuu

SEQ ID NO: 1773917 - RNA, 19 nt, Artificial Sequence
  Description of Artificial Sequence: Synthetic oligonucleotide
cccugcggcagcuccaugu

SEQ ID NO: 1773918 - RNA, 19 nt, Artificial Sequence
  Description of Artificial Sequence: Synthetic oligonucleotide
cgcggucuggacucuggca

SEQ ID NO: 1773919 - RNA, 19 nt, Artificial Sequence
  Description of Artificial Sequence: Synthetic oligonucleotide
gcgcgucgaaaggaaaccu

SEQ ID NO: 1773920 - RNA, 19 nt, Artificial Sequence
  Description of Artificial Sequence: Synthetic oligonucleotide
ccacgcucguucccacuga

SEQ ID NO: 1773921 - RNA, 19 nt, Artificial Sequence
  Description of Artificial Sequence: Synthetic oligonucleotide
ccaccgcauccacccgcgc

SEQ ID NO: 1773922 - RNA, 19 nt, Artificial Sequence
  Description of Artificial Sequence: Synthetic oligonucleotide
gggucgucguacugcucau

SEQ ID NO: 1773923 - RNA, 19 nt, Artificial Sequence
  Description of Artificial Sequence: Synthetic oligonucleotide
cccgcgcacucauucucaa

SEQ ID NO: 1773924 - RNA, 19 nt, Artificial Sequence
  Description of Artificial Sequence: Synthetic oligonucleotide
ccggcucaaggagguccgc

SEQ ID NO: 1773925 - RNA, 19 nt, Artificial Sequence
  Description of Artificial Sequence: Synthetic oligonucleotide
auccacccgcgcacucauu

SEQ ID NO: 1773926 - RNA, 19 nt, Artificial Sequence
  Description of Artificial Sequence: Synthetic oligonucleotide
ccacccgcgcacucauucu

SEQ ID NO: 1773927 - RNA, 19 nt, Artificial Sequence
  Description of Artificial Sequence: Synthetic oligonucleotide
cgucaccgcggucuggacu

SEQ ID NO: 1773928 - RNA, 19 nt, Artificial Sequence
  Description of Artificial Sequence: Synthetic oligonucleotide
cgaaggcgggccagucucu

SEQ ID NO: 1773929 - RNA, 19 nt, Artificial Sequence
  Description of Artificial Sequence: Synthetic oligonucleotide
ggcccgccucgucugccau

SEQ ID NO: 1773930 - RNA, 19 nt, Artificial Sequence
  Description of Artificial Sequence: Synthetic oligonucleotide
cggcucaaggagguccgcu

SEQ ID NO: 1773931 - RNA, 19 nt, Artificial Sequence
  Description of Artificial Sequence: Synthetic oligonucleotide
gcccgccucgucugccauu

SEQ ID NO: 1773932 - RNA, 19 nt, Artificial Sequence
  Description of Artificial Sequence: Synthetic oligonucleotide
cgugcggcuucggcggagu

SEQ ID NO: 1773933 - RNA, 19 nt, Artificial Sequence
  Description of Artificial Sequence: Synthetic oligonucleotide
aauagcauaauuuacaguc

SEQ ID NO: 1773934 - RNA, 19 nt, Artificial Sequence
  Description of Artificial Sequence: Synthetic oligonucleotide
cuaaguaagaacaaaaugc

SEQ ID NO: 1773935 - RNA, 19 nt, Artificial Sequence
  Description of Artificial Sequence: Synthetic oligonucleotide
uuaacuuaacacaaacccg

SEQ ID NO: 1773936 - RNA, 19 nt, Artificial Sequence
  Description of Artificial Sequence: Synthetic oligonucleotide
cuuaacacaaacccgagcg

SEQ ID NO: 1773937 - RNA, 19 nt, Artificial Sequence
  Description of Artificial Sequence: Synthetic oligonucleotide
uaaguaagaacaaaaugcc

SEQ ID NO: 1773938 - RNA, 19 nt, Artificial Sequence
  Description of Artificial Sequence: Synthetic oligonucleotide
ucaagcacuagccaguugg

SEQ ID NO: 1773939 - RNA, 19 nt, Artificial Sequence
  Description of Artificial Sequence: Synthetic oligonucleotide
ucauauauuauguauggca

SEQ ID NO: 1773940 - RNA, 19 nt, Artificial Sequence
  Description of Artificial Sequence: Synthetic oligonucleotide
uccucaauagcccagagug

SEQ ID NO: 1773941 - RNA, 19 nt, Artificial Sequence
  Description of Artificial Sequence: Synthetic oligonucleotide
aauacuuuguggcugucuc

SEQ ID NO: 1773942 - RNA, 19 nt, Artificial Sequence
  Description of Artificial Sequence: Synthetic oligonucleotide
uacagucuaaguaagaaca

SEQ ID NO: 1773943 - RNA, 19 nt, Artificial Sequence
  Description of Artificial Sequence: Synthetic oligonucleotide
uuaauagcauaauuuacag

SEQ ID NO: 1773944 - RNA, 19 nt, Artificial Sequence
  Description of Artificial Sequence: Synthetic oligonucleotide
acaaaagucacugaguaac

SEQ ID NO: 1773945 - RNA, 19 nt, Artificial Sequence
  Description of Artificial Sequence: Synthetic oligonucleotide
auuauuaguaccuaaguaa

SEQ ID NO: 1773946 - RNA, 19 nt, Artificial Sequence
  Description of Artificial Sequence: Synthetic oligonucleotide
auacagguuaacuuaacac

SEQ ID NO: 1773947 - RNA, 19 nt, Artificial Sequence
  Description of Artificial Sequence: Synthetic oligonucleotide
ugaaguaauaccuauaauu

SEQ ID NO: 1773948 - RNA, 19 nt, Artificial Sequence
  Description of Artificial Sequence: Synthetic oligonucleotide
aguaauaccuauaauuccc

SEQ ID NO: 1773949 - RNA, 19 nt, Artificial Sequence
  Description of Artificial Sequence: Synthetic oligonucleotide
ucacguuuugaauaaauag

SEQ ID NO: 1773950 - RNA, 19 nt, Artificial Sequence
  Description of Artificial Sequence: Synthetic oligonucleotide
aguugguuaacacucugcc

SEQ ID NO: 1773951 - RNA, 19 nt, Artificial Sequence
  Description of Artificial Sequence: Synthetic oligonucleotide
agucauauauuauguaugg

SEQ ID NO: 1773952 - RNA, 19 nt, Artificial Sequence
  Description of Artificial Sequence: Synthetic oligonucleotide
uaacuuaacacaaacccga

SEQ ID NO: 1773953 - RNA, 19 nt, Artificial Sequence
  Description of Artificial Sequence: Synthetic oligonucleotide
cauauauuauguauggcag

SEQ ID NO: 1773954 - RNA, 19 nt, Artificial Sequence
  Description of Artificial Sequence: Synthetic oligonucleotide
cuauaguacaguaaggaug

SEQ ID NO: 1773955 - RNA, 19 nt, Artificial Sequence
  Description of Artificial Sequence: Synthetic oligonucleotide
uuuccuucgaaauacuuug

SEQ ID NO: 1773956 - RNA, 19 nt, Artificial Sequence
  Description of Artificial Sequence: Synthetic oligonucleotide
uauacauaaaccccuuuca

SEQ ID NO: 1773957 - RNA, 19 nt, Artificial Sequence
  Description of Artificial Sequence: Synthetic oligonucleotide
aauuauuaguaccuaagua

SEQ ID NO: 1773958 - RNA, 19 nt, Artificial Sequence
  Description of Artificial Sequence: Synthetic oligonucleotide
uauuaauagcauaauuuac

SEQ ID NO: 1773959 - RNA, 19 nt, Artificial Sequence
  Description of Artificial Sequence: Synthetic oligonucleotide
uugguuaacacucugcccu

SEQ ID NO: 1773960 - RNA, 19 nt, Artificial Sequence
  Description of Artificial Sequence: Synthetic oligonucleotide
aaggauggcaaacaggaca

SEQ ID NO: 1773961 - RNA, 19 nt, Artificial Sequence
  Description of Artificial Sequence: Synthetic oligonucleotide
cuucgaaauacuuuguggc

SEQ ID NO: 1773962 - RNA, 19 nt, Artificial Sequence
  Description of Artificial Sequence: Synthetic oligonucleotide
aaagucacugaguaacaag

SEQ ID NO: 1773963 - RNA, 19 nt, Artificial Sequence
  Description of Artificial Sequence: Synthetic oligonucleotide
uaagugacaaccaacucac

SEQ ID NO: 1773964 - RNA, 19 nt, Artificial Sequence
  Description of Artificial Sequence: Synthetic oligonucleotide
uucuuuaaaaugaacuacu

SEQ ID NO: 1773965 - RNA, 19 nt, Artificial Sequence
  Description of Artificial Sequence: Synthetic oligonucleotide
aaaguaagugacaaccaac

SEQ ID NO: 1773966 - RNA, 19 nt, Artificial Sequence
  Description of Artificial Sequence: Synthetic oligonucleotide
uuugugaucugcuggagcc

SEQ ID NO: 1773967 - RNA, 19 nt, Artificial Sequence
  Description of Artificial Sequence: Synthetic oligonucleotide
uaggaagucauauauuaug

SEQ ID NO: 1773968 - RNA, 19 nt, Artificial Sequence
  Description of Artificial Sequence: Synthetic oligonucleotide
uaauuauuaguaccuaagu

SEQ ID NO: 1773969 - RNA, 19 nt, Artificial Sequence
  Description of Artificial Sequence: Synthetic oligonucleotide
aaaaccaagggagagcuug

SEQ ID NO: 1773970 - RNA, 19 nt, Artificial Sequence
  Description of Artificial Sequence: Synthetic oligonucleotide
aacucacuggccuggagcg

SEQ ID NO: 1773971 - RNA, 19 nt, Artificial Sequence
  Description of Artificial Sequence: Synthetic oligonucleotide
ugaguaacaagacuuguaa

SEQ ID NO: 1773972 - RNA, 19 nt, Artificial Sequence
  Description of Artificial Sequence: Synthetic oligonucleotide
uuccugaagacccaggggc

SEQ ID NO: 1773973 - RNA, 19 nt, Artificial Sequence
  Description of Artificial Sequence: Synthetic oligonucleotide
caugacaaaagucacugag

SEQ ID NO: 1773974 - RNA, 19 nt, Artificial Sequence
  Description of Artificial Sequence: Synthetic oligonucleotide
aaaaguaagugacaaccaa

SEQ ID NO: 1773975 - RNA, 19 nt, Artificial Sequence
  Description of Artificial Sequence: Synthetic oligonucleotide
ugacuggucacacagcacc

SEQ ID NO: 1773976 - RNA, 19 nt, Artificial Sequence
  Description of Artificial Sequence: Synthetic oligonucleotide
aaacaggacauacagguua

SEQ ID NO: 1773977 - RNA, 19 nt, Artificial Sequence
  Description of Artificial Sequence: Synthetic oligonucleotide
ucuuagucuaugaauuuca

SEQ ID NO: 1773978 - RNA, 19 nt, Artificial Sequence
  Description of Artificial Sequence: Synthetic oligonucleotide
ugauguuugggcaagcuau

SEQ ID NO: 1773979 - RNA, 19 nt, Artificial Sequence
  Description of Artificial Sequence: Synthetic oligonucleotide
gagcccugaauauagggcg

SEQ ID NO: 1773980 - RNA, 19 nt, Artificial Sequence
  Description of Artificial Sequence: Synthetic oligonucleotide
uucuuaauugguuucauuu

SEQ ID NO: 1773981 - RNA, 19 nt, Artificial Sequence
  Description of Artificial Sequence: Synthetic oligonucleotide
aauauagggcggugcacgg

SEQ ID NO: 1773982 - RNA, 19 nt, Artificial Sequence
  Description of Artificial Sequence: Synthetic oligonucleotide
agaacaaaaugccaugaca

SEQ ID NO: 1773983 - RNA, 19 nt, Artificial Sequence
  Description of Artificial Sequence: Synthetic oligonucleotide
gugacaaccaacucacugg

SEQ ID NO: 1773984 - RNA, 19 nt, Artificial Sequence
  Description of Artificial Sequence: Synthetic oligonucleotide
aguaacaagacuuguaaua

SEQ ID NO: 1773985 - RNA, 19 nt, Artificial Sequence
  Description of Artificial Sequence: Synthetic oligonucleotide
ugacaaaagucacugagua

SEQ ID NO: 1773986 - RNA, 19 nt, Artificial Sequence
  Description of Artificial Sequence: Synthetic oligonucleotide
ugucucguaggucugagac

SEQ ID NO: 1773987 - RNA, 19 nt, Artificial Sequence
  Description of Artificial Sequence: Synthetic oligonucleotide
gaauauagggcggugcacg

SEQ ID NO: 1773988 - RNA, 19 nt, Artificial Sequence
  Description of Artificial Sequence: Synthetic oligonucleotide
aaugaacuacuuuauuaau

SEQ ID NO: 1773989 - RNA, 19 nt, Artificial Sequence
  Description of Artificial Sequence: Synthetic oligonucleotide
ugcccuacacuauacacag

SEQ ID NO: 1773990 - RNA, 19 nt, Artificial Sequence
  Description of Artificial Sequence: Synthetic oligonucleotide
aauaccuauaauucccuuu

SEQ ID NO: 1773991 - RNA, 19 nt, Artificial Sequence
  Description of Artificial Sequence: Synthetic oligonucleotide
uucucuuagucuaugaauu

SEQ ID NO: 1773992 - RNA, 19 nt, Artificial Sequence
  Description of Artificial Sequence: Synthetic oligonucleotide
cuuggguuagagaagguug

SEQ ID NO: 1773993 - RNA, 19 nt, Artificial Sequence
  Description of Artificial Sequence: Synthetic oligonucleotide
uauuauguauggcagucuc

SEQ ID NO: 1773994 - RNA, 19 nt, Artificial Sequence
  Description of Artificial Sequence: Synthetic oligonucleotide
ucaaacacagucagccucc

SEQ ID NO: 1773995 - RNA, 19 nt, Artificial Sequence
  Description of Artificial Sequence: Synthetic oligonucleotide
ucacugaguaacaagacuu

SEQ ID NO: 1773996 - RNA, 19 nt, Artificial Sequence
  Description of Artificial Sequence: Synthetic oligonucleotide
uugguuucauuuuccuucg

SEQ ID NO: 1773997 - RNA, 19 nt, Artificial Sequence
  Description of Artificial Sequence: Synthetic oligonucleotide
caagucaagcacuagccag

SEQ ID NO: 1773998 - RNA, 19 nt, Artificial Sequence
  Description of Artificial Sequence: Synthetic oligonucleotide
uuuacagucuaaguaagaa

SEQ ID NO: 1773999 - RNA, 19 nt, Artificial Sequence
  Description of Artificial Sequence: Synthetic oligonucleotide
uauauuauguauggcaguc

SEQ ID NO: 1774000 - RNA, 19 nt, Artificial Sequence
  Description of Artificial Sequence: Synthetic oligonucleotide
uguaugggauuucuucucc

SEQ ID NO: 1774001 - RNA, 19 nt, Artificial Sequence
  Description of Artificial Sequence: Synthetic oligonucleotide
agaagguuguggcuccugc

SEQ ID NO: 1774002 - RNA, 19 nt, Artificial Sequence
  Description of Artificial Sequence: Synthetic oligonucleotide
acaggucugcuuucggucc

SEQ ID NO: 1774003 - RNA, 19 nt, Artificial Sequence
  Description of Artificial Sequence: Synthetic oligonucleotide
uuucucuuagucuaugaau

SEQ ID NO: 1774004 - RNA, 19 nt, Artificial Sequence
  Description of Artificial Sequence: Synthetic oligonucleotide
ugaauaaauaguucagguu

SEQ ID NO: 1774005 - RNA, 19 nt, Artificial Sequence
  Description of Artificial Sequence: Synthetic oligonucleotide
guaagaacaaaaugccaug

SEQ ID NO: 1774006 - RNA, 19 nt, Artificial Sequence
  Description of Artificial Sequence: Synthetic oligonucleotide
aagucacugaguaacaaga

SEQ ID NO: 1774007 - RNA, 19 nt, Artificial Sequence
  Description of Artificial Sequence: Synthetic oligonucleotide
guaaggauggcaaacagga

SEQ ID NO: 1774008 - RNA, 19 nt, Artificial Sequence
  Description of Artificial Sequence: Synthetic oligonucleotide
uuacagucuaaguaagaac

SEQ ID NO: 1774009 - RNA, 19 nt, Artificial Sequence
  Description of Artificial Sequence: Synthetic oligonucleotide
aacacucugcccuacacua

SEQ ID NO: 1774010 - RNA, 19 nt, Artificial Sequence
  Description of Artificial Sequence: Synthetic oligonucleotide
aaacccgagcgccaagggg

SEQ ID NO: 1774011 - RNA, 19 nt, Artificial Sequence
  Description of Artificial Sequence: Synthetic oligonucleotide
uuaacacaaacccgagcgc

SEQ ID NO: 1774012 - RNA, 19 nt, Artificial Sequence
  Description of Artificial Sequence: Synthetic oligonucleotide
uauagggcggugcacggag

SEQ ID NO: 1774013 - RNA, 19 nt, Artificial Sequence
  Description of Artificial Sequence: Synthetic oligonucleotide
acaaccaacucacuggccu

SEQ ID NO: 1774014 - RNA, 19 nt, Artificial Sequence
  Description of Artificial Sequence: Synthetic oligonucleotide
cugaagagcaaccacccgc

SEQ ID NO: 1774015 - RNA, 19 nt, Artificial Sequence
  Description of Artificial Sequence: Synthetic oligonucleotide
uuagucuaugaauuucaga

SEQ ID NO: 1774016 - RNA, 19 nt, Artificial Sequence
  Description of Artificial Sequence: Synthetic oligonucleotide
uacuacaguuuucucuuag

SEQ ID NO: 1774017 - RNA, 19 nt, Artificial Sequence
  Description of Artificial Sequence: Synthetic oligonucleotide
aguaagaacaaaaugccau

SEQ ID NO: 1774018 - RNA, 19 nt, Artificial Sequence
  Description of Artificial Sequence: Synthetic oligonucleotide
auauauuauguauggcagu

SEQ ID NO: 1774019 - RNA, 19 nt, Artificial Sequence
  Description of Artificial Sequence: Synthetic oligonucleotide
uccuuaaaguggcccaggg

SEQ ID NO: 1774020 - RNA, 19 nt, Artificial Sequence
  Description of Artificial Sequence: Synthetic oligonucleotide
agguacuguaccgauuucc

SEQ ID NO: 1774021 - RNA, 19 nt, Artificial Sequence
  Description of Artificial Sequence: Synthetic oligonucleotide
ugggcaagcuauacuacag

SEQ ID NO: 1774022 - RNA, 19 nt, Artificial Sequence
  Description of Artificial Sequence: Synthetic oligonucleotide
agagcuugagcccugaaua

SEQ ID NO: 1774023 - RNA, 19 nt, Artificial Sequence
  Description of Artificial Sequence: Synthetic oligonucleotide
ucuaugaauuucagauccc

SEQ ID NO: 1774024 - RNA, 19 nt, Artificial Sequence
  Description of Artificial Sequence: Synthetic oligonucleotide
ucgaacacugcuccacagg

SEQ ID NO: 1774025 - RNA, 19 nt, Artificial Sequence
  Description of Artificial Sequence: Synthetic oligonucleotide
uuugacaccucugccagcc

SEQ ID NO: 1774026 - RNA, 19 nt, Artificial Sequence
  Description of Artificial Sequence: Synthetic oligonucleotide
uucgaaauacuuuguggcu

SEQ ID NO: 1774027 - RNA, 19 nt, Artificial Sequence
  Description of Artificial Sequence: Synthetic oligonucleotide
gucucucaaacacagucag

SEQ ID NO: 1774028 - RNA, 19 nt, Artificial Sequence
  Description of Artificial Sequence: Synthetic oligonucleotide
ucccuaggaagucauauau

SEQ ID NO: 1774029 - RNA, 19 nt, Artificial Sequence
  Description of Artificial Sequence: Synthetic oligonucleotide
uaagaacaaaaugccauga

SEQ ID NO: 1774030 - RNA, 19 nt, Artificial Sequence
  Description of Artificial Sequence: Synthetic oligonucleotide
uccuucgaaauacuuugug

SEQ ID NO: 1774031 - RNA, 19 nt, Artificial Sequence
  Description of Artificial Sequence: Synthetic oligonucleotide
uuagagaagguuguggcuc

SEQ ID NO: 1774032 - RNA, 19 nt, Artificial Sequence
  Description of Artificial Sequence: Synthetic oligonucleotide
uaauagcauaauuuacagu

SEQ ID NO: 1774033 - RNA, 19 nt, Artificial Sequence
  Description of Artificial Sequence: Synthetic oligonucleotide
uaacacaaacccgagcgcc

SEQ ID NO: 1774034 - RNA, 19 nt, Artificial Sequence
  Description of Artificial Sequence: Synthetic oligonucleotide
accuaaguaauuuucuuua

SEQ ID NO: 1774035 - RNA, 19 nt, Artificial Sequence
  Description of Artificial Sequence: Synthetic oligonucleotide
uuuugaaguaauaccuaua

SEQ ID NO: 1774036 - RNA, 19 nt, Artificial Sequence
  Description of Artificial Sequence: Synthetic oligonucleotide
cuuagucuaugaauuucag

SEQ ID NO: 1774037 - RNA, 19 nt, Artificial Sequence
  Description of Artificial Sequence: Synthetic oligonucleotide
acggaggugaggcucaguc

SEQ ID NO: 1774038 - RNA, 19 nt, Artificial Sequence
  Description of Artificial Sequence: Synthetic oligonucleotide
ucgaaauacuuuguggcug

SEQ ID NO: 1774039 - RNA, 19 nt, Artificial Sequence
  Description of Artificial Sequence: Synthetic oligonucleotide
uuaacacucugcccuacac

SEQ ID NO: 1774040 - RNA, 19 nt, Artificial Sequence
  Description of Artificial Sequence: Synthetic oligonucleotide
ucugcccuacacuauacac

SEQ ID NO: 1774041 - RNA, 19 nt, Artificial Sequence
  Description of Artificial Sequence: Synthetic oligonucleotide
auaccuauaauucccuuuu

SEQ ID NO: 1774042 - RNA, 19 nt, Artificial Sequence
  Description of Artificial Sequence: Synthetic oligonucleotide
aguaaggauggcaaacagg

SEQ ID NO: 1774043 - RNA, 19 nt, Artificial Sequence
  Description of Artificial Sequence: Synthetic oligonucleotide
uacuguaccgauuucccaa

SEQ ID NO: 1774044 - RNA, 19 nt, Artificial Sequence
  Description of Artificial Sequence: Synthetic oligonucleotide
ccaagggagagcuugagcc

SEQ ID NO: 1774045 - RNA, 19 nt, Artificial Sequence
  Description of Artificial Sequence: Synthetic oligonucleotide
aggacauacagguuaacuu

SEQ ID NO: 1774046 - RNA, 19 nt, Artificial Sequence
  Description of Artificial Sequence: Synthetic oligonucleotide
aguggucacguuuugaaua

SEQ ID NO: 1774047 - RNA, 19 nt, Artificial Sequence
  Description of Artificial Sequence: Synthetic oligonucleotide
gguuagagaagguuguggc

SEQ ID NO: 1774048 - RNA, 19 nt, Artificial Sequence
  Description of Artificial Sequence: Synthetic oligonucleotide
cugcuuucgguccauggcg

SEQ ID NO: 1774049 - RNA, 19 nt, Artificial Sequence
  Description of Artificial Sequence: Synthetic oligonucleotide
cagucucucaaacacaguc

SEQ ID NO: 1774050 - RNA, 19 nt, Artificial Sequence
  Description of Artificial Sequence: Synthetic oligonucleotide
auacuuuguggcugucucg

SEQ ID NO: 1774051 - RNA, 19 nt, Artificial Sequence
  Description of Artificial Sequence: Synthetic oligonucleotide
gaucucgguacccagcuca

SEQ ID NO: 1774052 - RNA, 19 nt, Artificial Sequence
  Description of Artificial Sequence: Synthetic oligonucleotide
auacauggggagcaccguc

SEQ ID NO: 1774053 - RNA, 19 nt, Artificial Sequence
  Description of Artificial Sequence: Synthetic oligonucleotide
uuugggcaagcuauacuac

SEQ ID NO: 1774054 - RNA, 19 nt, Artificial Sequence
  Description of Artificial Sequence: Synthetic oligonucleotide
agcuauacuacaguuuucu

SEQ ID NO: 1774055 - RNA, 19 nt, Artificial Sequence
  Description of Artificial Sequence: Synthetic oligonucleotide
uguuugggcaagcuauacu

SEQ ID NO: 1774056 - RNA, 19 nt, Artificial Sequence
  Description of Artificial Sequence: Synthetic oligonucleotide
caggcaaacucaucacucg

SEQ ID NO: 1774057 - RNA, 19 nt, Artificial Sequence
  Description of Artificial Sequence: Synthetic oligonucleotide
guugguuaacacucugccc

SEQ ID NO: 1774058 - RNA, 19 nt, Artificial Sequence
  Description of Artificial Sequence: Synthetic oligonucleotide
cagagacugauguuugggc

SEQ ID NO: 1774059 - RNA, 19 nt, Artificial Sequence
  Description of Artificial Sequence: Synthetic oligonucleotide
guggccgugguccagagac

SEQ ID NO: 1774060 - RNA, 19 nt, Artificial Sequence
  Description of Artificial Sequence: Synthetic oligonucleotide
uugggcaagcuauacuaca

SEQ ID NO: 1774061 - RNA, 19 nt, Artificial Sequence
  Description of Artificial Sequence: Synthetic oligonucleotide
cuuuguggcugucucguag

SEQ ID NO: 1774062 - RNA, 19 nt, Artificial Sequence
  Description of Artificial Sequence: Synthetic oligonucleotide
uaugaauuucagaucccua

SEQ ID NO: 1774063 - RNA, 19 nt, Artificial Sequence
  Description of Artificial Sequence: Synthetic oligonucleotide
guaugggauuucuucuccg

SEQ ID NO: 1774064 - RNA, 19 nt, Artificial Sequence
  Description of Artificial Sequence: Synthetic oligonucleotide
auccugccuucauacaugg

SEQ ID NO: 1774065 - RNA, 19 nt, Artificial Sequence
  Description of Artificial Sequence: Synthetic oligonucleotide
ccugccuucauacaugggg

SEQ ID NO: 1774066 - RNA, 19 nt, Artificial Sequence
  Description of Artificial Sequence: Synthetic oligonucleotide
guuugggcaagcuauacua

SEQ ID NO: 1774067 - RNA, 19 nt, Artificial Sequence
  Description of Artificial Sequence: Synthetic oligonucleotide
uauuaguaccuaaguaauu

SEQ ID NO: 1774068 - RNA, 19 nt, Artificial Sequence
  Description of Artificial Sequence: Synthetic oligonucleotide
uaacacucugcccuacacu

SEQ ID NO: 1774069 - RNA, 19 nt, Artificial Sequence
  Description of Artificial Sequence: Synthetic oligonucleotide
ccuucgaaauacuuugugg

SEQ ID NO: 1774070 - RNA, 19 nt, Artificial Sequence
  Description of Artificial Sequence: Synthetic oligonucleotide
ugagacaggucugcuuucg

SEQ ID NO: 1774071 - RNA, 19 nt, Artificial Sequence
  Description of Artificial Sequence: Synthetic oligonucleotide
aaauacuuuguggcugucu

SEQ ID NO: 1774072 - RNA, 19 nt, Artificial Sequence
  Description of Artificial Sequence: Synthetic oligonucleotide
acuguaccgauuucccaag

SEQ ID NO: 1774073 - RNA, 19 nt, Artificial Sequence
  Description of Artificial Sequence: Synthetic oligonucleotide
aaaagucacugaguaacaa

SEQ ID NO: 1774074 - RNA, 19 nt, Artificial Sequence
  Description of Artificial Sequence: Synthetic oligonucleotide
aacuuaacacaaacccgag

SEQ ID NO: 1774075 - RNA, 19 nt, Artificial Sequence
  Description of Artificial Sequence: Synthetic oligonucleotide
aucucuuaauuacaauaau

SEQ ID NO: 1774076 - RNA, 19 nt, Artificial Sequence
  Description of Artificial Sequence: Synthetic oligonucleotide
uuuauacauaaaccccuuu

SEQ ID NO: 1774077 - RNA, 19 nt, Artificial Sequence
  Description of Artificial Sequence: Synthetic oligonucleotide
uagagaagguuguggcucc

SEQ ID NO: 1774078 - RNA, 19 nt, Artificial Sequence
  Description of Artificial Sequence: Synthetic oligonucleotide
cugcugacuggucacacag

SEQ ID NO: 1774079 - RNA, 19 nt, Artificial Sequence
  Description of Artificial Sequence: Synthetic oligonucleotide
uaccgauuucccaagucaa

SEQ ID NO: 1774080 - RNA, 19 nt, Artificial Sequence
  Description of Artificial Sequence: Synthetic oligonucleotide
cuagccaguugguuaacac

SEQ ID NO: 1774081 - RNA, 19 nt, Artificial Sequence
  Description of Artificial Sequence: Synthetic oligonucleotide
uguaccgauuucccaaguc

SEQ ID NO: 1774082 - RNA, 19 nt, Artificial Sequence
  Description of Artificial Sequence: Synthetic oligonucleotide
uacauggggagcaccgucu

SEQ ID NO: 1774083 - RNA, 19 nt, Artificial Sequence
  Description of Artificial Sequence: Synthetic oligonucleotide
aaccaacucacuggccugg

SEQ ID NO: 1774084 - RNA, 19 nt, Artificial Sequence
  Description of Artificial Sequence: Synthetic oligonucleotide
guaccgauuucccaaguca

SEQ ID NO: 1774085 - RNA, 19 nt, Artificial Sequence
  Description of Artificial Sequence: Synthetic oligonucleotide
gguaaggguggauuccugg

SEQ ID NO: 1774086 - RNA, 19 nt, Artificial Sequence
  Description of Artificial Sequence: Synthetic oligonucleotide
gacaggucugcuuucgguc

SEQ ID NO: 1774087 - RNA, 19 nt, Artificial Sequence
  Description of Artificial Sequence: Synthetic oligonucleotide
caagggagagcuugagccc

SEQ ID NO: 1774088 - RNA, 19 nt, Artificial Sequence
  Description of Artificial Sequence: Synthetic oligonucleotide
cacugaguaacaagacuug

SEQ ID NO: 1774089 - RNA, 19 nt, Artificial Sequence
  Description of Artificial Sequence: Synthetic oligonucleotide
acagguuaacuuaacacaa

SEQ ID NO: 1774090 - RNA, 19 nt, Artificial Sequence
  Description of Artificial Sequence: Synthetic oligonucleotide
ugcuuucgguccauggcgc

SEQ ID NO: 1774091 - RNA, 19 nt, Artificial Sequence
  Description of Artificial Sequence: Synthetic oligonucleotide
cccuacacuauacacaggc

SEQ ID NO: 1774092 - RNA, 19 nt, Artificial Sequence
  Description of Artificial Sequence: Synthetic oligonucleotide
cauacagguuaacuuaaca

SEQ ID NO: 1774093 - RNA, 19 nt, Artificial Sequence
  Description of Artificial Sequence: Synthetic oligonucleotide
uauguauggcagucucuca

SEQ ID NO: 1774094 - RNA, 19 nt, Artificial Sequence
  Description of Artificial Sequence: Synthetic oligonucleotide
auguauggcagucucucaa

SEQ ID NO: 1774095 - RNA, 19 nt, Artificial Sequence
  Description of Artificial Sequence: Synthetic oligonucleotide
cuugagcccugaauauagg

SEQ ID NO: 1774096 - RNA, 19 nt, Artificial Sequence
  Description of Artificial Sequence: Synthetic oligonucleotide
ugaccaguggccgaguggu

SEQ ID NO: 1774097 - RNA, 19 nt, Artificial Sequence
  Description of Artificial Sequence: Synthetic oligonucleotide
aacccgagcgccaagggga

SEQ ID NO: 1774098 - RNA, 19 nt, Artificial Sequence
  Description of Artificial Sequence: Synthetic oligonucleotide
aagucaagcacuagccagu

SEQ ID NO: 1774099 - RNA, 19 nt, Artificial Sequence
  Description of Artificial Sequence: Synthetic oligonucleotide
uacuuuguggcugucucgu

SEQ ID NO: 1774100 - RNA, 19 nt, Artificial Sequence
  Description of Artificial Sequence: Synthetic oligonucleotide
caguaaggauggcaaacag

SEQ ID NO: 1774101 - RNA, 19 nt, Artificial Sequence
  Description of Artificial Sequence: Synthetic oligonucleotide
gguuaacuuaacacaaacc

SEQ ID NO: 1774102 - RNA, 19 nt, Artificial Sequence
  Description of Artificial Sequence: Synthetic oligonucleotide
uguauggcagucucucaaa

SEQ ID NO: 1774103 - RNA, 19 nt, Artificial Sequence
  Description of Artificial Sequence: Synthetic oligonucleotide
uccucccuagacuuugucu

SEQ ID NO: 1774104 - RNA, 19 nt, Artificial Sequence
  Description of Artificial Sequence: Synthetic oligonucleotide
acaguaaggauggcaaaca

SEQ ID NO: 1774105 - RNA, 19 nt, Artificial Sequence
  Description of Artificial Sequence: Synthetic oligonucleotide
agcguguggacacuugcca

SEQ ID NO: 1774106 - RNA, 19 nt, Artificial Sequence
  Description of Artificial Sequence: Synthetic oligonucleotide
acaaacccgagcgccaagg

SEQ ID NO: 1774107 - RNA, 19 nt, Artificial Sequence
  Description of Artificial Sequence: Synthetic oligonucleotide
aagcuauacuacaguuuuc

SEQ ID NO: 1774108 - RNA, 19 nt, Artificial Sequence
  Description of Artificial Sequence: Synthetic oligonucleotide
gucauauauuauguauggc

SEQ ID NO: 1774109 - RNA, 19 nt, Artificial Sequence
  Description of Artificial Sequence: Synthetic oligonucleotide
cucgguacccagcucacug

SEQ ID NO: 1774110 - RNA, 19 nt, Artificial Sequence
  Description of Artificial Sequence: Synthetic oligonucleotide
cuguaugggauuucuucuc

SEQ ID NO: 1774111 - RNA, 19 nt, Artificial Sequence
  Description of Artificial Sequence: Synthetic oligonucleotide
ugaggcucagucgauccgc

SEQ ID NO: 1774112 - RNA, 19 nt, Artificial Sequence
  Description of Artificial Sequence: Synthetic oligonucleotide
gagacaggucugcuuucgg

SEQ ID NO: 1774113 - RNA, 19 nt, Artificial Sequence
  Description of Artificial Sequence: Synthetic oligonucleotide
ucucuuagucuaugaauuu

SEQ ID NO: 1774114 - RNA, 19 nt, Artificial Sequence
  Description of Artificial Sequence: Synthetic oligonucleotide
uuucugaucucgguaccca

SEQ ID NO: 1774115 - RNA, 19 nt, Artificial Sequence
  Description of Artificial Sequence: Synthetic oligonucleotide
ugaauauagggcggugcac

SEQ ID NO: 1774116 - RNA, 19 nt, Artificial Sequence
  Description of Artificial Sequence: Synthetic oligonucleotide
uuccuucgaaauacuuugu

SEQ ID NO: 1774117 - RNA, 19 nt, Artificial Sequence
  Description of Artificial Sequence: Synthetic oligonucleotide
augaacuacuuuauuaaua

SEQ ID NO: 1774118 - RNA, 19 nt, Artificial Sequence
  Description of Artificial Sequence: Synthetic oligonucleotide
gacaaaagucacugaguaa

SEQ ID NO: 1774119 - RNA, 19 nt, Artificial Sequence
  Description of Artificial Sequence: Synthetic oligonucleotide
cucuuagucuaugaauuuc

SEQ ID NO: 1774120 - RNA, 19 nt, Artificial Sequence
  Description of Artificial Sequence: Synthetic oligonucleotide
acauacagguuaacuuaac

SEQ ID NO: 1774121 - RNA, 19 nt, Artificial Sequence
  Description of Artificial Sequence: Synthetic oligonucleotide
cugaauauagggcggugca

SEQ ID NO: 1774122 - RNA, 19 nt, Artificial Sequence
  Description of Artificial Sequence: Synthetic oligonucleotide
gacuggucacacagcaccg

SEQ ID NO: 1774123 - RNA, 19 nt, Artificial Sequence
  Description of Artificial Sequence: Synthetic oligonucleotide
ugcuaagugcccguguccu

SEQ ID NO: 1774124 - RNA, 19 nt, Artificial Sequence
  Description of Artificial Sequence: Synthetic oligonucleotide
guauggcagucucucaaac

SEQ ID NO: 1774125 - RNA, 19 nt, Artificial Sequence
  Description of Artificial Sequence: Synthetic oligonucleotide
ucaauagcccagagugguc

SEQ ID NO: 1774126 - RNA, 19 nt, Artificial Sequence
  Description of Artificial Sequence: Synthetic oligonucleotide
aaccaagggagagcuugag

SEQ ID NO: 1774127 - RNA, 19 nt, Artificial Sequence
  Description of Artificial Sequence: Synthetic oligonucleotide
aacacaaacccgagcgcca

SEQ ID NO: 1774128 - RNA, 19 nt, Artificial Sequence
  Description of Artificial Sequence: Synthetic oligonucleotide
cugaccaguggccgagugg

SEQ ID NO: 1774129 - RNA, 19 nt, Artificial Sequence
  Description of Artificial Sequence: Synthetic oligonucleotide
cucgaacacugcuccacag

SEQ ID NO: 1774130 - RNA, 19 nt, Artificial Sequence
  Description of Artificial Sequence: Synthetic oligonucleotide
gguacuguaccgauuuccc

SEQ ID NO: 1774131 - RNA, 19 nt, Artificial Sequence
  Description of Artificial Sequence: Synthetic oligonucleotide
gggaauggaggagaggugc

SEQ ID NO: 1774132 - RNA, 19 nt, Artificial Sequence
  Description of Artificial Sequence: Synthetic oligonucleotide
uagggcggugcacggagug

SEQ ID NO: 1774133 - RNA, 19 nt, Artificial Sequence
  Description of Artificial Sequence: Synthetic oligonucleotide
accaguggccgagugguuc

SEQ ID NO: 1774134 - RNA, 19 nt, Artificial Sequence
  Description of Artificial Sequence: Synthetic oligonucleotide
caaacccgagcgccaaggg

SEQ ID NO: 1774135 - RNA, 19 nt, Artificial Sequence
  Description of Artificial Sequence: Synthetic oligonucleotide
gguggauuccugguggccg

SEQ ID NO: 1774136 - RNA, 19 nt, Artificial Sequence
  Description of Artificial Sequence: Synthetic oligonucleotide
gaggagaggugcugcuaag

SEQ ID NO: 1774137 - RNA, 19 nt, Artificial Sequence
  Description of Artificial Sequence: Synthetic oligonucleotide
auaguacaguaaggauggc

SEQ ID NO: 1774138 - RNA, 19 nt, Artificial Sequence
  Description of Artificial Sequence: Synthetic oligonucleotide
gaauggaggagaggugcug

SEQ ID NO: 1774139 - RNA, 19 nt, Artificial Sequence
  Description of Artificial Sequence: Synthetic oligonucleotide
auuauguauggcagucucu

SEQ ID NO: 1774140 - RNA, 19 nt, Artificial Sequence
  Description of Artificial Sequence: Synthetic oligonucleotide
cugcccuacacuauacaca

SEQ ID NO: 1774141 - RNA, 19 nt, Artificial Sequence
  Description of Artificial Sequence: Synthetic oligonucleotide
agcaaccacccgcccuucc

SEQ ID NO: 1774142 - RNA, 19 nt, Artificial Sequence
  Description of Artificial Sequence: Synthetic oligonucleotide
uccucgaacacugcuccac

SEQ ID NO: 1774143 - RNA, 19 nt, Artificial Sequence
  Description of Artificial Sequence: Synthetic oligonucleotide
cugcuaagugcccgugucc

SEQ ID NO: 1774144 - RNA, 19 nt, Artificial Sequence
  Description of Artificial Sequence: Synthetic oligonucleotide
gaagagcaaccacccgccc

SEQ ID NO: 1774145 - RNA, 19 nt, Artificial Sequence
  Description of Artificial Sequence: Synthetic oligonucleotide
aaaccaagggagagcuuga

SEQ ID NO: 1774146 - RNA, 19 nt, Artificial Sequence
  Description of Artificial Sequence: Synthetic oligonucleotide
gcugagcugcuccuuaaag

SEQ ID NO: 1774147 - RNA, 19 nt, Artificial Sequence
  Description of Artificial Sequence: Synthetic oligonucleotide
ucagucgauccgcuccacu

SEQ ID NO: 1774148 - RNA, 19 nt, Artificial Sequence
  Description of Artificial Sequence: Synthetic oligonucleotide
acaggccuauaguacagua

SEQ ID NO: 1774149 - RNA, 19 nt, Artificial Sequence
  Description of Artificial Sequence: Synthetic oligonucleotide
aaccacccgcccuuccuga

SEQ ID NO: 1774150 - RNA, 19 nt, Artificial Sequence
  Description of Artificial Sequence: Synthetic oligonucleotide
gcacugaagagcaaccacc

SEQ ID NO: 1774151 - RNA, 19 nt, Artificial Sequence
  Description of Artificial Sequence: Synthetic oligonucleotide
guggucacguuuugaauaa

SEQ ID NO: 1774152 - RNA, 19 nt, Artificial Sequence
  Description of Artificial Sequence: Synthetic oligonucleotide
uccugccuucauacauggg

SEQ ID NO: 1774153 - RNA, 19 nt, Artificial Sequence
  Description of Artificial Sequence: Synthetic oligonucleotide
uguccucucaggguugggu

SEQ ID NO: 1774154 - RNA, 19 nt, Artificial Sequence
  Description of Artificial Sequence: Synthetic oligonucleotide
gucucgucgucccagaccu

SEQ ID NO: 1774155 - RNA, 19 nt, Artificial Sequence
  Description of Artificial Sequence: Synthetic oligonucleotide
cugaguaacaagacuugua

SEQ ID NO: 1774156 - RNA, 19 nt, Artificial Sequence
  Description of Artificial Sequence: Synthetic oligonucleotide
acugauguuugggcaagcu

SEQ ID NO: 1774157 - RNA, 19 nt, Artificial Sequence
  Description of Artificial Sequence: Synthetic oligonucleotide
uuucgguccauggcgcaca

SEQ ID NO: 1774158 - RNA, 19 nt, Artificial Sequence
  Description of Artificial Sequence: Synthetic oligonucleotide
uccccgugccuguacaggu

SEQ ID NO: 1774159 - RNA, 19 nt, Artificial Sequence
  Description of Artificial Sequence: Synthetic oligonucleotide
uggguuagagaagguugug

SEQ ID NO: 1774160 - RNA, 19 nt, Artificial Sequence
  Description of Artificial Sequence: Synthetic oligonucleotide
guacuguaccgauuuccca

SEQ ID NO: 1774161 - RNA, 19 nt, Artificial Sequence
  Description of Artificial Sequence: Synthetic oligonucleotide
gucuucuuaauugguuuca

SEQ ID NO: 1774162 - RNA, 19 nt, Artificial Sequence
  Description of Artificial Sequence: Synthetic oligonucleotide
uggagcguguggacacuug

SEQ ID NO: 1774163 - RNA, 19 nt, Artificial Sequence
  Description of Artificial Sequence: Synthetic oligonucleotide
guuaacacucugcccuaca

SEQ ID NO: 1774164 - RNA, 19 nt, Artificial Sequence
  Description of Artificial Sequence: Synthetic oligonucleotide
accgauuucccaagucaag

SEQ ID NO: 1774165 - RNA, 19 nt, Artificial Sequence
  Description of Artificial Sequence: Synthetic oligonucleotide
caauagcccagagugguca

SEQ ID NO: 1774166 - RNA, 19 nt, Artificial Sequence
  Description of Artificial Sequence: Synthetic oligonucleotide
acucugcccuacacuauac

SEQ ID NO: 1774167 - RNA, 19 nt, Artificial Sequence
  Description of Artificial Sequence: Synthetic oligonucleotide
gagcguguggacacuugcc

SEQ ID NO: 1774168 - RNA, 19 nt, Artificial Sequence
  Description of Artificial Sequence: Synthetic oligonucleotide
ggagcguguggacacuugc

SEQ ID NO: 1774169 - RNA, 19 nt, Artificial Sequence
  Description of Artificial Sequence: Synthetic oligonucleotide
auagcccagaguggucacg

SEQ ID NO: 1774170 - RNA, 19 nt, Artificial Sequence
  Description of Artificial Sequence: Synthetic oligonucleotide
ggcacugaagagcaaccac

SEQ ID NO: 1774171 - RNA, 19 nt, Artificial Sequence
  Description of Artificial Sequence: Synthetic oligonucleotide
acagucuaaguaagaacaa

SEQ ID NO: 1774172 - RNA, 19 nt, Artificial Sequence
  Description of Artificial Sequence: Synthetic oligonucleotide
gguggguaaggguggauuc

SEQ ID NO: 1774173 - RNA, 19 nt, Artificial Sequence
  Description of Artificial Sequence: Synthetic oligonucleotide
guggguaaggguggauucc

SEQ ID NO: 1774174 - RNA, 19 nt, Artificial Sequence
  Description of Artificial Sequence: Synthetic oligonucleotide
agcauaauuuacagucuaa

SEQ ID NO: 1774175 - RNA, 19 nt, Artificial Sequence
  Description of Artificial Sequence: Synthetic oligonucleotide
gguuucauuuuccuucgaa

SEQ ID NO: 1774176 - RNA, 19 nt, Artificial Sequence
  Description of Artificial Sequence: Synthetic oligonucleotide
ucccuagacuuugucuucu

SEQ ID NO: 1774177 - RNA, 19 nt, Artificial Sequence
  Description of Artificial Sequence: Synthetic oligonucleotide
cgaacacugcuccacaggc

SEQ ID NO: 1774178 - RNA, 19 nt, Artificial Sequence
  Description of Artificial Sequence: Synthetic oligonucleotide
ccucaauagcccagagugg

SEQ ID NO: 1774179 - RNA, 19 nt, Artificial Sequence
  Description of Artificial Sequence: Synthetic oligonucleotide
cucccuagacuuugucuuc

SEQ ID NO: 1774180 - RNA, 19 nt, Artificial Sequence
  Description of Artificial Sequence: Synthetic oligonucleotide
gucacguuuugaauaaaua

SEQ ID NO: 1774181 - RNA, 19 nt, Artificial Sequence
  Description of Artificial Sequence: Synthetic oligonucleotide
cguuuugaauaaauaguuc

SEQ ID NO: 1774182 - RNA, 19 nt, Artificial Sequence
  Description of Artificial Sequence: Synthetic oligonucleotide
agucgauccgcuccacuuu

SEQ ID NO: 1774183 - RNA, 19 nt, Artificial Sequence
  Description of Artificial Sequence: Synthetic oligonucleotide
ugguuucauuuuccuucga

SEQ ID NO: 1774184 - RNA, 19 nt, Artificial Sequence
  Description of Artificial Sequence: Synthetic oligonucleotide
auggggagcaccgucucgu

SEQ ID NO: 1774185 - RNA, 19 nt, Artificial Sequence
  Description of Artificial Sequence: Synthetic oligonucleotide
ugguuaacacucugcccua

SEQ ID NO: 1774186 - RNA, 19 nt, Artificial Sequence
  Description of Artificial Sequence: Synthetic oligonucleotide
auggcgcacacggagguga

SEQ ID NO: 1774187 - RNA, 19 nt, Artificial Sequence
  Description of Artificial Sequence: Synthetic oligonucleotide
uaaaguggcccagggucaa

SEQ ID NO: 1774188 - RNA, 19 nt, Artificial Sequence
  Description of Artificial Sequence: Synthetic oligonucleotide
uagcccagaguggucacgu

SEQ ID NO: 1774189 - RNA, 19 nt, Artificial Sequence
  Description of Artificial Sequence: Synthetic oligonucleotide
ccuccucgaacacugcucc

SEQ ID NO: 1774190 - RNA, 19 nt, Artificial Sequence
  Description of Artificial Sequence: Synthetic oligonucleotide
guacaguaaggauggcaaa

SEQ ID NO: 1774191 - RNA, 19 nt, Artificial Sequence
  Description of Artificial Sequence: Synthetic oligonucleotide
guaaggguggauuccuggu

SEQ ID NO: 1774192 - RNA, 19 nt, Artificial Sequence
  Description of Artificial Sequence: Synthetic oligonucleotide
ccgauuucccaagucaagc

SEQ ID NO: 1774193 - RNA, 19 nt, Artificial Sequence
  Description of Artificial Sequence: Synthetic oligonucleotide
aggugaggcucagucgauc

SEQ ID NO: 1774194 - RNA, 19 nt, Artificial Sequence
  Description of Artificial Sequence: Synthetic oligonucleotide
guaauaccuauaauucccu

SEQ ID NO: 1774195 - RNA, 19 nt, Artificial Sequence
  Description of Artificial Sequence: Synthetic oligonucleotide
cucaauagcccagaguggu

SEQ ID NO: 1774196 - RNA, 19 nt, Artificial Sequence
  Description of Artificial Sequence: Synthetic oligonucleotide
gucgauccgcuccacuuuc

SEQ ID NO: 1774197 - RNA, 19 nt, Artificial Sequence
  Description of Artificial Sequence: Synthetic oligonucleotide
ggccuauaguacaguaagg

SEQ ID NO: 1774198 - RNA, 19 nt, Artificial Sequence
  Description of Artificial Sequence: Synthetic oligonucleotide
ugaucucgguacccagcuc

SEQ ID NO: 1774199 - RNA, 19 nt, Artificial Sequence
  Description of Artificial Sequence: Synthetic oligonucleotide
acuagccaguugguuaaca

SEQ ID NO: 1774200 - RNA, 19 nt, Artificial Sequence
  Description of Artificial Sequence: Synthetic oligonucleotide
aucucgguacccagcucac

SEQ ID NO: 1774201 - RNA, 19 nt, Artificial Sequence
  Description of Artificial Sequence: Synthetic oligonucleotide
cuaugaauuucagaucccu

SEQ ID NO: 1774202 - RNA, 19 nt, Artificial Sequence
  Description of Artificial Sequence: Synthetic oligonucleotide
acacuauacacaggccuau

SEQ ID NO: 1774203 - RNA, 19 nt, Artificial Sequence
  Description of Artificial Sequence: Synthetic oligonucleotide
agcgccaaggggaagggaa

SEQ ID NO: 1774204 - RNA, 19 nt, Artificial Sequence
  Description of Artificial Sequence: Synthetic oligonucleotide
ccugaauauagggcggugc

SEQ ID NO: 1774205 - RNA, 19 nt, Artificial Sequence
  Description of Artificial Sequence: Synthetic oligonucleotide
cagguuaacuuaacacaaa

SEQ ID NO: 1774206 - RNA, 19 nt, Artificial Sequence
  Description of Artificial Sequence: Synthetic oligonucleotide
uggagccaggcuuggguua

SEQ ID NO: 1774207 - RNA, 19 nt, Artificial Sequence
  Description of Artificial Sequence: Synthetic oligonucleotide
cuaggaagucauauauuau

SEQ ID NO: 1774208 - RNA, 19 nt, Artificial Sequence
  Description of Artificial Sequence: Synthetic oligonucleotide
aagcacuagccaguugguu

SEQ ID NO: 1774209 - RNA, 19 nt, Artificial Sequence
  Description of Artificial Sequence: Synthetic oligonucleotide
caggccuauaguacaguaa

SEQ ID NO: 1774210 - RNA, 19 nt, Artificial Sequence
  Description of Artificial Sequence: Synthetic oligonucleotide
aagugcccguguccucuca

SEQ ID NO: 1774211 - RNA, 19 nt, Artificial Sequence
  Description of Artificial Sequence: Synthetic oligonucleotide
uggcgcacacggaggugag

SEQ ID NO: 1774212 - RNA, 19 nt, Artificial Sequence
  Description of Artificial Sequence: Synthetic oligonucleotide
gcguguggacacuugccag

SEQ ID NO: 1774213 - RNA, 19 nt, Artificial Sequence
  Description of Artificial Sequence: Synthetic oligonucleotide
gcuauacuacaguuuucuc

SEQ ID NO: 1774214 - RNA, 19 nt, Artificial Sequence
  Description of Artificial Sequence: Synthetic oligonucleotide
cugauguuugggcaagcua

SEQ ID NO: 1774215 - RNA, 19 nt, Artificial Sequence
  Description of Artificial Sequence: Synthetic oligonucleotide
cagucuaaguaagaacaaa

SEQ ID NO: 1774216 - RNA, 19 nt, Artificial Sequence
  Description of Artificial Sequence: Synthetic oligonucleotide
gacugauguuugggcaagc

SEQ ID NO: 1774217 - RNA, 19 nt, Artificial Sequence
  Description of Artificial Sequence: Synthetic oligonucleotide
gaaauacuuuguggcuguc

SEQ ID NO: 1774218 - RNA, 19 nt, Artificial Sequence
  Description of Artificial Sequence: Synthetic oligonucleotide
gcugcuaagugcccguguc

SEQ ID NO: 1774219 - RNA, 19 nt, Artificial Sequence
  Description of Artificial Sequence: Synthetic oligonucleotide
cuuucgguccauggcgcac

SEQ ID NO: 1774220 - RNA, 19 nt, Artificial Sequence
  Description of Artificial Sequence: Synthetic oligonucleotide
gugguuccugucccucugc

SEQ ID NO: 1774221 - RNA, 19 nt, Artificial Sequence
  Description of Artificial Sequence: Synthetic oligonucleotide
uguggcugucucguagguc

SEQ ID NO: 1774222 - RNA, 19 nt, Artificial Sequence
  Description of Artificial Sequence: Synthetic oligonucleotide
gucaagcacuagccaguug

SEQ ID NO: 1774223 - RNA, 19 nt, Artificial Sequence
  Description of Artificial Sequence: Synthetic oligonucleotide
auauagggcggugcacgga

SEQ ID NO: 1774224 - RNA, 19 nt, Artificial Sequence
  Description of Artificial Sequence: Synthetic oligonucleotide
ggccgagugguuccugucc

SEQ ID NO: 1774225 - RNA, 19 nt, Artificial Sequence
  Description of Artificial Sequence: Synthetic oligonucleotide
ucacuggccuggagcgugu

SEQ ID NO: 1774226 - RNA, 19 nt, Artificial Sequence
  Description of Artificial Sequence: Synthetic oligonucleotide
ggaggagaggugcugcuaa

SEQ ID NO: 1774227 - RNA, 19 nt, Artificial Sequence
  Description of Artificial Sequence: Synthetic oligonucleotide
cacaaacccgagcgccaag

SEQ ID NO: 1774228 - RNA, 19 nt, Artificial Sequence
  Description of Artificial Sequence: Synthetic oligonucleotide
cugaucucgguacccagcu

SEQ ID NO: 1774229 - RNA, 19 nt, Artificial Sequence
  Description of Artificial Sequence: Synthetic oligonucleotide
gccgagugguuccuguccc

SEQ ID NO: 1774230 - RNA, 19 nt, Artificial Sequence
  Description of Artificial Sequence: Synthetic oligonucleotide
agcuugagcccugaauaua

SEQ ID NO: 1774231 - RNA, 19 nt, Artificial Sequence
  Description of Artificial Sequence: Synthetic oligonucleotide
agggcggugcacggagugg

SEQ ID NO: 1774232 - RNA, 19 nt, Artificial Sequence
  Description of Artificial Sequence: Synthetic oligonucleotide
gcacuagccaguugguuaa

SEQ ID NO: 1774233 - RNA, 19 nt, Artificial Sequence
  Description of Artificial Sequence: Synthetic oligonucleotide
cauuuuccuucgaaauacu

SEQ ID NO: 1774234 - RNA, 19 nt, Artificial Sequence
  Description of Artificial Sequence: Synthetic oligonucleotide
agucaagcacuagccaguu

SEQ ID NO: 1774235 - RNA, 19 nt, Artificial Sequence
  Description of Artificial Sequence: Synthetic oligonucleotide
gacacuugccagcuucuuu

SEQ ID NO: 1774236 - RNA, 19 nt, Artificial Sequence
  Description of Artificial Sequence: Synthetic oligonucleotide
ccaguugguuaacacucug

SEQ ID NO: 1774237 - RNA, 19 nt, Artificial Sequence
  Description of Artificial Sequence: Synthetic oligonucleotide
gcuccuuaaaguggcccag

SEQ ID NO: 1774238 - RNA, 19 nt, Artificial Sequence
  Description of Artificial Sequence: Synthetic oligonucleotide
ccuaaguaauuuucuuuaa

SEQ ID NO: 1774239 - RNA, 19 nt, Artificial Sequence
  Description of Artificial Sequence: Synthetic oligonucleotide
ccaguggccgagugguucc

SEQ ID NO: 1774240 - RNA, 19 nt, Artificial Sequence
  Description of Artificial Sequence: Synthetic oligonucleotide
cucugcccuacacuauaca

SEQ ID NO: 1774241 - RNA, 19 nt, Artificial Sequence
  Description of Artificial Sequence: Synthetic oligonucleotide
ggauccugccuucauacau

SEQ ID NO: 1774242 - RNA, 19 nt, Artificial Sequence
  Description of Artificial Sequence: Synthetic oligonucleotide
uggccgagugguuccuguc

SEQ ID NO: 1774243 - RNA, 19 nt, Artificial Sequence
  Description of Artificial Sequence: Synthetic oligonucleotide
accgucucgucgucccaga

SEQ ID NO: 1774244 - RNA, 19 nt, Artificial Sequence
  Description of Artificial Sequence: Synthetic oligonucleotide
uguggacacuugccagcuu

SEQ ID NO: 1774245 - RNA, 19 nt, Artificial Sequence
  Description of Artificial Sequence: Synthetic oligonucleotide
cacucugcccuacacuaua

SEQ ID NO: 1774246 - RNA, 19 nt, Artificial Sequence
  Description of Artificial Sequence: Synthetic oligonucleotide
ucucgguacccagcucacu

SEQ ID NO: 1774247 - RNA, 19 nt, Artificial Sequence
  Description of Artificial Sequence: Synthetic oligonucleotide
cagccuccucaauagccca

SEQ ID NO: 1774248 - RNA, 19 nt, Artificial Sequence
  Description of Artificial Sequence: Synthetic oligonucleotide
uggucacguuuugaauaaa

SEQ ID NO: 1774249 - RNA, 19 nt, Artificial Sequence
  Description of Artificial Sequence: Synthetic oligonucleotide
caccgucucgucgucccag

SEQ ID NO: 1774250 - RNA, 19 nt, Artificial Sequence
  Description of Artificial Sequence: Synthetic oligonucleotide
agagaagguuguggcuccu

SEQ ID NO: 1774251 - RNA, 19 nt, Artificial Sequence
  Description of Artificial Sequence: Synthetic oligonucleotide
gguccccgugccuguacag

SEQ ID NO: 1774252 - RNA, 19 nt, Artificial Sequence
  Description of Artificial Sequence: Synthetic oligonucleotide
ccuauaguacaguaaggau

SEQ ID NO: 1774253 - RNA, 19 nt, Artificial Sequence
  Description of Artificial Sequence: Synthetic oligonucleotide
cagccugcggcaggcuucc

SEQ ID NO: 1774254 - RNA, 19 nt, Artificial Sequence
  Description of Artificial Sequence: Synthetic oligonucleotide
guuguggcuccugccugac

SEQ ID NO: 1774255 - RNA, 19 nt, Artificial Sequence
  Description of Artificial Sequence: Synthetic oligonucleotide
cggaggugaggcucagucg

SEQ ID NO: 1774256 - RNA, 19 nt, Artificial Sequence
  Description of Artificial Sequence: Synthetic oligonucleotide
gcugucucguaggucugag

SEQ ID NO: 1774257 - RNA, 19 nt, Artificial Sequence
  Description of Artificial Sequence: Synthetic oligonucleotide
gguuaacacucugcccuac

SEQ ID NO: 1774258 - RNA, 19 nt, Artificial Sequence
  Description of Artificial Sequence: Synthetic oligonucleotide
caggucugcuuucggucca

SEQ ID NO: 1774259 - RNA, 19 nt, Artificial Sequence
  Description of Artificial Sequence: Synthetic oligonucleotide
ggugcacggaguggguccc

SEQ ID NO: 1774260 - RNA, 19 nt, Artificial Sequence
  Description of Artificial Sequence: Synthetic oligonucleotide
cuccucaauagcccagagu

SEQ ID NO: 1774261 - RNA, 19 nt, Artificial Sequence
  Description of Artificial Sequence: Synthetic oligonucleotide
guggauuccugguggccgu

SEQ ID NO: 1774262 - RNA, 19 nt, Artificial Sequence
  Description of Artificial Sequence: Synthetic oligonucleotide
acucacuggccuggagcgu

SEQ ID NO: 1774263 - RNA, 19 nt, Artificial Sequence
  Description of Artificial Sequence: Synthetic oligonucleotide
ccuuugugaucugcuggag

SEQ ID NO: 1774264 - RNA, 19 nt, Artificial Sequence
  Description of Artificial Sequence: Synthetic oligonucleotide
acacucugcccuacacuau

SEQ ID NO: 1774265 - RNA, 19 nt, Artificial Sequence
  Description of Artificial Sequence: Synthetic oligonucleotide
cagucgauccgcuccacuu

SEQ ID NO: 1774266 - RNA, 19 nt, Artificial Sequence
  Description of Artificial Sequence: Synthetic oligonucleotide
cgucucgucgucccagacc

SEQ ID NO: 1774267 - RNA, 19 nt, Artificial Sequence
  Description of Artificial Sequence: Synthetic oligonucleotide
acacggaggugaggcucag

SEQ ID NO: 1774268 - RNA, 19 nt, Artificial Sequence
  Description of Artificial Sequence: Synthetic oligonucleotide
accacccgcccuuccugaa

SEQ ID NO: 1774269 - RNA, 19 nt, Artificial Sequence
  Description of Artificial Sequence: Synthetic oligonucleotide
ccuccucaauagcccagag

SEQ ID NO: 1774270 - RNA, 19 nt, Artificial Sequence
  Description of Artificial Sequence: Synthetic oligonucleotide
gcuaagugcccguguccuc

SEQ ID NO: 1774271 - RNA, 19 nt, Artificial Sequence
  Description of Artificial Sequence: Synthetic oligonucleotide
cuccucgaacacugcucca

SEQ ID NO: 1774272 - RNA, 19 nt, Artificial Sequence
  Description of Artificial Sequence: Synthetic oligonucleotide
ccaacucacuggccuggag

SEQ ID NO: 1774273 - RNA, 19 nt, Artificial Sequence
  Description of Artificial Sequence: Synthetic oligonucleotide
auagggcggugcacggagu

SEQ ID NO: 1774274 - RNA, 19 nt, Artificial Sequence
  Description of Artificial Sequence: Synthetic oligonucleotide
ggucacguuuugaauaaau

SEQ ID NO: 1774275 - RNA, 19 nt, Artificial Sequence
  Description of Artificial Sequence: Synthetic oligonucleotide
caguuuucucuuagucuau

SEQ ID NO: 1774276 - RNA, 19 nt, Artificial Sequence
  Description of Artificial Sequence: Synthetic oligonucleotide
ggugcugcuaagugcccgu

SEQ ID NO: 1774277 - RNA, 19 nt, Artificial Sequence
  Description of Artificial Sequence: Synthetic oligonucleotide
cauacauggggagcaccgu

SEQ ID NO: 1774278 - RNA, 19 nt, Artificial Sequence
  Description of Artificial Sequence: Synthetic oligonucleotide
uggguggguaaggguggau

SEQ ID NO: 1774279 - RNA, 19 nt, Artificial Sequence
  Description of Artificial Sequence: Synthetic oligonucleotide
ccucccuagacuuugucuu

SEQ ID NO: 1774280 - RNA, 19 nt, Artificial Sequence
  Description of Artificial Sequence: Synthetic oligonucleotide
agaucccuaggaagucaua

SEQ ID NO: 1774281 - RNA, 19 nt, Artificial Sequence
  Description of Artificial Sequence: Synthetic oligonucleotide
gaggcucagucgauccgcu

SEQ ID NO: 1774282 - RNA, 19 nt, Artificial Sequence
  Description of Artificial Sequence: Synthetic oligonucleotide
gcccuacacuauacacagg

SEQ ID NO: 1774283 - RNA, 19 nt, Artificial Sequence
  Description of Artificial Sequence: Synthetic oligonucleotide
ccucgaacacugcuccaca

SEQ ID NO: 1774284 - RNA, 19 nt, Artificial Sequence
  Description of Artificial Sequence: Synthetic oligonucleotide
ggaauggaggagaggugcu

SEQ ID NO: 1774285 - RNA, 19 nt, Artificial Sequence
  Description of Artificial Sequence: Synthetic oligonucleotide
ggagcaccgucucgucguc

SEQ ID NO: 1774286 - RNA, 19 nt, Artificial Sequence
  Description of Artificial Sequence: Synthetic oligonucleotide
cuguaccgauuucccaagu

SEQ ID NO: 1774287 - RNA, 19 nt, Artificial Sequence
  Description of Artificial Sequence: Synthetic oligonucleotide
aggucugcuuucgguccau

SEQ ID NO: 1774288 - RNA, 19 nt, Artificial Sequence
  Description of Artificial Sequence: Synthetic oligonucleotide
ccacccgcccuuccugaag

SEQ ID NO: 1774289 - RNA, 19 nt, Artificial Sequence
  Description of Artificial Sequence: Synthetic oligonucleotide
ggguccccgugccuguaca

SEQ ID NO: 1774290 - RNA, 19 nt, Artificial Sequence
  Description of Artificial Sequence: Synthetic oligonucleotide
gcuuggguuagagaagguu

SEQ ID NO: 1774291 - RNA, 19 nt, Artificial Sequence
  Description of Artificial Sequence: Synthetic oligonucleotide
cccagaccuccucgaacac

SEQ ID NO: 1774292 - RNA, 19 nt, Artificial Sequence
  Description of Artificial Sequence: Synthetic oligonucleotide
ccuuaaaguggcccagggu

SEQ ID NO: 1774293 - RNA, 19 nt, Artificial Sequence
  Description of Artificial Sequence: Synthetic oligonucleotide
cgugguccagagacugaug

SEQ ID NO: 1774294 - RNA, 19 nt, Artificial Sequence
  Description of Artificial Sequence: Synthetic oligonucleotide
ggucugcuuucgguccaug

SEQ ID NO: 1774295 - RNA, 19 nt, Artificial Sequence
  Description of Artificial Sequence: Synthetic oligonucleotide
gugcacggagugggucccc

SEQ ID NO: 1774296 - RNA, 19 nt, Artificial Sequence
  Description of Artificial Sequence: Synthetic oligonucleotide
gaggugaggcucagucgau

SEQ ID NO: 1774297 - RNA, 19 nt, Artificial Sequence
  Description of Artificial Sequence: Synthetic oligonucleotide
gguggccgugguccagaga

SEQ ID NO: 1774298 - RNA, 19 nt, Artificial Sequence
  Description of Artificial Sequence: Synthetic oligonucleotide
cacuggcacugaagagcaa

SEQ ID NO: 1774299 - RNA, 19 nt, Artificial Sequence
  Description of Artificial Sequence: Synthetic oligonucleotide
cgagcgccaaggggaaggg

SEQ ID NO: 1774300 - RNA, 19 nt, Artificial Sequence
  Description of Artificial Sequence: Synthetic oligonucleotide
gcacccuccuguaugggau

SEQ ID NO: 1774301 - RNA, 19 nt, Artificial Sequence
  Description of Artificial Sequence: Synthetic oligonucleotide
ccgucucgucgucccagac

SEQ ID NO: 1774302 - RNA, 19 nt, Artificial Sequence
  Description of Artificial Sequence: Synthetic oligonucleotide
gccaguugguuaacacucu

SEQ ID NO: 1774303 - RNA, 19 nt, Artificial Sequence
  Description of Artificial Sequence: Synthetic oligonucleotide
ccugguggccgugguccag

SEQ ID NO: 1774304 - RNA, 19 nt, Artificial Sequence
  Description of Artificial Sequence: Synthetic oligonucleotide
ggauggcaaacaggacaua

SEQ ID NO: 1774305 - RNA, 19 nt, Artificial Sequence
  Description of Artificial Sequence: Synthetic oligonucleotide
ccgcuccacuuuccccagg

SEQ ID NO: 1774306 - RNA, 19 nt, Artificial Sequence
  Description of Artificial Sequence: Synthetic oligonucleotide
cacccuccuguaugggauu

SEQ ID NO: 1774307 - RNA, 19 nt, Artificial Sequence
  Description of Artificial Sequence: Synthetic oligonucleotide
gccgugguccagagacuga

SEQ ID NO: 1774308 - RNA, 19 nt, Artificial Sequence
  Description of Artificial Sequence: Synthetic oligonucleotide
cccuccuguaugggauuuc

SEQ ID NO: 1774309 - RNA, 19 nt, Artificial Sequence
  Description of Artificial Sequence: Synthetic oligonucleotide
cuggagcguguggacacuu

SEQ ID NO: 1774310 - RNA, 19 nt, Artificial Sequence
  Description of Artificial Sequence: Synthetic oligonucleotide
ccagaccuccucgaacacu

SEQ ID NO: 1774311 - RNA, 19 nt, Artificial Sequence
  Description of Artificial Sequence: Synthetic oligonucleotide
ggcuuggguuagagaaggu

SEQ ID NO: 1774312 - RNA, 19 nt, Artificial Sequence
  Description of Artificial Sequence: Synthetic oligonucleotide
ggacacuugccagcuucuu

SEQ ID NO: 1774313 - RNA, 19 nt, Artificial Sequence
  Description of Artificial Sequence: Synthetic oligonucleotide
ccgugguccagagacugau

SEQ ID NO: 1774314 - RNA, 19 nt, Artificial Sequence
  Description of Artificial Sequence: Synthetic oligonucleotide
ccccgugccuguacaggua

SEQ ID NO: 1774315 - RNA, 19 nt, Artificial Sequence
  Description of Artificial Sequence: Synthetic oligonucleotide
gcgccaaggggaagggaau

SEQ ID NO: 1774316 - RNA, 19 nt, Artificial Sequence
  Description of Artificial Sequence: Synthetic oligonucleotide
ccgagugguuccugucccu

SEQ ID NO: 1774317 - RNA, 19 nt, Artificial Sequence
  Description of Artificial Sequence: Synthetic oligonucleotide
cacggaggugaggcucagu

SEQ ID NO: 1774318 - RNA, 19 nt, Artificial Sequence
  Description of Artificial Sequence: Synthetic oligonucleotide
ugcggcuucagucagaugg

SEQ ID NO: 1774319 - RNA, 19 nt, Artificial Sequence
  Description of Artificial Sequence: Synthetic oligonucleotide
ucaaucaccaccaguagcc

SEQ ID NO: 1774320 - RNA, 19 nt, Artificial Sequence
  Description of Artificial Sequence: Synthetic oligonucleotide
aauggaagccugcagcagg

SEQ ID NO: 1774321 - RNA, 19 nt, Artificial Sequence
  Description of Artificial Sequence: Synthetic oligonucleotide
cugucuggaauucagaugc

SEQ ID NO: 1774322 - RNA, 19 nt, Artificial Sequence
  Description of Artificial Sequence: Synthetic oligonucleotide
gacuuauucaggcaccugg

SEQ ID NO: 1774323 - RNA, 19 nt, Artificial Sequence
  Description of Artificial Sequence: Synthetic oligonucleotide
uccacaagguuguacaggg

SEQ ID NO: 1774324 - RNA, 19 nt, Artificial Sequence
  Description of Artificial Sequence: Synthetic oligonucleotide
uccacgugguuucugaggg

SEQ ID NO: 1774325 - RNA, 19 nt, Artificial Sequence
  Description of Artificial Sequence: Synthetic oligonucleotide
aggagcacuuuacugaugg

SEQ ID NO: 1774326 - RNA, 19 nt, Artificial Sequence
  Description of Artificial Sequence: Synthetic oligonucleotide
uuauucaggcaccuggcag

SEQ ID NO: 1774327 - RNA, 19 nt, Artificial Sequence
  Description of Artificial Sequence: Synthetic oligonucleotide
caggacaugaagcuggucg

SEQ ID NO: 1774328 - RNA, 19 nt, Artificial Sequence
  Description of Artificial Sequence: Synthetic oligonucleotide
aacugugccgccugcuugc

SEQ ID NO: 1774329 - RNA, 19 nt, Artificial Sequence
  Description of Artificial Sequence: Synthetic oligonucleotide
aacggaugccuucucuccc

SEQ ID NO: 1774330 - RNA, 19 nt, Artificial Sequence
  Description of Artificial Sequence: Synthetic oligonucleotide
aacccggacaucuucuuuc

SEQ ID NO: 1774331 - RNA, 19 nt, Artificial Sequence
  Description of Artificial Sequence: Synthetic oligonucleotide
cuucucaacucuugaaugg

SEQ ID NO: 1774332 - RNA, 19 nt, Artificial Sequence
  Description of Artificial Sequence: Synthetic oligonucleotide
gaauucagaugccaggcgc

SEQ ID NO: 1774333 - RNA, 19 nt, Artificial Sequence
  Description of Artificial Sequence: Synthetic oligonucleotide
uggguaguaggccagugcc

SEQ ID NO: 1774334 - RNA, 19 nt, Artificial Sequence
  Description of Artificial Sequence: Synthetic oligonucleotide
ucugaagcgguggaggugg

SEQ ID NO: 1774335 - RNA, 19 nt, Artificial Sequence
  Description of Artificial Sequence: Synthetic oligonucleotide
uuuccuggcgucaaucacc

SEQ ID NO: 1774336 - RNA, 19 nt, Artificial Sequence
  Description of Artificial Sequence: Synthetic oligonucleotide
aacgggcucagcuucuggg

SEQ ID NO: 1774337 - RNA, 19 nt, Artificial Sequence
  Description of Artificial Sequence: Synthetic oligonucleotide
aagugugucagccuggcuu

SEQ ID NO: 1774338 - RNA, 19 nt, Artificial Sequence
  Description of Artificial Sequence: Synthetic oligonucleotide
cuucagguaacaguggagg

SEQ ID NO: 1774339 - RNA, 19 nt, Artificial Sequence
  Description of Artificial Sequence: Synthetic oligonucleotide
ugacaguccacguggaacc

SEQ ID NO: 1774340 - RNA, 19 nt, Artificial Sequence
  Description of Artificial Sequence: Synthetic oligonucleotide
uauucaggcaccuggcagc

SEQ ID NO: 1774341 - RNA, 19 nt, Artificial Sequence
  Description of Artificial Sequence: Synthetic oligonucleotide
uccgugugugccaaguggg

SEQ ID NO: 1774342 - RNA, 19 nt, Artificial Sequence
  Description of Artificial Sequence: Synthetic oligonucleotide
cuuuccacaacucccggcc

SEQ ID NO: 1774343 - RNA, 19 nt, Artificial Sequence
  Description of Artificial Sequence: Synthetic oligonucleotide
cuuggacuuauucaggcac

SEQ ID NO: 1774344 - RNA, 19 nt, Artificial Sequence
  Description of Artificial Sequence: Synthetic oligonucleotide
ugaauggaagccugcagca

SEQ ID NO: 1774345 - RNA, 19 nt, Artificial Sequence
  Description of Artificial Sequence: Synthetic oligonucleotide
guagaagugugucagccug

SEQ ID NO: 1774346 - RNA, 19 nt, Artificial Sequence
  Description of Artificial Sequence: Synthetic oligonucleotide
ucugagggccuucagcgag

SEQ ID NO: 1774347 - RNA, 19 nt, Artificial Sequence
  Description of Artificial Sequence: Synthetic oligonucleotide
cuggcuaggguccacgugg

SEQ ID NO: 1774348 - RNA, 19 nt, Artificial Sequence
  Description of Artificial Sequence: Synthetic oligonucleotide
agaacggaugccuucucuc

SEQ ID NO: 1774349 - RNA, 19 nt, Artificial Sequence
  Description of Artificial Sequence: Synthetic oligonucleotide
aaggcuaccaggucuggga

SEQ ID NO: 1774350 - RNA, 19 nt, Artificial Sequence
  Description of Artificial Sequence: Synthetic oligonucleotide
ucaaccaaggcccucggau

SEQ ID NO: 1774351 - RNA, 19 nt, Artificial Sequence
  Description of Artificial Sequence: Synthetic oligonucleotide
ucugucuggaauucagaug

SEQ ID NO: 1774352 - RNA, 19 nt, Artificial Sequence
  Description of Artificial Sequence: Synthetic oligonucleotide
ugauuggacgcagugacca

SEQ ID NO: 1774353 - RNA, 19 nt, Artificial Sequence
  Description of Artificial Sequence: Synthetic oligonucleotide
auggguaguaggccagugc

SEQ ID NO: 1774354 - RNA, 19 nt, Artificial Sequence
  Description of Artificial Sequence: Synthetic oligonucleotide
uccuuggacuuauucaggc

SEQ ID NO: 1774355 - RNA, 19 nt, Artificial Sequence
  Description of Artificial Sequence: Synthetic oligonucleotide
cauccagucauugaccugc

SEQ ID NO: 1774356 - RNA, 19 nt, Artificial Sequence
  Description of Artificial Sequence: Synthetic oligonucleotide
uggaauucagaugccaggc

SEQ ID NO: 1774357 - RNA, 19 nt, Artificial Sequence
  Description of Artificial Sequence: Synthetic oligonucleotide
agcacuuuacugauggagg

SEQ ID NO: 1774358 - RNA, 19 nt, Artificial Sequence
  Description of Artificial Sequence: Synthetic oligonucleotide
cuuucugaagcgguggagg

SEQ ID NO: 1774359 - RNA, 19 nt, Artificial Sequence
  Description of Artificial Sequence: Synthetic oligonucleotide
aacucuugaauggaagccu

SEQ ID NO: 1774360 - RNA, 19 nt, Artificial Sequence
  Description of Artificial Sequence: Synthetic oligonucleotide
cucaacucuugaauggaag

SEQ ID NO: 1774361 - RNA, 19 nt, Artificial Sequence
  Description of Artificial Sequence: Synthetic oligonucleotide
auacuggcuuccuucucgc

SEQ ID NO: 1774362 - RNA, 19 nt, Artificial Sequence
  Description of Artificial Sequence: Synthetic oligonucleotide
acuuauucaggcaccuggc

SEQ ID NO: 1774363 - RNA, 19 nt, Artificial Sequence
  Description of Artificial Sequence: Synthetic oligonucleotide
accaguagcccuuugacuu

SEQ ID NO: 1774364 - RNA, 19 nt, Artificial Sequence
  Description of Artificial Sequence: Synthetic oligonucleotide
uuggacuuauucaggcacc

SEQ ID NO: 1774365 - RNA, 19 nt, Artificial Sequence
  Description of Artificial Sequence: Synthetic oligonucleotide
agugcgcugccucucggcc

SEQ ID NO: 1774366 - RNA, 19 nt, Artificial Sequence
  Description of Artificial Sequence: Synthetic oligonucleotide
uggucguugccccugggcc

SEQ ID NO: 1774367 - RNA, 19 nt, Artificial Sequence
  Description of Artificial Sequence: Synthetic oligonucleotide
uucagguaacaguggaggc

SEQ ID NO: 1774368 - RNA, 19 nt, Artificial Sequence
  Description of Artificial Sequence: Synthetic oligonucleotide
ucucgcuccauccagucau

SEQ ID NO: 1774369 - RNA, 19 nt, Artificial Sequence
  Description of Artificial Sequence: Synthetic oligonucleotide
acaacucccggcccaggcc

SEQ ID NO: 1774370 - RNA, 19 nt, Artificial Sequence
  Description of Artificial Sequence: Synthetic oligonucleotide
cuggucguccacaagguug

SEQ ID NO: 1774371 - RNA, 19 nt, Artificial Sequence
  Description of Artificial Sequence: Synthetic oligonucleotide
gucagccuggcuuggaagg

SEQ ID NO: 1774372 - RNA, 19 nt, Artificial Sequence
  Description of Artificial Sequence: Synthetic oligonucleotide
uccauccagucauugaccu

SEQ ID NO: 1774373 - RNA, 19 nt, Artificial Sequence
  Description of Artificial Sequence: Synthetic oligonucleotide
agugugucagccuggcuug

SEQ ID NO: 1774374 - RNA, 19 nt, Artificial Sequence
  Description of Artificial Sequence: Synthetic oligonucleotide
uccacguggaacccggaca

SEQ ID NO: 1774375 - RNA, 19 nt, Artificial Sequence
  Description of Artificial Sequence: Synthetic oligonucleotide
gucaaucaccaccaguagc

SEQ ID NO: 1774376 - RNA, 19 nt, Artificial Sequence
  Description of Artificial Sequence: Synthetic oligonucleotide
ggugauuggacgcagugac

SEQ ID NO: 1774377 - RNA, 19 nt, Artificial Sequence
  Description of Artificial Sequence: Synthetic oligonucleotide
gguacugggccgcacaggg

SEQ ID NO: 1774378 - RNA, 19 nt, Artificial Sequence
  Description of Artificial Sequence: Synthetic oligonucleotide
guuucgauccgugugugcc

SEQ ID NO: 1774379 - RNA, 19 nt, Artificial Sequence
  Description of Artificial Sequence: Synthetic oligonucleotide
aaucaccaccaguagcccu

SEQ ID NO: 1774380 - RNA, 19 nt, Artificial Sequence
  Description of Artificial Sequence: Synthetic oligonucleotide
acuuuacugauggaggcug

SEQ ID NO: 1774381 - RNA, 19 nt, Artificial Sequence
  Description of Artificial Sequence: Synthetic oligonucleotide
cagguaacaguggaggcgg

SEQ ID NO: 1774382 - RNA, 19 nt, Artificial Sequence
  Description of Artificial Sequence: Synthetic oligonucleotide
ucagaugccaggcgcuuca

SEQ ID NO: 1774383 - RNA, 19 nt, Artificial Sequence
  Description of Artificial Sequence: Synthetic oligonucleotide
guaacaguggaggcggagg

SEQ ID NO: 1774384 - RNA, 19 nt, Artificial Sequence
  Description of Artificial Sequence: Synthetic oligonucleotide
uccuucucgcuccauccag

SEQ ID NO: 1774385 - RNA, 19 nt, Artificial Sequence
  Description of Artificial Sequence: Synthetic oligonucleotide
uucagcgaggucaguaccu

SEQ ID NO: 1774386 - RNA, 19 nt, Artificial Sequence
  Description of Artificial Sequence: Synthetic oligonucleotide
uuucugaagcgguggaggu

SEQ ID NO: 1774387 - RNA, 19 nt, Artificial Sequence
  Description of Artificial Sequence: Synthetic oligonucleotide
gaggugauuggacgcagug

SEQ ID NO: 1774388 - RNA, 19 nt, Artificial Sequence
  Description of Artificial Sequence: Synthetic oligonucleotide
ugcaaccuggccagaguag

SEQ ID NO: 1774389 - RNA, 19 nt, Artificial Sequence
  Description of Artificial Sequence: Synthetic oligonucleotide
cagaguagcuccaccuucc

SEQ ID NO: 1774390 - RNA, 19 nt, Artificial Sequence
  Description of Artificial Sequence: Synthetic oligonucleotide
cuuuacugauggaggcugg

SEQ ID NO: 1774391 - RNA, 19 nt, Artificial Sequence
  Description of Artificial Sequence: Synthetic oligonucleotide
ugugccgccugcuugcaca

SEQ ID NO: 1774392 - RNA, 19 nt, Artificial Sequence
  Description of Artificial Sequence: Synthetic oligonucleotide
uuccuggcgucaaucacca

SEQ ID NO: 1774393 - RNA, 19 nt, Artificial Sequence
  Description of Artificial Sequence: Synthetic oligonucleotide
aauucagaugccaggcgcu

SEQ ID NO: 1774394 - RNA, 19 nt, Artificial Sequence
  Description of Artificial Sequence: Synthetic oligonucleotide
agggccuucagcgagguca

SEQ ID NO: 1774395 - RNA, 19 nt, Artificial Sequence
  Description of Artificial Sequence: Synthetic oligonucleotide
auuggacgcagugaccagg

SEQ ID NO: 1774396 - RNA, 19 nt, Artificial Sequence
  Description of Artificial Sequence: Synthetic oligonucleotide
aggacaugaagcuggucgu

SEQ ID NO: 1774397 - RNA, 19 nt, Artificial Sequence
  Description of Artificial Sequence: Synthetic oligonucleotide
uucucaacucuugaaugga

SEQ ID NO: 1774398 - RNA, 19 nt, Artificial Sequence
  Description of Artificial Sequence: Synthetic oligonucleotide
auucaggcaccuggcagcc

SEQ ID NO: 1774399 - RNA, 19 nt, Artificial Sequence
  Description of Artificial Sequence: Synthetic oligonucleotide
ucagucagauggcuccuga

SEQ ID NO: 1774400 - RNA, 19 nt, Artificial Sequence
  Description of Artificial Sequence: Synthetic oligonucleotide
agugccuuccucaaccaag

SEQ ID NO: 1774401 - RNA, 19 nt, Artificial Sequence
  Description of Artificial Sequence: Synthetic oligonucleotide
guggcuggagaacggaugc

SEQ ID NO: 1774402 - RNA, 19 nt, Artificial Sequence
  Description of Artificial Sequence: Synthetic oligonucleotide
agaccugggucccucagca

SEQ ID NO: 1774403 - RNA, 19 nt, Artificial Sequence
  Description of Artificial Sequence: Synthetic oligonucleotide
ucucaacucuugaauggaa

SEQ ID NO: 1774404 - RNA, 19 nt, Artificial Sequence
  Description of Artificial Sequence: Synthetic oligonucleotide
cuccauccagucauugacc

SEQ ID NO: 1774405 - RNA, 19 nt, Artificial Sequence
  Description of Artificial Sequence: Synthetic oligonucleotide
ucuuucugaagcgguggag

SEQ ID NO: 1774406 - RNA, 19 nt, Artificial Sequence
  Description of Artificial Sequence: Synthetic oligonucleotide
gguuguacagggcugcggc

SEQ ID NO: 1774407 - RNA, 19 nt, Artificial Sequence
  Description of Artificial Sequence: Synthetic oligonucleotide
cuucggaggaggugauugg

SEQ ID NO: 1774408 - RNA, 19 nt, Artificial Sequence
  Description of Artificial Sequence: Synthetic oligonucleotide
caagugggcagcagugacc

SEQ ID NO: 1774409 - RNA, 19 nt, Artificial Sequence
  Description of Artificial Sequence: Synthetic oligonucleotide
gaagccugcagcagggaug

SEQ ID NO: 1774410 - RNA, 19 nt, Artificial Sequence
  Description of Artificial Sequence: Synthetic oligonucleotide
uuggacgcagugaccagga

SEQ ID NO: 1774411 - RNA, 19 nt, Artificial Sequence
  Description of Artificial Sequence: Synthetic oligonucleotide
uuacugauggaggcuggag

SEQ ID NO: 1774412 - RNA, 19 nt, Artificial Sequence
  Description of Artificial Sequence: Synthetic oligonucleotide
cuucagcgaggucaguacc

SEQ ID NO: 1774413 - RNA, 19 nt, Artificial Sequence
  Description of Artificial Sequence: Synthetic oligonucleotide
ggcaagauccuggagauac

SEQ ID NO: 1774414 - RNA, 19 nt, Artificial Sequence
  Description of Artificial Sequence: Synthetic oligonucleotide
ugaccucugggcaugggua

SEQ ID NO: 1774415 - RNA, 19 nt, Artificial Sequence
  Description of Artificial Sequence: Synthetic oligonucleotide
acgggcucagcuucugggg

SEQ ID NO: 1774416 - RNA, 19 nt, Artificial Sequence
  Description of Artificial Sequence: Synthetic oligonucleotide
cuaggguccacgugguuuc

SEQ ID NO: 1774417 - RNA, 19 nt, Artificial Sequence
  Description of Artificial Sequence: Synthetic oligonucleotide
uugaugucuugcccagucu

SEQ ID NO: 1774418 - RNA, 19 nt, Artificial Sequence
  Description of Artificial Sequence: Synthetic oligonucleotide
ucagucugcucgcuuccug

SEQ ID NO: 1774419 - RNA, 19 nt, Artificial Sequence
  Description of Artificial Sequence: Synthetic oligonucleotide
gaggaacgggcucagcuuc

SEQ ID NO: 1774420 - RNA, 19 nt, Artificial Sequence
  Description of Artificial Sequence: Synthetic oligonucleotide
uuucgauccgugugugcca

SEQ ID NO: 1774421 - RNA, 19 nt, Artificial Sequence
  Description of Artificial Sequence: Synthetic oligonucleotide
gauuggacgcagugaccag

SEQ ID NO: 1774422 - RNA, 19 nt, Artificial Sequence
  Description of Artificial Sequence: Synthetic oligonucleotide
uccaccuggacagguagug

SEQ ID NO: 1774423 - RNA, 19 nt, Artificial Sequence
  Description of Artificial Sequence: Synthetic oligonucleotide
agcccgugugcucugcagg

SEQ ID NO: 1774424 - RNA, 19 nt, Artificial Sequence
  Description of Artificial Sequence: Synthetic oligonucleotide
ucucccuggucguugcccc

SEQ ID NO: 1774425 - RNA, 19 nt, Artificial Sequence
  Description of Artificial Sequence: Synthetic oligonucleotide
gaauggaagccugcagcag

SEQ ID NO: 1774426 - RNA, 19 nt, Artificial Sequence
  Description of Artificial Sequence: Synthetic oligonucleotide
ggcgcuucagguaacagug

SEQ ID NO: 1774427 - RNA, 19 nt, Artificial Sequence
  Description of Artificial Sequence: Synthetic oligonucleotide
uguuucgauccgugugugc

SEQ ID NO: 1774428 - RNA, 19 nt, Artificial Sequence
  Description of Artificial Sequence: Synthetic oligonucleotide
ucggaggaggugauuggac

SEQ ID NO: 1774429 - RNA, 19 nt, Artificial Sequence
  Description of Artificial Sequence: Synthetic oligonucleotide
caguccacguggaacccgg

SEQ ID NO: 1774430 - RNA, 19 nt, Artificial Sequence
  Description of Artificial Sequence: Synthetic oligonucleotide
uuuacugauggaggcugga

SEQ ID NO: 1774431 - RNA, 19 nt, Artificial Sequence
  Description of Artificial Sequence: Synthetic oligonucleotide
agggcugcggcuucaguca

SEQ ID NO: 1774432 - RNA, 19 nt, Artificial Sequence
  Description of Artificial Sequence: Synthetic oligonucleotide
ugucuugcccagucugagc

SEQ ID NO: 1774433 - RNA, 19 nt, Artificial Sequence
  Description of Artificial Sequence: Synthetic oligonucleotide
ccucggaucucccuggucg

SEQ ID NO: 1774434 - RNA, 19 nt, Artificial Sequence
  Description of Artificial Sequence: Synthetic oligonucleotide
ucagugcgcugccucucgg

SEQ ID NO: 1774435 - RNA, 19 nt, Artificial Sequence
  Description of Artificial Sequence: Synthetic oligonucleotide
gacaucaggguuggcauuc

SEQ ID NO: 1774436 - RNA, 19 nt, Artificial Sequence
  Description of Artificial Sequence: Synthetic oligonucleotide
cagagccucgggcagcugg

SEQ ID NO: 1774437 - RNA, 19 nt, Artificial Sequence
  Description of Artificial Sequence: Synthetic oligonucleotide
aggcgcuucagguaacagu

SEQ ID NO: 1774438 - RNA, 19 nt, Artificial Sequence
  Description of Artificial Sequence: Synthetic oligonucleotide
ccuggcgucaaucaccacc

SEQ ID NO: 1774439 - RNA, 19 nt, Artificial Sequence
  Description of Artificial Sequence: Synthetic oligonucleotide
gcacuuuacugauggaggc

SEQ ID NO: 1774440 - RNA, 19 nt, Artificial Sequence
  Description of Artificial Sequence: Synthetic oligonucleotide
uaguaggccagugccuucc

SEQ ID NO: 1774441 - RNA, 19 nt, Artificial Sequence
  Description of Artificial Sequence: Synthetic oligonucleotide
ugcagggcgcugaccagag

SEQ ID NO: 1774442 - RNA, 19 nt, Artificial Sequence
  Description of Artificial Sequence: Synthetic oligonucleotide
accaccaguagcccuuuga

SEQ ID NO: 1774443 - RNA, 19 nt, Artificial Sequence
  Description of Artificial Sequence: Synthetic oligonucleotide
acaugaagcuggucgucca

SEQ ID NO: 1774444 - RNA, 19 nt, Artificial Sequence
  Description of Artificial Sequence: Synthetic oligonucleotide
ugaggaacgggcucagcuu

SEQ ID NO: 1774445 - RNA, 19 nt, Artificial Sequence
  Description of Artificial Sequence: Synthetic oligonucleotide
gaggucaguaccuccaccu

SEQ ID NO: 1774446 - RNA, 19 nt, Artificial Sequence
  Description of Artificial Sequence: Synthetic oligonucleotide
ugggcauggguaguaggcc

SEQ ID NO: 1774447 - RNA, 19 nt, Artificial Sequence
  Description of Artificial Sequence: Synthetic oligonucleotide
gauccgugugugccaagug

SEQ ID NO: 1774448 - RNA, 19 nt, Artificial Sequence
  Description of Artificial Sequence: Synthetic oligonucleotide
cugcuugcacaguuccagg

SEQ ID NO: 1774449 - RNA, 19 nt, Artificial Sequence
  Description of Artificial Sequence: Synthetic oligonucleotide
aggucugggaaccccgugu

SEQ ID NO: 1774450 - RNA, 19 nt, Artificial Sequence
  Description of Artificial Sequence: Synthetic oligonucleotide
accccgugucaccugcccc

SEQ ID NO: 1774451 - RNA, 19 nt, Artificial Sequence
  Description of Artificial Sequence: Synthetic oligonucleotide
caggcggacacggagcucc

SEQ ID NO: 1774452 - RNA, 19 nt, Artificial Sequence
  Description of Artificial Sequence: Synthetic oligonucleotide
uggagaacggaugccuucu

SEQ ID NO: 1774453 - RNA, 19 nt, Artificial Sequence
  Description of Artificial Sequence: Synthetic oligonucleotide
ggagcuccagccuucggag

SEQ ID NO: 1774454 - RNA, 19 nt, Artificial Sequence
  Description of Artificial Sequence: Synthetic oligonucleotide
gaacgggcucagcuucugg

SEQ ID NO: 1774455 - RNA, 19 nt, Artificial Sequence
  Description of Artificial Sequence: Synthetic oligonucleotide
gaaggucagugaggaacgg

SEQ ID NO: 1774456 - RNA, 19 nt, Artificial Sequence
  Description of Artificial Sequence: Synthetic oligonucleotide
cuucucucccaggaggagc

SEQ ID NO: 1774457 - RNA, 19 nt, Artificial Sequence
  Description of Artificial Sequence: Synthetic oligonucleotide
cucuuuccacaacucccgg

SEQ ID NO: 1774458 - RNA, 19 nt, Artificial Sequence
  Description of Artificial Sequence: Synthetic oligonucleotide
uggacuuauucaggcaccu

SEQ ID NO: 1774459 - RNA, 19 nt, Artificial Sequence
  Description of Artificial Sequence: Synthetic oligonucleotide
uucggaggaggugauugga

SEQ ID NO: 1774460 - RNA, 19 nt, Artificial Sequence
  Description of Artificial Sequence: Synthetic oligonucleotide
ucagauggcuccugacauc

SEQ ID NO: 1774461 - RNA, 19 nt, Artificial Sequence
  Description of Artificial Sequence: Synthetic oligonucleotide
cuuauucaggcaccuggca

SEQ ID NO: 1774462 - RNA, 19 nt, Artificial Sequence
  Description of Artificial Sequence: Synthetic oligonucleotide
cagggcugcggcuucaguc

SEQ ID NO: 1774463 - RNA, 19 nt, Artificial Sequence
  Description of Artificial Sequence: Synthetic oligonucleotide
gaccagagcaggacucggg

SEQ ID NO: 1774464 - RNA, 19 nt, Artificial Sequence
  Description of Artificial Sequence: Synthetic oligonucleotide
augucuugcccagucugag

SEQ ID NO: 1774465 - RNA, 19 nt, Artificial Sequence
  Description of Artificial Sequence: Synthetic oligonucleotide
gucagugcgcugccucucg

SEQ ID NO: 1774466 - RNA, 19 nt, Artificial Sequence
  Description of Artificial Sequence: Synthetic oligonucleotide
gcgaaggucagugaggaac

SEQ ID NO: 1774467 - RNA, 19 nt, Artificial Sequence
  Description of Artificial Sequence: Synthetic oligonucleotide
aggucaguaccuccaccug

SEQ ID NO: 1774468 - RNA, 19 nt, Artificial Sequence
  Description of Artificial Sequence: Synthetic oligonucleotide
agguggcccaggcggacac

SEQ ID NO: 1774469 - RNA, 19 nt, Artificial Sequence
  Description of Artificial Sequence: Synthetic oligonucleotide
cuggagaacggaugccuuc

SEQ ID NO: 1774470 - RNA, 19 nt, Artificial Sequence
  Description of Artificial Sequence: Synthetic oligonucleotide
uucugaagcgguggaggug

SEQ ID NO: 1774471 - RNA, 19 nt, Artificial Sequence
  Description of Artificial Sequence: Synthetic oligonucleotide
caacugugccgccugcuug

SEQ ID NO: 1774472 - RNA, 19 nt, Artificial Sequence
  Description of Artificial Sequence: Synthetic oligonucleotide
acguggaacccggacaucu

SEQ ID NO: 1774473 - RNA, 19 nt, Artificial Sequence
  Description of Artificial Sequence: Synthetic oligonucleotide
agcagugaccucugggcau

SEQ ID NO: 1774474 - RNA, 19 nt, Artificial Sequence
  Description of Artificial Sequence: Synthetic oligonucleotide
cacaagguuguacagggcu

SEQ ID NO: 1774475 - RNA, 19 nt, Artificial Sequence
  Description of Artificial Sequence: Synthetic oligonucleotide
cugagggccuucagcgagg

SEQ ID NO: 1774476 - RNA, 19 nt, Artificial Sequence
  Description of Artificial Sequence: Synthetic oligonucleotide
cagguccugacaguccacg

SEQ ID NO: 1774477 - RNA, 19 nt, Artificial Sequence
  Description of Artificial Sequence: Synthetic oligonucleotide
gucagugaggaacgggcuc

SEQ ID NO: 1774478 - RNA, 19 nt, Artificial Sequence
  Description of Artificial Sequence: Synthetic oligonucleotide
caugaagcuggucguccac

SEQ ID NO: 1774479 - RNA, 19 nt, Artificial Sequence
  Description of Artificial Sequence: Synthetic oligonucleotide
caccuggacagguagugca

SEQ ID NO: 1774480 - RNA, 19 nt, Artificial Sequence
  Description of Artificial Sequence: Synthetic oligonucleotide
cagggcgcugaccagagca

SEQ ID NO: 1774481 - RNA, 19 nt, Artificial Sequence
  Description of Artificial Sequence: Synthetic oligonucleotide
uccuggagauacuggcuuc

SEQ ID NO: 1774482 - RNA, 19 nt, Artificial Sequence
  Description of Artificial Sequence: Synthetic oligonucleotide
cuucucgcuccauccaguc

SEQ ID NO: 1774483 - RNA, 19 nt, Artificial Sequence
  Description of Artificial Sequence: Synthetic oligonucleotide
ugugugccaagugggcagc

SEQ ID NO: 1774484 - RNA, 19 nt, Artificial Sequence
  Description of Artificial Sequence: Synthetic oligonucleotide
cucucggccgccauguaga

SEQ ID NO: 1774485 - RNA, 19 nt, Artificial Sequence
  Description of Artificial Sequence: Synthetic oligonucleotide
uugcacaguuccaggcccu

SEQ ID NO: 1774486 - RNA, 19 nt, Artificial Sequence
  Description of Artificial Sequence: Synthetic oligonucleotide
cuggucguugccccugggc

SEQ ID NO: 1774487 - RNA, 19 nt, Artificial Sequence
  Description of Artificial Sequence: Synthetic oligonucleotide
ggcggcgaaggcuaccagg

SEQ ID NO: 1774488 - RNA, 19 nt, Artificial Sequence
  Description of Artificial Sequence: Synthetic oligonucleotide
caaucaccaccaguagccc

SEQ ID NO: 1774489 - RNA, 19 nt, Artificial Sequence
  Description of Artificial Sequence: Synthetic oligonucleotide
agguuguacagggcugcgg

SEQ ID NO: 1774490 - RNA, 19 nt, Artificial Sequence
  Description of Artificial Sequence: Synthetic oligonucleotide
cgaaggucagugaggaacg

SEQ ID NO: 1774491 - RNA, 19 nt, Artificial Sequence
  Description of Artificial Sequence: Synthetic oligonucleotide
acaguccacguggaacccg

SEQ ID NO: 1774492 - RNA, 19 nt, Artificial Sequence
  Description of Artificial Sequence: Synthetic oligonucleotide
uccugacaguccacgugga

SEQ ID NO: 1774493 - RNA, 19 nt, Artificial Sequence
  Description of Artificial Sequence: Synthetic oligonucleotide
acggaugccuucucuccca

SEQ ID NO: 1774494 - RNA, 19 nt, Artificial Sequence
  Description of Artificial Sequence: Synthetic oligonucleotide
agugaggaacgggcucagc

SEQ ID NO: 1774495 - RNA, 19 nt, Artificial Sequence
  Description of Artificial Sequence: Synthetic oligonucleotide
ugucaccugccccuuccuc

SEQ ID NO: 1774496 - RNA, 19 nt, Artificial Sequence
  Description of Artificial Sequence: Synthetic oligonucleotide
uccagucauugaccugcug

SEQ ID NO: 1774497 - RNA, 19 nt, Artificial Sequence
  Description of Artificial Sequence: Synthetic oligonucleotide
ccuggcgaaggucagugag

SEQ ID NO: 1774498 - RNA, 19 nt, Artificial Sequence
  Description of Artificial Sequence: Synthetic oligonucleotide
aucagauccuuggacuuau

SEQ ID NO: 1774499 - RNA, 19 nt, Artificial Sequence
  Description of Artificial Sequence: Synthetic oligonucleotide
aggugauuggacgcaguga

SEQ ID NO: 1774500 - RNA, 19 nt, Artificial Sequence
  Description of Artificial Sequence: Synthetic oligonucleotide
cagucagauggcuccugac

SEQ ID NO: 1774501 - RNA, 19 nt, Artificial Sequence
  Description of Artificial Sequence: Synthetic oligonucleotide
uccacaacucccggcccag

SEQ ID NO: 1774502 - RNA, 19 nt, Artificial Sequence
  Description of Artificial Sequence: Synthetic oligonucleotide
gucagauggcuccugacau

SEQ ID NO: 1774503 - RNA, 19 nt, Artificial Sequence
  Description of Artificial Sequence: Synthetic oligonucleotide
uucagucagauggcuccug

SEQ ID NO: 1774504 - RNA, 19 nt, Artificial Sequence
  Description of Artificial Sequence: Synthetic oligonucleotide
gacaguccacguggaaccc

SEQ ID NO: 1774505 - RNA, 19 nt, Artificial Sequence
  Description of Artificial Sequence: Synthetic oligonucleotide
aggucagugcgcugccucu

SEQ ID NO: 1774506 - RNA, 19 nt, Artificial Sequence
  Description of Artificial Sequence: Synthetic oligonucleotide
gcuccugacaucaggguug

SEQ ID NO: 1774507 - RNA, 19 nt, Artificial Sequence
  Description of Artificial Sequence: Synthetic oligonucleotide
ucagcgaggucaguaccuc

SEQ ID NO: 1774508 - RNA, 19 nt, Artificial Sequence
  Description of Artificial Sequence: Synthetic oligonucleotide
ggacgcagugaccaggaca

SEQ ID NO: 1774509 - RNA, 19 nt, Artificial Sequence
  Description of Artificial Sequence: Synthetic oligonucleotide
uaccaggucugggaacccc

SEQ ID NO: 1774510 - RNA, 19 nt, Artificial Sequence
  Description of Artificial Sequence: Synthetic oligonucleotide
uggcuaggguccacguggu

SEQ ID NO: 1774511 - RNA, 19 nt, Artificial Sequence
  Description of Artificial Sequence: Synthetic oligonucleotide
gaggaggugauuggacgca

SEQ ID NO: 1774512 - RNA, 19 nt, Artificial Sequence
  Description of Artificial Sequence: Synthetic oligonucleotide
gugcgcugccucucggccg

SEQ ID NO: 1774513 - RNA, 19 nt, Artificial Sequence
  Description of Artificial Sequence: Synthetic oligonucleotide
caucaggguuggcauucag

SEQ ID NO: 1774514 - RNA, 19 nt, Artificial Sequence
  Description of Artificial Sequence: Synthetic oligonucleotide
ugggaaccccgugucaccu

SEQ ID NO: 1774515 - RNA, 19 nt, Artificial Sequence
  Description of Artificial Sequence: Synthetic oligonucleotide
augaggccuggcgaagguc

SEQ ID NO: 1774516 - RNA, 19 nt, Artificial Sequence
  Description of Artificial Sequence: Synthetic oligonucleotide
ugaagcgguggagguggag

SEQ ID NO: 1774517 - RNA, 19 nt, Artificial Sequence
  Description of Artificial Sequence: Synthetic oligonucleotide
agcgaggucaguaccucca

SEQ ID NO: 1774518 - RNA, 19 nt, Artificial Sequence
  Description of Artificial Sequence: Synthetic oligonucleotide
cagcgaggucaguaccucc

SEQ ID NO: 1774519 - RNA, 19 nt, Artificial Sequence
  Description of Artificial Sequence: Synthetic oligonucleotide
uucgauccgugugugccaa

SEQ ID NO: 1774520 - RNA, 19 nt, Artificial Sequence
  Description of Artificial Sequence: Synthetic oligonucleotide
ugguuucugagggccuuca

SEQ ID NO: 1774521 - RNA, 19 nt, Artificial Sequence
  Description of Artificial Sequence: Synthetic oligonucleotide
ggagcuucauggccaggag

SEQ ID NO: 1774522 - RNA, 19 nt, Artificial Sequence
  Description of Artificial Sequence: Synthetic oligonucleotide
gagaacggaugccuucucu

SEQ ID NO: 1774523 - RNA, 19 nt, Artificial Sequence
  Description of Artificial Sequence: Synthetic oligonucleotide
gugauuggacgcagugacc

SEQ ID NO: 1774524 - RNA, 19 nt, Artificial Sequence
  Description of Artificial Sequence: Synthetic oligonucleotide
ccuucagcgaggucaguac

SEQ ID NO: 1774525 - RNA, 19 nt, Artificial Sequence
  Description of Artificial Sequence: Synthetic oligonucleotide
ugccucucggccgccaugu

SEQ ID NO: 1774526 - RNA, 19 nt, Artificial Sequence
  Description of Artificial Sequence: Synthetic oligonucleotide
gcggagguggagcugcucc

SEQ ID NO: 1774527 - RNA, 19 nt, Artificial Sequence
  Description of Artificial Sequence: Synthetic oligonucleotide
gcaaccuggccagaguagc

SEQ ID NO: 1774528 - RNA, 19 nt, Artificial Sequence
  Description of Artificial Sequence: Synthetic oligonucleotide
gguggcuggagaacggaug

SEQ ID NO: 1774529 - RNA, 19 nt, Artificial Sequence
  Description of Artificial Sequence: Synthetic oligonucleotide
cauggguaguaggccagug

SEQ ID NO: 1774530 - RNA, 19 nt, Artificial Sequence
  Description of Artificial Sequence: Synthetic oligonucleotide
cagugcgcugccucucggc

SEQ ID NO: 1774531 - RNA, 19 nt, Artificial Sequence
  Description of Artificial Sequence: Synthetic oligonucleotide
cugcuggauggcagcuucc

SEQ ID NO: 1774532 - RNA, 19 nt, Artificial Sequence
  Description of Artificial Sequence: Synthetic oligonucleotide
cuguuucgauccgugugug

SEQ ID NO: 1774533 - RNA, 19 nt, Artificial Sequence
  Description of Artificial Sequence: Synthetic oligonucleotide
ucccaacugugccgccugc

SEQ ID NO: 1774534 - RNA, 19 nt, Artificial Sequence
  Description of Artificial Sequence: Synthetic oligonucleotide
uggcgucaaucaccaccag

SEQ ID NO: 1774535 - RNA, 19 nt, Artificial Sequence
  Description of Artificial Sequence: Synthetic oligonucleotide
ccuucggaggaggugauug

SEQ ID NO: 1774536 - RNA, 19 nt, Artificial Sequence
  Description of Artificial Sequence: Synthetic oligonucleotide
ccaccaguagcccuuugac

SEQ ID NO: 1774537 - RNA, 19 nt, Artificial Sequence
  Description of Artificial Sequence: Synthetic oligonucleotide
gguaacaguggaggcggag

SEQ ID NO: 1774538 - RNA, 19 nt, Artificial Sequence
  Description of Artificial Sequence: Synthetic oligonucleotide
guccacguggaacccggac

SEQ ID NO: 1774539 - RNA, 19 nt, Artificial Sequence
  Description of Artificial Sequence: Synthetic oligonucleotide
gucugcucgcuuccugcug

SEQ ID NO: 1774540 - RNA, 19 nt, Artificial Sequence
  Description of Artificial Sequence: Synthetic oligonucleotide
caacucccggcccaggcca

SEQ ID NO: 1774541 - RNA, 19 nt, Artificial Sequence
  Description of Artificial Sequence: Synthetic oligonucleotide
cucccaacugugccgccug

SEQ ID NO: 1774542 - RNA, 19 nt, Artificial Sequence
  Description of Artificial Sequence: Synthetic oligonucleotide
ugugucagccuggcuugga

SEQ ID NO: 1774543 - RNA, 19 nt, Artificial Sequence
  Description of Artificial Sequence: Synthetic oligonucleotide
uacuggcuuccuucucgcu

SEQ ID NO: 1774544 - RNA, 19 nt, Artificial Sequence
  Description of Artificial Sequence: Synthetic oligonucleotide
gcccgugugcucugcaggg

SEQ ID NO: 1774545 - RNA, 19 nt, Artificial Sequence
  Description of Artificial Sequence: Synthetic oligonucleotide
agcuggcuaggguccacgu

SEQ ID NO: 1774546 - RNA, 19 nt, Artificial Sequence
  Description of Artificial Sequence: Synthetic oligonucleotide
gaggagcacuuuacugaug

SEQ ID NO: 1774547 - RNA, 19 nt, Artificial Sequence
  Description of Artificial Sequence: Synthetic oligonucleotide
aguaggccagugccuuccu

SEQ ID NO: 1774548 - RNA, 19 nt, Artificial Sequence
  Description of Artificial Sequence: Synthetic oligonucleotide
agucauugaccugcuggau

SEQ ID NO: 1774549 - RNA, 19 nt, Artificial Sequence
  Description of Artificial Sequence: Synthetic oligonucleotide
uggcuggagaacggaugcc

SEQ ID NO: 1774550 - RNA, 19 nt, Artificial Sequence
  Description of Artificial Sequence: Synthetic oligonucleotide
gguggagcagggucuccag

SEQ ID NO: 1774551 - RNA, 19 nt, Artificial Sequence
  Description of Artificial Sequence: Synthetic oligonucleotide
gccgccauguagaagugug

SEQ ID NO: 1774552 - RNA, 19 nt, Artificial Sequence
  Description of Artificial Sequence: Synthetic oligonucleotide
gcgucaaucaccaccagua

SEQ ID NO: 1774553 - RNA, 19 nt, Artificial Sequence
  Description of Artificial Sequence: Synthetic oligonucleotide
gauccuggagauacuggcu

SEQ ID NO: 1774554 - RNA, 19 nt, Artificial Sequence
  Description of Artificial Sequence: Synthetic oligonucleotide
gguuucugagggccuucag

SEQ ID NO: 1774555 - RNA, 19 nt, Artificial Sequence
  Description of Artificial Sequence: Synthetic oligonucleotide
guaguaggccagugccuuc

SEQ ID NO: 1774556 - RNA, 19 nt, Artificial Sequence
  Description of Artificial Sequence: Synthetic oligonucleotide
ggaucucccuggucguugc

SEQ ID NO: 1774557 - RNA, 19 nt, Artificial Sequence
  Description of Artificial Sequence: Synthetic oligonucleotide
cagccuucggaggagguga

SEQ ID NO: 1774558 - RNA, 19 nt, Artificial Sequence
  Description of Artificial Sequence: Synthetic oligonucleotide
agcuggucguccacaaggu

SEQ ID NO: 1774559 - RNA, 19 nt, Artificial Sequence
  Description of Artificial Sequence: Synthetic oligonucleotide
gaugaggccuggcgaaggu

SEQ ID NO: 1774560 - RNA, 19 nt, Artificial Sequence
  Description of Artificial Sequence: Synthetic oligonucleotide
cccaggaggagcacuuuac

SEQ ID NO: 1774561 - RNA, 19 nt, Artificial Sequence
  Description of Artificial Sequence: Synthetic oligonucleotide
augccaggcgcuucaggua

SEQ ID NO: 1774562 - RNA, 19 nt, Artificial Sequence
  Description of Artificial Sequence: Synthetic oligonucleotide
guacugggccgcacagggg

SEQ ID NO: 1774563 - RNA, 19 nt, Artificial Sequence
  Description of Artificial Sequence: Synthetic oligonucleotide
ccggacaucuucuuucuga

SEQ ID NO: 1774564 - RNA, 19 nt, Artificial Sequence
  Description of Artificial Sequence: Synthetic oligonucleotide
cugcaaccuggccagagua

SEQ ID NO: 1774565 - RNA, 19 nt, Artificial Sequence
  Description of Artificial Sequence: Synthetic oligonucleotide
acacggagcuccagccuuc

SEQ ID NO: 1774566 - RNA, 19 nt, Artificial Sequence
  Description of Artificial Sequence: Synthetic oligonucleotide
gacacggagcuccagccuu

SEQ ID NO: 1774567 - RNA, 19 nt, Artificial Sequence
  Description of Artificial Sequence: Synthetic oligonucleotide
acggagcuccagccuucgg

SEQ ID NO: 1774568 - RNA, 19 nt, Artificial Sequence
  Description of Artificial Sequence: Synthetic oligonucleotide
ccaccuggagcuucauggc

SEQ ID NO: 1774569 - RNA, 19 nt, Artificial Sequence
  Description of Artificial Sequence: Synthetic oligonucleotide
gugccgccugcuugcacag

SEQ ID NO: 1774570 - RNA, 19 nt, Artificial Sequence
  Description of Artificial Sequence: Synthetic oligonucleotide
ggcccucggaucucccugg

SEQ ID NO: 1774571 - RNA, 19 nt, Artificial Sequence
  Description of Artificial Sequence: Synthetic oligonucleotide
aggccagugccuuccucaa

SEQ ID NO: 1774572 - RNA, 19 nt, Artificial Sequence
  Description of Artificial Sequence: Synthetic oligonucleotide
ggcgaaggcuaccaggucu

SEQ ID NO: 1774573 - RNA, 19 nt, Artificial Sequence
  Description of Artificial Sequence: Synthetic oligonucleotide
ccugacaucaggguuggca

SEQ ID NO: 1774574 - RNA, 19 nt, Artificial Sequence
  Description of Artificial Sequence: Synthetic oligonucleotide
caaggcccucggaucuccc

SEQ ID NO: 1774575 - RNA, 19 nt, Artificial Sequence
  Description of Artificial Sequence: Synthetic oligonucleotide
ucgauccgugugugccaag

SEQ ID NO: 1774576 - RNA, 19 nt, Artificial Sequence
  Description of Artificial Sequence: Synthetic oligonucleotide
agggcgcugaccagagcag

SEQ ID NO: 1774577 - RNA, 19 nt, Artificial Sequence
  Description of Artificial Sequence: Synthetic oligonucleotide
ggucugggaaccccguguc

SEQ ID NO: 1774578 - RNA, 19 nt, Artificial Sequence
  Description of Artificial Sequence: Synthetic oligonucleotide
ccgugugcucugcagggcg

SEQ ID NO: 1774579 - RNA, 19 nt, Artificial Sequence
  Description of Artificial Sequence: Synthetic oligonucleotide
uaccuccaccuggacaggu

SEQ ID NO: 1774580 - RNA, 19 nt, Artificial Sequence
  Description of Artificial Sequence: Synthetic oligonucleotide
auucagaugccaggcgcuu

SEQ ID NO: 1774581 - RNA, 19 nt, Artificial Sequence
  Description of Artificial Sequence: Synthetic oligonucleotide
ggcauggguaguaggccag

SEQ ID NO: 1774582 - RNA, 19 nt, Artificial Sequence
  Description of Artificial Sequence: Synthetic oligonucleotide
ugugcucugcagggcgcug

SEQ ID NO: 1774583 - RNA, 19 nt, Artificial Sequence
  Description of Artificial Sequence: Synthetic oligonucleotide
gcggacacggagcuccagc

SEQ ID NO: 1774584 - RNA, 19 nt, Artificial Sequence
  Description of Artificial Sequence: Synthetic oligonucleotide
ucccuggucguugccccug

SEQ ID NO: 1774585 - RNA, 19 nt, Artificial Sequence
  Description of Artificial Sequence: Synthetic oligonucleotide
cacggagcuccagccuucg

SEQ ID NO: 1774586 - RNA, 19 nt, Artificial Sequence
  Description of Artificial Sequence: Synthetic oligonucleotide
acagcccgugugcucugca

SEQ ID NO: 1774587 - RNA, 19 nt, Artificial Sequence
  Description of Artificial Sequence: Synthetic oligonucleotide
cuaccaggucugggaaccc

SEQ ID NO: 1774588 - RNA, 19 nt, Artificial Sequence
  Description of Artificial Sequence: Synthetic oligonucleotide
aacucccggcccaggccag

SEQ ID NO: 1774589 - RNA, 19 nt, Artificial Sequence
  Description of Artificial Sequence: Synthetic oligonucleotide
gugugucagccuggcuugg

SEQ ID NO: 1774590 - RNA, 19 nt, Artificial Sequence
  Description of Artificial Sequence: Synthetic oligonucleotide
gcuggcuaggguccacgug

SEQ ID NO: 1774591 - RNA, 19 nt, Artificial Sequence
  Description of Artificial Sequence: Synthetic oligonucleotide
uggcuuccuucucgcucca

SEQ ID NO: 1774592 - RNA, 19 nt, Artificial Sequence
  Description of Artificial Sequence: Synthetic oligonucleotide
guaggccagugccuuccuc

SEQ ID NO: 1774593 - RNA, 19 nt, Artificial Sequence
  Description of Artificial Sequence: Synthetic oligonucleotide
cuggccagaguagcuccac

SEQ ID NO: 1774594 - RNA, 19 nt, Artificial Sequence
  Description of Artificial Sequence: Synthetic oligonucleotide
caccaguagcccuuugacu

SEQ ID NO: 1774595 - RNA, 19 nt, Artificial Sequence
  Description of Artificial Sequence: Synthetic oligonucleotide
acaucaggguuggcauuca

SEQ ID NO: 1774596 - RNA, 19 nt, Artificial Sequence
  Description of Artificial Sequence: Synthetic oligonucleotide
cgucaaucaccaccaguag

SEQ ID NO: 1774597 - RNA, 19 nt, Artificial Sequence
  Description of Artificial Sequence: Synthetic oligonucleotide
ggcuaccaggucugggaac

SEQ ID NO: 1774598 - RNA, 19 nt, Artificial Sequence
  Description of Artificial Sequence: Synthetic oligonucleotide
ggaggagcacuuuacugau

SEQ ID NO: 1774599 - RNA, 19 nt, Artificial Sequence
  Description of Artificial Sequence: Synthetic oligonucleotide
cagugaggaacgggcucag

SEQ ID NO: 1774600 - RNA, 19 nt, Artificial Sequence
  Description of Artificial Sequence: Synthetic oligonucleotide
gcgguacugggccgcacag

SEQ ID NO: 1774601 - RNA, 19 nt, Artificial Sequence
  Description of Artificial Sequence: Synthetic oligonucleotide
gugccaagugggcagcagu

SEQ ID NO: 1774602 - RNA, 19 nt, Artificial Sequence
  Description of Artificial Sequence: Synthetic oligonucleotide
gaaccccgugucaccugcc

SEQ ID NO: 1774603 - RNA, 19 nt, Artificial Sequence
  Description of Artificial Sequence: Synthetic oligonucleotide
gaagugugucagccuggcu

SEQ ID NO: 1774604 - RNA, 19 nt, Artificial Sequence
  Description of Artificial Sequence: Synthetic oligonucleotide
guggcggcgaaggcuacca

SEQ ID NO: 1774605 - RNA, 19 nt, Artificial Sequence
  Description of Artificial Sequence: Synthetic oligonucleotide
cugggccucuuuccacaac

SEQ ID NO: 1774606 - RNA, 19 nt, Artificial Sequence
  Description of Artificial Sequence: Synthetic oligonucleotide
ccgugugugccaagugggc

SEQ ID NO: 1774607 - RNA, 19 nt, Artificial Sequence
  Description of Artificial Sequence: Synthetic oligonucleotide
ccuuggacuuauucaggca

SEQ ID NO: 1774608 - RNA, 19 nt, Artificial Sequence
  Description of Artificial Sequence: Synthetic oligonucleotide
ggacuuauucaggcaccug

SEQ ID NO: 1774609 - RNA, 19 nt, Artificial Sequence
  Description of Artificial Sequence: Synthetic oligonucleotide
ggggcaagauccuggagau

SEQ ID NO: 1774610 - RNA, 19 nt, Artificial Sequence
  Description of Artificial Sequence: Synthetic oligonucleotide
gaacccggacaucuucuuu

SEQ ID NO: 1774611 - RNA, 19 nt, Artificial Sequence
  Description of Artificial Sequence: Synthetic oligonucleotide
accucugggcauggguagu

SEQ ID NO: 1774612 - RNA, 19 nt, Artificial Sequence
  Description of Artificial Sequence: Synthetic oligonucleotide
uccccagggcugguccuug

SEQ ID NO: 1774613 - RNA, 19 nt, Artificial Sequence
  Description of Artificial Sequence: Synthetic oligonucleotide
aggaacgggcucagcuucu

SEQ ID NO: 1774614 - RNA, 19 nt, Artificial Sequence
  Description of Artificial Sequence: Synthetic oligonucleotide
cagugaccucugggcaugg

SEQ ID NO: 1774615 - RNA, 19 nt, Artificial Sequence
  Description of Artificial Sequence: Synthetic oligonucleotide
gggaugaggccuggcgaag

SEQ ID NO: 1774616 - RNA, 19 nt, Artificial Sequence
  Description of Artificial Sequence: Synthetic oligonucleotide
uaggguccacgugguuucu

SEQ ID NO: 1774617 - RNA, 19 nt, Artificial Sequence
  Description of Artificial Sequence: Synthetic oligonucleotide
cacuuuacugauggaggcu

SEQ ID NO: 1774618 - RNA, 19 nt, Artificial Sequence
  Description of Artificial Sequence: Synthetic oligonucleotide
ggacaugaagcuggucguc

SEQ ID NO: 1774619 - RNA, 19 nt, Artificial Sequence
  Description of Artificial Sequence: Synthetic oligonucleotide
ccuguuucgauccgugugu

SEQ ID NO: 1774620 - RNA, 19 nt, Artificial Sequence
  Description of Artificial Sequence: Synthetic oligonucleotide
auccagucauugaccugcu

SEQ ID NO: 1774621 - RNA, 19 nt, Artificial Sequence
  Description of Artificial Sequence: Synthetic oligonucleotide
gcacaguuccaggcccugg

SEQ ID NO: 1774622 - RNA, 19 nt, Artificial Sequence
  Description of Artificial Sequence: Synthetic oligonucleotide
ccucaaccaaggcccucgg

SEQ ID NO: 1774623 - RNA, 19 nt, Artificial Sequence
  Description of Artificial Sequence: Synthetic oligonucleotide
ccgucccagagccucgggc

SEQ ID NO: 1774624 - RNA, 19 nt, Artificial Sequence
  Description of Artificial Sequence: Synthetic oligonucleotide
ccagucugagcugggucag

SEQ ID NO: 1774625 - RNA, 19 nt, Artificial Sequence
  Description of Artificial Sequence: Synthetic oligonucleotide
ggcgucaaucaccaccagu

SEQ ID NO: 1774626 - RNA, 19 nt, Artificial Sequence
  Description of Artificial Sequence: Synthetic oligonucleotide
cgccugcuugcacaguucc

SEQ ID NO: 1774627 - RNA, 19 nt, Artificial Sequence
  Description of Artificial Sequence: Synthetic oligonucleotide
ccacgugguuucugagggc

SEQ ID NO: 1774628 - RNA, 19 nt, Artificial Sequence
  Description of Artificial Sequence: Synthetic oligonucleotide
cuuccucaaccaaggcccu

SEQ ID NO: 1774629 - RNA, 19 nt, Artificial Sequence
  Description of Artificial Sequence: Synthetic oligonucleotide
ggccaggagcuucucuguc

SEQ ID NO: 1774630 - RNA, 19 nt, Artificial Sequence
  Description of Artificial Sequence: Synthetic oligonucleotide
cugugccgccugcuugcac

SEQ ID NO: 1774631 - RNA, 19 nt, Artificial Sequence
  Description of Artificial Sequence: Synthetic oligonucleotide
ggaacgggcucagcuucug

SEQ ID NO: 1774632 - RNA, 19 nt, Artificial Sequence
  Description of Artificial Sequence: Synthetic oligonucleotide
gggaaccccgugucaccug

SEQ ID NO: 1774633 - RNA, 19 nt, Artificial Sequence
  Description of Artificial Sequence: Synthetic oligonucleotide
uccuggcgucaaucaccac

SEQ ID NO: 1774634 - RNA, 19 nt, Artificial Sequence
  Description of Artificial Sequence: Synthetic oligonucleotide
cucggaucucccuggucgu

SEQ ID NO: 1774635 - RNA, 19 nt, Artificial Sequence
  Description of Artificial Sequence: Synthetic oligonucleotide
gguaguaggccagugccuu

SEQ ID NO: 1774636 - RNA, 19 nt, Artificial Sequence
  Description of Artificial Sequence: Synthetic oligonucleotide
ucggaucucccuggucguu

SEQ ID NO: 1774637 - RNA, 19 nt, Artificial Sequence
  Description of Artificial Sequence: Synthetic oligonucleotide
ccaccuggacagguagugc

SEQ ID NO: 1774638 - RNA, 19 nt, Artificial Sequence
  Description of Artificial Sequence: Synthetic oligonucleotide
cagcagaccugggucccuc

SEQ ID NO: 1774639 - RNA, 19 nt, Artificial Sequence
  Description of Artificial Sequence: Synthetic oligonucleotide
ggaagccugcagcagggau

SEQ ID NO: 1774640 - RNA, 19 nt, Artificial Sequence
  Description of Artificial Sequence: Synthetic oligonucleotide
cgccauguagaaguguguc

SEQ ID NO: 1774641 - RNA, 19 nt, Artificial Sequence
  Description of Artificial Sequence: Synthetic oligonucleotide
cugcggcuucagucagaug

SEQ ID NO: 1774642 - RNA, 19 nt, Artificial Sequence
  Description of Artificial Sequence: Synthetic oligonucleotide
ccaaggcccucggaucucc

SEQ ID NO: 1774643 - RNA, 19 nt, Artificial Sequence
  Description of Artificial Sequence: Synthetic oligonucleotide
agguaacaguggaggcgga

SEQ ID NO: 1774644 - RNA, 19 nt, Artificial Sequence
  Description of Artificial Sequence: Synthetic oligonucleotide
ggcuccugacaucaggguu

SEQ ID NO: 1774645 - RNA, 19 nt, Artificial Sequence
  Description of Artificial Sequence: Synthetic oligonucleotide
caccaccaguagcccuuug

SEQ ID NO: 1774646 - RNA, 19 nt, Artificial Sequence
  Description of Artificial Sequence: Synthetic oligonucleotide
gaccugcuggauggcagcu

SEQ ID NO: 1774647 - RNA, 19 nt, Artificial Sequence
  Description of Artificial Sequence: Synthetic oligonucleotide
uccugacaucaggguuggc

SEQ ID NO: 1774648 - RNA, 19 nt, Artificial Sequence
  Description of Artificial Sequence: Synthetic oligonucleotide
cgucccagagccucgggca

SEQ ID NO: 1774649 - RNA, 19 nt, Artificial Sequence
  Description of Artificial Sequence: Synthetic oligonucleotide
cacguggaacccggacauc

SEQ ID NO: 1774650 - RNA, 19 nt, Artificial Sequence
  Description of Artificial Sequence: Synthetic oligonucleotide
cuucagucagauggcuccu

SEQ ID NO: 1774651 - RNA, 19 nt, Artificial Sequence
  Description of Artificial Sequence: Synthetic oligonucleotide
ggcaccuggcagccuccug

SEQ ID NO: 1774652 - RNA, 19 nt, Artificial Sequence
  Description of Artificial Sequence: Synthetic oligonucleotide
ccuggcgguacugggccgc

SEQ ID NO: 1774653 - RNA, 19 nt, Artificial Sequence
  Description of Artificial Sequence: Synthetic oligonucleotide
gguggcggcgaaggcuacc

SEQ ID NO: 1774654 - RNA, 19 nt, Artificial Sequence
  Description of Artificial Sequence: Synthetic oligonucleotide
acgcagugaccaggacaug

SEQ ID NO: 1774655 - RNA, 19 nt, Artificial Sequence
  Description of Artificial Sequence: Synthetic oligonucleotide
cccuuuccuggcgucaauc

SEQ ID NO: 1774656 - RNA, 19 nt, Artificial Sequence
  Description of Artificial Sequence: Synthetic oligonucleotide
cuccaccuggacagguagu

SEQ ID NO: 1774657 - RNA, 19 nt, Artificial Sequence
  Description of Artificial Sequence: Synthetic oligonucleotide
gcgcugaccagagcaggac

SEQ ID NO: 1774658 - RNA, 19 nt, Artificial Sequence
  Description of Artificial Sequence: Synthetic oligonucleotide
gccuucagcgaggucagua

SEQ ID NO: 1774659 - RNA, 19 nt, Artificial Sequence
  Description of Artificial Sequence: Synthetic oligonucleotide
ggucagugcgcugccucuc

SEQ ID NO: 1774660 - RNA, 19 nt, Artificial Sequence
  Description of Artificial Sequence: Synthetic oligonucleotide
accuccaccuggacaggua

SEQ ID NO: 1774661 - RNA, 19 nt, Artificial Sequence
  Description of Artificial Sequence: Synthetic oligonucleotide
gcugcaaccuggccagagu

SEQ ID NO: 1774662 - RNA, 19 nt, Artificial Sequence
  Description of Artificial Sequence: Synthetic oligonucleotide
ggacacggagcuccagccu

SEQ ID NO: 1774663 - RNA, 19 nt, Artificial Sequence
  Description of Artificial Sequence: Synthetic oligonucleotide
gugugccaagugggcagca

SEQ ID NO: 1774664 - RNA, 19 nt, Artificial Sequence
  Description of Artificial Sequence: Synthetic oligonucleotide
agccuucggaggaggugau

SEQ ID NO: 1774665 - RNA, 19 nt, Artificial Sequence
  Description of Artificial Sequence: Synthetic oligonucleotide
uggcgguacugggccgcac

SEQ ID NO: 1774666 - RNA, 19 nt, Artificial Sequence
  Description of Artificial Sequence: Synthetic oligonucleotide
ggggcccuuuccuggcguc

SEQ ID NO: 1774667 - RNA, 19 nt, Artificial Sequence
  Description of Artificial Sequence: Synthetic oligonucleotide
ggguaguaggccagugccu

SEQ ID NO: 1774668 - RNA, 19 nt, Artificial Sequence
  Description of Artificial Sequence: Synthetic oligonucleotide
cccgugugcucugcagggc

SEQ ID NO: 1774669 - RNA, 19 nt, Artificial Sequence
  Description of Artificial Sequence: Synthetic oligonucleotide
ccacguggaacccggacau

SEQ ID NO: 1774670 - RNA, 19 nt, Artificial Sequence
  Description of Artificial Sequence: Synthetic oligonucleotide
ccgccugcuugcacaguuc

SEQ ID NO: 1774671 - RNA, 19 nt, Artificial Sequence
  Description of Artificial Sequence: Synthetic oligonucleotide
ucguugccccugggccucu

SEQ ID NO: 1774672 - RNA, 19 nt, Artificial Sequence
  Description of Artificial Sequence: Synthetic oligonucleotide
gccuggcgaaggucaguga

SEQ ID NO: 1774673 - RNA, 19 nt, Artificial Sequence
  Description of Artificial Sequence: Synthetic oligonucleotide
ccugacaguccacguggaa

SEQ ID NO: 1774674 - RNA, 19 nt, Artificial Sequence
  Description of Artificial Sequence: Synthetic oligonucleotide
cggaucucccuggucguug

SEQ ID NO: 1774675 - RNA, 19 nt, Artificial Sequence
  Description of Artificial Sequence: Synthetic oligonucleotide
gcccgucccagagccucgg

SEQ ID NO: 1774676 - RNA, 19 nt, Artificial Sequence
  Description of Artificial Sequence: Synthetic oligonucleotide
aggcggacacggagcucca

SEQ ID NO: 1774677 - RNA, 19 nt, Artificial Sequence
  Description of Artificial Sequence: Synthetic oligonucleotide
ccuucucgcuccauccagu

SEQ ID NO: 1774678 - RNA, 19 nt, Artificial Sequence
  Description of Artificial Sequence: Synthetic oligonucleotide
cgguacugggccgcacagg

SEQ ID NO: 1774679 - RNA, 19 nt, Artificial Sequence
  Description of Artificial Sequence: Synthetic oligonucleotide
gcauucagucugcucgcuu

SEQ ID NO: 1774680 - RNA, 19 nt, Artificial Sequence
  Description of Artificial Sequence: Synthetic oligonucleotide
ggaggugauuggacgcagu

SEQ ID NO: 1774681 - RNA, 19 nt, Artificial Sequence
  Description of Artificial Sequence: Synthetic oligonucleotide
cugggccgcacaggggcaa

SEQ ID NO: 1774682 - RNA, 19 nt, Artificial Sequence
  Description of Artificial Sequence: Synthetic oligonucleotide
cuggcgguacugggccgca

SEQ ID NO: 1774683 - RNA, 19 nt, Artificial Sequence
  Description of Artificial Sequence: Synthetic oligonucleotide
ggcccuuuccuggcgucaa

SEQ ID NO: 1774684 - RNA, 19 nt, Artificial Sequence
  Description of Artificial Sequence: Synthetic oligonucleotide
gggcccuuuccuggcguca

SEQ ID NO: 1774685 - RNA, 19 nt, Artificial Sequence
  Description of Artificial Sequence: Synthetic oligonucleotide
cccucggaucucccugguc

SEQ ID NO: 1774686 - RNA, 19 nt, Artificial Sequence
  Description of Artificial Sequence: Synthetic oligonucleotide
cucccuggucguugccccu

SEQ ID NO: 1774687 - RNA, 19 nt, Artificial Sequence
  Description of Artificial Sequence: Synthetic oligonucleotide
ccacagcccgugugcucug

SEQ ID NO: 1774688 - RNA, 19 nt, Artificial Sequence
  Description of Artificial Sequence: Synthetic oligonucleotide
caguagcccuuugacuuuu

SEQ ID NO: 1774689 - RNA, 19 nt, Artificial Sequence
  Description of Artificial Sequence: Synthetic oligonucleotide
cucgcuccauccagucauu

SEQ ID NO: 1774690 - RNA, 19 nt, Artificial Sequence
  Description of Artificial Sequence: Synthetic oligonucleotide
ccccgugucaccugccccu

SEQ ID NO: 1774691 - RNA, 19 nt, Artificial Sequence
  Description of Artificial Sequence: Synthetic oligonucleotide
gguuggcauucagucugcu

SEQ ID NO: 1774692 - RNA, 19 nt, Artificial Sequence
  Description of Artificial Sequence: Synthetic oligonucleotide
gcuggagaacggaugccuu

SEQ ID NO: 1774693 - RNA, 19 nt, Artificial Sequence
  Description of Artificial Sequence: Synthetic oligonucleotide
gcucccaacugugccgccu

SEQ ID NO: 1774694 - RNA, 19 nt, Artificial Sequence
  Description of Artificial Sequence: Synthetic oligonucleotide
guugccccugggccucuuu

SEQ ID NO: 1774695 - RNA, 19 nt, Artificial Sequence
  Description of Artificial Sequence: Synthetic oligonucleotide
gcauggguaguaggccagu

SEQ ID NO: 1774696 - RNA, 19 nt, Artificial Sequence
  Description of Artificial Sequence: Synthetic oligonucleotide
ccaggucugggaaccccgu

SEQ ID NO: 1774697 - RNA, 19 nt, Artificial Sequence
  Description of Artificial Sequence: Synthetic oligonucleotide
cggccgccauguagaagug

SEQ ID NO: 1774698 - RNA, 19 nt, Artificial Sequence
  Description of Artificial Sequence: Synthetic oligonucleotide
ccgugucaccugccccuuc

SEQ ID NO: 1774699 - RNA, 19 nt, Artificial Sequence
  Description of Artificial Sequence: Synthetic oligonucleotide
ggccgccauguagaagugu

SEQ ID NO: 1774700 - RNA, 19 nt, Artificial Sequence
  Description of Artificial Sequence: Synthetic oligonucleotide
cgauccgugugugccaagu

SEQ ID NO: 1774701 - RNA, 19 nt, Artificial Sequence
  Description of Artificial Sequence: Synthetic oligonucleotide
ggcuggagccacagcccgu

SEQ ID NO: 1774702 - RNA, 19 nt, Artificial Sequence
  Description of Artificial Sequence: Synthetic oligonucleotide
ggucguccacaagguugua

SEQ ID NO: 1774703 - RNA, 19 nt, Artificial Sequence
  Description of Artificial Sequence: Synthetic oligonucleotide
gcccucggaucucccuggu

SEQ ID NO: 1774704 - RNA, 19 nt, Artificial Sequence
  Description of Artificial Sequence: Synthetic oligonucleotide
gccucucggccgccaugua

SEQ ID NO: 1774705 - RNA, 19 nt, Artificial Sequence
  Description of Artificial Sequence: Synthetic oligonucleotide
cgugguuucugagggccuu

SEQ ID NO: 1774706 - RNA, 19 nt, Artificial Sequence
  Description of Artificial Sequence: Synthetic oligonucleotide
gccuucggaggaggugauu

SEQ ID NO: 1774707 - RNA, 19 nt, Artificial Sequence
  Description of Artificial Sequence: Synthetic oligonucleotide
cccgugucaccugccccuu

SEQ ID NO: 1774708 - RNA, 19 nt, Artificial Sequence
  Description of Artificial Sequence: Synthetic oligonucleotide
aguacaugcacucaaaggc

SEQ ID NO: 1774709 - RNA, 19 nt, Artificial Sequence
  Description of Artificial Sequence: Synthetic oligonucleotide
aagacuuugacuccugugc

SEQ ID NO: 1774710 - RNA, 19 nt, Artificial Sequence
  Description of Artificial Sequence: Synthetic oligonucleotide
ucuacuguaugcuugaagg

SEQ ID NO: 1774711 - RNA, 19 nt, Artificial Sequence
  Description of Artificial Sequence: Synthetic oligonucleotide
auagaauccaugcugggac

SEQ ID NO: 1774712 - RNA, 19 nt, Artificial Sequence
  Description of Artificial Sequence: Synthetic oligonucleotide
gaugucauccaacaggucc

SEQ ID NO: 1774713 - RNA, 19 nt, Artificial Sequence
  Description of Artificial Sequence: Synthetic oligonucleotide
uccagcaucgaguacaugc

SEQ ID NO: 1774714 - RNA, 19 nt, Artificial Sequence
  Description of Artificial Sequence: Synthetic oligonucleotide
ugaguucuggguuggaucg

SEQ ID NO: 1774715 - RNA, 19 nt, Artificial Sequence
  Description of Artificial Sequence: Synthetic oligonucleotide
uucagaaacucgcagacgu

SEQ ID NO: 1774716 - RNA, 19 nt, Artificial Sequence
  Description of Artificial Sequence: Synthetic oligonucleotide
guuauaaacaggugcagug

SEQ ID NO: 1774717 - RNA, 19 nt, Artificial Sequence
  Description of Artificial Sequence: Synthetic oligonucleotide
uugaguggcuccaugagcc

SEQ ID NO: 1774718 - RNA, 19 nt, Artificial Sequence
  Description of Artificial Sequence: Synthetic oligonucleotide
ucgagacaugacuagaggg

SEQ ID NO: 1774719 - RNA, 19 nt, Artificial Sequence
  Description of Artificial Sequence: Synthetic oligonucleotide
agcugaguuccauagaauc

SEQ ID NO: 1774720 - RNA, 19 nt, Artificial Sequence
  Description of Artificial Sequence: Synthetic oligonucleotide
cugaguugaagaaagugag

SEQ ID NO: 1774721 - RNA, 19 nt, Artificial Sequence
  Description of Artificial Sequence: Synthetic oligonucleotide
ugacuagagggaaugacug

SEQ ID NO: 1774722 - RNA, 19 nt, Artificial Sequence
  Description of Artificial Sequence: Synthetic oligonucleotide
uuuauugugcacagcugag

SEQ ID NO: 1774723 - RNA, 19 nt, Artificial Sequence
  Description of Artificial Sequence: Synthetic oligonucleotide
guacagguggcuuugagug

SEQ ID NO: 1774724 - RNA, 19 nt, Artificial Sequence
  Description of Artificial Sequence: Synthetic oligonucleotide
uuucgagacaugacuagag

SEQ ID NO: 1774725 - RNA, 19 nt, Artificial Sequence
  Description of Artificial Sequence: Synthetic oligonucleotide
uucgagacaugacuagagg

SEQ ID NO: 1774726 - RNA, 19 nt, Artificial Sequence
  Description of Artificial Sequence: Synthetic oligonucleotide
uuguguuggggacagcuag

SEQ ID NO: 1774727 - RNA, 19 nt, Artificial Sequence
  Description of Artificial Sequence: Synthetic oligonucleotide
ugagagggcagccacacac

SEQ ID NO: 1774728 - RNA, 19 nt, Artificial Sequence
  Description of Artificial Sequence: Synthetic oligonucleotide
ucuggguuggaucggaucu

SEQ ID NO: 1774729 - RNA, 19 nt, Artificial Sequence
  Description of Artificial Sequence: Synthetic oligonucleotide
caggaagucagacagguug

SEQ ID NO: 1774730 - RNA, 19 nt, Artificial Sequence
  Description of Artificial Sequence: Synthetic oligonucleotide
cagaguacuccacacacgg

SEQ ID NO: 1774731 - RNA, 19 nt, Artificial Sequence
  Description of Artificial Sequence: Synthetic oligonucleotide
uuugaguggcuccaugagc

SEQ ID NO: 1774732 - RNA, 19 nt, Artificial Sequence
  Description of Artificial Sequence: Synthetic oligonucleotide
uaaacaggugcagugagca

SEQ ID NO: 1774733 - RNA, 19 nt, Artificial Sequence
  Description of Artificial Sequence: Synthetic oligonucleotide
cucacauccucacugggcg

SEQ ID NO: 1774734 - RNA, 19 nt, Artificial Sequence
  Description of Artificial Sequence: Synthetic oligonucleotide
gacagugguggccaaagcc

SEQ ID NO: 1774735 - RNA, 19 nt, Artificial Sequence
  Description of Artificial Sequence: Synthetic oligonucleotide
cauucggaugucauagugg

SEQ ID NO: 1774736 - RNA, 19 nt, Artificial Sequence
  Description of Artificial Sequence: Synthetic oligonucleotide
acuguaugcuugaagggcc

SEQ ID NO: 1774737 - RNA, 19 nt, Artificial Sequence
  Description of Artificial Sequence: Synthetic oligonucleotide
uacuguaugcuugaagggc

SEQ ID NO: 1774738 - RNA, 19 nt, Artificial Sequence
  Description of Artificial Sequence: Synthetic oligonucleotide
aacucauccugcuuuucca

SEQ ID NO: 1774739 - RNA, 19 nt, Artificial Sequence
  Description of Artificial Sequence: Synthetic oligonucleotide
gagggaaugacugguacag

SEQ ID NO: 1774740 - RNA, 19 nt, Artificial Sequence
  Description of Artificial Sequence: Synthetic oligonucleotide
cacagaaccggcuuucacc

SEQ ID NO: 1774741 - RNA, 19 nt, Artificial Sequence
  Description of Artificial Sequence: Synthetic oligonucleotide
cucgcagacguccagcugg

SEQ ID NO: 1774742 - RNA, 19 nt, Artificial Sequence
  Description of Artificial Sequence: Synthetic oligonucleotide
ugaugguuuauugugcaca

SEQ ID NO: 1774743 - RNA, 19 nt, Artificial Sequence
  Description of Artificial Sequence: Synthetic oligonucleotide
aaacucgcagacguccagc

SEQ ID NO: 1774744 - RNA, 19 nt, Artificial Sequence
  Description of Artificial Sequence: Synthetic oligonucleotide
auaugggcggcgugcagcc

SEQ ID NO: 1774745 - RNA, 19 nt, Artificial Sequence
  Description of Artificial Sequence: Synthetic oligonucleotide
cuacuguaugcuugaaggg

SEQ ID NO: 1774746 - RNA, 19 nt, Artificial Sequence
  Description of Artificial Sequence: Synthetic oligonucleotide
uccugcuucacagaaccgg

SEQ ID NO: 1774747 - RNA, 19 nt, Artificial Sequence
  Description of Artificial Sequence: Synthetic oligonucleotide
cucagaguacuccacacac

SEQ ID NO: 1774748 - RNA, 19 nt, Artificial Sequence
  Description of Artificial Sequence: Synthetic oligonucleotide
uggaugcucucgaagagga

SEQ ID NO: 1774749 - RNA, 19 nt, Artificial Sequence
  Description of Artificial Sequence: Synthetic oligonucleotide
agcuagcugaguuccauag

SEQ ID NO: 1774750 - RNA, 19 nt, Artificial Sequence
  Description of Artificial Sequence: Synthetic oligonucleotide
agaaagugaguguggcccg

SEQ ID NO: 1774751 - RNA, 19 nt, Artificial Sequence
  Description of Artificial Sequence: Synthetic oligonucleotide
cauuagggcagccacugcc

SEQ ID NO: 1774752 - RNA, 19 nt, Artificial Sequence
  Description of Artificial Sequence: Synthetic oligonucleotide
agaagucagccacacuggg

SEQ ID NO: 1774753 - RNA, 19 nt, Artificial Sequence
  Description of Artificial Sequence: Synthetic oligonucleotide
gaagaaagugaguguggcc

SEQ ID NO: 1774754 - RNA, 19 nt, Artificial Sequence
  Description of Artificial Sequence: Synthetic oligonucleotide
gacuagagggaaugacugg

SEQ ID NO: 1774755 - RNA, 19 nt, Artificial Sequence
  Description of Artificial Sequence: Synthetic oligonucleotide
agugagcaggcuaaugagc

SEQ ID NO: 1774756 - RNA, 19 nt, Artificial Sequence
  Description of Artificial Sequence: Synthetic oligonucleotide
aaggcugccuuccuuacau

SEQ ID NO: 1774757 - RNA, 19 nt, Artificial Sequence
  Description of Artificial Sequence: Synthetic oligonucleotide
guuggggacagcuagcuga

SEQ ID NO: 1774758 - RNA, 19 nt, Artificial Sequence
  Description of Artificial Sequence: Synthetic oligonucleotide
cugguuauaaacaggugca

SEQ ID NO: 1774759 - RNA, 19 nt, Artificial Sequence
  Description of Artificial Sequence: Synthetic oligonucleotide
ucuuccguaccucaggguu

SEQ ID NO: 1774760 - RNA, 19 nt, Artificial Sequence
  Description of Artificial Sequence: Synthetic oligonucleotide
aaggcacgggucuucagcu

SEQ ID NO: 1774761 - RNA, 19 nt, Artificial Sequence
  Description of Artificial Sequence: Synthetic oligonucleotide
guagaggagggguaggaug

SEQ ID NO: 1774762 - RNA, 19 nt, Artificial Sequence
  Description of Artificial Sequence: Synthetic oligonucleotide
gacaugacuagagggaaug

SEQ ID NO: 1774763 - RNA, 19 nt, Artificial Sequence
  Description of Artificial Sequence: Synthetic oligonucleotide
caggcuaaugagcucagag

SEQ ID NO: 1774764 - RNA, 19 nt, Artificial Sequence
  Description of Artificial Sequence: Synthetic oligonucleotide
ugaaggucagcauucggau

SEQ ID NO: 1774765 - RNA, 19 nt, Artificial Sequence
  Description of Artificial Sequence: Synthetic oligonucleotide
uacauccagcccaucaucu

SEQ ID NO: 1774766 - RNA, 19 nt, Artificial Sequence
  Description of Artificial Sequence: Synthetic oligonucleotide
aucugugccagcaggaagg

SEQ ID NO: 1774767 - RNA, 19 nt, Artificial Sequence
  Description of Artificial Sequence: Synthetic oligonucleotide
aucuacuguaugcuugaag

SEQ ID NO: 1774768 - RNA, 19 nt, Artificial Sequence
  Description of Artificial Sequence: Synthetic oligonucleotide
ugaguugaagaaagugagu

SEQ ID NO: 1774769 - RNA, 19 nt, Artificial Sequence
  Description of Artificial Sequence: Synthetic oligonucleotide
ugacuccugugcuugagug

SEQ ID NO: 1774770 - RNA, 19 nt, Artificial Sequence
  Description of Artificial Sequence: Synthetic oligonucleotide
guuggaucggaucugggca

SEQ ID NO: 1774771 - RNA, 19 nt, Artificial Sequence
  Description of Artificial Sequence: Synthetic oligonucleotide
aguacagguggcuuugagu

SEQ ID NO: 1774772 - RNA, 19 nt, Artificial Sequence
  Description of Artificial Sequence: Synthetic oligonucleotide
augccaagacuuugacucc

SEQ ID NO: 1774773 - RNA, 19 nt, Artificial Sequence
  Description of Artificial Sequence: Synthetic oligonucleotide
ucggaugaggucccugcgg

SEQ ID NO: 1774774 - RNA, 19 nt, Artificial Sequence
  Description of Artificial Sequence: Synthetic oligonucleotide
ugguucagaaacucgcaga

SEQ ID NO: 1774775 - RNA, 19 nt, Artificial Sequence
  Description of Artificial Sequence: Synthetic oligonucleotide
uagagggaaugacugguac

SEQ ID NO: 1774776 - RNA, 19 nt, Artificial Sequence
  Description of Artificial Sequence: Synthetic oligonucleotide
acuccugugcuugaguggg

SEQ ID NO: 1774777 - RNA, 19 nt, Artificial Sequence
  Description of Artificial Sequence: Synthetic oligonucleotide
auuagggcagccacugccc

SEQ ID NO: 1774778 - RNA, 19 nt, Artificial Sequence
  Description of Artificial Sequence: Synthetic oligonucleotide
uuagggcagccacugcccg

SEQ ID NO: 1774779 - RNA, 19 nt, Artificial Sequence
  Description of Artificial Sequence: Synthetic oligonucleotide
agaaccggcuuucaccuug

SEQ ID NO: 1774780 - RNA, 19 nt, Artificial Sequence
  Description of Artificial Sequence: Synthetic oligonucleotide
guacuccacacacggaggg

SEQ ID NO: 1774781 - RNA, 19 nt, Artificial Sequence
  Description of Artificial Sequence: Synthetic oligonucleotide
uccauccucagccugguua

SEQ ID NO: 1774782 - RNA, 19 nt, Artificial Sequence
  Description of Artificial Sequence: Synthetic oligonucleotide
uuggaucggaucugggcag

SEQ ID NO: 1774783 - RNA, 19 nt, Artificial Sequence
  Description of Artificial Sequence: Synthetic oligonucleotide
gagggguaggaugucaucc

SEQ ID NO: 1774784 - RNA, 19 nt, Artificial Sequence
  Description of Artificial Sequence: Synthetic oligonucleotide
cuuugaguggcuccaugag

SEQ ID NO: 1774785 - RNA, 19 nt, Artificial Sequence
  Description of Artificial Sequence: Synthetic oligonucleotide
uuuucgagacaugacuaga

SEQ ID NO: 1774786 - RNA, 19 nt, Artificial Sequence
  Description of Artificial Sequence: Synthetic oligonucleotide
caaaggguggccagccugg

SEQ ID NO: 1774787 - RNA, 19 nt, Artificial Sequence
  Description of Artificial Sequence: Synthetic oligonucleotide
gacuccugugcuugagugg

SEQ ID NO: 1774788 - RNA, 19 nt, Artificial Sequence
  Description of Artificial Sequence: Synthetic oligonucleotide
aaacaggugcagugagcag

SEQ ID NO: 1774789 - RNA, 19 nt, Artificial Sequence
  Description of Artificial Sequence: Synthetic oligonucleotide
ugaugaaggucagcauucg

SEQ ID NO: 1774790 - RNA, 19 nt, Artificial Sequence
  Description of Artificial Sequence: Synthetic oligonucleotide
accagugaugguuuauugu

SEQ ID NO: 1774791 - RNA, 19 nt, Artificial Sequence
  Description of Artificial Sequence: Synthetic oligonucleotide
aggcuaaugagcucagagu

SEQ ID NO: 1774792 - RNA, 19 nt, Artificial Sequence
  Description of Artificial Sequence: Synthetic oligonucleotide
ucucggaugaggucccugc

SEQ ID NO: 1774793 - RNA, 19 nt, Artificial Sequence
  Description of Artificial Sequence: Synthetic oligonucleotide
gauaggaaugccaagacuu

SEQ ID NO: 1774794 - RNA, 19 nt, Artificial Sequence
  Description of Artificial Sequence: Synthetic oligonucleotide
aacucgcagacguccagcu

SEQ ID NO: 1774795 - RNA, 19 nt, Artificial Sequence
  Description of Artificial Sequence: Synthetic oligonucleotide
ucaaaggcugccuuccuua

SEQ ID NO: 1774796 - RNA, 19 nt, Artificial Sequence
  Description of Artificial Sequence: Synthetic oligonucleotide
ucauccaacaggucccgga

SEQ ID NO: 1774797 - RNA, 19 nt, Artificial Sequence
  Description of Artificial Sequence: Synthetic oligonucleotide
uguguuggggacagcuagc

SEQ ID NO: 1774798 - RNA, 19 nt, Artificial Sequence
  Description of Artificial Sequence: Synthetic oligonucleotide
cagcauucggaugucauag

SEQ ID NO: 1774799 - RNA, 19 nt, Artificial Sequence
  Description of Artificial Sequence: Synthetic oligonucleotide
aggguuggucauuagggca

SEQ ID NO: 1774800 - RNA, 19 nt, Artificial Sequence
  Description of Artificial Sequence: Synthetic oligonucleotide
agacuuugacuccugugcu

SEQ ID NO: 1774801 - RNA, 19 nt, Artificial Sequence
  Description of Artificial Sequence: Synthetic oligonucleotide
cauagugguccuucagccc

SEQ ID NO: 1774802 - RNA, 19 nt, Artificial Sequence
  Description of Artificial Sequence: Synthetic oligonucleotide
ccggcuuucaccuuggcag

SEQ ID NO: 1774803 - RNA, 19 nt, Artificial Sequence
  Description of Artificial Sequence: Synthetic oligonucleotide
aggggcugagaguaggaag

SEQ ID NO: 1774804 - RNA, 19 nt, Artificial Sequence
  Description of Artificial Sequence: Synthetic oligonucleotide
agcugaguugaagaaagug

SEQ ID NO: 1774805 - RNA, 19 nt, Artificial Sequence
  Description of Artificial Sequence: Synthetic oligonucleotide
auugugcacagcugaguug

SEQ ID NO: 1774806 - RNA, 19 nt, Artificial Sequence
  Description of Artificial Sequence: Synthetic oligonucleotide
uagaauccaugcugggacc

SEQ ID NO: 1774807 - RNA, 19 nt, Artificial Sequence
  Description of Artificial Sequence: Synthetic oligonucleotide
uggcaucacagaccaggcg

SEQ ID NO: 1774808 - RNA, 19 nt, Artificial Sequence
  Description of Artificial Sequence: Synthetic oligonucleotide
acuagagggaaugacuggu

SEQ ID NO: 1774809 - RNA, 19 nt, Artificial Sequence
  Description of Artificial Sequence: Synthetic oligonucleotide
cagcccauccuccacgugg

SEQ ID NO: 1774810 - RNA, 19 nt, Artificial Sequence
  Description of Artificial Sequence: Synthetic oligonucleotide
agacagguugccagcaccc

SEQ ID NO: 1774811 - RNA, 19 nt, Artificial Sequence
  Description of Artificial Sequence: Synthetic oligonucleotide
gaaacucgcagacguccag

SEQ ID NO: 1774812 - RNA, 19 nt, Artificial Sequence
  Description of Artificial Sequence: Synthetic oligonucleotide
gaaggucagcauucggaug

SEQ ID NO: 1774813 - RNA, 19 nt, Artificial Sequence
  Description of Artificial Sequence: Synthetic oligonucleotide
ucgaagaggauggugaguu

SEQ ID NO: 1774814 - RNA, 19 nt, Artificial Sequence
  Description of Artificial Sequence: Synthetic oligonucleotide
gguucagaaacucgcagac

SEQ ID NO: 1774815 - RNA, 19 nt, Artificial Sequence
  Description of Artificial Sequence: Synthetic oligonucleotide
acuccacacacggagggcg

SEQ ID NO: 1774816 - RNA, 19 nt, Artificial Sequence
  Description of Artificial Sequence: Synthetic oligonucleotide
cuagcugaguuccauagaa

SEQ ID NO: 1774817 - RNA, 19 nt, Artificial Sequence
  Description of Artificial Sequence: Synthetic oligonucleotide
aagcccguggggugggagg

SEQ ID NO: 1774818 - RNA, 19 nt, Artificial Sequence
  Description of Artificial Sequence: Synthetic oligonucleotide
cacgugguucagaaacucg

SEQ ID NO: 1774819 - RNA, 19 nt, Artificial Sequence
  Description of Artificial Sequence: Synthetic oligonucleotide
caggguuggucauuagggc

SEQ ID NO: 1774820 - RNA, 19 nt, Artificial Sequence
  Description of Artificial Sequence: Synthetic oligonucleotide
aucgaguacaugcacucaa

SEQ ID NO: 1774821 - RNA, 19 nt, Artificial Sequence
  Description of Artificial Sequence: Synthetic oligonucleotide
aggcauaugggcggcgugc

SEQ ID NO: 1774822 - RNA, 19 nt, Artificial Sequence
  Description of Artificial Sequence: Synthetic oligonucleotide
ucgaucugugccagcagga

SEQ ID NO: 1774823 - RNA, 19 nt, Artificial Sequence
  Description of Artificial Sequence: Synthetic oligonucleotide
augacuagagggaaugacu

SEQ ID NO: 1774824 - RNA, 19 nt, Artificial Sequence
  Description of Artificial Sequence: Synthetic oligonucleotide
cacggcccaaggcauaugg

SEQ ID NO: 1774825 - RNA, 19 nt, Artificial Sequence
  Description of Artificial Sequence: Synthetic oligonucleotide
augaaggucagcauucgga

SEQ ID NO: 1774826 - RNA, 19 nt, Artificial Sequence
  Description of Artificial Sequence: Synthetic oligonucleotide
uccaugcugggaccagagg

SEQ ID NO: 1774827 - RNA, 19 nt, Artificial Sequence
  Description of Artificial Sequence: Synthetic oligonucleotide
caugacuagagggaaugac

SEQ ID NO: 1774828 - RNA, 19 nt, Artificial Sequence
  Description of Artificial Sequence: Synthetic oligonucleotide
ugagaguaggaaggcacug

SEQ ID NO: 1774829 - RNA, 19 nt, Artificial Sequence
  Description of Artificial Sequence: Synthetic oligonucleotide
uuauugugcacagcugagu

SEQ ID NO: 1774830 - RNA, 19 nt, Artificial Sequence
  Description of Artificial Sequence: Synthetic oligonucleotide
gucauuagggcagccacug

SEQ ID NO: 1774831 - RNA, 19 nt, Artificial Sequence
  Description of Artificial Sequence: Synthetic oligonucleotide
uuccguaccucaggguugg

SEQ ID NO: 1774832 - RNA, 19 nt, Artificial Sequence
  Description of Artificial Sequence: Synthetic oligonucleotide
ucuccuuguagaggagggg

SEQ ID NO: 1774833 - RNA, 19 nt, Artificial Sequence
  Description of Artificial Sequence: Synthetic oligonucleotide
uuugacuccugugcuugag

SEQ ID NO: 1774834 - RNA, 19 nt, Artificial Sequence
  Description of Artificial Sequence: Synthetic oligonucleotide
aaggcauaugggcggcgug

SEQ ID NO: 1774835 - RNA, 19 nt, Artificial Sequence
  Description of Artificial Sequence: Synthetic oligonucleotide
cucagccugguuauaaaca

SEQ ID NO: 1774836 - RNA, 19 nt, Artificial Sequence
  Description of Artificial Sequence: Synthetic oligonucleotide
cuaagugcaugcagcagca

SEQ ID NO: 1774837 - RNA, 19 nt, Artificial Sequence
  Description of Artificial Sequence: Synthetic oligonucleotide
cccaucaucuacuguaugc

SEQ ID NO: 1774838 - RNA, 19 nt, Artificial Sequence
  Description of Artificial Sequence: Synthetic oligonucleotide
caccucucggaugaggucc

SEQ ID NO: 1774839 - RNA, 19 nt, Artificial Sequence
  Description of Artificial Sequence: Synthetic oligonucleotide
cugggcagagaagucagcc

SEQ ID NO: 1774840 - RNA, 19 nt, Artificial Sequence
  Description of Artificial Sequence: Synthetic oligonucleotide
ucgaguacaugcacucaaa

SEQ ID NO: 1774841 - RNA, 19 nt, Artificial Sequence
  Description of Artificial Sequence: Synthetic oligonucleotide
uguaggacaggugcaggac

SEQ ID NO: 1774842 - RNA, 19 nt, Artificial Sequence
  Description of Artificial Sequence: Synthetic oligonucleotide
gaaagugaguguggcccgg

SEQ ID NO: 1774843 - RNA, 19 nt, Artificial Sequence
  Description of Artificial Sequence: Synthetic oligonucleotide
uggguuggaucggaucugg

SEQ ID NO: 1774844 - RNA, 19 nt, Artificial Sequence
  Description of Artificial Sequence: Synthetic oligonucleotide
cuguaugcuugaagggccc

SEQ ID NO: 1774845 - RNA, 19 nt, Artificial Sequence
  Description of Artificial Sequence: Synthetic oligonucleotide
cacacaccgggccagugag

SEQ ID NO: 1774846 - RNA, 19 nt, Artificial Sequence
  Description of Artificial Sequence: Synthetic oligonucleotide
gguuggaucggaucugggc

SEQ ID NO: 1774847 - RNA, 19 nt, Artificial Sequence
  Description of Artificial Sequence: Synthetic oligonucleotide
ucagcauucggaugucaua

SEQ ID NO: 1774848 - RNA, 19 nt, Artificial Sequence
  Description of Artificial Sequence: Synthetic oligonucleotide
guucagaaacucgcagacg

SEQ ID NO: 1774849 - RNA, 19 nt, Artificial Sequence
  Description of Artificial Sequence: Synthetic oligonucleotide
uugacuccugugcuugagu

SEQ ID NO: 1774850 - RNA, 19 nt, Artificial Sequence
  Description of Artificial Sequence: Synthetic oligonucleotide
cugcccgcauugcugagcg

SEQ ID NO: 1774851 - RNA, 19 nt, Artificial Sequence
  Description of Artificial Sequence: Synthetic oligonucleotide
aaccggcuuucaccuuggc

SEQ ID NO: 1774852 - RNA, 19 nt, Artificial Sequence
  Description of Artificial Sequence: Synthetic oligonucleotide
cuuccguaccucaggguug

SEQ ID NO: 1774853 - RNA, 19 nt, Artificial Sequence
  Description of Artificial Sequence: Synthetic oligonucleotide
uguuggggacagcuagcug

SEQ ID NO: 1774854 - RNA, 19 nt, Artificial Sequence
  Description of Artificial Sequence: Synthetic oligonucleotide
ugaguuccauagaauccau

SEQ ID NO: 1774855 - RNA, 19 nt, Artificial Sequence
  Description of Artificial Sequence: Synthetic oligonucleotide
ucauuagggcagccacugc

SEQ ID NO: 1774856 - RNA, 19 nt, Artificial Sequence
  Description of Artificial Sequence: Synthetic oligonucleotide
ucccugcggaucuuggucu

SEQ ID NO: 1774857 - RNA, 19 nt, Artificial Sequence
  Description of Artificial Sequence: Synthetic oligonucleotide
cugacucggaaggacagug

SEQ ID NO: 1774858 - RNA, 19 nt, Artificial Sequence
  Description of Artificial Sequence: Synthetic oligonucleotide
agggguaggaugucaucca

SEQ ID NO: 1774859 - RNA, 19 nt, Artificial Sequence
  Description of Artificial Sequence: Synthetic oligonucleotide
gagcaggcuaaugagcuca

SEQ ID NO: 1774860 - RNA, 19 nt, Artificial Sequence
  Description of Artificial Sequence: Synthetic oligonucleotide
cagugauaggaaugccaag

SEQ ID NO: 1774861 - RNA, 19 nt, Artificial Sequence
  Description of Artificial Sequence: Synthetic oligonucleotide
ugcaggacaaaggguggcc

SEQ ID NO: 1774862 - RNA, 19 nt, Artificial Sequence
  Description of Artificial Sequence: Synthetic oligonucleotide
uucuggguuggaucggauc

SEQ ID NO: 1774863 - RNA, 19 nt, Artificial Sequence
  Description of Artificial Sequence: Synthetic oligonucleotide
gcauucggaugucauagug

SEQ ID NO: 1774864 - RNA, 19 nt, Artificial Sequence
  Description of Artificial Sequence: Synthetic oligonucleotide
gcugaguuccauagaaucc

SEQ ID NO: 1774865 - RNA, 19 nt, Artificial Sequence
  Description of Artificial Sequence: Synthetic oligonucleotide
ugcaugcagcagcagguau

SEQ ID NO: 1774866 - RNA, 19 nt, Artificial Sequence
  Description of Artificial Sequence: Synthetic oligonucleotide
acacuugcuugugcaggcc

SEQ ID NO: 1774867 - RNA, 19 nt, Artificial Sequence
  Description of Artificial Sequence: Synthetic oligonucleotide
aauccaugcugggaccaga

SEQ ID NO: 1774868 - RNA, 19 nt, Artificial Sequence
  Description of Artificial Sequence: Synthetic oligonucleotide
cauagaauccaugcuggga

SEQ ID NO: 1774869 - RNA, 19 nt, Artificial Sequence
  Description of Artificial Sequence: Synthetic oligonucleotide
cucggaugaggucccugcg

SEQ ID NO: 1774870 - RNA, 19 nt, Artificial Sequence
  Description of Artificial Sequence: Synthetic oligonucleotide
gaguggaacacuugcuugu

SEQ ID NO: 1774871 - RNA, 19 nt, Artificial Sequence
  Description of Artificial Sequence: Synthetic oligonucleotide
acugcccgcauugcugagc

SEQ ID NO: 1774872 - RNA, 19 nt, Artificial Sequence
  Description of Artificial Sequence: Synthetic oligonucleotide
aggcacugaggcugacucg

SEQ ID NO: 1774873 - RNA, 19 nt, Artificial Sequence
  Description of Artificial Sequence: Synthetic oligonucleotide
uccuuguagaggaggggua

SEQ ID NO: 1774874 - RNA, 19 nt, Artificial Sequence
  Description of Artificial Sequence: Synthetic oligonucleotide
caccuuggcaguacaggug

SEQ ID NO: 1774875 - RNA, 19 nt, Artificial Sequence
  Description of Artificial Sequence: Synthetic oligonucleotide
ggcugccuuccuuacaucc

SEQ ID NO: 1774876 - RNA, 19 nt, Artificial Sequence
  Description of Artificial Sequence: Synthetic oligonucleotide
uguaugcuugaagggcccc

SEQ ID NO: 1774877 - RNA, 19 nt, Artificial Sequence
  Description of Artificial Sequence: Synthetic oligonucleotide
uguggcccggucccuaagu

SEQ ID NO: 1774878 - RNA, 19 nt, Artificial Sequence
  Description of Artificial Sequence: Synthetic oligonucleotide
ggucccuaagugcaugcag

SEQ ID NO: 1774879 - RNA, 19 nt, Artificial Sequence
  Description of Artificial Sequence: Synthetic oligonucleotide
aggaaugccaagacuuuga

SEQ ID NO: 1774880 - RNA, 19 nt, Artificial Sequence
  Description of Artificial Sequence: Synthetic oligonucleotide
gcgugcagcccucacaucc

SEQ ID NO: 1774881 - RNA, 19 nt, Artificial Sequence
  Description of Artificial Sequence: Synthetic oligonucleotide
caugcacucaaaggcugcc

SEQ ID NO: 1774882 - RNA, 19 nt, Artificial Sequence
  Description of Artificial Sequence: Synthetic oligonucleotide
caggccggguccuccaucc

SEQ ID NO: 1774883 - RNA, 19 nt, Artificial Sequence
  Description of Artificial Sequence: Synthetic oligonucleotide
ugaagggccccaucuccac

SEQ ID NO: 1774884 - RNA, 19 nt, Artificial Sequence
  Description of Artificial Sequence: Synthetic oligonucleotide
gcucuuccguaccucaggg

SEQ ID NO: 1774885 - RNA, 19 nt, Artificial Sequence
  Description of Artificial Sequence: Synthetic oligonucleotide
ugcuugugcaggccggguc

SEQ ID NO: 1774886 - RNA, 19 nt, Artificial Sequence
  Description of Artificial Sequence: Synthetic oligonucleotide
gugaugguuuauugugcac

SEQ ID NO: 1774887 - RNA, 19 nt, Artificial Sequence
  Description of Artificial Sequence: Synthetic oligonucleotide
agcagguauugucgccggg

SEQ ID NO: 1774888 - RNA, 19 nt, Artificial Sequence
  Description of Artificial Sequence: Synthetic oligonucleotide
cagaccaggcggcuggcag

SEQ ID NO: 1774889 - RNA, 19 nt, Artificial Sequence
  Description of Artificial Sequence: Synthetic oligonucleotide
gaaugccaagacuuugacu

SEQ ID NO: 1774890 - RNA, 19 nt, Artificial Sequence
  Description of Artificial Sequence: Synthetic oligonucleotide
accggcuuucaccuuggca

SEQ ID NO: 1774891 - RNA, 19 nt, Artificial Sequence
  Description of Artificial Sequence: Synthetic oligonucleotide
guggaacacuugcuugugc

SEQ ID NO: 1774892 - RNA, 19 nt, Artificial Sequence
  Description of Artificial Sequence: Synthetic oligonucleotide
aaagcccguggggugggag

SEQ ID NO: 1774893 - RNA, 19 nt, Artificial Sequence
  Description of Artificial Sequence: Synthetic oligonucleotide
agaauccaugcugggacca

SEQ ID NO: 1774894 - RNA, 19 nt, Artificial Sequence
  Description of Artificial Sequence: Synthetic oligonucleotide
uccaugagccgguccacuc

SEQ ID NO: 1774895 - RNA, 19 nt, Artificial Sequence
  Description of Artificial Sequence: Synthetic oligonucleotide
gagaguaggaaggcacuga

SEQ ID NO: 1774896 - RNA, 19 nt, Artificial Sequence
  Description of Artificial Sequence: Synthetic oligonucleotide
agcaucgaguacaugcacu

SEQ ID NO: 1774897 - RNA, 19 nt, Artificial Sequence
  Description of Artificial Sequence: Synthetic oligonucleotide
uggcccggucccuaagugc

SEQ ID NO: 1774898 - RNA, 19 nt, Artificial Sequence
  Description of Artificial Sequence: Synthetic oligonucleotide
ggaaugccaagacuuugac

SEQ ID NO: 1774899 - RNA, 19 nt, Artificial Sequence
  Description of Artificial Sequence: Synthetic oligonucleotide
gguauugucgccgggguuc

SEQ ID NO: 1774900 - RNA, 19 nt, Artificial Sequence
  Description of Artificial Sequence: Synthetic oligonucleotide
cuugcuugugcaggccggg

SEQ ID NO: 1774901 - RNA, 19 nt, Artificial Sequence
  Description of Artificial Sequence: Synthetic oligonucleotide
gaauccaugcugggaccag

SEQ ID NO: 1774902 - RNA, 19 nt, Artificial Sequence
  Description of Artificial Sequence: Synthetic oligonucleotide
guauugucgccgggguucg

SEQ ID NO: 1774903 - RNA, 19 nt, Artificial Sequence
  Description of Artificial Sequence: Synthetic oligonucleotide
gcugagaguaggaaggcac

SEQ ID NO: 1774904 - RNA, 19 nt, Artificial Sequence
  Description of Artificial Sequence: Synthetic oligonucleotide
gcagcagguauugucgccg

SEQ ID NO: 1774905 - RNA, 19 nt, Artificial Sequence
  Description of Artificial Sequence: Synthetic oligonucleotide
ggcccaaggcauaugggcg

SEQ ID NO: 1774906 - RNA, 19 nt, Artificial Sequence
  Description of Artificial Sequence: Synthetic oligonucleotide
ggucccggaccagugaugg

SEQ ID NO: 1774907 - RNA, 19 nt, Artificial Sequence
  Description of Artificial Sequence: Synthetic oligonucleotide
gguggcuuugaguggcucc

SEQ ID NO: 1774908 - RNA, 19 nt, Artificial Sequence
  Description of Artificial Sequence: Synthetic oligonucleotide
caguacagguggcuuugag

SEQ ID NO: 1774909 - RNA, 19 nt, Artificial Sequence
  Description of Artificial Sequence: Synthetic oligonucleotide
gacucggaaggacaguggu

SEQ ID NO: 1774910 - RNA, 19 nt, Artificial Sequence
  Description of Artificial Sequence: Synthetic oligonucleotide
cuccacacacggagggcgg

SEQ ID NO: 1774911 - RNA, 19 nt, Artificial Sequence
  Description of Artificial Sequence: Synthetic oligonucleotide
augcuugaagggccccauc

SEQ ID NO: 1774912 - RNA, 19 nt, Artificial Sequence
  Description of Artificial Sequence: Synthetic oligonucleotide
gaagucagacagguugcca

SEQ ID NO: 1774913 - RNA, 19 nt, Artificial Sequence
  Description of Artificial Sequence: Synthetic oligonucleotide
ucgcagacguccagcuggc

SEQ ID NO: 1774914 - RNA, 19 nt, Artificial Sequence
  Description of Artificial Sequence: Synthetic oligonucleotide
ggacagcuagcugaguucc

SEQ ID NO: 1774915 - RNA, 19 nt, Artificial Sequence
  Description of Artificial Sequence: Synthetic oligonucleotide
uggcaguuccugcugccuc

SEQ ID NO: 1774916 - RNA, 19 nt, Artificial Sequence
  Description of Artificial Sequence: Synthetic oligonucleotide
cacaccgggccagugagug

SEQ ID NO: 1774917 - RNA, 19 nt, Artificial Sequence
  Description of Artificial Sequence: Synthetic oligonucleotide
agggaaugacugguacagg

SEQ ID NO: 1774918 - RNA, 19 nt, Artificial Sequence
  Description of Artificial Sequence: Synthetic oligonucleotide
ucggaaggacagugguggc

SEQ ID NO: 1774919 - RNA, 19 nt, Artificial Sequence
  Description of Artificial Sequence: Synthetic oligonucleotide
caugaugaaggucagcauu

SEQ ID NO: 1774920 - RNA, 19 nt, Artificial Sequence
  Description of Artificial Sequence: Synthetic oligonucleotide
ugggcgaccccaaggcuuc

SEQ ID NO: 1774921 - RNA, 19 nt, Artificial Sequence
  Description of Artificial Sequence: Synthetic oligonucleotide
uucggaugucauagugguc

SEQ ID NO: 1774922 - RNA, 19 nt, Artificial Sequence
  Description of Artificial Sequence: Synthetic oligonucleotide
gaguucuggguuggaucgg

SEQ ID NO: 1774923 - RNA, 19 nt, Artificial Sequence
  Description of Artificial Sequence: Synthetic oligonucleotide
gcaucgaguacaugcacuc

SEQ ID NO: 1774924 - RNA, 19 nt, Artificial Sequence
  Description of Artificial Sequence: Synthetic oligonucleotide
acauccucacugggcgacc

SEQ ID NO: 1774925 - RNA, 19 nt, Artificial Sequence
  Description of Artificial Sequence: Synthetic oligonucleotide
gcagguauugucgccgggg

SEQ ID NO: 1774926 - RNA, 19 nt, Artificial Sequence
  Description of Artificial Sequence: Synthetic oligonucleotide
cuccugcuucacagaaccg

SEQ ID NO: 1774927 - RNA, 19 nt, Artificial Sequence
  Description of Artificial Sequence: Synthetic oligonucleotide
uccacacacggagggcggg

SEQ ID NO: 1774928 - RNA, 19 nt, Artificial Sequence
  Description of Artificial Sequence: Synthetic oligonucleotide
ggucuccuuguagaggagg

SEQ ID NO: 1774929 - RNA, 19 nt, Artificial Sequence
  Description of Artificial Sequence: Synthetic oligonucleotide
cagcaucgaguacaugcac

SEQ ID NO: 1774930 - RNA, 19 nt, Artificial Sequence
  Description of Artificial Sequence: Synthetic oligonucleotide
gcccaaggcauaugggcgg

SEQ ID NO: 1774931 - RNA, 19 nt, Artificial Sequence
  Description of Artificial Sequence: Synthetic oligonucleotide
uacuccacacacggagggc

SEQ ID NO: 1774932 - RNA, 19 nt, Artificial Sequence
  Description of Artificial Sequence: Synthetic oligonucleotide
agaccaggcggcuggcagu

SEQ ID NO: 1774933 - RNA, 19 nt, Artificial Sequence
  Description of Artificial Sequence: Synthetic oligonucleotide
aguucuggguuggaucgga

SEQ ID NO: 1774934 - RNA, 19 nt, Artificial Sequence
  Description of Artificial Sequence: Synthetic oligonucleotide
augggcggcgugcagcccu

SEQ ID NO: 1774935 - RNA, 19 nt, Artificial Sequence
  Description of Artificial Sequence: Synthetic oligonucleotide
ccauagaauccaugcuggg

SEQ ID NO: 1774936 - RNA, 19 nt, Artificial Sequence
  Description of Artificial Sequence: Synthetic oligonucleotide
gugagcaggcuaaugagcu

SEQ ID NO: 1774937 - RNA, 19 nt, Artificial Sequence
  Description of Artificial Sequence: Synthetic oligonucleotide
ccucacauccucacugggc

SEQ ID NO: 1774938 - RNA, 19 nt, Artificial Sequence
  Description of Artificial Sequence: Synthetic oligonucleotide
ucccggaccagugaugguu

SEQ ID NO: 1774939 - RNA, 19 nt, Artificial Sequence
  Description of Artificial Sequence: Synthetic oligonucleotide
acugggcgaccccaaggcu

SEQ ID NO: 1774940 - RNA, 19 nt, Artificial Sequence
  Description of Artificial Sequence: Synthetic oligonucleotide
cagguugccagcacccaca

SEQ ID NO: 1774941 - RNA, 19 nt, Artificial Sequence
  Description of Artificial Sequence: Synthetic oligonucleotide
cacauccucacugggcgac

SEQ ID NO: 1774942 - RNA, 19 nt, Artificial Sequence
  Description of Artificial Sequence: Synthetic oligonucleotide
acaugacuagagggaauga

SEQ ID NO: 1774943 - RNA, 19 nt, Artificial Sequence
  Description of Artificial Sequence: Synthetic oligonucleotide
acagcuagcugaguuccau

SEQ ID NO: 1774944 - RNA, 19 nt, Artificial Sequence
  Description of Artificial Sequence: Synthetic oligonucleotide
acaccgggccagugagugg

SEQ ID NO: 1774945 - RNA, 19 nt, Artificial Sequence
  Description of Artificial Sequence: Synthetic oligonucleotide
cuuucaccuuggcaguaca

SEQ ID NO: 1774946 - RNA, 19 nt, Artificial Sequence
  Description of Artificial Sequence: Synthetic oligonucleotide
ugccuccugaggacaggca

SEQ ID NO: 1774947 - RNA, 19 nt, Artificial Sequence
  Description of Artificial Sequence: Synthetic oligonucleotide
acgggucuucagcucucuc

SEQ ID NO: 1774948 - RNA, 19 nt, Artificial Sequence
  Description of Artificial Sequence: Synthetic oligonucleotide
ccuuccuuacauccagccc

SEQ ID NO: 1774949 - RNA, 19 nt, Artificial Sequence
  Description of Artificial Sequence: Synthetic oligonucleotide
aucacagaccaggcggcug

SEQ ID NO: 1774950 - RNA, 19 nt, Artificial Sequence
  Description of Artificial Sequence: Synthetic oligonucleotide
gacugguacaggggcugag

SEQ ID NO: 1774951 - RNA, 19 nt, Artificial Sequence
  Description of Artificial Sequence: Synthetic oligonucleotide
cacuggggcucuuccguac

SEQ ID NO: 1774952 - RNA, 19 nt, Artificial Sequence
  Description of Artificial Sequence: Synthetic oligonucleotide
gcuaaugagcucagaguac

SEQ ID NO: 1774953 - RNA, 19 nt, Artificial Sequence
  Description of Artificial Sequence: Synthetic oligonucleotide
guggcccggucccuaagug

SEQ ID NO: 1774954 - RNA, 19 nt, Artificial Sequence
  Description of Artificial Sequence: Synthetic oligonucleotide
gggacagcuagcugaguuc

SEQ ID NO: 1774955 - RNA, 19 nt, Artificial Sequence
  Description of Artificial Sequence: Synthetic oligonucleotide
uggcuccaugagccggucc

SEQ ID NO: 1774956 - RNA, 19 nt, Artificial Sequence
  Description of Artificial Sequence: Synthetic oligonucleotide
cuagagggaaugacuggua

SEQ ID NO: 1774957 - RNA, 19 nt, Artificial Sequence
  Description of Artificial Sequence: Synthetic oligonucleotide
aggcuuccagaaggcacgg

SEQ ID NO: 1774958 - RNA, 19 nt, Artificial Sequence
  Description of Artificial Sequence: Synthetic oligonucleotide
cgaguacaugcacucaaag

SEQ ID NO: 1774959 - RNA, 19 nt, Artificial Sequence
  Description of Artificial Sequence: Synthetic oligonucleotide
uggaucggaucugggcaga

SEQ ID NO: 1774960 - RNA, 19 nt, Artificial Sequence
  Description of Artificial Sequence: Synthetic oligonucleotide
cuggguuggaucggaucug

SEQ ID NO: 1774961 - RNA, 19 nt, Artificial Sequence
  Description of Artificial Sequence: Synthetic oligonucleotide
cugagaguaggaaggcacu

SEQ ID NO: 1774962 - RNA, 19 nt, Artificial Sequence
  Description of Artificial Sequence: Synthetic oligonucleotide
aaggacagugguggccaaa

SEQ ID NO: 1774963 - RNA, 19 nt, Artificial Sequence
  Description of Artificial Sequence: Synthetic oligonucleotide
ugcugggaccagaggccga

SEQ ID NO: 1774964 - RNA, 19 nt, Artificial Sequence
  Description of Artificial Sequence: Synthetic oligonucleotide
ggcaguacagguggcuuug

SEQ ID NO: 1774965 - RNA, 19 nt, Artificial Sequence
  Description of Artificial Sequence: Synthetic oligonucleotide
cacagcugaguugaagaaa

SEQ ID NO: 1774966 - RNA, 19 nt, Artificial Sequence
  Description of Artificial Sequence: Synthetic oligonucleotide
agguauugucgccgggguu

SEQ ID NO: 1774967 - RNA, 19 nt, Artificial Sequence
  Description of Artificial Sequence: Synthetic oligonucleotide
gcggaucuuggucuccuug

SEQ ID NO: 1774968 - RNA, 19 nt, Artificial Sequence
  Description of Artificial Sequence: Synthetic oligonucleotide
cugagcgcuucaacucauc

SEQ ID NO: 1774969 - RNA, 19 nt, Artificial Sequence
  Description of Artificial Sequence: Synthetic oligonucleotide
guaugcuugaagggcccca

SEQ ID NO: 1774970 - RNA, 19 nt, Artificial Sequence
  Description of Artificial Sequence: Synthetic oligonucleotide
cguaccucaggguugguca

SEQ ID NO: 1774971 - RNA, 19 nt, Artificial Sequence
  Description of Artificial Sequence: Synthetic oligonucleotide
augcacucaaaggcugccu

SEQ ID NO: 1774972 - RNA, 19 nt, Artificial Sequence
  Description of Artificial Sequence: Synthetic oligonucleotide
cuuugacuccugugcuuga

SEQ ID NO: 1774973 - RNA, 19 nt, Artificial Sequence
  Description of Artificial Sequence: Synthetic oligonucleotide
gucauccaacaggucccgg

SEQ ID NO: 1774974 - RNA, 19 nt, Artificial Sequence
  Description of Artificial Sequence: Synthetic oligonucleotide
aggcugacucggaaggaca

SEQ ID NO: 1774975 - RNA, 19 nt, Artificial Sequence
  Description of Artificial Sequence: Synthetic oligonucleotide
agaguacuccacacacgga

SEQ ID NO: 1774976 - RNA, 19 nt, Artificial Sequence
  Description of Artificial Sequence: Synthetic oligonucleotide
gccaaagcccguggggugg

SEQ ID NO: 1774977 - RNA, 19 nt, Artificial Sequence
  Description of Artificial Sequence: Synthetic oligonucleotide
agacaugacuagagggaau

SEQ ID NO: 1774978 - RNA, 19 nt, Artificial Sequence
  Description of Artificial Sequence: Synthetic oligonucleotide
uauugucgccgggguucgg

SEQ ID NO: 1774979 - RNA, 19 nt, Artificial Sequence
  Description of Artificial Sequence: Synthetic oligonucleotide
aguguggcccggucccuaa

SEQ ID NO: 1774980 - RNA, 19 nt, Artificial Sequence
  Description of Artificial Sequence: Synthetic oligonucleotide
gaucggaucugggcagaga

SEQ ID NO: 1774981 - RNA, 19 nt, Artificial Sequence
  Description of Artificial Sequence: Synthetic oligonucleotide
agcaggcuaaugagcucag

SEQ ID NO: 1774982 - RNA, 19 nt, Artificial Sequence
  Description of Artificial Sequence: Synthetic oligonucleotide
gacuuugacuccugugcuu

SEQ ID NO: 1774983 - RNA, 19 nt, Artificial Sequence
  Description of Artificial Sequence: Synthetic oligonucleotide
gcuagcugaguuccauaga

SEQ ID NO: 1774984 - RNA, 19 nt, Artificial Sequence
  Description of Artificial Sequence: Synthetic oligonucleotide
ccugcugccuccugaggac

SEQ ID NO: 1774985 - RNA, 19 nt, Artificial Sequence
  Description of Artificial Sequence: Synthetic oligonucleotide
ccagugaguggaacacuug

SEQ ID NO: 1774986 - RNA, 19 nt, Artificial Sequence
  Description of Artificial Sequence: Synthetic oligonucleotide
guucggccucgaucugugc

SEQ ID NO: 1774987 - RNA, 19 nt, Artificial Sequence
  Description of Artificial Sequence: Synthetic oligonucleotide
uugcuugugcaggccgggu

SEQ ID NO: 1774988 - RNA, 19 nt, Artificial Sequence
  Description of Artificial Sequence: Synthetic oligonucleotide
caucgaguacaugcacuca

SEQ ID NO: 1774989 - RNA, 19 nt, Artificial Sequence
  Description of Artificial Sequence: Synthetic oligonucleotide
uccagaaggcacgggucuu

SEQ ID NO: 1774990 - RNA, 19 nt, Artificial Sequence
  Description of Artificial Sequence: Synthetic oligonucleotide
agcccauccuccacguggu

SEQ ID NO: 1774991 - RNA, 19 nt, Artificial Sequence
  Description of Artificial Sequence: Synthetic oligonucleotide
gaaggacagugguggccaa

SEQ ID NO: 1774992 - RNA, 19 nt, Artificial Sequence
  Description of Artificial Sequence: Synthetic oligonucleotide
gcacucaaaggcugccuuc

SEQ ID NO: 1774993 - RNA, 19 nt, Artificial Sequence
  Description of Artificial Sequence: Synthetic oligonucleotide
ggagggguaggaugucauc

SEQ ID NO: 1774994 - RNA, 19 nt, Artificial Sequence
  Description of Artificial Sequence: Synthetic oligonucleotide
caccgggccagugagugga

SEQ ID NO: 1774995 - RNA, 19 nt, Artificial Sequence
  Description of Artificial Sequence: Synthetic oligonucleotide
gguucggccucgaucugug

SEQ ID NO: 1774996 - RNA, 19 nt, Artificial Sequence
  Description of Artificial Sequence: Synthetic oligonucleotide
ccaggcggcuggcaguucc

SEQ ID NO: 1774997 - RNA, 19 nt, Artificial Sequence
  Description of Artificial Sequence: Synthetic oligonucleotide
gacagcuagcugaguucca

SEQ ID NO: 1774998 - RNA, 19 nt, Artificial Sequence
  Description of Artificial Sequence: Synthetic oligonucleotide
gcucucgaagaggauggug

SEQ ID NO: 1774999 - RNA, 19 nt, Artificial Sequence
  Description of Artificial Sequence: Synthetic oligonucleotide
ggguaggaugucauccaac

SEQ ID NO: 1775000 - RNA, 19 nt, Artificial Sequence
  Description of Artificial Sequence: Synthetic oligonucleotide
uaugggcggcgugcagccc

SEQ ID NO: 1775001 - RNA, 19 nt, Artificial Sequence
  Description of Artificial Sequence: Synthetic oligonucleotide
ggcggcuggcaguuccugc

SEQ ID NO: 1775002 - RNA, 19 nt, Artificial Sequence
  Description of Artificial Sequence: Synthetic oligonucleotide
gcgaccccaaggcuuccag

SEQ ID NO: 1775003 - RNA, 19 nt, Artificial Sequence
  Description of Artificial Sequence: Synthetic oligonucleotide
gcauaugggcggcgugcag

SEQ ID NO: 1775004 - RNA, 19 nt, Artificial Sequence
  Description of Artificial Sequence: Synthetic oligonucleotide
gcccaucaucuacuguaug

SEQ ID NO: 1775005 - RNA, 19 nt, Artificial Sequence
  Description of Artificial Sequence: Synthetic oligonucleotide
ggcccggucccuaagugca

SEQ ID NO: 1775006 - RNA, 19 nt, Artificial Sequence
  Description of Artificial Sequence: Synthetic oligonucleotide
cagguauugucgccggggu

SEQ ID NO: 1775007 - RNA, 19 nt, Artificial Sequence
  Description of Artificial Sequence: Synthetic oligonucleotide
gccgguccacucucuguag

SEQ ID NO: 1775008 - RNA, 19 nt, Artificial Sequence
  Description of Artificial Sequence: Synthetic oligonucleotide
uggugaguucuggguugga

SEQ ID NO: 1775009 - RNA, 19 nt, Artificial Sequence
  Description of Artificial Sequence: Synthetic oligonucleotide
gggguaggaugucauccaa

SEQ ID NO: 1775010 - RNA, 19 nt, Artificial Sequence
  Description of Artificial Sequence: Synthetic oligonucleotide
ggggagggcuuguguuggg

SEQ ID NO: 1775011 - RNA, 19 nt, Artificial Sequence
  Description of Artificial Sequence: Synthetic oligonucleotide
gccugguuauaaacaggug

SEQ ID NO: 1775012 - RNA, 19 nt, Artificial Sequence
  Description of Artificial Sequence: Synthetic oligonucleotide
ggguuggaucggaucuggg

SEQ ID NO: 1775013 - RNA, 19 nt, Artificial Sequence
  Description of Artificial Sequence: Synthetic oligonucleotide
cacagaccaggcggcuggc

SEQ ID NO: 1775014 - RNA, 19 nt, Artificial Sequence
  Description of Artificial Sequence: Synthetic oligonucleotide
ccggucccuaagugcaugc

SEQ ID NO: 1775015 - RNA, 19 nt, Artificial Sequence
  Description of Artificial Sequence: Synthetic oligonucleotide
ccuucagcccauccuccac

SEQ ID NO: 1775016 - RNA, 19 nt, Artificial Sequence
  Description of Artificial Sequence: Synthetic oligonucleotide
cuuggcaguacagguggcu

SEQ ID NO: 1775017 - RNA, 19 nt, Artificial Sequence
  Description of Artificial Sequence: Synthetic oligonucleotide
aggucccggaccagugaug

SEQ ID NO: 1775018 - RNA, 19 nt, Artificial Sequence
  Description of Artificial Sequence: Synthetic oligonucleotide
ugcccgcauugcugagcgc

SEQ ID NO: 1775019 - RNA, 19 nt, Artificial Sequence
  Description of Artificial Sequence: Synthetic oligonucleotide
ggcacgggucuucagcucu

SEQ ID NO: 1775020 - RNA, 19 nt, Artificial Sequence
  Description of Artificial Sequence: Synthetic oligonucleotide
gcugccuuccuuacaucca

SEQ ID NO: 1775021 - RNA, 19 nt, Artificial Sequence
  Description of Artificial Sequence: Synthetic oligonucleotide
gccucgaucugugccagca

SEQ ID NO: 1775022 - RNA, 19 nt, Artificial Sequence
  Description of Artificial Sequence: Synthetic oligonucleotide
ggaucggaucugggcagag

SEQ ID NO: 1775023 - RNA, 19 nt, Artificial Sequence
  Description of Artificial Sequence: Synthetic oligonucleotide
ugggcggcgugcagcccuc

SEQ ID NO: 1775024 - RNA, 19 nt, Artificial Sequence
  Description of Artificial Sequence: Synthetic oligonucleotide
uggcuuugaguggcuccau

SEQ ID NO: 1775025 - RNA, 19 nt, Artificial Sequence
  Description of Artificial Sequence: Synthetic oligonucleotide
cugggcgaccccaaggcuu

SEQ ID NO: 1775026 - RNA, 19 nt, Artificial Sequence
  Description of Artificial Sequence: Synthetic oligonucleotide
ggcauaugggcggcgugca

SEQ ID NO: 1775027 - RNA, 19 nt, Artificial Sequence
  Description of Artificial Sequence: Synthetic oligonucleotide
ccgggguucggccucgauc

SEQ ID NO: 1775028 - RNA, 19 nt, Artificial Sequence
  Description of Artificial Sequence: Synthetic oligonucleotide
aggcggcuggcaguuccug

SEQ ID NO: 1775029 - RNA, 19 nt, Artificial Sequence
  Description of Artificial Sequence: Synthetic oligonucleotide
cucaaaggcugccuuccuu

SEQ ID NO: 1775030 - RNA, 19 nt, Artificial Sequence
  Description of Artificial Sequence: Synthetic oligonucleotide
ggaggggagggcuuguguu

SEQ ID NO: 1775031 - RNA, 19 nt, Artificial Sequence
  Description of Artificial Sequence: Synthetic oligonucleotide
augagccgguccacucucu

SEQ ID NO: 1775032 - RNA, 19 nt, Artificial Sequence
  Description of Artificial Sequence: Synthetic oligonucleotide
cucuuccguaccucagggu

SEQ ID NO: 1775033 - RNA, 19 nt, Artificial Sequence
  Description of Artificial Sequence: Synthetic oligonucleotide
gcagcugagagggcagcca

SEQ ID NO: 1775034 - RNA, 19 nt, Artificial Sequence
  Description of Artificial Sequence: Synthetic oligonucleotide
acacggcccaaggcauaug

SEQ ID NO: 1775035 - RNA, 19 nt, Artificial Sequence
  Description of Artificial Sequence: Synthetic oligonucleotide
ggccggguccuccauccuc

SEQ ID NO: 1775036 - RNA, 19 nt, Artificial Sequence
  Description of Artificial Sequence: Synthetic oligonucleotide
caggggcugagaguaggaa

SEQ ID NO: 1775037 - RNA, 19 nt, Artificial Sequence
  Description of Artificial Sequence: Synthetic oligonucleotide
cggaaggacagugguggcc

SEQ ID NO: 1775038 - RNA, 19 nt, Artificial Sequence
  Description of Artificial Sequence: Synthetic oligonucleotide
aggccggguccuccauccu

SEQ ID NO: 1775039 - RNA, 19 nt, Artificial Sequence
  Description of Artificial Sequence: Synthetic oligonucleotide
gcgcuucaacucauccugc

SEQ ID NO: 1775040 - RNA, 19 nt, Artificial Sequence
  Description of Artificial Sequence: Synthetic oligonucleotide
cucgaagaggauggugagu

SEQ ID NO: 1775041 - RNA, 19 nt, Artificial Sequence
  Description of Artificial Sequence: Synthetic oligonucleotide
caucuacuguaugcuugaa

SEQ ID NO: 1775042 - RNA, 19 nt, Artificial Sequence
  Description of Artificial Sequence: Synthetic oligonucleotide
cccaaggcauaugggcggc

SEQ ID NO: 1775043 - RNA, 19 nt, Artificial Sequence
  Description of Artificial Sequence: Synthetic oligonucleotide
cagcugaguugaagaaagu

SEQ ID NO: 1775044 - RNA, 19 nt, Artificial Sequence
  Description of Artificial Sequence: Synthetic oligonucleotide
caaggcauaugggcggcgu

SEQ ID NO: 1775045 - RNA, 19 nt, Artificial Sequence
  Description of Artificial Sequence: Synthetic oligonucleotide
cugcugccuccugaggaca

SEQ ID NO: 1775046 - RNA, 19 nt, Artificial Sequence
  Description of Artificial Sequence: Synthetic oligonucleotide
acacaccgggccagugagu

SEQ ID NO: 1775047 - RNA, 19 nt, Artificial Sequence
  Description of Artificial Sequence: Synthetic oligonucleotide
cuccagcaucgaguacaug

SEQ ID NO: 1775048 - RNA, 19 nt, Artificial Sequence
  Description of Artificial Sequence: Synthetic oligonucleotide
ggucauuagggcagccacu

SEQ ID NO: 1775049 - RNA, 19 nt, Artificial Sequence
  Description of Artificial Sequence: Synthetic oligonucleotide
caggucccggaccagugau

SEQ ID NO: 1775050 - RNA, 19 nt, Artificial Sequence
  Description of Artificial Sequence: Synthetic oligonucleotide
gaguguggcccggucccua

SEQ ID NO: 1775051 - RNA, 19 nt, Artificial Sequence
  Description of Artificial Sequence: Synthetic oligonucleotide
gcggcgugcagcccucaca

SEQ ID NO: 1775052 - RNA, 19 nt, Artificial Sequence
  Description of Artificial Sequence: Synthetic oligonucleotide
cgggguucggccucgaucu

SEQ ID NO: 1775053 - RNA, 19 nt, Artificial Sequence
  Description of Artificial Sequence: Synthetic oligonucleotide
gggguucggccucgaucug

SEQ ID NO: 1775054 - RNA, 19 nt, Artificial Sequence
  Description of Artificial Sequence: Synthetic oligonucleotide
gcccgcauugcugagcgcu

SEQ ID NO: 1775055 - RNA, 19 nt, Artificial Sequence
  Description of Artificial Sequence: Synthetic oligonucleotide
ccacacaccgggccaguga

SEQ ID NO: 1775056 - RNA, 19 nt, Artificial Sequence
  Description of Artificial Sequence: Synthetic oligonucleotide
ggaccagaggccgagucuu

SEQ ID NO: 1775057 - RNA, 19 nt, Artificial Sequence
  Description of Artificial Sequence: Synthetic oligonucleotide
ggucccugcggaucuuggu

SEQ ID NO: 1775058 - RNA, 19 nt, Artificial Sequence
  Description of Artificial Sequence: Synthetic oligonucleotide
ggaccagugaugguuuauu

SEQ ID NO: 1775059 - RNA, 19 nt, Artificial Sequence
  Description of Artificial Sequence: Synthetic oligonucleotide
uccguaccucaggguuggu

SEQ ID NO: 1775060 - RNA, 19 nt, Artificial Sequence
  Description of Artificial Sequence: Synthetic oligonucleotide
ccguaccucaggguugguc

SEQ ID NO: 1775061 - RNA, 19 nt, Artificial Sequence
  Description of Artificial Sequence: Synthetic oligonucleotide
cccaccucagccagugaua

SEQ ID NO: 1775062 - RNA, 19 nt, Artificial Sequence
  Description of Artificial Sequence: Synthetic oligonucleotide
ggcgugcagcccucacauc

SEQ ID NO: 1775063 - RNA, 19 nt, Artificial Sequence
  Description of Artificial Sequence: Synthetic oligonucleotide
gcauugcugagcgcuucaa

SEQ ID NO: 1775064 - RNA, 19 nt, Artificial Sequence
  Description of Artificial Sequence: Synthetic oligonucleotide
cccggucccuaagugcaug

SEQ ID NO: 1775065 - RNA, 19 nt, Artificial Sequence
  Description of Artificial Sequence: Synthetic oligonucleotide
ggcggcgugcagcccucac

SEQ ID NO: 1775066 - RNA, 19 nt, Artificial Sequence
  Description of Artificial Sequence: Synthetic oligonucleotide
ccaagacuuugacuccugu

SEQ ID NO: 1775067 - RNA, 19 nt, Artificial Sequence
  Description of Artificial Sequence: Synthetic oligonucleotide
gcaguacagguggcuuuga

SEQ ID NO: 1775068 - RNA, 19 nt, Artificial Sequence
  Description of Artificial Sequence: Synthetic oligonucleotide
guucuggguuggaucggau

SEQ ID NO: 1775069 - RNA, 19 nt, Artificial Sequence
  Description of Artificial Sequence: Synthetic oligonucleotide
ccggguccuccauccucag

SEQ ID NO: 1775070 - RNA, 19 nt, Artificial Sequence
  Description of Artificial Sequence: Synthetic oligonucleotide
caggcggcuggcaguuccu

SEQ ID NO: 1775071 - RNA, 19 nt, Artificial Sequence
  Description of Artificial Sequence: Synthetic oligonucleotide
ccaugagccgguccacucu

SEQ ID NO: 1775072 - RNA, 19 nt, Artificial Sequence
  Description of Artificial Sequence: Synthetic oligonucleotide
ccgcauugcugagcgcuuc

SEQ ID NO: 1775073 - RNA, 19 nt, Artificial Sequence
  Description of Artificial Sequence: Synthetic oligonucleotide
cauccucagccugguuaua

SEQ ID NO: 1775074 - RNA, 19 nt, Artificial Sequence
  Description of Artificial Sequence: Synthetic oligonucleotide
gucccggaccagugauggu

SEQ ID NO: 1775075 - RNA, 19 nt, Artificial Sequence
  Description of Artificial Sequence: Synthetic oligonucleotide
caaagcccgugggguggga

SEQ ID NO: 1775076 - RNA, 19 nt, Artificial Sequence
  Description of Artificial Sequence: Synthetic oligonucleotide
ggguucggccucgaucugu

SEQ ID NO: 1775077 - RNA, 19 nt, Artificial Sequence
  Description of Artificial Sequence: Synthetic oligonucleotide
gcacgggucuucagcucuc

SEQ ID NO: 1775078 - RNA, 19 nt, Artificial Sequence
  Description of Artificial Sequence: Synthetic oligonucleotide
ggcgaccccaaggcuucca

SEQ ID NO: 1775079 - RNA, 19 nt, Artificial Sequence
  Description of Artificial Sequence: Synthetic oligonucleotide
accgggccagugaguggaa

SEQ ID NO: 1775080 - RNA, 19 nt, Artificial Sequence
  Description of Artificial Sequence: Synthetic oligonucleotide
cacgggucuucagcucucu

SEQ ID NO: 1775081 - RNA, 19 nt, Artificial Sequence
  Description of Artificial Sequence: Synthetic oligonucleotide
ccgggccagugaguggaac

SEQ ID NO: 1775082 - RNA, 19 nt, Artificial Sequence
  Description of Artificial Sequence: Synthetic oligonucleotide
cgaucugugccagcaggaa

SEQ ID NO: 1775083 - RNA, 19 nt, Artificial Sequence
  Description of Artificial Sequence: Synthetic oligonucleotide
gcugagcgcuucaacucau

SEQ ID NO: 1775084 - RNA, 19 nt, Artificial Sequence
  Description of Artificial Sequence: Synthetic oligonucleotide
gggcgaccccaaggcuucc

SEQ ID NO: 1775085 - RNA, 19 nt, Artificial Sequence
  Description of Artificial Sequence: Synthetic oligonucleotide
ccacacggcccaaggcaua

SEQ ID NO: 1775086 - RNA, 19 nt, Artificial Sequence
  Description of Artificial Sequence: Synthetic oligonucleotide
cccggaccagugaugguuu

SEQ ID NO: 1775087 - RNA, 19 nt, Artificial Sequence
  Description of Artificial Sequence: Synthetic oligonucleotide
cggcuuucaccuuggcagu

SEQ ID NO: 1775088 - RNA, 19 nt, Artificial Sequence
  Description of Artificial Sequence: Synthetic oligonucleotide
gggccuggcccagccaccu

SEQ ID NO: 1775089 - RNA, 19 nt, Artificial Sequence
  Description of Artificial Sequence: Synthetic oligonucleotide
ccggaccagugaugguuua

SEQ ID NO: 1775090 - RNA, 19 nt, Artificial Sequence
  Description of Artificial Sequence: Synthetic oligonucleotide
cggcgugcagcccucacau

SEQ ID NO: 1775091 - RNA, 19 nt, Artificial Sequence
  Description of Artificial Sequence: Synthetic oligonucleotide
cgcagacguccagcuggcc

SEQ ID NO: 1775092 - RNA, 19 nt, Artificial Sequence
  Description of Artificial Sequence: Synthetic oligonucleotide
cggucccuaagugcaugca

SEQ ID NO: 1775093 - RNA, 19 nt, Artificial Sequence
  Description of Artificial Sequence: Synthetic oligonucleotide
cccgcauugcugagcgcuu

SEQ ID NO: 1775094 - RNA, 19 nt, Artificial Sequence
  Description of Artificial Sequence: Synthetic oligonucleotide
ccacacacggagggcgggu

SEQ ID NO: 1775095 - RNA, 19 nt, Artificial Sequence
  Description of Artificial Sequence: Synthetic oligonucleotide
gggcggcgugcagcccuca

SEQ ID NO: 1775096 - RNA, 19 nt, Artificial Sequence
  Description of Artificial Sequence: Synthetic oligonucleotide
gcccauccuccacgugguu

SEQ ID NO: 1775097 - RNA, 19 nt, Artificial Sequence
  Description of Artificial Sequence: Synthetic oligonucleotide
gccgggguucggccucgau

SEQ ID NO: 1775098 - RNA, 19 nt, Artificial Sequence
  Description of Artificial Sequence: Synthetic oligonucleotide
ccucucggaugaggucccu

SEQ ID NO: 1775099 - RNA, 19 nt, Artificial Sequence
  Description of Artificial Sequence: Synthetic oligonucleotide
cgccgggguucggccucga

SEQ ID NO: 1775100 - RNA, 19 nt, Artificial Sequence
  Description of Artificial Sequence: Synthetic oligonucleotide
uuuugaugagcuuugagag

SEQ ID NO: 1775101 - RNA, 19 nt, Artificial Sequence
  Description of Artificial Sequence: Synthetic oligonucleotide
gaaauguuugcucugagcc

SEQ ID NO: 1775102 - RNA, 19 nt, Artificial Sequence
  Description of Artificial Sequence: Synthetic oligonucleotide
gaagcugucaccuuguccc

SEQ ID NO: 1775103 - RNA, 19 nt, Artificial Sequence
  Description of Artificial Sequence: Synthetic oligonucleotide
uuuaguacaauggaaaugu

SEQ ID NO: 1775104 - RNA, 19 nt, Artificial Sequence
  Description of Artificial Sequence: Synthetic oligonucleotide
aguauagcacaucugcugc

SEQ ID NO: 1775105 - RNA, 19 nt, Artificial Sequence
  Description of Artificial Sequence: Synthetic oligonucleotide
aaugacaacgucugcuugg

SEQ ID NO: 1775106 - RNA, 19 nt, Artificial Sequence
  Description of Artificial Sequence: Synthetic oligonucleotide
uuuauuuaguacaauggaa

SEQ ID NO: 1775107 - RNA, 19 nt, Artificial Sequence
  Description of Artificial Sequence: Synthetic oligonucleotide
ucaaacacugugacaaccg

SEQ ID NO: 1775108 - RNA, 19 nt, Artificial Sequence
  Description of Artificial Sequence: Synthetic oligonucleotide
gaguguguggcucuaaggg

SEQ ID NO: 1775109 - RNA, 19 nt, Artificial Sequence
  Description of Artificial Sequence: Synthetic oligonucleotide
ugaagaugaaugcucuggg

SEQ ID NO: 1775110 - RNA, 19 nt, Artificial Sequence
  Description of Artificial Sequence: Synthetic oligonucleotide
aagaugaaugcucuggggu

SEQ ID NO: 1775111 - RNA, 19 nt, Artificial Sequence
  Description of Artificial Sequence: Synthetic oligonucleotide
uucaggauuacgauggcug

SEQ ID NO: 1775112 - RNA, 19 nt, Artificial Sequence
  Description of Artificial Sequence: Synthetic oligonucleotide
uucguaagggaacaguuug

SEQ ID NO: 1775113 - RNA, 19 nt, Artificial Sequence
  Description of Artificial Sequence: Synthetic oligonucleotide
acaucaggagcauucuucc

SEQ ID NO: 1775114 - RNA, 19 nt, Artificial Sequence
  Description of Artificial Sequence: Synthetic oligonucleotide
gauggcugaauacucuucg

SEQ ID NO: 1775115 - RNA, 19 nt, Artificial Sequence
  Description of Artificial Sequence: Synthetic oligonucleotide
acaaccguucagcacaagc

SEQ ID NO: 1775116 - RNA, 19 nt, Artificial Sequence
  Description of Artificial Sequence: Synthetic oligonucleotide
cacaguauagcacaucugc

SEQ ID NO: 1775117 - RNA, 19 nt, Artificial Sequence
  Description of Artificial Sequence: Synthetic oligonucleotide
aguacaauggaaauguuug

SEQ ID NO: 1775118 - RNA, 19 nt, Artificial Sequence
  Description of Artificial Sequence: Synthetic oligonucleotide
acaacgucugcuuggaagg

SEQ ID NO: 1775119 - RNA, 19 nt, Artificial Sequence
  Description of Artificial Sequence: Synthetic oligonucleotide
aacacugugacaaccguuc

SEQ ID NO: 1775120 - RNA, 19 nt, Artificial Sequence
  Description of Artificial Sequence: Synthetic oligonucleotide
acaauggaaauguuugcuc

SEQ ID NO: 1775121 - RNA, 19 nt, Artificial Sequence
  Description of Artificial Sequence: Synthetic oligonucleotide
ugacugagucuccugaagg

SEQ ID NO: 1775122 - RNA, 19 nt, Artificial Sequence
  Description of Artificial Sequence: Synthetic oligonucleotide
gacaacgucugcuuggaag

SEQ ID NO: 1775123 - RNA, 19 nt, Artificial Sequence
  Description of Artificial Sequence: Synthetic oligonucleotide
agucgcugaagaugaaugc

SEQ ID NO: 1775124 - RNA, 19 nt, Artificial Sequence
  Description of Artificial Sequence: Synthetic oligonucleotide
aucugaugaggacagggac

SEQ ID NO: 1775125 - RNA, 19 nt, Artificial Sequence
  Description of Artificial Sequence: Synthetic oligonucleotide
ucuagaugaucugaugagg

SEQ ID NO: 1775126 - RNA, 19 nt, Artificial Sequence
  Description of Artificial Sequence: Synthetic oligonucleotide
ugguauaggccacauagac

SEQ ID NO: 1775127 - RNA, 19 nt, Artificial Sequence
  Description of Artificial Sequence: Synthetic oligonucleotide
cauccaaaggcucuguggg

SEQ ID NO: 1775128 - RNA, 19 nt, Artificial Sequence
  Description of Artificial Sequence: Synthetic oligonucleotide
cauacagggugcuucacgg

SEQ ID NO: 1775129 - RNA, 19 nt, Artificial Sequence
  Description of Artificial Sequence: Synthetic oligonucleotide
aacucauggagauccaccu

SEQ ID NO: 1775130 - RNA, 19 nt, Artificial Sequence
  Description of Artificial Sequence: Synthetic oligonucleotide
gaagaugaaugcucugggg

SEQ ID NO: 1775131 - RNA, 19 nt, Artificial Sequence
  Description of Artificial Sequence: Synthetic oligonucleotide
ucaauuucucuucuaggcu

SEQ ID NO: 1775132 - RNA, 19 nt, Artificial Sequence
  Description of Artificial Sequence: Synthetic oligonucleotide
aguaaguagcuccgguggc

SEQ ID NO: 1775133 - RNA, 19 nt, Artificial Sequence
  Description of Artificial Sequence: Synthetic oligonucleotide
ugaucugaugaggacaggg

SEQ ID NO: 1775134 - RNA, 19 nt, Artificial Sequence
  Description of Artificial Sequence: Synthetic oligonucleotide
cacucugccagguagagug

SEQ ID NO: 1775135 - RNA, 19 nt, Artificial Sequence
  Description of Artificial Sequence: Synthetic oligonucleotide
acucuagaugaucugauga

SEQ ID NO: 1775136 - RNA, 19 nt, Artificial Sequence
  Description of Artificial Sequence: Synthetic oligonucleotide
agugaucucauuuuccagu

SEQ ID NO: 1775137 - RNA, 19 nt, Artificial Sequence
  Description of Artificial Sequence: Synthetic oligonucleotide
aaauguuugcucugagcca

SEQ ID NO: 1775138 - RNA, 19 nt, Artificial Sequence
  Description of Artificial Sequence: Synthetic oligonucleotide
ugacagucgcugaagauga

SEQ ID NO: 1775139 - RNA, 19 nt, Artificial Sequence
  Description of Artificial Sequence: Synthetic oligonucleotide
auagacaucaggagcauuc

SEQ ID NO: 1775140 - RNA, 19 nt, Artificial Sequence
  Description of Artificial Sequence: Synthetic oligonucleotide
aaggggaagccguugagga

SEQ ID NO: 1775141 - RNA, 19 nt, Artificial Sequence
  Description of Artificial Sequence: Synthetic oligonucleotide
uauuuaguacaauggaaau

SEQ ID NO: 1775142 - RNA, 19 nt, Artificial Sequence
  Description of Artificial Sequence: Synthetic oligonucleotide
auuacgauggcugaauacu

SEQ ID NO: 1775143 - RNA, 19 nt, Artificial Sequence
  Description of Artificial Sequence: Synthetic oligonucleotide
ucaccuucaaacacuguga

SEQ ID NO: 1775144 - RNA, 19 nt, Artificial Sequence
  Description of Artificial Sequence: Synthetic oligonucleotide
cagaauagccagaagcagc

SEQ ID NO: 1775145 - RNA, 19 nt, Artificial Sequence
  Description of Artificial Sequence: Synthetic oligonucleotide
ugugggcacagccucaugc

SEQ ID NO: 1775146 - RNA, 19 nt, Artificial Sequence
  Description of Artificial Sequence: Synthetic oligonucleotide
uugaccaugacagucgcug

SEQ ID NO: 1775147 - RNA, 19 nt, Artificial Sequence
  Description of Artificial Sequence: Synthetic oligonucleotide
gaucucauuuuccagucac

SEQ ID NO: 1775148 - RNA, 19 nt, Artificial Sequence
  Description of Artificial Sequence: Synthetic oligonucleotide
ugaggagcacguuucuacg

SEQ ID NO: 1775149 - RNA, 19 nt, Artificial Sequence
  Description of Artificial Sequence: Synthetic oligonucleotide
caguaaguagcuccggugg

SEQ ID NO: 1775150 - RNA, 19 nt, Artificial Sequence
  Description of Artificial Sequence: Synthetic oligonucleotide
acuugaccaugacagucgc

SEQ ID NO: 1775151 - RNA, 19 nt, Artificial Sequence
  Description of Artificial Sequence: Synthetic oligonucleotide
gggaccagcacucaaagcc

SEQ ID NO: 1775152 - RNA, 19 nt, Artificial Sequence
  Description of Artificial Sequence: Synthetic oligonucleotide
auggccagaccugugaggc

SEQ ID NO: 1775153 - RNA, 19 nt, Artificial Sequence
  Description of Artificial Sequence: Synthetic oligonucleotide
auuuaguacaauggaaaug

SEQ ID NO: 1775154 - RNA, 19 nt, Artificial Sequence
  Description of Artificial Sequence: Synthetic oligonucleotide
ucuacggagcugcucaagc

SEQ ID NO: 1775155 - RNA, 19 nt, Artificial Sequence
  Description of Artificial Sequence: Synthetic oligonucleotide
uguccacucuagaugaucu

SEQ ID NO: 1775156 - RNA, 19 nt, Artificial Sequence
  Description of Artificial Sequence: Synthetic oligonucleotide
gauuacgauggcugaauac

SEQ ID NO: 1775157 - RNA, 19 nt, Artificial Sequence
  Description of Artificial Sequence: Synthetic oligonucleotide
acauacagggugcuucacg

SEQ ID NO: 1775158 - RNA, 19 nt, Artificial Sequence
  Description of Artificial Sequence: Synthetic oligonucleotide
aaagcagcgggcguacuuc

SEQ ID NO: 1775159 - RNA, 19 nt, Artificial Sequence
  Description of Artificial Sequence: Synthetic oligonucleotide
ugugcucucagagagugug

SEQ ID NO: 1775160 - RNA, 19 nt, Artificial Sequence
  Description of Artificial Sequence: Synthetic oligonucleotide
uugaggagcacguuucuac

SEQ ID NO: 1775161 - RNA, 19 nt, Artificial Sequence
  Description of Artificial Sequence: Synthetic oligonucleotide
caauuucucuucuaggcuc

SEQ ID NO: 1775162 - RNA, 19 nt, Artificial Sequence
  Description of Artificial Sequence: Synthetic oligonucleotide
uggagauccaccugccuag

SEQ ID NO: 1775163 - RNA, 19 nt, Artificial Sequence
  Description of Artificial Sequence: Synthetic oligonucleotide
gugacaaccguucagcaca

SEQ ID NO: 1775164 - RNA, 19 nt, Artificial Sequence
  Description of Artificial Sequence: Synthetic oligonucleotide
uacaauggaaauguuugcu

SEQ ID NO: 1775165 - RNA, 19 nt, Artificial Sequence
  Description of Artificial Sequence: Synthetic oligonucleotide
aguagaucccugcucgguc

SEQ ID NO: 1775166 - RNA, 19 nt, Artificial Sequence
  Description of Artificial Sequence: Synthetic oligonucleotide
guaaccaagccuguggugc

SEQ ID NO: 1775167 - RNA, 19 nt, Artificial Sequence
  Description of Artificial Sequence: Synthetic oligonucleotide
cuugucccaguccagcucg

SEQ ID NO: 1775168 - RNA, 19 nt, Artificial Sequence
  Description of Artificial Sequence: Synthetic oligonucleotide
ucuucuaggcucugccagg

SEQ ID NO: 1775169 - RNA, 19 nt, Artificial Sequence
  Description of Artificial Sequence: Synthetic oligonucleotide
ucuaaggggaagccguuga

SEQ ID NO: 1775170 - RNA, 19 nt, Artificial Sequence
  Description of Artificial Sequence: Synthetic oligonucleotide
cacuugaccaugacagucg

SEQ ID NO: 1775171 - RNA, 19 nt, Artificial Sequence
  Description of Artificial Sequence: Synthetic oligonucleotide
aaggcaguaaguagcuccg

SEQ ID NO: 1775172 - RNA, 19 nt, Artificial Sequence
  Description of Artificial Sequence: Synthetic oligonucleotide
guuucuacggagcugcuca

SEQ ID NO: 1775173 - RNA, 19 nt, Artificial Sequence
  Description of Artificial Sequence: Synthetic oligonucleotide
ucguacagugcauccaaag

SEQ ID NO: 1775174 - RNA, 19 nt, Artificial Sequence
  Description of Artificial Sequence: Synthetic oligonucleotide
caguauagcacaucugcug

SEQ ID NO: 1775175 - RNA, 19 nt, Artificial Sequence
  Description of Artificial Sequence: Synthetic oligonucleotide
ggugccaugggacacaaug

SEQ ID NO: 1775176 - RNA, 19 nt, Artificial Sequence
  Description of Artificial Sequence: Synthetic oligonucleotide
cacauagacaucaggagca

SEQ ID NO: 1775177 - RNA, 19 nt, Artificial Sequence
  Description of Artificial Sequence: Synthetic oligonucleotide
uccagucaccuucaaacac

SEQ ID NO: 1775178 - RNA, 19 nt, Artificial Sequence
  Description of Artificial Sequence: Synthetic oligonucleotide
uaguacaauggaaauguuu

SEQ ID NO: 1775179 - RNA, 19 nt, Artificial Sequence
  Description of Artificial Sequence: Synthetic oligonucleotide
agcauucuuccucuggcag

SEQ ID NO: 1775180 - RNA, 19 nt, Artificial Sequence
  Description of Artificial Sequence: Synthetic oligonucleotide
gaagccguugaggagcacg

SEQ ID NO: 1775181 - RNA, 19 nt, Artificial Sequence
  Description of Artificial Sequence: Synthetic oligonucleotide
gggcguacuucacagaugg

SEQ ID NO: 1775182 - RNA, 19 nt, Artificial Sequence
  Description of Artificial Sequence: Synthetic oligonucleotide
caucccauguaaccaagcc

SEQ ID NO: 1775183 - RNA, 19 nt, Artificial Sequence
  Description of Artificial Sequence: Synthetic oligonucleotide
gaggagcacguuucuacgg

SEQ ID NO: 1775184 - RNA, 19 nt, Artificial Sequence
  Description of Artificial Sequence: Synthetic oligonucleotide
ugcuucacggucuucugca

SEQ ID NO: 1775185 - RNA, 19 nt, Artificial Sequence
  Description of Artificial Sequence: Synthetic oligonucleotide
auccaaaggcucugugggc

SEQ ID NO: 1775186 - RNA, 19 nt, Artificial Sequence
  Description of Artificial Sequence: Synthetic oligonucleotide
uagugaucucauuuuccag

SEQ ID NO: 1775187 - RNA, 19 nt, Artificial Sequence
  Description of Artificial Sequence: Synthetic oligonucleotide
ucgaaacucugcagcagag

SEQ ID NO: 1775188 - RNA, 19 nt, Artificial Sequence
  Description of Artificial Sequence: Synthetic oligonucleotide
acugccuagcuccaggaca

SEQ ID NO: 1775189 - RNA, 19 nt, Artificial Sequence
  Description of Artificial Sequence: Synthetic oligonucleotide
uugcaaauggccagaccug

SEQ ID NO: 1775190 - RNA, 19 nt, Artificial Sequence
  Description of Artificial Sequence: Synthetic oligonucleotide
ucguaagggaacaguuugc

SEQ ID NO: 1775191 - RNA, 19 nt, Artificial Sequence
  Description of Artificial Sequence: Synthetic oligonucleotide
uuacgauggcugaauacuc

SEQ ID NO: 1775192 - RNA, 19 nt, Artificial Sequence
  Description of Artificial Sequence: Synthetic oligonucleotide
ucaggauuacgauggcuga

SEQ ID NO: 1775193 - RNA, 19 nt, Artificial Sequence
  Description of Artificial Sequence: Synthetic oligonucleotide
cuugcaaauggccagaccu

SEQ ID NO: 1775194 - RNA, 19 nt, Artificial Sequence
  Description of Artificial Sequence: Synthetic oligonucleotide
ugaugaacagcuugccggu

SEQ ID NO: 1775195 - RNA, 19 nt, Artificial Sequence
  Description of Artificial Sequence: Synthetic oligonucleotide
gucaaugggaguguguggc

SEQ ID NO: 1775196 - RNA, 19 nt, Artificial Sequence
  Description of Artificial Sequence: Synthetic oligonucleotide
agaugaucugaugaggaca

SEQ ID NO: 1775197 - RNA, 19 nt, Artificial Sequence
  Description of Artificial Sequence: Synthetic oligonucleotide
agauccaccugccuaguga

SEQ ID NO: 1775198 - RNA, 19 nt, Artificial Sequence
  Description of Artificial Sequence: Synthetic oligonucleotide
agugcagcaucccauguaa

SEQ ID NO: 1775199 - RNA, 19 nt, Artificial Sequence
  Description of Artificial Sequence: Synthetic oligonucleotide
guacuucacagauggcagg

SEQ ID NO: 1775200 - RNA, 19 nt, Artificial Sequence
  Description of Artificial Sequence: Synthetic oligonucleotide
cacguuucuacggagcugc

SEQ ID NO: 1775201 - RNA, 19 nt, Artificial Sequence
  Description of Artificial Sequence: Synthetic oligonucleotide
cagucgcugaagaugaaug

SEQ ID NO: 1775202 - RNA, 19 nt, Artificial Sequence
  Description of Artificial Sequence: Synthetic oligonucleotide
ucuaggcucugccagggaa

SEQ ID NO: 1775203 - RNA, 19 nt, Artificial Sequence
  Description of Artificial Sequence: Synthetic oligonucleotide
aaccguucagcacaagcuu

SEQ ID NO: 1775204 - RNA, 19 nt, Artificial Sequence
  Description of Artificial Sequence: Synthetic oligonucleotide
aacaguuugcuggcgugag

SEQ ID NO: 1775205 - RNA, 19 nt, Artificial Sequence
  Description of Artificial Sequence: Synthetic oligonucleotide
agaauagccagaagcagcu

SEQ ID NO: 1775206 - RNA, 19 nt, Artificial Sequence
  Description of Artificial Sequence: Synthetic oligonucleotide
auguaaccaagccuguggu

SEQ ID NO: 1775207 - RNA, 19 nt, Artificial Sequence
  Description of Artificial Sequence: Synthetic oligonucleotide
cuuugagagaaagcagcgg

SEQ ID NO: 1775208 - RNA, 19 nt, Artificial Sequence
  Description of Artificial Sequence: Synthetic oligonucleotide
auaggccacauagacauca

SEQ ID NO: 1775209 - RNA, 19 nt, Artificial Sequence
  Description of Artificial Sequence: Synthetic oligonucleotide
uggguggacucuuuggcca

SEQ ID NO: 1775210 - RNA, 19 nt, Artificial Sequence
  Description of Artificial Sequence: Synthetic oligonucleotide
uguaaccaagccuguggug

SEQ ID NO: 1775211 - RNA, 19 nt, Artificial Sequence
  Description of Artificial Sequence: Synthetic oligonucleotide
ucacuuccccacaguauag

SEQ ID NO: 1775212 - RNA, 19 nt, Artificial Sequence
  Description of Artificial Sequence: Synthetic oligonucleotide
ucgcugaagaugaaugcuc

SEQ ID NO: 1775213 - RNA, 19 nt, Artificial Sequence
  Description of Artificial Sequence: Synthetic oligonucleotide
augccuugcaaauggccag

SEQ ID NO: 1775214 - RNA, 19 nt, Artificial Sequence
  Description of Artificial Sequence: Synthetic oligonucleotide
uccacucuagaugaucuga

SEQ ID NO: 1775215 - RNA, 19 nt, Artificial Sequence
  Description of Artificial Sequence: Synthetic oligonucleotide
uagagugcagcaucccaug

SEQ ID NO: 1775216 - RNA, 19 nt, Artificial Sequence
  Description of Artificial Sequence: Synthetic oligonucleotide
agaaccugagggcucccuc

SEQ ID NO: 1775217 - RNA, 19 nt, Artificial Sequence
  Description of Artificial Sequence: Synthetic oligonucleotide
cuucccaguagaucccugc

SEQ ID NO: 1775218 - RNA, 19 nt, Artificial Sequence
  Description of Artificial Sequence: Synthetic oligonucleotide
ugcacauacagggugcuuc

SEQ ID NO: 1775219 - RNA, 19 nt, Artificial Sequence
  Description of Artificial Sequence: Synthetic oligonucleotide
uccaaaggcucugugggca

SEQ ID NO: 1775220 - RNA, 19 nt, Artificial Sequence
  Description of Artificial Sequence: Synthetic oligonucleotide
uccaccugccuagugaucu

SEQ ID NO: 1775221 - RNA, 19 nt, Artificial Sequence
  Description of Artificial Sequence: Synthetic oligonucleotide
gcugaauacucuucguaag

SEQ ID NO: 1775222 - RNA, 19 nt, Artificial Sequence
  Description of Artificial Sequence: Synthetic oligonucleotide
guuugcuggcgugaggagg

SEQ ID NO: 1775223 - RNA, 19 nt, Artificial Sequence
  Description of Artificial Sequence: Synthetic oligonucleotide
ucugggguagcaugccuug

SEQ ID NO: 1775224 - RNA, 19 nt, Artificial Sequence
  Description of Artificial Sequence: Synthetic oligonucleotide
ggaaauguuugcucugagc

SEQ ID NO: 1775225 - RNA, 19 nt, Artificial Sequence
  Description of Artificial Sequence: Synthetic oligonucleotide
agggaagcgcacgagccgc

SEQ ID NO: 1775226 - RNA, 19 nt, Artificial Sequence
  Description of Artificial Sequence: Synthetic oligonucleotide
gucaccuuugggcugcuug

SEQ ID NO: 1775227 - RNA, 19 nt, Artificial Sequence
  Description of Artificial Sequence: Synthetic oligonucleotide
agaugaaugcucuggggua

SEQ ID NO: 1775228 - RNA, 19 nt, Artificial Sequence
  Description of Artificial Sequence: Synthetic oligonucleotide
aucagaaccucugccagug

SEQ ID NO: 1775229 - RNA, 19 nt, Artificial Sequence
  Description of Artificial Sequence: Synthetic oligonucleotide
agcacguuucuacggagcu

SEQ ID NO: 1775230 - RNA, 19 nt, Artificial Sequence
  Description of Artificial Sequence: Synthetic oligonucleotide
ugaucucauuuuccaguca

SEQ ID NO: 1775231 - RNA, 19 nt, Artificial Sequence
  Description of Artificial Sequence: Synthetic oligonucleotide
guaagggaacaguuugcug

SEQ ID NO: 1775232 - RNA, 19 nt, Artificial Sequence
  Description of Artificial Sequence: Synthetic oligonucleotide
uguggcucuaaggggaagc

SEQ ID NO: 1775233 - RNA, 19 nt, Artificial Sequence
  Description of Artificial Sequence: Synthetic oligonucleotide
gcauccaaaggcucugugg

SEQ ID NO: 1775234 - RNA, 19 nt, Artificial Sequence
  Description of Artificial Sequence: Synthetic oligonucleotide
cagguagagugcagcaucc

SEQ ID NO: 1775235 - RNA, 19 nt, Artificial Sequence
  Description of Artificial Sequence: Synthetic oligonucleotide
uaaccaagccuguggugcc

SEQ ID NO: 1775236 - RNA, 19 nt, Artificial Sequence
  Description of Artificial Sequence: Synthetic oligonucleotide
ugucacuuccccacaguau

SEQ ID NO: 1775237 - RNA, 19 nt, Artificial Sequence
  Description of Artificial Sequence: Synthetic oligonucleotide
aggaagcggcgcucgaaac

SEQ ID NO: 1775238 - RNA, 19 nt, Artificial Sequence
  Description of Artificial Sequence: Synthetic oligonucleotide
cugcuugggucaaugggag

SEQ ID NO: 1775239 - RNA, 19 nt, Artificial Sequence
  Description of Artificial Sequence: Synthetic oligonucleotide
gugacugagucuccugaag

SEQ ID NO: 1775240 - RNA, 19 nt, Artificial Sequence
  Description of Artificial Sequence: Synthetic oligonucleotide
ugcauccaaaggcucugug

SEQ ID NO: 1775241 - RNA, 19 nt, Artificial Sequence
  Description of Artificial Sequence: Synthetic oligonucleotide
cacuggguggacucuuugg

SEQ ID NO: 1775242 - RNA, 19 nt, Artificial Sequence
  Description of Artificial Sequence: Synthetic oligonucleotide
uggcugaauacucuucgua

SEQ ID NO: 1775243 - RNA, 19 nt, Artificial Sequence
  Description of Artificial Sequence: Synthetic oligonucleotide
ugggguagcaugccuugca

SEQ ID NO: 1775244 - RNA, 19 nt, Artificial Sequence
  Description of Artificial Sequence: Synthetic oligonucleotide
ugcucaagcacuugaccau

SEQ ID NO: 1775245 - RNA, 19 nt, Artificial Sequence
  Description of Artificial Sequence: Synthetic oligonucleotide
caccuucaaacacugugac

SEQ ID NO: 1775246 - RNA, 19 nt, Artificial Sequence
  Description of Artificial Sequence: Synthetic oligonucleotide
aggacagggaccagcacuc

SEQ ID NO: 1775247 - RNA, 19 nt, Artificial Sequence
  Description of Artificial Sequence: Synthetic oligonucleotide
caguguccacucuagauga

SEQ ID NO: 1775248 - RNA, 19 nt, Artificial Sequence
  Description of Artificial Sequence: Synthetic oligonucleotide
auggagauccaccugccua

SEQ ID NO: 1775249 - RNA, 19 nt, Artificial Sequence
  Description of Artificial Sequence: Synthetic oligonucleotide
uucccaguagaucccugcu

SEQ ID NO: 1775250 - RNA, 19 nt, Artificial Sequence
  Description of Artificial Sequence: Synthetic oligonucleotide
ugugacugagucuccugaa

SEQ ID NO: 1775251 - RNA, 19 nt, Artificial Sequence
  Description of Artificial Sequence: Synthetic oligonucleotide
ugcaaauggccagaccugu

SEQ ID NO: 1775252 - RNA, 19 nt, Artificial Sequence
  Description of Artificial Sequence: Synthetic oligonucleotide
ggcugcuugggucaauggg

SEQ ID NO: 1775253 - RNA, 19 nt, Artificial Sequence
  Description of Artificial Sequence: Synthetic oligonucleotide
aggagcacguuucuacgga

SEQ ID NO: 1775254 - RNA, 19 nt, Artificial Sequence
  Description of Artificial Sequence: Synthetic oligonucleotide
cagcucagaaccugagggc

SEQ ID NO: 1775255 - RNA, 19 nt, Artificial Sequence
  Description of Artificial Sequence: Synthetic oligonucleotide
agcacaucugcugcaauga

SEQ ID NO: 1775256 - RNA, 19 nt, Artificial Sequence
  Description of Artificial Sequence: Synthetic oligonucleotide
cacucuagaugaucugaug

SEQ ID NO: 1775257 - RNA, 19 nt, Artificial Sequence
  Description of Artificial Sequence: Synthetic oligonucleotide
ccuagugaucucauuuucc

SEQ ID NO: 1775258 - RNA, 19 nt, Artificial Sequence
  Description of Artificial Sequence: Synthetic oligonucleotide
cccaguagaucccugcucg

SEQ ID NO: 1775259 - RNA, 19 nt, Artificial Sequence
  Description of Artificial Sequence: Synthetic oligonucleotide
gugccaugggacacaaugg

SEQ ID NO: 1775260 - RNA, 19 nt, Artificial Sequence
  Description of Artificial Sequence: Synthetic oligonucleotide
cuaaggggaagccguugag

SEQ ID NO: 1775261 - RNA, 19 nt, Artificial Sequence
  Description of Artificial Sequence: Synthetic oligonucleotide
gaucugaugaggacaggga

SEQ ID NO: 1775262 - RNA, 19 nt, Artificial Sequence
  Description of Artificial Sequence: Synthetic oligonucleotide
acucauggagauccaccug

SEQ ID NO: 1775263 - RNA, 19 nt, Artificial Sequence
  Description of Artificial Sequence: Synthetic oligonucleotide
uuaguacaauggaaauguu

SEQ ID NO: 1775264 - RNA, 19 nt, Artificial Sequence
  Description of Artificial Sequence: Synthetic oligonucleotide
gcuuugagagaaagcagcg

SEQ ID NO: 1775265 - RNA, 19 nt, Artificial Sequence
  Description of Artificial Sequence: Synthetic oligonucleotide
gucacuuccccacaguaua

SEQ ID NO: 1775266 - RNA, 19 nt, Artificial Sequence
  Description of Artificial Sequence: Synthetic oligonucleotide
cacugugacaaccguucag

SEQ ID NO: 1775267 - RNA, 19 nt, Artificial Sequence
  Description of Artificial Sequence: Synthetic oligonucleotide
accagugacagugucacuu

SEQ ID NO: 1775268 - RNA, 19 nt, Artificial Sequence
  Description of Artificial Sequence: Synthetic oligonucleotide
ugacagugucacuucccca

SEQ ID NO: 1775269 - RNA, 19 nt, Artificial Sequence
  Description of Artificial Sequence: Synthetic oligonucleotide
cagggaccagcacucaaag

SEQ ID NO: 1775270 - RNA, 19 nt, Artificial Sequence
  Description of Artificial Sequence: Synthetic oligonucleotide
aguuugcuggcgugaggag

SEQ ID NO: 1775271 - RNA, 19 nt, Artificial Sequence
  Description of Artificial Sequence: Synthetic oligonucleotide
uugccggugucuuggcugc

SEQ ID NO: 1775272 - RNA, 19 nt, Artificial Sequence
  Description of Artificial Sequence: Synthetic oligonucleotide
augaaugcucugggguagc

SEQ ID NO: 1775273 - RNA, 19 nt, Artificial Sequence
  Description of Artificial Sequence: Synthetic oligonucleotide
cuggcagucgcugagcauc

SEQ ID NO: 1775274 - RNA, 19 nt, Artificial Sequence
  Description of Artificial Sequence: Synthetic oligonucleotide
acaguauagcacaucugcu

SEQ ID NO: 1775275 - RNA, 19 nt, Artificial Sequence
  Description of Artificial Sequence: Synthetic oligonucleotide
uggcucuaaggggaagccg

SEQ ID NO: 1775276 - RNA, 19 nt, Artificial Sequence
  Description of Artificial Sequence: Synthetic oligonucleotide
accguucagcacaagcuuc

SEQ ID NO: 1775277 - RNA, 19 nt, Artificial Sequence
  Description of Artificial Sequence: Synthetic oligonucleotide
ugccucguacagugcaucc

SEQ ID NO: 1775278 - RNA, 19 nt, Artificial Sequence
  Description of Artificial Sequence: Synthetic oligonucleotide
auggaaauguuugcucuga

SEQ ID NO: 1775279 - RNA, 19 nt, Artificial Sequence
  Description of Artificial Sequence: Synthetic oligonucleotide
uaaguagcuccgguggcac

SEQ ID NO: 1775280 - RNA, 19 nt, Artificial Sequence
  Description of Artificial Sequence: Synthetic oligonucleotide
gaagcggcgcucgaaacuc

SEQ ID NO: 1775281 - RNA, 19 nt, Artificial Sequence
  Description of Artificial Sequence: Synthetic oligonucleotide
agugcauccaaaggcucug

SEQ ID NO: 1775282 - RNA, 19 nt, Artificial Sequence
  Description of Artificial Sequence: Synthetic oligonucleotide
aagcagcgggcguacuuca

SEQ ID NO: 1775283 - RNA, 19 nt, Artificial Sequence
  Description of Artificial Sequence: Synthetic oligonucleotide
aguagcuccgguggcacug

SEQ ID NO: 1775284 - RNA, 19 nt, Artificial Sequence
  Description of Artificial Sequence: Synthetic oligonucleotide
agugucacuuccccacagu

SEQ ID NO: 1775285 - RNA, 19 nt, Artificial Sequence
  Description of Artificial Sequence: Synthetic oligonucleotide
auggcugaauacucuucgu

SEQ ID NO: 1775286 - RNA, 19 nt, Artificial Sequence
  Description of Artificial Sequence: Synthetic oligonucleotide
gcaguaaguagcuccggug

SEQ ID NO: 1775287 - RNA, 19 nt, Artificial Sequence
  Description of Artificial Sequence: Synthetic oligonucleotide
ucccaguagaucccugcuc

SEQ ID NO: 1775288 - RNA, 19 nt, Artificial Sequence
  Description of Artificial Sequence: Synthetic oligonucleotide
ugcucgguccagcucugug

SEQ ID NO: 1775289 - RNA, 19 nt, Artificial Sequence
  Description of Artificial Sequence: Synthetic oligonucleotide
aaacacugugacaaccguu

SEQ ID NO: 1775290 - RNA, 19 nt, Artificial Sequence
  Description of Artificial Sequence: Synthetic oligonucleotide
agcugcucaagcacuugac

SEQ ID NO: 1775291 - RNA, 19 nt, Artificial Sequence
  Description of Artificial Sequence: Synthetic oligonucleotide
ucuucccaguagaucccug

SEQ ID NO: 1775292 - RNA, 19 nt, Artificial Sequence
  Description of Artificial Sequence: Synthetic oligonucleotide
agagugcagcaucccaugu

SEQ ID NO: 1775293 - RNA, 19 nt, Artificial Sequence
  Description of Artificial Sequence: Synthetic oligonucleotide
uguguggcucuaaggggaa

SEQ ID NO: 1775294 - RNA, 19 nt, Artificial Sequence
  Description of Artificial Sequence: Synthetic oligonucleotide
ccaguguccacucuagaug

SEQ ID NO: 1775295 - RNA, 19 nt, Artificial Sequence
  Description of Artificial Sequence: Synthetic oligonucleotide
cagcacucaaagccugugc

SEQ ID NO: 1775296 - RNA, 19 nt, Artificial Sequence
  Description of Artificial Sequence: Synthetic oligonucleotide
cugugaugaacagcuugcc

SEQ ID NO: 1775297 - RNA, 19 nt, Artificial Sequence
  Description of Artificial Sequence: Synthetic oligonucleotide
ggaacaguuugcuggcgug

SEQ ID NO: 1775298 - RNA, 19 nt, Artificial Sequence
  Description of Artificial Sequence: Synthetic oligonucleotide
acggucuucugcagaauag

SEQ ID NO: 1775299 - RNA, 19 nt, Artificial Sequence
  Description of Artificial Sequence: Synthetic oligonucleotide
cucgaaacucugcagcaga

SEQ ID NO: 1775300 - RNA, 19 nt, Artificial Sequence
  Description of Artificial Sequence: Synthetic oligonucleotide
gugugacugagucuccuga

SEQ ID NO: 1775301 - RNA, 19 nt, Artificial Sequence
  Description of Artificial Sequence: Synthetic oligonucleotide
cuuggaaggcagagagcug

SEQ ID NO: 1775302 - RNA, 19 nt, Artificial Sequence
  Description of Artificial Sequence: Synthetic oligonucleotide
ugcuggguucucgauggcc

SEQ ID NO: 1775303 - RNA, 19 nt, Artificial Sequence
  Description of Artificial Sequence: Synthetic oligonucleotide
guauagcacaucugcugca

SEQ ID NO: 1775304 - RNA, 19 nt, Artificial Sequence
  Description of Artificial Sequence: Synthetic oligonucleotide
cagcgggcguacuucacag

SEQ ID NO: 1775305 - RNA, 19 nt, Artificial Sequence
  Description of Artificial Sequence: Synthetic oligonucleotide
aagccguugaggagcacgu

SEQ ID NO: 1775306 - RNA, 19 nt, Artificial Sequence
  Description of Artificial Sequence: Synthetic oligonucleotide
aaccugagggcucccucaa

SEQ ID NO: 1775307 - RNA, 19 nt, Artificial Sequence
  Description of Artificial Sequence: Synthetic oligonucleotide
cauuuuccagucaccuuca

SEQ ID NO: 1775308 - RNA, 19 nt, Artificial Sequence
  Description of Artificial Sequence: Synthetic oligonucleotide
uagaucccugcucggucca

SEQ ID NO: 1775309 - RNA, 19 nt, Artificial Sequence
  Description of Artificial Sequence: Synthetic oligonucleotide
gcugcucaagcacuugacc

SEQ ID NO: 1775310 - RNA, 19 nt, Artificial Sequence
  Description of Artificial Sequence: Synthetic oligonucleotide
cugccagugccucguacag

SEQ ID NO: 1775311 - RNA, 19 nt, Artificial Sequence
  Description of Artificial Sequence: Synthetic oligonucleotide
cccucaauuucucuucuag

SEQ ID NO: 1775312 - RNA, 19 nt, Artificial Sequence
  Description of Artificial Sequence: Synthetic oligonucleotide
uucuacggagcugcucaag

SEQ ID NO: 1775313 - RNA, 19 nt, Artificial Sequence
  Description of Artificial Sequence: Synthetic oligonucleotide
ggcugaauacucuucguaa

SEQ ID NO: 1775314 - RNA, 19 nt, Artificial Sequence
  Description of Artificial Sequence: Synthetic oligonucleotide
gagcacguuucuacggagc

SEQ ID NO: 1775315 - RNA, 19 nt, Artificial Sequence
  Description of Artificial Sequence: Synthetic oligonucleotide
caaccguucagcacaagcu

SEQ ID NO: 1775316 - RNA, 19 nt, Artificial Sequence
  Description of Artificial Sequence: Synthetic oligonucleotide
aggauuacgauggcugaau

SEQ ID NO: 1775317 - RNA, 19 nt, Artificial Sequence
  Description of Artificial Sequence: Synthetic oligonucleotide
ugacaaccguucagcacaa

SEQ ID NO: 1775318 - RNA, 19 nt, Artificial Sequence
  Description of Artificial Sequence: Synthetic oligonucleotide
gcuugggucaaugggagug

SEQ ID NO: 1775319 - RNA, 19 nt, Artificial Sequence
  Description of Artificial Sequence: Synthetic oligonucleotide
gagcugcucaagcacuuga

SEQ ID NO: 1775320 - RNA, 19 nt, Artificial Sequence
  Description of Artificial Sequence: Synthetic oligonucleotide
agcuugccggugucuuggc

SEQ ID NO: 1775321 - RNA, 19 nt, Artificial Sequence
  Description of Artificial Sequence: Synthetic oligonucleotide
ccuagcuccaggacagucc

SEQ ID NO: 1775322 - RNA, 19 nt, Artificial Sequence
  Description of Artificial Sequence: Synthetic oligonucleotide
auacagggugcuucacggu

SEQ ID NO: 1775323 - RNA, 19 nt, Artificial Sequence
  Description of Artificial Sequence: Synthetic oligonucleotide
guguguggcucuaagggga

SEQ ID NO: 1775324 - RNA, 19 nt, Artificial Sequence
  Description of Artificial Sequence: Synthetic oligonucleotide
augacaacgucugcuugga

SEQ ID NO: 1775325 - RNA, 19 nt, Artificial Sequence
  Description of Artificial Sequence: Synthetic oligonucleotide
ggggaagccguugaggagc

SEQ ID NO: 1775326 - RNA, 19 nt, Artificial Sequence
  Description of Artificial Sequence: Synthetic oligonucleotide
gagauccaccugccuagug

SEQ ID NO: 1775327 - RNA, 19 nt, Artificial Sequence
  Description of Artificial Sequence: Synthetic oligonucleotide
agagaaagcagcgggcgua

SEQ ID NO: 1775328 - RNA, 19 nt, Artificial Sequence
  Description of Artificial Sequence: Synthetic oligonucleotide
uauaggccacauagacauc

SEQ ID NO: 1775329 - RNA, 19 nt, Artificial Sequence
  Description of Artificial Sequence: Synthetic oligonucleotide
agcaucuucaggacccuga

SEQ ID NO: 1775330 - RNA, 19 nt, Artificial Sequence
  Description of Artificial Sequence: Synthetic oligonucleotide
gguagagugcagcauccca

SEQ ID NO: 1775331 - RNA, 19 nt, Artificial Sequence
  Description of Artificial Sequence: Synthetic oligonucleotide
uuucuacggagcugcucaa

SEQ ID NO: 1775332 - RNA, 19 nt, Artificial Sequence
  Description of Artificial Sequence: Synthetic oligonucleotide
ggagcacguuucuacggag

SEQ ID NO: 1775333 - RNA, 19 nt, Artificial Sequence
  Description of Artificial Sequence: Synthetic oligonucleotide
acgucugcuuggaaggcag

SEQ ID NO: 1775334 - RNA, 19 nt, Artificial Sequence
  Description of Artificial Sequence: Synthetic oligonucleotide
gacaguccugucagugaag

SEQ ID NO: 1775335 - RNA, 19 nt, Artificial Sequence
  Description of Artificial Sequence: Synthetic oligonucleotide
gaccaugacagucgcugaa

SEQ ID NO: 1775336 - RNA, 19 nt, Artificial Sequence
  Description of Artificial Sequence: Synthetic oligonucleotide
cagucgcugagcaucuuca

SEQ ID NO: 1775337 - RNA, 19 nt, Artificial Sequence
  Description of Artificial Sequence: Synthetic oligonucleotide
uggcagucgcugagcaucu

SEQ ID NO: 1775338 - RNA, 19 nt, Artificial Sequence
  Description of Artificial Sequence: Synthetic oligonucleotide
guaaguagcuccgguggca

SEQ ID NO: 1775339 - RNA, 19 nt, Artificial Sequence
  Description of Artificial Sequence: Synthetic oligonucleotide
cacaagcuucaggauuacg

SEQ ID NO: 1775340 - RNA, 19 nt, Artificial Sequence
  Description of Artificial Sequence: Synthetic oligonucleotide
guccacucuagaugaucug

SEQ ID NO: 1775341 - RNA, 19 nt, Artificial Sequence
  Description of Artificial Sequence: Synthetic oligonucleotide
cuccgguggcacugggugg

SEQ ID NO: 1775342 - RNA, 19 nt, Artificial Sequence
  Description of Artificial Sequence: Synthetic oligonucleotide
caggacccugaccagugac

SEQ ID NO: 1775343 - RNA, 19 nt, Artificial Sequence
  Description of Artificial Sequence: Synthetic oligonucleotide
uccgguggcacugggugga

SEQ ID NO: 1775344 - RNA, 19 nt, Artificial Sequence
  Description of Artificial Sequence: Synthetic oligonucleotide
gagaaagcagcgggcguac

SEQ ID NO: 1775345 - RNA, 19 nt, Artificial Sequence
  Description of Artificial Sequence: Synthetic oligonucleotide
gaccagcacucaaagccug

SEQ ID NO: 1775346 - RNA, 19 nt, Artificial Sequence
  Description of Artificial Sequence: Synthetic oligonucleotide
uugggucaaugggagugug

SEQ ID NO: 1775347 - RNA, 19 nt, Artificial Sequence
  Description of Artificial Sequence: Synthetic oligonucleotide
cagugucacuuccccacag

SEQ ID NO: 1775348 - RNA, 19 nt, Artificial Sequence
  Description of Artificial Sequence: Synthetic oligonucleotide
ugaaugcucugggguagca

SEQ ID NO: 1775349 - RNA, 19 nt, Artificial Sequence
  Description of Artificial Sequence: Synthetic oligonucleotide
cacuuccccacaguauagc

SEQ ID NO: 1775350 - RNA, 19 nt, Artificial Sequence
  Description of Artificial Sequence: Synthetic oligonucleotide
agcaucccauguaaccaag

SEQ ID NO: 1775351 - RNA, 19 nt, Artificial Sequence
  Description of Artificial Sequence: Synthetic oligonucleotide
gguauaggccacauagaca

SEQ ID NO: 1775352 - RNA, 19 nt, Artificial Sequence
  Description of Artificial Sequence: Synthetic oligonucleotide
cugcaaugacaacgucugc

SEQ ID NO: 1775353 - RNA, 19 nt, Artificial Sequence
  Description of Artificial Sequence: Synthetic oligonucleotide
gggaguguguggcucuaag

SEQ ID NO: 1775354 - RNA, 19 nt, Artificial Sequence
  Description of Artificial Sequence: Synthetic oligonucleotide
uucuaggcucugccaggga

SEQ ID NO: 1775355 - RNA, 19 nt, Artificial Sequence
  Description of Artificial Sequence: Synthetic oligonucleotide
caagcuucaggauuacgau

SEQ ID NO: 1775356 - RNA, 19 nt, Artificial Sequence
  Description of Artificial Sequence: Synthetic oligonucleotide
ggcccacucugccagguag

SEQ ID NO: 1775357 - RNA, 19 nt, Artificial Sequence
  Description of Artificial Sequence: Synthetic oligonucleotide
acagucgcugaagaugaau

SEQ ID NO: 1775358 - RNA, 19 nt, Artificial Sequence
  Description of Artificial Sequence: Synthetic oligonucleotide
gcguacuucacagauggca

SEQ ID NO: 1775359 - RNA, 19 nt, Artificial Sequence
  Description of Artificial Sequence: Synthetic oligonucleotide
ggcugcggaugguauaggc

SEQ ID NO: 1775360 - RNA, 19 nt, Artificial Sequence
  Description of Artificial Sequence: Synthetic oligonucleotide
gagugcagcaucccaugua

SEQ ID NO: 1775361 - RNA, 19 nt, Artificial Sequence
  Description of Artificial Sequence: Synthetic oligonucleotide
gcuuggaaggcagagagcu

SEQ ID NO: 1775362 - RNA, 19 nt, Artificial Sequence
  Description of Artificial Sequence: Synthetic oligonucleotide
ugcuugggucaaugggagu

SEQ ID NO: 1775363 - RNA, 19 nt, Artificial Sequence
  Description of Artificial Sequence: Synthetic oligonucleotide
agggaacaguuugcuggcg

SEQ ID NO: 1775364 - RNA, 19 nt, Artificial Sequence
  Description of Artificial Sequence: Synthetic oligonucleotide
gugucacuuccccacagua

SEQ ID NO: 1775365 - RNA, 19 nt, Artificial Sequence
  Description of Artificial Sequence: Synthetic oligonucleotide
gagagcugagaagcuguca

SEQ ID NO: 1775366 - RNA, 19 nt, Artificial Sequence
  Description of Artificial Sequence: Synthetic oligonucleotide
acucuucguaagggaacag

SEQ ID NO: 1775367 - RNA, 19 nt, Artificial Sequence
  Description of Artificial Sequence: Synthetic oligonucleotide
aucccugcucgguccagcu

SEQ ID NO: 1775368 - RNA, 19 nt, Artificial Sequence
  Description of Artificial Sequence: Synthetic oligonucleotide
cagugccucguacagugca

SEQ ID NO: 1775369 - RNA, 19 nt, Artificial Sequence
  Description of Artificial Sequence: Synthetic oligonucleotide
aggcaguaaguagcuccgg

SEQ ID NO: 1775370 - RNA, 19 nt, Artificial Sequence
  Description of Artificial Sequence: Synthetic oligonucleotide
acagggugcuucacggucu

SEQ ID NO: 1775371 - RNA, 19 nt, Artificial Sequence
  Description of Artificial Sequence: Synthetic oligonucleotide
ugagcaucuucaggacccu

SEQ ID NO: 1775372 - RNA, 19 nt, Artificial Sequence
  Description of Artificial Sequence: Synthetic oligonucleotide
gaucccugcucgguccagc

SEQ ID NO: 1775373 - RNA, 19 nt, Artificial Sequence
  Description of Artificial Sequence: Synthetic oligonucleotide
cuucacggucuucugcaga

SEQ ID NO: 1775374 - RNA, 19 nt, Artificial Sequence
  Description of Artificial Sequence: Synthetic oligonucleotide
ugacaacgucugcuuggaa

SEQ ID NO: 1775375 - RNA, 19 nt, Artificial Sequence
  Description of Artificial Sequence: Synthetic oligonucleotide
cuagcuccaggacaguccu

SEQ ID NO: 1775376 - RNA, 19 nt, Artificial Sequence
  Description of Artificial Sequence: Synthetic oligonucleotide
ucugugggcacagccucau

SEQ ID NO: 1775377 - RNA, 19 nt, Artificial Sequence
  Description of Artificial Sequence: Synthetic oligonucleotide
acauagacaucaggagcau

SEQ ID NO: 1775378 - RNA, 19 nt, Artificial Sequence
  Description of Artificial Sequence: Synthetic oligonucleotide
gagagaaagcagcgggcgu

SEQ ID NO: 1775379 - RNA, 19 nt, Artificial Sequence
  Description of Artificial Sequence: Synthetic oligonucleotide
guagcuccgguggcacugg

SEQ ID NO: 1775380 - RNA, 19 nt, Artificial Sequence
  Description of Artificial Sequence: Synthetic oligonucleotide
guguccacucuagaugauc

SEQ ID NO: 1775381 - RNA, 19 nt, Artificial Sequence
  Description of Artificial Sequence: Synthetic oligonucleotide
gccuagugaucucauuuuc

SEQ ID NO: 1775382 - RNA, 19 nt, Artificial Sequence
  Description of Artificial Sequence: Synthetic oligonucleotide
gucgcugaagaugaaugcu

SEQ ID NO: 1775383 - RNA, 19 nt, Artificial Sequence
  Description of Artificial Sequence: Synthetic oligonucleotide
gaauagccagaagcagcuc

SEQ ID NO: 1775384 - RNA, 19 nt, Artificial Sequence
  Description of Artificial Sequence: Synthetic oligonucleotide
ucccucaauuucucuucua

SEQ ID NO: 1775385 - RNA, 19 nt, Artificial Sequence
  Description of Artificial Sequence: Synthetic oligonucleotide
aggacccugaccagugaca

SEQ ID NO: 1775386 - RNA, 19 nt, Artificial Sequence
  Description of Artificial Sequence: Synthetic oligonucleotide
cagcaucccauguaaccaa

SEQ ID NO: 1775387 - RNA, 19 nt, Artificial Sequence
  Description of Artificial Sequence: Synthetic oligonucleotide
cuguggugccaugggacac

SEQ ID NO: 1775388 - RNA, 19 nt, Artificial Sequence
  Description of Artificial Sequence: Synthetic oligonucleotide
gaaagcagcgggcguacuu

SEQ ID NO: 1775389 - RNA, 19 nt, Artificial Sequence
  Description of Artificial Sequence: Synthetic oligonucleotide
ccguugaggagcacguuuc

SEQ ID NO: 1775390 - RNA, 19 nt, Artificial Sequence
  Description of Artificial Sequence: Synthetic oligonucleotide
gagggcucccucaauuucu

SEQ ID NO: 1775391 - RNA, 19 nt, Artificial Sequence
  Description of Artificial Sequence: Synthetic oligonucleotide
cuucguaagggaacaguuu

SEQ ID NO: 1775392 - RNA, 19 nt, Artificial Sequence
  Description of Artificial Sequence: Synthetic oligonucleotide
cugccuagugaucucauuu

SEQ ID NO: 1775393 - RNA, 19 nt, Artificial Sequence
  Description of Artificial Sequence: Synthetic oligonucleotide
ccaguagaucccugcucgg

SEQ ID NO: 1775394 - RNA, 19 nt, Artificial Sequence
  Description of Artificial Sequence: Synthetic oligonucleotide
cacggucuucugcagaaua

SEQ ID NO: 1775395 - RNA, 19 nt, Artificial Sequence
  Description of Artificial Sequence: Synthetic oligonucleotide
ccacaguauagcacaucug

SEQ ID NO: 1775396 - RNA, 19 nt, Artificial Sequence
  Description of Artificial Sequence: Synthetic oligonucleotide
ccucuucccaguagauccc

SEQ ID NO: 1775397 - RNA, 19 nt, Artificial Sequence
  Description of Artificial Sequence: Synthetic oligonucleotide
gcucaagcacuugaccaug

SEQ ID NO: 1775398 - RNA, 19 nt, Artificial Sequence
  Description of Artificial Sequence: Synthetic oligonucleotide
agcgggcguacuucacaga

SEQ ID NO: 1775399 - RNA, 19 nt, Artificial Sequence
  Description of Artificial Sequence: Synthetic oligonucleotide
gcucgaaacucugcagcag

SEQ ID NO: 1775400 - RNA, 19 nt, Artificial Sequence
  Description of Artificial Sequence: Synthetic oligonucleotide
uggguucucgauggcccac

SEQ ID NO: 1775401 - RNA, 19 nt, Artificial Sequence
  Description of Artificial Sequence: Synthetic oligonucleotide
cuggguucucgauggccca

SEQ ID NO: 1775402 - RNA, 19 nt, Artificial Sequence
  Description of Artificial Sequence: Synthetic oligonucleotide
ccuugcaaauggccagacc

SEQ ID NO: 1775403 - RNA, 19 nt, Artificial Sequence
  Description of Artificial Sequence: Synthetic oligonucleotide
caugacagucgcugaagau

SEQ ID NO: 1775404 - RNA, 19 nt, Artificial Sequence
  Description of Artificial Sequence: Synthetic oligonucleotide
gacaaccguucagcacaag

SEQ ID NO: 1775405 - RNA, 19 nt, Artificial Sequence
  Description of Artificial Sequence: Synthetic oligonucleotide
cgcacgagccgccaggaag

SEQ ID NO: 1775406 - RNA, 19 nt, Artificial Sequence
  Description of Artificial Sequence: Synthetic oligonucleotide
ugccagugccucguacagu

SEQ ID NO: 1775407 - RNA, 19 nt, Artificial Sequence
  Description of Artificial Sequence: Synthetic oligonucleotide
cacgagccgccaggaagcg

SEQ ID NO: 1775408 - RNA, 19 nt, Artificial Sequence
  Description of Artificial Sequence: Synthetic oligonucleotide
ggauuacgauggcugaaua

SEQ ID NO: 1775409 - RNA, 19 nt, Artificial Sequence
  Description of Artificial Sequence: Synthetic oligonucleotide
agugccucguacagugcau

SEQ ID NO: 1775410 - RNA, 19 nt, Artificial Sequence
  Description of Artificial Sequence: Synthetic oligonucleotide
agucuccugaaggcaguaa

SEQ ID NO: 1775411 - RNA, 19 nt, Artificial Sequence
  Description of Artificial Sequence: Synthetic oligonucleotide
cugcugcaaugacaacguc

SEQ ID NO: 1775412 - RNA, 19 nt, Artificial Sequence
  Description of Artificial Sequence: Synthetic oligonucleotide
cgauggcccacucugccag

SEQ ID NO: 1775413 - RNA, 19 nt, Artificial Sequence
  Description of Artificial Sequence: Synthetic oligonucleotide
ggccagaccugugaggcca

SEQ ID NO: 1775414 - RNA, 19 nt, Artificial Sequence
  Description of Artificial Sequence: Synthetic oligonucleotide
accagcacucaaagccugu

SEQ ID NO: 1775415 - RNA, 19 nt, Artificial Sequence
  Description of Artificial Sequence: Synthetic oligonucleotide
acgagccgccaggaagcgg

SEQ ID NO: 1775416 - RNA, 19 nt, Artificial Sequence
  Description of Artificial Sequence: Synthetic oligonucleotide
agaaagcagcgggcguacu

SEQ ID NO: 1775417 - RNA, 19 nt, Artificial Sequence
  Description of Artificial Sequence: Synthetic oligonucleotide
caucagaaccucugccagu

SEQ ID NO: 1775418 - RNA, 19 nt, Artificial Sequence
  Description of Artificial Sequence: Synthetic oligonucleotide
cagcacaagcuucaggauu

SEQ ID NO: 1775419 - RNA, 19 nt, Artificial Sequence
  Description of Artificial Sequence: Synthetic oligonucleotide
gaggcaccucuucccagua

SEQ ID NO: 1775420 - RNA, 19 nt, Artificial Sequence
  Description of Artificial Sequence: Synthetic oligonucleotide
gcaucccauguaaccaagc

SEQ ID NO: 1775421 - RNA, 19 nt, Artificial Sequence
  Description of Artificial Sequence: Synthetic oligonucleotide
aagcggcgcucgaaacucu

SEQ ID NO: 1775422 - RNA, 19 nt, Artificial Sequence
  Description of Artificial Sequence: Synthetic oligonucleotide
ggcucuaaggggaagccgu

SEQ ID NO: 1775423 - RNA, 19 nt, Artificial Sequence
  Description of Artificial Sequence: Synthetic oligonucleotide
ucgugguccucaggcgcca

SEQ ID NO: 1775424 - RNA, 19 nt, Artificial Sequence
  Description of Artificial Sequence: Synthetic oligonucleotide
ucacggucuucugcagaau

SEQ ID NO: 1775425 - RNA, 19 nt, Artificial Sequence
  Description of Artificial Sequence: Synthetic oligonucleotide
agcggcgcucgaaacucug

SEQ ID NO: 1775426 - RNA, 19 nt, Artificial Sequence
  Description of Artificial Sequence: Synthetic oligonucleotide
gcaaauggccagaccugug

SEQ ID NO: 1775427 - RNA, 19 nt, Artificial Sequence
  Description of Artificial Sequence: Synthetic oligonucleotide
ggcgugaggaggcaccucu

SEQ ID NO: 1775428 - RNA, 19 nt, Artificial Sequence
  Description of Artificial Sequence: Synthetic oligonucleotide
gcagcgggcguacuucaca

SEQ ID NO: 1775429 - RNA, 19 nt, Artificial Sequence
  Description of Artificial Sequence: Synthetic oligonucleotide
gugcagcaucccauguaac

SEQ ID NO: 1775430 - RNA, 19 nt, Artificial Sequence
  Description of Artificial Sequence: Synthetic oligonucleotide
cucugagccaguguccacu

SEQ ID NO: 1775431 - RNA, 19 nt, Artificial Sequence
  Description of Artificial Sequence: Synthetic oligonucleotide
ugccggugucuuggcugcg

SEQ ID NO: 1775432 - RNA, 19 nt, Artificial Sequence
  Description of Artificial Sequence: Synthetic oligonucleotide
ccguucagcacaagcuuca

SEQ ID NO: 1775433 - RNA, 19 nt, Artificial Sequence
  Description of Artificial Sequence: Synthetic oligonucleotide
accugagggcucccucaau

SEQ ID NO: 1775434 - RNA, 19 nt, Artificial Sequence
  Description of Artificial Sequence: Synthetic oligonucleotide
gggguagcaugccuugcaa

SEQ ID NO: 1775435 - RNA, 19 nt, Artificial Sequence
  Description of Artificial Sequence: Synthetic oligonucleotide
gggaacaguuugcuggcgu

SEQ ID NO: 1775436 - RNA, 19 nt, Artificial Sequence
  Description of Artificial Sequence: Synthetic oligonucleotide
gccaguguccacucuagau

SEQ ID NO: 1775437 - RNA, 19 nt, Artificial Sequence
  Description of Artificial Sequence: Synthetic oligonucleotide
ccucaggcgccaucccggg

SEQ ID NO: 1775438 - RNA, 19 nt, Artificial Sequence
  Description of Artificial Sequence: Synthetic oligonucleotide
ugggaguguguggcucuaa

SEQ ID NO: 1775439 - RNA, 19 nt, Artificial Sequence
  Description of Artificial Sequence: Synthetic oligonucleotide
uugcuggcgugaggaggca

SEQ ID NO: 1775440 - RNA, 19 nt, Artificial Sequence
  Description of Artificial Sequence: Synthetic oligonucleotide
aguguccacucuagaugau

SEQ ID NO: 1775441 - RNA, 19 nt, Artificial Sequence
  Description of Artificial Sequence: Synthetic oligonucleotide
gcacguuucuacggagcug

SEQ ID NO: 1775442 - RNA, 19 nt, Artificial Sequence
  Description of Artificial Sequence: Synthetic oligonucleotide
cucgguccagcucugugau

SEQ ID NO: 1775443 - RNA, 19 nt, Artificial Sequence
  Description of Artificial Sequence: Synthetic oligonucleotide
caccugccuagugaucuca

SEQ ID NO: 1775444 - RNA, 19 nt, Artificial Sequence
  Description of Artificial Sequence: Synthetic oligonucleotide
cuugaccaugacagucgcu

SEQ ID NO: 1775445 - RNA, 19 nt, Artificial Sequence
  Description of Artificial Sequence: Synthetic oligonucleotide
cuugggucaaugggagugu

SEQ ID NO: 1775446 - RNA, 19 nt, Artificial Sequence
  Description of Artificial Sequence: Synthetic oligonucleotide
cucccucaauuucucuucu

SEQ ID NO: 1775447 - RNA, 19 nt, Artificial Sequence
  Description of Artificial Sequence: Synthetic oligonucleotide
gugcucucagagaguguga

SEQ ID NO: 1775448 - RNA, 19 nt, Artificial Sequence
  Description of Artificial Sequence: Synthetic oligonucleotide
ccagcacucaaagccugug

SEQ ID NO: 1775449 - RNA, 19 nt, Artificial Sequence
  Description of Artificial Sequence: Synthetic oligonucleotide
cucugggguagcaugccuu

SEQ ID NO: 1775450 - RNA, 19 nt, Artificial Sequence
  Description of Artificial Sequence: Synthetic oligonucleotide
ggccagcuccacugccuag

SEQ ID NO: 1775451 - RNA, 19 nt, Artificial Sequence
  Description of Artificial Sequence: Synthetic oligonucleotide
ggaugguauaggccacaua

SEQ ID NO: 1775452 - RNA, 19 nt, Artificial Sequence
  Description of Artificial Sequence: Synthetic oligonucleotide
gccggugucuuggcugcgg

SEQ ID NO: 1775453 - RNA, 19 nt, Artificial Sequence
  Description of Artificial Sequence: Synthetic oligonucleotide
accugccuagugaucucau

SEQ ID NO: 1775454 - RNA, 19 nt, Artificial Sequence
  Description of Artificial Sequence: Synthetic oligonucleotide
gcgggcguacuucacagau

SEQ ID NO: 1775455 - RNA, 19 nt, Artificial Sequence
  Description of Artificial Sequence: Synthetic oligonucleotide
gaccagugacagugucacu

SEQ ID NO: 1775456 - RNA, 19 nt, Artificial Sequence
  Description of Artificial Sequence: Synthetic oligonucleotide
augggaguguguggcucua

SEQ ID NO: 1775457 - RNA, 19 nt, Artificial Sequence
  Description of Artificial Sequence: Synthetic oligonucleotide
acguuucuacggagcugcu

SEQ ID NO: 1775458 - RNA, 19 nt, Artificial Sequence
  Description of Artificial Sequence: Synthetic oligonucleotide
cgcucgaaacucugcagca

SEQ ID NO: 1775459 - RNA, 19 nt, Artificial Sequence
  Description of Artificial Sequence: Synthetic oligonucleotide
ggcguacuucacagauggc

SEQ ID NO: 1775460 - RNA, 19 nt, Artificial Sequence
  Description of Artificial Sequence: Synthetic oligonucleotide
gccuagcuccaggacaguc

SEQ ID NO: 1775461 - RNA, 19 nt, Artificial Sequence
  Description of Artificial Sequence: Synthetic oligonucleotide
gccguugaggagcacguuu

SEQ ID NO: 1775462 - RNA, 19 nt, Artificial Sequence
  Description of Artificial Sequence: Synthetic oligonucleotide
gcacaagcuucaggauuac

SEQ ID NO: 1775463 - RNA, 19 nt, Artificial Sequence
  Description of Artificial Sequence: Synthetic oligonucleotide
uugggcugcuugggucaau

SEQ ID NO: 1775464 - RNA, 19 nt, Artificial Sequence
  Description of Artificial Sequence: Synthetic oligonucleotide
cgggcguacuucacagaug

SEQ ID NO: 1775465 - RNA, 19 nt, Artificial Sequence
  Description of Artificial Sequence: Synthetic oligonucleotide
agccguugaggagcacguu

SEQ ID NO: 1775466 - RNA, 19 nt, Artificial Sequence
  Description of Artificial Sequence: Synthetic oligonucleotide
gcggcgcucgaaacucugc

SEQ ID NO: 1775467 - RNA, 19 nt, Artificial Sequence
  Description of Artificial Sequence: Synthetic oligonucleotide
gcacucaaagccugugcuu

SEQ ID NO: 1775468 - RNA, 19 nt, Artificial Sequence
  Description of Artificial Sequence: Synthetic oligonucleotide
gcuccaggacaguccuguc

SEQ ID NO: 1775469 - RNA, 19 nt, Artificial Sequence
  Description of Artificial Sequence: Synthetic oligonucleotide
ccacucuagaugaucugau

SEQ ID NO: 1775470 - RNA, 19 nt, Artificial Sequence
  Description of Artificial Sequence: Synthetic oligonucleotide
cugugcucucagagagugu

SEQ ID NO: 1775471 - RNA, 19 nt, Artificial Sequence
  Description of Artificial Sequence: Synthetic oligonucleotide
cagaccugugaggccagcu

SEQ ID NO: 1775472 - RNA, 19 nt, Artificial Sequence
  Description of Artificial Sequence: Synthetic oligonucleotide
ccaagccuguggugccaug

SEQ ID NO: 1775473 - RNA, 19 nt, Artificial Sequence
  Description of Artificial Sequence: Synthetic oligonucleotide
cguaagggaacaguuugcu

SEQ ID NO: 1775474 - RNA, 19 nt, Artificial Sequence
  Description of Artificial Sequence: Synthetic oligonucleotide
cguuucuacggagcugcuc

SEQ ID NO: 1775475 - RNA, 19 nt, Artificial Sequence
  Description of Artificial Sequence: Synthetic oligonucleotide
cuggcgugaggaggcaccu

SEQ ID NO: 1775476 - RNA, 19 nt, Artificial Sequence
  Description of Artificial Sequence: Synthetic oligonucleotide
ccccacaguauagcacauc

SEQ ID NO: 1775477 - RNA, 19 nt, Artificial Sequence
  Description of Artificial Sequence: Synthetic oligonucleotide
gccgccaggaagcggcgcu

SEQ ID NO: 1775478 - RNA, 19 nt, Artificial Sequence
  Description of Artificial Sequence: Synthetic oligonucleotide
gcuugccggugucuuggcu

SEQ ID NO: 1775479 - RNA, 19 nt, Artificial Sequence
  Description of Artificial Sequence: Synthetic oligonucleotide
gccugugcuuacuguacuu

SEQ ID NO: 1775480 - RNA, 19 nt, Artificial Sequence
  Description of Artificial Sequence: Synthetic oligonucleotide
cggcgcucgaaacucugca

SEQ ID NO: 1775481 - RNA, 19 nt, Artificial Sequence
  Description of Artificial Sequence: Synthetic oligonucleotide
ccagaccugugaggccagc

SEQ ID NO: 1775482 - RNA, 19 nt, Artificial Sequence
  Description of Artificial Sequence: Synthetic oligonucleotide
ccggugucuuggcugcgga

SEQ ID NO: 1775483 - RNA, 19 nt, Artificial Sequence
  Description of Artificial Sequence: Synthetic oligonucleotide
gccagguagagugcagcau

SEQ ID NO: 1775484 - RNA, 19 nt, Artificial Sequence
  Description of Artificial Sequence: Synthetic oligonucleotide
ggaagccguugaggagcac

SEQ ID NO: 1775485 - RNA, 19 nt, Artificial Sequence
  Description of Artificial Sequence: Synthetic oligonucleotide
ggguucucgauggcccacu

SEQ ID NO: 1775486 - RNA, 19 nt, Artificial Sequence
  Description of Artificial Sequence: Synthetic oligonucleotide
gugcacauacagggugcuu

SEQ ID NO: 1775487 - RNA, 19 nt, Artificial Sequence
  Description of Artificial Sequence: Synthetic oligonucleotide
gcgcacgagccgccaggaa

SEQ ID NO: 1775488 - RNA, 19 nt, Artificial Sequence
  Description of Artificial Sequence: Synthetic oligonucleotide
ccugucagugaaggcugcu

SEQ ID NO: 1775489 - RNA, 19 nt, Artificial Sequence
  Description of Artificial Sequence: Synthetic oligonucleotide
ggcacuggguggacucuuu

SEQ ID NO: 1775490 - RNA, 19 nt, Artificial Sequence
  Description of Artificial Sequence: Synthetic oligonucleotide
ccgguggcacuggguggac

SEQ ID NO: 1775491 - RNA, 19 nt, Artificial Sequence
  Description of Artificial Sequence: Synthetic oligonucleotide
cugcucgguccagcucugu

SEQ ID NO: 1775492 - RNA, 19 nt, Artificial Sequence
  Description of Artificial Sequence: Synthetic oligonucleotide
gcgugaggaggcaccucuu

SEQ ID NO: 1775493 - RNA, 19 nt, Artificial Sequence
  Description of Artificial Sequence: Synthetic oligonucleotide
cggaugguauaggccacau

SEQ ID NO: 1775494 - RNA, 19 nt, Artificial Sequence
  Description of Artificial Sequence: Synthetic oligonucleotide
uauuguaaguacaaaaugg

SEQ ID NO: 1775495 - RNA, 19 nt, Artificial Sequence
  Description of Artificial Sequence: Synthetic oligonucleotide
aaacagugagcuuagaguc

SEQ ID NO: 1775496 - RNA, 19 nt, Artificial Sequence
  Description of Artificial Sequence: Synthetic oligonucleotide
auaguuuacuguuucgacc

SEQ ID NO: 1775497 - RNA, 19 nt, Artificial Sequence
  Description of Artificial Sequence: Synthetic oligonucleotide
uguaaguacaaaauggcac

SEQ ID NO: 1775498 - RNA, 19 nt, Artificial Sequence
  Description of Artificial Sequence: Synthetic oligonucleotide
uguuauuuggucuagguau

SEQ ID NO: 1775499 - RNA, 19 nt, Artificial Sequence
  Description of Artificial Sequence: Synthetic oligonucleotide
uaaucauuccuacugaacu

SEQ ID NO: 1775500 - RNA, 19 nt, Artificial Sequence
  Description of Artificial Sequence: Synthetic oligonucleotide
gucguuaaugcuuagagug

SEQ ID NO: 1775501 - RNA, 19 nt, Artificial Sequence
  Description of Artificial Sequence: Synthetic oligonucleotide
auuguaaguacaaaauggc

SEQ ID NO: 1775502 - RNA, 19 nt, Artificial Sequence
  Description of Artificial Sequence: Synthetic oligonucleotide
aaucauuccuacugaacuc

SEQ ID NO: 1775503 - RNA, 19 nt, Artificial Sequence
  Description of Artificial Sequence: Synthetic oligonucleotide
ugggauauuggcuuuagcc

SEQ ID NO: 1775504 - RNA, 19 nt, Artificial Sequence
  Description of Artificial Sequence: Synthetic oligonucleotide
aguacaaaauggcacuucg

SEQ ID NO: 1775505 - RNA, 19 nt, Artificial Sequence
  Description of Artificial Sequence: Synthetic oligonucleotide
gacaguguguauaagaaag

SEQ ID NO: 1775506 - RNA, 19 nt, Artificial Sequence
  Description of Artificial Sequence: Synthetic oligonucleotide
ucuucauaaacagugagcu

SEQ ID NO: 1775507 - RNA, 19 nt, Artificial Sequence
  Description of Artificial Sequence: Synthetic oligonucleotide
aacaauauauagucuuucu

SEQ ID NO: 1775508 - RNA, 19 nt, Artificial Sequence
  Description of Artificial Sequence: Synthetic oligonucleotide
caaucuugaguuuuggagc

SEQ ID NO: 1775509 - RNA, 19 nt, Artificial Sequence
  Description of Artificial Sequence: Synthetic oligonucleotide
uggucguuaaugcuuagag

SEQ ID NO: 1775510 - RNA, 19 nt, Artificial Sequence
  Description of Artificial Sequence: Synthetic oligonucleotide
uuagccuaaauugugggag

SEQ ID NO: 1775511 - RNA, 19 nt, Artificial Sequence
  Description of Artificial Sequence: Synthetic oligonucleotide
ucuucaacugguacaaggc

SEQ ID NO: 1775512 - RNA, 19 nt, Artificial Sequence
  Description of Artificial Sequence: Synthetic oligonucleotide
acaaggcccaaacagcacc

SEQ ID NO: 1775513 - RNA, 19 nt, Artificial Sequence
  Description of Artificial Sequence: Synthetic oligonucleotide
uuugcuguuugccucaugu

SEQ ID NO: 1775514 - RNA, 19 nt, Artificial Sequence
  Description of Artificial Sequence: Synthetic oligonucleotide
acugguacaaggcccaaac

SEQ ID NO: 1775515 - RNA, 19 nt, Artificial Sequence
  Description of Artificial Sequence: Synthetic oligonucleotide
uaguuuacuguuucgacca

SEQ ID NO: 1775516 - RNA, 19 nt, Artificial Sequence
  Description of Artificial Sequence: Synthetic oligonucleotide
guauuguaaguacaaaaug

SEQ ID NO: 1775517 - RNA, 19 nt, Artificial Sequence
  Description of Artificial Sequence: Synthetic oligonucleotide
acaauauauagucuuucug

SEQ ID NO: 1775518 - RNA, 19 nt, Artificial Sequence
  Description of Artificial Sequence: Synthetic oligonucleotide
aagaaagagccuuccuccg

SEQ ID NO: 1775519 - RNA, 19 nt, Artificial Sequence
  Description of Artificial Sequence: Synthetic oligonucleotide
uaaauauggcuauaauaga

SEQ ID NO: 1775520 - RNA, 19 nt, Artificial Sequence
  Description of Artificial Sequence: Synthetic oligonucleotide
ucuagguauuguaaguaca

SEQ ID NO: 1775521 - RNA, 19 nt, Artificial Sequence
  Description of Artificial Sequence: Synthetic oligonucleotide
cuccuugugccauaaaggg

SEQ ID NO: 1775522 - RNA, 19 nt, Artificial Sequence
  Description of Artificial Sequence: Synthetic oligonucleotide
agucuauagcagcauggcc

SEQ ID NO: 1775523 - RNA, 19 nt, Artificial Sequence
  Description of Artificial Sequence: Synthetic oligonucleotide
gaaacgugaacugaugggc

SEQ ID NO: 1775524 - RNA, 19 nt, Artificial Sequence
  Description of Artificial Sequence: Synthetic oligonucleotide
agcuuagaguccuucuugc

SEQ ID NO: 1775525 - RNA, 19 nt, Artificial Sequence
  Description of Artificial Sequence: Synthetic oligonucleotide
aggaaacgugaacugaugg

SEQ ID NO: 1775526 - RNA, 19 nt, Artificial Sequence
  Description of Artificial Sequence: Synthetic oligonucleotide
uauaguuuacuguuucgac

SEQ ID NO: 1775527 - RNA, 19 nt, Artificial Sequence
  Description of Artificial Sequence: Synthetic oligonucleotide
cuuuagccuaaauuguggg

SEQ ID NO: 1775528 - RNA, 19 nt, Artificial Sequence
  Description of Artificial Sequence: Synthetic oligonucleotide
uccuacugaacucuguuac

SEQ ID NO: 1775529 - RNA, 19 nt, Artificial Sequence
  Description of Artificial Sequence: Synthetic oligonucleotide
uuggucuagguauuguaag

SEQ ID NO: 1775530 - RNA, 19 nt, Artificial Sequence
  Description of Artificial Sequence: Synthetic oligonucleotide
ucuggauggucguuaaugc

SEQ ID NO: 1775531 - RNA, 19 nt, Artificial Sequence
  Description of Artificial Sequence: Synthetic oligonucleotide
ucauaaacagugagcuuag

SEQ ID NO: 1775532 - RNA, 19 nt, Artificial Sequence
  Description of Artificial Sequence: Synthetic oligonucleotide
ugugcaagcuccccuaggc

SEQ ID NO: 1775533 - RNA, 19 nt, Artificial Sequence
  Description of Artificial Sequence: Synthetic oligonucleotide
gcaaucuugaguuuuggag

SEQ ID NO: 1775534 - RNA, 19 nt, Artificial Sequence
  Description of Artificial Sequence: Synthetic oligonucleotide
uccuugugccauaaagggg

SEQ ID NO: 1775535 - RNA, 19 nt, Artificial Sequence
  Description of Artificial Sequence: Synthetic oligonucleotide
aaccugugcuaaucauucc

SEQ ID NO: 1775536 - RNA, 19 nt, Artificial Sequence
  Description of Artificial Sequence: Synthetic oligonucleotide
ugucguauaguuuacuguu

SEQ ID NO: 1775537 - RNA, 19 nt, Artificial Sequence
  Description of Artificial Sequence: Synthetic oligonucleotide
uauaagaaagagccuuccu

SEQ ID NO: 1775538 - RNA, 19 nt, Artificial Sequence
  Description of Artificial Sequence: Synthetic oligonucleotide
gugcuaaucauuccuacug

SEQ ID NO: 1775539 - RNA, 19 nt, Artificial Sequence
  Description of Artificial Sequence: Synthetic oligonucleotide
uuuagccuaaauuguggga

SEQ ID NO: 1775540 - RNA, 19 nt, Artificial Sequence
  Description of Artificial Sequence: Synthetic oligonucleotide
aauggcaccauucguguua

SEQ ID NO: 1775541 - RNA, 19 nt, Artificial Sequence
  Description of Artificial Sequence: Synthetic oligonucleotide
ucguuaaugcuuagagugc

SEQ ID NO: 1775542 - RNA, 19 nt, Artificial Sequence
  Description of Artificial Sequence: Synthetic oligonucleotide
aauauggcuauaauagaaa

SEQ ID NO: 1775543 - RNA, 19 nt, Artificial Sequence
  Description of Artificial Sequence: Synthetic oligonucleotide
aaggggaggauucccuguc

SEQ ID NO: 1775544 - RNA, 19 nt, Artificial Sequence
  Description of Artificial Sequence: Synthetic oligonucleotide
auauggcuauaauagaaaa

SEQ ID NO: 1775545 - RNA, 19 nt, Artificial Sequence
  Description of Artificial Sequence: Synthetic oligonucleotide
ugugccauaaaggggagga

SEQ ID NO: 1775546 - RNA, 19 nt, Artificial Sequence
  Description of Artificial Sequence: Synthetic oligonucleotide
ucuguuaccuugcugcuua

SEQ ID NO: 1775547 - RNA, 19 nt, Artificial Sequence
  Description of Artificial Sequence: Synthetic oligonucleotide
ugcuaaucauuccuacuga

SEQ ID NO: 1775548 - RNA, 19 nt, Artificial Sequence
  Description of Artificial Sequence: Synthetic oligonucleotide
ggaaacgugaacugauggg

SEQ ID NO: 1775549 - RNA, 19 nt, Artificial Sequence
  Description of Artificial Sequence: Synthetic oligonucleotide
caaccugugcuaaucauuc

SEQ ID NO: 1775550 - RNA, 19 nt, Artificial Sequence
  Description of Artificial Sequence: Synthetic oligonucleotide
ucguauaguuuacuguuuc

SEQ ID NO: 1775551 - RNA, 19 nt, Artificial Sequence
  Description of Artificial Sequence: Synthetic oligonucleotide
gugcucuucauaaacagug

SEQ ID NO: 1775552 - RNA, 19 nt, Artificial Sequence
  Description of Artificial Sequence: Synthetic oligonucleotide
uagccuaaauugugggagg

SEQ ID NO: 1775553 - RNA, 19 nt, Artificial Sequence
  Description of Artificial Sequence: Synthetic oligonucleotide
ggaaaacccagaucugucg

SEQ ID NO: 1775554 - RNA, 19 nt, Artificial Sequence
  Description of Artificial Sequence: Synthetic oligonucleotide
aaacugucuacuucuucaa

SEQ ID NO: 1775555 - RNA, 19 nt, Artificial Sequence
  Description of Artificial Sequence: Synthetic oligonucleotide
uuaaugcuuagagugcugu

SEQ ID NO: 1775556 - RNA, 19 nt, Artificial Sequence
  Description of Artificial Sequence: Synthetic oligonucleotide
gagcuuagaguccuucuug

SEQ ID NO: 1775557 - RNA, 19 nt, Artificial Sequence
  Description of Artificial Sequence: Synthetic oligonucleotide
ugugcuaaucauuccuacu

SEQ ID NO: 1775558 - RNA, 19 nt, Artificial Sequence
  Description of Artificial Sequence: Synthetic oligonucleotide
uggcuuuagccuaaauugu

SEQ ID NO: 1775559 - RNA, 19 nt, Artificial Sequence
  Description of Artificial Sequence: Synthetic oligonucleotide
aaauugugggagguggugu

SEQ ID NO: 1775560 - RNA, 19 nt, Artificial Sequence
  Description of Artificial Sequence: Synthetic oligonucleotide
cugucuacuucuucaacug

SEQ ID NO: 1775561 - RNA, 19 nt, Artificial Sequence
  Description of Artificial Sequence: Synthetic oligonucleotide
guugagucaucagacagug

SEQ ID NO: 1775562 - RNA, 19 nt, Artificial Sequence
  Description of Artificial Sequence: Synthetic oligonucleotide
aaguccgaguggcuucugg

SEQ ID NO: 1775563 - RNA, 19 nt, Artificial Sequence
  Description of Artificial Sequence: Synthetic oligonucleotide
gaggugguguuucaaagga

SEQ ID NO: 1775564 - RNA, 19 nt, Artificial Sequence
  Description of Artificial Sequence: Synthetic oligonucleotide
ugaguugagucaucagaca

SEQ ID NO: 1775565 - RNA, 19 nt, Artificial Sequence
  Description of Artificial Sequence: Synthetic oligonucleotide
guaaguacaaaauggcacu

SEQ ID NO: 1775566 - RNA, 19 nt, Artificial Sequence
  Description of Artificial Sequence: Synthetic oligonucleotide
uggauggucguuaaugcuu

SEQ ID NO: 1775567 - RNA, 19 nt, Artificial Sequence
  Description of Artificial Sequence: Synthetic oligonucleotide
uaaauugugggagguggug

SEQ ID NO: 1775568 - RNA, 19 nt, Artificial Sequence
  Description of Artificial Sequence: Synthetic oligonucleotide
gaguugcaccccuaguucc

SEQ ID NO: 1775569 - RNA, 19 nt, Artificial Sequence
  Description of Artificial Sequence: Synthetic oligonucleotide
aacaugcccugcuuccgag

SEQ ID NO: 1775570 - RNA, 19 nt, Artificial Sequence
  Description of Artificial Sequence: Synthetic oligonucleotide
caguguguauaagaaagag

SEQ ID NO: 1775571 - RNA, 19 nt, Artificial Sequence
  Description of Artificial Sequence: Synthetic oligonucleotide
uggggcuuuucucauggca

SEQ ID NO: 1775572 - RNA, 19 nt, Artificial Sequence
  Description of Artificial Sequence: Synthetic oligonucleotide
uggucuagguauuguaagu

SEQ ID NO: 1775573 - RNA, 19 nt, Artificial Sequence
  Description of Artificial Sequence: Synthetic oligonucleotide
ugaccauuggccuggugac

SEQ ID NO: 1775574 - RNA, 19 nt, Artificial Sequence
  Description of Artificial Sequence: Synthetic oligonucleotide
ugauauggaggaucccaug

SEQ ID NO: 1775575 - RNA, 19 nt, Artificial Sequence
  Description of Artificial Sequence: Synthetic oligonucleotide
acccagaucugucguauag

SEQ ID NO: 1775576 - RNA, 19 nt, Artificial Sequence
  Description of Artificial Sequence: Synthetic oligonucleotide
ggcacuucgaggaaaaccc

SEQ ID NO: 1775577 - RNA, 19 nt, Artificial Sequence
  Description of Artificial Sequence: Synthetic oligonucleotide
aauugugggaggugguguu

SEQ ID NO: 1775578 - RNA, 19 nt, Artificial Sequence
  Description of Artificial Sequence: Synthetic oligonucleotide
aaaauggcacuucgaggaa

SEQ ID NO: 1775579 - RNA, 19 nt, Artificial Sequence
  Description of Artificial Sequence: Synthetic oligonucleotide
uggcacuucgaggaaaacc

SEQ ID NO: 1775580 - RNA, 19 nt, Artificial Sequence
  Description of Artificial Sequence: Synthetic oligonucleotide
uuugccucaugugugcucu

SEQ ID NO: 1775581 - RNA, 19 nt, Artificial Sequence
  Description of Artificial Sequence: Synthetic oligonucleotide
guauaagaaagagccuucc

SEQ ID NO: 1775582 - RNA, 19 nt, Artificial Sequence
  Description of Artificial Sequence: Synthetic oligonucleotide
gucuagguauuguaaguac

SEQ ID NO: 1775583 - RNA, 19 nt, Artificial Sequence
  Description of Artificial Sequence: Synthetic oligonucleotide
accaaguccgaguggcuuc

SEQ ID NO: 1775584 - RNA, 19 nt, Artificial Sequence
  Description of Artificial Sequence: Synthetic oligonucleotide
ugagcuuagaguccuucuu

SEQ ID NO: 1775585 - RNA, 19 nt, Artificial Sequence
  Description of Artificial Sequence: Synthetic oligonucleotide
uccgagcuagacuugggac

SEQ ID NO: 1775586 - RNA, 19 nt, Artificial Sequence
  Description of Artificial Sequence: Synthetic oligonucleotide
cucuggauggucguuaaug

SEQ ID NO: 1775587 - RNA, 19 nt, Artificial Sequence
  Description of Artificial Sequence: Synthetic oligonucleotide
uauagcagcauggccuuug

SEQ ID NO: 1775588 - RNA, 19 nt, Artificial Sequence
  Description of Artificial Sequence: Synthetic oligonucleotide
guauaguuuacuguuucga

SEQ ID NO: 1775589 - RNA, 19 nt, Artificial Sequence
  Description of Artificial Sequence: Synthetic oligonucleotide
ccuaaauugugggaggugg

SEQ ID NO: 1775590 - RNA, 19 nt, Artificial Sequence
  Description of Artificial Sequence: Synthetic oligonucleotide
aaacgugaacugaugggcu

SEQ ID NO: 1775591 - RNA, 19 nt, Artificial Sequence
  Description of Artificial Sequence: Synthetic oligonucleotide
ucuauagcagcauggccuu

SEQ ID NO: 1775592 - RNA, 19 nt, Artificial Sequence
  Description of Artificial Sequence: Synthetic oligonucleotide
uccauaggcagaaggggau

SEQ ID NO: 1775593 - RNA, 19 nt, Artificial Sequence
  Description of Artificial Sequence: Synthetic oligonucleotide
ggcagaaggggaugaaagg

SEQ ID NO: 1775594 - RNA, 19 nt, Artificial Sequence
  Description of Artificial Sequence: Synthetic oligonucleotide
aaaacccagaucugucgua

SEQ ID NO: 1775595 - RNA, 19 nt, Artificial Sequence
  Description of Artificial Sequence: Synthetic oligonucleotide
auucguguuauuuggucua

SEQ ID NO: 1775596 - RNA, 19 nt, Artificial Sequence
  Description of Artificial Sequence: Synthetic oligonucleotide
agucuuucugggauauugg

SEQ ID NO: 1775597 - RNA, 19 nt, Artificial Sequence
  Description of Artificial Sequence: Synthetic oligonucleotide
guuuacuguuucgaccagg

SEQ ID NO: 1775598 - RNA, 19 nt, Artificial Sequence
  Description of Artificial Sequence: Synthetic oligonucleotide
agcaaucuugaguuuugga

SEQ ID NO: 1775599 - RNA, 19 nt, Artificial Sequence
  Description of Artificial Sequence: Synthetic oligonucleotide
guggcuccagucuauagca

SEQ ID NO: 1775600 - RNA, 19 nt, Artificial Sequence
  Description of Artificial Sequence: Synthetic oligonucleotide
auuccuacugaacucuguu

SEQ ID NO: 1775601 - RNA, 19 nt, Artificial Sequence
  Description of Artificial Sequence: Synthetic oligonucleotide
cuguuugccucaugugugc

SEQ ID NO: 1775602 - RNA, 19 nt, Artificial Sequence
  Description of Artificial Sequence: Synthetic oligonucleotide
aggaaaacccagaucuguc

SEQ ID NO: 1775603 - RNA, 19 nt, Artificial Sequence
  Description of Artificial Sequence: Synthetic oligonucleotide
aacgugaacugaugggcuu

SEQ ID NO: 1775604 - RNA, 19 nt, Artificial Sequence
  Description of Artificial Sequence: Synthetic oligonucleotide
cugugcuaaucauuccuac

SEQ ID NO: 1775605 - RNA, 19 nt, Artificial Sequence
  Description of Artificial Sequence: Synthetic oligonucleotide
agacaguguguauaagaaa

SEQ ID NO: 1775606 - RNA, 19 nt, Artificial Sequence
  Description of Artificial Sequence: Synthetic oligonucleotide
uuaccuugcugcuuauuuu

SEQ ID NO: 1775607 - RNA, 19 nt, Artificial Sequence
  Description of Artificial Sequence: Synthetic oligonucleotide
aaacccagaucugucguau

SEQ ID NO: 1775608 - RNA, 19 nt, Artificial Sequence
  Description of Artificial Sequence: Synthetic oligonucleotide
cugagugauauggaggauc

SEQ ID NO: 1775609 - RNA, 19 nt, Artificial Sequence
  Description of Artificial Sequence: Synthetic oligonucleotide
auauggaggaucccaugaa

SEQ ID NO: 1775610 - RNA, 19 nt, Artificial Sequence
  Description of Artificial Sequence: Synthetic oligonucleotide
gaggaucccaugaagcuuc

SEQ ID NO: 1775611 - RNA, 19 nt, Artificial Sequence
  Description of Artificial Sequence: Synthetic oligonucleotide
gguacaaggcccaaacagc

SEQ ID NO: 1775612 - RNA, 19 nt, Artificial Sequence
  Description of Artificial Sequence: Synthetic oligonucleotide
uauuuggucuagguauugu

SEQ ID NO: 1775613 - RNA, 19 nt, Artificial Sequence
  Description of Artificial Sequence: Synthetic oligonucleotide
agaacuauagaaacacaua

SEQ ID NO: 1775614 - RNA, 19 nt, Artificial Sequence
  Description of Artificial Sequence: Synthetic oligonucleotide
gcuuuagccuaaauugugg

SEQ ID NO: 1775615 - RNA, 19 nt, Artificial Sequence
  Description of Artificial Sequence: Synthetic oligonucleotide
gguuccaugggccaucuga

SEQ ID NO: 1775616 - RNA, 19 nt, Artificial Sequence
  Description of Artificial Sequence: Synthetic oligonucleotide
aguuuacuguuucgaccag

SEQ ID NO: 1775617 - RNA, 19 nt, Artificial Sequence
  Description of Artificial Sequence: Synthetic oligonucleotide
ucugggauauuggcuuuag

SEQ ID NO: 1775618 - RNA, 19 nt, Artificial Sequence
  Description of Artificial Sequence: Synthetic oligonucleotide
gucuauagcagcauggccu

SEQ ID NO: 1775619 - RNA, 19 nt, Artificial Sequence
  Description of Artificial Sequence: Synthetic oligonucleotide
uggagagaguugcaccccu

SEQ ID NO: 1775620 - RNA, 19 nt, Artificial Sequence
  Description of Artificial Sequence: Synthetic oligonucleotide
uuauugacucuggaugguc

SEQ ID NO: 1775621 - RNA, 19 nt, Artificial Sequence
  Description of Artificial Sequence: Synthetic oligonucleotide
uucguguuauuuggucuag

SEQ ID NO: 1775622 - RNA, 19 nt, Artificial Sequence
  Description of Artificial Sequence: Synthetic oligonucleotide
uaguuccuguccuguguag

SEQ ID NO: 1775623 - RNA, 19 nt, Artificial Sequence
  Description of Artificial Sequence: Synthetic oligonucleotide
uuccuacugaacucuguua

SEQ ID NO: 1775624 - RNA, 19 nt, Artificial Sequence
  Description of Artificial Sequence: Synthetic oligonucleotide
ucguguuauuuggucuagg

SEQ ID NO: 1775625 - RNA, 19 nt, Artificial Sequence
  Description of Artificial Sequence: Synthetic oligonucleotide
gauggucguuaaugcuuag

SEQ ID NO: 1775626 - RNA, 19 nt, Artificial Sequence
  Description of Artificial Sequence: Synthetic oligonucleotide
gcagcugcggaacaugccc

SEQ ID NO: 1775627 - RNA, 19 nt, Artificial Sequence
  Description of Artificial Sequence: Synthetic oligonucleotide
aguugagucaucagacagu

SEQ ID NO: 1775628 - RNA, 19 nt, Artificial Sequence
  Description of Artificial Sequence: Synthetic oligonucleotide
gguagggcugaccauuggc

SEQ ID NO: 1775629 - RNA, 19 nt, Artificial Sequence
  Description of Artificial Sequence: Synthetic oligonucleotide
cuugugccauaaaggggag

SEQ ID NO: 1775630 - RNA, 19 nt, Artificial Sequence
  Description of Artificial Sequence: Synthetic oligonucleotide
uguguaggccaggugcuga

SEQ ID NO: 1775631 - RNA, 19 nt, Artificial Sequence
  Description of Artificial Sequence: Synthetic oligonucleotide
gcaccauucguguuauuug

SEQ ID NO: 1775632 - RNA, 19 nt, Artificial Sequence
  Description of Artificial Sequence: Synthetic oligonucleotide
uaaugcuuagagugcugua

SEQ ID NO: 1775633 - RNA, 19 nt, Artificial Sequence
  Description of Artificial Sequence: Synthetic oligonucleotide
aaggcccaaacagcaccgg

SEQ ID NO: 1775634 - RNA, 19 nt, Artificial Sequence
  Description of Artificial Sequence: Synthetic oligonucleotide
ugccauaaaggggaggauu

SEQ ID NO: 1775635 - RNA, 19 nt, Artificial Sequence
  Description of Artificial Sequence: Synthetic oligonucleotide
uuuggagcagcuggugagu

SEQ ID NO: 1775636 - RNA, 19 nt, Artificial Sequence
  Description of Artificial Sequence: Synthetic oligonucleotide
uuggagagaguugcacccc

SEQ ID NO: 1775637 - RNA, 19 nt, Artificial Sequence
  Description of Artificial Sequence: Synthetic oligonucleotide
acaguguguauaagaaaga

SEQ ID NO: 1775638 - RNA, 19 nt, Artificial Sequence
  Description of Artificial Sequence: Synthetic oligonucleotide
uggcuccagucuauagcag

SEQ ID NO: 1775639 - RNA, 19 nt, Artificial Sequence
  Description of Artificial Sequence: Synthetic oligonucleotide
cuaggcagugcugcugagg

SEQ ID NO: 1775640 - RNA, 19 nt, Artificial Sequence
  Description of Artificial Sequence: Synthetic oligonucleotide
ggaugaaaggugacgauga

SEQ ID NO: 1775641 - RNA, 19 nt, Artificial Sequence
  Description of Artificial Sequence: Synthetic oligonucleotide
guguuauuuggucuaggua

SEQ ID NO: 1775642 - RNA, 19 nt, Artificial Sequence
  Description of Artificial Sequence: Synthetic oligonucleotide
cccaauggcaccauucgug

SEQ ID NO: 1775643 - RNA, 19 nt, Artificial Sequence
  Description of Artificial Sequence: Synthetic oligonucleotide
ggauauuggcuuuagccua

SEQ ID NO: 1775644 - RNA, 19 nt, Artificial Sequence
  Description of Artificial Sequence: Synthetic oligonucleotide
gggauauuggcuuuagccu

SEQ ID NO: 1775645 - RNA, 19 nt, Artificial Sequence
  Description of Artificial Sequence: Synthetic oligonucleotide
uugugccauaaaggggagg

SEQ ID NO: 1775646 - RNA, 19 nt, Artificial Sequence
  Description of Artificial Sequence: Synthetic oligonucleotide
gagaguugcaccccuaguu

SEQ ID NO: 1775647 - RNA, 19 nt, Artificial Sequence
  Description of Artificial Sequence: Synthetic oligonucleotide
guuaaugcuuagagugcug

SEQ ID NO: 1775648 - RNA, 19 nt, Artificial Sequence
  Description of Artificial Sequence: Synthetic oligonucleotide
gguauuguaaguacaaaau

SEQ ID NO: 1775649 - RNA, 19 nt, Artificial Sequence
  Description of Artificial Sequence: Synthetic oligonucleotide
ccgagcuagacuugggacc

SEQ ID NO: 1775650 - RNA, 19 nt, Artificial Sequence
  Description of Artificial Sequence: Synthetic oligonucleotide
guuucgaccaggcccucca

SEQ ID NO: 1775651 - RNA, 19 nt, Artificial Sequence
  Description of Artificial Sequence: Synthetic oligonucleotide
agguagggcugaccauugg

SEQ ID NO: 1775652 - RNA, 19 nt, Artificial Sequence
  Description of Artificial Sequence: Synthetic oligonucleotide
ugugggaggugguguuuca

SEQ ID NO: 1775653 - RNA, 19 nt, Artificial Sequence
  Description of Artificial Sequence: Synthetic oligonucleotide
cugugcaagcuccccuagg

SEQ ID NO: 1775654 - RNA, 19 nt, Artificial Sequence
  Description of Artificial Sequence: Synthetic oligonucleotide
gguguuucaaaggaaacgu

SEQ ID NO: 1775655 - RNA, 19 nt, Artificial Sequence
  Description of Artificial Sequence: Synthetic oligonucleotide
uauuggcuuuagccuaaau

SEQ ID NO: 1775656 - RNA, 19 nt, Artificial Sequence
  Description of Artificial Sequence: Synthetic oligonucleotide
gaggaaaacccagaucugu

SEQ ID NO: 1775657 - RNA, 19 nt, Artificial Sequence
  Description of Artificial Sequence: Synthetic oligonucleotide
uguccuguguaggccaggu

SEQ ID NO: 1775658 - RNA, 19 nt, Artificial Sequence
  Description of Artificial Sequence: Synthetic oligonucleotide
aucagacaguguguauaag

SEQ ID NO: 1775659 - RNA, 19 nt, Artificial Sequence
  Description of Artificial Sequence: Synthetic oligonucleotide
ugggaccucuggcaaccug

SEQ ID NO: 1775660 - RNA, 19 nt, Artificial Sequence
  Description of Artificial Sequence: Synthetic oligonucleotide
gcuguuugccucaugugug

SEQ ID NO: 1775661 - RNA, 19 nt, Artificial Sequence
  Description of Artificial Sequence: Synthetic oligonucleotide
cugucguauaguuuacugu

SEQ ID NO: 1775662 - RNA, 19 nt, Artificial Sequence
  Description of Artificial Sequence: Synthetic oligonucleotide
ccggaaguccucccaaugg

SEQ ID NO: 1775663 - RNA, 19 nt, Artificial Sequence
  Description of Artificial Sequence: Synthetic oligonucleotide
gagguagggcugaccauug

SEQ ID NO: 1775664 - RNA, 19 nt, Artificial Sequence
  Description of Artificial Sequence: Synthetic oligonucleotide
agccuaaauugugggaggu

SEQ ID NO: 1775665 - RNA, 19 nt, Artificial Sequence
  Description of Artificial Sequence: Synthetic oligonucleotide
ggcccaaacagcaccgggg

SEQ ID NO: 1775666 - RNA, 19 nt, Artificial Sequence
  Description of Artificial Sequence: Synthetic oligonucleotide
uucgaccaggcccuccaua

SEQ ID NO: 1775667 - RNA, 19 nt, Artificial Sequence
  Description of Artificial Sequence: Synthetic oligonucleotide
acgugaacugaugggcuug

SEQ ID NO: 1775668 - RNA, 19 nt, Artificial Sequence
  Description of Artificial Sequence: Synthetic oligonucleotide
agcugcggaacaugcccug

SEQ ID NO: 1775669 - RNA, 19 nt, Artificial Sequence
  Description of Artificial Sequence: Synthetic oligonucleotide
ugacucuggauggucguua

SEQ ID NO: 1775670 - RNA, 19 nt, Artificial Sequence
  Description of Artificial Sequence: Synthetic oligonucleotide
ggaacaugcccugcuuccg

SEQ ID NO: 1775671 - RNA, 19 nt, Artificial Sequence
  Description of Artificial Sequence: Synthetic oligonucleotide
auggucguuaaugcuuaga

SEQ ID NO: 1775672 - RNA, 19 nt, Artificial Sequence
  Description of Artificial Sequence: Synthetic oligonucleotide
uguuucgaccaggcccucc

SEQ ID NO: 1775673 - RNA, 19 nt, Artificial Sequence
  Description of Artificial Sequence: Synthetic oligonucleotide
ccauucguguuauuugguc

SEQ ID NO: 1775674 - RNA, 19 nt, Artificial Sequence
  Description of Artificial Sequence: Synthetic oligonucleotide
gcuaaucauuccuacugaa

SEQ ID NO: 1775675 - RNA, 19 nt, Artificial Sequence
  Description of Artificial Sequence: Synthetic oligonucleotide
aacugguacaaggcccaaa

SEQ ID NO: 1775676 - RNA, 19 nt, Artificial Sequence
  Description of Artificial Sequence: Synthetic oligonucleotide
gagugauauggaggauccc

SEQ ID NO: 1775677 - RNA, 19 nt, Artificial Sequence
  Description of Artificial Sequence: Synthetic oligonucleotide
aacccagaucugucguaua

SEQ ID NO: 1775678 - RNA, 19 nt, Artificial Sequence
  Description of Artificial Sequence: Synthetic oligonucleotide
gcaaccugcuggcucuggg

SEQ ID NO: 1775679 - RNA, 19 nt, Artificial Sequence
  Description of Artificial Sequence: Synthetic oligonucleotide
gccauaaaggggaggauuc

SEQ ID NO: 1775680 - RNA, 19 nt, Artificial Sequence
  Description of Artificial Sequence: Synthetic oligonucleotide
ugcaccccuaguuccuguc

SEQ ID NO: 1775681 - RNA, 19 nt, Artificial Sequence
  Description of Artificial Sequence: Synthetic oligonucleotide
aagcuccccuaggcagugc

SEQ ID NO: 1775682 - RNA, 19 nt, Artificial Sequence
  Description of Artificial Sequence: Synthetic oligonucleotide
cuaaauugugggagguggu

SEQ ID NO: 1775683 - RNA, 19 nt, Artificial Sequence
  Description of Artificial Sequence: Synthetic oligonucleotide
cacccacuuggcaggaguc

SEQ ID NO: 1775684 - RNA, 19 nt, Artificial Sequence
  Description of Artificial Sequence: Synthetic oligonucleotide
accccuaguuccuguccug

SEQ ID NO: 1775685 - RNA, 19 nt, Artificial Sequence
  Description of Artificial Sequence: Synthetic oligonucleotide
aggaucccaugaagcuucc

SEQ ID NO: 1775686 - RNA, 19 nt, Artificial Sequence
  Description of Artificial Sequence: Synthetic oligonucleotide
agcuagacuugggaccucu

SEQ ID NO: 1775687 - RNA, 19 nt, Artificial Sequence
  Description of Artificial Sequence: Synthetic oligonucleotide
gucuggcauguggugacag

SEQ ID NO: 1775688 - RNA, 19 nt, Artificial Sequence
  Description of Artificial Sequence: Synthetic oligonucleotide
aguugcaccccuaguuccu

SEQ ID NO: 1775689 - RNA, 19 nt, Artificial Sequence
  Description of Artificial Sequence: Synthetic oligonucleotide
caugugugcucuucauaaa

SEQ ID NO: 1775690 - RNA, 19 nt, Artificial Sequence
  Description of Artificial Sequence: Synthetic oligonucleotide
accauucguguuauuuggu

SEQ ID NO: 1775691 - RNA, 19 nt, Artificial Sequence
  Description of Artificial Sequence: Synthetic oligonucleotide
cuugaguuuuggagcagcu

SEQ ID NO: 1775692 - RNA, 19 nt, Artificial Sequence
  Description of Artificial Sequence: Synthetic oligonucleotide
uuugcccgagggccuccug

SEQ ID NO: 1775693 - RNA, 19 nt, Artificial Sequence
  Description of Artificial Sequence: Synthetic oligonucleotide
gccacccuuugcccgaggg

SEQ ID NO: 1775694 - RNA, 19 nt, Artificial Sequence
  Description of Artificial Sequence: Synthetic oligonucleotide
ccaucugaagccugccaac

SEQ ID NO: 1775695 - RNA, 19 nt, Artificial Sequence
  Description of Artificial Sequence: Synthetic oligonucleotide
ggucguuaaugcuuagagu

SEQ ID NO: 1775696 - RNA, 19 nt, Artificial Sequence
  Description of Artificial Sequence: Synthetic oligonucleotide
ggucuagguauuguaagua

SEQ ID NO: 1775697 - RNA, 19 nt, Artificial Sequence
  Description of Artificial Sequence: Synthetic oligonucleotide
cuggauggucguuaaugcu

SEQ ID NO: 1775698 - RNA, 19 nt, Artificial Sequence
  Description of Artificial Sequence: Synthetic oligonucleotide
ggaggauucccugucucuc

SEQ ID NO: 1775699 - RNA, 19 nt, Artificial Sequence
  Description of Artificial Sequence: Synthetic oligonucleotide
ugccucaugugugcucuuc

SEQ ID NO: 1775700 - RNA, 19 nt, Artificial Sequence
  Description of Artificial Sequence: Synthetic oligonucleotide
cauugaugccacugaggua

SEQ ID NO: 1775701 - RNA, 19 nt, Artificial Sequence
  Description of Artificial Sequence: Synthetic oligonucleotide
caagcuccccuaggcagug

SEQ ID NO: 1775702 - RNA, 19 nt, Artificial Sequence
  Description of Artificial Sequence: Synthetic oligonucleotide
cggaaguccucccaauggc

SEQ ID NO: 1775703 - RNA, 19 nt, Artificial Sequence
  Description of Artificial Sequence: Synthetic oligonucleotide
ggaaguccucccaauggca

SEQ ID NO: 1775704 - RNA, 19 nt, Artificial Sequence
  Description of Artificial Sequence: Synthetic oligonucleotide
acucuggauggucguuaau

SEQ ID NO: 1775705 - RNA, 19 nt, Artificial Sequence
  Description of Artificial Sequence: Synthetic oligonucleotide
ggauucccugucucuccag

SEQ ID NO: 1775706 - RNA, 19 nt, Artificial Sequence
  Description of Artificial Sequence: Synthetic oligonucleotide
gcccgggacccucaggugc

SEQ ID NO: 1775707 - RNA, 19 nt, Artificial Sequence
  Description of Artificial Sequence: Synthetic oligonucleotide
gcauguggugacagguugc

SEQ ID NO: 1775708 - RNA, 19 nt, Artificial Sequence
  Description of Artificial Sequence: Synthetic oligonucleotide
gcagaaggggaugaaaggu

SEQ ID NO: 1775709 - RNA, 19 nt, Artificial Sequence
  Description of Artificial Sequence: Synthetic oligonucleotide
cuguguaggccaggugcug

SEQ ID NO: 1775710 - RNA, 19 nt, Artificial Sequence
  Description of Artificial Sequence: Synthetic oligonucleotide
gugauauggaggaucccau

SEQ ID NO: 1775711 - RNA, 19 nt, Artificial Sequence
  Description of Artificial Sequence: Synthetic oligonucleotide
gcggaacaugcccugcuuc

SEQ ID NO: 1775712 - RNA, 19 nt, Artificial Sequence
  Description of Artificial Sequence: Synthetic oligonucleotide
cuucauaaacagugagcuu

SEQ ID NO: 1775713 - RNA, 19 nt, Artificial Sequence
  Description of Artificial Sequence: Synthetic oligonucleotide
ggauggucguuaaugcuua

SEQ ID NO: 1775714 - RNA, 19 nt, Artificial Sequence
  Description of Artificial Sequence: Synthetic oligonucleotide
uugccacccuuugcccgag

SEQ ID NO: 1775715 - RNA, 19 nt, Artificial Sequence
  Description of Artificial Sequence: Synthetic oligonucleotide
agcauggccuuugcuguuu

SEQ ID NO: 1775716 - RNA, 19 nt, Artificial Sequence
  Description of Artificial Sequence: Synthetic oligonucleotide
ccuccgagcuagacuuggg

SEQ ID NO: 1775717 - RNA, 19 nt, Artificial Sequence
  Description of Artificial Sequence: Synthetic oligonucleotide
cauguggugacagguugcu

SEQ ID NO: 1775718 - RNA, 19 nt, Artificial Sequence
  Description of Artificial Sequence: Synthetic oligonucleotide
cgaggaaaacccagaucug

SEQ ID NO: 1775719 - RNA, 19 nt, Artificial Sequence
  Description of Artificial Sequence: Synthetic oligonucleotide
agccugccaaccugugcua

SEQ ID NO: 1775720 - RNA, 19 nt, Artificial Sequence
  Description of Artificial Sequence: Synthetic oligonucleotide
cccggaaguccucccaaug

SEQ ID NO: 1775721 - RNA, 19 nt, Artificial Sequence
  Description of Artificial Sequence: Synthetic oligonucleotide
gccaaccauggucugccuc

SEQ ID NO: 1775722 - RNA, 19 nt, Artificial Sequence
  Description of Artificial Sequence: Synthetic oligonucleotide
auuggccuggugacccgga

SEQ ID NO: 1775723 - RNA, 19 nt, Artificial Sequence
  Description of Artificial Sequence: Synthetic oligonucleotide
ccugugcuaaucauuccua

SEQ ID NO: 1775724 - RNA, 19 nt, Artificial Sequence
  Description of Artificial Sequence: Synthetic oligonucleotide
cagaucugucguauaguuu

SEQ ID NO: 1775725 - RNA, 19 nt, Artificial Sequence
  Description of Artificial Sequence: Synthetic oligonucleotide
uugggaccucuggcaaccu

SEQ ID NO: 1775726 - RNA, 19 nt, Artificial Sequence
  Description of Artificial Sequence: Synthetic oligonucleotide
uggguggcuccagucuaua

SEQ ID NO: 1775727 - RNA, 19 nt, Artificial Sequence
  Description of Artificial Sequence: Synthetic oligonucleotide
ccaauggcaccauucgugu

SEQ ID NO: 1775728 - RNA, 19 nt, Artificial Sequence
  Description of Artificial Sequence: Synthetic oligonucleotide
ggcaccauucguguuauuu

SEQ ID NO: 1775729 - RNA, 19 nt, Artificial Sequence
  Description of Artificial Sequence: Synthetic oligonucleotide
gucguauaguuuacuguuu

SEQ ID NO: 1775730 - RNA, 19 nt, Artificial Sequence
  Description of Artificial Sequence: Synthetic oligonucleotide
aaacagcaccggggcccug

SEQ ID NO: 1775731 - RNA, 19 nt, Artificial Sequence
  Description of Artificial Sequence: Synthetic oligonucleotide
cccuaguuccuguccugug

SEQ ID NO: 1775732 - RNA, 19 nt, Artificial Sequence
  Description of Artificial Sequence: Synthetic oligonucleotide
caccccuaguuccuguccu

SEQ ID NO: 1775733 - RNA, 19 nt, Artificial Sequence
  Description of Artificial Sequence: Synthetic oligonucleotide
caccagucuucuccaccca

SEQ ID NO: 1775734 - RNA, 19 nt, Artificial Sequence
  Description of Artificial Sequence: Synthetic oligonucleotide
ccgagcaguuggcuggcac

SEQ ID NO: 1775735 - RNA, 19 nt, Artificial Sequence
  Description of Artificial Sequence: Synthetic oligonucleotide
cguguuauuuggucuaggu

SEQ ID NO: 1775736 - RNA, 19 nt, Artificial Sequence
  Description of Artificial Sequence: Synthetic oligonucleotide
uccgagcaguuggcuggca

SEQ ID NO: 1775737 - RNA, 19 nt, Artificial Sequence
  Description of Artificial Sequence: Synthetic oligonucleotide
ccagaucugucguauaguu

SEQ ID NO: 1775738 - RNA, 19 nt, Artificial Sequence
  Description of Artificial Sequence: Synthetic oligonucleotide
auguggugacagguugcuu

SEQ ID NO: 1775739 - RNA, 19 nt, Artificial Sequence
  Description of Artificial Sequence: Synthetic oligonucleotide
gcuagacuugggaccucug

SEQ ID NO: 1775740 - RNA, 19 nt, Artificial Sequence
  Description of Artificial Sequence: Synthetic oligonucleotide
cccuaggcagugcugcuga

SEQ ID NO: 1775741 - RNA, 19 nt, Artificial Sequence
  Description of Artificial Sequence: Synthetic oligonucleotide
caaguccgaguggcuucug

SEQ ID NO: 1775742 - RNA, 19 nt, Artificial Sequence
  Description of Artificial Sequence: Synthetic oligonucleotide
cgagcaguuggcuggcaca

SEQ ID NO: 1775743 - RNA, 19 nt, Artificial Sequence
  Description of Artificial Sequence: Synthetic oligonucleotide
gagcuagacuugggaccuc

SEQ ID NO: 1775744 - RNA, 19 nt, Artificial Sequence
  Description of Artificial Sequence: Synthetic oligonucleotide
ggcccgcccauugaugcca

SEQ ID NO: 1775745 - RNA, 19 nt, Artificial Sequence
  Description of Artificial Sequence: Synthetic oligonucleotide
caauggcaccauucguguu

SEQ ID NO: 1775746 - RNA, 19 nt, Artificial Sequence
  Description of Artificial Sequence: Synthetic oligonucleotide
cguuaaugcuuagagugcu

SEQ ID NO: 1775747 - RNA, 19 nt, Artificial Sequence
  Description of Artificial Sequence: Synthetic oligonucleotide
gcuggugaguugagucauc

SEQ ID NO: 1775748 - RNA, 19 nt, Artificial Sequence
  Description of Artificial Sequence: Synthetic oligonucleotide
caccaaguccgaguggcuu

SEQ ID NO: 1775749 - RNA, 19 nt, Artificial Sequence
  Description of Artificial Sequence: Synthetic oligonucleotide
uggcaccauucguguuauu

SEQ ID NO: 1775750 - RNA, 19 nt, Artificial Sequence
  Description of Artificial Sequence: Synthetic oligonucleotide
gccuuccuccgagcuagac

SEQ ID NO: 1775751 - RNA, 19 nt, Artificial Sequence
  Description of Artificial Sequence: Synthetic oligonucleotide
ggagagaguugcaccccua

SEQ ID NO: 1775752 - RNA, 19 nt, Artificial Sequence
  Description of Artificial Sequence: Synthetic oligonucleotide
gugccauaaaggggaggau

SEQ ID NO: 1775753 - RNA, 19 nt, Artificial Sequence
  Description of Artificial Sequence: Synthetic oligonucleotide
cgcccauugaugccacuga

SEQ ID NO: 1775754 - RNA, 19 nt, Artificial Sequence
  Description of Artificial Sequence: Synthetic oligonucleotide
gccaggugcugaggacacc

SEQ ID NO: 1775755 - RNA, 19 nt, Artificial Sequence
  Description of Artificial Sequence: Synthetic oligonucleotide
cuguuaccuugcugcuuau

SEQ ID NO: 1775756 - RNA, 19 nt, Artificial Sequence
  Description of Artificial Sequence: Synthetic oligonucleotide
cgagcuagacuugggaccu

SEQ ID NO: 1775757 - RNA, 19 nt, Artificial Sequence
  Description of Artificial Sequence: Synthetic oligonucleotide
gccugccaaccugugcuaa

SEQ ID NO: 1775758 - RNA, 19 nt, Artificial Sequence
  Description of Artificial Sequence: Synthetic oligonucleotide
agccuuccuccgagcuaga

SEQ ID NO: 1775759 - RNA, 19 nt, Artificial Sequence
  Description of Artificial Sequence: Synthetic oligonucleotide
cuuugcccgagggccuccu

SEQ ID NO: 1775760 - RNA, 19 nt, Artificial Sequence
  Description of Artificial Sequence: Synthetic oligonucleotide
ccaaguccgaguggcuucu

SEQ ID NO: 1775761 - RNA, 19 nt, Artificial Sequence
  Description of Artificial Sequence: Synthetic oligonucleotide
cucuggcaaccugcuggcu

SEQ ID NO: 1775762 - RNA, 19 nt, Artificial Sequence
  Description of Artificial Sequence: Synthetic oligonucleotide
ccugccaaccugugcuaau

SEQ ID NO: 1775763 - RNA, 19 nt, Artificial Sequence
  Description of Artificial Sequence: Synthetic oligonucleotide
ccgggacccucaggugccc

SEQ ID NO: 1775764 - RNA, 19 nt, Artificial Sequence
  Description of Artificial Sequence: Synthetic oligonucleotide
ccccuaguuccuguccugu

SEQ ID NO: 1775765 - RNA, 19 nt, Artificial Sequence
  Description of Artificial Sequence: Synthetic oligonucleotide
cggggcccugagugauaug

SEQ ID NO: 1775766 - RNA, 19 nt, Artificial Sequence
  Description of Artificial Sequence: Synthetic oligonucleotide
cccgcccauugaugccacu

SEQ ID NO: 1775767 - RNA, 19 nt, Artificial Sequence
  Description of Artificial Sequence: Synthetic oligonucleotide
aacgcuaucauccacuauc

SEQ ID NO: 1775768 - RNA, 19 nt, Artificial Sequence
  Description of Artificial Sequence: Synthetic oligonucleotide
acaaguaguucucugaguc

SEQ ID NO: 1775769 - RNA, 19 nt, Artificial Sequence
  Description of Artificial Sequence: Synthetic oligonucleotide
uugaccuugucaaacauca

SEQ ID NO: 1775770 - RNA, 19 nt, Artificial Sequence
  Description of Artificial Sequence: Synthetic oligonucleotide
uuuauugcgugauucuggg

SEQ ID NO: 1775771 - RNA, 19 nt, Artificial Sequence
  Description of Artificial Sequence: Synthetic oligonucleotide
uucuaaugagcucaggaac

SEQ ID NO: 1775772 - RNA, 19 nt, Artificial Sequence
  Description of Artificial Sequence: Synthetic oligonucleotide
uucaauuaacuucugggaa

SEQ ID NO: 1775773 - RNA, 19 nt, Artificial Sequence
  Description of Artificial Sequence: Synthetic oligonucleotide
ucuaaugagcucaggaacu

SEQ ID NO: 1775774 - RNA, 19 nt, Artificial Sequence
  Description of Artificial Sequence: Synthetic oligonucleotide
aguacaugcucucugugag

SEQ ID NO: 1775775 - RNA, 19 nt, Artificial Sequence
  Description of Artificial Sequence: Synthetic oligonucleotide
cuugucaaacaucauuucc

SEQ ID NO: 1775776 - RNA, 19 nt, Artificial Sequence
  Description of Artificial Sequence: Synthetic oligonucleotide
ucucuaguugcccuuguag

SEQ ID NO: 1775777 - RNA, 19 nt, Artificial Sequence
  Description of Artificial Sequence: Synthetic oligonucleotide
agagauuuacugugggaac

SEQ ID NO: 1775778 - RNA, 19 nt, Artificial Sequence
  Description of Artificial Sequence: Synthetic oligonucleotide
gaauucacgcuucuuucgg

SEQ ID NO: 1775779 - RNA, 19 nt, Artificial Sequence
  Description of Artificial Sequence: Synthetic oligonucleotide
agaauucacgcuucuuucg

SEQ ID NO: 1775780 - RNA, 19 nt, Artificial Sequence
  Description of Artificial Sequence: Synthetic oligonucleotide
aucucugauaugucguggc

SEQ ID NO: 1775781 - RNA, 19 nt, Artificial Sequence
  Description of Artificial Sequence: Synthetic oligonucleotide
ucggauugcagucuccucc

SEQ ID NO: 1775782 - RNA, 19 nt, Artificial Sequence
  Description of Artificial Sequence: Synthetic oligonucleotide
agaucggacaaguaguucu

SEQ ID NO: 1775783 - RNA, 19 nt, Artificial Sequence
  Description of Artificial Sequence: Synthetic oligonucleotide
ucuaacuucuuuccugaca

SEQ ID NO: 1775784 - RNA, 19 nt, Artificial Sequence
  Description of Artificial Sequence: Synthetic oligonucleotide
aacuuuauugcgugauucu

SEQ ID NO: 1775785 - RNA, 19 nt, Artificial Sequence
  Description of Artificial Sequence: Synthetic oligonucleotide
ucguugucccucuugagag

SEQ ID NO: 1775786 - RNA, 19 nt, Artificial Sequence
  Description of Artificial Sequence: Synthetic oligonucleotide
agucuugcgcuccaugcgc

SEQ ID NO: 1775787 - RNA, 19 nt, Artificial Sequence
  Description of Artificial Sequence: Synthetic oligonucleotide
uucgaaacacagcauguga

SEQ ID NO: 1775788 - RNA, 19 nt, Artificial Sequence
  Description of Artificial Sequence: Synthetic oligonucleotide
ucugauaugucguggcucu

SEQ ID NO: 1775789 - RNA, 19 nt, Artificial Sequence
  Description of Artificial Sequence: Synthetic oligonucleotide
ucgagagauuuacuguggg

SEQ ID NO: 1775790 - RNA, 19 nt, Artificial Sequence
  Description of Artificial Sequence: Synthetic oligonucleotide
uaugucguggcucucuagu

SEQ ID NO: 1775791 - RNA, 19 nt, Artificial Sequence
  Description of Artificial Sequence: Synthetic oligonucleotide
ugagucuugcgcuccaugc

SEQ ID NO: 1775792 - RNA, 19 nt, Artificial Sequence
  Description of Artificial Sequence: Synthetic oligonucleotide
augugauucagccacucca

SEQ ID NO: 1775793 - RNA, 19 nt, Artificial Sequence
  Description of Artificial Sequence: Synthetic oligonucleotide
ugguacaugccccagcgac

SEQ ID NO: 1775794 - RNA, 19 nt, Artificial Sequence
  Description of Artificial Sequence: Synthetic oligonucleotide
caguuauguagaauucacg

SEQ ID NO: 1775795 - RNA, 19 nt, Artificial Sequence
  Description of Artificial Sequence: Synthetic oligonucleotide
gaugggacgcaacugcgag

SEQ ID NO: 1775796 - RNA, 19 nt, Artificial Sequence
  Description of Artificial Sequence: Synthetic oligonucleotide
uccgaugggacgcaacugc

SEQ ID NO: 1775797 - RNA, 19 nt, Artificial Sequence
  Description of Artificial Sequence: Synthetic oligonucleotide
ugcccuuguagucucagca

SEQ ID NO: 1775798 - RNA, 19 nt, Artificial Sequence
  Description of Artificial Sequence: Synthetic oligonucleotide
cacaucgcgaucauccucc

SEQ ID NO: 1775799 - RNA, 19 nt, Artificial Sequence
  Description of Artificial Sequence: Synthetic oligonucleotide
auucagccacuccaguggc

SEQ ID NO: 1775800 - RNA, 19 nt, Artificial Sequence
  Description of Artificial Sequence: Synthetic oligonucleotide
accuucgaaacacagcaug

SEQ ID NO: 1775801 - RNA, 19 nt, Artificial Sequence
  Description of Artificial Sequence: Synthetic oligonucleotide
agcacgggucaccacaucg

SEQ ID NO: 1775802 - RNA, 19 nt, Artificial Sequence
  Description of Artificial Sequence: Synthetic oligonucleotide
uccagauauugcaacuggc

SEQ ID NO: 1775803 - RNA, 19 nt, Artificial Sequence
  Description of Artificial Sequence: Synthetic oligonucleotide
uagaauucacgcuucuuuc

SEQ ID NO: 1775804 - RNA, 19 nt, Artificial Sequence
  Description of Artificial Sequence: Synthetic oligonucleotide
ugugaugugucgcaucauc

SEQ ID NO: 1775805 - RNA, 19 nt, Artificial Sequence
  Description of Artificial Sequence: Synthetic oligonucleotide
ugugggaacuucuggcucc

SEQ ID NO: 1775806 - RNA, 19 nt, Artificial Sequence
  Description of Artificial Sequence: Synthetic oligonucleotide
cuaucauccacuaucacgu

SEQ ID NO: 1775807 - RNA, 19 nt, Artificial Sequence
  Description of Artificial Sequence: Synthetic oligonucleotide
cucgaaggagccuccaggg

SEQ ID NO: 1775808 - RNA, 19 nt, Artificial Sequence
  Description of Artificial Sequence: Synthetic oligonucleotide
uaacuaguguggcaucccc

SEQ ID NO: 1775809 - RNA, 19 nt, Artificial Sequence
  Description of Artificial Sequence: Synthetic oligonucleotide
aauucacgcuucuuucggu

SEQ ID NO: 1775810 - RNA, 19 nt, Artificial Sequence
  Description of Artificial Sequence: Synthetic oligonucleotide
ucgaaacacagcaugugau

SEQ ID NO: 1775811 - RNA, 19 nt, Artificial Sequence
  Description of Artificial Sequence: Synthetic oligonucleotide
acuaguguggcauccccug

SEQ ID NO: 1775812 - RNA, 19 nt, Artificial Sequence
  Description of Artificial Sequence: Synthetic oligonucleotide
gaacuuuauugcgugauuc

SEQ ID NO: 1775813 - RNA, 19 nt, Artificial Sequence
  Description of Artificial Sequence: Synthetic oligonucleotide
acagaacgcuaucauccac

SEQ ID NO: 1775814 - RNA, 19 nt, Artificial Sequence
  Description of Artificial Sequence: Synthetic oligonucleotide
ugucguggcucucuaguug

SEQ ID NO: 1775815 - RNA, 19 nt, Artificial Sequence
  Description of Artificial Sequence: Synthetic oligonucleotide
cagcagaucggacaaguag

SEQ ID NO: 1775816 - RNA, 19 nt, Artificial Sequence
  Description of Artificial Sequence: Synthetic oligonucleotide
cugcgugaaggucucaucc

SEQ ID NO: 1775817 - RNA, 19 nt, Artificial Sequence
  Description of Artificial Sequence: Synthetic oligonucleotide
uggaggguucgcaaggcgc

SEQ ID NO: 1775818 - RNA, 19 nt, Artificial Sequence
  Description of Artificial Sequence: Synthetic oligonucleotide
gagagauuuacugugggaa

SEQ ID NO: 1775819 - RNA, 19 nt, Artificial Sequence
  Description of Artificial Sequence: Synthetic oligonucleotide
cucgagagauuuacugugg

SEQ ID NO: 1775820 - RNA, 19 nt, Artificial Sequence
  Description of Artificial Sequence: Synthetic oligonucleotide
aauuaacuucugggaacgg

SEQ ID NO: 1775821 - RNA, 19 nt, Artificial Sequence
  Description of Artificial Sequence: Synthetic oligonucleotide
aaugucuccugcaucgugu

SEQ ID NO: 1775822 - RNA, 19 nt, Artificial Sequence
  Description of Artificial Sequence: Synthetic oligonucleotide
uuuugguuguucagugaac

SEQ ID NO: 1775823 - RNA, 19 nt, Artificial Sequence
  Description of Artificial Sequence: Synthetic oligonucleotide
agagucuccaacugcguga

SEQ ID NO: 1775824 - RNA, 19 nt, Artificial Sequence
  Description of Artificial Sequence: Synthetic oligonucleotide
cagauauugcaacuggcuc

SEQ ID NO: 1775825 - RNA, 19 nt, Artificial Sequence
  Description of Artificial Sequence: Synthetic oligonucleotide
cagggcuccgcccacaccg

SEQ ID NO: 1775826 - RNA, 19 nt, Artificial Sequence
  Description of Artificial Sequence: Synthetic oligonucleotide
uuauugcgugauucugggg

SEQ ID NO: 1775827 - RNA, 19 nt, Artificial Sequence
  Description of Artificial Sequence: Synthetic oligonucleotide
guacuugagguucuccagc

SEQ ID NO: 1775828 - RNA, 19 nt, Artificial Sequence
  Description of Artificial Sequence: Synthetic oligonucleotide
aaggucucauccugggcca

SEQ ID NO: 1775829 - RNA, 19 nt, Artificial Sequence
  Description of Artificial Sequence: Synthetic oligonucleotide
uaguguggcauccccugag

SEQ ID NO: 1775830 - RNA, 19 nt, Artificial Sequence
  Description of Artificial Sequence: Synthetic oligonucleotide
uggacaaccuccagcagau

SEQ ID NO: 1775831 - RNA, 19 nt, Artificial Sequence
  Description of Artificial Sequence: Synthetic oligonucleotide
agucaguuauguagaauuc

SEQ ID NO: 1775832 - RNA, 19 nt, Artificial Sequence
  Description of Artificial Sequence: Synthetic oligonucleotide
acuuuauugcgugauucug

SEQ ID NO: 1775833 - RNA, 19 nt, Artificial Sequence
  Description of Artificial Sequence: Synthetic oligonucleotide
agccacuccaguggcaucc

SEQ ID NO: 1775834 - RNA, 19 nt, Artificial Sequence
  Description of Artificial Sequence: Synthetic oligonucleotide
ugaugugucgcaucaucuc

SEQ ID NO: 1775835 - RNA, 19 nt, Artificial Sequence
  Description of Artificial Sequence: Synthetic oligonucleotide
caaggcgcguuccaguugc

SEQ ID NO: 1775836 - RNA, 19 nt, Artificial Sequence
  Description of Artificial Sequence: Synthetic oligonucleotide
ugcgagucuaggaccugcg

SEQ ID NO: 1775837 - RNA, 19 nt, Artificial Sequence
  Description of Artificial Sequence: Synthetic oligonucleotide
ugaaggucucauccugggc

SEQ ID NO: 1775838 - RNA, 19 nt, Artificial Sequence
  Description of Artificial Sequence: Synthetic oligonucleotide
caacugcgagucuaggacc

SEQ ID NO: 1775839 - RNA, 19 nt, Artificial Sequence
  Description of Artificial Sequence: Synthetic oligonucleotide
ucuuuccugacagaacgcu

SEQ ID NO: 1775840 - RNA, 19 nt, Artificial Sequence
  Description of Artificial Sequence: Synthetic oligonucleotide
acuaucacguggcucaguu

SEQ ID NO: 1775841 - RNA, 19 nt, Artificial Sequence
  Description of Artificial Sequence: Synthetic oligonucleotide
acuucuuuccugacagaac

SEQ ID NO: 1775842 - RNA, 19 nt, Artificial Sequence
  Description of Artificial Sequence: Synthetic oligonucleotide
gagucuaggaccugcgcga

SEQ ID NO: 1775843 - RNA, 19 nt, Artificial Sequence
  Description of Artificial Sequence: Synthetic oligonucleotide
auuaacuucugggaacgga

SEQ ID NO: 1775844 - RNA, 19 nt, Artificial Sequence
  Description of Artificial Sequence: Synthetic oligonucleotide
cuugaccuugucaaacauc

SEQ ID NO: 1775845 - RNA, 19 nt, Artificial Sequence
  Description of Artificial Sequence: Synthetic oligonucleotide
uccgacguuccccuccucc

SEQ ID NO: 1775846 - RNA, 19 nt, Artificial Sequence
  Description of Artificial Sequence: Synthetic oligonucleotide
acugcgugaaggucucauc

SEQ ID NO: 1775847 - RNA, 19 nt, Artificial Sequence
  Description of Artificial Sequence: Synthetic oligonucleotide
gaacggagcuugaaggcag

SEQ ID NO: 1775848 - RNA, 19 nt, Artificial Sequence
  Description of Artificial Sequence: Synthetic oligonucleotide
guuauguagaauucacgcu

SEQ ID NO: 1775849 - RNA, 19 nt, Artificial Sequence
  Description of Artificial Sequence: Synthetic oligonucleotide
ucggacaaguaguucucug

SEQ ID NO: 1775850 - RNA, 19 nt, Artificial Sequence
  Description of Artificial Sequence: Synthetic oligonucleotide
gcaacugcgagucuaggac

SEQ ID NO: 1775851 - RNA, 19 nt, Artificial Sequence
  Description of Artificial Sequence: Synthetic oligonucleotide
gagcuugaaggcagcacgg

SEQ ID NO: 1775852 - RNA, 19 nt, Artificial Sequence
  Description of Artificial Sequence: Synthetic oligonucleotide
uccgcuggcuaacuagugu

SEQ ID NO: 1775853 - RNA, 19 nt, Artificial Sequence
  Description of Artificial Sequence: Synthetic oligonucleotide
gaugucguugcgccgccgc

SEQ ID NO: 1775854 - RNA, 19 nt, Artificial Sequence
  Description of Artificial Sequence: Synthetic oligonucleotide
uuccuucuaaugagcucag

SEQ ID NO: 1775855 - RNA, 19 nt, Artificial Sequence
  Description of Artificial Sequence: Synthetic oligonucleotide
ugugucgcaucaucucuga

SEQ ID NO: 1775856 - RNA, 19 nt, Artificial Sequence
  Description of Artificial Sequence: Synthetic oligonucleotide
ucggggucuaacuucuuuc

SEQ ID NO: 1775857 - RNA, 19 nt, Artificial Sequence
  Description of Artificial Sequence: Synthetic oligonucleotide
gcuuaacccgccucgagag

SEQ ID NO: 1775858 - RNA, 19 nt, Artificial Sequence
  Description of Artificial Sequence: Synthetic oligonucleotide
agugaacuuuauugcguga

SEQ ID NO: 1775859 - RNA, 19 nt, Artificial Sequence
  Description of Artificial Sequence: Synthetic oligonucleotide
aacggagcuugaaggcagc

SEQ ID NO: 1775860 - RNA, 19 nt, Artificial Sequence
  Description of Artificial Sequence: Synthetic oligonucleotide
gaugugucgcaucaucucu

SEQ ID NO: 1775861 - RNA, 19 nt, Artificial Sequence
  Description of Artificial Sequence: Synthetic oligonucleotide
uccugcaucgugucgcgga

SEQ ID NO: 1775862 - RNA, 19 nt, Artificial Sequence
  Description of Artificial Sequence: Synthetic oligonucleotide
ugauaugucguggcucucu

SEQ ID NO: 1775863 - RNA, 19 nt, Artificial Sequence
  Description of Artificial Sequence: Synthetic oligonucleotide
gacguuccccuccuccggg

SEQ ID NO: 1775864 - RNA, 19 nt, Artificial Sequence
  Description of Artificial Sequence: Synthetic oligonucleotide
uuaacccgccucgagagau

SEQ ID NO: 1775865 - RNA, 19 nt, Artificial Sequence
  Description of Artificial Sequence: Synthetic oligonucleotide
cuucgaaacacagcaugug

SEQ ID NO: 1775866 - RNA, 19 nt, Artificial Sequence
  Description of Artificial Sequence: Synthetic oligonucleotide
ugagagucuccaacugcgu

SEQ ID NO: 1775867 - RNA, 19 nt, Artificial Sequence
  Description of Artificial Sequence: Synthetic oligonucleotide
agaaggaugcggguguuga

SEQ ID NO: 1775868 - RNA, 19 nt, Artificial Sequence
  Description of Artificial Sequence: Synthetic oligonucleotide
aacugcgagucuaggaccu

SEQ ID NO: 1775869 - RNA, 19 nt, Artificial Sequence
  Description of Artificial Sequence: Synthetic oligonucleotide
auaugucguggcucucuag

SEQ ID NO: 1775870 - RNA, 19 nt, Artificial Sequence
  Description of Artificial Sequence: Synthetic oligonucleotide
uucugcccguuucuugcag

SEQ ID NO: 1775871 - RNA, 19 nt, Artificial Sequence
  Description of Artificial Sequence: Synthetic oligonucleotide
ugggacgcaacugcgaguc

SEQ ID NO: 1775872 - RNA, 19 nt, Artificial Sequence
  Description of Artificial Sequence: Synthetic oligonucleotide
ucugugagucuugcgcucc

SEQ ID NO: 1775873 - RNA, 19 nt, Artificial Sequence
  Description of Artificial Sequence: Synthetic oligonucleotide
gggucuaacuucuuuccug

SEQ ID NO: 1775874 - RNA, 19 nt, Artificial Sequence
  Description of Artificial Sequence: Synthetic oligonucleotide
cacgggucaccacaucgcg

SEQ ID NO: 1775875 - RNA, 19 nt, Artificial Sequence
  Description of Artificial Sequence: Synthetic oligonucleotide
ucgcaggguucccuagagg

SEQ ID NO: 1775876 - RNA, 19 nt, Artificial Sequence
  Description of Artificial Sequence: Synthetic oligonucleotide
cuaacuaguguggcauccc

SEQ ID NO: 1775877 - RNA, 19 nt, Artificial Sequence
  Description of Artificial Sequence: Synthetic oligonucleotide
gaccuacugcgcuucuugc

SEQ ID NO: 1775878 - RNA, 19 nt, Artificial Sequence
  Description of Artificial Sequence: Synthetic oligonucleotide
cuacugcgcuucuugcugc

SEQ ID NO: 1775879 - RNA, 19 nt, Artificial Sequence
  Description of Artificial Sequence: Synthetic oligonucleotide
ucuuuguggcguugguggu

SEQ ID NO: 1775880 - RNA, 19 nt, Artificial Sequence
  Description of Artificial Sequence: Synthetic oligonucleotide
uccugacagaacgcuauca

SEQ ID NO: 1775881 - RNA, 19 nt, Artificial Sequence
  Description of Artificial Sequence: Synthetic oligonucleotide
augcggguguugaagagag

SEQ ID NO: 1775882 - RNA, 19 nt, Artificial Sequence
  Description of Artificial Sequence: Synthetic oligonucleotide
gucgcaucaucucugauau

SEQ ID NO: 1775883 - RNA, 19 nt, Artificial Sequence
  Description of Artificial Sequence: Synthetic oligonucleotide
auguagaauucacgcuucu

SEQ ID NO: 1775884 - RNA, 19 nt, Artificial Sequence
  Description of Artificial Sequence: Synthetic oligonucleotide
guacaugccccagcgacgc

SEQ ID NO: 1775885 - RNA, 19 nt, Artificial Sequence
  Description of Artificial Sequence: Synthetic oligonucleotide
cucguugucccucuugaga

SEQ ID NO: 1775886 - RNA, 19 nt, Artificial Sequence
  Description of Artificial Sequence: Synthetic oligonucleotide
cuaaugagcucaggaacuc

SEQ ID NO: 1775887 - RNA, 19 nt, Artificial Sequence
  Description of Artificial Sequence: Synthetic oligonucleotide
aacuaguguggcauccccu

SEQ ID NO: 1775888 - RNA, 19 nt, Artificial Sequence
  Description of Artificial Sequence: Synthetic oligonucleotide
agaacgcuaucauccacua

SEQ ID NO: 1775889 - RNA, 19 nt, Artificial Sequence
  Description of Artificial Sequence: Synthetic oligonucleotide
caucgugucgcggagcuuc

SEQ ID NO: 1775890 - RNA, 19 nt, Artificial Sequence
  Description of Artificial Sequence: Synthetic oligonucleotide
uuccgcuggcuaacuagug

SEQ ID NO: 1775891 - RNA, 19 nt, Artificial Sequence
  Description of Artificial Sequence: Synthetic oligonucleotide
ggucuaacuucuuuccuga

SEQ ID NO: 1775892 - RNA, 19 nt, Artificial Sequence
  Description of Artificial Sequence: Synthetic oligonucleotide
ccucgagagauuuacugug

SEQ ID NO: 1775893 - RNA, 19 nt, Artificial Sequence
  Description of Artificial Sequence: Synthetic oligonucleotide
guucccuagaggcccggag

SEQ ID NO: 1775894 - RNA, 19 nt, Artificial Sequence
  Description of Artificial Sequence: Synthetic oligonucleotide
ccagcgacgcuucagcucc

SEQ ID NO: 1775895 - RNA, 19 nt, Artificial Sequence
  Description of Artificial Sequence: Synthetic oligonucleotide
gcuuccgcuggcuaacuag

SEQ ID NO: 1775896 - RNA, 19 nt, Artificial Sequence
  Description of Artificial Sequence: Synthetic oligonucleotide
gucgcaggguucccuagag

SEQ ID NO: 1775897 - RNA, 19 nt, Artificial Sequence
  Description of Artificial Sequence: Synthetic oligonucleotide
gacgcaacugcgagucuag

SEQ ID NO: 1775898 - RNA, 19 nt, Artificial Sequence
  Description of Artificial Sequence: Synthetic oligonucleotide
gggaacggagcuugaaggc

SEQ ID NO: 1775899 - RNA, 19 nt, Artificial Sequence
  Description of Artificial Sequence: Synthetic oligonucleotide
gagauuuacugugggaacu

SEQ ID NO: 1775900 - RNA, 19 nt, Artificial Sequence
  Description of Artificial Sequence: Synthetic oligonucleotide
ucacgcuucuuucggucuc

SEQ ID NO: 1775901 - RNA, 19 nt, Artificial Sequence
  Description of Artificial Sequence: Synthetic oligonucleotide
aguuuguuggccagaugcu

SEQ ID NO: 1775902 - RNA, 19 nt, Artificial Sequence
  Description of Artificial Sequence: Synthetic oligonucleotide
cucugauaugucguggcuc

SEQ ID NO: 1775903 - RNA, 19 nt, Artificial Sequence
  Description of Artificial Sequence: Synthetic oligonucleotide
gaugcggguguugaagaga

SEQ ID NO: 1775904 - RNA, 19 nt, Artificial Sequence
  Description of Artificial Sequence: Synthetic oligonucleotide
gaucggacaaguaguucuc

SEQ ID NO: 1775905 - RNA, 19 nt, Artificial Sequence
  Description of Artificial Sequence: Synthetic oligonucleotide
ugcugcgggcuucaauuaa

SEQ ID NO: 1775906 - RNA, 19 nt, Artificial Sequence
  Description of Artificial Sequence: Synthetic oligonucleotide
agucuaggaccugcgcgac

SEQ ID NO: 1775907 - RNA, 19 nt, Artificial Sequence
  Description of Artificial Sequence: Synthetic oligonucleotide
ucuugcagucaguuaugua

SEQ ID NO: 1775908 - RNA, 19 nt, Artificial Sequence
  Description of Artificial Sequence: Synthetic oligonucleotide
gcggguguugaagagaggc

SEQ ID NO: 1775909 - RNA, 19 nt, Artificial Sequence
  Description of Artificial Sequence: Synthetic oligonucleotide
uugguuguucagugaacuu

SEQ ID NO: 1775910 - RNA, 19 nt, Artificial Sequence
  Description of Artificial Sequence: Synthetic oligonucleotide
ugcggguguugaagagagg

SEQ ID NO: 1775911 - RNA, 19 nt, Artificial Sequence
  Description of Artificial Sequence: Synthetic oligonucleotide
ucugcccguuucuugcagu

SEQ ID NO: 1775912 - RNA, 19 nt, Artificial Sequence
  Description of Artificial Sequence: Synthetic oligonucleotide
ggaaccuucgaaacacagc

SEQ ID NO: 1775913 - RNA, 19 nt, Artificial Sequence
  Description of Artificial Sequence: Synthetic oligonucleotide
gacaaguaguucucugagu

SEQ ID NO: 1775914 - RNA, 19 nt, Artificial Sequence
  Description of Artificial Sequence: Synthetic oligonucleotide
uuccugacagaacgcuauc

SEQ ID NO: 1775915 - RNA, 19 nt, Artificial Sequence
  Description of Artificial Sequence: Synthetic oligonucleotide
gguacaugccccagcgacg

SEQ ID NO: 1775916 - RNA, 19 nt, Artificial Sequence
  Description of Artificial Sequence: Synthetic oligonucleotide
cuucugacugaagcaguac

SEQ ID NO: 1775917 - RNA, 19 nt, Artificial Sequence
  Description of Artificial Sequence: Synthetic oligonucleotide
gcuaacuaguguggcaucc

SEQ ID NO: 1775918 - RNA, 19 nt, Artificial Sequence
  Description of Artificial Sequence: Synthetic oligonucleotide
cucuaguugcccuuguagu

SEQ ID NO: 1775919 - RNA, 19 nt, Artificial Sequence
  Description of Artificial Sequence: Synthetic oligonucleotide
gcucuuggcaaugucccgg

SEQ ID NO: 1775920 - RNA, 19 nt, Artificial Sequence
  Description of Artificial Sequence: Synthetic oligonucleotide
cucugugagucuugcgcuc

SEQ ID NO: 1775921 - RNA, 19 nt, Artificial Sequence
  Description of Artificial Sequence: Synthetic oligonucleotide
cgagucuaggaccugcgcg

SEQ ID NO: 1775922 - RNA, 19 nt, Artificial Sequence
  Description of Artificial Sequence: Synthetic oligonucleotide
ucgcucugugaugugucgc

SEQ ID NO: 1775923 - RNA, 19 nt, Artificial Sequence
  Description of Artificial Sequence: Synthetic oligonucleotide
augugucgcaucaucucug

SEQ ID NO: 1775924 - RNA, 19 nt, Artificial Sequence
  Description of Artificial Sequence: Synthetic oligonucleotide
ugaccuugucaaacaucau

SEQ ID NO: 1775925 - RNA, 19 nt, Artificial Sequence
  Description of Artificial Sequence: Synthetic oligonucleotide
acgcuaucauccacuauca

SEQ ID NO: 1775926 - RNA, 19 nt, Artificial Sequence
  Description of Artificial Sequence: Synthetic oligonucleotide
gucguugcgccgccgcucc

SEQ ID NO: 1775927 - RNA, 19 nt, Artificial Sequence
  Description of Artificial Sequence: Synthetic oligonucleotide
gucuaacuucuuuccugac

SEQ ID NO: 1775928 - RNA, 19 nt, Artificial Sequence
  Description of Artificial Sequence: Synthetic oligonucleotide
augucguggcucucuaguu

SEQ ID NO: 1775929 - RNA, 19 nt, Artificial Sequence
  Description of Artificial Sequence: Synthetic oligonucleotide
ugcgcucugucugaaguuu

SEQ ID NO: 1775930 - RNA, 19 nt, Artificial Sequence
  Description of Artificial Sequence: Synthetic oligonucleotide
ggucauggacuguaucuuc

SEQ ID NO: 1775931 - RNA, 19 nt, Artificial Sequence
  Description of Artificial Sequence: Synthetic oligonucleotide
gcccguuucuugcagucag

SEQ ID NO: 1775932 - RNA, 19 nt, Artificial Sequence
  Description of Artificial Sequence: Synthetic oligonucleotide
augggacgcaacugcgagu

SEQ ID NO: 1775933 - RNA, 19 nt, Artificial Sequence
  Description of Artificial Sequence: Synthetic oligonucleotide
cagaacgcuaucauccacu

SEQ ID NO: 1775934 - RNA, 19 nt, Artificial Sequence
  Description of Artificial Sequence: Synthetic oligonucleotide
cacgcuucuuucggucucg

SEQ ID NO: 1775935 - RNA, 19 nt, Artificial Sequence
  Description of Artificial Sequence: Synthetic oligonucleotide
gcccuuguagucucagcag

SEQ ID NO: 1775936 - RNA, 19 nt, Artificial Sequence
  Description of Artificial Sequence: Synthetic oligonucleotide
cuuucggucucggauugca

SEQ ID NO: 1775937 - RNA, 19 nt, Artificial Sequence
  Description of Artificial Sequence: Synthetic oligonucleotide
guagucucagcagcuuuuc

SEQ ID NO: 1775938 - RNA, 19 nt, Artificial Sequence
  Description of Artificial Sequence: Synthetic oligonucleotide
aucgugucgcggagcuucc

SEQ ID NO: 1775939 - RNA, 19 nt, Artificial Sequence
  Description of Artificial Sequence: Synthetic oligonucleotide
cuuuccugacagaacgcua

SEQ ID NO: 1775940 - RNA, 19 nt, Artificial Sequence
  Description of Artificial Sequence: Synthetic oligonucleotide
ucgcgaucauccuccucac

SEQ ID NO: 1775941 - RNA, 19 nt, Artificial Sequence
  Description of Artificial Sequence: Synthetic oligonucleotide
gcgugaaggucucauccug

SEQ ID NO: 1775942 - RNA, 19 nt, Artificial Sequence
  Description of Artificial Sequence: Synthetic oligonucleotide
aaccuucgaaacacagcau

SEQ ID NO: 1775943 - RNA, 19 nt, Artificial Sequence
  Description of Artificial Sequence: Synthetic oligonucleotide
cugcgagucuaggaccugc

SEQ ID NO: 1775944 - RNA, 19 nt, Artificial Sequence
  Description of Artificial Sequence: Synthetic oligonucleotide
cuuuguggcguuggugguc

SEQ ID NO: 1775945 - RNA, 19 nt, Artificial Sequence
  Description of Artificial Sequence: Synthetic oligonucleotide
aucggacaaguaguucucu

SEQ ID NO: 1775946 - RNA, 19 nt, Artificial Sequence
  Description of Artificial Sequence: Synthetic oligonucleotide
auccgaugggacgcaacug

SEQ ID NO: 1775947 - RNA, 19 nt, Artificial Sequence
  Description of Artificial Sequence: Synthetic oligonucleotide
cucugagucggggucuaac

SEQ ID NO: 1775948 - RNA, 19 nt, Artificial Sequence
  Description of Artificial Sequence: Synthetic oligonucleotide
uugcugcgggcuucaauua

SEQ ID NO: 1775949 - RNA, 19 nt, Artificial Sequence
  Description of Artificial Sequence: Synthetic oligonucleotide
aacuucuggcuccgacguu

SEQ ID NO: 1775950 - RNA, 19 nt, Artificial Sequence
  Description of Artificial Sequence: Synthetic oligonucleotide
gcaguacaugcucucugug

SEQ ID NO: 1775951 - RNA, 19 nt, Artificial Sequence
  Description of Artificial Sequence: Synthetic oligonucleotide
ucuuucggucucggauugc

SEQ ID NO: 1775952 - RNA, 19 nt, Artificial Sequence
  Description of Artificial Sequence: Synthetic oligonucleotide
gaagcaguacaugcucucu

SEQ ID NO: 1775953 - RNA, 19 nt, Artificial Sequence
  Description of Artificial Sequence: Synthetic oligonucleotide
caugccccagcgacgcuuc

SEQ ID NO: 1775954 - RNA, 19 nt, Artificial Sequence
  Description of Artificial Sequence: Synthetic oligonucleotide
cagaucggacaaguaguuc

SEQ ID NO: 1775955 - RNA, 19 nt, Artificial Sequence
  Description of Artificial Sequence: Synthetic oligonucleotide
ccgaugggacgcaacugcg

SEQ ID NO: 1775956 - RNA, 19 nt, Artificial Sequence
  Description of Artificial Sequence: Synthetic oligonucleotide
cugcucguugucccucuug

SEQ ID NO: 1775957 - RNA, 19 nt, Artificial Sequence
  Description of Artificial Sequence: Synthetic oligonucleotide
ggaacggagcuugaaggca

SEQ ID NO: 1775958 - RNA, 19 nt, Artificial Sequence
  Description of Artificial Sequence: Synthetic oligonucleotide
cuagaggcccggaggcauc

SEQ ID NO: 1775959 - RNA, 19 nt, Artificial Sequence
  Description of Artificial Sequence: Synthetic oligonucleotide
cugaagcaguacaugcucu

SEQ ID NO: 1775960 - RNA, 19 nt, Artificial Sequence
  Description of Artificial Sequence: Synthetic oligonucleotide
aacccgccucgagagauuu

SEQ ID NO: 1775961 - RNA, 19 nt, Artificial Sequence
  Description of Artificial Sequence: Synthetic oligonucleotide
uccgcccacaccgguaggu

SEQ ID NO: 1775962 - RNA, 19 nt, Artificial Sequence
  Description of Artificial Sequence: Synthetic oligonucleotide
ugcccguuucuugcaguca

SEQ ID NO: 1775963 - RNA, 19 nt, Artificial Sequence
  Description of Artificial Sequence: Synthetic oligonucleotide
gcuggcuaacuaguguggc

SEQ ID NO: 1775964 - RNA, 19 nt, Artificial Sequence
  Description of Artificial Sequence: Synthetic oligonucleotide
ucgcaucaucucugauaug

SEQ ID NO: 1775965 - RNA, 19 nt, Artificial Sequence
  Description of Artificial Sequence: Synthetic oligonucleotide
gugaugugucgcaucaucu

SEQ ID NO: 1775966 - RNA, 19 nt, Artificial Sequence
  Description of Artificial Sequence: Synthetic oligonucleotide
agaggcaguuuuccuucua

SEQ ID NO: 1775967 - RNA, 19 nt, Artificial Sequence
  Description of Artificial Sequence: Synthetic oligonucleotide
cauccgaugggacgcaacu

SEQ ID NO: 1775968 - RNA, 19 nt, Artificial Sequence
  Description of Artificial Sequence: Synthetic oligonucleotide
ugcgcgaccuacugcgcuu

SEQ ID NO: 1775969 - RNA, 19 nt, Artificial Sequence
  Description of Artificial Sequence: Synthetic oligonucleotide
cuaguguggcauccccuga

SEQ ID NO: 1775970 - RNA, 19 nt, Artificial Sequence
  Description of Artificial Sequence: Synthetic oligonucleotide
ugucguugcgccgccgcuc

SEQ ID NO: 1775971 - RNA, 19 nt, Artificial Sequence
  Description of Artificial Sequence: Synthetic oligonucleotide
ccgacguuccccuccuccg

SEQ ID NO: 1775972 - RNA, 19 nt, Artificial Sequence
  Description of Artificial Sequence: Synthetic oligonucleotide
ggaccugcgcgaccuacug

SEQ ID NO: 1775973 - RNA, 19 nt, Artificial Sequence
  Description of Artificial Sequence: Synthetic oligonucleotide
acgcaacugcgagucuagg

SEQ ID NO: 1775974 - RNA, 19 nt, Artificial Sequence
  Description of Artificial Sequence: Synthetic oligonucleotide
acaucgcgaucauccuccu

SEQ ID NO: 1775975 - RNA, 19 nt, Artificial Sequence
  Description of Artificial Sequence: Synthetic oligonucleotide
cuuccgcuggcuaacuagu

SEQ ID NO: 1775976 - RNA, 19 nt, Artificial Sequence
  Description of Artificial Sequence: Synthetic oligonucleotide
cuuaacccgccucgagaga

SEQ ID NO: 1775977 - RNA, 19 nt, Artificial Sequence
  Description of Artificial Sequence: Synthetic oligonucleotide
cggggucuaacuucuuucc

SEQ ID NO: 1775978 - RNA, 19 nt, Artificial Sequence
  Description of Artificial Sequence: Synthetic oligonucleotide
cuccaacugcgugaagguc

SEQ ID NO: 1775979 - RNA, 19 nt, Artificial Sequence
  Description of Artificial Sequence: Synthetic oligonucleotide
ggcuccgacguuccccucc

SEQ ID NO: 1775980 - RNA, 19 nt, Artificial Sequence
  Description of Artificial Sequence: Synthetic oligonucleotide
ccagauauugcaacuggcu

SEQ ID NO: 1775981 - RNA, 19 nt, Artificial Sequence
  Description of Artificial Sequence: Synthetic oligonucleotide
cgccucgagagauuuacug

SEQ ID NO: 1775982 - RNA, 19 nt, Artificial Sequence
  Description of Artificial Sequence: Synthetic oligonucleotide
caggaaccuucgaaacaca

SEQ ID NO: 1775983 - RNA, 19 nt, Artificial Sequence
  Description of Artificial Sequence: Synthetic oligonucleotide
gcucguugucccucuugag

SEQ ID NO: 1775984 - RNA, 19 nt, Artificial Sequence
  Description of Artificial Sequence: Synthetic oligonucleotide
ucacguggcucaguuuguu

SEQ ID NO: 1775985 - RNA, 19 nt, Artificial Sequence
  Description of Artificial Sequence: Synthetic oligonucleotide
gaggcccggaggcauccga

SEQ ID NO: 1775986 - RNA, 19 nt, Artificial Sequence
  Description of Artificial Sequence: Synthetic oligonucleotide
ugugagucuugcgcuccau

SEQ ID NO: 1775987 - RNA, 19 nt, Artificial Sequence
  Description of Artificial Sequence: Synthetic oligonucleotide
uaacccgccucgagagauu

SEQ ID NO: 1775988 - RNA, 19 nt, Artificial Sequence
  Description of Artificial Sequence: Synthetic oligonucleotide
cuccaugcgcucugucuga

SEQ ID NO: 1775989 - RNA, 19 nt, Artificial Sequence
  Description of Artificial Sequence: Synthetic oligonucleotide
cagaaggaugcggguguug

SEQ ID NO: 1775990 - RNA, 19 nt, Artificial Sequence
  Description of Artificial Sequence: Synthetic oligonucleotide
cagcgggucgcaggguucc

SEQ ID NO: 1775991 - RNA, 19 nt, Artificial Sequence
  Description of Artificial Sequence: Synthetic oligonucleotide
uacaugccccagcgacgcu

SEQ ID NO: 1775992 - RNA, 19 nt, Artificial Sequence
  Description of Artificial Sequence: Synthetic oligonucleotide
ccaacugcgugaaggucuc

SEQ ID NO: 1775993 - RNA, 19 nt, Artificial Sequence
  Description of Artificial Sequence: Synthetic oligonucleotide
accugcggugcucccuacu

SEQ ID NO: 1775994 - RNA, 19 nt, Artificial Sequence
  Description of Artificial Sequence: Synthetic oligonucleotide
gggcuuaacccgccucgag

SEQ ID NO: 1775995 - RNA, 19 nt, Artificial Sequence
  Description of Artificial Sequence: Synthetic oligonucleotide
ggagcuuccgcuggcuaac

SEQ ID NO: 1775996 - RNA, 19 nt, Artificial Sequence
  Description of Artificial Sequence: Synthetic oligonucleotide
guacaugcucucugugagu

SEQ ID NO: 1775997 - RNA, 19 nt, Artificial Sequence
  Description of Artificial Sequence: Synthetic oligonucleotide
acaugccccagcgacgcuu

SEQ ID NO: 1775998 - RNA, 19 nt, Artificial Sequence
  Description of Artificial Sequence: Synthetic oligonucleotide
uccaugcgcucugucugaa

SEQ ID NO: 1775999 - RNA, 19 nt, Artificial Sequence
  Description of Artificial Sequence: Synthetic oligonucleotide
gugauucagccacuccagu

SEQ ID NO: 1776000 - RNA, 19 nt, Artificial Sequence
  Description of Artificial Sequence: Synthetic oligonucleotide
ccugcggugcucccuacug

SEQ ID NO: 1776001 - RNA, 19 nt, Artificial Sequence
  Description of Artificial Sequence: Synthetic oligonucleotide
cccuacuggagccuccuuc

SEQ ID NO: 1776002 - RNA, 19 nt, Artificial Sequence
  Description of Artificial Sequence: Synthetic oligonucleotide
gccccagcgacgcuucagc

SEQ ID NO: 1776003 - RNA, 19 nt, Artificial Sequence
  Description of Artificial Sequence: Synthetic oligonucleotide
ccugcaucgugucgcggag

SEQ ID NO: 1776004 - RNA, 19 nt, Artificial Sequence
  Description of Artificial Sequence: Synthetic oligonucleotide
acugcgagucuaggaccug

SEQ ID NO: 1776005 - RNA, 19 nt, Artificial Sequence
  Description of Artificial Sequence: Synthetic oligonucleotide
agcgggucgcaggguuccc

SEQ ID NO: 1776006 - RNA, 19 nt, Artificial Sequence
  Description of Artificial Sequence: Synthetic oligonucleotide
gccucgagagauuuacugu

SEQ ID NO: 1776007 - RNA, 19 nt, Artificial Sequence
  Description of Artificial Sequence: Synthetic oligonucleotide
cugcaucgugucgcggagc

SEQ ID NO: 1776008 - RNA, 19 nt, Artificial Sequence
  Description of Artificial Sequence: Synthetic oligonucleotide
gcugcgggcuucaauuaac

SEQ ID NO: 1776009 - RNA, 19 nt, Artificial Sequence
  Description of Artificial Sequence: Synthetic oligonucleotide
gcacgggucaccacaucgc

SEQ ID NO: 1776010 - RNA, 19 nt, Artificial Sequence
  Description of Artificial Sequence: Synthetic oligonucleotide
cccgccucgagagauuuac

SEQ ID NO: 1776011 - RNA, 19 nt, Artificial Sequence
  Description of Artificial Sequence: Synthetic oligonucleotide
gcaaggcgcguuccaguug

SEQ ID NO: 1776012 - RNA, 19 nt, Artificial Sequence
  Description of Artificial Sequence: Synthetic oligonucleotide
gguucgcaaggcgcguucc

SEQ ID NO: 1776013 - RNA, 19 nt, Artificial Sequence
  Description of Artificial Sequence: Synthetic oligonucleotide
agcuuccgcuggcuaacua

SEQ ID NO: 1776014 - RNA, 19 nt, Artificial Sequence
  Description of Artificial Sequence: Synthetic oligonucleotide
caucgcgaucauccuccuc

SEQ ID NO: 1776015 - RNA, 19 nt, Artificial Sequence
  Description of Artificial Sequence: Synthetic oligonucleotide
aggaccugcgcgaccuacu

SEQ ID NO: 1776016 - RNA, 19 nt, Artificial Sequence
  Description of Artificial Sequence: Synthetic oligonucleotide
cugcgggcuucaauuaacu

SEQ ID NO: 1776017 - RNA, 19 nt, Artificial Sequence
  Description of Artificial Sequence: Synthetic oligonucleotide
gggucgcaggguucccuag

SEQ ID NO: 1776018 - RNA, 19 nt, Artificial Sequence
  Description of Artificial Sequence: Synthetic oligonucleotide
gaacgcuaucauccacuau

SEQ ID NO: 1776019 - RNA, 19 nt, Artificial Sequence
  Description of Artificial Sequence: Synthetic oligonucleotide
cugauaugucguggcucuc

SEQ ID NO: 1776020 - RNA, 19 nt, Artificial Sequence
  Description of Artificial Sequence: Synthetic oligonucleotide
cuggcuccgacguuccccu

SEQ ID NO: 1776021 - RNA, 19 nt, Artificial Sequence
  Description of Artificial Sequence: Synthetic oligonucleotide
ccacaucgcgaucauccuc

SEQ ID NO: 1776022 - RNA, 19 nt, Artificial Sequence
  Description of Artificial Sequence: Synthetic oligonucleotide
cugguacaugccccagcga

SEQ ID NO: 1776023 - RNA, 19 nt, Artificial Sequence
  Description of Artificial Sequence: Synthetic oligonucleotide
cccggaggcauccgauggg

SEQ ID NO: 1776024 - RNA, 19 nt, Artificial Sequence
  Description of Artificial Sequence: Synthetic oligonucleotide
ccuucgaaacacagcaugu

SEQ ID NO: 1776025 - RNA, 19 nt, Artificial Sequence
  Description of Artificial Sequence: Synthetic oligonucleotide
ggucgcaggguucccuaga

SEQ ID NO: 1776026 - RNA, 19 nt, Artificial Sequence
  Description of Artificial Sequence: Synthetic oligonucleotide
ugcgcuccaugcgcucugu

SEQ ID NO: 1776027 - RNA, 19 nt, Artificial Sequence
  Description of Artificial Sequence: Synthetic oligonucleotide
cccagcgacgcuucagcuc

SEQ ID NO: 1776028 - RNA, 19 nt, Artificial Sequence
  Description of Artificial Sequence: Synthetic oligonucleotide
gaccugcggugcucccuac

SEQ ID NO: 1776029 - RNA, 19 nt, Artificial Sequence
  Description of Artificial Sequence: Synthetic oligonucleotide
cgagagauuuacuguggga

SEQ ID NO: 1776030 - RNA, 19 nt, Artificial Sequence
  Description of Artificial Sequence: Synthetic oligonucleotide
cugagucggggucuaacuu

SEQ ID NO: 1776031 - RNA, 19 nt, Artificial Sequence
  Description of Artificial Sequence: Synthetic oligonucleotide
ccgguaggugggcccagcg

SEQ ID NO: 1776032 - RNA, 19 nt, Artificial Sequence
  Description of Artificial Sequence: Synthetic oligonucleotide
ggguucgcaaggcgcguuc

SEQ ID NO: 1776033 - RNA, 19 nt, Artificial Sequence
  Description of Artificial Sequence: Synthetic oligonucleotide
aguugcccuuguagucuca

SEQ ID NO: 1776034 - RNA, 19 nt, Artificial Sequence
  Description of Artificial Sequence: Synthetic oligonucleotide
cgugucgcggagcuuccgc

SEQ ID NO: 1776035 - RNA, 19 nt, Artificial Sequence
  Description of Artificial Sequence: Synthetic oligonucleotide
ucucugagucggggucuaa

SEQ ID NO: 1776036 - RNA, 19 nt, Artificial Sequence
  Description of Artificial Sequence: Synthetic oligonucleotide
aaggcgcguuccaguugcu

SEQ ID NO: 1776037 - RNA, 19 nt, Artificial Sequence
  Description of Artificial Sequence: Synthetic oligonucleotide
gcguugguggucauggacu

SEQ ID NO: 1776038 - RNA, 19 nt, Artificial Sequence
  Description of Artificial Sequence: Synthetic oligonucleotide
cccucgaaggagccuccag

SEQ ID NO: 1776039 - RNA, 19 nt, Artificial Sequence
  Description of Artificial Sequence: Synthetic oligonucleotide
ccaugcgcucugucugaag

SEQ ID NO: 1776040 - RNA, 19 nt, Artificial Sequence
  Description of Artificial Sequence: Synthetic oligonucleotide
cagcacgggucaccacauc

SEQ ID NO: 1776041 - RNA, 19 nt, Artificial Sequence
  Description of Artificial Sequence: Synthetic oligonucleotide
ggaugucguugcgccgccg

SEQ ID NO: 1776042 - RNA, 19 nt, Artificial Sequence
  Description of Artificial Sequence: Synthetic oligonucleotide
cauccacuaucacguggcu

SEQ ID NO: 1776043 - RNA, 19 nt, Artificial Sequence
  Description of Artificial Sequence: Synthetic oligonucleotide
cgcaacugcgagucuagga

SEQ ID NO: 1776044 - RNA, 19 nt, Artificial Sequence
  Description of Artificial Sequence: Synthetic oligonucleotide
gcugaccugcggugcuccc

SEQ ID NO: 1776045 - RNA, 19 nt, Artificial Sequence
  Description of Artificial Sequence: Synthetic oligonucleotide
aggguucgcaaggcgcguu

SEQ ID NO: 1776046 - RNA, 19 nt, Artificial Sequence
  Description of Artificial Sequence: Synthetic oligonucleotide
cuaucacguggcucaguuu

SEQ ID NO: 1776047 - RNA, 19 nt, Artificial Sequence
  Description of Artificial Sequence: Synthetic oligonucleotide
uucuugcugcgggcuucaa

SEQ ID NO: 1776048 - RNA, 19 nt, Artificial Sequence
  Description of Artificial Sequence: Synthetic oligonucleotide
gcauccgaugggacgcaac

SEQ ID NO: 1776049 - RNA, 19 nt, Artificial Sequence
  Description of Artificial Sequence: Synthetic oligonucleotide
uuguggcguugguggucau

SEQ ID NO: 1776050 - RNA, 19 nt, Artificial Sequence
  Description of Artificial Sequence: Synthetic oligonucleotide
gcucaguuuguuggccaga

SEQ ID NO: 1776051 - RNA, 19 nt, Artificial Sequence
  Description of Artificial Sequence: Synthetic oligonucleotide
gaggguucgcaaggcgcgu

SEQ ID NO: 1776052 - RNA, 19 nt, Artificial Sequence
  Description of Artificial Sequence: Synthetic oligonucleotide
cugcgcgaccuacugcgcu

SEQ ID NO: 1776053 - RNA, 19 nt, Artificial Sequence
  Description of Artificial Sequence: Synthetic oligonucleotide
gcggugcucccuacuggag

SEQ ID NO: 1776054 - RNA, 19 nt, Artificial Sequence
  Description of Artificial Sequence: Synthetic oligonucleotide
cgcuaucauccacuaucac

SEQ ID NO: 1776055 - RNA, 19 nt, Artificial Sequence
  Description of Artificial Sequence: Synthetic oligonucleotide
agccuccuucagcccucga

SEQ ID NO: 1776056 - RNA, 19 nt, Artificial Sequence
  Description of Artificial Sequence: Synthetic oligonucleotide
uggcuccgacguuccccuc

SEQ ID NO: 1776057 - RNA, 19 nt, Artificial Sequence
  Description of Artificial Sequence: Synthetic oligonucleotide
caccgguaggugggcccag

SEQ ID NO: 1776058 - RNA, 19 nt, Artificial Sequence
  Description of Artificial Sequence: Synthetic oligonucleotide
ccacuaucacguggcucag

SEQ ID NO: 1776059 - RNA, 19 nt, Artificial Sequence
  Description of Artificial Sequence: Synthetic oligonucleotide
ggggcuuaacccgccucga

SEQ ID NO: 1776060 - RNA, 19 nt, Artificial Sequence
  Description of Artificial Sequence: Synthetic oligonucleotide
ggguucccuagaggcccgg

SEQ ID NO: 1776061 - RNA, 19 nt, Artificial Sequence
  Description of Artificial Sequence: Synthetic oligonucleotide
cgaugggacgcaacugcga

SEQ ID NO: 1776062 - RNA, 19 nt, Artificial Sequence
  Description of Artificial Sequence: Synthetic oligonucleotide
gcgcguuccaguugcuggu

SEQ ID NO: 1776063 - RNA, 19 nt, Artificial Sequence
  Description of Artificial Sequence: Synthetic oligonucleotide
gugucgcaucaucucugau

SEQ ID NO: 1776064 - RNA, 19 nt, Artificial Sequence
  Description of Artificial Sequence: Synthetic oligonucleotide
ccuccgggugcugcugacc

SEQ ID NO: 1776065 - RNA, 19 nt, Artificial Sequence
  Description of Artificial Sequence: Synthetic oligonucleotide
gagcuuccgcuggcuaacu

SEQ ID NO: 1776066 - RNA, 19 nt, Artificial Sequence
  Description of Artificial Sequence: Synthetic oligonucleotide
cggaggcauccgaugggac

SEQ ID NO: 1776067 - RNA, 19 nt, Artificial Sequence
  Description of Artificial Sequence: Synthetic oligonucleotide
gguucccuagaggcccgga

SEQ ID NO: 1776068 - RNA, 19 nt, Artificial Sequence
  Description of Artificial Sequence: Synthetic oligonucleotide
ccggaggcauccgauggga

SEQ ID NO: 1776069 - RNA, 19 nt, Artificial Sequence
  Description of Artificial Sequence: Synthetic oligonucleotide
ccgcccacaccgguaggug

SEQ ID NO: 1776070 - RNA, 19 nt, Artificial Sequence
  Description of Artificial Sequence: Synthetic oligonucleotide
cacuaucacguggcucagu

SEQ ID NO: 1776071 - RNA, 19 nt, Artificial Sequence
  Description of Artificial Sequence: Synthetic oligonucleotide
cugugaugugucgcaucau

SEQ ID NO: 1776072 - RNA, 19 nt, Artificial Sequence
  Description of Artificial Sequence: Synthetic oligonucleotide
gcgcgaccuacugcgcuuc

SEQ ID NO: 1776073 - RNA, 19 nt, Artificial Sequence
  Description of Artificial Sequence: Synthetic oligonucleotide
cgcuccaugcgcucugucu

SEQ ID NO: 1776074 - RNA, 19 nt, Artificial Sequence
  Description of Artificial Sequence: Synthetic oligonucleotide
cgcguuccaguugcuggug

SEQ ID NO: 1776075 - RNA, 19 nt, Artificial Sequence
  Description of Artificial Sequence: Synthetic oligonucleotide
gccgccgcuccucagucuu

SEQ ID NO: 1776076 - RNA, 19 nt, Artificial Sequence
  Description of Artificial Sequence: Synthetic oligonucleotide
ggcauccgaugggacgcaa

SEQ ID NO: 1776077 - RNA, 19 nt, Artificial Sequence
  Description of Artificial Sequence: Synthetic oligonucleotide
gcgcuccaugcgcucuguc

SEQ ID NO: 1776078 - RNA, 19 nt, Artificial Sequence
  Description of Artificial Sequence: Synthetic oligonucleotide
ccuagaggcccggaggcau

SEQ ID NO: 1776079 - RNA, 19 nt, Artificial Sequence
  Description of Artificial Sequence: Synthetic oligonucleotide
gcagcacgggucaccacau

SEQ ID NO: 1776080 - RNA, 19 nt, Artificial Sequence
  Description of Artificial Sequence: Synthetic oligonucleotide
acccgccucgagagauuua

SEQ ID NO: 1776081 - RNA, 19 nt, Artificial Sequence
  Description of Artificial Sequence: Synthetic oligonucleotide
gggacgcaacugcgagucu

SEQ ID NO: 1776082 - RNA, 19 nt, Artificial Sequence
  Description of Artificial Sequence: Synthetic oligonucleotide
ggcuccgcccacaccggua

SEQ ID NO: 1776083 - RNA, 19 nt, Artificial Sequence
  Description of Artificial Sequence: Synthetic oligonucleotide
cccguuucuugcagucagu

SEQ ID NO: 1776084 - RNA, 19 nt, Artificial Sequence
  Description of Artificial Sequence: Synthetic oligonucleotide
cgcuucuuucggucucgga

SEQ ID NO: 1776085 - RNA, 19 nt, Artificial Sequence
  Description of Artificial Sequence: Synthetic oligonucleotide
cccuagaggcccggaggca

SEQ ID NO: 1776086 - RNA, 19 nt, Artificial Sequence
  Description of Artificial Sequence: Synthetic oligonucleotide
gccgcuccucagucuugaa

SEQ ID NO: 1776087 - RNA, 19 nt, Artificial Sequence
  Description of Artificial Sequence: Synthetic oligonucleotide
cguugcgccgccgcuccuc

SEQ ID NO: 1776088 - RNA, 19 nt, Artificial Sequence
  Description of Artificial Sequence: Synthetic oligonucleotide
gcccucgaaggagccucca

SEQ ID NO: 1776089 - RNA, 19 nt, Artificial Sequence
  Description of Artificial Sequence: Synthetic oligonucleotide
cagcgacgcuucagcuccu

SEQ ID NO: 1776090 - RNA, 19 nt, Artificial Sequence
  Description of Artificial Sequence: Synthetic oligonucleotide
ccccagcgacgcuucagcu

SEQ ID NO: 1776091 - RNA, 19 nt, Artificial Sequence
  Description of Artificial Sequence: Synthetic oligonucleotide
gcagaaggaugcggguguu

SEQ ID NO: 1776092 - RNA, 19 nt, Artificial Sequence
  Description of Artificial Sequence: Synthetic oligonucleotide
cgcaaggcgcguuccaguu

SEQ ID NO: 1776093 - RNA, 19 nt, Artificial Sequence
  Description of Artificial Sequence: Synthetic oligonucleotide
ccgccucgagagauuuacu

SEQ ID NO: 1776094 - RNA, 19 nt, Artificial Sequence
  Description of Artificial Sequence: Synthetic oligonucleotide
cgggucgcaggguucccua

SEQ ID NO: 1776095 - RNA, 19 nt, Artificial Sequence
  Description of Artificial Sequence: Synthetic oligonucleotide
gcgggucgcaggguucccu

SEQ ID NO: 1776096 - RNA, 19 nt, Artificial Sequence
  Description of Artificial Sequence: Synthetic oligonucleotide
gcgaccuacugcgcuucuu

SEQ ID NO: 1776097 - RNA, 19 nt, Artificial Sequence
  Description of Artificial Sequence: Synthetic oligonucleotide
cgcgaucauccuccucacu

SEQ ID NO: 1776098 - RNA, 19 nt, Artificial Sequence
  Description of Artificial Sequence: Synthetic oligonucleotide
gcaucgugucgcggagcuu

SEQ ID NO: 1776099 - RNA, 19 nt, Artificial Sequence
  Description of Artificial Sequence: Synthetic oligonucleotide
ccgggcauucagggccucu

SEQ ID NO: 1776100 - RNA, 19 nt, Artificial Sequence
  Description of Artificial Sequence: Synthetic oligonucleotide
gcccagcgggucgcagggu

SEQ ID NO: 1776101 - RNA, 19 nt, Artificial Sequence
  Description of Artificial Sequence: Synthetic oligonucleotide
cgcgaccuacugcgcuucu

SEQ ID NO: 1776102 - RNA, 19 nt, Artificial Sequence
  Description of Artificial Sequence: Synthetic oligonucleotide
aauacaaagaaauauugug

SEQ ID NO: 1776103 - RNA, 19 nt, Artificial Sequence
  Description of Artificial Sequence: Synthetic oligonucleotide
uacaacauuauauuggcgg

SEQ ID NO: 1776104 - RNA, 19 nt, Artificial Sequence
  Description of Artificial Sequence: Synthetic oligonucleotide
aauauuauuuuccucaaau

SEQ ID NO: 1776105 - RNA, 19 nt, Artificial Sequence
  Description of Artificial Sequence: Synthetic oligonucleotide
uaaauuauaaguucucuca

SEQ ID NO: 1776106 - RNA, 19 nt, Artificial Sequence
  Description of Artificial Sequence: Synthetic oligonucleotide
aauccugugugucagcuac

SEQ ID NO: 1776107 - RNA, 19 nt, Artificial Sequence
  Description of Artificial Sequence: Synthetic oligonucleotide
uauggaaugacuuuucucu

SEQ ID NO: 1776108 - RNA, 19 nt, Artificial Sequence
  Description of Artificial Sequence: Synthetic oligonucleotide
aagggcauuaauuuuaacu

SEQ ID NO: 1776109 - RNA, 19 nt, Artificial Sequence
  Description of Artificial Sequence: Synthetic oligonucleotide
aaauauuguggguacagca

SEQ ID NO: 1776110 - RNA, 19 nt, Artificial Sequence
  Description of Artificial Sequence: Synthetic oligonucleotide
ucugaagacagcaaaauau

SEQ ID NO: 1776111 - RNA, 19 nt, Artificial Sequence
  Description of Artificial Sequence: Synthetic oligonucleotide
ucauuuauacuucugauuu

SEQ ID NO: 1776112 - RNA, 19 nt, Artificial Sequence
  Description of Artificial Sequence: Synthetic oligonucleotide
aaguucucucaauaaaggg

SEQ ID NO: 1776113 - RNA, 19 nt, Artificial Sequence
  Description of Artificial Sequence: Synthetic oligonucleotide
agagcauguagucuugucc

SEQ ID NO: 1776114 - RNA, 19 nt, Artificial Sequence
  Description of Artificial Sequence: Synthetic oligonucleotide
cuuaaaucaucuuuacugc

SEQ ID NO: 1776115 - RNA, 19 nt, Artificial Sequence
  Description of Artificial Sequence: Synthetic oligonucleotide
uauauuggcggucuaagga

SEQ ID NO: 1776116 - RNA, 19 nt, Artificial Sequence
  Description of Artificial Sequence: Synthetic oligonucleotide
aaagagacaggcuuguccu

SEQ ID NO: 1776117 - RNA, 19 nt, Artificial Sequence
  Description of Artificial Sequence: Synthetic oligonucleotide
uuuauuuacuaaguaauca

SEQ ID NO: 1776118 - RNA, 19 nt, Artificial Sequence
  Description of Artificial Sequence: Synthetic oligonucleotide
aauccgcuuccuuuggugc

SEQ ID NO: 1776119 - RNA, 19 nt, Artificial Sequence
  Description of Artificial Sequence: Synthetic oligonucleotide
aauacugcuguauuuagua

SEQ ID NO: 1776120 - RNA, 19 nt, Artificial Sequence
  Description of Artificial Sequence: Synthetic oligonucleotide
auaaaugaagcucugacua

SEQ ID NO: 1776121 - RNA, 19 nt, Artificial Sequence
  Description of Artificial Sequence: Synthetic oligonucleotide
uaacaaauguguauguaca

SEQ ID NO: 1776122 - RNA, 19 nt, Artificial Sequence
  Description of Artificial Sequence: Synthetic oligonucleotide
uuucuauaaauacucaaau

SEQ ID NO: 1776123 - RNA, 19 nt, Artificial Sequence
  Description of Artificial Sequence: Synthetic oligonucleotide
uuugacaagugauugagaa

SEQ ID NO: 1776124 - RNA, 19 nt, Artificial Sequence
  Description of Artificial Sequence: Synthetic oligonucleotide
uucaacaauuucaaagcag

SEQ ID NO: 1776125 - RNA, 19 nt, Artificial Sequence
  Description of Artificial Sequence: Synthetic oligonucleotide
uaauuguggucacagaaca

SEQ ID NO: 1776126 - RNA, 19 nt, Artificial Sequence
  Description of Artificial Sequence: Synthetic oligonucleotide
aguucucucaauaaagggc

SEQ ID NO: 1776127 - RNA, 19 nt, Artificial Sequence
  Description of Artificial Sequence: Synthetic oligonucleotide
ugguacuucaacaauuuca

SEQ ID NO: 1776128 - RNA, 19 nt, Artificial Sequence
  Description of Artificial Sequence: Synthetic oligonucleotide
uacugcuguauuuaguagg

SEQ ID NO: 1776129 - RNA, 19 nt, Artificial Sequence
  Description of Artificial Sequence: Synthetic oligonucleotide
guuaucaggggucuggagg

SEQ ID NO: 1776130 - RNA, 19 nt, Artificial Sequence
  Description of Artificial Sequence: Synthetic oligonucleotide
ugacuauaaauaacaaaug

SEQ ID NO: 1776131 - RNA, 19 nt, Artificial Sequence
  Description of Artificial Sequence: Synthetic oligonucleotide
uauaaguucucucaauaaa

SEQ ID NO: 1776132 - RNA, 19 nt, Artificial Sequence
  Description of Artificial Sequence: Synthetic oligonucleotide
uuaucaggggucuggaggg

SEQ ID NO: 1776133 - RNA, 19 nt, Artificial Sequence
  Description of Artificial Sequence: Synthetic oligonucleotide
agucagaggaaacuugugg

SEQ ID NO: 1776134 - RNA, 19 nt, Artificial Sequence
  Description of Artificial Sequence: Synthetic oligonucleotide
aguaauuuguuguugcacu

SEQ ID NO: 1776135 - RNA, 19 nt, Artificial Sequence
  Description of Artificial Sequence: Synthetic oligonucleotide
aaaugaaauccuguguguc

SEQ ID NO: 1776136 - RNA, 19 nt, Artificial Sequence
  Description of Artificial Sequence: Synthetic oligonucleotide
uguggcucaauacaaagaa

SEQ ID NO: 1776137 - RNA, 19 nt, Artificial Sequence
  Description of Artificial Sequence: Synthetic oligonucleotide
ucuucuaacagcugccucc

SEQ ID NO: 1776138 - RNA, 19 nt, Artificial Sequence
  Description of Artificial Sequence: Synthetic oligonucleotide
uaaguaaucaaguacuguu

SEQ ID NO: 1776139 - RNA, 19 nt, Artificial Sequence
  Description of Artificial Sequence: Synthetic oligonucleotide
uuuacuaaguaaucaagua

SEQ ID NO: 1776140 - RNA, 19 nt, Artificial Sequence
  Description of Artificial Sequence: Synthetic oligonucleotide
ugacaagugauugagaaaa

SEQ ID NO: 1776141 - RNA, 19 nt, Artificial Sequence
  Description of Artificial Sequence: Synthetic oligonucleotide
uucaguaauuuguuguugc

SEQ ID NO: 1776142 - RNA, 19 nt, Artificial Sequence
  Description of Artificial Sequence: Synthetic oligonucleotide
uguggguacagcauucucc

SEQ ID NO: 1776143 - RNA, 19 nt, Artificial Sequence
  Description of Artificial Sequence: Synthetic oligonucleotide
ucuauauucugagaggcug

SEQ ID NO: 1776144 - RNA, 19 nt, Artificial Sequence
  Description of Artificial Sequence: Synthetic oligonucleotide
uuauauuggcggucuaagg

SEQ ID NO: 1776145 - RNA, 19 nt, Artificial Sequence
  Description of Artificial Sequence: Synthetic oligonucleotide
acuguuuacaaagaccggg

SEQ ID NO: 1776146 - RNA, 19 nt, Artificial Sequence
  Description of Artificial Sequence: Synthetic oligonucleotide
aagacagcaaaauauuauu

SEQ ID NO: 1776147 - RNA, 19 nt, Artificial Sequence
  Description of Artificial Sequence: Synthetic oligonucleotide
ugcacucucucuuaaagca

SEQ ID NO: 1776148 - RNA, 19 nt, Artificial Sequence
  Description of Artificial Sequence: Synthetic oligonucleotide
aacaccgacagguuaucag

SEQ ID NO: 1776149 - RNA, 19 nt, Artificial Sequence
  Description of Artificial Sequence: Synthetic oligonucleotide
guuuacaaagaccggggcg

SEQ ID NO: 1776150 - RNA, 19 nt, Artificial Sequence
  Description of Artificial Sequence: Synthetic oligonucleotide
auauggaaugacuuuucuc

SEQ ID NO: 1776151 - RNA, 19 nt, Artificial Sequence
  Description of Artificial Sequence: Synthetic oligonucleotide
auuuugacaagugauugag

SEQ ID NO: 1776152 - RNA, 19 nt, Artificial Sequence
  Description of Artificial Sequence: Synthetic oligonucleotide
aaaccaauauacaacauua

SEQ ID NO: 1776153 - RNA, 19 nt, Artificial Sequence
  Description of Artificial Sequence: Synthetic oligonucleotide
uuuacaaagaccggggcga

SEQ ID NO: 1776154 - RNA, 19 nt, Artificial Sequence
  Description of Artificial Sequence: Synthetic oligonucleotide
uuagcagcccaauagcagc

SEQ ID NO: 1776155 - RNA, 19 nt, Artificial Sequence
  Description of Artificial Sequence: Synthetic oligonucleotide
aucucuauauucugagagg

SEQ ID NO: 1776156 - RNA, 19 nt, Artificial Sequence
  Description of Artificial Sequence: Synthetic oligonucleotide
aacuuaaaucaucuuuacu

SEQ ID NO: 1776157 - RNA, 19 nt, Artificial Sequence
  Description of Artificial Sequence: Synthetic oligonucleotide
uguacaucucuauauucug

SEQ ID NO: 1776158 - RNA, 19 nt, Artificial Sequence
  Description of Artificial Sequence: Synthetic oligonucleotide
ucucuauauucugagaggc

SEQ ID NO: 1776159 - RNA, 19 nt, Artificial Sequence
  Description of Artificial Sequence: Synthetic oligonucleotide
uuaaaucaucuuuacugca

SEQ ID NO: 1776160 - RNA, 19 nt, Artificial Sequence
  Description of Artificial Sequence: Synthetic oligonucleotide
ugcauuguguccuccacag

SEQ ID NO: 1776161 - RNA, 19 nt, Artificial Sequence
  Description of Artificial Sequence: Synthetic oligonucleotide
ugugggagaaucacauuag

SEQ ID NO: 1776162 - RNA, 19 nt, Artificial Sequence
  Description of Artificial Sequence: Synthetic oligonucleotide
auuauaaguucucucaaua

SEQ ID NO: 1776163 - RNA, 19 nt, Artificial Sequence
  Description of Artificial Sequence: Synthetic oligonucleotide
ugaagcucugacuauaaau

SEQ ID NO: 1776164 - RNA, 19 nt, Artificial Sequence
  Description of Artificial Sequence: Synthetic oligonucleotide
guauuuaguaggcuugaag

SEQ ID NO: 1776165 - RNA, 19 nt, Artificial Sequence
  Description of Artificial Sequence: Synthetic oligonucleotide
cugacuauaaauaacaaau

SEQ ID NO: 1776166 - RNA, 19 nt, Artificial Sequence
  Description of Artificial Sequence: Synthetic oligonucleotide
uuauaaguucucucaauaa

SEQ ID NO: 1776167 - RNA, 19 nt, Artificial Sequence
  Description of Artificial Sequence: Synthetic oligonucleotide
gacugcaccauccuuccgg

SEQ ID NO: 1776168 - RNA, 19 nt, Artificial Sequence
  Description of Artificial Sequence: Synthetic oligonucleotide
agggcauuaauuuuaacuu

SEQ ID NO: 1776169 - RNA, 19 nt, Artificial Sequence
  Description of Artificial Sequence: Synthetic oligonucleotide
uugacaguuuauuuugaca

SEQ ID NO: 1776170 - RNA, 19 nt, Artificial Sequence
  Description of Artificial Sequence: Synthetic oligonucleotide
ccacuguuuacaaagaccg

SEQ ID NO: 1776171 - RNA, 19 nt, Artificial Sequence
  Description of Artificial Sequence: Synthetic oligonucleotide
guacaucucauuuucucag

SEQ ID NO: 1776172 - RNA, 19 nt, Artificial Sequence
  Description of Artificial Sequence: Synthetic oligonucleotide
uaaaugaaauccugugugu

SEQ ID NO: 1776173 - RNA, 19 nt, Artificial Sequence
  Description of Artificial Sequence: Synthetic oligonucleotide
acaccgacagguuaucagg

SEQ ID NO: 1776174 - RNA, 19 nt, Artificial Sequence
  Description of Artificial Sequence: Synthetic oligonucleotide
aaauauugacuugacaguu

SEQ ID NO: 1776175 - RNA, 19 nt, Artificial Sequence
  Description of Artificial Sequence: Synthetic oligonucleotide
cuguuuacaaagaccgggg

SEQ ID NO: 1776176 - RNA, 19 nt, Artificial Sequence
  Description of Artificial Sequence: Synthetic oligonucleotide
acugcuguauuuaguaggc

SEQ ID NO: 1776177 - RNA, 19 nt, Artificial Sequence
  Description of Artificial Sequence: Synthetic oligonucleotide
ucugggguaaaguacucug

SEQ ID NO: 1776178 - RNA, 19 nt, Artificial Sequence
  Description of Artificial Sequence: Synthetic oligonucleotide
uuuguuguugcacucucuc

SEQ ID NO: 1776179 - RNA, 19 nt, Artificial Sequence
  Description of Artificial Sequence: Synthetic oligonucleotide
aaagggcauuaauuuuaac

SEQ ID NO: 1776180 - RNA, 19 nt, Artificial Sequence
  Description of Artificial Sequence: Synthetic oligonucleotide
aacauuauauuggcggucu

SEQ ID NO: 1776181 - RNA, 19 nt, Artificial Sequence
  Description of Artificial Sequence: Synthetic oligonucleotide
uuucugacgcaucaucucu

SEQ ID NO: 1776182 - RNA, 19 nt, Artificial Sequence
  Description of Artificial Sequence: Synthetic oligonucleotide
uaucguaucgguucuugca

SEQ ID NO: 1776183 - RNA, 19 nt, Artificial Sequence
  Description of Artificial Sequence: Synthetic oligonucleotide
auuauauuggcggucuaag

SEQ ID NO: 1776184 - RNA, 19 nt, Artificial Sequence
  Description of Artificial Sequence: Synthetic oligonucleotide
acaaauguguauguacauc

SEQ ID NO: 1776185 - RNA, 19 nt, Artificial Sequence
  Description of Artificial Sequence: Synthetic oligonucleotide
aucguaucgguucuugcag

SEQ ID NO: 1776186 - RNA, 19 nt, Artificial Sequence
  Description of Artificial Sequence: Synthetic oligonucleotide
uguccuaugaucucauuua

SEQ ID NO: 1776187 - RNA, 19 nt, Artificial Sequence
  Description of Artificial Sequence: Synthetic oligonucleotide
acaacauuauauuggcggu

SEQ ID NO: 1776188 - RNA, 19 nt, Artificial Sequence
  Description of Artificial Sequence: Synthetic oligonucleotide
uuuacugcaccguuauccu

SEQ ID NO: 1776189 - RNA, 19 nt, Artificial Sequence
  Description of Artificial Sequence: Synthetic oligonucleotide
cuuucgguggcuuugguca

SEQ ID NO: 1776190 - RNA, 19 nt, Artificial Sequence
  Description of Artificial Sequence: Synthetic oligonucleotide
ugaagacagcaaaauauua

SEQ ID NO: 1776191 - RNA, 19 nt, Artificial Sequence
  Description of Artificial Sequence: Synthetic oligonucleotide
aggacugcaccauccuucc

SEQ ID NO: 1776192 - RNA, 19 nt, Artificial Sequence
  Description of Artificial Sequence: Synthetic oligonucleotide
guacucugaacaaauacug

SEQ ID NO: 1776193 - RNA, 19 nt, Artificial Sequence
  Description of Artificial Sequence: Synthetic oligonucleotide
cacacuuccccucugcccg

SEQ ID NO: 1776194 - RNA, 19 nt, Artificial Sequence
  Description of Artificial Sequence: Synthetic oligonucleotide
aagcucugacuauaaauaa

SEQ ID NO: 1776195 - RNA, 19 nt, Artificial Sequence
  Description of Artificial Sequence: Synthetic oligonucleotide
ggcauuagcagcccaauag

SEQ ID NO: 1776196 - RNA, 19 nt, Artificial Sequence
  Description of Artificial Sequence: Synthetic oligonucleotide
aucucucucucucuggaag

SEQ ID NO: 1776197 - RNA, 19 nt, Artificial Sequence
  Description of Artificial Sequence: Synthetic oligonucleotide
accaucuugaaaccaauau

SEQ ID NO: 1776198 - RNA, 19 nt, Artificial Sequence
  Description of Artificial Sequence: Synthetic oligonucleotide
ggagaaucacauuagcccc

SEQ ID NO: 1776199 - RNA, 19 nt, Artificial Sequence
  Description of Artificial Sequence: Synthetic oligonucleotide
uguagucuugucccacuag

SEQ ID NO: 1776200 - RNA, 19 nt, Artificial Sequence
  Description of Artificial Sequence: Synthetic oligonucleotide
acaaagaaauauugugggu

SEQ ID NO: 1776201 - RNA, 19 nt, Artificial Sequence
  Description of Artificial Sequence: Synthetic oligonucleotide
ugaacaaauacugcuguau

SEQ ID NO: 1776202 - RNA, 19 nt, Artificial Sequence
  Description of Artificial Sequence: Synthetic oligonucleotide
uacaagagagcauguaguc

SEQ ID NO: 1776203 - RNA, 19 nt, Artificial Sequence
  Description of Artificial Sequence: Synthetic oligonucleotide
aauaacaaauguguaugua

SEQ ID NO: 1776204 - RNA, 19 nt, Artificial Sequence
  Description of Artificial Sequence: Synthetic oligonucleotide
auuucuauaaauacucaaa

SEQ ID NO: 1776205 - RNA, 19 nt, Artificial Sequence
  Description of Artificial Sequence: Synthetic oligonucleotide
acugcaccauccuuccggc

SEQ ID NO: 1776206 - RNA, 19 nt, Artificial Sequence
  Description of Artificial Sequence: Synthetic oligonucleotide
ugacgcaucaucucucucu

SEQ ID NO: 1776207 - RNA, 19 nt, Artificial Sequence
  Description of Artificial Sequence: Synthetic oligonucleotide
ucaguaauuuguuguugca

SEQ ID NO: 1776208 - RNA, 19 nt, Artificial Sequence
  Description of Artificial Sequence: Synthetic oligonucleotide
ucuaacagcugccucccac

SEQ ID NO: 1776209 - RNA, 19 nt, Artificial Sequence
  Description of Artificial Sequence: Synthetic oligonucleotide
ugacuugacaguuuauuuu

SEQ ID NO: 1776210 - RNA, 19 nt, Artificial Sequence
  Description of Artificial Sequence: Synthetic oligonucleotide
ggguaaaguacucugaaca

SEQ ID NO: 1776211 - RNA, 19 nt, Artificial Sequence
  Description of Artificial Sequence: Synthetic oligonucleotide
auuuaguaggcuugaaguu

SEQ ID NO: 1776212 - RNA, 19 nt, Artificial Sequence
  Description of Artificial Sequence: Synthetic oligonucleotide
uaaagggcauuaauuuuaa

SEQ ID NO: 1776213 - RNA, 19 nt, Artificial Sequence
  Description of Artificial Sequence: Synthetic oligonucleotide
uuuugacaagugauugaga

SEQ ID NO: 1776214 - RNA, 19 nt, Artificial Sequence
  Description of Artificial Sequence: Synthetic oligonucleotide
uuuaguaggcuugaaguuu

SEQ ID NO: 1776215 - RNA, 19 nt, Artificial Sequence
  Description of Artificial Sequence: Synthetic oligonucleotide
auacugcuguauuuaguag

SEQ ID NO: 1776216 - RNA, 19 nt, Artificial Sequence
  Description of Artificial Sequence: Synthetic oligonucleotide
augugggagaaucacauua

SEQ ID NO: 1776217 - RNA, 19 nt, Artificial Sequence
  Description of Artificial Sequence: Synthetic oligonucleotide
gaaauauuguggguacagc

SEQ ID NO: 1776218 - RNA, 19 nt, Artificial Sequence
  Description of Artificial Sequence: Synthetic oligonucleotide
auauuggcggucuaaggau

SEQ ID NO: 1776219 - RNA, 19 nt, Artificial Sequence
  Description of Artificial Sequence: Synthetic oligonucleotide
uugacuugacaguuuauuu

SEQ ID NO: 1776220 - RNA, 19 nt, Artificial Sequence
  Description of Artificial Sequence: Synthetic oligonucleotide
ucaucucucucucucugga

SEQ ID NO: 1776221 - RNA, 19 nt, Artificial Sequence
  Description of Artificial Sequence: Synthetic oligonucleotide
gaagcucugacuauaaaua

SEQ ID NO: 1776222 - RNA, 19 nt, Artificial Sequence
  Description of Artificial Sequence: Synthetic oligonucleotide
acaaagaccggggcgaguc

SEQ ID NO: 1776223 - RNA, 19 nt, Artificial Sequence
  Description of Artificial Sequence: Synthetic oligonucleotide
auuucaaagcagucaugug

SEQ ID NO: 1776224 - RNA, 19 nt, Artificial Sequence
  Description of Artificial Sequence: Synthetic oligonucleotide
uuuucugacgcaucaucuc

SEQ ID NO: 1776225 - RNA, 19 nt, Artificial Sequence
  Description of Artificial Sequence: Synthetic oligonucleotide
cagcccaauagcagcaucg

SEQ ID NO: 1776226 - RNA, 19 nt, Artificial Sequence
  Description of Artificial Sequence: Synthetic oligonucleotide
gaauccgcuuccuuuggug

SEQ ID NO: 1776227 - RNA, 19 nt, Artificial Sequence
  Description of Artificial Sequence: Synthetic oligonucleotide
uuaucguaucgguucuugc

SEQ ID NO: 1776228 - RNA, 19 nt, Artificial Sequence
  Description of Artificial Sequence: Synthetic oligonucleotide
guucucucaauaaagggca

SEQ ID NO: 1776229 - RNA, 19 nt, Artificial Sequence
  Description of Artificial Sequence: Synthetic oligonucleotide
ucagaggaaacuuguggaa

SEQ ID NO: 1776230 - RNA, 19 nt, Artificial Sequence
  Description of Artificial Sequence: Synthetic oligonucleotide
uuaguaggcuugaaguuuu

SEQ ID NO: 1776231 - RNA, 19 nt, Artificial Sequence
  Description of Artificial Sequence: Synthetic oligonucleotide
auauugacuugacaguuua

SEQ ID NO: 1776232 - RNA, 19 nt, Artificial Sequence
  Description of Artificial Sequence: Synthetic oligonucleotide
accggggcgagucagagga

SEQ ID NO: 1776233 - RNA, 19 nt, Artificial Sequence
  Description of Artificial Sequence: Synthetic oligonucleotide
augaaauccugugugucag

SEQ ID NO: 1776234 - RNA, 19 nt, Artificial Sequence
  Description of Artificial Sequence: Synthetic oligonucleotide
cuucugauuuaaauuauaa

SEQ ID NO: 1776235 - RNA, 19 nt, Artificial Sequence
  Description of Artificial Sequence: Synthetic oligonucleotide
cacaguguaauugugguca

SEQ ID NO: 1776236 - RNA, 19 nt, Artificial Sequence
  Description of Artificial Sequence: Synthetic oligonucleotide
auuuucucaggcugguacu

SEQ ID NO: 1776237 - RNA, 19 nt, Artificial Sequence
  Description of Artificial Sequence: Synthetic oligonucleotide
ucuugucccacuaguacau

SEQ ID NO: 1776238 - RNA, 19 nt, Artificial Sequence
  Description of Artificial Sequence: Synthetic oligonucleotide
agcucugacuauaaauaac

SEQ ID NO: 1776239 - RNA, 19 nt, Artificial Sequence
  Description of Artificial Sequence: Synthetic oligonucleotide
aaagcagucugggguaaag

SEQ ID NO: 1776240 - RNA, 19 nt, Artificial Sequence
  Description of Artificial Sequence: Synthetic oligonucleotide
uucuugcagccguaggcgg

SEQ ID NO: 1776241 - RNA, 19 nt, Artificial Sequence
  Description of Artificial Sequence: Synthetic oligonucleotide
aucaucucucucucucugg

SEQ ID NO: 1776242 - RNA, 19 nt, Artificial Sequence
  Description of Artificial Sequence: Synthetic oligonucleotide
cuuuucgaccugcugcucc

SEQ ID NO: 1776243 - RNA, 19 nt, Artificial Sequence
  Description of Artificial Sequence: Synthetic oligonucleotide
uacuucugauuuaaauuau

SEQ ID NO: 1776244 - RNA, 19 nt, Artificial Sequence
  Description of Artificial Sequence: Synthetic oligonucleotide
auuagcagcccaauagcag

SEQ ID NO: 1776245 - RNA, 19 nt, Artificial Sequence
  Description of Artificial Sequence: Synthetic oligonucleotide
acaguguaauuguggucac

SEQ ID NO: 1776246 - RNA, 19 nt, Artificial Sequence
  Description of Artificial Sequence: Synthetic oligonucleotide
uaucgguucuugcagccgu

SEQ ID NO: 1776247 - RNA, 19 nt, Artificial Sequence
  Description of Artificial Sequence: Synthetic oligonucleotide
uaaaugaagcucugacuau

SEQ ID NO: 1776248 - RNA, 19 nt, Artificial Sequence
  Description of Artificial Sequence: Synthetic oligonucleotide
auauucugagaggcugucc

SEQ ID NO: 1776249 - RNA, 19 nt, Artificial Sequence
  Description of Artificial Sequence: Synthetic oligonucleotide
uuguccuuaucguaucggu

SEQ ID NO: 1776250 - RNA, 19 nt, Artificial Sequence
  Description of Artificial Sequence: Synthetic oligonucleotide
augaucucauuuauacuuc

SEQ ID NO: 1776251 - RNA, 19 nt, Artificial Sequence
  Description of Artificial Sequence: Synthetic oligonucleotide
auaaagggcauuaauuuua

SEQ ID NO: 1776252 - RNA, 19 nt, Artificial Sequence
  Description of Artificial Sequence: Synthetic oligonucleotide
ucaucuuuacugcaccguu

SEQ ID NO: 1776253 - RNA, 19 nt, Artificial Sequence
  Description of Artificial Sequence: Synthetic oligonucleotide
aaaugaagcucugacuaua

SEQ ID NO: 1776254 - RNA, 19 nt, Artificial Sequence
  Description of Artificial Sequence: Synthetic oligonucleotide
guaauuuguuguugcacuc

SEQ ID NO: 1776255 - RNA, 19 nt, Artificial Sequence
  Description of Artificial Sequence: Synthetic oligonucleotide
aucuuuacugcaccguuau

SEQ ID NO: 1776256 - RNA, 19 nt, Artificial Sequence
  Description of Artificial Sequence: Synthetic oligonucleotide
aaguaaucaaguacuguuu

SEQ ID NO: 1776257 - RNA, 19 nt, Artificial Sequence
  Description of Artificial Sequence: Synthetic oligonucleotide
uccuuaucguaucgguucu

SEQ ID NO: 1776258 - RNA, 19 nt, Artificial Sequence
  Description of Artificial Sequence: Synthetic oligonucleotide
uccucucuacuuuucauuu

SEQ ID NO: 1776259 - RNA, 19 nt, Artificial Sequence
  Description of Artificial Sequence: Synthetic oligonucleotide
uuuucgaccugcugcucca

SEQ ID NO: 1776260 - RNA, 19 nt, Artificial Sequence
  Description of Artificial Sequence: Synthetic oligonucleotide
caccgacagguuaucaggg

SEQ ID NO: 1776261 - RNA, 19 nt, Artificial Sequence
  Description of Artificial Sequence: Synthetic oligonucleotide
caacaauuucaaagcaguc

SEQ ID NO: 1776262 - RNA, 19 nt, Artificial Sequence
  Description of Artificial Sequence: Synthetic oligonucleotide
aagaaauauuguggguaca

SEQ ID NO: 1776263 - RNA, 19 nt, Artificial Sequence
  Description of Artificial Sequence: Synthetic oligonucleotide
accguuauccucucuacuu

SEQ ID NO: 1776264 - RNA, 19 nt, Artificial Sequence
  Description of Artificial Sequence: Synthetic oligonucleotide
cuuguccuuaucguaucgg

SEQ ID NO: 1776265 - RNA, 19 nt, Artificial Sequence
  Description of Artificial Sequence: Synthetic oligonucleotide
ucgaccugggaaguagggg

SEQ ID NO: 1776266 - RNA, 19 nt, Artificial Sequence
  Description of Artificial Sequence: Synthetic oligonucleotide
cacuguuuacaaagaccgg

SEQ ID NO: 1776267 - RNA, 19 nt, Artificial Sequence
  Description of Artificial Sequence: Synthetic oligonucleotide
cauuagcagcccaauagca

SEQ ID NO: 1776268 - RNA, 19 nt, Artificial Sequence
  Description of Artificial Sequence: Synthetic oligonucleotide
caaauauugacuugacagu

SEQ ID NO: 1776269 - RNA, 19 nt, Artificial Sequence
  Description of Artificial Sequence: Synthetic oligonucleotide
uuguuguugcacucucucu

SEQ ID NO: 1776270 - RNA, 19 nt, Artificial Sequence
  Description of Artificial Sequence: Synthetic oligonucleotide
caggacugcaccauccuuc

SEQ ID NO: 1776271 - RNA, 19 nt, Artificial Sequence
  Description of Artificial Sequence: Synthetic oligonucleotide
ucguaucgguucuugcagc

SEQ ID NO: 1776272 - RNA, 19 nt, Artificial Sequence
  Description of Artificial Sequence: Synthetic oligonucleotide
aauauugacuugacaguuu

SEQ ID NO: 1776273 - RNA, 19 nt, Artificial Sequence
  Description of Artificial Sequence: Synthetic oligonucleotide
ucugacgcaucaucucucu

SEQ ID NO: 1776274 - RNA, 19 nt, Artificial Sequence
  Description of Artificial Sequence: Synthetic oligonucleotide
ucucucucucucuggaagu

SEQ ID NO: 1776275 - RNA, 19 nt, Artificial Sequence
  Description of Artificial Sequence: Synthetic oligonucleotide
caguaauuuguuguugcac

SEQ ID NO: 1776276 - RNA, 19 nt, Artificial Sequence
  Description of Artificial Sequence: Synthetic oligonucleotide
cuggaagugcacugcuucc

SEQ ID NO: 1776277 - RNA, 19 nt, Artificial Sequence
  Description of Artificial Sequence: Synthetic oligonucleotide
gucuugucccacuaguaca

SEQ ID NO: 1776278 - RNA, 19 nt, Artificial Sequence
  Description of Artificial Sequence: Synthetic oligonucleotide
uuccccucugcccgggagg

SEQ ID NO: 1776279 - RNA, 19 nt, Artificial Sequence
  Description of Artificial Sequence: Synthetic oligonucleotide
ugucccacuaguacaucuc

SEQ ID NO: 1776280 - RNA, 19 nt, Artificial Sequence
  Description of Artificial Sequence: Synthetic oligonucleotide
aaugaagcucugacuauaa

SEQ ID NO: 1776281 - RNA, 19 nt, Artificial Sequence
  Description of Artificial Sequence: Synthetic oligonucleotide
guggucacagaacaccgac

SEQ ID NO: 1776282 - RNA, 19 nt, Artificial Sequence
  Description of Artificial Sequence: Synthetic oligonucleotide
gcggucuugaguuucuucc

SEQ ID NO: 1776283 - RNA, 19 nt, Artificial Sequence
  Description of Artificial Sequence: Synthetic oligonucleotide
agugcacugcuuccuuuag

SEQ ID NO: 1776284 - RNA, 19 nt, Artificial Sequence
  Description of Artificial Sequence: Synthetic oligonucleotide
aagugcacugcuuccuuua

SEQ ID NO: 1776285 - RNA, 19 nt, Artificial Sequence
  Description of Artificial Sequence: Synthetic oligonucleotide
acaagagagcauguagucu

SEQ ID NO: 1776286 - RNA, 19 nt, Artificial Sequence
  Description of Artificial Sequence: Synthetic oligonucleotide
agcagucugggguaaagua

SEQ ID NO: 1776287 - RNA, 19 nt, Artificial Sequence
  Description of Artificial Sequence: Synthetic oligonucleotide
cuuaucguaucgguucuug

SEQ ID NO: 1776288 - RNA, 19 nt, Artificial Sequence
  Description of Artificial Sequence: Synthetic oligonucleotide
ugcugggcggucuugaguu

SEQ ID NO: 1776289 - RNA, 19 nt, Artificial Sequence
  Description of Artificial Sequence: Synthetic oligonucleotide
aaccaauauacaacauuau

SEQ ID NO: 1776290 - RNA, 19 nt, Artificial Sequence
  Description of Artificial Sequence: Synthetic oligonucleotide
uauccucucuacuuuucau

SEQ ID NO: 1776291 - RNA, 19 nt, Artificial Sequence
  Description of Artificial Sequence: Synthetic oligonucleotide
cuuaaagcagucuggggua

SEQ ID NO: 1776292 - RNA, 19 nt, Artificial Sequence
  Description of Artificial Sequence: Synthetic oligonucleotide
cuucuaacagcugccuccc

SEQ ID NO: 1776293 - RNA, 19 nt, Artificial Sequence
  Description of Artificial Sequence: Synthetic oligonucleotide
gcauuagcagcccaauagc

SEQ ID NO: 1776294 - RNA, 19 nt, Artificial Sequence
  Description of Artificial Sequence: Synthetic oligonucleotide
gaagacagcaaaauauuau

SEQ ID NO: 1776295 - RNA, 19 nt, Artificial Sequence
  Description of Artificial Sequence: Synthetic oligonucleotide
cucaauacaaagaaauauu

SEQ ID NO: 1776296 - RNA, 19 nt, Artificial Sequence
  Description of Artificial Sequence: Synthetic oligonucleotide
gagagggaagcuguucuug

SEQ ID NO: 1776297 - RNA, 19 nt, Artificial Sequence
  Description of Artificial Sequence: Synthetic oligonucleotide
cccacuguuuacaaagacc

SEQ ID NO: 1776298 - RNA, 19 nt, Artificial Sequence
  Description of Artificial Sequence: Synthetic oligonucleotide
uauuggcggucuaaggauu

SEQ ID NO: 1776299 - RNA, 19 nt, Artificial Sequence
  Description of Artificial Sequence: Synthetic oligonucleotide
caucgaccugggaaguagg

SEQ ID NO: 1776300 - RNA, 19 nt, Artificial Sequence
  Description of Artificial Sequence: Synthetic oligonucleotide
uucugacgcaucaucucuc

SEQ ID NO: 1776301 - RNA, 19 nt, Artificial Sequence
  Description of Artificial Sequence: Synthetic oligonucleotide
gugaauccgcuuccuuugg

SEQ ID NO: 1776302 - RNA, 19 nt, Artificial Sequence
  Description of Artificial Sequence: Synthetic oligonucleotide
caucaucucucucucucug

SEQ ID NO: 1776303 - RNA, 19 nt, Artificial Sequence
  Description of Artificial Sequence: Synthetic oligonucleotide
ugaauccgcuuccuuuggu

SEQ ID NO: 1776304 - RNA, 19 nt, Artificial Sequence
  Description of Artificial Sequence: Synthetic oligonucleotide
cuacaagagagcauguagu

SEQ ID NO: 1776305 - RNA, 19 nt, Artificial Sequence
  Description of Artificial Sequence: Synthetic oligonucleotide
gguaaaguacucugaacaa

SEQ ID NO: 1776306 - RNA, 19 nt, Artificial Sequence
  Description of Artificial Sequence: Synthetic oligonucleotide
ucgaccugcugcuccagcu

SEQ ID NO: 1776307 - RNA, 19 nt, Artificial Sequence
  Description of Artificial Sequence: Synthetic oligonucleotide
guggaaagagacaggcuug

SEQ ID NO: 1776308 - RNA, 19 nt, Artificial Sequence
  Description of Artificial Sequence: Synthetic oligonucleotide
aucaucuuuacugcaccgu

SEQ ID NO: 1776309 - RNA, 19 nt, Artificial Sequence
  Description of Artificial Sequence: Synthetic oligonucleotide
guaaaguacucugaacaaa

SEQ ID NO: 1776310 - RNA, 19 nt, Artificial Sequence
  Description of Artificial Sequence: Synthetic oligonucleotide
aaauccugugugucagcua

SEQ ID NO: 1776311 - RNA, 19 nt, Artificial Sequence
  Description of Artificial Sequence: Synthetic oligonucleotide
gcuguauuuaguaggcuug

SEQ ID NO: 1776312 - RNA, 19 nt, Artificial Sequence
  Description of Artificial Sequence: Synthetic oligonucleotide
aaaguacucugaacaaaua

SEQ ID NO: 1776313 - RNA, 19 nt, Artificial Sequence
  Description of Artificial Sequence: Synthetic oligonucleotide
uuacaaagaccggggcgag

SEQ ID NO: 1776314 - RNA, 19 nt, Artificial Sequence
  Description of Artificial Sequence: Synthetic oligonucleotide
aagagagcauguagucuug

SEQ ID NO: 1776315 - RNA, 19 nt, Artificial Sequence
  Description of Artificial Sequence: Synthetic oligonucleotide
ucagugucgcugcgcucgg

SEQ ID NO: 1776316 - RNA, 19 nt, Artificial Sequence
  Description of Artificial Sequence: Synthetic oligonucleotide
agacagcaaaauauuauuu

SEQ ID NO: 1776317 - RNA, 19 nt, Artificial Sequence
  Description of Artificial Sequence: Synthetic oligonucleotide
ggcggaacaggacugcacc

SEQ ID NO: 1776318 - RNA, 19 nt, Artificial Sequence
  Description of Artificial Sequence: Synthetic oligonucleotide
agaacaccgacagguuauc

SEQ ID NO: 1776319 - RNA, 19 nt, Artificial Sequence
  Description of Artificial Sequence: Synthetic oligonucleotide
agcauguagucuuguccca

SEQ ID NO: 1776320 - RNA, 19 nt, Artificial Sequence
  Description of Artificial Sequence: Synthetic oligonucleotide
uguauuuaguaggcuugaa

SEQ ID NO: 1776321 - RNA, 19 nt, Artificial Sequence
  Description of Artificial Sequence: Synthetic oligonucleotide
ucucaauaaagggcauuaa

SEQ ID NO: 1776322 - RNA, 19 nt, Artificial Sequence
  Description of Artificial Sequence: Synthetic oligonucleotide
uuguugcacucucucuuaa

SEQ ID NO: 1776323 - RNA, 19 nt, Artificial Sequence
  Description of Artificial Sequence: Synthetic oligonucleotide
ggcuuugacacgcucgcug

SEQ ID NO: 1776324 - RNA, 19 nt, Artificial Sequence
  Description of Artificial Sequence: Synthetic oligonucleotide
aagcagucugggguaaagu

SEQ ID NO: 1776325 - RNA, 19 nt, Artificial Sequence
  Description of Artificial Sequence: Synthetic oligonucleotide
caacauuauauuggcgguc

SEQ ID NO: 1776326 - RNA, 19 nt, Artificial Sequence
  Description of Artificial Sequence: Synthetic oligonucleotide
ggguacagcauucuccuuc

SEQ ID NO: 1776327 - RNA, 19 nt, Artificial Sequence
  Description of Artificial Sequence: Synthetic oligonucleotide
uucugagaggcuguccuau

SEQ ID NO: 1776328 - RNA, 19 nt, Artificial Sequence
  Description of Artificial Sequence: Synthetic oligonucleotide
uguguccuccacaguguaa

SEQ ID NO: 1776329 - RNA, 19 nt, Artificial Sequence
  Description of Artificial Sequence: Synthetic oligonucleotide
guaucgguucuugcagccg

SEQ ID NO: 1776330 - RNA, 19 nt, Artificial Sequence
  Description of Artificial Sequence: Synthetic oligonucleotide
gcuuugacacgcucgcugc

SEQ ID NO: 1776331 - RNA, 19 nt, Artificial Sequence
  Description of Artificial Sequence: Synthetic oligonucleotide
auuguguccuccacagugu

SEQ ID NO: 1776332 - RNA, 19 nt, Artificial Sequence
  Description of Artificial Sequence: Synthetic oligonucleotide
acacgcucgcugcuuucgg

SEQ ID NO: 1776333 - RNA, 19 nt, Artificial Sequence
  Description of Artificial Sequence: Synthetic oligonucleotide
aucgaccugggaaguaggg

SEQ ID NO: 1776334 - RNA, 19 nt, Artificial Sequence
  Description of Artificial Sequence: Synthetic oligonucleotide
uaucaggggucuggagggg

SEQ ID NO: 1776335 - RNA, 19 nt, Artificial Sequence
  Description of Artificial Sequence: Synthetic oligonucleotide
cucugacuauaaauaacaa

SEQ ID NO: 1776336 - RNA, 19 nt, Artificial Sequence
  Description of Artificial Sequence: Synthetic oligonucleotide
ucccacuaguacaucucau

SEQ ID NO: 1776337 - RNA, 19 nt, Artificial Sequence
  Description of Artificial Sequence: Synthetic oligonucleotide
gcuuguccuuaucguaucg

SEQ ID NO: 1776338 - RNA, 19 nt, Artificial Sequence
  Description of Artificial Sequence: Synthetic oligonucleotide
caagagagcauguagucuu

SEQ ID NO: 1776339 - RNA, 19 nt, Artificial Sequence
  Description of Artificial Sequence: Synthetic oligonucleotide
acgcucgcugcuuucggug

SEQ ID NO: 1776340 - RNA, 19 nt, Artificial Sequence
  Description of Artificial Sequence: Synthetic oligonucleotide
gucauguggcucaauacaa

SEQ ID NO: 1776341 - RNA, 19 nt, Artificial Sequence
  Description of Artificial Sequence: Synthetic oligonucleotide
cugguacuucaacaauuuc

SEQ ID NO: 1776342 - RNA, 19 nt, Artificial Sequence
  Description of Artificial Sequence: Synthetic oligonucleotide
ucgggcggcuuugacacgc

SEQ ID NO: 1776343 - RNA, 19 nt, Artificial Sequence
  Description of Artificial Sequence: Synthetic oligonucleotide
gcucgggcggcuuugacac

SEQ ID NO: 1776344 - RNA, 19 nt, Artificial Sequence
  Description of Artificial Sequence: Synthetic oligonucleotide
auguggcucaauacaaaga

SEQ ID NO: 1776345 - RNA, 19 nt, Artificial Sequence
  Description of Artificial Sequence: Synthetic oligonucleotide
caggcugguacuucaacaa

SEQ ID NO: 1776346 - RNA, 19 nt, Artificial Sequence
  Description of Artificial Sequence: Synthetic oligonucleotide
ugcagccguaggcggaaca

SEQ ID NO: 1776347 - RNA, 19 nt, Artificial Sequence
  Description of Artificial Sequence: Synthetic oligonucleotide
cucaauaaagggcauuaau

SEQ ID NO: 1776348 - RNA, 19 nt, Artificial Sequence
  Description of Artificial Sequence: Synthetic oligonucleotide
ggaaacuuguggaaagaga

SEQ ID NO: 1776349 - RNA, 19 nt, Artificial Sequence
  Description of Artificial Sequence: Synthetic oligonucleotide
gucccacuaguacaucuca

SEQ ID NO: 1776350 - RNA, 19 nt, Artificial Sequence
  Description of Artificial Sequence: Synthetic oligonucleotide
cauccuuccggcccuccac

SEQ ID NO: 1776351 - RNA, 19 nt, Artificial Sequence
  Description of Artificial Sequence: Synthetic oligonucleotide
ucgguucuugcagccguag

SEQ ID NO: 1776352 - RNA, 19 nt, Artificial Sequence
  Description of Artificial Sequence: Synthetic oligonucleotide
gguuaucaggggucuggag

SEQ ID NO: 1776353 - RNA, 19 nt, Artificial Sequence
  Description of Artificial Sequence: Synthetic oligonucleotide
cuguucuugggguuccaga

SEQ ID NO: 1776354 - RNA, 19 nt, Artificial Sequence
  Description of Artificial Sequence: Synthetic oligonucleotide
gcagucaugugggagaauc

SEQ ID NO: 1776355 - RNA, 19 nt, Artificial Sequence
  Description of Artificial Sequence: Synthetic oligonucleotide
ucucucaauaaagggcauu

SEQ ID NO: 1776356 - RNA, 19 nt, Artificial Sequence
  Description of Artificial Sequence: Synthetic oligonucleotide
cauuauauuggcggucuaa

SEQ ID NO: 1776357 - RNA, 19 nt, Artificial Sequence
  Description of Artificial Sequence: Synthetic oligonucleotide
guuauccucucuacuuuuc

SEQ ID NO: 1776358 - RNA, 19 nt, Artificial Sequence
  Description of Artificial Sequence: Synthetic oligonucleotide
aggucucagugucgcugcg

SEQ ID NO: 1776359 - RNA, 19 nt, Artificial Sequence
  Description of Artificial Sequence: Synthetic oligonucleotide
cuauauucugagaggcugu

SEQ ID NO: 1776360 - RNA, 19 nt, Artificial Sequence
  Description of Artificial Sequence: Synthetic oligonucleotide
aggcugguacuucaacaau

SEQ ID NO: 1776361 - RNA, 19 nt, Artificial Sequence
  Description of Artificial Sequence: Synthetic oligonucleotide
auguagucuugucccacua

SEQ ID NO: 1776362 - RNA, 19 nt, Artificial Sequence
  Description of Artificial Sequence: Synthetic oligonucleotide
gugcauuguguccuccaca

SEQ ID NO: 1776363 - RNA, 19 nt, Artificial Sequence
  Description of Artificial Sequence: Synthetic oligonucleotide
gucaugugggagaaucaca

SEQ ID NO: 1776364 - RNA, 19 nt, Artificial Sequence
  Description of Artificial Sequence: Synthetic oligonucleotide
uuugacacgcucgcugcuu

SEQ ID NO: 1776365 - RNA, 19 nt, Artificial Sequence
  Description of Artificial Sequence: Synthetic oligonucleotide
gcucaauacaaagaaauau

SEQ ID NO: 1776366 - RNA, 19 nt, Artificial Sequence
  Description of Artificial Sequence: Synthetic oligonucleotide
gaccggggcgagucagagg

SEQ ID NO: 1776367 - RNA, 19 nt, Artificial Sequence
  Description of Artificial Sequence: Synthetic oligonucleotide
cuguauuuaguaggcuuga

SEQ ID NO: 1776368 - RNA, 19 nt, Artificial Sequence
  Description of Artificial Sequence: Synthetic oligonucleotide
auucugagaggcuguccua

SEQ ID NO: 1776369 - RNA, 19 nt, Artificial Sequence
  Description of Artificial Sequence: Synthetic oligonucleotide
cucucucucucuggaagug

SEQ ID NO: 1776370 - RNA, 19 nt, Artificial Sequence
  Description of Artificial Sequence: Synthetic oligonucleotide
ggcggcuuugacacgcucg

SEQ ID NO: 1776371 - RNA, 19 nt, Artificial Sequence
  Description of Artificial Sequence: Synthetic oligonucleotide
ugggcggucuugaguuucu

SEQ ID NO: 1776372 - RNA, 19 nt, Artificial Sequence
  Description of Artificial Sequence: Synthetic oligonucleotide
cuuuggugcauuguguccu

SEQ ID NO: 1776373 - RNA, 19 nt, Artificial Sequence
  Description of Artificial Sequence: Synthetic oligonucleotide
cuuccccucugcccgggag

SEQ ID NO: 1776374 - RNA, 19 nt, Artificial Sequence
  Description of Artificial Sequence: Synthetic oligonucleotide
gcggcuuugacacgcucgc

SEQ ID NO: 1776375 - RNA, 19 nt, Artificial Sequence
  Description of Artificial Sequence: Synthetic oligonucleotide
agaccggggcgagucagag

SEQ ID NO: 1776376 - RNA, 19 nt, Artificial Sequence
  Description of Artificial Sequence: Synthetic oligonucleotide
agagagcauguagucuugu

SEQ ID NO: 1776377 - RNA, 19 nt, Artificial Sequence
  Description of Artificial Sequence: Synthetic oligonucleotide
agcccaauagcagcaucga

SEQ ID NO: 1776378 - RNA, 19 nt, Artificial Sequence
  Description of Artificial Sequence: Synthetic oligonucleotide
ggcuuuggucagcaguuac

SEQ ID NO: 1776379 - RNA, 19 nt, Artificial Sequence
  Description of Artificial Sequence: Synthetic oligonucleotide
aggcuguccuaugaucuca

SEQ ID NO: 1776380 - RNA, 19 nt, Artificial Sequence
  Description of Artificial Sequence: Synthetic oligonucleotide
ugcuuucgguggcuuuggu

SEQ ID NO: 1776381 - RNA, 19 nt, Artificial Sequence
  Description of Artificial Sequence: Synthetic oligonucleotide
gcaucgaccugggaaguag

SEQ ID NO: 1776382 - RNA, 19 nt, Artificial Sequence
  Description of Artificial Sequence: Synthetic oligonucleotide
acauuauauuggcggucua

SEQ ID NO: 1776383 - RNA, 19 nt, Artificial Sequence
  Description of Artificial Sequence: Synthetic oligonucleotide
agccguaggcggaacagga

SEQ ID NO: 1776384 - RNA, 19 nt, Artificial Sequence
  Description of Artificial Sequence: Synthetic oligonucleotide
agguuaucaggggucugga

SEQ ID NO: 1776385 - RNA, 19 nt, Artificial Sequence
  Description of Artificial Sequence: Synthetic oligonucleotide
cacucucucuuaaagcagu

SEQ ID NO: 1776386 - RNA, 19 nt, Artificial Sequence
  Description of Artificial Sequence: Synthetic oligonucleotide
cuaacagcugccucccacu

SEQ ID NO: 1776387 - RNA, 19 nt, Artificial Sequence
  Description of Artificial Sequence: Synthetic oligonucleotide
cagccguaggcggaacagg

SEQ ID NO: 1776388 - RNA, 19 nt, Artificial Sequence
  Description of Artificial Sequence: Synthetic oligonucleotide
guacagcauucuccuucag

SEQ ID NO: 1776389 - RNA, 19 nt, Artificial Sequence
  Description of Artificial Sequence: Synthetic oligonucleotide
cucccacuguuuacaaaga

SEQ ID NO: 1776390 - RNA, 19 nt, Artificial Sequence
  Description of Artificial Sequence: Synthetic oligonucleotide
uaaagcagucugggguaaa

SEQ ID NO: 1776391 - RNA, 19 nt, Artificial Sequence
  Description of Artificial Sequence: Synthetic oligonucleotide
gaacaccgacagguuauca

SEQ ID NO: 1776392 - RNA, 19 nt, Artificial Sequence
  Description of Artificial Sequence: Synthetic oligonucleotide
gacagguuaucaggggucu

SEQ ID NO: 1776393 - RNA, 19 nt, Artificial Sequence
  Description of Artificial Sequence: Synthetic oligonucleotide
caggcuuguccuuaucgua

SEQ ID NO: 1776394 - RNA, 19 nt, Artificial Sequence
  Description of Artificial Sequence: Synthetic oligonucleotide
agcugccucccacuguuua

SEQ ID NO: 1776395 - RNA, 19 nt, Artificial Sequence
  Description of Artificial Sequence: Synthetic oligonucleotide
cguaucgguucuugcagcc

SEQ ID NO: 1776396 - RNA, 19 nt, Artificial Sequence
  Description of Artificial Sequence: Synthetic oligonucleotide
gucucagugucgcugcgcu

SEQ ID NO: 1776397 - RNA, 19 nt, Artificial Sequence
  Description of Artificial Sequence: Synthetic oligonucleotide
uacaaagaccggggcgagu

SEQ ID NO: 1776398 - RNA, 19 nt, Artificial Sequence
  Description of Artificial Sequence: Synthetic oligonucleotide
acagguuaucaggggucug

SEQ ID NO: 1776399 - RNA, 19 nt, Artificial Sequence
  Description of Artificial Sequence: Synthetic oligonucleotide
guccuaugaucucauuuau

SEQ ID NO: 1776400 - RNA, 19 nt, Artificial Sequence
  Description of Artificial Sequence: Synthetic oligonucleotide
gcaccguuauccucucuac

SEQ ID NO: 1776401 - RNA, 19 nt, Artificial Sequence
  Description of Artificial Sequence: Synthetic oligonucleotide
ccugcggcaccgcugcugg

SEQ ID NO: 1776402 - RNA, 19 nt, Artificial Sequence
  Description of Artificial Sequence: Synthetic oligonucleotide
cucuccugccugcggcacc

SEQ ID NO: 1776403 - RNA, 19 nt, Artificial Sequence
  Description of Artificial Sequence: Synthetic oligonucleotide
cugacgcaucaucucucuc

SEQ ID NO: 1776404 - RNA, 19 nt, Artificial Sequence
  Description of Artificial Sequence: Synthetic oligonucleotide
auuggcggucuaaggauuu

SEQ ID NO: 1776405 - RNA, 19 nt, Artificial Sequence
  Description of Artificial Sequence: Synthetic oligonucleotide
aagaccggggcgagucaga

SEQ ID NO: 1776406 - RNA, 19 nt, Artificial Sequence
  Description of Artificial Sequence: Synthetic oligonucleotide
acgcaucaucucucucucu

SEQ ID NO: 1776407 - RNA, 19 nt, Artificial Sequence
  Description of Artificial Sequence: Synthetic oligonucleotide
cauguagucuugucccacu

SEQ ID NO: 1776408 - RNA, 19 nt, Artificial Sequence
  Description of Artificial Sequence: Synthetic oligonucleotide
uccgcuuccuuuggugcau

SEQ ID NO: 1776409 - RNA, 19 nt, Artificial Sequence
  Description of Artificial Sequence: Synthetic oligonucleotide
caccaucuugaaaccaaua

SEQ ID NO: 1776410 - RNA, 19 nt, Artificial Sequence
  Description of Artificial Sequence: Synthetic oligonucleotide
uucuugucauguggcucaa

SEQ ID NO: 1776411 - RNA, 19 nt, Artificial Sequence
  Description of Artificial Sequence: Synthetic oligonucleotide
gcagccguaggcggaacag

SEQ ID NO: 1776412 - RNA, 19 nt, Artificial Sequence
  Description of Artificial Sequence: Synthetic oligonucleotide
cugggcggucuugaguuuc

SEQ ID NO: 1776413 - RNA, 19 nt, Artificial Sequence
  Description of Artificial Sequence: Synthetic oligonucleotide
cgcaucaucucucucucuc

SEQ ID NO: 1776414 - RNA, 19 nt, Artificial Sequence
  Description of Artificial Sequence: Synthetic oligonucleotide
caucucucucucucuggaa

SEQ ID NO: 1776415 - RNA, 19 nt, Artificial Sequence
  Description of Artificial Sequence: Synthetic oligonucleotide
gaagugcacugcuuccuuu

SEQ ID NO: 1776416 - RNA, 19 nt, Artificial Sequence
  Description of Artificial Sequence: Synthetic oligonucleotide
cguaggcggaacaggacug

SEQ ID NO: 1776417 - RNA, 19 nt, Artificial Sequence
  Description of Artificial Sequence: Synthetic oligonucleotide
ccacaguguaauugugguc

SEQ ID NO: 1776418 - RNA, 19 nt, Artificial Sequence
  Description of Artificial Sequence: Synthetic oligonucleotide
cucgggcggcuuugacacg

SEQ ID NO: 1776419 - RNA, 19 nt, Artificial Sequence
  Description of Artificial Sequence: Synthetic oligonucleotide
caaagaccggggcgaguca

SEQ ID NO: 1776420 - RNA, 19 nt, Artificial Sequence
  Description of Artificial Sequence: Synthetic oligonucleotide
cgacagguuaucagggguc

SEQ ID NO: 1776421 - RNA, 19 nt, Artificial Sequence
  Description of Artificial Sequence: Synthetic oligonucleotide
gagacaggcuuguccuuau

SEQ ID NO: 1776422 - RNA, 19 nt, Artificial Sequence
  Description of Artificial Sequence: Synthetic oligonucleotide
uuggcggucuaaggauuuu

SEQ ID NO: 1776423 - RNA, 19 nt, Artificial Sequence
  Description of Artificial Sequence: Synthetic oligonucleotide
uuccggcccuccacacuuc

SEQ ID NO: 1776424 - RNA, 19 nt, Artificial Sequence
  Description of Artificial Sequence: Synthetic oligonucleotide
gcggcaccgcugcugggcg

SEQ ID NO: 1776425 - RNA, 19 nt, Artificial Sequence
  Description of Artificial Sequence: Synthetic oligonucleotide
ggucucagugucgcugcgc

SEQ ID NO: 1776426 - RNA, 19 nt, Artificial Sequence
  Description of Artificial Sequence: Synthetic oligonucleotide
cuugcagccguaggcggaa

SEQ ID NO: 1776427 - RNA, 19 nt, Artificial Sequence
  Description of Artificial Sequence: Synthetic oligonucleotide
gcggaacaggacugcacca

SEQ ID NO: 1776428 - RNA, 19 nt, Artificial Sequence
  Description of Artificial Sequence: Synthetic oligonucleotide
caguguaauuguggucaca

SEQ ID NO: 1776429 - RNA, 19 nt, Artificial Sequence
  Description of Artificial Sequence: Synthetic oligonucleotide
ucugcccgggaggcaggug

SEQ ID NO: 1776430 - RNA, 19 nt, Artificial Sequence
  Description of Artificial Sequence: Synthetic oligonucleotide
agcagcccaauagcagcau

SEQ ID NO: 1776431 - RNA, 19 nt, Artificial Sequence
  Description of Artificial Sequence: Synthetic oligonucleotide
cuuccggcccuccacacuu

SEQ ID NO: 1776432 - RNA, 19 nt, Artificial Sequence
  Description of Artificial Sequence: Synthetic oligonucleotide
acuuccccucugcccggga

SEQ ID NO: 1776433 - RNA, 19 nt, Artificial Sequence
  Description of Artificial Sequence: Synthetic oligonucleotide
cuuugacacgcucgcugcu

SEQ ID NO: 1776434 - RNA, 19 nt, Artificial Sequence
  Description of Artificial Sequence: Synthetic oligonucleotide
caccguuauccucucuacu

SEQ ID NO: 1776435 - RNA, 19 nt, Artificial Sequence
  Description of Artificial Sequence: Synthetic oligonucleotide
agcaucgaccugggaagua

SEQ ID NO: 1776436 - RNA, 19 nt, Artificial Sequence
  Description of Artificial Sequence: Synthetic oligonucleotide
cgcucgcugcuuucggugg

SEQ ID NO: 1776437 - RNA, 19 nt, Artificial Sequence
  Description of Artificial Sequence: Synthetic oligonucleotide
gcaucaucucucucucucu

SEQ ID NO: 1776438 - RNA, 19 nt, Artificial Sequence
  Description of Artificial Sequence: Synthetic oligonucleotide
gucagcuacaagagagcau

SEQ ID NO: 1776439 - RNA, 19 nt, Artificial Sequence
  Description of Artificial Sequence: Synthetic oligonucleotide
ggggcgagucagaggaaac

SEQ ID NO: 1776440 - RNA, 19 nt, Artificial Sequence
  Description of Artificial Sequence: Synthetic oligonucleotide
caugugggagaaucacauu

SEQ ID NO: 1776441 - RNA, 19 nt, Artificial Sequence
  Description of Artificial Sequence: Synthetic oligonucleotide
cgguucuugcagccguagg

SEQ ID NO: 1776442 - RNA, 19 nt, Artificial Sequence
  Description of Artificial Sequence: Synthetic oligonucleotide
uugcagccguaggcggaac

SEQ ID NO: 1776443 - RNA, 19 nt, Artificial Sequence
  Description of Artificial Sequence: Synthetic oligonucleotide
aucgguucuugcagccgua

SEQ ID NO: 1776444 - RNA, 19 nt, Artificial Sequence
  Description of Artificial Sequence: Synthetic oligonucleotide
agcagucaugugggagaau

SEQ ID NO: 1776445 - RNA, 19 nt, Artificial Sequence
  Description of Artificial Sequence: Synthetic oligonucleotide
ggaagugcacugcuuccuu

SEQ ID NO: 1776446 - RNA, 19 nt, Artificial Sequence
  Description of Artificial Sequence: Synthetic oligonucleotide
cacgcucgcugcuuucggu

SEQ ID NO: 1776447 - RNA, 19 nt, Artificial Sequence
  Description of Artificial Sequence: Synthetic oligonucleotide
cugcgcucgggcggcuuug

SEQ ID NO: 1776448 - RNA, 19 nt, Artificial Sequence
  Description of Artificial Sequence: Synthetic oligonucleotide
gccguaggcggaacaggac

SEQ ID NO: 1776449 - RNA, 19 nt, Artificial Sequence
  Description of Artificial Sequence: Synthetic oligonucleotide
ccguaggcggaacaggacu

SEQ ID NO: 1776450 - RNA, 19 nt, Artificial Sequence
  Description of Artificial Sequence: Synthetic oligonucleotide
ggagagggaagcuguucuu

SEQ ID NO: 1776451 - RNA, 19 nt, Artificial Sequence
  Description of Artificial Sequence: Synthetic oligonucleotide
cugcuguauuuaguaggcu

SEQ ID NO: 1776452 - RNA, 19 nt, Artificial Sequence
  Description of Artificial Sequence: Synthetic oligonucleotide
ggcgagucagaggaaacuu

SEQ ID NO: 1776453 - RNA, 19 nt, Artificial Sequence
  Description of Artificial Sequence: Synthetic oligonucleotide
cccacuaguacaucucauu

SEQ ID NO: 1776454 - RNA, 19 nt, Artificial Sequence
  Description of Artificial Sequence: Synthetic oligonucleotide
gggcgagucagaggaaacu

SEQ ID NO: 1776455 - RNA, 19 nt, Artificial Sequence
  Description of Artificial Sequence: Synthetic oligonucleotide
ccggcccuccacacuuccc

SEQ ID NO: 1776456 - RNA, 19 nt, Artificial Sequence
  Description of Artificial Sequence: Synthetic oligonucleotide
gccugcggcaccgcugcug

SEQ ID NO: 1776457 - RNA, 19 nt, Artificial Sequence
  Description of Artificial Sequence: Synthetic oligonucleotide
cuggugaauccgcuuccuu

SEQ ID NO: 1776458 - RNA, 19 nt, Artificial Sequence
  Description of Artificial Sequence: Synthetic oligonucleotide
gcauuguguccuccacagu

SEQ ID NO: 1776459 - RNA, 19 nt, Artificial Sequence
  Description of Artificial Sequence: Synthetic oligonucleotide
ccguuauccucucuacuuu

SEQ ID NO: 1776460 - RNA, 19 nt, Artificial Sequence
  Description of Artificial Sequence: Synthetic oligonucleotide
cguuauccucucuacuuuu

SEQ ID NO: 1776461 - RNA, 19 nt, Artificial Sequence
  Description of Artificial Sequence: Synthetic oligonucleotide
gcgcucgggcggcuuugac

SEQ ID NO: 1776462 - RNA, 19 nt, Artificial Sequence
  Description of Artificial Sequence: Synthetic oligonucleotide
cgguggcuuuggucagcag

SEQ ID NO: 1776463 - RNA, 19 nt, Artificial Sequence
  Description of Artificial Sequence: Synthetic oligonucleotide
ccuuccggcccuccacacu

SEQ ID NO: 1776464 - RNA, 19 nt, Artificial Sequence
  Description of Artificial Sequence: Synthetic oligonucleotide
cggggcgagucagaggaaa

SEQ ID NO: 1776465 - RNA, 19 nt, Artificial Sequence
  Description of Artificial Sequence: Synthetic oligonucleotide
gcugggcggucuugaguuu

SEQ ID NO: 1776466 - RNA, 19 nt, Artificial Sequence
  Description of Artificial Sequence: Synthetic oligonucleotide
gcugcgcucgggcggcuuu

SEQ ID NO: 1776467 - RNA, 19 nt, Artificial Sequence
  Description of Artificial Sequence: Synthetic oligonucleotide
ccggggcgagucagaggaa

SEQ ID NO: 1776468 - RNA, 19 nt, Artificial Sequence
  Description of Artificial Sequence: Synthetic oligonucleotide
cgggcggcuuugacacgcu

SEQ ID NO: 1776469 - RNA, 19 nt, Artificial Sequence
  Description of Artificial Sequence: Synthetic oligonucleotide
ccgcuuccuuuggugcauu

SEQ ID NO: 1776470 - RNA, 19 nt, Artificial Sequence
  Description of Artificial Sequence: Synthetic oligonucleotide
cgcugcgcucgggcggcuu

SEQ ID NO: 1776471 - RNA, 19 nt, Artificial Sequence
  Description of Artificial Sequence: Synthetic oligonucleotide
aaagaauagccguugaacc

SEQ ID NO: 1776472 - RNA, 19 nt, Artificial Sequence
  Description of Artificial Sequence: Synthetic oligonucleotide
uaugagucaaguaacaugg

SEQ ID NO: 1776473 - RNA, 19 nt, Artificial Sequence
  Description of Artificial Sequence: Synthetic oligonucleotide
ucuaaagaagauuucaucc

SEQ ID NO: 1776474 - RNA, 19 nt, Artificial Sequence
  Description of Artificial Sequence: Synthetic oligonucleotide
ugauuguuaaauaaucgag

SEQ ID NO: 1776475 - RNA, 19 nt, Artificial Sequence
  Description of Artificial Sequence: Synthetic oligonucleotide
uguuaaauaaucgaggucu

SEQ ID NO: 1776476 - RNA, 19 nt, Artificial Sequence
  Description of Artificial Sequence: Synthetic oligonucleotide
aauaaucgaggucuugugg

SEQ ID NO: 1776477 - RNA, 19 nt, Artificial Sequence
  Description of Artificial Sequence: Synthetic oligonucleotide
aaucugagcagauugacga

SEQ ID NO: 1776478 - RNA, 19 nt, Artificial Sequence
  Description of Artificial Sequence: Synthetic oligonucleotide
cuuaacauggcuauucagg

SEQ ID NO: 1776479 - RNA, 19 nt, Artificial Sequence
  Description of Artificial Sequence: Synthetic oligonucleotide
auaaucgaggucuuguggc

SEQ ID NO: 1776480 - RNA, 19 nt, Artificial Sequence
  Description of Artificial Sequence: Synthetic oligonucleotide
agcguaaaacuuuugauuc

SEQ ID NO: 1776481 - RNA, 19 nt, Artificial Sequence
  Description of Artificial Sequence: Synthetic oligonucleotide
uccacuuggagcuugaaag

SEQ ID NO: 1776482 - RNA, 19 nt, Artificial Sequence
  Description of Artificial Sequence: Synthetic oligonucleotide
ucuggcuugauccacacug

SEQ ID NO: 1776483 - RNA, 19 nt, Artificial Sequence
  Description of Artificial Sequence: Synthetic oligonucleotide
aguugaaacaucaauacag

SEQ ID NO: 1776484 - RNA, 19 nt, Artificial Sequence
  Description of Artificial Sequence: Synthetic oligonucleotide
ugcgacuuacaauaaaggg

SEQ ID NO: 1776485 - RNA, 19 nt, Artificial Sequence
  Description of Artificial Sequence: Synthetic oligonucleotide
ucuuucauaucgcuguggg

SEQ ID NO: 1776486 - RNA, 19 nt, Artificial Sequence
  Description of Artificial Sequence: Synthetic oligonucleotide
ugugcgacuuacaauaaag

SEQ ID NO: 1776487 - RNA, 19 nt, Artificial Sequence
  Description of Artificial Sequence: Synthetic oligonucleotide
auuguuaaauaaucgaggu

SEQ ID NO: 1776488 - RNA, 19 nt, Artificial Sequence
  Description of Artificial Sequence: Synthetic oligonucleotide
guuguaaagcuucaucucg

SEQ ID NO: 1776489 - RNA, 19 nt, Artificial Sequence
  Description of Artificial Sequence: Synthetic oligonucleotide
auguacacgauuuggaaag

SEQ ID NO: 1776490 - RNA, 19 nt, Artificial Sequence
  Description of Artificial Sequence: Synthetic oligonucleotide
gauuccagcuaucacaccc

SEQ ID NO: 1776491 - RNA, 19 nt, Artificial Sequence
  Description of Artificial Sequence: Synthetic oligonucleotide
cuuuugauucaauggaggg

SEQ ID NO: 1776492 - RNA, 19 nt, Artificial Sequence
  Description of Artificial Sequence: Synthetic oligonucleotide
acaucuagagcgcugacag

SEQ ID NO: 1776493 - RNA, 19 nt, Artificial Sequence
  Description of Artificial Sequence: Synthetic oligonucleotide
aaagcguaaaacuuuugau

SEQ ID NO: 1776494 - RNA, 19 nt, Artificial Sequence
  Description of Artificial Sequence: Synthetic oligonucleotide
ucauguguagcuucucucg

SEQ ID NO: 1776495 - RNA, 19 nt, Artificial Sequence
  Description of Artificial Sequence: Synthetic oligonucleotide
agcauuggcuaguaagucc

SEQ ID NO: 1776496 - RNA, 19 nt, Artificial Sequence
  Description of Artificial Sequence: Synthetic oligonucleotide
uuugauucaauggagggac

SEQ ID NO: 1776497 - RNA, 19 nt, Artificial Sequence
  Description of Artificial Sequence: Synthetic oligonucleotide
aaauaaucgaggucuugug

SEQ ID NO: 1776498 - RNA, 19 nt, Artificial Sequence
  Description of Artificial Sequence: Synthetic oligonucleotide
agguauacgacuagcagcc

SEQ ID NO: 1776499 - RNA, 19 nt, Artificial Sequence
  Description of Artificial Sequence: Synthetic oligonucleotide
ucuaaauaaucauacugaa

SEQ ID NO: 1776500 - RNA, 19 nt, Artificial Sequence
  Description of Artificial Sequence: Synthetic oligonucleotide
uccgguuccaaccaaaccu

SEQ ID NO: 1776501 - RNA, 19 nt, Artificial Sequence
  Description of Artificial Sequence: Synthetic oligonucleotide
aagaauagccguugaacca

SEQ ID NO: 1776502 - RNA, 19 nt, Artificial Sequence
  Description of Artificial Sequence: Synthetic oligonucleotide
uuaagaacaucuagagcgc

SEQ ID NO: 1776503 - RNA, 19 nt, Artificial Sequence
  Description of Artificial Sequence: Synthetic oligonucleotide
uaguguaacagacaacccu

SEQ ID NO: 1776504 - RNA, 19 nt, Artificial Sequence
  Description of Artificial Sequence: Synthetic oligonucleotide
guugguaugagucaaguaa

SEQ ID NO: 1776505 - RNA, 19 nt, Artificial Sequence
  Description of Artificial Sequence: Synthetic oligonucleotide
ugggcgaagugacaaacgg

SEQ ID NO: 1776506 - RNA, 19 nt, Artificial Sequence
  Description of Artificial Sequence: Synthetic oligonucleotide
uucugugcgacuuacaaua

SEQ ID NO: 1776507 - RNA, 19 nt, Artificial Sequence
  Description of Artificial Sequence: Synthetic oligonucleotide
cacaaaucugagcagauug

SEQ ID NO: 1776508 - RNA, 19 nt, Artificial Sequence
  Description of Artificial Sequence: Synthetic oligonucleotide
ugucacuccagguauacga

SEQ ID NO: 1776509 - RNA, 19 nt, Artificial Sequence
  Description of Artificial Sequence: Synthetic oligonucleotide
caugucaacuucuucacac

SEQ ID NO: 1776510 - RNA, 19 nt, Artificial Sequence
  Description of Artificial Sequence: Synthetic oligonucleotide
ggaaggacugaucugacgg

SEQ ID NO: 1776511 - RNA, 19 nt, Artificial Sequence
  Description of Artificial Sequence: Synthetic oligonucleotide
ugacaaacggaacucuacc

SEQ ID NO: 1776512 - RNA, 19 nt, Artificial Sequence
  Description of Artificial Sequence: Synthetic oligonucleotide
caguauacuucuucaaggg

SEQ ID NO: 1776513 - RNA, 19 nt, Artificial Sequence
  Description of Artificial Sequence: Synthetic oligonucleotide
aauggagggacaguaucgg

SEQ ID NO: 1776514 - RNA, 19 nt, Artificial Sequence
  Description of Artificial Sequence: Synthetic oligonucleotide
gguaguguaacagacaacc

SEQ ID NO: 1776515 - RNA, 19 nt, Artificial Sequence
  Description of Artificial Sequence: Synthetic oligonucleotide
uuccaaccaaaccugaugu

SEQ ID NO: 1776516 - RNA, 19 nt, Artificial Sequence
  Description of Artificial Sequence: Synthetic oligonucleotide
guaacagacaacccuuggg

SEQ ID NO: 1776517 - RNA, 19 nt, Artificial Sequence
  Description of Artificial Sequence: Synthetic oligonucleotide
uugauuccagcuaucacac

SEQ ID NO: 1776518 - RNA, 19 nt, Artificial Sequence
  Description of Artificial Sequence: Synthetic oligonucleotide
guagauaaggucagaaucc

SEQ ID NO: 1776519 - RNA, 19 nt, Artificial Sequence
  Description of Artificial Sequence: Synthetic oligonucleotide
guaugagucaaguaacaug

SEQ ID NO: 1776520 - RNA, 19 nt, Artificial Sequence
  Description of Artificial Sequence: Synthetic oligonucleotide
uugguaugagucaaguaac

SEQ ID NO: 1776521 - RNA, 19 nt, Artificial Sequence
  Description of Artificial Sequence: Synthetic oligonucleotide
cacacuuaagaacaucuag

SEQ ID NO: 1776522 - RNA, 19 nt, Artificial Sequence
  Description of Artificial Sequence: Synthetic oligonucleotide
uaaauaaucgaggucuugu

SEQ ID NO: 1776523 - RNA, 19 nt, Artificial Sequence
  Description of Artificial Sequence: Synthetic oligonucleotide
cagguauacgacuagcagc

SEQ ID NO: 1776524 - RNA, 19 nt, Artificial Sequence
  Description of Artificial Sequence: Synthetic oligonucleotide
aaaucugagcagauugacg

SEQ ID NO: 1776525 - RNA, 19 nt, Artificial Sequence
  Description of Artificial Sequence: Synthetic oligonucleotide
aucaagacuccuauguagc

SEQ ID NO: 1776526 - RNA, 19 nt, Artificial Sequence
  Description of Artificial Sequence: Synthetic oligonucleotide
aaacaugcgguaugguuca

SEQ ID NO: 1776527 - RNA, 19 nt, Artificial Sequence
  Description of Artificial Sequence: Synthetic oligonucleotide
uccuauguagccuucugug

SEQ ID NO: 1776528 - RNA, 19 nt, Artificial Sequence
  Description of Artificial Sequence: Synthetic oligonucleotide
auacagacucauaagcagc

SEQ ID NO: 1776529 - RNA, 19 nt, Artificial Sequence
  Description of Artificial Sequence: Synthetic oligonucleotide
auuaucugggcgaagugac

SEQ ID NO: 1776530 - RNA, 19 nt, Artificial Sequence
  Description of Artificial Sequence: Synthetic oligonucleotide
ugcgguaugguucacuggu

SEQ ID NO: 1776531 - RNA, 19 nt, Artificial Sequence
  Description of Artificial Sequence: Synthetic oligonucleotide
auaaucauacugaacacca

SEQ ID NO: 1776532 - RNA, 19 nt, Artificial Sequence
  Description of Artificial Sequence: Synthetic oligonucleotide
gguagauaaggucagaauc

SEQ ID NO: 1776533 - RNA, 19 nt, Artificial Sequence
  Description of Artificial Sequence: Synthetic oligonucleotide
agcucuuucauaucgcugu

SEQ ID NO: 1776534 - RNA, 19 nt, Artificial Sequence
  Description of Artificial Sequence: Synthetic oligonucleotide
caauggagggacaguaucg

SEQ ID NO: 1776535 - RNA, 19 nt, Artificial Sequence
  Description of Artificial Sequence: Synthetic oligonucleotide
gacaaacggaacucuaccc

SEQ ID NO: 1776536 - RNA, 19 nt, Artificial Sequence
  Description of Artificial Sequence: Synthetic oligonucleotide
ucagcugguaguguaacag

SEQ ID NO: 1776537 - RNA, 19 nt, Artificial Sequence
  Description of Artificial Sequence: Synthetic oligonucleotide
ugucucaagggaaggacug

SEQ ID NO: 1776538 - RNA, 19 nt, Artificial Sequence
  Description of Artificial Sequence: Synthetic oligonucleotide
uagagcgcugacaggaagg

SEQ ID NO: 1776539 - RNA, 19 nt, Artificial Sequence
  Description of Artificial Sequence: Synthetic oligonucleotide
agaaagcugaaugguaugg

SEQ ID NO: 1776540 - RNA, 19 nt, Artificial Sequence
  Description of Artificial Sequence: Synthetic oligonucleotide
cuuguaacucagcugguag

SEQ ID NO: 1776541 - RNA, 19 nt, Artificial Sequence
  Description of Artificial Sequence: Synthetic oligonucleotide
caaagaauagccguugaac

SEQ ID NO: 1776542 - RNA, 19 nt, Artificial Sequence
  Description of Artificial Sequence: Synthetic oligonucleotide
acuagcagccccaauaguc

SEQ ID NO: 1776543 - RNA, 19 nt, Artificial Sequence
  Description of Artificial Sequence: Synthetic oligonucleotide
uuugguguuccguuacugc

SEQ ID NO: 1776544 - RNA, 19 nt, Artificial Sequence
  Description of Artificial Sequence: Synthetic oligonucleotide
ucaaguaacauggcaguug

SEQ ID NO: 1776545 - RNA, 19 nt, Artificial Sequence
  Description of Artificial Sequence: Synthetic oligonucleotide
aaggcuucuauuaacacuu

SEQ ID NO: 1776546 - RNA, 19 nt, Artificial Sequence
  Description of Artificial Sequence: Synthetic oligonucleotide
uauacgacuagcagcccca

SEQ ID NO: 1776547 - RNA, 19 nt, Artificial Sequence
  Description of Artificial Sequence: Synthetic oligonucleotide
cugauuguuaaauaaucga

SEQ ID NO: 1776548 - RNA, 19 nt, Artificial Sequence
  Description of Artificial Sequence: Synthetic oligonucleotide
agccccaauagucuguggg

SEQ ID NO: 1776549 - RNA, 19 nt, Artificial Sequence
  Description of Artificial Sequence: Synthetic oligonucleotide
uuuugauucaauggaggga

SEQ ID NO: 1776550 - RNA, 19 nt, Artificial Sequence
  Description of Artificial Sequence: Synthetic oligonucleotide
uggaugaaccauuuuggcu

SEQ ID NO: 1776551 - RNA, 19 nt, Artificial Sequence
  Description of Artificial Sequence: Synthetic oligonucleotide
uuuccacugacucgaagac

SEQ ID NO: 1776552 - RNA, 19 nt, Artificial Sequence
  Description of Artificial Sequence: Synthetic oligonucleotide
aaacggaacucuacccugc

SEQ ID NO: 1776553 - RNA, 19 nt, Artificial Sequence
  Description of Artificial Sequence: Synthetic oligonucleotide
aacaucaauacagacucau

SEQ ID NO: 1776554 - RNA, 19 nt, Artificial Sequence
  Description of Artificial Sequence: Synthetic oligonucleotide
gaaggacugaucugacggg

SEQ ID NO: 1776555 - RNA, 19 nt, Artificial Sequence
  Description of Artificial Sequence: Synthetic oligonucleotide
acaaacggaacucuacccu

SEQ ID NO: 1776556 - RNA, 19 nt, Artificial Sequence
  Description of Artificial Sequence: Synthetic oligonucleotide
agucaaguaacauggcagu

SEQ ID NO: 1776557 - RNA, 19 nt, Artificial Sequence
  Description of Artificial Sequence: Synthetic oligonucleotide
uuguuaaauaaucgagguc

SEQ ID NO: 1776558 - RNA, 19 nt, Artificial Sequence
  Description of Artificial Sequence: Synthetic oligonucleotide
uggcaguugaucuucuggc

SEQ ID NO: 1776559 - RNA, 19 nt, Artificial Sequence
  Description of Artificial Sequence: Synthetic oligonucleotide
aaggacugaucugacgggg

SEQ ID NO: 1776560 - RNA, 19 nt, Artificial Sequence
  Description of Artificial Sequence: Synthetic oligonucleotide
uguaacucagcugguagug

SEQ ID NO: 1776561 - RNA, 19 nt, Artificial Sequence
  Description of Artificial Sequence: Synthetic oligonucleotide
ccugauuguuaaauaaucg

SEQ ID NO: 1776562 - RNA, 19 nt, Artificial Sequence
  Description of Artificial Sequence: Synthetic oligonucleotide
uacacgauuuggaaagcgu

SEQ ID NO: 1776563 - RNA, 19 nt, Artificial Sequence
  Description of Artificial Sequence: Synthetic oligonucleotide
aaaccugauguacacgauu

SEQ ID NO: 1776564 - RNA, 19 nt, Artificial Sequence
  Description of Artificial Sequence: Synthetic oligonucleotide
uguguagcuucucucgaac

SEQ ID NO: 1776565 - RNA, 19 nt, Artificial Sequence
  Description of Artificial Sequence: Synthetic oligonucleotide
caucaauacagacucauaa

SEQ ID NO: 1776566 - RNA, 19 nt, Artificial Sequence
  Description of Artificial Sequence: Synthetic oligonucleotide
gauccacacuguuucacug

SEQ ID NO: 1776567 - RNA, 19 nt, Artificial Sequence
  Description of Artificial Sequence: Synthetic oligonucleotide
ugguaugagucaaguaaca

SEQ ID NO: 1776568 - RNA, 19 nt, Artificial Sequence
  Description of Artificial Sequence: Synthetic oligonucleotide
auagccguugaaccaaaug

SEQ ID NO: 1776569 - RNA, 19 nt, Artificial Sequence
  Description of Artificial Sequence: Synthetic oligonucleotide
ggucagaucaucaaucaag

SEQ ID NO: 1776570 - RNA, 19 nt, Artificial Sequence
  Description of Artificial Sequence: Synthetic oligonucleotide
aagacuccuauguagccuu

SEQ ID NO: 1776571 - RNA, 19 nt, Artificial Sequence
  Description of Artificial Sequence: Synthetic oligonucleotide
uaacacuuauaggagcuug

SEQ ID NO: 1776572 - RNA, 19 nt, Artificial Sequence
  Description of Artificial Sequence: Synthetic oligonucleotide
cuuuccacugacucgaaga

SEQ ID NO: 1776573 - RNA, 19 nt, Artificial Sequence
  Description of Artificial Sequence: Synthetic oligonucleotide
uccuuaacauggcuauuca

SEQ ID NO: 1776574 - RNA, 19 nt, Artificial Sequence
  Description of Artificial Sequence: Synthetic oligonucleotide
ggagcuugaaagcucaaug

SEQ ID NO: 1776575 - RNA, 19 nt, Artificial Sequence
  Description of Artificial Sequence: Synthetic oligonucleotide
cuuucauaucgcugugggg

SEQ ID NO: 1776576 - RNA, 19 nt, Artificial Sequence
  Description of Artificial Sequence: Synthetic oligonucleotide
acaauaaaggguggcuuuc

SEQ ID NO: 1776577 - RNA, 19 nt, Artificial Sequence
  Description of Artificial Sequence: Synthetic oligonucleotide
aaagcuucaucucgcugaa

SEQ ID NO: 1776578 - RNA, 19 nt, Artificial Sequence
  Description of Artificial Sequence: Synthetic oligonucleotide
uguaaagcuucaucucgcu

SEQ ID NO: 1776579 - RNA, 19 nt, Artificial Sequence
  Description of Artificial Sequence: Synthetic oligonucleotide
guauacgacuagcagcccc

SEQ ID NO: 1776580 - RNA, 19 nt, Artificial Sequence
  Description of Artificial Sequence: Synthetic oligonucleotide
acacuuaagaacaucuaga

SEQ ID NO: 1776581 - RNA, 19 nt, Artificial Sequence
  Description of Artificial Sequence: Synthetic oligonucleotide
aucccugauuguuaaauaa

SEQ ID NO: 1776582 - RNA, 19 nt, Artificial Sequence
  Description of Artificial Sequence: Synthetic oligonucleotide
agggacaguaucggggucc

SEQ ID NO: 1776583 - RNA, 19 nt, Artificial Sequence
  Description of Artificial Sequence: Synthetic oligonucleotide
caaacggaacucuacccug

SEQ ID NO: 1776584 - RNA, 19 nt, Artificial Sequence
  Description of Artificial Sequence: Synthetic oligonucleotide
uaacauggcuauucaggug

SEQ ID NO: 1776585 - RNA, 19 nt, Artificial Sequence
  Description of Artificial Sequence: Synthetic oligonucleotide
ucuguccagcaaagaauag

SEQ ID NO: 1776586 - RNA, 19 nt, Artificial Sequence
  Description of Artificial Sequence: Synthetic oligonucleotide
uaaucgaggucuuguggca

SEQ ID NO: 1776587 - RNA, 19 nt, Artificial Sequence
  Description of Artificial Sequence: Synthetic oligonucleotide
ugcacguuaucauuuucuc

SEQ ID NO: 1776588 - RNA, 19 nt, Artificial Sequence
  Description of Artificial Sequence: Synthetic oligonucleotide
acuggcguugauuccagcu

SEQ ID NO: 1776589 - RNA, 19 nt, Artificial Sequence
  Description of Artificial Sequence: Synthetic oligonucleotide
uuguaacucagcugguagu

SEQ ID NO: 1776590 - RNA, 19 nt, Artificial Sequence
  Description of Artificial Sequence: Synthetic oligonucleotide
ucccugauuguuaaauaau

SEQ ID NO: 1776591 - RNA, 19 nt, Artificial Sequence
  Description of Artificial Sequence: Synthetic oligonucleotide
aguaucgggguccucuugu

SEQ ID NO: 1776592 - RNA, 19 nt, Artificial Sequence
  Description of Artificial Sequence: Synthetic oligonucleotide
ugggcucggaaugugaggc

SEQ ID NO: 1776593 - RNA, 19 nt, Artificial Sequence
  Description of Artificial Sequence: Synthetic oligonucleotide
ugggacaaugacacauccc

SEQ ID NO: 1776594 - RNA, 19 nt, Artificial Sequence
  Description of Artificial Sequence: Synthetic oligonucleotide
gucagcauuaucugggcga

SEQ ID NO: 1776595 - RNA, 19 nt, Artificial Sequence
  Description of Artificial Sequence: Synthetic oligonucleotide
agcuuguggaauuaacuuu

SEQ ID NO: 1776596 - RNA, 19 nt, Artificial Sequence
  Description of Artificial Sequence: Synthetic oligonucleotide
uauguagccuucugugcga

SEQ ID NO: 1776597 - RNA, 19 nt, Artificial Sequence
  Description of Artificial Sequence: Synthetic oligonucleotide
auggcuauucaggugcagg

SEQ ID NO: 1776598 - RNA, 19 nt, Artificial Sequence
  Description of Artificial Sequence: Synthetic oligonucleotide
uuccgguuccaaccaaacc

SEQ ID NO: 1776599 - RNA, 19 nt, Artificial Sequence
  Description of Artificial Sequence: Synthetic oligonucleotide
uuaugggcucggaauguga

SEQ ID NO: 1776600 - RNA, 19 nt, Artificial Sequence
  Description of Artificial Sequence: Synthetic oligonucleotide
cgacuuacaauaaagggug

SEQ ID NO: 1776601 - RNA, 19 nt, Artificial Sequence
  Description of Artificial Sequence: Synthetic oligonucleotide
gugcgacuuacaauaaagg

SEQ ID NO: 1776602 - RNA, 19 nt, Artificial Sequence
  Description of Artificial Sequence: Synthetic oligonucleotide
caaaucugagcagauugac

SEQ ID NO: 1776603 - RNA, 19 nt, Artificial Sequence
  Description of Artificial Sequence: Synthetic oligonucleotide
acgacuagcagccccaaua

SEQ ID NO: 1776604 - RNA, 19 nt, Artificial Sequence
  Description of Artificial Sequence: Synthetic oligonucleotide
caguugaucuucuggcuug

SEQ ID NO: 1776605 - RNA, 19 nt, Artificial Sequence
  Description of Artificial Sequence: Synthetic oligonucleotide
cacacuguuucacugagaa

SEQ ID NO: 1776606 - RNA, 19 nt, Artificial Sequence
  Description of Artificial Sequence: Synthetic oligonucleotide
agcauuaucugggcgaagu

SEQ ID NO: 1776607 - RNA, 19 nt, Artificial Sequence
  Description of Artificial Sequence: Synthetic oligonucleotide
acagcauuggcuaguaagu

SEQ ID NO: 1776608 - RNA, 19 nt, Artificial Sequence
  Description of Artificial Sequence: Synthetic oligonucleotide
cucauguguagcuucucuc

SEQ ID NO: 1776609 - RNA, 19 nt, Artificial Sequence
  Description of Artificial Sequence: Synthetic oligonucleotide
aaccagugguuccauuuau

SEQ ID NO: 1776610 - RNA, 19 nt, Artificial Sequence
  Description of Artificial Sequence: Synthetic oligonucleotide
guacacgauuuggaaagcg

SEQ ID NO: 1776611 - RNA, 19 nt, Artificial Sequence
  Description of Artificial Sequence: Synthetic oligonucleotide
uuaucugggcgaagugaca

SEQ ID NO: 1776612 - RNA, 19 nt, Artificial Sequence
  Description of Artificial Sequence: Synthetic oligonucleotide
acguuaucauuuucucuug

SEQ ID NO: 1776613 - RNA, 19 nt, Artificial Sequence
  Description of Artificial Sequence: Synthetic oligonucleotide
cuuggagcuugaaagcuca

SEQ ID NO: 1776614 - RNA, 19 nt, Artificial Sequence
  Description of Artificial Sequence: Synthetic oligonucleotide
gacuuacaauaaagggugg

SEQ ID NO: 1776615 - RNA, 19 nt, Artificial Sequence
  Description of Artificial Sequence: Synthetic oligonucleotide
ugguuugguguuccguuac

SEQ ID NO: 1776616 - RNA, 19 nt, Artificial Sequence
  Description of Artificial Sequence: Synthetic oligonucleotide
aaccugauguacacgauuu

SEQ ID NO: 1776617 - RNA, 19 nt, Artificial Sequence
  Description of Artificial Sequence: Synthetic oligonucleotide
gacgauggcagcugguguc

SEQ ID NO: 1776618 - RNA, 19 nt, Artificial Sequence
  Description of Artificial Sequence: Synthetic oligonucleotide
uucaauggagggacaguau

SEQ ID NO: 1776619 - RNA, 19 nt, Artificial Sequence
  Description of Artificial Sequence: Synthetic oligonucleotide
cagacucauaagcagcuuc

SEQ ID NO: 1776620 - RNA, 19 nt, Artificial Sequence
  Description of Artificial Sequence: Synthetic oligonucleotide
caggaaggcuucuauuaac

SEQ ID NO: 1776621 - RNA, 19 nt, Artificial Sequence
  Description of Artificial Sequence: Synthetic oligonucleotide
cagaauccauuccuuccgg

SEQ ID NO: 1776622 - RNA, 19 nt, Artificial Sequence
  Description of Artificial Sequence: Synthetic oligonucleotide
uaaccagugguuccauuua

SEQ ID NO: 1776623 - RNA, 19 nt, Artificial Sequence
  Description of Artificial Sequence: Synthetic oligonucleotide
acaggaaggcuucuauuaa

SEQ ID NO: 1776624 - RNA, 19 nt, Artificial Sequence
  Description of Artificial Sequence: Synthetic oligonucleotide
guaugguucacuggugccc

SEQ ID NO: 1776625 - RNA, 19 nt, Artificial Sequence
  Description of Artificial Sequence: Synthetic oligonucleotide
cauuccuuccgguuccaac

SEQ ID NO: 1776626 - RNA, 19 nt, Artificial Sequence
  Description of Artificial Sequence: Synthetic oligonucleotide
ugacgauggcagcuggugu

SEQ ID NO: 1776627 - RNA, 19 nt, Artificial Sequence
  Description of Artificial Sequence: Synthetic oligonucleotide
uugaaccaaaugugucuca

SEQ ID NO: 1776628 - RNA, 19 nt, Artificial Sequence
  Description of Artificial Sequence: Synthetic oligonucleotide
uaucugggcgaagugacaa

SEQ ID NO: 1776629 - RNA, 19 nt, Artificial Sequence
  Description of Artificial Sequence: Synthetic oligonucleotide
cugggcgaagugacaaacg

SEQ ID NO: 1776630 - RNA, 19 nt, Artificial Sequence
  Description of Artificial Sequence: Synthetic oligonucleotide
ucugggcgaagugacaaac

SEQ ID NO: 1776631 - RNA, 19 nt, Artificial Sequence
  Description of Artificial Sequence: Synthetic oligonucleotide
uguuccguuacugcugccu

SEQ ID NO: 1776632 - RNA, 19 nt, Artificial Sequence
  Description of Artificial Sequence: Synthetic oligonucleotide
agaauagccguugaaccaa

SEQ ID NO: 1776633 - RNA, 19 nt, Artificial Sequence
  Description of Artificial Sequence: Synthetic oligonucleotide
guaaguccaugucaacuuc

SEQ ID NO: 1776634 - RNA, 19 nt, Artificial Sequence
  Description of Artificial Sequence: Synthetic oligonucleotide
ggggucuaaauaaucauac

SEQ ID NO: 1776635 - RNA, 19 nt, Artificial Sequence
  Description of Artificial Sequence: Synthetic oligonucleotide
ccugcugguaaacaugcgg

SEQ ID NO: 1776636 - RNA, 19 nt, Artificial Sequence
  Description of Artificial Sequence: Synthetic oligonucleotide
gaugcacguuaucauuuuc

SEQ ID NO: 1776637 - RNA, 19 nt, Artificial Sequence
  Description of Artificial Sequence: Synthetic oligonucleotide
uccucauaaccagugguuc

SEQ ID NO: 1776638 - RNA, 19 nt, Artificial Sequence
  Description of Artificial Sequence: Synthetic oligonucleotide
ucugugggcgacucaugug

SEQ ID NO: 1776639 - RNA, 19 nt, Artificial Sequence
  Description of Artificial Sequence: Synthetic oligonucleotide
uccacgaagcucuuucaua

SEQ ID NO: 1776640 - RNA, 19 nt, Artificial Sequence
  Description of Artificial Sequence: Synthetic oligonucleotide
uugauucaauggagggaca

SEQ ID NO: 1776641 - RNA, 19 nt, Artificial Sequence
  Description of Artificial Sequence: Synthetic oligonucleotide
cuagagcgcugacaggaag

SEQ ID NO: 1776642 - RNA, 19 nt, Artificial Sequence
  Description of Artificial Sequence: Synthetic oligonucleotide
augagucaaguaacauggc

SEQ ID NO: 1776643 - RNA, 19 nt, Artificial Sequence
  Description of Artificial Sequence: Synthetic oligonucleotide
acuuggagcuugaaagcuc

SEQ ID NO: 1776644 - RNA, 19 nt, Artificial Sequence
  Description of Artificial Sequence: Synthetic oligonucleotide
uuugcugaguggucuucac

SEQ ID NO: 1776645 - RNA, 19 nt, Artificial Sequence
  Description of Artificial Sequence: Synthetic oligonucleotide
uggcuaguaaguccauguc

SEQ ID NO: 1776646 - RNA, 19 nt, Artificial Sequence
  Description of Artificial Sequence: Synthetic oligonucleotide
acaucccugauuguuaaau

SEQ ID NO: 1776647 - RNA, 19 nt, Artificial Sequence
  Description of Artificial Sequence: Synthetic oligonucleotide
caaccaaaccugauguaca

SEQ ID NO: 1776648 - RNA, 19 nt, Artificial Sequence
  Description of Artificial Sequence: Synthetic oligonucleotide
uguacacgauuuggaaagc

SEQ ID NO: 1776649 - RNA, 19 nt, Artificial Sequence
  Description of Artificial Sequence: Synthetic oligonucleotide
cuuccgguuccaaccaaac

SEQ ID NO: 1776650 - RNA, 19 nt, Artificial Sequence
  Description of Artificial Sequence: Synthetic oligonucleotide
ugguaguguaacagacaac

SEQ ID NO: 1776651 - RNA, 19 nt, Artificial Sequence
  Description of Artificial Sequence: Synthetic oligonucleotide
ucuccaagccucugaugca

SEQ ID NO: 1776652 - RNA, 19 nt, Artificial Sequence
  Description of Artificial Sequence: Synthetic oligonucleotide
agccguugaaccaaaugug

SEQ ID NO: 1776653 - RNA, 19 nt, Artificial Sequence
  Description of Artificial Sequence: Synthetic oligonucleotide
cuuauaggagcuuguggaa

SEQ ID NO: 1776654 - RNA, 19 nt, Artificial Sequence
  Description of Artificial Sequence: Synthetic oligonucleotide
guuccguuacugcugccug

SEQ ID NO: 1776655 - RNA, 19 nt, Artificial Sequence
  Description of Artificial Sequence: Synthetic oligonucleotide
agauuucauccacgaagcu

SEQ ID NO: 1776656 - RNA, 19 nt, Artificial Sequence
  Description of Artificial Sequence: Synthetic oligonucleotide
augcgguaugguucacugg

SEQ ID NO: 1776657 - RNA, 19 nt, Artificial Sequence
  Description of Artificial Sequence: Synthetic oligonucleotide
ccugauguacacgauuugg

SEQ ID NO: 1776658 - RNA, 19 nt, Artificial Sequence
  Description of Artificial Sequence: Synthetic oligonucleotide
ucugugcgacuuacaauaa

SEQ ID NO: 1776659 - RNA, 19 nt, Artificial Sequence
  Description of Artificial Sequence: Synthetic oligonucleotide
agacucauaagcagcuucu

SEQ ID NO: 1776660 - RNA, 19 nt, Artificial Sequence
  Description of Artificial Sequence: Synthetic oligonucleotide
gggacaaugacacaucccu

SEQ ID NO: 1776661 - RNA, 19 nt, Artificial Sequence
  Description of Artificial Sequence: Synthetic oligonucleotide
uucuagccagcucucuauc

SEQ ID NO: 1776662 - RNA, 19 nt, Artificial Sequence
  Description of Artificial Sequence: Synthetic oligonucleotide
cucuuucauaucgcugugg

SEQ ID NO: 1776663 - RNA, 19 nt, Artificial Sequence
  Description of Artificial Sequence: Synthetic oligonucleotide
accugauguacacgauuug

SEQ ID NO: 1776664 - RNA, 19 nt, Artificial Sequence
  Description of Artificial Sequence: Synthetic oligonucleotide
gguaugguucacuggugcc

SEQ ID NO: 1776665 - RNA, 19 nt, Artificial Sequence
  Description of Artificial Sequence: Synthetic oligonucleotide
gugacaaacggaacucuac

SEQ ID NO: 1776666 - RNA, 19 nt, Artificial Sequence
  Description of Artificial Sequence: Synthetic oligonucleotide
cauuaucugggcgaaguga

SEQ ID NO: 1776667 - RNA, 19 nt, Artificial Sequence
  Description of Artificial Sequence: Synthetic oligonucleotide
guuugguguuccguuacug

SEQ ID NO: 1776668 - RNA, 19 nt, Artificial Sequence
  Description of Artificial Sequence: Synthetic oligonucleotide
ucuagagcgcugacaggaa

SEQ ID NO: 1776669 - RNA, 19 nt, Artificial Sequence
  Description of Artificial Sequence: Synthetic oligonucleotide
ggcuaguaaguccauguca

SEQ ID NO: 1776670 - RNA, 19 nt, Artificial Sequence
  Description of Artificial Sequence: Synthetic oligonucleotide
cccugauuguuaaauaauc

SEQ ID NO: 1776671 - RNA, 19 nt, Artificial Sequence
  Description of Artificial Sequence: Synthetic oligonucleotide
cuucaagggcucaggaaca

SEQ ID NO: 1776672 - RNA, 19 nt, Artificial Sequence
  Description of Artificial Sequence: Synthetic oligonucleotide
ucuuguaacucagcuggua

SEQ ID NO: 1776673 - RNA, 19 nt, Artificial Sequence
  Description of Artificial Sequence: Synthetic oligonucleotide
guaaacaugcgguaugguu

SEQ ID NO: 1776674 - RNA, 19 nt, Artificial Sequence
  Description of Artificial Sequence: Synthetic oligonucleotide
uccagcuaucacacccuga

SEQ ID NO: 1776675 - RNA, 19 nt, Artificial Sequence
  Description of Artificial Sequence: Synthetic oligonucleotide
ugaugcacguuaucauuuu

SEQ ID NO: 1776676 - RNA, 19 nt, Artificial Sequence
  Description of Artificial Sequence: Synthetic oligonucleotide
gagcuuguggaauuaacuu

SEQ ID NO: 1776677 - RNA, 19 nt, Artificial Sequence
  Description of Artificial Sequence: Synthetic oligonucleotide
ugcugguaaacaugcggua

SEQ ID NO: 1776678 - RNA, 19 nt, Artificial Sequence
  Description of Artificial Sequence: Synthetic oligonucleotide
ccagguauacgacuagcag

SEQ ID NO: 1776679 - RNA, 19 nt, Artificial Sequence
  Description of Artificial Sequence: Synthetic oligonucleotide
ucucgcugaaccuccuuua

SEQ ID NO: 1776680 - RNA, 19 nt, Artificial Sequence
  Description of Artificial Sequence: Synthetic oligonucleotide
uagucugugggcgacucau

SEQ ID NO: 1776681 - RNA, 19 nt, Artificial Sequence
  Description of Artificial Sequence: Synthetic oligonucleotide
cggaacucuacccugcugg

SEQ ID NO: 1776682 - RNA, 19 nt, Artificial Sequence
  Description of Artificial Sequence: Synthetic oligonucleotide
agcuuccucauaaccagug

SEQ ID NO: 1776683 - RNA, 19 nt, Artificial Sequence
  Description of Artificial Sequence: Synthetic oligonucleotide
cuuaugggcucggaaugug

SEQ ID NO: 1776684 - RNA, 19 nt, Artificial Sequence
  Description of Artificial Sequence: Synthetic oligonucleotide
cauaucgcuguggggacac

SEQ ID NO: 1776685 - RNA, 19 nt, Artificial Sequence
  Description of Artificial Sequence: Synthetic oligonucleotide
ccucauaaccagugguucc

SEQ ID NO: 1776686 - RNA, 19 nt, Artificial Sequence
  Description of Artificial Sequence: Synthetic oligonucleotide
uaucgcuguggggacacac

SEQ ID NO: 1776687 - RNA, 19 nt, Artificial Sequence
  Description of Artificial Sequence: Synthetic oligonucleotide
ccaaccaaaccugauguac

SEQ ID NO: 1776688 - RNA, 19 nt, Artificial Sequence
  Description of Artificial Sequence: Synthetic oligonucleotide
acgauuuggaaagcguaaa

SEQ ID NO: 1776689 - RNA, 19 nt, Artificial Sequence
  Description of Artificial Sequence: Synthetic oligonucleotide
uccaaccaaaccugaugua

SEQ ID NO: 1776690 - RNA, 19 nt, Artificial Sequence
  Description of Artificial Sequence: Synthetic oligonucleotide
cauguguagcuucucucga

SEQ ID NO: 1776691 - RNA, 19 nt, Artificial Sequence
  Description of Artificial Sequence: Synthetic oligonucleotide
ccuuaacauggcuauucag

SEQ ID NO: 1776692 - RNA, 19 nt, Artificial Sequence
  Description of Artificial Sequence: Synthetic oligonucleotide
cucuuguaguuuccuuaac

SEQ ID NO: 1776693 - RNA, 19 nt, Artificial Sequence
  Description of Artificial Sequence: Synthetic oligonucleotide
uuccguuacugcugccugu

SEQ ID NO: 1776694 - RNA, 19 nt, Artificial Sequence
  Description of Artificial Sequence: Synthetic oligonucleotide
gacaguaucgggguccucu

SEQ ID NO: 1776695 - RNA, 19 nt, Artificial Sequence
  Description of Artificial Sequence: Synthetic oligonucleotide
cacugacucgaagacuggc

SEQ ID NO: 1776696 - RNA, 19 nt, Artificial Sequence
  Description of Artificial Sequence: Synthetic oligonucleotide
ccacuuggagcuugaaagc

SEQ ID NO: 1776697 - RNA, 19 nt, Artificial Sequence
  Description of Artificial Sequence: Synthetic oligonucleotide
aacaugcgguaugguucac

SEQ ID NO: 1776698 - RNA, 19 nt, Artificial Sequence
  Description of Artificial Sequence: Synthetic oligonucleotide
aucugagcagauugacgau

SEQ ID NO: 1776699 - RNA, 19 nt, Artificial Sequence
  Description of Artificial Sequence: Synthetic oligonucleotide
gaaugugaggcggcuguca

SEQ ID NO: 1776700 - RNA, 19 nt, Artificial Sequence
  Description of Artificial Sequence: Synthetic oligonucleotide
gcuaguaaguccaugucaa

SEQ ID NO: 1776701 - RNA, 19 nt, Artificial Sequence
  Description of Artificial Sequence: Synthetic oligonucleotide
aaagcucaauggauuucaa

SEQ ID NO: 1776702 - RNA, 19 nt, Artificial Sequence
  Description of Artificial Sequence: Synthetic oligonucleotide
cuagcagccccaauagucu

SEQ ID NO: 1776703 - RNA, 19 nt, Artificial Sequence
  Description of Artificial Sequence: Synthetic oligonucleotide
ggcgaagugacaaacggaa

SEQ ID NO: 1776704 - RNA, 19 nt, Artificial Sequence
  Description of Artificial Sequence: Synthetic oligonucleotide
uggagcuugaaagcucaau

SEQ ID NO: 1776705 - RNA, 19 nt, Artificial Sequence
  Description of Artificial Sequence: Synthetic oligonucleotide
acacgauuuggaaagcgua

SEQ ID NO: 1776706 - RNA, 19 nt, Artificial Sequence
  Description of Artificial Sequence: Synthetic oligonucleotide
cuugauccacacuguuuca

SEQ ID NO: 1776707 - RNA, 19 nt, Artificial Sequence
  Description of Artificial Sequence: Synthetic oligonucleotide
ucacaaaucugagcagauu

SEQ ID NO: 1776708 - RNA, 19 nt, Artificial Sequence
  Description of Artificial Sequence: Synthetic oligonucleotide
caaucaagacuccuaugua

SEQ ID NO: 1776709 - RNA, 19 nt, Artificial Sequence
  Description of Artificial Sequence: Synthetic oligonucleotide
cagcuaucacacccugagc

SEQ ID NO: 1776710 - RNA, 19 nt, Artificial Sequence
  Description of Artificial Sequence: Synthetic oligonucleotide
ugacucgaagacuggcguu

SEQ ID NO: 1776711 - RNA, 19 nt, Artificial Sequence
  Description of Artificial Sequence: Synthetic oligonucleotide
ucauaucgcuguggggaca

SEQ ID NO: 1776712 - RNA, 19 nt, Artificial Sequence
  Description of Artificial Sequence: Synthetic oligonucleotide
ucgcugaaccuccuuuauu

SEQ ID NO: 1776713 - RNA, 19 nt, Artificial Sequence
  Description of Artificial Sequence: Synthetic oligonucleotide
auagccuggaugaaccauu

SEQ ID NO: 1776714 - RNA, 19 nt, Artificial Sequence
  Description of Artificial Sequence: Synthetic oligonucleotide
gcagauugacgauggcagc

SEQ ID NO: 1776715 - RNA, 19 nt, Artificial Sequence
  Description of Artificial Sequence: Synthetic oligonucleotide
acggaacucuacccugcug

SEQ ID NO: 1776716 - RNA, 19 nt, Artificial Sequence
  Description of Artificial Sequence: Synthetic oligonucleotide
uccguuacugcugccuguc

SEQ ID NO: 1776717 - RNA, 19 nt, Artificial Sequence
  Description of Artificial Sequence: Synthetic oligonucleotide
cagcauuggcuaguaaguc

SEQ ID NO: 1776718 - RNA, 19 nt, Artificial Sequence
  Description of Artificial Sequence: Synthetic oligonucleotide
gcgacuuacaauaaagggu

SEQ ID NO: 1776719 - RNA, 19 nt, Artificial Sequence
  Description of Artificial Sequence: Synthetic oligonucleotide
cacccugagcugcagcuuc

SEQ ID NO: 1776720 - RNA, 19 nt, Artificial Sequence
  Description of Artificial Sequence: Synthetic oligonucleotide
cacgaagcucuuucauauc

SEQ ID NO: 1776721 - RNA, 19 nt, Artificial Sequence
  Description of Artificial Sequence: Synthetic oligonucleotide
gccccaauagucugugggc

SEQ ID NO: 1776722 - RNA, 19 nt, Artificial Sequence
  Description of Artificial Sequence: Synthetic oligonucleotide
ucgggguccucuuguaguu

SEQ ID NO: 1776723 - RNA, 19 nt, Artificial Sequence
  Description of Artificial Sequence: Synthetic oligonucleotide
aauagccguugaaccaaau

SEQ ID NO: 1776724 - RNA, 19 nt, Artificial Sequence
  Description of Artificial Sequence: Synthetic oligonucleotide
gcauuaucugggcgaagug

SEQ ID NO: 1776725 - RNA, 19 nt, Artificial Sequence
  Description of Artificial Sequence: Synthetic oligonucleotide
uguagccuucugugcgacu

SEQ ID NO: 1776726 - RNA, 19 nt, Artificial Sequence
  Description of Artificial Sequence: Synthetic oligonucleotide
ucucauccacucugggguu

SEQ ID NO: 1776727 - RNA, 19 nt, Artificial Sequence
  Description of Artificial Sequence: Synthetic oligonucleotide
ucggaaugugaggcggcug

SEQ ID NO: 1776728 - RNA, 19 nt, Artificial Sequence
  Description of Artificial Sequence: Synthetic oligonucleotide
gcguaaaacuuuugauuca

SEQ ID NO: 1776729 - RNA, 19 nt, Artificial Sequence
  Description of Artificial Sequence: Synthetic oligonucleotide
acaguaucgggguccucuu

SEQ ID NO: 1776730 - RNA, 19 nt, Artificial Sequence
  Description of Artificial Sequence: Synthetic oligonucleotide
cauccacgaagcucuuuca

SEQ ID NO: 1776731 - RNA, 19 nt, Artificial Sequence
  Description of Artificial Sequence: Synthetic oligonucleotide
cagcugguaguguaacaga

SEQ ID NO: 1776732 - RNA, 19 nt, Artificial Sequence
  Description of Artificial Sequence: Synthetic oligonucleotide
uuggagcuugaaagcucaa

SEQ ID NO: 1776733 - RNA, 19 nt, Artificial Sequence
  Description of Artificial Sequence: Synthetic oligonucleotide
caucccugauuguuaaaua

SEQ ID NO: 1776734 - RNA, 19 nt, Artificial Sequence
  Description of Artificial Sequence: Synthetic oligonucleotide
gaacuuccugggacaauga

SEQ ID NO: 1776735 - RNA, 19 nt, Artificial Sequence
  Description of Artificial Sequence: Synthetic oligonucleotide
ccgguuccaaccaaaccug

SEQ ID NO: 1776736 - RNA, 19 nt, Artificial Sequence
  Description of Artificial Sequence: Synthetic oligonucleotide
uccuuccgguuccaaccaa

SEQ ID NO: 1776737 - RNA, 19 nt, Artificial Sequence
  Description of Artificial Sequence: Synthetic oligonucleotide
cauccuuaugggcucggaa

SEQ ID NO: 1776738 - RNA, 19 nt, Artificial Sequence
  Description of Artificial Sequence: Synthetic oligonucleotide
ccguugaaccaaauguguc

SEQ ID NO: 1776739 - RNA, 19 nt, Artificial Sequence
  Description of Artificial Sequence: Synthetic oligonucleotide
gcggcugucagcauuaucu

SEQ ID NO: 1776740 - RNA, 19 nt, Artificial Sequence
  Description of Artificial Sequence: Synthetic oligonucleotide
uacgacuagcagccccaau

SEQ ID NO: 1776741 - RNA, 19 nt, Artificial Sequence
  Description of Artificial Sequence: Synthetic oligonucleotide
agauaaggucagaauccau

SEQ ID NO: 1776742 - RNA, 19 nt, Artificial Sequence
  Description of Artificial Sequence: Synthetic oligonucleotide
aucugggcgaagugacaaa

SEQ ID NO: 1776743 - RNA, 19 nt, Artificial Sequence
  Description of Artificial Sequence: Synthetic oligonucleotide
cauggcuauucaggugcag

SEQ ID NO: 1776744 - RNA, 19 nt, Artificial Sequence
  Description of Artificial Sequence: Synthetic oligonucleotide
acaugcgguaugguucacu

SEQ ID NO: 1776745 - RNA, 19 nt, Artificial Sequence
  Description of Artificial Sequence: Synthetic oligonucleotide
ggucuuguggcaguuguaa

SEQ ID NO: 1776746 - RNA, 19 nt, Artificial Sequence
  Description of Artificial Sequence: Synthetic oligonucleotide
acaucaauacagacucaua

SEQ ID NO: 1776747 - RNA, 19 nt, Artificial Sequence
  Description of Artificial Sequence: Synthetic oligonucleotide
gcuuuccacugacucgaag

SEQ ID NO: 1776748 - RNA, 19 nt, Artificial Sequence
  Description of Artificial Sequence: Synthetic oligonucleotide
gucugugggcgacucaugu

SEQ ID NO: 1776749 - RNA, 19 nt, Artificial Sequence
  Description of Artificial Sequence: Synthetic oligonucleotide
ggugucacuccagguauac

SEQ ID NO: 1776750 - RNA, 19 nt, Artificial Sequence
  Description of Artificial Sequence: Synthetic oligonucleotide
cuggcguugauuccagcua

SEQ ID NO: 1776751 - RNA, 19 nt, Artificial Sequence
  Description of Artificial Sequence: Synthetic oligonucleotide
auaggagcuuguggaauua

SEQ ID NO: 1776752 - RNA, 19 nt, Artificial Sequence
  Description of Artificial Sequence: Synthetic oligonucleotide
gcgacucauguguagcuuc

SEQ ID NO: 1776753 - RNA, 19 nt, Artificial Sequence
  Description of Artificial Sequence: Synthetic oligonucleotide
cgaagcucuuucauaucgc

SEQ ID NO: 1776754 - RNA, 19 nt, Artificial Sequence
  Description of Artificial Sequence: Synthetic oligonucleotide
agacuggcguugauuccag

SEQ ID NO: 1776755 - RNA, 19 nt, Artificial Sequence
  Description of Artificial Sequence: Synthetic oligonucleotide
cgacuagcagccccaauag

SEQ ID NO: 1776756 - RNA, 19 nt, Artificial Sequence
  Description of Artificial Sequence: Synthetic oligonucleotide
gaauagccguugaaccaaa

SEQ ID NO: 1776757 - RNA, 19 nt, Artificial Sequence
  Description of Artificial Sequence: Synthetic oligonucleotide
aucgcuguggggacacaca

SEQ ID NO: 1776758 - RNA, 19 nt, Artificial Sequence
  Description of Artificial Sequence: Synthetic oligonucleotide
cucugaugcacguuaucau

SEQ ID NO: 1776759 - RNA, 19 nt, Artificial Sequence
  Description of Artificial Sequence: Synthetic oligonucleotide
acucuacccugcugguaaa

SEQ ID NO: 1776760 - RNA, 19 nt, Artificial Sequence
  Description of Artificial Sequence: Synthetic oligonucleotide
ccuucugugcgacuuacaa

SEQ ID NO: 1776761 - RNA, 19 nt, Artificial Sequence
  Description of Artificial Sequence: Synthetic oligonucleotide
agacuccuauguagccuuc

SEQ ID NO: 1776762 - RNA, 19 nt, Artificial Sequence
  Description of Artificial Sequence: Synthetic oligonucleotide
gacucauguguagcuucuc

SEQ ID NO: 1776763 - RNA, 19 nt, Artificial Sequence
  Description of Artificial Sequence: Synthetic oligonucleotide
gacucauaagcagcuucua

SEQ ID NO: 1776764 - RNA, 19 nt, Artificial Sequence
  Description of Artificial Sequence: Synthetic oligonucleotide
cgguaugguucacuggugc

SEQ ID NO: 1776765 - RNA, 19 nt, Artificial Sequence
  Description of Artificial Sequence: Synthetic oligonucleotide
cagccccaauagucugugg

SEQ ID NO: 1776766 - RNA, 19 nt, Artificial Sequence
  Description of Artificial Sequence: Synthetic oligonucleotide
cugugcgacuuacaauaaa

SEQ ID NO: 1776767 - RNA, 19 nt, Artificial Sequence
  Description of Artificial Sequence: Synthetic oligonucleotide
cucuacccugcugguaaac

SEQ ID NO: 1776768 - RNA, 19 nt, Artificial Sequence
  Description of Artificial Sequence: Synthetic oligonucleotide
cuucugugcgacuuacaau

SEQ ID NO: 1776769 - RNA, 19 nt, Artificial Sequence
  Description of Artificial Sequence: Synthetic oligonucleotide
cagauugacgauggcagcu

SEQ ID NO: 1776770 - RNA, 19 nt, Artificial Sequence
  Description of Artificial Sequence: Synthetic oligonucleotide
acauggcuauucaggugca

SEQ ID NO: 1776771 - RNA, 19 nt, Artificial Sequence
  Description of Artificial Sequence: Synthetic oligonucleotide
cuacccugcugguaaacau

SEQ ID NO: 1776772 - RNA, 19 nt, Artificial Sequence
  Description of Artificial Sequence: Synthetic oligonucleotide
gcugguaguguaacagaca

SEQ ID NO: 1776773 - RNA, 19 nt, Artificial Sequence
  Description of Artificial Sequence: Synthetic oligonucleotide
gugucucaagggaaggacu

SEQ ID NO: 1776774 - RNA, 19 nt, Artificial Sequence
  Description of Artificial Sequence: Synthetic oligonucleotide
cguugauuccagcuaucac

SEQ ID NO: 1776775 - RNA, 19 nt, Artificial Sequence
  Description of Artificial Sequence: Synthetic oligonucleotide
ucgaacuuccugggacaau

SEQ ID NO: 1776776 - RNA, 19 nt, Artificial Sequence
  Description of Artificial Sequence: Synthetic oligonucleotide
gcacguuaucauuuucucu

SEQ ID NO: 1776777 - RNA, 19 nt, Artificial Sequence
  Description of Artificial Sequence: Synthetic oligonucleotide
gaacucuacccugcuggua

SEQ ID NO: 1776778 - RNA, 19 nt, Artificial Sequence
  Description of Artificial Sequence: Synthetic oligonucleotide
guaucgggguccucuugua

SEQ ID NO: 1776779 - RNA, 19 nt, Artificial Sequence
  Description of Artificial Sequence: Synthetic oligonucleotide
guaacucagcugguagugu

SEQ ID NO: 1776780 - RNA, 19 nt, Artificial Sequence
  Description of Artificial Sequence: Synthetic oligonucleotide
gguaugagucaaguaacau

SEQ ID NO: 1776781 - RNA, 19 nt, Artificial Sequence
  Description of Artificial Sequence: Synthetic oligonucleotide
guguuccguuacugcugcc

SEQ ID NO: 1776782 - RNA, 19 nt, Artificial Sequence
  Description of Artificial Sequence: Synthetic oligonucleotide
gcguugauuccagcuauca

SEQ ID NO: 1776783 - RNA, 19 nt, Artificial Sequence
  Description of Artificial Sequence: Synthetic oligonucleotide
cagcauuaucugggcgaag

SEQ ID NO: 1776784 - RNA, 19 nt, Artificial Sequence
  Description of Artificial Sequence: Synthetic oligonucleotide
cguugaaccaaaugugucu

SEQ ID NO: 1776785 - RNA, 19 nt, Artificial Sequence
  Description of Artificial Sequence: Synthetic oligonucleotide
caaaccugauguacacgau

SEQ ID NO: 1776786 - RNA, 19 nt, Artificial Sequence
  Description of Artificial Sequence: Synthetic oligonucleotide
gggguugguaugagucaag

SEQ ID NO: 1776787 - RNA, 19 nt, Artificial Sequence
  Description of Artificial Sequence: Synthetic oligonucleotide
cucgaacuuccugggacaa

SEQ ID NO: 1776788 - RNA, 19 nt, Artificial Sequence
  Description of Artificial Sequence: Synthetic oligonucleotide
ccacgaagcucuuucauau

SEQ ID NO: 1776789 - RNA, 19 nt, Artificial Sequence
  Description of Artificial Sequence: Synthetic oligonucleotide
gacuccuauguagccuucu

SEQ ID NO: 1776790 - RNA, 19 nt, Artificial Sequence
  Description of Artificial Sequence: Synthetic oligonucleotide
auacgacuagcagccccaa

SEQ ID NO: 1776791 - RNA, 19 nt, Artificial Sequence
  Description of Artificial Sequence: Synthetic oligonucleotide
gggcgaagugacaaacgga

SEQ ID NO: 1776792 - RNA, 19 nt, Artificial Sequence
  Description of Artificial Sequence: Synthetic oligonucleotide
ggaacucuacccugcuggu

SEQ ID NO: 1776793 - RNA, 19 nt, Artificial Sequence
  Description of Artificial Sequence: Synthetic oligonucleotide
gccguugaaccaaaugugu

SEQ ID NO: 1776794 - RNA, 19 nt, Artificial Sequence
  Description of Artificial Sequence: Synthetic oligonucleotide
cauagccuggaugaaccau

SEQ ID NO: 1776795 - RNA, 19 nt, Artificial Sequence
  Description of Artificial Sequence: Synthetic oligonucleotide
gucaaguaacauggcaguu

SEQ ID NO: 1776796 - RNA, 19 nt, Artificial Sequence
  Description of Artificial Sequence: Synthetic oligonucleotide
ggacaaucucauccacucu

SEQ ID NO: 1776797 - RNA, 19 nt, Artificial Sequence
  Description of Artificial Sequence: Synthetic oligonucleotide
caaugacacaucccugauu

SEQ ID NO: 1776798 - RNA, 19 nt, Artificial Sequence
  Description of Artificial Sequence: Synthetic oligonucleotide
agccucugaugcacguuau

SEQ ID NO: 1776799 - RNA, 19 nt, Artificial Sequence
  Description of Artificial Sequence: Synthetic oligonucleotide
gguuugguguuccguuacu

SEQ ID NO: 1776800 - RNA, 19 nt, Artificial Sequence
  Description of Artificial Sequence: Synthetic oligonucleotide
gcugguaaacaugcgguau

SEQ ID NO: 1776801 - RNA, 19 nt, Artificial Sequence
  Description of Artificial Sequence: Synthetic oligonucleotide
cucgcugaaccuccuuuau

SEQ ID NO: 1776802 - RNA, 19 nt, Artificial Sequence
  Description of Artificial Sequence: Synthetic oligonucleotide
gcgguaugguucacuggug

SEQ ID NO: 1776803 - RNA, 19 nt, Artificial Sequence
  Description of Artificial Sequence: Synthetic oligonucleotide
auaucgcuguggggacaca

SEQ ID NO: 1776804 - RNA, 19 nt, Artificial Sequence
  Description of Artificial Sequence: Synthetic oligonucleotide
aggucuuguggcaguugua

SEQ ID NO: 1776805 - RNA, 19 nt, Artificial Sequence
  Description of Artificial Sequence: Synthetic oligonucleotide
cauaaccagugguuccauu

SEQ ID NO: 1776806 - RNA, 19 nt, Artificial Sequence
  Description of Artificial Sequence: Synthetic oligonucleotide
gguaaacaugcgguauggu

SEQ ID NO: 1776807 - RNA, 19 nt, Artificial Sequence
  Description of Artificial Sequence: Synthetic oligonucleotide
aggcuucuauuaacacuua

SEQ ID NO: 1776808 - RNA, 19 nt, Artificial Sequence
  Description of Artificial Sequence: Synthetic oligonucleotide
ggcggcugucagcauuauc

SEQ ID NO: 1776809 - RNA, 19 nt, Artificial Sequence
  Description of Artificial Sequence: Synthetic oligonucleotide
cauuggcuaguaaguccau

SEQ ID NO: 1776810 - RNA, 19 nt, Artificial Sequence
  Description of Artificial Sequence: Synthetic oligonucleotide
ggcguugauuccagcuauc

SEQ ID NO: 1776811 - RNA, 19 nt, Artificial Sequence
  Description of Artificial Sequence: Synthetic oligonucleotide
gggcgacucauguguagcu

SEQ ID NO: 1776812 - RNA, 19 nt, Artificial Sequence
  Description of Artificial Sequence: Synthetic oligonucleotide
cucggaaugugaggcggcu

SEQ ID NO: 1776813 - RNA, 19 nt, Artificial Sequence
  Description of Artificial Sequence: Synthetic oligonucleotide
cgcugaaccuccuuuauuu

SEQ ID NO: 1776814 - RNA, 19 nt, Artificial Sequence
  Description of Artificial Sequence: Synthetic oligonucleotide
caauagucugugggcgacu

SEQ ID NO: 1776815 - RNA, 19 nt, Artificial Sequence
  Description of Artificial Sequence: Synthetic oligonucleotide
gguuccaaccaaaccugau

SEQ ID NO: 1776816 - RNA, 19 nt, Artificial Sequence
  Description of Artificial Sequence: Synthetic oligonucleotide
ggcuugauccacacuguuu

SEQ ID NO: 1776817 - RNA, 19 nt, Artificial Sequence
  Description of Artificial Sequence: Synthetic oligonucleotide
gcauccuuaugggcucgga

SEQ ID NO: 1776818 - RNA, 19 nt, Artificial Sequence
  Description of Artificial Sequence: Synthetic oligonucleotide
ccuuaugggcucggaaugu

SEQ ID NO: 1776819 - RNA, 19 nt, Artificial Sequence
  Description of Artificial Sequence: Synthetic oligonucleotide
aggcggcugucagcauuau

SEQ ID NO: 1776820 - RNA, 19 nt, Artificial Sequence
  Description of Artificial Sequence: Synthetic oligonucleotide
ggcgacucauguguagcuu

SEQ ID NO: 1776821 - RNA, 19 nt, Artificial Sequence
  Description of Artificial Sequence: Synthetic oligonucleotide
cguuacugcugccugucuu

SEQ ID NO: 1776822 - RNA, 19 nt, Artificial Sequence
  Description of Artificial Sequence: Synthetic oligonucleotide
cauccacucugggguuggu

SEQ ID NO: 1776823 - RNA, 19 nt, Artificial Sequence
  Description of Artificial Sequence: Synthetic oligonucleotide
ccguuacugcugccugucu

SEQ ID NO: 1776824 - RNA, 19 nt, Artificial Sequence
  Description of Artificial Sequence: Synthetic oligonucleotide
ugaaaggccacucuggggc

SEQ ID NO: 1776825 - RNA, 19 nt, Artificial Sequence
  Description of Artificial Sequence: Synthetic oligonucleotide
uaaccacaacuuaagaggg

SEQ ID NO: 1776826 - RNA, 19 nt, Artificial Sequence
  Description of Artificial Sequence: Synthetic oligonucleotide
ugacuuuugcuguagaagc

SEQ ID NO: 1776827 - RNA, 19 nt, Artificial Sequence
  Description of Artificial Sequence: Synthetic oligonucleotide
aaagguucggggucgcgcc

SEQ ID NO: 1776828 - RNA, 19 nt, Artificial Sequence
  Description of Artificial Sequence: Synthetic oligonucleotide
ucuguaaacauugcuagcc

SEQ ID NO: 1776829 - RNA, 19 nt, Artificial Sequence
  Description of Artificial Sequence: Synthetic oligonucleotide
caugcagagaggcugagcg

SEQ ID NO: 1776830 - RNA, 19 nt, Artificial Sequence
  Description of Artificial Sequence: Synthetic oligonucleotide
cucaauugccaucucaugg

SEQ ID NO: 1776831 - RNA, 19 nt, Artificial Sequence
  Description of Artificial Sequence: Synthetic oligonucleotide
uguagaagccucuggauug

SEQ ID NO: 1776832 - RNA, 19 nt, Artificial Sequence
  Description of Artificial Sequence: Synthetic oligonucleotide
cacgcuaccauacaggggc

SEQ ID NO: 1776833 - RNA, 19 nt, Artificial Sequence
  Description of Artificial Sequence: Synthetic oligonucleotide
aguaaacagggguucuugc

SEQ ID NO: 1776834 - RNA, 19 nt, Artificial Sequence
  Description of Artificial Sequence: Synthetic oligonucleotide
ugcgaugucgucuagcggc

SEQ ID NO: 1776835 - RNA, 19 nt, Artificial Sequence
  Description of Artificial Sequence: Synthetic oligonucleotide
aaaagguucggggucgcgc

SEQ ID NO: 1776836 - RNA, 19 nt, Artificial Sequence
  Description of Artificial Sequence: Synthetic oligonucleotide
uaccaugcuaaccacaacu

SEQ ID NO: 1776837 - RNA, 19 nt, Artificial Sequence
  Description of Artificial Sequence: Synthetic oligonucleotide
ucucaugguauaaggaccc

SEQ ID NO: 1776838 - RNA, 19 nt, Artificial Sequence
  Description of Artificial Sequence: Synthetic oligonucleotide
ucuguuaccccucuccagc

SEQ ID NO: 1776839 - RNA, 19 nt, Artificial Sequence
  Description of Artificial Sequence: Synthetic oligonucleotide
agaucaugugugcggaacc

SEQ ID NO: 1776840 - RNA, 19 nt, Artificial Sequence
  Description of Artificial Sequence: Synthetic oligonucleotide
caucucaugguauaaggac

SEQ ID NO: 1776841 - RNA, 19 nt, Artificial Sequence
  Description of Artificial Sequence: Synthetic oligonucleotide
accacaacuuaagaggggc

SEQ ID NO: 1776842 - RNA, 19 nt, Artificial Sequence
  Description of Artificial Sequence: Synthetic oligonucleotide
agugucugcaccuucagau

SEQ ID NO: 1776843 - RNA, 19 nt, Artificial Sequence
  Description of Artificial Sequence: Synthetic oligonucleotide
ucaauugccaucucauggu

SEQ ID NO: 1776844 - RNA, 19 nt, Artificial Sequence
  Description of Artificial Sequence: Synthetic oligonucleotide
gagguuugugccuuucagg

SEQ ID NO: 1776845 - RNA, 19 nt, Artificial Sequence
  Description of Artificial Sequence: Synthetic oligonucleotide
agcuuaggggaucccaacc

SEQ ID NO: 1776846 - RNA, 19 nt, Artificial Sequence
  Description of Artificial Sequence: Synthetic oligonucleotide
aagggugagaucaugugug

SEQ ID NO: 1776847 - RNA, 19 nt, Artificial Sequence
  Description of Artificial Sequence: Synthetic oligonucleotide
augguauaaggaccccugc

SEQ ID NO: 1776848 - RNA, 19 nt, Artificial Sequence
  Description of Artificial Sequence: Synthetic oligonucleotide
acuggcaagggugagauca

SEQ ID NO: 1776849 - RNA, 19 nt, Artificial Sequence
  Description of Artificial Sequence: Synthetic oligonucleotide
caccucaucaccuccauac

SEQ ID NO: 1776850 - RNA, 19 nt, Artificial Sequence
  Description of Artificial Sequence: Synthetic oligonucleotide
ggucuguaaacauugcuag

SEQ ID NO: 1776851 - RNA, 19 nt, Artificial Sequence
  Description of Artificial Sequence: Synthetic oligonucleotide
ucgucuagcggcucaauug

SEQ ID NO: 1776852 - RNA, 19 nt, Artificial Sequence
  Description of Artificial Sequence: Synthetic oligonucleotide
cacacgcuaccauacaggg

SEQ ID NO: 1776853 - RNA, 19 nt, Artificial Sequence
  Description of Artificial Sequence: Synthetic oligonucleotide
uggucuguaaacauugcua

SEQ ID NO: 1776854 - RNA, 19 nt, Artificial Sequence
  Description of Artificial Sequence: Synthetic oligonucleotide
gcuaaccacaacuuaagag

SEQ ID NO: 1776855 - RNA, 19 nt, Artificial Sequence
  Description of Artificial Sequence: Synthetic oligonucleotide
agagguuugugccuuucag

SEQ ID NO: 1776856 - RNA, 19 nt, Artificial Sequence
  Description of Artificial Sequence: Synthetic oligonucleotide
guaaacauugcuagccagg

SEQ ID NO: 1776857 - RNA, 19 nt, Artificial Sequence
  Description of Artificial Sequence: Synthetic oligonucleotide
agggguuucgauuuucaug

SEQ ID NO: 1776858 - RNA, 19 nt, Artificial Sequence
  Description of Artificial Sequence: Synthetic oligonucleotide
aauaguaaacagggguucu

SEQ ID NO: 1776859 - RNA, 19 nt, Artificial Sequence
  Description of Artificial Sequence: Synthetic oligonucleotide
uucucugcucuccacccgg

SEQ ID NO: 1776860 - RNA, 19 nt, Artificial Sequence
  Description of Artificial Sequence: Synthetic oligonucleotide
uguugauggcaauaguaaa

SEQ ID NO: 1776861 - RNA, 19 nt, Artificial Sequence
  Description of Artificial Sequence: Synthetic oligonucleotide
uucgauuuucaugacuuca

SEQ ID NO: 1776862 - RNA, 19 nt, Artificial Sequence
  Description of Artificial Sequence: Synthetic oligonucleotide
acagcgcuggaccuagggc

SEQ ID NO: 1776863 - RNA, 19 nt, Artificial Sequence
  Description of Artificial Sequence: Synthetic oligonucleotide
uaagaggggcuucuguuac

SEQ ID NO: 1776864 - RNA, 19 nt, Artificial Sequence
  Description of Artificial Sequence: Synthetic oligonucleotide
ugugcggaacccaucuugc

SEQ ID NO: 1776865 - RNA, 19 nt, Artificial Sequence
  Description of Artificial Sequence: Synthetic oligonucleotide
gagugucccauucuguagc

SEQ ID NO: 1776866 - RNA, 19 nt, Artificial Sequence
  Description of Artificial Sequence: Synthetic oligonucleotide
agggguugcguccagguug

SEQ ID NO: 1776867 - RNA, 19 nt, Artificial Sequence
  Description of Artificial Sequence: Synthetic oligonucleotide
guugcguccagguugggac

SEQ ID NO: 1776868 - RNA, 19 nt, Artificial Sequence
  Description of Artificial Sequence: Synthetic oligonucleotide
guauaaggaccccugcuug

SEQ ID NO: 1776869 - RNA, 19 nt, Artificial Sequence
  Description of Artificial Sequence: Synthetic oligonucleotide
cugacuuuugcuguagaag

SEQ ID NO: 1776870 - RNA, 19 nt, Artificial Sequence
  Description of Artificial Sequence: Synthetic oligonucleotide
guugauggcaauaguaaac

SEQ ID NO: 1776871 - RNA, 19 nt, Artificial Sequence
  Description of Artificial Sequence: Synthetic oligonucleotide
aggauugggacuguucccg

SEQ ID NO: 1776872 - RNA, 19 nt, Artificial Sequence
  Description of Artificial Sequence: Synthetic oligonucleotide
gggguuucgauuuucauga

SEQ ID NO: 1776873 - RNA, 19 nt, Artificial Sequence
  Description of Artificial Sequence: Synthetic oligonucleotide
uccaguaacaaaagagguu

SEQ ID NO: 1776874 - RNA, 19 nt, Artificial Sequence
  Description of Artificial Sequence: Synthetic oligonucleotide
uggcaauaguaaacagggg

SEQ ID NO: 1776875 - RNA, 19 nt, Artificial Sequence
  Description of Artificial Sequence: Synthetic oligonucleotide
ucuagcggcucaauugcca

SEQ ID NO: 1776876 - RNA, 19 nt, Artificial Sequence
  Description of Artificial Sequence: Synthetic oligonucleotide
ugguauaaggaccccugcu

SEQ ID NO: 1776877 - RNA, 19 nt, Artificial Sequence
  Description of Artificial Sequence: Synthetic oligonucleotide
auaaggaccccugcuuggc

SEQ ID NO: 1776878 - RNA, 19 nt, Artificial Sequence
  Description of Artificial Sequence: Synthetic oligonucleotide
uucggggucgcgcccaagg

SEQ ID NO: 1776879 - RNA, 19 nt, Artificial Sequence
  Description of Artificial Sequence: Synthetic oligonucleotide
uaggggaucccaaccaacu

SEQ ID NO: 1776880 - RNA, 19 nt, Artificial Sequence
  Description of Artificial Sequence: Synthetic oligonucleotide
caugcuaaccacaacuuaa

SEQ ID NO: 1776881 - RNA, 19 nt, Artificial Sequence
  Description of Artificial Sequence: Synthetic oligonucleotide
gaucccaaccaacuccagc

SEQ ID NO: 1776882 - RNA, 19 nt, Artificial Sequence
  Description of Artificial Sequence: Synthetic oligonucleotide
agcuaggcaaggcaggcug

SEQ ID NO: 1776883 - RNA, 19 nt, Artificial Sequence
  Description of Artificial Sequence: Synthetic oligonucleotide
caaccgagcgagaagcccc

SEQ ID NO: 1776884 - RNA, 19 nt, Artificial Sequence
  Description of Artificial Sequence: Synthetic oligonucleotide
ucaugucaaagaagagcug

SEQ ID NO: 1776885 - RNA, 19 nt, Artificial Sequence
  Description of Artificial Sequence: Synthetic oligonucleotide
aagguucggggucgcgccc

SEQ ID NO: 1776886 - RNA, 19 nt, Artificial Sequence
  Description of Artificial Sequence: Synthetic oligonucleotide
ccaguuuucucccaggaag

SEQ ID NO: 1776887 - RNA, 19 nt, Artificial Sequence
  Description of Artificial Sequence: Synthetic oligonucleotide
ugcggaacccaucuugcac

SEQ ID NO: 1776888 - RNA, 19 nt, Artificial Sequence
  Description of Artificial Sequence: Synthetic oligonucleotide
uggugccucucucacacug

SEQ ID NO: 1776889 - RNA, 19 nt, Artificial Sequence
  Description of Artificial Sequence: Synthetic oligonucleotide
acaacuuaagaggggcuuc

SEQ ID NO: 1776890 - RNA, 19 nt, Artificial Sequence
  Description of Artificial Sequence: Synthetic oligonucleotide
ugucaugcagagaggcuga

SEQ ID NO: 1776891 - RNA, 19 nt, Artificial Sequence
  Description of Artificial Sequence: Synthetic oligonucleotide
uuaggggaucccaaccaac

SEQ ID NO: 1776892 - RNA, 19 nt, Artificial Sequence
  Description of Artificial Sequence: Synthetic oligonucleotide
uaguaaacagggguucuug

SEQ ID NO: 1776893 - RNA, 19 nt, Artificial Sequence
  Description of Artificial Sequence: Synthetic oligonucleotide
acccuagucuccuuguuga

SEQ ID NO: 1776894 - RNA, 19 nt, Artificial Sequence
  Description of Artificial Sequence: Synthetic oligonucleotide
gaugcccugacacgcuucc

SEQ ID NO: 1776895 - RNA, 19 nt, Artificial Sequence
  Description of Artificial Sequence: Synthetic oligonucleotide
gacuuuugcuguagaagcc

SEQ ID NO: 1776896 - RNA, 19 nt, Artificial Sequence
  Description of Artificial Sequence: Synthetic oligonucleotide
cugaggguaccacuugcgg

SEQ ID NO: 1776897 - RNA, 19 nt, Artificial Sequence
  Description of Artificial Sequence: Synthetic oligonucleotide
gugaaaggccacucugggg

SEQ ID NO: 1776898 - RNA, 19 nt, Artificial Sequence
  Description of Artificial Sequence: Synthetic oligonucleotide
uuugucaccucaucaccuc

SEQ ID NO: 1776899 - RNA, 19 nt, Artificial Sequence
  Description of Artificial Sequence: Synthetic oligonucleotide
ugucaaagaagagcugcca

SEQ ID NO: 1776900 - RNA, 19 nt, Artificial Sequence
  Description of Artificial Sequence: Synthetic oligonucleotide
aaccacaacuuaagagggg

SEQ ID NO: 1776901 - RNA, 19 nt, Artificial Sequence
  Description of Artificial Sequence: Synthetic oligonucleotide
augugugcggaacccaucu

SEQ ID NO: 1776902 - RNA, 19 nt, Artificial Sequence
  Description of Artificial Sequence: Synthetic oligonucleotide
ucagaucuccaguaacaaa

SEQ ID NO: 1776903 - RNA, 19 nt, Artificial Sequence
  Description of Artificial Sequence: Synthetic oligonucleotide
gaucaugugugcggaaccc

SEQ ID NO: 1776904 - RNA, 19 nt, Artificial Sequence
  Description of Artificial Sequence: Synthetic oligonucleotide
caauaguaaacagggguuc

SEQ ID NO: 1776905 - RNA, 19 nt, Artificial Sequence
  Description of Artificial Sequence: Synthetic oligonucleotide
gacccuagucuccuuguug

SEQ ID NO: 1776906 - RNA, 19 nt, Artificial Sequence
  Description of Artificial Sequence: Synthetic oligonucleotide
gugucaugcagagaggcug

SEQ ID NO: 1776907 - RNA, 19 nt, Artificial Sequence
  Description of Artificial Sequence: Synthetic oligonucleotide
cucuggauuguggggaucg

SEQ ID NO: 1776908 - RNA, 19 nt, Artificial Sequence
  Description of Artificial Sequence: Synthetic oligonucleotide
aagagcuuaggggauccca

SEQ ID NO: 1776909 - RNA, 19 nt, Artificial Sequence
  Description of Artificial Sequence: Synthetic oligonucleotide
ugagcggccagccggcagc

SEQ ID NO: 1776910 - RNA, 19 nt, Artificial Sequence
  Description of Artificial Sequence: Synthetic oligonucleotide
gucuguaaacauugcuagc

SEQ ID NO: 1776911 - RNA, 19 nt, Artificial Sequence
  Description of Artificial Sequence: Synthetic oligonucleotide
gaucuccaguaacaaaaga

SEQ ID NO: 1776912 - RNA, 19 nt, Artificial Sequence
  Description of Artificial Sequence: Synthetic oligonucleotide
uguccagugaugcccugac

SEQ ID NO: 1776913 - RNA, 19 nt, Artificial Sequence
  Description of Artificial Sequence: Synthetic oligonucleotide
aggggaucccaaccaacuc

SEQ ID NO: 1776914 - RNA, 19 nt, Artificial Sequence
  Description of Artificial Sequence: Synthetic oligonucleotide
uucuccucgugacuggcaa

SEQ ID NO: 1776915 - RNA, 19 nt, Artificial Sequence
  Description of Artificial Sequence: Synthetic oligonucleotide
uucagaucuccaguaacaa

SEQ ID NO: 1776916 - RNA, 19 nt, Artificial Sequence
  Description of Artificial Sequence: Synthetic oligonucleotide
gggucguuuucuuucuugg

SEQ ID NO: 1776917 - RNA, 19 nt, Artificial Sequence
  Description of Artificial Sequence: Synthetic oligonucleotide
gaggguguuugucaccuca

SEQ ID NO: 1776918 - RNA, 19 nt, Artificial Sequence
  Description of Artificial Sequence: Synthetic oligonucleotide
ggcaauaguaaacaggggu

SEQ ID NO: 1776919 - RNA, 19 nt, Artificial Sequence
  Description of Artificial Sequence: Synthetic oligonucleotide
guuugugccuuucaggacu

SEQ ID NO: 1776920 - RNA, 19 nt, Artificial Sequence
  Description of Artificial Sequence: Synthetic oligonucleotide
ucaugugugcggaacccau

SEQ ID NO: 1776921 - RNA, 19 nt, Artificial Sequence
  Description of Artificial Sequence: Synthetic oligonucleotide
gagaucaugugugcggaac

SEQ ID NO: 1776922 - RNA, 19 nt, Artificial Sequence
  Description of Artificial Sequence: Synthetic oligonucleotide
uccaguuuucucccaggaa

SEQ ID NO: 1776923 - RNA, 19 nt, Artificial Sequence
  Description of Artificial Sequence: Synthetic oligonucleotide
ugcacgagugucccauucu

SEQ ID NO: 1776924 - RNA, 19 nt, Artificial Sequence
  Description of Artificial Sequence: Synthetic oligonucleotide
aacagggguucuugcccag

SEQ ID NO: 1776925 - RNA, 19 nt, Artificial Sequence
  Description of Artificial Sequence: Synthetic oligonucleotide
uaccgguugcugaugcuga

SEQ ID NO: 1776926 - RNA, 19 nt, Artificial Sequence
  Description of Artificial Sequence: Synthetic oligonucleotide
gugcaaccgagcgagaagc

SEQ ID NO: 1776927 - RNA, 19 nt, Artificial Sequence
  Description of Artificial Sequence: Synthetic oligonucleotide
acauugcuagccagggugg

SEQ ID NO: 1776928 - RNA, 19 nt, Artificial Sequence
  Description of Artificial Sequence: Synthetic oligonucleotide
aguaccaugcuaaccacaa

SEQ ID NO: 1776929 - RNA, 19 nt, Artificial Sequence
  Description of Artificial Sequence: Synthetic oligonucleotide
ggaggggugcaaccgagcg

SEQ ID NO: 1776930 - RNA, 19 nt, Artificial Sequence
  Description of Artificial Sequence: Synthetic oligonucleotide
ucaugguauaaggaccccu

SEQ ID NO: 1776931 - RNA, 19 nt, Artificial Sequence
  Description of Artificial Sequence: Synthetic oligonucleotide
cagugaugcccugacacgc

SEQ ID NO: 1776932 - RNA, 19 nt, Artificial Sequence
  Description of Artificial Sequence: Synthetic oligonucleotide
cuaccauacaggggcagcc

SEQ ID NO: 1776933 - RNA, 19 nt, Artificial Sequence
  Description of Artificial Sequence: Synthetic oligonucleotide
uuugugccuuucaggacuc

SEQ ID NO: 1776934 - RNA, 19 nt, Artificial Sequence
  Description of Artificial Sequence: Synthetic oligonucleotide
gggacuggagccaugugcg

SEQ ID NO: 1776935 - RNA, 19 nt, Artificial Sequence
  Description of Artificial Sequence: Synthetic oligonucleotide
ugggccaagaggugaguac

SEQ ID NO: 1776936 - RNA, 19 nt, Artificial Sequence
  Description of Artificial Sequence: Synthetic oligonucleotide
ucgugacuggcaaggguga

SEQ ID NO: 1776937 - RNA, 19 nt, Artificial Sequence
  Description of Artificial Sequence: Synthetic oligonucleotide
ggcugguuagugcagggag

SEQ ID NO: 1776938 - RNA, 19 nt, Artificial Sequence
  Description of Artificial Sequence: Synthetic oligonucleotide
ucaucaccuccauaccggu

SEQ ID NO: 1776939 - RNA, 19 nt, Artificial Sequence
  Description of Artificial Sequence: Synthetic oligonucleotide
acuccgugcacgagugucc

SEQ ID NO: 1776940 - RNA, 19 nt, Artificial Sequence
  Description of Artificial Sequence: Synthetic oligonucleotide
ugcaaccgagcgagaagcc

SEQ ID NO: 1776941 - RNA, 19 nt, Artificial Sequence
  Description of Artificial Sequence: Synthetic oligonucleotide
auugcuagccagggugggg

SEQ ID NO: 1776942 - RNA, 19 nt, Artificial Sequence
  Description of Artificial Sequence: Synthetic oligonucleotide
gaugucugucacagcugcg

SEQ ID NO: 1776943 - RNA, 19 nt, Artificial Sequence
  Description of Artificial Sequence: Synthetic oligonucleotide
cacagcgcuggaccuaggg

SEQ ID NO: 1776944 - RNA, 19 nt, Artificial Sequence
  Description of Artificial Sequence: Synthetic oligonucleotide
ggcgucuccagccuugugc

SEQ ID NO: 1776945 - RNA, 19 nt, Artificial Sequence
  Description of Artificial Sequence: Synthetic oligonucleotide
ugccucucucacacugggg

SEQ ID NO: 1776946 - RNA, 19 nt, Artificial Sequence
  Description of Artificial Sequence: Synthetic oligonucleotide
gaugucgucuagcggcuca

SEQ ID NO: 1776947 - RNA, 19 nt, Artificial Sequence
  Description of Artificial Sequence: Synthetic oligonucleotide
aauugccaucucaugguau

SEQ ID NO: 1776948 - RNA, 19 nt, Artificial Sequence
  Description of Artificial Sequence: Synthetic oligonucleotide
aacuuaagaggggcuucug

SEQ ID NO: 1776949 - RNA, 19 nt, Artificial Sequence
  Description of Artificial Sequence: Synthetic oligonucleotide
ugugcggagcugacuuuug

SEQ ID NO: 1776950 - RNA, 19 nt, Artificial Sequence
  Description of Artificial Sequence: Synthetic oligonucleotide
augucugucacagcugcga

SEQ ID NO: 1776951 - RNA, 19 nt, Artificial Sequence
  Description of Artificial Sequence: Synthetic oligonucleotide
acagcgugggguaggcagc

SEQ ID NO: 1776952 - RNA, 19 nt, Artificial Sequence
  Description of Artificial Sequence: Synthetic oligonucleotide
acgagugucccauucugua

SEQ ID NO: 1776953 - RNA, 19 nt, Artificial Sequence
  Description of Artificial Sequence: Synthetic oligonucleotide
caguuuucucccaggaaga

SEQ ID NO: 1776954 - RNA, 19 nt, Artificial Sequence
  Description of Artificial Sequence: Synthetic oligonucleotide
gagcuuaggggaucccaac

SEQ ID NO: 1776955 - RNA, 19 nt, Artificial Sequence
  Description of Artificial Sequence: Synthetic oligonucleotide
ccucaucaccuccauaccg

SEQ ID NO: 1776956 - RNA, 19 nt, Artificial Sequence
  Description of Artificial Sequence: Synthetic oligonucleotide
gaaaagguucggggucgcg

SEQ ID NO: 1776957 - RNA, 19 nt, Artificial Sequence
  Description of Artificial Sequence: Synthetic oligonucleotide
cuccaguaacaaaagaggu

SEQ ID NO: 1776958 - RNA, 19 nt, Artificial Sequence
  Description of Artificial Sequence: Synthetic oligonucleotide
ucuccucgugacuggcaag

SEQ ID NO: 1776959 - RNA, 19 nt, Artificial Sequence
  Description of Artificial Sequence: Synthetic oligonucleotide
accuagggcccaguugccc

SEQ ID NO: 1776960 - RNA, 19 nt, Artificial Sequence
  Description of Artificial Sequence: Synthetic oligonucleotide
agcaggauugggacuguuc

SEQ ID NO: 1776961 - RNA, 19 nt, Artificial Sequence
  Description of Artificial Sequence: Synthetic oligonucleotide
ugcugcacccugaggguac

SEQ ID NO: 1776962 - RNA, 19 nt, Artificial Sequence
  Description of Artificial Sequence: Synthetic oligonucleotide
gaguggugugggccaagag

SEQ ID NO: 1776963 - RNA, 19 nt, Artificial Sequence
  Description of Artificial Sequence: Synthetic oligonucleotide
gaacccaucuugcacugcu

SEQ ID NO: 1776964 - RNA, 19 nt, Artificial Sequence
  Description of Artificial Sequence: Synthetic oligonucleotide
gcaagggugagaucaugug

SEQ ID NO: 1776965 - RNA, 19 nt, Artificial Sequence
  Description of Artificial Sequence: Synthetic oligonucleotide
cuugcggugggcuguguca

SEQ ID NO: 1776966 - RNA, 19 nt, Artificial Sequence
  Description of Artificial Sequence: Synthetic oligonucleotide
gcgagaagccccaagggag

SEQ ID NO: 1776967 - RNA, 19 nt, Artificial Sequence
  Description of Artificial Sequence: Synthetic oligonucleotide
gauugggacuguucccgga

SEQ ID NO: 1776968 - RNA, 19 nt, Artificial Sequence
  Description of Artificial Sequence: Synthetic oligonucleotide
ggucguuuucuuucuuggc

SEQ ID NO: 1776969 - RNA, 19 nt, Artificial Sequence
  Description of Artificial Sequence: Synthetic oligonucleotide
uaccacuugcggugggcug

SEQ ID NO: 1776970 - RNA, 19 nt, Artificial Sequence
  Description of Artificial Sequence: Synthetic oligonucleotide
ccaagaggugaguaccggg

SEQ ID NO: 1776971 - RNA, 19 nt, Artificial Sequence
  Description of Artificial Sequence: Synthetic oligonucleotide
aaggcaggcuggucuguaa

SEQ ID NO: 1776972 - RNA, 19 nt, Artificial Sequence
  Description of Artificial Sequence: Synthetic oligonucleotide
gacuccgugcacgaguguc

SEQ ID NO: 1776973 - RNA, 19 nt, Artificial Sequence
  Description of Artificial Sequence: Synthetic oligonucleotide
cauugcuagccaggguggg

SEQ ID NO: 1776974 - RNA, 19 nt, Artificial Sequence
  Description of Artificial Sequence: Synthetic oligonucleotide
cagcagugcuuccacuggc

SEQ ID NO: 1776975 - RNA, 19 nt, Artificial Sequence
  Description of Artificial Sequence: Synthetic oligonucleotide
cccaguugcccuugggucg

SEQ ID NO: 1776976 - RNA, 19 nt, Artificial Sequence
  Description of Artificial Sequence: Synthetic oligonucleotide
agggcagacuuguuccagu

SEQ ID NO: 1776977 - RNA, 19 nt, Artificial Sequence
  Description of Artificial Sequence: Synthetic oligonucleotide
acccggaggguguuuguca

SEQ ID NO: 1776978 - RNA, 19 nt, Artificial Sequence
  Description of Artificial Sequence: Synthetic oligonucleotide
ugagggugaaaggccacuc

SEQ ID NO: 1776979 - RNA, 19 nt, Artificial Sequence
  Description of Artificial Sequence: Synthetic oligonucleotide
ugcccuugggucguuuucu

SEQ ID NO: 1776980 - RNA, 19 nt, Artificial Sequence
  Description of Artificial Sequence: Synthetic oligonucleotide
caugugugcggaacccauc

SEQ ID NO: 1776981 - RNA, 19 nt, Artificial Sequence
  Description of Artificial Sequence: Synthetic oligonucleotide
uaccauacaggggcagcca

SEQ ID NO: 1776982 - RNA, 19 nt, Artificial Sequence
  Description of Artificial Sequence: Synthetic oligonucleotide
accgguugcugaugcugag

SEQ ID NO: 1776983 - RNA, 19 nt, Artificial Sequence
  Description of Artificial Sequence: Synthetic oligonucleotide
ggauugggacuguucccgg

SEQ ID NO: 1776984 - RNA, 19 nt, Artificial Sequence
  Description of Artificial Sequence: Synthetic oligonucleotide
gcacacgcuaccauacagg

SEQ ID NO: 1776985 - RNA, 19 nt, Artificial Sequence
  Description of Artificial Sequence: Synthetic oligonucleotide
gggguaggcagcaggauug

SEQ ID NO: 1776986 - RNA, 19 nt, Artificial Sequence
  Description of Artificial Sequence: Synthetic oligonucleotide
auccuguugcuggugccuc

SEQ ID NO: 1776987 - RNA, 19 nt, Artificial Sequence
  Description of Artificial Sequence: Synthetic oligonucleotide
ccuucagaucuccaguaac

SEQ ID NO: 1776988 - RNA, 19 nt, Artificial Sequence
  Description of Artificial Sequence: Synthetic oligonucleotide
uuguuccaguuuucuccca

SEQ ID NO: 1776989 - RNA, 19 nt, Artificial Sequence
  Description of Artificial Sequence: Synthetic oligonucleotide
acacgcuaccauacagggg

SEQ ID NO: 1776990 - RNA, 19 nt, Artificial Sequence
  Description of Artificial Sequence: Synthetic oligonucleotide
auaguaaacagggguucuu

SEQ ID NO: 1776991 - RNA, 19 nt, Artificial Sequence
  Description of Artificial Sequence: Synthetic oligonucleotide
aggaccccugcuuggccag

SEQ ID NO: 1776992 - RNA, 19 nt, Artificial Sequence
  Description of Artificial Sequence: Synthetic oligonucleotide
ucucugcucuccacccgga

SEQ ID NO: 1776993 - RNA, 19 nt, Artificial Sequence
  Description of Artificial Sequence: Synthetic oligonucleotide
uugcguccagguugggacu

SEQ ID NO: 1776994 - RNA, 19 nt, Artificial Sequence
  Description of Artificial Sequence: Synthetic oligonucleotide
uccauaccgguugcugaug

SEQ ID NO: 1776995 - RNA, 19 nt, Artificial Sequence
  Description of Artificial Sequence: Synthetic oligonucleotide
ugcuagggugagaguggug

SEQ ID NO: 1776996 - RNA, 19 nt, Artificial Sequence
  Description of Artificial Sequence: Synthetic oligonucleotide
gcugguuagugcagggagg

SEQ ID NO: 1776997 - RNA, 19 nt, Artificial Sequence
  Description of Artificial Sequence: Synthetic oligonucleotide
gccucucucacacugggga

SEQ ID NO: 1776998 - RNA, 19 nt, Artificial Sequence
  Description of Artificial Sequence: Synthetic oligonucleotide
caagggugagaucaugugu

SEQ ID NO: 1776999 - RNA, 19 nt, Artificial Sequence
  Description of Artificial Sequence: Synthetic oligonucleotide
gcuuaggggaucccaacca

SEQ ID NO: 1777000 - RNA, 19 nt, Artificial Sequence
  Description of Artificial Sequence: Synthetic oligonucleotide
gugcggagcugacuuuugc

SEQ ID NO: 1777001 - RNA, 19 nt, Artificial Sequence
  Description of Artificial Sequence: Synthetic oligonucleotide
cgagcgagaagccccaagg

SEQ ID NO: 1777002 - RNA, 19 nt, Artificial Sequence
  Description of Artificial Sequence: Synthetic oligonucleotide
gcugcuagggugagagugg

SEQ ID NO: 1777003 - RNA, 19 nt, Artificial Sequence
  Description of Artificial Sequence: Synthetic oligonucleotide
agccuugugcccucccgcu

SEQ ID NO: 1777004 - RNA, 19 nt, Artificial Sequence
  Description of Artificial Sequence: Synthetic oligonucleotide
uccacccggaggguguuug

SEQ ID NO: 1777005 - RNA, 19 nt, Artificial Sequence
  Description of Artificial Sequence: Synthetic oligonucleotide
gagaagccccaagggagug

SEQ ID NO: 1777006 - RNA, 19 nt, Artificial Sequence
  Description of Artificial Sequence: Synthetic oligonucleotide
cuuaggggaucccaaccaa

SEQ ID NO: 1777007 - RNA, 19 nt, Artificial Sequence
  Description of Artificial Sequence: Synthetic oligonucleotide
ugcccggacccuagucucc

SEQ ID NO: 1777008 - RNA, 19 nt, Artificial Sequence
  Description of Artificial Sequence: Synthetic oligonucleotide
cucaugguauaaggacccc

SEQ ID NO: 1777009 - RNA, 19 nt, Artificial Sequence
  Description of Artificial Sequence: Synthetic oligonucleotide
aggguaccacuugcggugg

SEQ ID NO: 1777010 - RNA, 19 nt, Artificial Sequence
  Description of Artificial Sequence: Synthetic oligonucleotide
gcgucuccagccuugugcc

SEQ ID NO: 1777011 - RNA, 19 nt, Artificial Sequence
  Description of Artificial Sequence: Synthetic oligonucleotide
guaccaugcuaaccacaac

SEQ ID NO: 1777012 - RNA, 19 nt, Artificial Sequence
  Description of Artificial Sequence: Synthetic oligonucleotide
acccugaggguaccacuug

SEQ ID NO: 1777013 - RNA, 19 nt, Artificial Sequence
  Description of Artificial Sequence: Synthetic oligonucleotide
gguuugugccuuucaggac

SEQ ID NO: 1777014 - RNA, 19 nt, Artificial Sequence
  Description of Artificial Sequence: Synthetic oligonucleotide
agagcuuaggggaucccaa

SEQ ID NO: 1777015 - RNA, 19 nt, Artificial Sequence
  Description of Artificial Sequence: Synthetic oligonucleotide
ugcguccagguugggacug

SEQ ID NO: 1777016 - RNA, 19 nt, Artificial Sequence
  Description of Artificial Sequence: Synthetic oligonucleotide
guagcuccccggcuugcug

SEQ ID NO: 1777017 - RNA, 19 nt, Artificial Sequence
  Description of Artificial Sequence: Synthetic oligonucleotide
gcacgagugucccauucug

SEQ ID NO: 1777018 - RNA, 19 nt, Artificial Sequence
  Description of Artificial Sequence: Synthetic oligonucleotide
gaagagcuuaggggauccc

SEQ ID NO: 1777019 - RNA, 19 nt, Artificial Sequence
  Description of Artificial Sequence: Synthetic oligonucleotide
ccauucuguagcuccccgg

SEQ ID NO: 1777020 - RNA, 19 nt, Artificial Sequence
  Description of Artificial Sequence: Synthetic oligonucleotide
uccccucaguaccaugcua

SEQ ID NO: 1777021 - RNA, 19 nt, Artificial Sequence
  Description of Artificial Sequence: Synthetic oligonucleotide
gggccaagaggugaguacc

SEQ ID NO: 1777022 - RNA, 19 nt, Artificial Sequence
  Description of Artificial Sequence: Synthetic oligonucleotide
gggugagaucaugugugcg

SEQ ID NO: 1777023 - RNA, 19 nt, Artificial Sequence
  Description of Artificial Sequence: Synthetic oligonucleotide
cugcccggacccuagucuc

SEQ ID NO: 1777024 - RNA, 19 nt, Artificial Sequence
  Description of Artificial Sequence: Synthetic oligonucleotide
cgucuagcggcucaauugc

SEQ ID NO: 1777025 - RNA, 19 nt, Artificial Sequence
  Description of Artificial Sequence: Synthetic oligonucleotide
cuugugcccucccgcuggg

SEQ ID NO: 1777026 - RNA, 19 nt, Artificial Sequence
  Description of Artificial Sequence: Synthetic oligonucleotide
guugggacuggggccacug

SEQ ID NO: 1777027 - RNA, 19 nt, Artificial Sequence
  Description of Artificial Sequence: Synthetic oligonucleotide
gggguucuugcccaguguc

SEQ ID NO: 1777028 - RNA, 19 nt, Artificial Sequence
  Description of Artificial Sequence: Synthetic oligonucleotide
guuuccggggugcaggggu

SEQ ID NO: 1777029 - RNA, 19 nt, Artificial Sequence
  Description of Artificial Sequence: Synthetic oligonucleotide
aggcaggcuggucuguaaa

SEQ ID NO: 1777030 - RNA, 19 nt, Artificial Sequence
  Description of Artificial Sequence: Synthetic oligonucleotide
ucaggacuccgugcacgag

SEQ ID NO: 1777031 - RNA, 19 nt, Artificial Sequence
  Description of Artificial Sequence: Synthetic oligonucleotide
ugugugcggaacccaucuu

SEQ ID NO: 1777032 - RNA, 19 nt, Artificial Sequence
  Description of Artificial Sequence: Synthetic oligonucleotide
ucaccucaucaccuccaua

SEQ ID NO: 1777033 - RNA, 19 nt, Artificial Sequence
  Description of Artificial Sequence: Synthetic oligonucleotide
ggagcuaggcaaggcaggc

SEQ ID NO: 1777034 - RNA, 19 nt, Artificial Sequence
  Description of Artificial Sequence: Synthetic oligonucleotide
aaccgagcgagaagcccca

SEQ ID NO: 1777035 - RNA, 19 nt, Artificial Sequence
  Description of Artificial Sequence: Synthetic oligonucleotide
cuccgugcacgaguguccc

SEQ ID NO: 1777036 - RNA, 19 nt, Artificial Sequence
  Description of Artificial Sequence: Synthetic oligonucleotide
ccauaccgguugcugaugc

SEQ ID NO: 1777037 - RNA, 19 nt, Artificial Sequence
  Description of Artificial Sequence: Synthetic oligonucleotide
ugcagggguuucgauuuuc

SEQ ID NO: 1777038 - RNA, 19 nt, Artificial Sequence
  Description of Artificial Sequence: Synthetic oligonucleotide
uccccggcuugcugcaccc

SEQ ID NO: 1777039 - RNA, 19 nt, Artificial Sequence
  Description of Artificial Sequence: Synthetic oligonucleotide
gugcacgagugucccauuc

SEQ ID NO: 1777040 - RNA, 19 nt, Artificial Sequence
  Description of Artificial Sequence: Synthetic oligonucleotide
gggguugcguccagguugg

SEQ ID NO: 1777041 - RNA, 19 nt, Artificial Sequence
  Description of Artificial Sequence: Synthetic oligonucleotide
cagggcagacuuguuccag

SEQ ID NO: 1777042 - RNA, 19 nt, Artificial Sequence
  Description of Artificial Sequence: Synthetic oligonucleotide
gguauaaggaccccugcuu

SEQ ID NO: 1777043 - RNA, 19 nt, Artificial Sequence
  Description of Artificial Sequence: Synthetic oligonucleotide
agugaugcccugacacgcu

SEQ ID NO: 1777044 - RNA, 19 nt, Artificial Sequence
  Description of Artificial Sequence: Synthetic oligonucleotide
uuuccggggugcagggguu

SEQ ID NO: 1777045 - RNA, 19 nt, Artificial Sequence
  Description of Artificial Sequence: Synthetic oligonucleotide
gucuagcggcucaauugcc

SEQ ID NO: 1777046 - RNA, 19 nt, Artificial Sequence
  Description of Artificial Sequence: Synthetic oligonucleotide
gguuucgauuuucaugacu

SEQ ID NO: 1777047 - RNA, 19 nt, Artificial Sequence
  Description of Artificial Sequence: Synthetic oligonucleotide
augcccugacacgcuuccc

SEQ ID NO: 1777048 - RNA, 19 nt, Artificial Sequence
  Description of Artificial Sequence: Synthetic oligonucleotide
caccuucagaucuccagua

SEQ ID NO: 1777049 - RNA, 19 nt, Artificial Sequence
  Description of Artificial Sequence: Synthetic oligonucleotide
gcgugggguaggcagcagg

SEQ ID NO: 1777050 - RNA, 19 nt, Artificial Sequence
  Description of Artificial Sequence: Synthetic oligonucleotide
cuccccggcuugcugcacc

SEQ ID NO: 1777051 - RNA, 19 nt, Artificial Sequence
  Description of Artificial Sequence: Synthetic oligonucleotide
uugggucguuuucuuucuu

SEQ ID NO: 1777052 - RNA, 19 nt, Artificial Sequence
  Description of Artificial Sequence: Synthetic oligonucleotide
gccuuucaggacuccgugc

SEQ ID NO: 1777053 - RNA, 19 nt, Artificial Sequence
  Description of Artificial Sequence: Synthetic oligonucleotide
auacaggggcagccaggca

SEQ ID NO: 1777054 - RNA, 19 nt, Artificial Sequence
  Description of Artificial Sequence: Synthetic oligonucleotide
gccaagaggugaguaccgg

SEQ ID NO: 1777055 - RNA, 19 nt, Artificial Sequence
  Description of Artificial Sequence: Synthetic oligonucleotide
ggggucgcgcccaaggcag

SEQ ID NO: 1777056 - RNA, 19 nt, Artificial Sequence
  Description of Artificial Sequence: Synthetic oligonucleotide
gcaaccgagcgagaagccc

SEQ ID NO: 1777057 - RNA, 19 nt, Artificial Sequence
  Description of Artificial Sequence: Synthetic oligonucleotide
gcagcacacgcuaccauac

SEQ ID NO: 1777058 - RNA, 19 nt, Artificial Sequence
  Description of Artificial Sequence: Synthetic oligonucleotide
ggugcagggguuucgauuu

SEQ ID NO: 1777059 - RNA, 19 nt, Artificial Sequence
  Description of Artificial Sequence: Synthetic oligonucleotide
ggcucaugucaaagaagag

SEQ ID NO: 1777060 - RNA, 19 nt, Artificial Sequence
  Description of Artificial Sequence: Synthetic oligonucleotide
gcuagggugagaguggugu

SEQ ID NO: 1777061 - RNA, 19 nt, Artificial Sequence
  Description of Artificial Sequence: Synthetic oligonucleotide
gcuaccauacaggggcagc

SEQ ID NO: 1777062 - RNA, 19 nt, Artificial Sequence
  Description of Artificial Sequence: Synthetic oligonucleotide
augugcggagcugacuuuu

SEQ ID NO: 1777063 - RNA, 19 nt, Artificial Sequence
  Description of Artificial Sequence: Synthetic oligonucleotide
cagguugggacuggggcca

SEQ ID NO: 1777064 - RNA, 19 nt, Artificial Sequence
  Description of Artificial Sequence: Synthetic oligonucleotide
cuugcugcacccugagggu

SEQ ID NO: 1777065 - RNA, 19 nt, Artificial Sequence
  Description of Artificial Sequence: Synthetic oligonucleotide
agccaugugcggagcugac

SEQ ID NO: 1777066 - RNA, 19 nt, Artificial Sequence
  Description of Artificial Sequence: Synthetic oligonucleotide
gauccuguugcuggugccu

SEQ ID NO: 1777067 - RNA, 19 nt, Artificial Sequence
  Description of Artificial Sequence: Synthetic oligonucleotide
gcuaggcaaggcaggcugg

SEQ ID NO: 1777068 - RNA, 19 nt, Artificial Sequence
  Description of Artificial Sequence: Synthetic oligonucleotide
ccucaguaccaugcuaacc

SEQ ID NO: 1777069 - RNA, 19 nt, Artificial Sequence
  Description of Artificial Sequence: Synthetic oligonucleotide
gugcggaacccaucuugca

SEQ ID NO: 1777070 - RNA, 19 nt, Artificial Sequence
  Description of Artificial Sequence: Synthetic oligonucleotide
gaccuagggcccaguugcc

SEQ ID NO: 1777071 - RNA, 19 nt, Artificial Sequence
  Description of Artificial Sequence: Synthetic oligonucleotide
uugcugcacccugagggua

SEQ ID NO: 1777072 - RNA, 19 nt, Artificial Sequence
  Description of Artificial Sequence: Synthetic oligonucleotide
cccugaggguaccacuugc

SEQ ID NO: 1777073 - RNA, 19 nt, Artificial Sequence
  Description of Artificial Sequence: Synthetic oligonucleotide
ggguguuugucaccucauc

SEQ ID NO: 1777074 - RNA, 19 nt, Artificial Sequence
  Description of Artificial Sequence: Synthetic oligonucleotide
ggcuugcugcacccugagg

SEQ ID NO: 1777075 - RNA, 19 nt, Artificial Sequence
  Description of Artificial Sequence: Synthetic oligonucleotide
uccgugcacgaguguccca

SEQ ID NO: 1777076 - RNA, 19 nt, Artificial Sequence
  Description of Artificial Sequence: Synthetic oligonucleotide
gcaauaguaaacagggguu

SEQ ID NO: 1777077 - RNA, 19 nt, Artificial Sequence
  Description of Artificial Sequence: Synthetic oligonucleotide
gcuggucuguaaacauugc

SEQ ID NO: 1777078 - RNA, 19 nt, Artificial Sequence
  Description of Artificial Sequence: Synthetic oligonucleotide
gcaggcuggucuguaaaca

SEQ ID NO: 1777079 - RNA, 19 nt, Artificial Sequence
  Description of Artificial Sequence: Synthetic oligonucleotide
cuggagccaugugcggagc

SEQ ID NO: 1777080 - RNA, 19 nt, Artificial Sequence
  Description of Artificial Sequence: Synthetic oligonucleotide
ggcgagcaggaggagcuag

SEQ ID NO: 1777081 - RNA, 19 nt, Artificial Sequence
  Description of Artificial Sequence: Synthetic oligonucleotide
cuagcggcucaauugccau

SEQ ID NO: 1777082 - RNA, 19 nt, Artificial Sequence
  Description of Artificial Sequence: Synthetic oligonucleotide
ggauuguggggaucgcugu

SEQ ID NO: 1777083 - RNA, 19 nt, Artificial Sequence
  Description of Artificial Sequence: Synthetic oligonucleotide
gucgcgcccaaggcagggg

SEQ ID NO: 1777084 - RNA, 19 nt, Artificial Sequence
  Description of Artificial Sequence: Synthetic oligonucleotide
ggaaaagguucggggucgc

SEQ ID NO: 1777085 - RNA, 19 nt, Artificial Sequence
  Description of Artificial Sequence: Synthetic oligonucleotide
aggguguuugucaccucau

SEQ ID NO: 1777086 - RNA, 19 nt, Artificial Sequence
  Description of Artificial Sequence: Synthetic oligonucleotide
gcggaacccaucuugcacu

SEQ ID NO: 1777087 - RNA, 19 nt, Artificial Sequence
  Description of Artificial Sequence: Synthetic oligonucleotide
ccuccauaccgguugcuga

SEQ ID NO: 1777088 - RNA, 19 nt, Artificial Sequence
  Description of Artificial Sequence: Synthetic oligonucleotide
cccggaggguguuugucac

SEQ ID NO: 1777089 - RNA, 19 nt, Artificial Sequence
  Description of Artificial Sequence: Synthetic oligonucleotide
cacgagugucccauucugu

SEQ ID NO: 1777090 - RNA, 19 nt, Artificial Sequence
  Description of Artificial Sequence: Synthetic oligonucleotide
cuugcacugcugcuagggu

SEQ ID NO: 1777091 - RNA, 19 nt, Artificial Sequence
  Description of Artificial Sequence: Synthetic oligonucleotide
guagaagccucuggauugu

SEQ ID NO: 1777092 - RNA, 19 nt, Artificial Sequence
  Description of Artificial Sequence: Synthetic oligonucleotide
ggguuucgauuuucaugac

SEQ ID NO: 1777093 - RNA, 19 nt, Artificial Sequence
  Description of Artificial Sequence: Synthetic oligonucleotide
caacuuaagaggggcuucu

SEQ ID NO: 1777094 - RNA, 19 nt, Artificial Sequence
  Description of Artificial Sequence: Synthetic oligonucleotide
cuccauaccgguugcugau

SEQ ID NO: 1777095 - RNA, 19 nt, Artificial Sequence
  Description of Artificial Sequence: Synthetic oligonucleotide
acagggguucuugcccagu

SEQ ID NO: 1777096 - RNA, 19 nt, Artificial Sequence
  Description of Artificial Sequence: Synthetic oligonucleotide
ugucgucuagcggcucaau

SEQ ID NO: 1777097 - RNA, 19 nt, Artificial Sequence
  Description of Artificial Sequence: Synthetic oligonucleotide
cccucaguaccaugcuaac

SEQ ID NO: 1777098 - RNA, 19 nt, Artificial Sequence
  Description of Artificial Sequence: Synthetic oligonucleotide
cagcacacgcuaccauaca

SEQ ID NO: 1777099 - RNA, 19 nt, Artificial Sequence
  Description of Artificial Sequence: Synthetic oligonucleotide
ccagcacuguccagugaug

SEQ ID NO: 1777100 - RNA, 19 nt, Artificial Sequence
  Description of Artificial Sequence: Synthetic oligonucleotide
cagcuccccugcccggacc

SEQ ID NO: 1777101 - RNA, 19 nt, Artificial Sequence
  Description of Artificial Sequence: Synthetic oligonucleotide
cacaacuuaagaggggcuu

SEQ ID NO: 1777102 - RNA, 19 nt, Artificial Sequence
  Description of Artificial Sequence: Synthetic oligonucleotide
cacccggaggguguuuguc

SEQ ID NO: 1777103 - RNA, 19 nt, Artificial Sequence
  Description of Artificial Sequence: Synthetic oligonucleotide
cucucacacuggggacugg

SEQ ID NO: 1777104 - RNA, 19 nt, Artificial Sequence
  Description of Artificial Sequence: Synthetic oligonucleotide
cuucaucacagcagugcuu

SEQ ID NO: 1777105 - RNA, 19 nt, Artificial Sequence
  Description of Artificial Sequence: Synthetic oligonucleotide
agccggcagcacacgcuac

SEQ ID NO: 1777106 - RNA, 19 nt, Artificial Sequence
  Description of Artificial Sequence: Synthetic oligonucleotide
ggucgcgcccaaggcaggg

SEQ ID NO: 1777107 - RNA, 19 nt, Artificial Sequence
  Description of Artificial Sequence: Synthetic oligonucleotide
ggcucaauugccaucucau

SEQ ID NO: 1777108 - RNA, 19 nt, Artificial Sequence
  Description of Artificial Sequence: Synthetic oligonucleotide
gcagggcagacuuguucca

SEQ ID NO: 1777109 - RNA, 19 nt, Artificial Sequence
  Description of Artificial Sequence: Synthetic oligonucleotide
gucgucuagcggcucaauu

SEQ ID NO: 1777110 - RNA, 19 nt, Artificial Sequence
  Description of Artificial Sequence: Synthetic oligonucleotide
aggccacucuggggccugc

SEQ ID NO: 1777111 - RNA, 19 nt, Artificial Sequence
  Description of Artificial Sequence: Synthetic oligonucleotide
gguugcguccagguuggga

SEQ ID NO: 1777112 - RNA, 19 nt, Artificial Sequence
  Description of Artificial Sequence: Synthetic oligonucleotide
guaccacuugcggugggcu

SEQ ID NO: 1777113 - RNA, 19 nt, Artificial Sequence
  Description of Artificial Sequence: Synthetic oligonucleotide
ggcaagggugagaucaugu

SEQ ID NO: 1777114 - RNA, 19 nt, Artificial Sequence
  Description of Artificial Sequence: Synthetic oligonucleotide
ccgguugcugaugcugagg

SEQ ID NO: 1777115 - RNA, 19 nt, Artificial Sequence
  Description of Artificial Sequence: Synthetic oligonucleotide
cauaccgguugcugaugcu

SEQ ID NO: 1777116 - RNA, 19 nt, Artificial Sequence
  Description of Artificial Sequence: Synthetic oligonucleotide
gggcccaguugcccuuggg

SEQ ID NO: 1777117 - RNA, 19 nt, Artificial Sequence
  Description of Artificial Sequence: Synthetic oligonucleotide
gccagccggcagcacacgc

SEQ ID NO: 1777118 - RNA, 19 nt, Artificial Sequence
  Description of Artificial Sequence: Synthetic oligonucleotide
gcagggguuucgauuuuca

SEQ ID NO: 1777119 - RNA, 19 nt, Artificial Sequence
  Description of Artificial Sequence: Synthetic oligonucleotide
gugccuuucaggacuccgu

SEQ ID NO: 1777120 - RNA, 19 nt, Artificial Sequence
  Description of Artificial Sequence: Synthetic oligonucleotide
ggaacccaucuugcacugc

SEQ ID NO: 1777121 - RNA, 19 nt, Artificial Sequence
  Description of Artificial Sequence: Synthetic oligonucleotide
cagccggcagcacacgcua

SEQ ID NO: 1777122 - RNA, 19 nt, Artificial Sequence
  Description of Artificial Sequence: Synthetic oligonucleotide
gugggccaagaggugagua

SEQ ID NO: 1777123 - RNA, 19 nt, Artificial Sequence
  Description of Artificial Sequence: Synthetic oligonucleotide
ccggacccuagucuccuug

SEQ ID NO: 1777124 - RNA, 19 nt, Artificial Sequence
  Description of Artificial Sequence: Synthetic oligonucleotide
ccggaggguguuugucacc

SEQ ID NO: 1777125 - RNA, 19 nt, Artificial Sequence
  Description of Artificial Sequence: Synthetic oligonucleotide
ccgagcgagaagccccaag

SEQ ID NO: 1777126 - RNA, 19 nt, Artificial Sequence
  Description of Artificial Sequence: Synthetic oligonucleotide
ggcccaguugcccuugggu

SEQ ID NO: 1777127 - RNA, 19 nt, Artificial Sequence
  Description of Artificial Sequence: Synthetic oligonucleotide
acgcuaccauacaggggca

SEQ ID NO: 1777128 - RNA, 19 nt, Artificial Sequence
  Description of Artificial Sequence: Synthetic oligonucleotide
cacccugaggguaccacuu

SEQ ID NO: 1777129 - RNA, 19 nt, Artificial Sequence
  Description of Artificial Sequence: Synthetic oligonucleotide
cagggguuucgauuuucau

SEQ ID NO: 1777130 - RNA, 19 nt, Artificial Sequence
  Description of Artificial Sequence: Synthetic oligonucleotide
gagcuaggcaaggcaggcu

SEQ ID NO: 1777131 - RNA, 19 nt, Artificial Sequence
  Description of Artificial Sequence: Synthetic oligonucleotide
gggaggggugcaaccgagc

SEQ ID NO: 1777132 - RNA, 19 nt, Artificial Sequence
  Description of Artificial Sequence: Synthetic oligonucleotide
cagcugcgaugucgucuag

SEQ ID NO: 1777133 - RNA, 19 nt, Artificial Sequence
  Description of Artificial Sequence: Synthetic oligonucleotide
gcggccagccggcagcaca

SEQ ID NO: 1777134 - RNA, 19 nt, Artificial Sequence
  Description of Artificial Sequence: Synthetic oligonucleotide
gcgcccaaggcagggguug

SEQ ID NO: 1777135 - RNA, 19 nt, Artificial Sequence
  Description of Artificial Sequence: Synthetic oligonucleotide
cuaggcaaggcaggcuggu

SEQ ID NO: 1777136 - RNA, 19 nt, Artificial Sequence
  Description of Artificial Sequence: Synthetic oligonucleotide
cggaacccaucuugcacug

SEQ ID NO: 1777137 - RNA, 19 nt, Artificial Sequence
  Description of Artificial Sequence: Synthetic oligonucleotide
cugagggugaaaggccacu

SEQ ID NO: 1777138 - RNA, 19 nt, Artificial Sequence
  Description of Artificial Sequence: Synthetic oligonucleotide
ggaggguguuugucaccuc

SEQ ID NO: 1777139 - RNA, 19 nt, Artificial Sequence
  Description of Artificial Sequence: Synthetic oligonucleotide
gcccaaggcagggguugcg

SEQ ID NO: 1777140 - RNA, 19 nt, Artificial Sequence
  Description of Artificial Sequence: Synthetic oligonucleotide
gggugcagggguuucgauu

SEQ ID NO: 1777141 - RNA, 19 nt, Artificial Sequence
  Description of Artificial Sequence: Synthetic oligonucleotide
aguugcccuugggucguuu

SEQ ID NO: 1777142 - RNA, 19 nt, Artificial Sequence
  Description of Artificial Sequence: Synthetic oligonucleotide
ccaugugcggagcugacuu

SEQ ID NO: 1777143 - RNA, 19 nt, Artificial Sequence
  Description of Artificial Sequence: Synthetic oligonucleotide
gcugcacccugaggguacc

SEQ ID NO: 1777144 - RNA, 19 nt, Artificial Sequence
  Description of Artificial Sequence: Synthetic oligonucleotide
caaggcaggcuggucugua

SEQ ID NO: 1777145 - RNA, 19 nt, Artificial Sequence
  Description of Artificial Sequence: Synthetic oligonucleotide
gcacccugaggguaccacu

SEQ ID NO: 1777146 - RNA, 19 nt, Artificial Sequence
  Description of Artificial Sequence: Synthetic oligonucleotide
caugugcggagcugacuuu

SEQ ID NO: 1777147 - RNA, 19 nt, Artificial Sequence
  Description of Artificial Sequence: Synthetic oligonucleotide
gcguccagguugggacugg

SEQ ID NO: 1777148 - RNA, 19 nt, Artificial Sequence
  Description of Artificial Sequence: Synthetic oligonucleotide
ggaccccugcuuggccagg

SEQ ID NO: 1777149 - RNA, 19 nt, Artificial Sequence
  Description of Artificial Sequence: Synthetic oligonucleotide
caucaccuccauaccgguu

SEQ ID NO: 1777150 - RNA, 19 nt, Artificial Sequence
  Description of Artificial Sequence: Synthetic oligonucleotide
ccacaacuuaagaggggcu

SEQ ID NO: 1777151 - RNA, 19 nt, Artificial Sequence
  Description of Artificial Sequence: Synthetic oligonucleotide
cgugacuggcaagggugag

SEQ ID NO: 1777152 - RNA, 19 nt, Artificial Sequence
  Description of Artificial Sequence: Synthetic oligonucleotide
gggucgcgcccaaggcagg

SEQ ID NO: 1777153 - RNA, 19 nt, Artificial Sequence
  Description of Artificial Sequence: Synthetic oligonucleotide
cuagggcccaguugcccuu

SEQ ID NO: 1777154 - RNA, 19 nt, Artificial Sequence
  Description of Artificial Sequence: Synthetic oligonucleotide
gggcgucuccagccuugug

SEQ ID NO: 1777155 - RNA, 19 nt, Artificial Sequence
  Description of Artificial Sequence: Synthetic oligonucleotide
cggcucaauugccaucuca

SEQ ID NO: 1777156 - RNA, 19 nt, Artificial Sequence
  Description of Artificial Sequence: Synthetic oligonucleotide
ccggcuugcugcacccuga

SEQ ID NO: 1777157 - RNA, 19 nt, Artificial Sequence
  Description of Artificial Sequence: Synthetic oligonucleotide
aggcgagcaggaggagcua

SEQ ID NO: 1777158 - RNA, 19 nt, Artificial Sequence
  Description of Artificial Sequence: Synthetic oligonucleotide
accgagcgagaagccccaa

SEQ ID NO: 1777159 - RNA, 19 nt, Artificial Sequence
  Description of Artificial Sequence: Synthetic oligonucleotide
cuggaccuagggcccaguu

SEQ ID NO: 1777160 - RNA, 19 nt, Artificial Sequence
  Description of Artificial Sequence: Synthetic oligonucleotide
cacugcugcuagggugaga

SEQ ID NO: 1777161 - RNA, 19 nt, Artificial Sequence
  Description of Artificial Sequence: Synthetic oligonucleotide
ccuccccacagcgcuggac

SEQ ID NO: 1777162 - RNA, 19 nt, Artificial Sequence
  Description of Artificial Sequence: Synthetic oligonucleotide
ccucgugacuggcaagggu

SEQ ID NO: 1777163 - RNA, 19 nt, Artificial Sequence
  Description of Artificial Sequence: Synthetic oligonucleotide
ccucuggauuguggggauc

SEQ ID NO: 1777164 - RNA, 19 nt, Artificial Sequence
  Description of Artificial Sequence: Synthetic oligonucleotide
ggacccuagucuccuuguu

SEQ ID NO: 1777165 - RNA, 19 nt, Artificial Sequence
  Description of Artificial Sequence: Synthetic oligonucleotide
cugcacccugaggguacca

SEQ ID NO: 1777166 - RNA, 19 nt, Artificial Sequence
  Description of Artificial Sequence: Synthetic oligonucleotide
gcgaugucgucuagcggcu

SEQ ID NO: 1777167 - RNA, 19 nt, Artificial Sequence
  Description of Artificial Sequence: Synthetic oligonucleotide
cuggugccucucucacacu

SEQ ID NO: 1777168 - RNA, 19 nt, Artificial Sequence
  Description of Artificial Sequence: Synthetic oligonucleotide
gcggcucaauugccaucuc

SEQ ID NO: 1777169 - RNA, 19 nt, Artificial Sequence
  Description of Artificial Sequence: Synthetic oligonucleotide
gguucggggucgcgcccaa

SEQ ID NO: 1777170 - RNA, 19 nt, Artificial Sequence
  Description of Artificial Sequence: Synthetic oligonucleotide
ggguugcguccagguuggg

SEQ ID NO: 1777171 - RNA, 19 nt, Artificial Sequence
  Description of Artificial Sequence: Synthetic oligonucleotide
ccggcagcacacgcuacca

SEQ ID NO: 1777172 - RNA, 19 nt, Artificial Sequence
  Description of Artificial Sequence: Synthetic oligonucleotide
cccaaccaacuccagcaau

SEQ ID NO: 1777173 - RNA, 19 nt, Artificial Sequence
  Description of Artificial Sequence: Synthetic oligonucleotide
gugcagggguuucgauuuu

SEQ ID NO: 1777174 - RNA, 19 nt, Artificial Sequence
  Description of Artificial Sequence: Synthetic oligonucleotide
ccggagccccagcacuguc

SEQ ID NO: 1777175 - RNA, 19 nt, Artificial Sequence
  Description of Artificial Sequence: Synthetic oligonucleotide
cggggucgcgcccaaggca

SEQ ID NO: 1777176 - RNA, 19 nt, Artificial Sequence
  Description of Artificial Sequence: Synthetic oligonucleotide
gccaugugcggagcugacu

SEQ ID NO: 1777177 - RNA, 19 nt, Artificial Sequence
  Description of Artificial Sequence: Synthetic oligonucleotide
gggcugugucaugcagaga

SEQ ID NO: 1777178 - RNA, 19 nt, Artificial Sequence
  Description of Artificial Sequence: Synthetic oligonucleotide
ggacuccgugcacgagugu

SEQ ID NO: 1777179 - RNA, 19 nt, Artificial Sequence
  Description of Artificial Sequence: Synthetic oligonucleotide
cgcccaaggcagggguugc

SEQ ID NO: 1777180 - RNA, 19 nt, Artificial Sequence
  Description of Artificial Sequence: Synthetic oligonucleotide
gcaaggcaggcuggucugu

SEQ ID NO: 1777181 - RNA, 19 nt, Artificial Sequence
  Description of Artificial Sequence: Synthetic oligonucleotide
gcugagcggccagccggca

SEQ ID NO: 1777182 - RNA, 19 nt, Artificial Sequence
  Description of Artificial Sequence: Synthetic oligonucleotide
ccgugcacgagugucccau

SEQ ID NO: 1777183 - RNA, 19 nt, Artificial Sequence
  Description of Artificial Sequence: Synthetic oligonucleotide
cccuagucuccuuguugau

SEQ ID NO: 1777184 - RNA, 19 nt, Artificial Sequence
  Description of Artificial Sequence: Synthetic oligonucleotide
cggacccuagucuccuugu

SEQ ID NO: 1777185 - RNA, 19 nt, Artificial Sequence
  Description of Artificial Sequence: Synthetic oligonucleotide
cgaugucgucuagcggcuc

SEQ ID NO: 1777186 - RNA, 19 nt, Artificial Sequence
  Description of Artificial Sequence: Synthetic oligonucleotide
cccaaggcagggguugcgu

SEQ ID NO: 1777187 - RNA, 19 nt, Artificial Sequence
  Description of Artificial Sequence: Synthetic oligonucleotide
gcccggacccuagucuccu

SEQ ID NO: 1777188 - RNA, 19 nt, Artificial Sequence
  Description of Artificial Sequence: Synthetic oligonucleotide
gcgcuggaccuagggccca

SEQ ID NO: 1777189 - RNA, 19 nt, Artificial Sequence
  Description of Artificial Sequence: Synthetic oligonucleotide
ggggcgucuccagccuugu

SEQ ID NO: 1777190 - RNA, 19 nt, Artificial Sequence
  Description of Artificial Sequence: Synthetic oligonucleotide
ccacccggaggguguuugu

SEQ ID NO: 1777191 - RNA, 19 nt, Artificial Sequence
  Description of Artificial Sequence: Synthetic oligonucleotide
ccccacagcgcuggaccua

SEQ ID NO: 1777192 - RNA, 19 nt, Artificial Sequence
  Description of Artificial Sequence: Synthetic oligonucleotide
cuccacccggaggguguuu

SEQ ID NO: 1777193 - RNA, 19 nt, Artificial Sequence
  Description of Artificial Sequence: Synthetic oligonucleotide
gcuccccugcccggacccu

SEQ ID NO: 1777194 - RNA, 19 nt, Artificial Sequence
  Description of Artificial Sequence: Synthetic oligonucleotide
cgugcacgagugucccauu

SEQ ID NO: 1777195 - RNA, 19 nt, Artificial Sequence
  Description of Artificial Sequence: Synthetic oligonucleotide
cggcagcacacgcuaccau

SEQ ID NO: 1777196 - RNA, 19 nt, Artificial Sequence
  Description of Artificial Sequence: Synthetic oligonucleotide
caguugcccuugggucguu

SEQ ID NO: 1777197 - RNA, 19 nt, Artificial Sequence
  Description of Artificial Sequence: Synthetic oligonucleotide
cgcgcccaaggcagggguu

SEQ ID NO: 1777198 - RNA, 19 nt, Artificial Sequence
  Description of Artificial Sequence: Synthetic oligonucleotide
ccccugcccggacccuagu

SEQ ID NO: 1777199 - RNA, 19 nt, Artificial Sequence
  Description of Artificial Sequence: Synthetic oligonucleotide
cccggacccuagucuccuu

SEQ ID NO: 1777200 - RNA, 19 nt, Artificial Sequence
  Description of Artificial Sequence: Synthetic oligonucleotide
aaaauuaggucacuuuccc

SEQ ID NO: 1777201 - RNA, 19 nt, Artificial Sequence
  Description of Artificial Sequence: Synthetic oligonucleotide
uguucaacuguccagagag

SEQ ID NO: 1777202 - RNA, 19 nt, Artificial Sequence
  Description of Artificial Sequence: Synthetic oligonucleotide
ucauauaccaugcuaagug

SEQ ID NO: 1777203 - RNA, 19 nt, Artificial Sequence
  Description of Artificial Sequence: Synthetic oligonucleotide
auuaucaccauuuacaaau

SEQ ID NO: 1777204 - RNA, 19 nt, Artificial Sequence
  Description of Artificial Sequence: Synthetic oligonucleotide
acuaucauuuauucaaggc

SEQ ID NO: 1777205 - RNA, 19 nt, Artificial Sequence
  Description of Artificial Sequence: Synthetic oligonucleotide
auuacuugauccugcaucc

SEQ ID NO: 1777206 - RNA, 19 nt, Artificial Sequence
  Description of Artificial Sequence: Synthetic oligonucleotide
cuugcuguaauccugaggc

SEQ ID NO: 1777207 - RNA, 19 nt, Artificial Sequence
  Description of Artificial Sequence: Synthetic oligonucleotide
uaucauuuauucaaggccc

SEQ ID NO: 1777208 - RNA, 19 nt, Artificial Sequence
  Description of Artificial Sequence: Synthetic oligonucleotide
aauuagacagccccuuccc

SEQ ID NO: 1777209 - RNA, 19 nt, Artificial Sequence
  Description of Artificial Sequence: Synthetic oligonucleotide
aauuaggucacuuucccca

SEQ ID NO: 1777210 - RNA, 19 nt, Artificial Sequence
  Description of Artificial Sequence: Synthetic oligonucleotide
ugagcaaaagauaauuuca

SEQ ID NO: 1777211 - RNA, 19 nt, Artificial Sequence
  Description of Artificial Sequence: Synthetic oligonucleotide
cuaucauuuauucaaggcc

SEQ ID NO: 1777212 - RNA, 19 nt, Artificial Sequence
  Description of Artificial Sequence: Synthetic oligonucleotide
aauuucauuccucaacuca

SEQ ID NO: 1777213 - RNA, 19 nt, Artificial Sequence
  Description of Artificial Sequence: Synthetic oligonucleotide
ucuccaaaagguuugagca

SEQ ID NO: 1777214 - RNA, 19 nt, Artificial Sequence
  Description of Artificial Sequence: Synthetic oligonucleotide
ucuccaauuagacagcccc

SEQ ID NO: 1777215 - RNA, 19 nt, Artificial Sequence
  Description of Artificial Sequence: Synthetic oligonucleotide
aacuuguaaaugaaacucc

SEQ ID NO: 1777216 - RNA, 19 nt, Artificial Sequence
  Description of Artificial Sequence: Synthetic oligonucleotide
auugaagcugacuugaugu

SEQ ID NO: 1777217 - RNA, 19 nt, Artificial Sequence
  Description of Artificial Sequence: Synthetic oligonucleotide
auaauuucauuccucaacu

SEQ ID NO: 1777218 - RNA, 19 nt, Artificial Sequence
  Description of Artificial Sequence: Synthetic oligonucleotide
ucguccuucagucugacgc

SEQ ID NO: 1777219 - RNA, 19 nt, Artificial Sequence
  Description of Artificial Sequence: Synthetic oligonucleotide
aagucugcuuguuuggccg

SEQ ID NO: 1777220 - RNA, 19 nt, Artificial Sequence
  Description of Artificial Sequence: Synthetic oligonucleotide
uccaacuuguaaaugaaac

SEQ ID NO: 1777221 - RNA, 19 nt, Artificial Sequence
  Description of Artificial Sequence: Synthetic oligonucleotide
aaugcaaagcuauccagga

SEQ ID NO: 1777222 - RNA, 19 nt, Artificial Sequence
  Description of Artificial Sequence: Synthetic oligonucleotide
aaugaaacuccccagugaa

SEQ ID NO: 1777223 - RNA, 19 nt, Artificial Sequence
  Description of Artificial Sequence: Synthetic oligonucleotide
aucuagguaagucugagca

SEQ ID NO: 1777224 - RNA, 19 nt, Artificial Sequence
  Description of Artificial Sequence: Synthetic oligonucleotide
uuuauucaagcucuggauc

SEQ ID NO: 1777225 - RNA, 19 nt, Artificial Sequence
  Description of Artificial Sequence: Synthetic oligonucleotide
uuauucaaggcccaguaau

SEQ ID NO: 1777226 - RNA, 19 nt, Artificial Sequence
  Description of Artificial Sequence: Synthetic oligonucleotide
acauucaccgcugauaggg

SEQ ID NO: 1777227 - RNA, 19 nt, Artificial Sequence
  Description of Artificial Sequence: Synthetic oligonucleotide
caaaugagaacacaggcuc

SEQ ID NO: 1777228 - RNA, 19 nt, Artificial Sequence
  Description of Artificial Sequence: Synthetic oligonucleotide
gauuguaccagcuccuggc

SEQ ID NO: 1777229 - RNA, 19 nt, Artificial Sequence
  Description of Artificial Sequence: Synthetic oligonucleotide
ugcuaaguguuuuacauuc

SEQ ID NO: 1777230 - RNA, 19 nt, Artificial Sequence
  Description of Artificial Sequence: Synthetic oligonucleotide
ugaaaacaggcacucgucc

SEQ ID NO: 1777231 - RNA, 19 nt, Artificial Sequence
  Description of Artificial Sequence: Synthetic oligonucleotide
ugauccugcauccauuagc

SEQ ID NO: 1777232 - RNA, 19 nt, Artificial Sequence
  Description of Artificial Sequence: Synthetic oligonucleotide
uuugagcacauuuuauuca

SEQ ID NO: 1777233 - RNA, 19 nt, Artificial Sequence
  Description of Artificial Sequence: Synthetic oligonucleotide
ucagcagugcaucuaagga

SEQ ID NO: 1777234 - RNA, 19 nt, Artificial Sequence
  Description of Artificial Sequence: Synthetic oligonucleotide
caaggauuguaccagcucc

SEQ ID NO: 1777235 - RNA, 19 nt, Artificial Sequence
  Description of Artificial Sequence: Synthetic oligonucleotide
ugguugaccugcuugagcc

SEQ ID NO: 1777236 - RNA, 19 nt, Artificial Sequence
  Description of Artificial Sequence: Synthetic oligonucleotide
aucaccugagaguggaggc

SEQ ID NO: 1777237 - RNA, 19 nt, Artificial Sequence
  Description of Artificial Sequence: Synthetic oligonucleotide
cugagcaaaagauaauuuc

SEQ ID NO: 1777238 - RNA, 19 nt, Artificial Sequence
  Description of Artificial Sequence: Synthetic oligonucleotide
cucauggcugaaaacaggc

SEQ ID NO: 1777239 - RNA, 19 nt, Artificial Sequence
  Description of Artificial Sequence: Synthetic oligonucleotide
auucauauaccaugcuaag

SEQ ID NO: 1777240 - RNA, 19 nt, Artificial Sequence
  Description of Artificial Sequence: Synthetic oligonucleotide
agcacagaucaccugagag

SEQ ID NO: 1777241 - RNA, 19 nt, Artificial Sequence
  Description of Artificial Sequence: Synthetic oligonucleotide
aggguugaaagucugcuug

SEQ ID NO: 1777242 - RNA, 19 nt, Artificial Sequence
  Description of Artificial Sequence: Synthetic oligonucleotide
cucauuuuaauccucacaa

SEQ ID NO: 1777243 - RNA, 19 nt, Artificial Sequence
  Description of Artificial Sequence: Synthetic oligonucleotide
ugaaggucuccaauuagac

SEQ ID NO: 1777244 - RNA, 19 nt, Artificial Sequence
  Description of Artificial Sequence: Synthetic oligonucleotide
caacuuguaaaugaaacuc

SEQ ID NO: 1777245 - RNA, 19 nt, Artificial Sequence
  Description of Artificial Sequence: Synthetic oligonucleotide
gucagggacgaccucaugg

SEQ ID NO: 1777246 - RNA, 19 nt, Artificial Sequence
  Description of Artificial Sequence: Synthetic oligonucleotide
uagcuauucacaguggagc

SEQ ID NO: 1777247 - RNA, 19 nt, Artificial Sequence
  Description of Artificial Sequence: Synthetic oligonucleotide
auugccacggcccgguugg

SEQ ID NO: 1777248 - RNA, 19 nt, Artificial Sequence
  Description of Artificial Sequence: Synthetic oligonucleotide
cuuguaaaugaaacucccc

SEQ ID NO: 1777249 - RNA, 19 nt, Artificial Sequence
  Description of Artificial Sequence: Synthetic oligonucleotide
ucagucugacgcaugaggu

SEQ ID NO: 1777250 - RNA, 19 nt, Artificial Sequence
  Description of Artificial Sequence: Synthetic oligonucleotide
uguguaaaucacagcaagu

SEQ ID NO: 1777251 - RNA, 19 nt, Artificial Sequence
  Description of Artificial Sequence: Synthetic oligonucleotide
agaguguucaacuguccag

SEQ ID NO: 1777252 - RNA, 19 nt, Artificial Sequence
  Description of Artificial Sequence: Synthetic oligonucleotide
gguauuaucaccauuuaca

SEQ ID NO: 1777253 - RNA, 19 nt, Artificial Sequence
  Description of Artificial Sequence: Synthetic oligonucleotide
uguccagagagcaaugcaa

SEQ ID NO: 1777254 - RNA, 19 nt, Artificial Sequence
  Description of Artificial Sequence: Synthetic oligonucleotide
cauggcugaaaacaggcac

SEQ ID NO: 1777255 - RNA, 19 nt, Artificial Sequence
  Description of Artificial Sequence: Synthetic oligonucleotide
uucaucucgaucuggggac

SEQ ID NO: 1777256 - RNA, 19 nt, Artificial Sequence
  Description of Artificial Sequence: Synthetic oligonucleotide
gugucugcaggguugaaag

SEQ ID NO: 1777257 - RNA, 19 nt, Artificial Sequence
  Description of Artificial Sequence: Synthetic oligonucleotide
aagguuugagcacauuuua

SEQ ID NO: 1777258 - RNA, 19 nt, Artificial Sequence
  Description of Artificial Sequence: Synthetic oligonucleotide
auuucauuccucaacucag

SEQ ID NO: 1777259 - RNA, 19 nt, Artificial Sequence
  Description of Artificial Sequence: Synthetic oligonucleotide
uuugcaggacagagaauag

SEQ ID NO: 1777260 - RNA, 19 nt, Artificial Sequence
  Description of Artificial Sequence: Synthetic oligonucleotide
uuaucaccauuuacaaaug

SEQ ID NO: 1777261 - RNA, 19 nt, Artificial Sequence
  Description of Artificial Sequence: Synthetic oligonucleotide
uugguucucaaauggucag

SEQ ID NO: 1777262 - RNA, 19 nt, Artificial Sequence
  Description of Artificial Sequence: Synthetic oligonucleotide
ugauagggaugcauugaag

SEQ ID NO: 1777263 - RNA, 19 nt, Artificial Sequence
  Description of Artificial Sequence: Synthetic oligonucleotide
cucgccaaugucauggagc

SEQ ID NO: 1777264 - RNA, 19 nt, Artificial Sequence
  Description of Artificial Sequence: Synthetic oligonucleotide
gucgcauagcuauucacag

SEQ ID NO: 1777265 - RNA, 19 nt, Artificial Sequence
  Description of Artificial Sequence: Synthetic oligonucleotide
auugucugcugcugguucg

SEQ ID NO: 1777266 - RNA, 19 nt, Artificial Sequence
  Description of Artificial Sequence: Synthetic oligonucleotide
uugucucuugcugaaagcc

SEQ ID NO: 1777267 - RNA, 19 nt, Artificial Sequence
  Description of Artificial Sequence: Synthetic oligonucleotide
ucauacucguuuuccaacu

SEQ ID NO: 1777268 - RNA, 19 nt, Artificial Sequence
  Description of Artificial Sequence: Synthetic oligonucleotide
auuuauucaaggcccagua

SEQ ID NO: 1777269 - RNA, 19 nt, Artificial Sequence
  Description of Artificial Sequence: Synthetic oligonucleotide
uucauuccucaacucagca

SEQ ID NO: 1777270 - RNA, 19 nt, Artificial Sequence
  Description of Artificial Sequence: Synthetic oligonucleotide
caauuagacagccccuucc

SEQ ID NO: 1777271 - RNA, 19 nt, Artificial Sequence
  Description of Artificial Sequence: Synthetic oligonucleotide
gaucaccugagaguggagg

SEQ ID NO: 1777272 - RNA, 19 nt, Artificial Sequence
  Description of Artificial Sequence: Synthetic oligonucleotide
ucucguuccucuuugcuaa

SEQ ID NO: 1777273 - RNA, 19 nt, Artificial Sequence
  Description of Artificial Sequence: Synthetic oligonucleotide
uugagcacauuuuauucaa

SEQ ID NO: 1777274 - RNA, 19 nt, Artificial Sequence
  Description of Artificial Sequence: Synthetic oligonucleotide
aucugaacuugcuguaauc

SEQ ID NO: 1777275 - RNA, 19 nt, Artificial Sequence
  Description of Artificial Sequence: Synthetic oligonucleotide
acgcaugaggucuucaucu

SEQ ID NO: 1777276 - RNA, 19 nt, Artificial Sequence
  Description of Artificial Sequence: Synthetic oligonucleotide
guauuaucaccauuuacaa

SEQ ID NO: 1777277 - RNA, 19 nt, Artificial Sequence
  Description of Artificial Sequence: Synthetic oligonucleotide
uuuauucaaggcccaguaa

SEQ ID NO: 1777278 - RNA, 19 nt, Artificial Sequence
  Description of Artificial Sequence: Synthetic oligonucleotide
gagauuugucucuugcuga

SEQ ID NO: 1777279 - RNA, 19 nt, Artificial Sequence
  Description of Artificial Sequence: Synthetic oligonucleotide
uacccaucuagguaagucu

SEQ ID NO: 1777280 - RNA, 19 nt, Artificial Sequence
  Description of Artificial Sequence: Synthetic oligonucleotide
aaguucuguuugcaggaca

SEQ ID NO: 1777281 - RNA, 19 nt, Artificial Sequence
  Description of Artificial Sequence: Synthetic oligonucleotide
cauuuuauucaagcucugg

SEQ ID NO: 1777282 - RNA, 19 nt, Artificial Sequence
  Description of Artificial Sequence: Synthetic oligonucleotide
aggcacucguccuucaguc

SEQ ID NO: 1777283 - RNA, 19 nt, Artificial Sequence
  Description of Artificial Sequence: Synthetic oligonucleotide
ugcuugagccaucuggacu

SEQ ID NO: 1777284 - RNA, 19 nt, Artificial Sequence
  Description of Artificial Sequence: Synthetic oligonucleotide
ugagcacauuuuauucaag

SEQ ID NO: 1777285 - RNA, 19 nt, Artificial Sequence
  Description of Artificial Sequence: Synthetic oligonucleotide
auuaggucacuuuccccag

SEQ ID NO: 1777286 - RNA, 19 nt, Artificial Sequence
  Description of Artificial Sequence: Synthetic oligonucleotide
ucgccaaugucauggagcu

SEQ ID NO: 1777287 - RNA, 19 nt, Artificial Sequence
  Description of Artificial Sequence: Synthetic oligonucleotide
uccugcaaggauuguacca

SEQ ID NO: 1777288 - RNA, 19 nt, Artificial Sequence
  Description of Artificial Sequence: Synthetic oligonucleotide
uagggaugcauugaagcug

SEQ ID NO: 1777289 - RNA, 19 nt, Artificial Sequence
  Description of Artificial Sequence: Synthetic oligonucleotide
uccagagagcaaugcaaag

SEQ ID NO: 1777290 - RNA, 19 nt, Artificial Sequence
  Description of Artificial Sequence: Synthetic oligonucleotide
gaccucauggcugaaaaca

SEQ ID NO: 1777291 - RNA, 19 nt, Artificial Sequence
  Description of Artificial Sequence: Synthetic oligonucleotide
cuugauucagcagugcauc

SEQ ID NO: 1777292 - RNA, 19 nt, Artificial Sequence
  Description of Artificial Sequence: Synthetic oligonucleotide
cauuuacaaaugagaacac

SEQ ID NO: 1777293 - RNA, 19 nt, Artificial Sequence
  Description of Artificial Sequence: Synthetic oligonucleotide
gagcaaugcaaagcuaucc

SEQ ID NO: 1777294 - RNA, 19 nt, Artificial Sequence
  Description of Artificial Sequence: Synthetic oligonucleotide
uuagacagccccuucccaa

SEQ ID NO: 1777295 - RNA, 19 nt, Artificial Sequence
  Description of Artificial Sequence: Synthetic oligonucleotide
ugcuuguuuggccggagac

SEQ ID NO: 1777296 - RNA, 19 nt, Artificial Sequence
  Description of Artificial Sequence: Synthetic oligonucleotide
agcaccaaagggaugauga

SEQ ID NO: 1777297 - RNA, 19 nt, Artificial Sequence
  Description of Artificial Sequence: Synthetic oligonucleotide
ugaaacuccccagugaauu

SEQ ID NO: 1777298 - RNA, 19 nt, Artificial Sequence
  Description of Artificial Sequence: Synthetic oligonucleotide
ggguggaaaaguaagaaac

SEQ ID NO: 1777299 - RNA, 19 nt, Artificial Sequence
  Description of Artificial Sequence: Synthetic oligonucleotide
aggucgcauagcuauucac

SEQ ID NO: 1777300 - RNA, 19 nt, Artificial Sequence
  Description of Artificial Sequence: Synthetic oligonucleotide
uucauauaccaugcuaagu

SEQ ID NO: 1777301 - RNA, 19 nt, Artificial Sequence
  Description of Artificial Sequence: Synthetic oligonucleotide
ugccacuaaggcauuggug

SEQ ID NO: 1777302 - RNA, 19 nt, Artificial Sequence
  Description of Artificial Sequence: Synthetic oligonucleotide
cauuagcucgccaauguca

SEQ ID NO: 1777303 - RNA, 19 nt, Artificial Sequence
  Description of Artificial Sequence: Synthetic oligonucleotide
caacucagcacagaucacc

SEQ ID NO: 1777304 - RNA, 19 nt, Artificial Sequence
  Description of Artificial Sequence: Synthetic oligonucleotide
aaagggaugaugaccuggu

SEQ ID NO: 1777305 - RNA, 19 nt, Artificial Sequence
  Description of Artificial Sequence: Synthetic oligonucleotide
caccauuuacaaaugagaa

SEQ ID NO: 1777306 - RNA, 19 nt, Artificial Sequence
  Description of Artificial Sequence: Synthetic oligonucleotide
uccucaacucagcacagau

SEQ ID NO: 1777307 - RNA, 19 nt, Artificial Sequence
  Description of Artificial Sequence: Synthetic oligonucleotide
agugaauucuucagaucgg

SEQ ID NO: 1777308 - RNA, 19 nt, Artificial Sequence
  Description of Artificial Sequence: Synthetic oligonucleotide
uggagcuguguaaaucaca

SEQ ID NO: 1777309 - RNA, 19 nt, Artificial Sequence
  Description of Artificial Sequence: Synthetic oligonucleotide
aguaagaaacuaucauuua

SEQ ID NO: 1777310 - RNA, 19 nt, Artificial Sequence
  Description of Artificial Sequence: Synthetic oligonucleotide
gaaggucuccaauuagaca

SEQ ID NO: 1777311 - RNA, 19 nt, Artificial Sequence
  Description of Artificial Sequence: Synthetic oligonucleotide
agcagugcaucuaaggaug

SEQ ID NO: 1777312 - RNA, 19 nt, Artificial Sequence
  Description of Artificial Sequence: Synthetic oligonucleotide
guuugcaggacagagaaua

SEQ ID NO: 1777313 - RNA, 19 nt, Artificial Sequence
  Description of Artificial Sequence: Synthetic oligonucleotide
aaacaggcacucguccuuc

SEQ ID NO: 1777314 - RNA, 19 nt, Artificial Sequence
  Description of Artificial Sequence: Synthetic oligonucleotide
aaggcccaguaauucauau

SEQ ID NO: 1777315 - RNA, 19 nt, Artificial Sequence
  Description of Artificial Sequence: Synthetic oligonucleotide
uaauuucauuccucaacuc

SEQ ID NO: 1777316 - RNA, 19 nt, Artificial Sequence
  Description of Artificial Sequence: Synthetic oligonucleotide
uggauuacuugauccugca

SEQ ID NO: 1777317 - RNA, 19 nt, Artificial Sequence
  Description of Artificial Sequence: Synthetic oligonucleotide
gucauacucguuuuccaac

SEQ ID NO: 1777318 - RNA, 19 nt, Artificial Sequence
  Description of Artificial Sequence: Synthetic oligonucleotide
gggaugaugaccugguuac

SEQ ID NO: 1777319 - RNA, 19 nt, Artificial Sequence
  Description of Artificial Sequence: Synthetic oligonucleotide
ugcaaggauuguaccagcu

SEQ ID NO: 1777320 - RNA, 19 nt, Artificial Sequence
  Description of Artificial Sequence: Synthetic oligonucleotide
auagcuauucacaguggag

SEQ ID NO: 1777321 - RNA, 19 nt, Artificial Sequence
  Description of Artificial Sequence: Synthetic oligonucleotide
uuccccaggucgcauagcu

SEQ ID NO: 1777322 - RNA, 19 nt, Artificial Sequence
  Description of Artificial Sequence: Synthetic oligonucleotide
ucuagguaagucugagcaa

SEQ ID NO: 1777323 - RNA, 19 nt, Artificial Sequence
  Description of Artificial Sequence: Synthetic oligonucleotide
uguuuggccggagaccucc

SEQ ID NO: 1777324 - RNA, 19 nt, Artificial Sequence
  Description of Artificial Sequence: Synthetic oligonucleotide
uccacugagcauugucugc

SEQ ID NO: 1777325 - RNA, 19 nt, Artificial Sequence
  Description of Artificial Sequence: Synthetic oligonucleotide
aaaugagaacacaggcuca

SEQ ID NO: 1777326 - RNA, 19 nt, Artificial Sequence
  Description of Artificial Sequence: Synthetic oligonucleotide
cacucucugauucucguuc

SEQ ID NO: 1777327 - RNA, 19 nt, Artificial Sequence
  Description of Artificial Sequence: Synthetic oligonucleotide
ucauuuauucaaggcccag

SEQ ID NO: 1777328 - RNA, 19 nt, Artificial Sequence
  Description of Artificial Sequence: Synthetic oligonucleotide
uguugucagcugcuucucc

SEQ ID NO: 1777329 - RNA, 19 nt, Artificial Sequence
  Description of Artificial Sequence: Synthetic oligonucleotide
agugcaucuaaggaugccu

SEQ ID NO: 1777330 - RNA, 19 nt, Artificial Sequence
  Description of Artificial Sequence: Synthetic oligonucleotide
uacuugauccugcauccau

SEQ ID NO: 1777331 - RNA, 19 nt, Artificial Sequence
  Description of Artificial Sequence: Synthetic oligonucleotide
gguaagucugagcaaaaga

SEQ ID NO: 1777332 - RNA, 19 nt, Artificial Sequence
  Description of Artificial Sequence: Synthetic oligonucleotide
agucugacgcaugaggucu

SEQ ID NO: 1777333 - RNA, 19 nt, Artificial Sequence
  Description of Artificial Sequence: Synthetic oligonucleotide
caccaaagggaugaugacc

SEQ ID NO: 1777334 - RNA, 19 nt, Artificial Sequence
  Description of Artificial Sequence: Synthetic oligonucleotide
gguucucaaauggucaggg

SEQ ID NO: 1777335 - RNA, 19 nt, Artificial Sequence
  Description of Artificial Sequence: Synthetic oligonucleotide
cauagcuauucacagugga

SEQ ID NO: 1777336 - RNA, 19 nt, Artificial Sequence
  Description of Artificial Sequence: Synthetic oligonucleotide
guaaaugaaacuccccagu

SEQ ID NO: 1777337 - RNA, 19 nt, Artificial Sequence
  Description of Artificial Sequence: Synthetic oligonucleotide
aggguggaaaaguaagaaa

SEQ ID NO: 1777338 - RNA, 19 nt, Artificial Sequence
  Description of Artificial Sequence: Synthetic oligonucleotide
agauuugucucuugcugaa

SEQ ID NO: 1777339 - RNA, 19 nt, Artificial Sequence
  Description of Artificial Sequence: Synthetic oligonucleotide
agggaugaugaccugguua

SEQ ID NO: 1777340 - RNA, 19 nt, Artificial Sequence
  Description of Artificial Sequence: Synthetic oligonucleotide
cugaaggucuccaauuaga

SEQ ID NO: 1777341 - RNA, 19 nt, Artificial Sequence
  Description of Artificial Sequence: Synthetic oligonucleotide
uucucguuccucuuugcua

SEQ ID NO: 1777342 - RNA, 19 nt, Artificial Sequence
  Description of Artificial Sequence: Synthetic oligonucleotide
ugguucucaaauggucagg

SEQ ID NO: 1777343 - RNA, 19 nt, Artificial Sequence
  Description of Artificial Sequence: Synthetic oligonucleotide
caacagcugccacuaaggc

SEQ ID NO: 1777344 - RNA, 19 nt, Artificial Sequence
  Description of Artificial Sequence: Synthetic oligonucleotide
caucuagguaagucugagc

SEQ ID NO: 1777345 - RNA, 19 nt, Artificial Sequence
  Description of Artificial Sequence: Synthetic oligonucleotide
ugaagcugacuugauguuc

SEQ ID NO: 1777346 - RNA, 19 nt, Artificial Sequence
  Description of Artificial Sequence: Synthetic oligonucleotide
uugcaggacagagaauagc

SEQ ID NO: 1777347 - RNA, 19 nt, Artificial Sequence
  Description of Artificial Sequence: Synthetic oligonucleotide
caucuaaggaugccucaag

SEQ ID NO: 1777348 - RNA, 19 nt, Artificial Sequence
  Description of Artificial Sequence: Synthetic oligonucleotide
ugucauggagcuguguaaa

SEQ ID NO: 1777349 - RNA, 19 nt, Artificial Sequence
  Description of Artificial Sequence: Synthetic oligonucleotide
ugaugaccugguuacggaa

SEQ ID NO: 1777350 - RNA, 19 nt, Artificial Sequence
  Description of Artificial Sequence: Synthetic oligonucleotide
uugauucagcagugcaucu

SEQ ID NO: 1777351 - RNA, 19 nt, Artificial Sequence
  Description of Artificial Sequence: Synthetic oligonucleotide
uauucaagcucuggaucug

SEQ ID NO: 1777352 - RNA, 19 nt, Artificial Sequence
  Description of Artificial Sequence: Synthetic oligonucleotide
agagcaaugcaaagcuauc

SEQ ID NO: 1777353 - RNA, 19 nt, Artificial Sequence
  Description of Artificial Sequence: Synthetic oligonucleotide
uuacauucauuuucucauu

SEQ ID NO: 1777354 - RNA, 19 nt, Artificial Sequence
  Description of Artificial Sequence: Synthetic oligonucleotide
uuacggaacaguggugucu

SEQ ID NO: 1777355 - RNA, 19 nt, Artificial Sequence
  Description of Artificial Sequence: Synthetic oligonucleotide
aaggauuguaccagcuccu

SEQ ID NO: 1777356 - RNA, 19 nt, Artificial Sequence
  Description of Artificial Sequence: Synthetic oligonucleotide
cagagggccaagucagccg

SEQ ID NO: 1777357 - RNA, 19 nt, Artificial Sequence
  Description of Artificial Sequence: Synthetic oligonucleotide
aagaccuuguucagagugu

SEQ ID NO: 1777358 - RNA, 19 nt, Artificial Sequence
  Description of Artificial Sequence: Synthetic oligonucleotide
uuguacccaucuagguaag

SEQ ID NO: 1777359 - RNA, 19 nt, Artificial Sequence
  Description of Artificial Sequence: Synthetic oligonucleotide
acugcuaccugaaggucuc

SEQ ID NO: 1777360 - RNA, 19 nt, Artificial Sequence
  Description of Artificial Sequence: Synthetic oligonucleotide
gaaaacaggcacucguccu

SEQ ID NO: 1777361 - RNA, 19 nt, Artificial Sequence
  Description of Artificial Sequence: Synthetic oligonucleotide
uccacauucaccgcugaua

SEQ ID NO: 1777362 - RNA, 19 nt, Artificial Sequence
  Description of Artificial Sequence: Synthetic oligonucleotide
augucauggagcuguguaa

SEQ ID NO: 1777363 - RNA, 19 nt, Artificial Sequence
  Description of Artificial Sequence: Synthetic oligonucleotide
gacgcaugaggucuucauc

SEQ ID NO: 1777364 - RNA, 19 nt, Artificial Sequence
  Description of Artificial Sequence: Synthetic oligonucleotide
gaauagcaggguggaaaag

SEQ ID NO: 1777365 - RNA, 19 nt, Artificial Sequence
  Description of Artificial Sequence: Synthetic oligonucleotide
acgaccucauggcugaaaa

SEQ ID NO: 1777366 - RNA, 19 nt, Artificial Sequence
  Description of Artificial Sequence: Synthetic oligonucleotide
cuuuccccaggucgcauag

SEQ ID NO: 1777367 - RNA, 19 nt, Artificial Sequence
  Description of Artificial Sequence: Synthetic oligonucleotide
cuagguaagucugagcaaa

SEQ ID NO: 1777368 - RNA, 19 nt, Artificial Sequence
  Description of Artificial Sequence: Synthetic oligonucleotide
cugguugaccugcuugagc

SEQ ID NO: 1777369 - RNA, 19 nt, Artificial Sequence
  Description of Artificial Sequence: Synthetic oligonucleotide
uaccugaaggucuccaauu

SEQ ID NO: 1777370 - RNA, 19 nt, Artificial Sequence
  Description of Artificial Sequence: Synthetic oligonucleotide
ggauuguaccagcuccugg

SEQ ID NO: 1777371 - RNA, 19 nt, Artificial Sequence
  Description of Artificial Sequence: Synthetic oligonucleotide
gcaacagcugccacuaagg

SEQ ID NO: 1777372 - RNA, 19 nt, Artificial Sequence
  Description of Artificial Sequence: Synthetic oligonucleotide
ugguuacggaacaguggug

SEQ ID NO: 1777373 - RNA, 19 nt, Artificial Sequence
  Description of Artificial Sequence: Synthetic oligonucleotide
accucauggcugaaaacag

SEQ ID NO: 1777374 - RNA, 19 nt, Artificial Sequence
  Description of Artificial Sequence: Synthetic oligonucleotide
uugaagcugacuugauguu

SEQ ID NO: 1777375 - RNA, 19 nt, Artificial Sequence
  Description of Artificial Sequence: Synthetic oligonucleotide
ggcaacagcugccacuaag

SEQ ID NO: 1777376 - RNA, 19 nt, Artificial Sequence
  Description of Artificial Sequence: Synthetic oligonucleotide
ccugguuacggaacagugg

SEQ ID NO: 1777377 - RNA, 19 nt, Artificial Sequence
  Description of Artificial Sequence: Synthetic oligonucleotide
cuccugcaaggauuguacc

SEQ ID NO: 1777378 - RNA, 19 nt, Artificial Sequence
  Description of Artificial Sequence: Synthetic oligonucleotide
acuaaggcauuggugucug

SEQ ID NO: 1777379 - RNA, 19 nt, Artificial Sequence
  Description of Artificial Sequence: Synthetic oligonucleotide
ucgcauagcuauucacagu

SEQ ID NO: 1777380 - RNA, 19 nt, Artificial Sequence
  Description of Artificial Sequence: Synthetic oligonucleotide
uagguaagucugagcaaaa

SEQ ID NO: 1777381 - RNA, 19 nt, Artificial Sequence
  Description of Artificial Sequence: Synthetic oligonucleotide
cccaguaauucauauacca

SEQ ID NO: 1777382 - RNA, 19 nt, Artificial Sequence
  Description of Artificial Sequence: Synthetic oligonucleotide
cugcaaggauuguaccagc

SEQ ID NO: 1777383 - RNA, 19 nt, Artificial Sequence
  Description of Artificial Sequence: Synthetic oligonucleotide
ggaucugcuucugagcugc

SEQ ID NO: 1777384 - RNA, 19 nt, Artificial Sequence
  Description of Artificial Sequence: Synthetic oligonucleotide
caccaauucuggcagcauc

SEQ ID NO: 1777385 - RNA, 19 nt, Artificial Sequence
  Description of Artificial Sequence: Synthetic oligonucleotide
augcuaaguguuuuacauu

SEQ ID NO: 1777386 - RNA, 19 nt, Artificial Sequence
  Description of Artificial Sequence: Synthetic oligonucleotide
gaggcuccugcaaggauug

SEQ ID NO: 1777387 - RNA, 19 nt, Artificial Sequence
  Description of Artificial Sequence: Synthetic oligonucleotide
auucaccgcugauagggau

SEQ ID NO: 1777388 - RNA, 19 nt, Artificial Sequence
  Description of Artificial Sequence: Synthetic oligonucleotide
accugaaggucuccaauua

SEQ ID NO: 1777389 - RNA, 19 nt, Artificial Sequence
  Description of Artificial Sequence: Synthetic oligonucleotide
cugguuacggaacaguggu

SEQ ID NO: 1777390 - RNA, 19 nt, Artificial Sequence
  Description of Artificial Sequence: Synthetic oligonucleotide
uagacagccccuucccaaa

SEQ ID NO: 1777391 - RNA, 19 nt, Artificial Sequence
  Description of Artificial Sequence: Synthetic oligonucleotide
aucauuuauucaaggccca

SEQ ID NO: 1777392 - RNA, 19 nt, Artificial Sequence
  Description of Artificial Sequence: Synthetic oligonucleotide
uccaauuagacagccccuu

SEQ ID NO: 1777393 - RNA, 19 nt, Artificial Sequence
  Description of Artificial Sequence: Synthetic oligonucleotide
auggucagggacgaccuca

SEQ ID NO: 1777394 - RNA, 19 nt, Artificial Sequence
  Description of Artificial Sequence: Synthetic oligonucleotide
guacccaucuagguaaguc

SEQ ID NO: 1777395 - RNA, 19 nt, Artificial Sequence
  Description of Artificial Sequence: Synthetic oligonucleotide
cauauaccaugcuaagugu

SEQ ID NO: 1777396 - RNA, 19 nt, Artificial Sequence
  Description of Artificial Sequence: Synthetic oligonucleotide
gguuggcgcaaccacuucc

SEQ ID NO: 1777397 - RNA, 19 nt, Artificial Sequence
  Description of Artificial Sequence: Synthetic oligonucleotide
gagagcaaugcaaagcuau

SEQ ID NO: 1777398 - RNA, 19 nt, Artificial Sequence
  Description of Artificial Sequence: Synthetic oligonucleotide
uucggagcaccugccaucu

SEQ ID NO: 1777399 - RNA, 19 nt, Artificial Sequence
  Description of Artificial Sequence: Synthetic oligonucleotide
uggccggagaccuccacuc

SEQ ID NO: 1777400 - RNA, 19 nt, Artificial Sequence
  Description of Artificial Sequence: Synthetic oligonucleotide
accugguuacggaacagug

SEQ ID NO: 1777401 - RNA, 19 nt, Artificial Sequence
  Description of Artificial Sequence: Synthetic oligonucleotide
agacagccccuucccaaag

SEQ ID NO: 1777402 - RNA, 19 nt, Artificial Sequence
  Description of Artificial Sequence: Synthetic oligonucleotide
guucagaguguucaacugu

SEQ ID NO: 1777403 - RNA, 19 nt, Artificial Sequence
  Description of Artificial Sequence: Synthetic oligonucleotide
auccauuagcucgccaaug

SEQ ID NO: 1777404 - RNA, 19 nt, Artificial Sequence
  Description of Artificial Sequence: Synthetic oligonucleotide
cagucugacgcaugagguc

SEQ ID NO: 1777405 - RNA, 19 nt, Artificial Sequence
  Description of Artificial Sequence: Synthetic oligonucleotide
ugauucagcagugcaucua

SEQ ID NO: 1777406 - RNA, 19 nt, Artificial Sequence
  Description of Artificial Sequence: Synthetic oligonucleotide
aucucgaucuggggacagc

SEQ ID NO: 1777407 - RNA, 19 nt, Artificial Sequence
  Description of Artificial Sequence: Synthetic oligonucleotide
cugauagggaugcauugaa

SEQ ID NO: 1777408 - RNA, 19 nt, Artificial Sequence
  Description of Artificial Sequence: Synthetic oligonucleotide
auauaccaugcuaaguguu

SEQ ID NO: 1777409 - RNA, 19 nt, Artificial Sequence
  Description of Artificial Sequence: Synthetic oligonucleotide
uggcugaaaacaggcacuc

SEQ ID NO: 1777410 - RNA, 19 nt, Artificial Sequence
  Description of Artificial Sequence: Synthetic oligonucleotide
guuacggaacagugguguc

SEQ ID NO: 1777411 - RNA, 19 nt, Artificial Sequence
  Description of Artificial Sequence: Synthetic oligonucleotide
uuacuugauccugcaucca

SEQ ID NO: 1777412 - RNA, 19 nt, Artificial Sequence
  Description of Artificial Sequence: Synthetic oligonucleotide
ccugcaaggauuguaccag

SEQ ID NO: 1777413 - RNA, 19 nt, Artificial Sequence
  Description of Artificial Sequence: Synthetic oligonucleotide
guucggagcaccugccauc

SEQ ID NO: 1777414 - RNA, 19 nt, Artificial Sequence
  Description of Artificial Sequence: Synthetic oligonucleotide
uuuggccggagaccuccac

SEQ ID NO: 1777415 - RNA, 19 nt, Artificial Sequence
  Description of Artificial Sequence: Synthetic oligonucleotide
auagcaggguggaaaagua

SEQ ID NO: 1777416 - RNA, 19 nt, Artificial Sequence
  Description of Artificial Sequence: Synthetic oligonucleotide
caaaggcaacagcugccac

SEQ ID NO: 1777417 - RNA, 19 nt, Artificial Sequence
  Description of Artificial Sequence: Synthetic oligonucleotide
aggauuguaccagcuccug

SEQ ID NO: 1777418 - RNA, 19 nt, Artificial Sequence
  Description of Artificial Sequence: Synthetic oligonucleotide
agggacgaccucauggcug

SEQ ID NO: 1777419 - RNA, 19 nt, Artificial Sequence
  Description of Artificial Sequence: Synthetic oligonucleotide
cagaucaccugagagugga

SEQ ID NO: 1777420 - RNA, 19 nt, Artificial Sequence
  Description of Artificial Sequence: Synthetic oligonucleotide
cauugccacggcccgguug

SEQ ID NO: 1777421 - RNA, 19 nt, Artificial Sequence
  Description of Artificial Sequence: Synthetic oligonucleotide
gcuguaauccugaggcucc

SEQ ID NO: 1777422 - RNA, 19 nt, Artificial Sequence
  Description of Artificial Sequence: Synthetic oligonucleotide
cucaaauggucagggacga

SEQ ID NO: 1777423 - RNA, 19 nt, Artificial Sequence
  Description of Artificial Sequence: Synthetic oligonucleotide
ucaucucgaucuggggaca

SEQ ID NO: 1777424 - RNA, 19 nt, Artificial Sequence
  Description of Artificial Sequence: Synthetic oligonucleotide
acagaucaccugagagugg

SEQ ID NO: 1777425 - RNA, 19 nt, Artificial Sequence
  Description of Artificial Sequence: Synthetic oligonucleotide
ggucgcauagcuauucaca

SEQ ID NO: 1777426 - RNA, 19 nt, Artificial Sequence
  Description of Artificial Sequence: Synthetic oligonucleotide
ggaugccucaagcugcuuc

SEQ ID NO: 1777427 - RNA, 19 nt, Artificial Sequence
  Description of Artificial Sequence: Synthetic oligonucleotide
guucaacuguccagagagc

SEQ ID NO: 1777428 - RNA, 19 nt, Artificial Sequence
  Description of Artificial Sequence: Synthetic oligonucleotide
auucagcagugcaucuaag

SEQ ID NO: 1777429 - RNA, 19 nt, Artificial Sequence
  Description of Artificial Sequence: Synthetic oligonucleotide
cucguccuucagucugacg

SEQ ID NO: 1777430 - RNA, 19 nt, Artificial Sequence
  Description of Artificial Sequence: Synthetic oligonucleotide
ggccacuugauucagcagu

SEQ ID NO: 1777431 - RNA, 19 nt, Artificial Sequence
  Description of Artificial Sequence: Synthetic oligonucleotide
gcuugguucucaaaugguc

SEQ ID NO: 1777432 - RNA, 19 nt, Artificial Sequence
  Description of Artificial Sequence: Synthetic oligonucleotide
uguacccaucuagguaagu

SEQ ID NO: 1777433 - RNA, 19 nt, Artificial Sequence
  Description of Artificial Sequence: Synthetic oligonucleotide
gugcaucuaaggaugccuc

SEQ ID NO: 1777434 - RNA, 19 nt, Artificial Sequence
  Description of Artificial Sequence: Synthetic oligonucleotide
cagugcaucuaaggaugcc

SEQ ID NO: 1777435 - RNA, 19 nt, Artificial Sequence
  Description of Artificial Sequence: Synthetic oligonucleotide
gcaaggauuguaccagcuc

SEQ ID NO: 1777436 - RNA, 19 nt, Artificial Sequence
  Description of Artificial Sequence: Synthetic oligonucleotide
cacugagcauugucugcug

SEQ ID NO: 1777437 - RNA, 19 nt, Artificial Sequence
  Description of Artificial Sequence: Synthetic oligonucleotide
agaccuuguucagaguguu

SEQ ID NO: 1777438 - RNA, 19 nt, Artificial Sequence
  Description of Artificial Sequence: Synthetic oligonucleotide
uuccucaacucagcacaga

SEQ ID NO: 1777439 - RNA, 19 nt, Artificial Sequence
  Description of Artificial Sequence: Synthetic oligonucleotide
agggccaagucagccgguc

SEQ ID NO: 1777440 - RNA, 19 nt, Artificial Sequence
  Description of Artificial Sequence: Synthetic oligonucleotide
gcugccacuaaggcauugg

SEQ ID NO: 1777441 - RNA, 19 nt, Artificial Sequence
  Description of Artificial Sequence: Synthetic oligonucleotide
gucugagcaaaagauaauu

SEQ ID NO: 1777442 - RNA, 19 nt, Artificial Sequence
  Description of Artificial Sequence: Synthetic oligonucleotide
agccccuucccaaaggcaa

SEQ ID NO: 1777443 - RNA, 19 nt, Artificial Sequence
  Description of Artificial Sequence: Synthetic oligonucleotide
gcauagcuauucacagugg

SEQ ID NO: 1777444 - RNA, 19 nt, Artificial Sequence
  Description of Artificial Sequence: Synthetic oligonucleotide
cauucaccgcugauaggga

SEQ ID NO: 1777445 - RNA, 19 nt, Artificial Sequence
  Description of Artificial Sequence: Synthetic oligonucleotide
uugaccugcuugagccauc

SEQ ID NO: 1777446 - RNA, 19 nt, Artificial Sequence
  Description of Artificial Sequence: Synthetic oligonucleotide
ggucuccaauuagacagcc

SEQ ID NO: 1777447 - RNA, 19 nt, Artificial Sequence
  Description of Artificial Sequence: Synthetic oligonucleotide
gcuccugcaaggauuguac

SEQ ID NO: 1777448 - RNA, 19 nt, Artificial Sequence
  Description of Artificial Sequence: Synthetic oligonucleotide
accgcugauagggaugcau

SEQ ID NO: 1777449 - RNA, 19 nt, Artificial Sequence
  Description of Artificial Sequence: Synthetic oligonucleotide
gucuccaauuagacagccc

SEQ ID NO: 1777450 - RNA, 19 nt, Artificial Sequence
  Description of Artificial Sequence: Synthetic oligonucleotide
cuugagccaucuggacucc

SEQ ID NO: 1777451 - RNA, 19 nt, Artificial Sequence
  Description of Artificial Sequence: Synthetic oligonucleotide
ugcugguucggagcaccug

SEQ ID NO: 1777452 - RNA, 19 nt, Artificial Sequence
  Description of Artificial Sequence: Synthetic oligonucleotide
ucaaauggucagggacgac

SEQ ID NO: 1777453 - RNA, 19 nt, Artificial Sequence
  Description of Artificial Sequence: Synthetic oligonucleotide
gguggaaaaguaagaaacu

SEQ ID NO: 1777454 - RNA, 19 nt, Artificial Sequence
  Description of Artificial Sequence: Synthetic oligonucleotide
gagcaccugccaucugaac

SEQ ID NO: 1777455 - RNA, 19 nt, Artificial Sequence
  Description of Artificial Sequence: Synthetic oligonucleotide
acuugauccugcauccauu

SEQ ID NO: 1777456 - RNA, 19 nt, Artificial Sequence
  Description of Artificial Sequence: Synthetic oligonucleotide
cacugcuaccugaaggucu

SEQ ID NO: 1777457 - RNA, 19 nt, Artificial Sequence
  Description of Artificial Sequence: Synthetic oligonucleotide
gguuacggaacaguggugu

SEQ ID NO: 1777458 - RNA, 19 nt, Artificial Sequence
  Description of Artificial Sequence: Synthetic oligonucleotide
ccaacuuguaaaugaaacu

SEQ ID NO: 1777459 - RNA, 19 nt, Artificial Sequence
  Description of Artificial Sequence: Synthetic oligonucleotide
ccaucuagguaagucugag

SEQ ID NO: 1777460 - RNA, 19 nt, Artificial Sequence
  Description of Artificial Sequence: Synthetic oligonucleotide
agcucgccaaugucaugga

SEQ ID NO: 1777461 - RNA, 19 nt, Artificial Sequence
  Description of Artificial Sequence: Synthetic oligonucleotide
gggacgaccucauggcuga

SEQ ID NO: 1777462 - RNA, 19 nt, Artificial Sequence
  Description of Artificial Sequence: Synthetic oligonucleotide
gcaccaaagggaugaugac

SEQ ID NO: 1777463 - RNA, 19 nt, Artificial Sequence
  Description of Artificial Sequence: Synthetic oligonucleotide
uuuccccaggucgcauagc

SEQ ID NO: 1777464 - RNA, 19 nt, Artificial Sequence
  Description of Artificial Sequence: Synthetic oligonucleotide
caucucgaucuggggacag

SEQ ID NO: 1777465 - RNA, 19 nt, Artificial Sequence
  Description of Artificial Sequence: Synthetic oligonucleotide
gccacuugauucagcagug

SEQ ID NO: 1777466 - RNA, 19 nt, Artificial Sequence
  Description of Artificial Sequence: Synthetic oligonucleotide
gcacagaucaccugagagu

SEQ ID NO: 1777467 - RNA, 19 nt, Artificial Sequence
  Description of Artificial Sequence: Synthetic oligonucleotide
uuguuuggccggagaccuc

SEQ ID NO: 1777468 - RNA, 19 nt, Artificial Sequence
  Description of Artificial Sequence: Synthetic oligonucleotide
gcugauagggaugcauuga

SEQ ID NO: 1777469 - RNA, 19 nt, Artificial Sequence
  Description of Artificial Sequence: Synthetic oligonucleotide
ccggucauacucguuuucc

SEQ ID NO: 1777470 - RNA, 19 nt, Artificial Sequence
  Description of Artificial Sequence: Synthetic oligonucleotide
ucagccggucauacucguu

SEQ ID NO: 1777471 - RNA, 19 nt, Artificial Sequence
  Description of Artificial Sequence: Synthetic oligonucleotide
agccggucauacucguuuu

SEQ ID NO: 1777472 - RNA, 19 nt, Artificial Sequence
  Description of Artificial Sequence: Synthetic oligonucleotide
agagaauagcaggguggaa

SEQ ID NO: 1777473 - RNA, 19 nt, Artificial Sequence
  Description of Artificial Sequence: Synthetic oligonucleotide
agagagcaaugcaaagcua

SEQ ID NO: 1777474 - RNA, 19 nt, Artificial Sequence
  Description of Artificial Sequence: Synthetic oligonucleotide
ggugucuucucaugcuuua

SEQ ID NO: 1777475 - RNA, 19 nt, Artificial Sequence
  Description of Artificial Sequence: Synthetic oligonucleotide
gcucgccaaugucauggag

SEQ ID NO: 1777476 - RNA, 19 nt, Artificial Sequence
  Description of Artificial Sequence: Synthetic oligonucleotide
ccaauuagacagccccuuc

SEQ ID NO: 1777477 - RNA, 19 nt, Artificial Sequence
  Description of Artificial Sequence: Synthetic oligonucleotide
caggucgcauagcuauuca

SEQ ID NO: 1777478 - RNA, 19 nt, Artificial Sequence
  Description of Artificial Sequence: Synthetic oligonucleotide
ccaugcuaaguguuuuaca

SEQ ID NO: 1777479 - RNA, 19 nt, Artificial Sequence
  Description of Artificial Sequence: Synthetic oligonucleotide
cuaccugaaggucuccaau

SEQ ID NO: 1777480 - RNA, 19 nt, Artificial Sequence
  Description of Artificial Sequence: Synthetic oligonucleotide
cgcugauagggaugcauug

SEQ ID NO: 1777481 - RNA, 19 nt, Artificial Sequence
  Description of Artificial Sequence: Synthetic oligonucleotide
ccacuaaggcauugguguc

SEQ ID NO: 1777482 - RNA, 19 nt, Artificial Sequence
  Description of Artificial Sequence: Synthetic oligonucleotide
gcccaguaauucauauacc

SEQ ID NO: 1777483 - RNA, 19 nt, Artificial Sequence
  Description of Artificial Sequence: Synthetic oligonucleotide
gcuaaguguuuuacauuca

SEQ ID NO: 1777484 - RNA, 19 nt, Artificial Sequence
  Description of Artificial Sequence: Synthetic oligonucleotide
cugcauugccacggcccgg

SEQ ID NO: 1777485 - RNA, 19 nt, Artificial Sequence
  Description of Artificial Sequence: Synthetic oligonucleotide
gaccugguuacggaacagu

SEQ ID NO: 1777486 - RNA, 19 nt, Artificial Sequence
  Description of Artificial Sequence: Synthetic oligonucleotide
cuccucccucugcauugcc

SEQ ID NO: 1777487 - RNA, 19 nt, Artificial Sequence
  Description of Artificial Sequence: Synthetic oligonucleotide
ucggagcaccugccaucug

SEQ ID NO: 1777488 - RNA, 19 nt, Artificial Sequence
  Description of Artificial Sequence: Synthetic oligonucleotide
gcuguccacauucaccgcu

SEQ ID NO: 1777489 - RNA, 19 nt, Artificial Sequence
  Description of Artificial Sequence: Synthetic oligonucleotide
caaggcccaguaauucaua

SEQ ID NO: 1777490 - RNA, 19 nt, Artificial Sequence
  Description of Artificial Sequence: Synthetic oligonucleotide
gcuaccugaaggucuccaa

SEQ ID NO: 1777491 - RNA, 19 nt, Artificial Sequence
  Description of Artificial Sequence: Synthetic oligonucleotide
cugcuuguuuggccggaga

SEQ ID NO: 1777492 - RNA, 19 nt, Artificial Sequence
  Description of Artificial Sequence: Synthetic oligonucleotide
agcugacuugauguucguu

SEQ ID NO: 1777493 - RNA, 19 nt, Artificial Sequence
  Description of Artificial Sequence: Synthetic oligonucleotide
cugcauccauuagcucgcc

SEQ ID NO: 1777494 - RNA, 19 nt, Artificial Sequence
  Description of Artificial Sequence: Synthetic oligonucleotide
guugaccugcuugagccau

SEQ ID NO: 1777495 - RNA, 19 nt, Artificial Sequence
  Description of Artificial Sequence: Synthetic oligonucleotide
gucauggagcuguguaaau

SEQ ID NO: 1777496 - RNA, 19 nt, Artificial Sequence
  Description of Artificial Sequence: Synthetic oligonucleotide
cacuaaggcauuggugucu

SEQ ID NO: 1777497 - RNA, 19 nt, Artificial Sequence
  Description of Artificial Sequence: Synthetic oligonucleotide
gccggguuggccaggacca

SEQ ID NO: 1777498 - RNA, 19 nt, Artificial Sequence
  Description of Artificial Sequence: Synthetic oligonucleotide
caaagcuauccaggacaga

SEQ ID NO: 1777499 - RNA, 19 nt, Artificial Sequence
  Description of Artificial Sequence: Synthetic oligonucleotide
cugccacuaaggcauuggu

SEQ ID NO: 1777500 - RNA, 19 nt, Artificial Sequence
  Description of Artificial Sequence: Synthetic oligonucleotide
ccaggucgcauagcuauuc

SEQ ID NO: 1777501 - RNA, 19 nt, Artificial Sequence
  Description of Artificial Sequence: Synthetic oligonucleotide
gccggagaccuccacucuc

SEQ ID NO: 1777502 - RNA, 19 nt, Artificial Sequence
  Description of Artificial Sequence: Synthetic oligonucleotide
cccagugaauucuucagau

SEQ ID NO: 1777503 - RNA, 19 nt, Artificial Sequence
  Description of Artificial Sequence: Synthetic oligonucleotide
ccacuugauucagcagugc

SEQ ID NO: 1777504 - RNA, 19 nt, Artificial Sequence
  Description of Artificial Sequence: Synthetic oligonucleotide
caagucagccggucauacu

SEQ ID NO: 1777505 - RNA, 19 nt, Artificial Sequence
  Description of Artificial Sequence: Synthetic oligonucleotide
cccaucuagguaagucuga

SEQ ID NO: 1777506 - RNA, 19 nt, Artificial Sequence
  Description of Artificial Sequence: Synthetic oligonucleotide
cauacucguuuuccaacuu

SEQ ID NO: 1777507 - RNA, 19 nt, Artificial Sequence
  Description of Artificial Sequence: Synthetic oligonucleotide
gcaccugccaucugaacuu

SEQ ID NO: 1777508 - RNA, 19 nt, Artificial Sequence
  Description of Artificial Sequence: Synthetic oligonucleotide
ccccagugaauucuucaga

SEQ ID NO: 1777509 - RNA, 19 nt, Artificial Sequence
  Description of Artificial Sequence: Synthetic oligonucleotide
ggaugcauugaagcugacu

SEQ ID NO: 1777510 - RNA, 19 nt, Artificial Sequence
  Description of Artificial Sequence: Synthetic oligonucleotide
gguucggagcaccugccau

SEQ ID NO: 1777511 - RNA, 19 nt, Artificial Sequence
  Description of Artificial Sequence: Synthetic oligonucleotide
caggguugaaagucugcuu

SEQ ID NO: 1777512 - RNA, 19 nt, Artificial Sequence
  Description of Artificial Sequence: Synthetic oligonucleotide
gccggucauacucguuuuc

SEQ ID NO: 1777513 - RNA, 19 nt, Artificial Sequence
  Description of Artificial Sequence: Synthetic oligonucleotide
ggacagagaauagcagggu

SEQ ID NO: 1777514 - RNA, 19 nt, Artificial Sequence
  Description of Artificial Sequence: Synthetic oligonucleotide
ggauuacuugauccugcau

SEQ ID NO: 1777515 - RNA, 19 nt, Artificial Sequence
  Description of Artificial Sequence: Synthetic oligonucleotide
cgcaugaggucuucaucuc

SEQ ID NO: 1777516 - RNA, 19 nt, Artificial Sequence
  Description of Artificial Sequence: Synthetic oligonucleotide
cgaccucauggcugaaaac

SEQ ID NO: 1777517 - RNA, 19 nt, Artificial Sequence
  Description of Artificial Sequence: Synthetic oligonucleotide
ggagcaccugccaucugaa

SEQ ID NO: 1777518 - RNA, 19 nt, Artificial Sequence
  Description of Artificial Sequence: Synthetic oligonucleotide
cccucugcauugccacggc

SEQ ID NO: 1777519 - RNA, 19 nt, Artificial Sequence
  Description of Artificial Sequence: Synthetic oligonucleotide
ggccaagucagccggucau

SEQ ID NO: 1777520 - RNA, 19 nt, Artificial Sequence
  Description of Artificial Sequence: Synthetic oligonucleotide
ggcuccugcaaggauugua

SEQ ID NO: 1777521 - RNA, 19 nt, Artificial Sequence
  Description of Artificial Sequence: Synthetic oligonucleotide
uggugucugcaggguugaa

SEQ ID NO: 1777522 - RNA, 19 nt, Artificial Sequence
  Description of Artificial Sequence: Synthetic oligonucleotide
uugccacggcccgguuggc

SEQ ID NO: 1777523 - RNA, 19 nt, Artificial Sequence
  Description of Artificial Sequence: Synthetic oligonucleotide
cguccuucagucugacgca

SEQ ID NO: 1777524 - RNA, 19 nt, Artificial Sequence
  Description of Artificial Sequence: Synthetic oligonucleotide
ccccaggucgcauagcuau

SEQ ID NO: 1777525 - RNA, 19 nt, Artificial Sequence
  Description of Artificial Sequence: Synthetic oligonucleotide
ccacugcuaccugaagguc

SEQ ID NO: 1777526 - RNA, 19 nt, Artificial Sequence
  Description of Artificial Sequence: Synthetic oligonucleotide
acggcccgguuggcgcaac

SEQ ID NO: 1777527 - RNA, 19 nt, Artificial Sequence
  Description of Artificial Sequence: Synthetic oligonucleotide
gggucaggcuugguucuca

SEQ ID NO: 1777528 - RNA, 19 nt, Artificial Sequence
  Description of Artificial Sequence: Synthetic oligonucleotide
ccaucugaacuugcuguaa

SEQ ID NO: 1777529 - RNA, 19 nt, Artificial Sequence
  Description of Artificial Sequence: Synthetic oligonucleotide
ccacugagcauugucugcu

SEQ ID NO: 1777530 - RNA, 19 nt, Artificial Sequence
  Description of Artificial Sequence: Synthetic oligonucleotide
ccggagaccuccacucucu

SEQ ID NO: 1777531 - RNA, 19 nt, Artificial Sequence
  Description of Artificial Sequence: Synthetic oligonucleotide
ggccggagaccuccacucu

SEQ ID NO: 1777532 - RNA, 19 nt, Artificial Sequence
  Description of Artificial Sequence: Synthetic oligonucleotide
cguuccucuuugcuaauuu

SEQ ID NO: 1777533 - RNA, 19 nt, Artificial Sequence
  Description of Artificial Sequence: Synthetic oligonucleotide
caccgcugauagggaugca

SEQ ID NO: 1777534 - RNA, 19 nt, Artificial Sequence
  Description of Artificial Sequence: Synthetic oligonucleotide
ccacggcccgguuggcgca

SEQ ID NO: 1777535 - RNA, 19 nt, Artificial Sequence
  Description of Artificial Sequence: Synthetic oligonucleotide
cggaacaguggugucuucu

SEQ ID NO: 1777536 - RNA, 19 nt, Artificial Sequence
  Description of Artificial Sequence: Synthetic oligonucleotide
gcaccaauucuggcagcau

SEQ ID NO: 1777537 - RNA, 19 nt, Artificial Sequence
  Description of Artificial Sequence: Synthetic oligonucleotide
cacggcccgguuggcgcaa

SEQ ID NO: 1777538 - RNA, 19 nt, Artificial Sequence
  Description of Artificial Sequence: Synthetic oligonucleotide
ccaggacagagggccaagu

SEQ ID NO: 1777539 - RNA, 19 nt, Artificial Sequence
  Description of Artificial Sequence: Synthetic oligonucleotide
ggacuccacugagcauugu

SEQ ID NO: 1777540 - RNA, 19 nt, Artificial Sequence
  Description of Artificial Sequence: Synthetic oligonucleotide
ggacgaccucauggcugaa

SEQ ID NO: 1777541 - RNA, 19 nt, Artificial Sequence
  Description of Artificial Sequence: Synthetic oligonucleotide
gcauugccacggcccgguu

SEQ ID NO: 1777542 - RNA, 19 nt, Artificial Sequence
  Description of Artificial Sequence: Synthetic oligonucleotide
ugcaagaccauaaugaugg

SEQ ID NO: 1777543 - RNA, 19 nt, Artificial Sequence
  Description of Artificial Sequence: Synthetic oligonucleotide
auuauuucaagccugauug

SEQ ID NO: 1777544 - RNA, 19 nt, Artificial Sequence
  Description of Artificial Sequence: Synthetic oligonucleotide
aaagugaguauauuuaucu

SEQ ID NO: 1777545 - RNA, 19 nt, Artificial Sequence
  Description of Artificial Sequence: Synthetic oligonucleotide
auuuaucuaaugcaagacc

SEQ ID NO: 1777546 - RNA, 19 nt, Artificial Sequence
  Description of Artificial Sequence: Synthetic oligonucleotide
uuuaucuaaugcaagacca

SEQ ID NO: 1777547 - RNA, 19 nt, Artificial Sequence
  Description of Artificial Sequence: Synthetic oligonucleotide
auuugcacuauccagagag

SEQ ID NO: 1777548 - RNA, 19 nt, Artificial Sequence
  Description of Artificial Sequence: Synthetic oligonucleotide
uaaugcaagaccauaauga

SEQ ID NO: 1777549 - RNA, 19 nt, Artificial Sequence
  Description of Artificial Sequence: Synthetic oligonucleotide
ucuaauugaauaaaucacu

SEQ ID NO: 1777550 - RNA, 19 nt, Artificial Sequence
  Description of Artificial Sequence: Synthetic oligonucleotide
aagaccauaaugauggaac

SEQ ID NO: 1777551 - RNA, 19 nt, Artificial Sequence
  Description of Artificial Sequence: Synthetic oligonucleotide
cugaauaucuucuuauugg

SEQ ID NO: 1777552 - RNA, 19 nt, Artificial Sequence
  Description of Artificial Sequence: Synthetic oligonucleotide
uucuaauugaauaaaucac

SEQ ID NO: 1777553 - RNA, 19 nt, Artificial Sequence
  Description of Artificial Sequence: Synthetic oligonucleotide
ugaaauguaacugacugcc

SEQ ID NO: 1777554 - RNA, 19 nt, Artificial Sequence
  Description of Artificial Sequence: Synthetic oligonucleotide
agaauggcaacgcaagacc

SEQ ID NO: 1777555 - RNA, 19 nt, Artificial Sequence
  Description of Artificial Sequence: Synthetic oligonucleotide
ugaucuuguucugagaucg

SEQ ID NO: 1777556 - RNA, 19 nt, Artificial Sequence
  Description of Artificial Sequence: Synthetic oligonucleotide
aagaccuggacagauauuc

SEQ ID NO: 1777557 - RNA, 19 nt, Artificial Sequence
  Description of Artificial Sequence: Synthetic oligonucleotide
caaacuuucuuucauuucc

SEQ ID NO: 1777558 - RNA, 19 nt, Artificial Sequence
  Description of Artificial Sequence: Synthetic oligonucleotide
uguuacauggucaaacaga

SEQ ID NO: 1777559 - RNA, 19 nt, Artificial Sequence
  Description of Artificial Sequence: Synthetic oligonucleotide
guucuaauugaauaaauca

SEQ ID NO: 1777560 - RNA, 19 nt, Artificial Sequence
  Description of Artificial Sequence: Synthetic oligonucleotide
ucgguguacaacaauaucu

SEQ ID NO: 1777561 - RNA, 19 nt, Artificial Sequence
  Description of Artificial Sequence: Synthetic oligonucleotide
aaauggcugccauuaauag

SEQ ID NO: 1777562 - RNA, 19 nt, Artificial Sequence
  Description of Artificial Sequence: Synthetic oligonucleotide
aacagaugaaauguaacug

SEQ ID NO: 1777563 - RNA, 19 nt, Artificial Sequence
  Description of Artificial Sequence: Synthetic oligonucleotide
aauguaacugacugcccuc

SEQ ID NO: 1777564 - RNA, 19 nt, Artificial Sequence
  Description of Artificial Sequence: Synthetic oligonucleotide
uaauagucgguguacaaca

SEQ ID NO: 1777565 - RNA, 19 nt, Artificial Sequence
  Description of Artificial Sequence: Synthetic oligonucleotide
ucagucuggacuccgaacc

SEQ ID NO: 1777566 - RNA, 19 nt, Artificial Sequence
  Description of Artificial Sequence: Synthetic oligonucleotide
auauuuaucuaaugcaaga

SEQ ID NO: 1777567 - RNA, 19 nt, Artificial Sequence
  Description of Artificial Sequence: Synthetic oligonucleotide
aaugcaagaccauaaugau

SEQ ID NO: 1777568 - RNA, 19 nt, Artificial Sequence
  Description of Artificial Sequence: Synthetic oligonucleotide
acaacaauaucugaauauc

SEQ ID NO: 1777569 - RNA, 19 nt, Artificial Sequence
  Description of Artificial Sequence: Synthetic oligonucleotide
gguuuggugucauauaugg

SEQ ID NO: 1777570 - RNA, 19 nt, Artificial Sequence
  Description of Artificial Sequence: Synthetic oligonucleotide
agaucuuuguugcugaaca

SEQ ID NO: 1777571 - RNA, 19 nt, Artificial Sequence
  Description of Artificial Sequence: Synthetic oligonucleotide
cuaugaagaagccuuuugc

SEQ ID NO: 1777572 - RNA, 19 nt, Artificial Sequence
  Description of Artificial Sequence: Synthetic oligonucleotide
uuggcagaauucuugauac

SEQ ID NO: 1777573 - RNA, 19 nt, Artificial Sequence
  Description of Artificial Sequence: Synthetic oligonucleotide
ugaugugucugcauaauuc

SEQ ID NO: 1777574 - RNA, 19 nt, Artificial Sequence
  Description of Artificial Sequence: Synthetic oligonucleotide
acagaugaaauguaacuga

SEQ ID NO: 1777575 - RNA, 19 nt, Artificial Sequence
  Description of Artificial Sequence: Synthetic oligonucleotide
uguacaacaauaucugaau

SEQ ID NO: 1777576 - RNA, 19 nt, Artificial Sequence
  Description of Artificial Sequence: Synthetic oligonucleotide
gucauauaugguuuguugc

SEQ ID NO: 1777577 - RNA, 19 nt, Artificial Sequence
  Description of Artificial Sequence: Synthetic oligonucleotide
ucuuuguugcugaacaaac

SEQ ID NO: 1777578 - RNA, 19 nt, Artificial Sequence
  Description of Artificial Sequence: Synthetic oligonucleotide
ucauauaugguuuguugcu

SEQ ID NO: 1777579 - RNA, 19 nt, Artificial Sequence
  Description of Artificial Sequence: Synthetic oligonucleotide
cuaccuuccagcuccaggg

SEQ ID NO: 1777580 - RNA, 19 nt, Artificial Sequence
  Description of Artificial Sequence: Synthetic oligonucleotide
acaacggucucuuuugcuc

SEQ ID NO: 1777581 - RNA, 19 nt, Artificial Sequence
  Description of Artificial Sequence: Synthetic oligonucleotide
ugcauaauuccucaagauc

SEQ ID NO: 1777582 - RNA, 19 nt, Artificial Sequence
  Description of Artificial Sequence: Synthetic oligonucleotide
ucuuacuguuacaugguca

SEQ ID NO: 1777583 - RNA, 19 nt, Artificial Sequence
  Description of Artificial Sequence: Synthetic oligonucleotide
uugaauaaaucacuccauc

SEQ ID NO: 1777584 - RNA, 19 nt, Artificial Sequence
  Description of Artificial Sequence: Synthetic oligonucleotide
acuauccagagagucagcc

SEQ ID NO: 1777585 - RNA, 19 nt, Artificial Sequence
  Description of Artificial Sequence: Synthetic oligonucleotide
uaugguuuguugcuuauua

SEQ ID NO: 1777586 - RNA, 19 nt, Artificial Sequence
  Description of Artificial Sequence: Synthetic oligonucleotide
gauguggcgagcuauguca

SEQ ID NO: 1777587 - RNA, 19 nt, Artificial Sequence
  Description of Artificial Sequence: Synthetic oligonucleotide
cuuguucugagaucguugc

SEQ ID NO: 1777588 - RNA, 19 nt, Artificial Sequence
  Description of Artificial Sequence: Synthetic oligonucleotide
caaaccuugguaugaauac

SEQ ID NO: 1777589 - RNA, 19 nt, Artificial Sequence
  Description of Artificial Sequence: Synthetic oligonucleotide
uuuuauuggaccguguguc

SEQ ID NO: 1777590 - RNA, 19 nt, Artificial Sequence
  Description of Artificial Sequence: Synthetic oligonucleotide
uuaauuccaaaccuuggua

SEQ ID NO: 1777591 - RNA, 19 nt, Artificial Sequence
  Description of Artificial Sequence: Synthetic oligonucleotide
acuccgaaccucuaccuac

SEQ ID NO: 1777592 - RNA, 19 nt, Artificial Sequence
  Description of Artificial Sequence: Synthetic oligonucleotide
uauuuaucuaaugcaagac

SEQ ID NO: 1777593 - RNA, 19 nt, Artificial Sequence
  Description of Artificial Sequence: Synthetic oligonucleotide
ucuucuuagccacccagug

SEQ ID NO: 1777594 - RNA, 19 nt, Artificial Sequence
  Description of Artificial Sequence: Synthetic oligonucleotide
uaaagugaguauauuuauc

SEQ ID NO: 1777595 - RNA, 19 nt, Artificial Sequence
  Description of Artificial Sequence: Synthetic oligonucleotide
caacgcaagaccuggacag

SEQ ID NO: 1777596 - RNA, 19 nt, Artificial Sequence
  Description of Artificial Sequence: Synthetic oligonucleotide
gaagccuuuugcuuuagca

SEQ ID NO: 1777597 - RNA, 19 nt, Artificial Sequence
  Description of Artificial Sequence: Synthetic oligonucleotide
cuaaugcaagaccauaaug

SEQ ID NO: 1777598 - RNA, 19 nt, Artificial Sequence
  Description of Artificial Sequence: Synthetic oligonucleotide
agaaguagagugcauugga

SEQ ID NO: 1777599 - RNA, 19 nt, Artificial Sequence
  Description of Artificial Sequence: Synthetic oligonucleotide
uuaauagucgguguacaac

SEQ ID NO: 1777600 - RNA, 19 nt, Artificial Sequence
  Description of Artificial Sequence: Synthetic oligonucleotide
gagugcauuggacauggcc

SEQ ID NO: 1777601 - RNA, 19 nt, Artificial Sequence
  Description of Artificial Sequence: Synthetic oligonucleotide
uguuuggcagaauucuuga

SEQ ID NO: 1777602 - RNA, 19 nt, Artificial Sequence
  Description of Artificial Sequence: Synthetic oligonucleotide
ucuaaugcaagaccauaau

SEQ ID NO: 1777603 - RNA, 19 nt, Artificial Sequence
  Description of Artificial Sequence: Synthetic oligonucleotide
uggacugcuucugagaaug

SEQ ID NO: 1777604 - RNA, 19 nt, Artificial Sequence
  Description of Artificial Sequence: Synthetic oligonucleotide
ugauacuccuccugaagca

SEQ ID NO: 1777605 - RNA, 19 nt, Artificial Sequence
  Description of Artificial Sequence: Synthetic oligonucleotide
cuuguucaccauagggucg

SEQ ID NO: 1777606 - RNA, 19 nt, Artificial Sequence
  Description of Artificial Sequence: Synthetic oligonucleotide
accauaaugauggaacucu

SEQ ID NO: 1777607 - RNA, 19 nt, Artificial Sequence
  Description of Artificial Sequence: Synthetic oligonucleotide
acuguuacauggucaaaca

SEQ ID NO: 1777608 - RNA, 19 nt, Artificial Sequence
  Description of Artificial Sequence: Synthetic oligonucleotide
ucuuuugcucggauguggc

SEQ ID NO: 1777609 - RNA, 19 nt, Artificial Sequence
  Description of Artificial Sequence: Synthetic oligonucleotide
ugcacuauccagagaguca

SEQ ID NO: 1777610 - RNA, 19 nt, Artificial Sequence
  Description of Artificial Sequence: Synthetic oligonucleotide
cuaggaucaugcauucggc

SEQ ID NO: 1777611 - RNA, 19 nt, Artificial Sequence
  Description of Artificial Sequence: Synthetic oligonucleotide
uuaucuaaugcaagaccau

SEQ ID NO: 1777612 - RNA, 19 nt, Artificial Sequence
  Description of Artificial Sequence: Synthetic oligonucleotide
uuucaagccugauuguauc

SEQ ID NO: 1777613 - RNA, 19 nt, Artificial Sequence
  Description of Artificial Sequence: Synthetic oligonucleotide
ccugauuguaucagaaugg

SEQ ID NO: 1777614 - RNA, 19 nt, Artificial Sequence
  Description of Artificial Sequence: Synthetic oligonucleotide
cuuauuauuucaagccuga

SEQ ID NO: 1777615 - RNA, 19 nt, Artificial Sequence
  Description of Artificial Sequence: Synthetic oligonucleotide
accacaacggucucuuuug

SEQ ID NO: 1777616 - RNA, 19 nt, Artificial Sequence
  Description of Artificial Sequence: Synthetic oligonucleotide
caugcauucggccacuguc

SEQ ID NO: 1777617 - RNA, 19 nt, Artificial Sequence
  Description of Artificial Sequence: Synthetic oligonucleotide
ggucauuugcacuauccag

SEQ ID NO: 1777618 - RNA, 19 nt, Artificial Sequence
  Description of Artificial Sequence: Synthetic oligonucleotide
uagucgguguacaacaaua

SEQ ID NO: 1777619 - RNA, 19 nt, Artificial Sequence
  Description of Artificial Sequence: Synthetic oligonucleotide
caacggucucuuuugcucg

SEQ ID NO: 1777620 - RNA, 19 nt, Artificial Sequence
  Description of Artificial Sequence: Synthetic oligonucleotide
aacggucucuuuugcucgg

SEQ ID NO: 1777621 - RNA, 19 nt, Artificial Sequence
  Description of Artificial Sequence: Synthetic oligonucleotide
agaccauaaugauggaacu

SEQ ID NO: 1777622 - RNA, 19 nt, Artificial Sequence
  Description of Artificial Sequence: Synthetic oligonucleotide
cuucuuagccacccagugg

SEQ ID NO: 1777623 - RNA, 19 nt, Artificial Sequence
  Description of Artificial Sequence: Synthetic oligonucleotide
auuaauagucgguguacaa

SEQ ID NO: 1777624 - RNA, 19 nt, Artificial Sequence
  Description of Artificial Sequence: Synthetic oligonucleotide
ucagaauggcaacgcaaga

SEQ ID NO: 1777625 - RNA, 19 nt, Artificial Sequence
  Description of Artificial Sequence: Synthetic oligonucleotide
cuuacuguuacauggucaa

SEQ ID NO: 1777626 - RNA, 19 nt, Artificial Sequence
  Description of Artificial Sequence: Synthetic oligonucleotide
uuagcacauucucggagcu

SEQ ID NO: 1777627 - RNA, 19 nt, Artificial Sequence
  Description of Artificial Sequence: Synthetic oligonucleotide
aaaccuugguaugaauaca

SEQ ID NO: 1777628 - RNA, 19 nt, Artificial Sequence
  Description of Artificial Sequence: Synthetic oligonucleotide
gagaucguugcagggaucc

SEQ ID NO: 1777629 - RNA, 19 nt, Artificial Sequence
  Description of Artificial Sequence: Synthetic oligonucleotide
uuauuucaagccugauugu

SEQ ID NO: 1777630 - RNA, 19 nt, Artificial Sequence
  Description of Artificial Sequence: Synthetic oligonucleotide
agaucggguuacuucuuuc

SEQ ID NO: 1777631 - RNA, 19 nt, Artificial Sequence
  Description of Artificial Sequence: Synthetic oligonucleotide
ucugagaucguugcaggga

SEQ ID NO: 1777632 - RNA, 19 nt, Artificial Sequence
  Description of Artificial Sequence: Synthetic oligonucleotide
gccugauuguaucagaaug

SEQ ID NO: 1777633 - RNA, 19 nt, Artificial Sequence
  Description of Artificial Sequence: Synthetic oligonucleotide
agaucacuaagccaucuuu

SEQ ID NO: 1777634 - RNA, 19 nt, Artificial Sequence
  Description of Artificial Sequence: Synthetic oligonucleotide
uucuuacuguuacaugguc

SEQ ID NO: 1777635 - RNA, 19 nt, Artificial Sequence
  Description of Artificial Sequence: Synthetic oligonucleotide
gguuuuauuggaccgugug

SEQ ID NO: 1777636 - RNA, 19 nt, Artificial Sequence
  Description of Artificial Sequence: Synthetic oligonucleotide
gaucggguuacuucuuuca

SEQ ID NO: 1777637 - RNA, 19 nt, Artificial Sequence
  Description of Artificial Sequence: Synthetic oligonucleotide
ccuugguaugaauacaagc

SEQ ID NO: 1777638 - RNA, 19 nt, Artificial Sequence
  Description of Artificial Sequence: Synthetic oligonucleotide
uuguugcuuauuauuucaa

SEQ ID NO: 1777639 - RNA, 19 nt, Artificial Sequence
  Description of Artificial Sequence: Synthetic oligonucleotide
agauauucuuacuguuaca

SEQ ID NO: 1777640 - RNA, 19 nt, Artificial Sequence
  Description of Artificial Sequence: Synthetic oligonucleotide
gaaguagagugcauuggac

SEQ ID NO: 1777641 - RNA, 19 nt, Artificial Sequence
  Description of Artificial Sequence: Synthetic oligonucleotide
cuuuugcucggauguggcg

SEQ ID NO: 1777642 - RNA, 19 nt, Artificial Sequence
  Description of Artificial Sequence: Synthetic oligonucleotide
ucuuuugaaauggcugcca

SEQ ID NO: 1777643 - RNA, 19 nt, Artificial Sequence
  Description of Artificial Sequence: Synthetic oligonucleotide
uauuucaagccugauugua

SEQ ID NO: 1777644 - RNA, 19 nt, Artificial Sequence
  Description of Artificial Sequence: Synthetic oligonucleotide
ucuggguuuggugucauau

SEQ ID NO: 1777645 - RNA, 19 nt, Artificial Sequence
  Description of Artificial Sequence: Synthetic oligonucleotide
gaccgugugucuaugaaga

SEQ ID NO: 1777646 - RNA, 19 nt, Artificial Sequence
  Description of Artificial Sequence: Synthetic oligonucleotide
ggagaaguagagugcauug

SEQ ID NO: 1777647 - RNA, 19 nt, Artificial Sequence
  Description of Artificial Sequence: Synthetic oligonucleotide
uacaagcacaccauuuguu

SEQ ID NO: 1777648 - RNA, 19 nt, Artificial Sequence
  Description of Artificial Sequence: Synthetic oligonucleotide
acuccaucggccaugcauc

SEQ ID NO: 1777649 - RNA, 19 nt, Artificial Sequence
  Description of Artificial Sequence: Synthetic oligonucleotide
ucggguuacuucuuucacu

SEQ ID NO: 1777650 - RNA, 19 nt, Artificial Sequence
  Description of Artificial Sequence: Synthetic oligonucleotide
agaaguaaagugaguauau

SEQ ID NO: 1777651 - RNA, 19 nt, Artificial Sequence
  Description of Artificial Sequence: Synthetic oligonucleotide
uuugcacuauccagagagu

SEQ ID NO: 1777652 - RNA, 19 nt, Artificial Sequence
  Description of Artificial Sequence: Synthetic oligonucleotide
uuguucaccauagggucgc

SEQ ID NO: 1777653 - RNA, 19 nt, Artificial Sequence
  Description of Artificial Sequence: Synthetic oligonucleotide
cucuuuugcucggaugugg

SEQ ID NO: 1777654 - RNA, 19 nt, Artificial Sequence
  Description of Artificial Sequence: Synthetic oligonucleotide
ucuaccuaccuuccagcuc

SEQ ID NO: 1777655 - RNA, 19 nt, Artificial Sequence
  Description of Artificial Sequence: Synthetic oligonucleotide
agcacauucucggagcucu

SEQ ID NO: 1777656 - RNA, 19 nt, Artificial Sequence
  Description of Artificial Sequence: Synthetic oligonucleotide
cagaauggcaacgcaagac

SEQ ID NO: 1777657 - RNA, 19 nt, Artificial Sequence
  Description of Artificial Sequence: Synthetic oligonucleotide
agcugagcuucuuccacag

SEQ ID NO: 1777658 - RNA, 19 nt, Artificial Sequence
  Description of Artificial Sequence: Synthetic oligonucleotide
uucagucuggacuccgaac

SEQ ID NO: 1777659 - RNA, 19 nt, Artificial Sequence
  Description of Artificial Sequence: Synthetic oligonucleotide
gagggaacucugaugacac

SEQ ID NO: 1777660 - RNA, 19 nt, Artificial Sequence
  Description of Artificial Sequence: Synthetic oligonucleotide
uggugucauauaugguuug

SEQ ID NO: 1777661 - RNA, 19 nt, Artificial Sequence
  Description of Artificial Sequence: Synthetic oligonucleotide
ccacaugagaucacuaagc

SEQ ID NO: 1777662 - RNA, 19 nt, Artificial Sequence
  Description of Artificial Sequence: Synthetic oligonucleotide
ugccauuaauagucggugu

SEQ ID NO: 1777663 - RNA, 19 nt, Artificial Sequence
  Description of Artificial Sequence: Synthetic oligonucleotide
uggcugccauuaauagucg

SEQ ID NO: 1777664 - RNA, 19 nt, Artificial Sequence
  Description of Artificial Sequence: Synthetic oligonucleotide
uugaugugucugcauaauu

SEQ ID NO: 1777665 - RNA, 19 nt, Artificial Sequence
  Description of Artificial Sequence: Synthetic oligonucleotide
cagugguuggcuaggauca

SEQ ID NO: 1777666 - RNA, 19 nt, Artificial Sequence
  Description of Artificial Sequence: Synthetic oligonucleotide
caagcugagcuucuuccac

SEQ ID NO: 1777667 - RNA, 19 nt, Artificial Sequence
  Description of Artificial Sequence: Synthetic oligonucleotide
gaucguugcagggauccug

SEQ ID NO: 1777668 - RNA, 19 nt, Artificial Sequence
  Description of Artificial Sequence: Synthetic oligonucleotide
gcuuguucaccauaggguc

SEQ ID NO: 1777669 - RNA, 19 nt, Artificial Sequence
  Description of Artificial Sequence: Synthetic oligonucleotide
guaugaauacaagcacacc

SEQ ID NO: 1777670 - RNA, 19 nt, Artificial Sequence
  Description of Artificial Sequence: Synthetic oligonucleotide
uuguucugagaucguugca

SEQ ID NO: 1777671 - RNA, 19 nt, Artificial Sequence
  Description of Artificial Sequence: Synthetic oligonucleotide
aacucucccaaaucuucuu

SEQ ID NO: 1777672 - RNA, 19 nt, Artificial Sequence
  Description of Artificial Sequence: Synthetic oligonucleotide
uugcacuauccagagaguc

SEQ ID NO: 1777673 - RNA, 19 nt, Artificial Sequence
  Description of Artificial Sequence: Synthetic oligonucleotide
gugcauuggacauggccug

SEQ ID NO: 1777674 - RNA, 19 nt, Artificial Sequence
  Description of Artificial Sequence: Synthetic oligonucleotide
cuucuuauuggagaaguaa

SEQ ID NO: 1777675 - RNA, 19 nt, Artificial Sequence
  Description of Artificial Sequence: Synthetic oligonucleotide
uggaccgugugucuaugaa

SEQ ID NO: 1777676 - RNA, 19 nt, Artificial Sequence
  Description of Artificial Sequence: Synthetic oligonucleotide
ucggauguggcgagcuaug

SEQ ID NO: 1777677 - RNA, 19 nt, Artificial Sequence
  Description of Artificial Sequence: Synthetic oligonucleotide
guguacaacaauaucugaa

SEQ ID NO: 1777678 - RNA, 19 nt, Artificial Sequence
  Description of Artificial Sequence: Synthetic oligonucleotide
gccacaugagaucacuaag

SEQ ID NO: 1777679 - RNA, 19 nt, Artificial Sequence
  Description of Artificial Sequence: Synthetic oligonucleotide
gggaacucugaugacacag

SEQ ID NO: 1777680 - RNA, 19 nt, Artificial Sequence
  Description of Artificial Sequence: Synthetic oligonucleotide
augguuuguugcuuauuau

SEQ ID NO: 1777681 - RNA, 19 nt, Artificial Sequence
  Description of Artificial Sequence: Synthetic oligonucleotide
ccaggguuuuauuggaccg

SEQ ID NO: 1777682 - RNA, 19 nt, Artificial Sequence
  Description of Artificial Sequence: Synthetic oligonucleotide
uauuggaccgugugucuau

SEQ ID NO: 1777683 - RNA, 19 nt, Artificial Sequence
  Description of Artificial Sequence: Synthetic oligonucleotide
aagagcucgguggacugcu

SEQ ID NO: 1777684 - RNA, 19 nt, Artificial Sequence
  Description of Artificial Sequence: Synthetic oligonucleotide
auagucgguguacaacaau

SEQ ID NO: 1777685 - RNA, 19 nt, Artificial Sequence
  Description of Artificial Sequence: Synthetic oligonucleotide
gauccgguggagaaguaga

SEQ ID NO: 1777686 - RNA, 19 nt, Artificial Sequence
  Description of Artificial Sequence: Synthetic oligonucleotide
agaugaaauguaacugacu

SEQ ID NO: 1777687 - RNA, 19 nt, Artificial Sequence
  Description of Artificial Sequence: Synthetic oligonucleotide
guacaacaauaucugaaua

SEQ ID NO: 1777688 - RNA, 19 nt, Artificial Sequence
  Description of Artificial Sequence: Synthetic oligonucleotide
cccaaaucuucuuagccac

SEQ ID NO: 1777689 - RNA, 19 nt, Artificial Sequence
  Description of Artificial Sequence: Synthetic oligonucleotide
aauagucgguguacaacaa

SEQ ID NO: 1777690 - RNA, 19 nt, Artificial Sequence
  Description of Artificial Sequence: Synthetic oligonucleotide
cuccgaaccucuaccuacc

SEQ ID NO: 1777691 - RNA, 19 nt, Artificial Sequence
  Description of Artificial Sequence: Synthetic oligonucleotide
aagccugauuguaucagaa

SEQ ID NO: 1777692 - RNA, 19 nt, Artificial Sequence
  Description of Artificial Sequence: Synthetic oligonucleotide
auuucaagccugauuguau

SEQ ID NO: 1777693 - RNA, 19 nt, Artificial Sequence
  Description of Artificial Sequence: Synthetic oligonucleotide
guuuuauuggaccgugugu

SEQ ID NO: 1777694 - RNA, 19 nt, Artificial Sequence
  Description of Artificial Sequence: Synthetic oligonucleotide
caacaauaucugaauaucu

SEQ ID NO: 1777695 - RNA, 19 nt, Artificial Sequence
  Description of Artificial Sequence: Synthetic oligonucleotide
accauagggucgcuggggu

SEQ ID NO: 1777696 - RNA, 19 nt, Artificial Sequence
  Description of Artificial Sequence: Synthetic oligonucleotide
guaucagaauggcaacgca

SEQ ID NO: 1777697 - RNA, 19 nt, Artificial Sequence
  Description of Artificial Sequence: Synthetic oligonucleotide
augcaagaccauaaugaug

SEQ ID NO: 1777698 - RNA, 19 nt, Artificial Sequence
  Description of Artificial Sequence: Synthetic oligonucleotide
gaaccucuaccuaccuucc

SEQ ID NO: 1777699 - RNA, 19 nt, Artificial Sequence
  Description of Artificial Sequence: Synthetic oligonucleotide
ggaccgugugucuaugaag

SEQ ID NO: 1777700 - RNA, 19 nt, Artificial Sequence
  Description of Artificial Sequence: Synthetic oligonucleotide
cuccaucggccaugcaucg

SEQ ID NO: 1777701 - RNA, 19 nt, Artificial Sequence
  Description of Artificial Sequence: Synthetic oligonucleotide
ugcauucggccacugucuc

SEQ ID NO: 1777702 - RNA, 19 nt, Artificial Sequence
  Description of Artificial Sequence: Synthetic oligonucleotide
aaccucuaccuaccuucca

SEQ ID NO: 1777703 - RNA, 19 nt, Artificial Sequence
  Description of Artificial Sequence: Synthetic oligonucleotide
cauuaauagucgguguaca

SEQ ID NO: 1777704 - RNA, 19 nt, Artificial Sequence
  Description of Artificial Sequence: Synthetic oligonucleotide
gaagcaccuugccuuugac

SEQ ID NO: 1777705 - RNA, 19 nt, Artificial Sequence
  Description of Artificial Sequence: Synthetic oligonucleotide
cacagaucggguuacuucu

SEQ ID NO: 1777706 - RNA, 19 nt, Artificial Sequence
  Description of Artificial Sequence: Synthetic oligonucleotide
aacucacuuuucagcaaga

SEQ ID NO: 1777707 - RNA, 19 nt, Artificial Sequence
  Description of Artificial Sequence: Synthetic oligonucleotide
uccaaaccuugguaugaau

SEQ ID NO: 1777708 - RNA, 19 nt, Artificial Sequence
  Description of Artificial Sequence: Synthetic oligonucleotide
uggcgagcuaugucaguca

SEQ ID NO: 1777709 - RNA, 19 nt, Artificial Sequence
  Description of Artificial Sequence: Synthetic oligonucleotide
agccugauuguaucagaau

SEQ ID NO: 1777710 - RNA, 19 nt, Artificial Sequence
  Description of Artificial Sequence: Synthetic oligonucleotide
ucggccaugcaucgcuccu

SEQ ID NO: 1777711 - RNA, 19 nt, Artificial Sequence
  Description of Artificial Sequence: Synthetic oligonucleotide
cuggacuccgaaccucuac

SEQ ID NO: 1777712 - RNA, 19 nt, Artificial Sequence
  Description of Artificial Sequence: Synthetic oligonucleotide
gguguacaacaauaucuga

SEQ ID NO: 1777713 - RNA, 19 nt, Artificial Sequence
  Description of Artificial Sequence: Synthetic oligonucleotide
accuugguaugaauacaag

SEQ ID NO: 1777714 - RNA, 19 nt, Artificial Sequence
  Description of Artificial Sequence: Synthetic oligonucleotide
aacgcaagaccuggacaga

SEQ ID NO: 1777715 - RNA, 19 nt, Artificial Sequence
  Description of Artificial Sequence: Synthetic oligonucleotide
ugagaucguugcagggauc

SEQ ID NO: 1777716 - RNA, 19 nt, Artificial Sequence
  Description of Artificial Sequence: Synthetic oligonucleotide
uccgaaccucuaccuaccu

SEQ ID NO: 1777717 - RNA, 19 nt, Artificial Sequence
  Description of Artificial Sequence: Synthetic oligonucleotide
caagccugauuguaucaga

SEQ ID NO: 1777718 - RNA, 19 nt, Artificial Sequence
  Description of Artificial Sequence: Synthetic oligonucleotide
augagaucacuaagccauc

SEQ ID NO: 1777719 - RNA, 19 nt, Artificial Sequence
  Description of Artificial Sequence: Synthetic oligonucleotide
guuggcuaggaucaugcau

SEQ ID NO: 1777720 - RNA, 19 nt, Artificial Sequence
  Description of Artificial Sequence: Synthetic oligonucleotide
cuaacucacuuuucagcaa

SEQ ID NO: 1777721 - RNA, 19 nt, Artificial Sequence
  Description of Artificial Sequence: Synthetic oligonucleotide
augcauucggccacugucu

SEQ ID NO: 1777722 - RNA, 19 nt, Artificial Sequence
  Description of Artificial Sequence: Synthetic oligonucleotide
gaauggcaacgcaagaccu

SEQ ID NO: 1777723 - RNA, 19 nt, Artificial Sequence
  Description of Artificial Sequence: Synthetic oligonucleotide
ggucucuuuugcucggaug

SEQ ID NO: 1777724 - RNA, 19 nt, Artificial Sequence
  Description of Artificial Sequence: Synthetic oligonucleotide
gaagagcucgguggacugc

SEQ ID NO: 1777725 - RNA, 19 nt, Artificial Sequence
  Description of Artificial Sequence: Synthetic oligonucleotide
uuccaaaccuugguaugaa

SEQ ID NO: 1777726 - RNA, 19 nt, Artificial Sequence
  Description of Artificial Sequence: Synthetic oligonucleotide
uccgguggagaaguagagu

SEQ ID NO: 1777727 - RNA, 19 nt, Artificial Sequence
  Description of Artificial Sequence: Synthetic oligonucleotide
ccuaccuuccagcuccagg

SEQ ID NO: 1777728 - RNA, 19 nt, Artificial Sequence
  Description of Artificial Sequence: Synthetic oligonucleotide
ucggccacugucucaugaa

SEQ ID NO: 1777729 - RNA, 19 nt, Artificial Sequence
  Description of Artificial Sequence: Synthetic oligonucleotide
ggcgagcuaugucagucag

SEQ ID NO: 1777730 - RNA, 19 nt, Artificial Sequence
  Description of Artificial Sequence: Synthetic oligonucleotide
cgguguacaacaauaucug

SEQ ID NO: 1777731 - RNA, 19 nt, Artificial Sequence
  Description of Artificial Sequence: Synthetic oligonucleotide
aucuucuuagccacccagu

SEQ ID NO: 1777732 - RNA, 19 nt, Artificial Sequence
  Description of Artificial Sequence: Synthetic oligonucleotide
agucgguguacaacaauau

SEQ ID NO: 1777733 - RNA, 19 nt, Artificial Sequence
  Description of Artificial Sequence: Synthetic oligonucleotide
cacaggauccgguggagaa

SEQ ID NO: 1777734 - RNA, 19 nt, Artificial Sequence
  Description of Artificial Sequence: Synthetic oligonucleotide
ggcugccauuaauagucgg

SEQ ID NO: 1777735 - RNA, 19 nt, Artificial Sequence
  Description of Artificial Sequence: Synthetic oligonucleotide
uguggcgagcuaugucagu

SEQ ID NO: 1777736 - RNA, 19 nt, Artificial Sequence
  Description of Artificial Sequence: Synthetic oligonucleotide
cuuccacagaucggguuac

SEQ ID NO: 1777737 - RNA, 19 nt, Artificial Sequence
  Description of Artificial Sequence: Synthetic oligonucleotide
auccgguggagaaguagag

SEQ ID NO: 1777738 - RNA, 19 nt, Artificial Sequence
  Description of Artificial Sequence: Synthetic oligonucleotide
cacuauccagagagucagc

SEQ ID NO: 1777739 - RNA, 19 nt, Artificial Sequence
  Description of Artificial Sequence: Synthetic oligonucleotide
agccaggguuuuauuggac

SEQ ID NO: 1777740 - RNA, 19 nt, Artificial Sequence
  Description of Artificial Sequence: Synthetic oligonucleotide
agagagucagccaggguuu

SEQ ID NO: 1777741 - RNA, 19 nt, Artificial Sequence
  Description of Artificial Sequence: Synthetic oligonucleotide
ggacagauauucuuacugu

SEQ ID NO: 1777742 - RNA, 19 nt, Artificial Sequence
  Description of Artificial Sequence: Synthetic oligonucleotide
guggcgagcuaugucaguc

SEQ ID NO: 1777743 - RNA, 19 nt, Artificial Sequence
  Description of Artificial Sequence: Synthetic oligonucleotide
ccauuaauagucgguguac

SEQ ID NO: 1777744 - RNA, 19 nt, Artificial Sequence
  Description of Artificial Sequence: Synthetic oligonucleotide
ucgcuggggucauuugcac

SEQ ID NO: 1777745 - RNA, 19 nt, Artificial Sequence
  Description of Artificial Sequence: Synthetic oligonucleotide
uuacuguuacauggucaaa

SEQ ID NO: 1777746 - RNA, 19 nt, Artificial Sequence
  Description of Artificial Sequence: Synthetic oligonucleotide
cagggcaccacaacggucu

SEQ ID NO: 1777747 - RNA, 19 nt, Artificial Sequence
  Description of Artificial Sequence: Synthetic oligonucleotide
auguggcgagcuaugucag

SEQ ID NO: 1777748 - RNA, 19 nt, Artificial Sequence
  Description of Artificial Sequence: Synthetic oligonucleotide
ggcaacgcaagaccuggac

SEQ ID NO: 1777749 - RNA, 19 nt, Artificial Sequence
  Description of Artificial Sequence: Synthetic oligonucleotide
ccucuaccuaccuuccagc

SEQ ID NO: 1777750 - RNA, 19 nt, Artificial Sequence
  Description of Artificial Sequence: Synthetic oligonucleotide
ccacagaucggguuacuuc

SEQ ID NO: 1777751 - RNA, 19 nt, Artificial Sequence
  Description of Artificial Sequence: Synthetic oligonucleotide
cauucagucuggacuccga

SEQ ID NO: 1777752 - RNA, 19 nt, Artificial Sequence
  Description of Artificial Sequence: Synthetic oligonucleotide
gcaacgcaagaccuggaca

SEQ ID NO: 1777753 - RNA, 19 nt, Artificial Sequence
  Description of Artificial Sequence: Synthetic oligonucleotide
ucguugcagggauccuggc

SEQ ID NO: 1777754 - RNA, 19 nt, Artificial Sequence
  Description of Artificial Sequence: Synthetic oligonucleotide
ggauccgguggagaaguag

SEQ ID NO: 1777755 - RNA, 19 nt, Artificial Sequence
  Description of Artificial Sequence: Synthetic oligonucleotide
ccaaaucuucuuagccacc

SEQ ID NO: 1777756 - RNA, 19 nt, Artificial Sequence
  Description of Artificial Sequence: Synthetic oligonucleotide
agggcaccacaacggucuc

SEQ ID NO: 1777757 - RNA, 19 nt, Artificial Sequence
  Description of Artificial Sequence: Synthetic oligonucleotide
gccauuaauagucggugua

SEQ ID NO: 1777758 - RNA, 19 nt, Artificial Sequence
  Description of Artificial Sequence: Synthetic oligonucleotide
gaaguaaagugaguauauu

SEQ ID NO: 1777759 - RNA, 19 nt, Artificial Sequence
  Description of Artificial Sequence: Synthetic oligonucleotide
uggggucauuugcacuauc

SEQ ID NO: 1777760 - RNA, 19 nt, Artificial Sequence
  Description of Artificial Sequence: Synthetic oligonucleotide
ccaaaccuugguaugaaua

SEQ ID NO: 1777761 - RNA, 19 nt, Artificial Sequence
  Description of Artificial Sequence: Synthetic oligonucleotide
ggagaaguaaagugaguau

SEQ ID NO: 1777762 - RNA, 19 nt, Artificial Sequence
  Description of Artificial Sequence: Synthetic oligonucleotide
gcuggggucauuugcacua

SEQ ID NO: 1777763 - RNA, 19 nt, Artificial Sequence
  Description of Artificial Sequence: Synthetic oligonucleotide
ggccacaugagaucacuaa

SEQ ID NO: 1777764 - RNA, 19 nt, Artificial Sequence
  Description of Artificial Sequence: Synthetic oligonucleotide
gugguuggcuaggaucaug

SEQ ID NO: 1777765 - RNA, 19 nt, Artificial Sequence
  Description of Artificial Sequence: Synthetic oligonucleotide
cacaccauuuguucuaauu

SEQ ID NO: 1777766 - RNA, 19 nt, Artificial Sequence
  Description of Artificial Sequence: Synthetic oligonucleotide
uccaucggccaugcaucgc

SEQ ID NO: 1777767 - RNA, 19 nt, Artificial Sequence
  Description of Artificial Sequence: Synthetic oligonucleotide
cacuccaucggccaugcau

SEQ ID NO: 1777768 - RNA, 19 nt, Artificial Sequence
  Description of Artificial Sequence: Synthetic oligonucleotide
agagugcauuggacauggc

SEQ ID NO: 1777769 - RNA, 19 nt, Artificial Sequence
  Description of Artificial Sequence: Synthetic oligonucleotide
ccgugugucuaugaagaag

SEQ ID NO: 1777770 - RNA, 19 nt, Artificial Sequence
  Description of Artificial Sequence: Synthetic oligonucleotide
acgcaagaccuggacagau

SEQ ID NO: 1777771 - RNA, 19 nt, Artificial Sequence
  Description of Artificial Sequence: Synthetic oligonucleotide
cauuugcacuauccagaga

SEQ ID NO: 1777772 - RNA, 19 nt, Artificial Sequence
  Description of Artificial Sequence: Synthetic oligonucleotide
uaccuaccuuccagcucca

SEQ ID NO: 1777773 - RNA, 19 nt, Artificial Sequence
  Description of Artificial Sequence: Synthetic oligonucleotide
cugagaucguugcagggau

SEQ ID NO: 1777774 - RNA, 19 nt, Artificial Sequence
  Description of Artificial Sequence: Synthetic oligonucleotide
gcugugguagaggugaucu

SEQ ID NO: 1777775 - RNA, 19 nt, Artificial Sequence
  Description of Artificial Sequence: Synthetic oligonucleotide
cucuaccuaccuuccagcu

SEQ ID NO: 1777776 - RNA, 19 nt, Artificial Sequence
  Description of Artificial Sequence: Synthetic oligonucleotide
uagcacauucucggagcuc

SEQ ID NO: 1777777 - RNA, 19 nt, Artificial Sequence
  Description of Artificial Sequence: Synthetic oligonucleotide
ccacccagugguuggcuag

SEQ ID NO: 1777778 - RNA, 19 nt, Artificial Sequence
  Description of Artificial Sequence: Synthetic oligonucleotide
augcaucgcuccucuguuu

SEQ ID NO: 1777779 - RNA, 19 nt, Artificial Sequence
  Description of Artificial Sequence: Synthetic oligonucleotide
agaucguugcagggauccu

SEQ ID NO: 1777780 - RNA, 19 nt, Artificial Sequence
  Description of Artificial Sequence: Synthetic oligonucleotide
ggcuaggaucaugcauucg

SEQ ID NO: 1777781 - RNA, 19 nt, Artificial Sequence
  Description of Artificial Sequence: Synthetic oligonucleotide
cugggccacaugagaucac

SEQ ID NO: 1777782 - RNA, 19 nt, Artificial Sequence
  Description of Artificial Sequence: Synthetic oligonucleotide
cucgguggacugcuucuga

SEQ ID NO: 1777783 - RNA, 19 nt, Artificial Sequence
  Description of Artificial Sequence: Synthetic oligonucleotide
ccacaacggucucuuuugc

SEQ ID NO: 1777784 - RNA, 19 nt, Artificial Sequence
  Description of Artificial Sequence: Synthetic oligonucleotide
cacaacggucucuuuugcu

SEQ ID NO: 1777785 - RNA, 19 nt, Artificial Sequence
  Description of Artificial Sequence: Synthetic oligonucleotide
uguucaccauagggucgcu

SEQ ID NO: 1777786 - RNA, 19 nt, Artificial Sequence
  Description of Artificial Sequence: Synthetic oligonucleotide
gaggguguuggcgcagcaa

SEQ ID NO: 1777787 - RNA, 19 nt, Artificial Sequence
  Description of Artificial Sequence: Synthetic oligonucleotide
agugguuggcuaggaucau

SEQ ID NO: 1777788 - RNA, 19 nt, Artificial Sequence
  Description of Artificial Sequence: Synthetic oligonucleotide
ucacuccaucggccaugca

SEQ ID NO: 1777789 - RNA, 19 nt, Artificial Sequence
  Description of Artificial Sequence: Synthetic oligonucleotide
caggauccgguggagaagu

SEQ ID NO: 1777790 - RNA, 19 nt, Artificial Sequence
  Description of Artificial Sequence: Synthetic oligonucleotide
caugcaucgcuccucuguu

SEQ ID NO: 1777791 - RNA, 19 nt, Artificial Sequence
  Description of Artificial Sequence: Synthetic oligonucleotide
acagaucggguuacuucuu

SEQ ID NO: 1777792 - RNA, 19 nt, Artificial Sequence
  Description of Artificial Sequence: Synthetic oligonucleotide
gcugccauuaauagucggu

SEQ ID NO: 1777793 - RNA, 19 nt, Artificial Sequence
  Description of Artificial Sequence: Synthetic oligonucleotide
cggguuacuucuuucacua

SEQ ID NO: 1777794 - RNA, 19 nt, Artificial Sequence
  Description of Artificial Sequence: Synthetic oligonucleotide
gaucuuguucugagaucgu

SEQ ID NO: 1777795 - RNA, 19 nt, Artificial Sequence
  Description of Artificial Sequence: Synthetic oligonucleotide
ggugucauauaugguuugu

SEQ ID NO: 1777796 - RNA, 19 nt, Artificial Sequence
  Description of Artificial Sequence: Synthetic oligonucleotide
ggacuccgaaccucuaccu

SEQ ID NO: 1777797 - RNA, 19 nt, Artificial Sequence
  Description of Artificial Sequence: Synthetic oligonucleotide
accuaccuuccagcuccag

SEQ ID NO: 1777798 - RNA, 19 nt, Artificial Sequence
  Description of Artificial Sequence: Synthetic oligonucleotide
acggucucuuuugcucgga

SEQ ID NO: 1777799 - RNA, 19 nt, Artificial Sequence
  Description of Artificial Sequence: Synthetic oligonucleotide
gcauucggccacugucuca

SEQ ID NO: 1777800 - RNA, 19 nt, Artificial Sequence
  Description of Artificial Sequence: Synthetic oligonucleotide
ggaacucugaugacacagu

SEQ ID NO: 1777801 - RNA, 19 nt, Artificial Sequence
  Description of Artificial Sequence: Synthetic oligonucleotide
acccagugguuggcuagga

SEQ ID NO: 1777802 - RNA, 19 nt, Artificial Sequence
  Description of Artificial Sequence: Synthetic oligonucleotide
agagucagccaggguuuua

SEQ ID NO: 1777803 - RNA, 19 nt, Artificial Sequence
  Description of Artificial Sequence: Synthetic oligonucleotide
cagucuggacuccgaaccu

SEQ ID NO: 1777804 - RNA, 19 nt, Artificial Sequence
  Description of Artificial Sequence: Synthetic oligonucleotide
gggucgcuggggucauuug

SEQ ID NO: 1777805 - RNA, 19 nt, Artificial Sequence
  Description of Artificial Sequence: Synthetic oligonucleotide
ggguuacuucuuucacuaa

SEQ ID NO: 1777806 - RNA, 19 nt, Artificial Sequence
  Description of Artificial Sequence: Synthetic oligonucleotide
gcgagcuaugucagucagc

SEQ ID NO: 1777807 - RNA, 19 nt, Artificial Sequence
  Description of Artificial Sequence: Synthetic oligonucleotide
cucggauguggcgagcuau

SEQ ID NO: 1777808 - RNA, 19 nt, Artificial Sequence
  Description of Artificial Sequence: Synthetic oligonucleotide
ccauagggucgcugggguc

SEQ ID NO: 1777809 - RNA, 19 nt, Artificial Sequence
  Description of Artificial Sequence: Synthetic oligonucleotide
ggacauggccuggguggcc

SEQ ID NO: 1777810 - RNA, 19 nt, Artificial Sequence
  Description of Artificial Sequence: Synthetic oligonucleotide
cagaucggguuacuucuuu

SEQ ID NO: 1777811 - RNA, 19 nt, Artificial Sequence
  Description of Artificial Sequence: Synthetic oligonucleotide
cccuuuguuuggcagaauu

SEQ ID NO: 1777812 - RNA, 19 nt, Artificial Sequence
  Description of Artificial Sequence: Synthetic oligonucleotide
gccaugcaucgcuccucug

SEQ ID NO: 1777813 - RNA, 19 nt, Artificial Sequence
  Description of Artificial Sequence: Synthetic oligonucleotide
gagcuaugucagucagcuu

SEQ ID NO: 1777814 - RNA, 19 nt, Artificial Sequence
  Description of Artificial Sequence: Synthetic oligonucleotide
gcaucgcuccucuguuucu

SEQ ID NO: 1777815 - RNA, 19 nt, Artificial Sequence
  Description of Artificial Sequence: Synthetic oligonucleotide
gccacccagugguuggcua

SEQ ID NO: 1777816 - RNA, 19 nt, Artificial Sequence
  Description of Artificial Sequence: Synthetic oligonucleotide
ggguuuuauuggaccgugu

SEQ ID NO: 1777817 - RNA, 19 nt, Artificial Sequence
  Description of Artificial Sequence: Synthetic oligonucleotide
gggccacaugagaucacua

SEQ ID NO: 1777818 - RNA, 19 nt, Artificial Sequence
  Description of Artificial Sequence: Synthetic oligonucleotide
gcucggauguggcgagcua

SEQ ID NO: 1777819 - RNA, 19 nt, Artificial Sequence
  Description of Artificial Sequence: Synthetic oligonucleotide
cuggggucauuugcacuau

SEQ ID NO: 1777820 - RNA, 19 nt, Artificial Sequence
  Description of Artificial Sequence: Synthetic oligonucleotide
ccgaaccucuaccuaccuu

SEQ ID NO: 1777821 - RNA, 19 nt, Artificial Sequence
  Description of Artificial Sequence: Synthetic oligonucleotide
cggauguggcgagcuaugu

SEQ ID NO: 1777822 - RNA, 19 nt, Artificial Sequence
  Description of Artificial Sequence: Synthetic oligonucleotide
cggucucuuuugcucggau

SEQ ID NO: 1777823 - RNA, 19 nt, Artificial Sequence
  Description of Artificial Sequence: Synthetic oligonucleotide
aauggcuggauuuuagagc

SEQ ID NO: 1777824 - RNA, 19 nt, Artificial Sequence
  Description of Artificial Sequence: Synthetic oligonucleotide
aauugccacaaucauagac

SEQ ID NO: 1777825 - RNA, 19 nt, Artificial Sequence
  Description of Artificial Sequence: Synthetic oligonucleotide
ugaugcauacaucuaaugg

SEQ ID NO: 1777826 - RNA, 19 nt, Artificial Sequence
  Description of Artificial Sequence: Synthetic oligonucleotide
uuaacaguucguuugaugc

SEQ ID NO: 1777827 - RNA, 19 nt, Artificial Sequence
  Description of Artificial Sequence: Synthetic oligonucleotide
aaaauauaaccaaguaccc

SEQ ID NO: 1777828 - RNA, 19 nt, Artificial Sequence
  Description of Artificial Sequence: Synthetic oligonucleotide
auaagauaucuuaaaaccc

SEQ ID NO: 1777829 - RNA, 19 nt, Artificial Sequence
  Description of Artificial Sequence: Synthetic oligonucleotide
uggcauaaaauuaaaauau

SEQ ID NO: 1777830 - RNA, 19 nt, Artificial Sequence
  Description of Artificial Sequence: Synthetic oligonucleotide
aaagagaccucaucaauug

SEQ ID NO: 1777831 - RNA, 19 nt, Artificial Sequence
  Description of Artificial Sequence: Synthetic oligonucleotide
uuggccucuagcaauauag

SEQ ID NO: 1777832 - RNA, 19 nt, Artificial Sequence
  Description of Artificial Sequence: Synthetic oligonucleotide
ucagaagugaucacuacug

SEQ ID NO: 1777833 - RNA, 19 nt, Artificial Sequence
  Description of Artificial Sequence: Synthetic oligonucleotide
uaaugugugggcuacagcu

SEQ ID NO: 1777834 - RNA, 19 nt, Artificial Sequence
  Description of Artificial Sequence: Synthetic oligonucleotide
uccauaugcucucauagcc

SEQ ID NO: 1777835 - RNA, 19 nt, Artificial Sequence
  Description of Artificial Sequence: Synthetic oligonucleotide
ggauuuuagagcuacagcc

SEQ ID NO: 1777836 - RNA, 19 nt, Artificial Sequence
  Description of Artificial Sequence: Synthetic oligonucleotide
uaauguugccaucaggacc

SEQ ID NO: 1777837 - RNA, 19 nt, Artificial Sequence
  Description of Artificial Sequence: Synthetic oligonucleotide
aguacuacaucacaccaag

SEQ ID NO: 1777838 - RNA, 19 nt, Artificial Sequence
  Description of Artificial Sequence: Synthetic oligonucleotide
cagaacacuagccacaagg

SEQ ID NO: 1777839 - RNA, 19 nt, Artificial Sequence
  Description of Artificial Sequence: Synthetic oligonucleotide
uguaggugaguuaauguug

SEQ ID NO: 1777840 - RNA, 19 nt, Artificial Sequence
  Description of Artificial Sequence: Synthetic oligonucleotide
agagcuacagccugcaggg

SEQ ID NO: 1777841 - RNA, 19 nt, Artificial Sequence
  Description of Artificial Sequence: Synthetic oligonucleotide
cuagccacaaggaaggacc

SEQ ID NO: 1777842 - RNA, 19 nt, Artificial Sequence
  Description of Artificial Sequence: Synthetic oligonucleotide
aaagcauucuccuuccggu

SEQ ID NO: 1777843 - RNA, 19 nt, Artificial Sequence
  Description of Artificial Sequence: Synthetic oligonucleotide
aacacuagccacaaggaag

SEQ ID NO: 1777844 - RNA, 19 nt, Artificial Sequence
  Description of Artificial Sequence: Synthetic oligonucleotide
auucauuuguccucgguag

SEQ ID NO: 1777845 - RNA, 19 nt, Artificial Sequence
  Description of Artificial Sequence: Synthetic oligonucleotide
cugauugugaaucugccgc

SEQ ID NO: 1777846 - RNA, 19 nt, Artificial Sequence
  Description of Artificial Sequence: Synthetic oligonucleotide
ucgguagaaaaccagggug

SEQ ID NO: 1777847 - RNA, 19 nt, Artificial Sequence
  Description of Artificial Sequence: Synthetic oligonucleotide
aagagaccucaucaauugc

SEQ ID NO: 1777848 - RNA, 19 nt, Artificial Sequence
  Description of Artificial Sequence: Synthetic oligonucleotide
guucuuaacaguucguuug

SEQ ID NO: 1777849 - RNA, 19 nt, Artificial Sequence
  Description of Artificial Sequence: Synthetic oligonucleotide
aauguugccaucaggaccu

SEQ ID NO: 1777850 - RNA, 19 nt, Artificial Sequence
  Description of Artificial Sequence: Synthetic oligonucleotide
acuccauaugcucucauag

SEQ ID NO: 1777851 - RNA, 19 nt, Artificial Sequence
  Description of Artificial Sequence: Synthetic oligonucleotide
ucuagcaauauagagucug

SEQ ID NO: 1777852 - RNA, 19 nt, Artificial Sequence
  Description of Artificial Sequence: Synthetic oligonucleotide
cauagacaaagguaagucc

SEQ ID NO: 1777853 - RNA, 19 nt, Artificial Sequence
  Description of Artificial Sequence: Synthetic oligonucleotide
uagaaaaccagggugggag

SEQ ID NO: 1777854 - RNA, 19 nt, Artificial Sequence
  Description of Artificial Sequence: Synthetic oligonucleotide
cagcaugaaacguacagcc

SEQ ID NO: 1777855 - RNA, 19 nt, Artificial Sequence
  Description of Artificial Sequence: Synthetic oligonucleotide
aauaguggcauaaaauuaa

SEQ ID NO: 1777856 - RNA, 19 nt, Artificial Sequence
  Description of Artificial Sequence: Synthetic oligonucleotide
uauagagucuggcacauua

SEQ ID NO: 1777857 - RNA, 19 nt, Artificial Sequence
  Description of Artificial Sequence: Synthetic oligonucleotide
uuccuaauaacccaccaau

SEQ ID NO: 1777858 - RNA, 19 nt, Artificial Sequence
  Description of Artificial Sequence: Synthetic oligonucleotide
uggauuuuagagcuacagc

SEQ ID NO: 1777859 - RNA, 19 nt, Artificial Sequence
  Description of Artificial Sequence: Synthetic oligonucleotide
aauggaccagcuccucggc

SEQ ID NO: 1777860 - RNA, 19 nt, Artificial Sequence
  Description of Artificial Sequence: Synthetic oligonucleotide
caguccaucaccagcaugc

SEQ ID NO: 1777861 - RNA, 19 nt, Artificial Sequence
  Description of Artificial Sequence: Synthetic oligonucleotide
cuacaucacaccaagguuc

SEQ ID NO: 1777862 - RNA, 19 nt, Artificial Sequence
  Description of Artificial Sequence: Synthetic oligonucleotide
agugcuagaggcacuaagc

SEQ ID NO: 1777863 - RNA, 19 nt, Artificial Sequence
  Description of Artificial Sequence: Synthetic oligonucleotide
aaacguacagcccacucau

SEQ ID NO: 1777864 - RNA, 19 nt, Artificial Sequence
  Description of Artificial Sequence: Synthetic oligonucleotide
agagaccucaucaauugcc

SEQ ID NO: 1777865 - RNA, 19 nt, Artificial Sequence
  Description of Artificial Sequence: Synthetic oligonucleotide
aguuaauguugccaucagg

SEQ ID NO: 1777866 - RNA, 19 nt, Artificial Sequence
  Description of Artificial Sequence: Synthetic oligonucleotide
ucagaucuaggucagcuuc

SEQ ID NO: 1777867 - RNA, 19 nt, Artificial Sequence
  Description of Artificial Sequence: Synthetic oligonucleotide
accaagguuccccugugcc

SEQ ID NO: 1777868 - RNA, 19 nt, Artificial Sequence
  Description of Artificial Sequence: Synthetic oligonucleotide
aacaaagagaccucaucaa

SEQ ID NO: 1777869 - RNA, 19 nt, Artificial Sequence
  Description of Artificial Sequence: Synthetic oligonucleotide
auuuuagagcuacagccug

SEQ ID NO: 1777870 - RNA, 19 nt, Artificial Sequence
  Description of Artificial Sequence: Synthetic oligonucleotide
guuaauguugccaucagga

SEQ ID NO: 1777871 - RNA, 19 nt, Artificial Sequence
  Description of Artificial Sequence: Synthetic oligonucleotide
uggcacauuagcaagccga

SEQ ID NO: 1777872 - RNA, 19 nt, Artificial Sequence
  Description of Artificial Sequence: Synthetic oligonucleotide
ucuucugacaagugagugc

SEQ ID NO: 1777873 - RNA, 19 nt, Artificial Sequence
  Description of Artificial Sequence: Synthetic oligonucleotide
ugacaagugagugcgauga

SEQ ID NO: 1777874 - RNA, 19 nt, Artificial Sequence
  Description of Artificial Sequence: Synthetic oligonucleotide
agcaccuagaucuccauca

SEQ ID NO: 1777875 - RNA, 19 nt, Artificial Sequence
  Description of Artificial Sequence: Synthetic oligonucleotide
auaacccaccaauucacag

SEQ ID NO: 1777876 - RNA, 19 nt, Artificial Sequence
  Description of Artificial Sequence: Synthetic oligonucleotide
cacauuagcaagccgauuc

SEQ ID NO: 1777877 - RNA, 19 nt, Artificial Sequence
  Description of Artificial Sequence: Synthetic oligonucleotide
accacugcaggcaaagugc

SEQ ID NO: 1777878 - RNA, 19 nt, Artificial Sequence
  Description of Artificial Sequence: Synthetic oligonucleotide
agcaauauagagucuggca

SEQ ID NO: 1777879 - RNA, 19 nt, Artificial Sequence
  Description of Artificial Sequence: Synthetic oligonucleotide
uacaucacaccaagguucc

SEQ ID NO: 1777880 - RNA, 19 nt, Artificial Sequence
  Description of Artificial Sequence: Synthetic oligonucleotide
acucaaugaagaguccugc

SEQ ID NO: 1777881 - RNA, 19 nt, Artificial Sequence
  Description of Artificial Sequence: Synthetic oligonucleotide
uuagcaagccgauucauuu

SEQ ID NO: 1777882 - RNA, 19 nt, Artificial Sequence
  Description of Artificial Sequence: Synthetic oligonucleotide
caaagagcguccuauuuug

SEQ ID NO: 1777883 - RNA, 19 nt, Artificial Sequence
  Description of Artificial Sequence: Synthetic oligonucleotide
agugcgaugacaguccauc

SEQ ID NO: 1777884 - RNA, 19 nt, Artificial Sequence
  Description of Artificial Sequence: Synthetic oligonucleotide
auagacaaagguaaguccu

SEQ ID NO: 1777885 - RNA, 19 nt, Artificial Sequence
  Description of Artificial Sequence: Synthetic oligonucleotide
aagccgauucauuuguccu

SEQ ID NO: 1777886 - RNA, 19 nt, Artificial Sequence
  Description of Artificial Sequence: Synthetic oligonucleotide
cuagcaauauagagucugg

SEQ ID NO: 1777887 - RNA, 19 nt, Artificial Sequence
  Description of Artificial Sequence: Synthetic oligonucleotide
agcuccucggcucagaagu

SEQ ID NO: 1777888 - RNA, 19 nt, Artificial Sequence
  Description of Artificial Sequence: Synthetic oligonucleotide
gccacaaucauagacaaag

SEQ ID NO: 1777889 - RNA, 19 nt, Artificial Sequence
  Description of Artificial Sequence: Synthetic oligonucleotide
uuuuagagcuacagccugc

SEQ ID NO: 1777890 - RNA, 19 nt, Artificial Sequence
  Description of Artificial Sequence: Synthetic oligonucleotide
aagccauagaaggacuccg

SEQ ID NO: 1777891 - RNA, 19 nt, Artificial Sequence
  Description of Artificial Sequence: Synthetic oligonucleotide
aggacaucagaaucacacg

SEQ ID NO: 1777892 - RNA, 19 nt, Artificial Sequence
  Description of Artificial Sequence: Synthetic oligonucleotide
augugugggcuacagcucg

SEQ ID NO: 1777893 - RNA, 19 nt, Artificial Sequence
  Description of Artificial Sequence: Synthetic oligonucleotide
agugagguggugccgcagc

SEQ ID NO: 1777894 - RNA, 19 nt, Artificial Sequence
  Description of Artificial Sequence: Synthetic oligonucleotide
ucugcuacauccuucggua

SEQ ID NO: 1777895 - RNA, 19 nt, Artificial Sequence
  Description of Artificial Sequence: Synthetic oligonucleotide
uuuccuaauaacccaccaa

SEQ ID NO: 1777896 - RNA, 19 nt, Artificial Sequence
  Description of Artificial Sequence: Synthetic oligonucleotide
aaucauagacaaagguaag

SEQ ID NO: 1777897 - RNA, 19 nt, Artificial Sequence
  Description of Artificial Sequence: Synthetic oligonucleotide
aagugucaaugucagggga

SEQ ID NO: 1777898 - RNA, 19 nt, Artificial Sequence
  Description of Artificial Sequence: Synthetic oligonucleotide
agucuggcacauuagcaag

SEQ ID NO: 1777899 - RNA, 19 nt, Artificial Sequence
  Description of Artificial Sequence: Synthetic oligonucleotide
cauccuucgguaaugugug

SEQ ID NO: 1777900 - RNA, 19 nt, Artificial Sequence
  Description of Artificial Sequence: Synthetic oligonucleotide
uugaugcauacaucuaaug

SEQ ID NO: 1777901 - RNA, 19 nt, Artificial Sequence
  Description of Artificial Sequence: Synthetic oligonucleotide
uuguccucgguagaaaacc

SEQ ID NO: 1777902 - RNA, 19 nt, Artificial Sequence
  Description of Artificial Sequence: Synthetic oligonucleotide
uccugauugugaaucugcc

SEQ ID NO: 1777903 - RNA, 19 nt, Artificial Sequence
  Description of Artificial Sequence: Synthetic oligonucleotide
ugucugcaaagcauucucc

SEQ ID NO: 1777904 - RNA, 19 nt, Artificial Sequence
  Description of Artificial Sequence: Synthetic oligonucleotide
caauggaccagcuccucgg

SEQ ID NO: 1777905 - RNA, 19 nt, Artificial Sequence
  Description of Artificial Sequence: Synthetic oligonucleotide
gaaacguacagcccacuca

SEQ ID NO: 1777906 - RNA, 19 nt, Artificial Sequence
  Description of Artificial Sequence: Synthetic oligonucleotide
aaugugugggcuacagcuc

SEQ ID NO: 1777907 - RNA, 19 nt, Artificial Sequence
  Description of Artificial Sequence: Synthetic oligonucleotide
caagccgauucauuugucc

SEQ ID NO: 1777908 - RNA, 19 nt, Artificial Sequence
  Description of Artificial Sequence: Synthetic oligonucleotide
ucucauagccucagcaccu

SEQ ID NO: 1777909 - RNA, 19 nt, Artificial Sequence
  Description of Artificial Sequence: Synthetic oligonucleotide
aaaaccagggugggaggac

SEQ ID NO: 1777910 - RNA, 19 nt, Artificial Sequence
  Description of Artificial Sequence: Synthetic oligonucleotide
uucaaagagcuggugcagg

SEQ ID NO: 1777911 - RNA, 19 nt, Artificial Sequence
  Description of Artificial Sequence: Synthetic oligonucleotide
uccucuagggaggaaauga

SEQ ID NO: 1777912 - RNA, 19 nt, Artificial Sequence
  Description of Artificial Sequence: Synthetic oligonucleotide
ugaacuagcucuggggagc

SEQ ID NO: 1777913 - RNA, 19 nt, Artificial Sequence
  Description of Artificial Sequence: Synthetic oligonucleotide
uaacaguucguuugaugca

SEQ ID NO: 1777914 - RNA, 19 nt, Artificial Sequence
  Description of Artificial Sequence: Synthetic oligonucleotide
ggcaugaggagugaggugg

SEQ ID NO: 1777915 - RNA, 19 nt, Artificial Sequence
  Description of Artificial Sequence: Synthetic oligonucleotide
augaggagugagguggugc

SEQ ID NO: 1777916 - RNA, 19 nt, Artificial Sequence
  Description of Artificial Sequence: Synthetic oligonucleotide
acagaagugucaaugucag

SEQ ID NO: 1777917 - RNA, 19 nt, Artificial Sequence
  Description of Artificial Sequence: Synthetic oligonucleotide
aauauagagucuggcacau

SEQ ID NO: 1777918 - RNA, 19 nt, Artificial Sequence
  Description of Artificial Sequence: Synthetic oligonucleotide
acaaagagaccucaucaau

SEQ ID NO: 1777919 - RNA, 19 nt, Artificial Sequence
  Description of Artificial Sequence: Synthetic oligonucleotide
cauaugcucucauagccuc

SEQ ID NO: 1777920 - RNA, 19 nt, Artificial Sequence
  Description of Artificial Sequence: Synthetic oligonucleotide
cuagaggcacuaagcaggg

SEQ ID NO: 1777921 - RNA, 19 nt, Artificial Sequence
  Description of Artificial Sequence: Synthetic oligonucleotide
cuggauuuuagagcuacag

SEQ ID NO: 1777922 - RNA, 19 nt, Artificial Sequence
  Description of Artificial Sequence: Synthetic oligonucleotide
ucucuaagcccucuacccu

SEQ ID NO: 1777923 - RNA, 19 nt, Artificial Sequence
  Description of Artificial Sequence: Synthetic oligonucleotide
gauucauuuguccucggua

SEQ ID NO: 1777924 - RNA, 19 nt, Artificial Sequence
  Description of Artificial Sequence: Synthetic oligonucleotide
caaugucaggggaauagug

SEQ ID NO: 1777925 - RNA, 19 nt, Artificial Sequence
  Description of Artificial Sequence: Synthetic oligonucleotide
ccucuagcaauauagaguc

SEQ ID NO: 1777926 - RNA, 19 nt, Artificial Sequence
  Description of Artificial Sequence: Synthetic oligonucleotide
acuacaucacaccaagguu

SEQ ID NO: 1777927 - RNA, 19 nt, Artificial Sequence
  Description of Artificial Sequence: Synthetic oligonucleotide
auagccaguacuacaucac

SEQ ID NO: 1777928 - RNA, 19 nt, Artificial Sequence
  Description of Artificial Sequence: Synthetic oligonucleotide
aagguaaguccugauugug

SEQ ID NO: 1777929 - RNA, 19 nt, Artificial Sequence
  Description of Artificial Sequence: Synthetic oligonucleotide
acuagcucuggggagcccc

SEQ ID NO: 1777930 - RNA, 19 nt, Artificial Sequence
  Description of Artificial Sequence: Synthetic oligonucleotide
aguaucugccauuucccga

SEQ ID NO: 1777931 - RNA, 19 nt, Artificial Sequence
  Description of Artificial Sequence: Synthetic oligonucleotide
cagaagugaucacuacugg

SEQ ID NO: 1777932 - RNA, 19 nt, Artificial Sequence
  Description of Artificial Sequence: Synthetic oligonucleotide
uccuucgguaauguguggg

SEQ ID NO: 1777933 - RNA, 19 nt, Artificial Sequence
  Description of Artificial Sequence: Synthetic oligonucleotide
uguagccacucucuuuggc

SEQ ID NO: 1777934 - RNA, 19 nt, Artificial Sequence
  Description of Artificial Sequence: Synthetic oligonucleotide
aggacuccgucucacuuuc

SEQ ID NO: 1777935 - RNA, 19 nt, Artificial Sequence
  Description of Artificial Sequence: Synthetic oligonucleotide
guaggugaguuaauguugc

SEQ ID NO: 1777936 - RNA, 19 nt, Artificial Sequence
  Description of Artificial Sequence: Synthetic oligonucleotide
cucuagggaggaaaugagc

SEQ ID NO: 1777937 - RNA, 19 nt, Artificial Sequence
  Description of Artificial Sequence: Synthetic oligonucleotide
agccgauucauuuguccuc

SEQ ID NO: 1777938 - RNA, 19 nt, Artificial Sequence
  Description of Artificial Sequence: Synthetic oligonucleotide
aaucugccgcugaacaaac

SEQ ID NO: 1777939 - RNA, 19 nt, Artificial Sequence
  Description of Artificial Sequence: Synthetic oligonucleotide
agcaagccgauucauuugu

SEQ ID NO: 1777940 - RNA, 19 nt, Artificial Sequence
  Description of Artificial Sequence: Synthetic oligonucleotide
aagugaucacuacuggcuu

SEQ ID NO: 1777941 - RNA, 19 nt, Artificial Sequence
  Description of Artificial Sequence: Synthetic oligonucleotide
ugcgaugacaguccaucac

SEQ ID NO: 1777942 - RNA, 19 nt, Artificial Sequence
  Description of Artificial Sequence: Synthetic oligonucleotide
caguaucugccauuucccg

SEQ ID NO: 1777943 - RNA, 19 nt, Artificial Sequence
  Description of Artificial Sequence: Synthetic oligonucleotide
uugccacaaucauagacaa

SEQ ID NO: 1777944 - RNA, 19 nt, Artificial Sequence
  Description of Artificial Sequence: Synthetic oligonucleotide
gaguuaauguugccaucag

SEQ ID NO: 1777945 - RNA, 19 nt, Artificial Sequence
  Description of Artificial Sequence: Synthetic oligonucleotide
cagaaucacacgcaguauc

SEQ ID NO: 1777946 - RNA, 19 nt, Artificial Sequence
  Description of Artificial Sequence: Synthetic oligonucleotide
cuagaucuccaucagaucu

SEQ ID NO: 1777947 - RNA, 19 nt, Artificial Sequence
  Description of Artificial Sequence: Synthetic oligonucleotide
uaguggcauaaaauuaaaa

SEQ ID NO: 1777948 - RNA, 19 nt, Artificial Sequence
  Description of Artificial Sequence: Synthetic oligonucleotide
ugauugugaaucugccgcu

SEQ ID NO: 1777949 - RNA, 19 nt, Artificial Sequence
  Description of Artificial Sequence: Synthetic oligonucleotide
uggcuuuccuaauaaccca

SEQ ID NO: 1777950 - RNA, 19 nt, Artificial Sequence
  Description of Artificial Sequence: Synthetic oligonucleotide
ucuaagcccucuacccucc

SEQ ID NO: 1777951 - RNA, 19 nt, Artificial Sequence
  Description of Artificial Sequence: Synthetic oligonucleotide
uuuagagcuacagccugca

SEQ ID NO: 1777952 - RNA, 19 nt, Artificial Sequence
  Description of Artificial Sequence: Synthetic oligonucleotide
uagccaguacuacaucaca

SEQ ID NO: 1777953 - RNA, 19 nt, Artificial Sequence
  Description of Artificial Sequence: Synthetic oligonucleotide
cuggcagaacacuagccac

SEQ ID NO: 1777954 - RNA, 19 nt, Artificial Sequence
  Description of Artificial Sequence: Synthetic oligonucleotide
caaacucaaugaagagucc

SEQ ID NO: 1777955 - RNA, 19 nt, Artificial Sequence
  Description of Artificial Sequence: Synthetic oligonucleotide
aucauagacaaagguaagu

SEQ ID NO: 1777956 - RNA, 19 nt, Artificial Sequence
  Description of Artificial Sequence: Synthetic oligonucleotide
gagucuggcacauuagcaa

SEQ ID NO: 1777957 - RNA, 19 nt, Artificial Sequence
  Description of Artificial Sequence: Synthetic oligonucleotide
uucguuugaugcauacauc

SEQ ID NO: 1777958 - RNA, 19 nt, Artificial Sequence
  Description of Artificial Sequence: Synthetic oligonucleotide
uggugccgcagcaugaaac

SEQ ID NO: 1777959 - RNA, 19 nt, Artificial Sequence
  Description of Artificial Sequence: Synthetic oligonucleotide
auuuguccucgguagaaaa

SEQ ID NO: 1777960 - RNA, 19 nt, Artificial Sequence
  Description of Artificial Sequence: Synthetic oligonucleotide
cugaacuagcucuggggag

SEQ ID NO: 1777961 - RNA, 19 nt, Artificial Sequence
  Description of Artificial Sequence: Synthetic oligonucleotide
uuucugcuacauccuucgg

SEQ ID NO: 1777962 - RNA, 19 nt, Artificial Sequence
  Description of Artificial Sequence: Synthetic oligonucleotide
auagccucagcaccuagau

SEQ ID NO: 1777963 - RNA, 19 nt, Artificial Sequence
  Description of Artificial Sequence: Synthetic oligonucleotide
gaagugaucacuacuggcu

SEQ ID NO: 1777964 - RNA, 19 nt, Artificial Sequence
  Description of Artificial Sequence: Synthetic oligonucleotide
gaagccgaggguuccucag

SEQ ID NO: 1777965 - RNA, 19 nt, Artificial Sequence
  Description of Artificial Sequence: Synthetic oligonucleotide
ugugggcuacagcucgccg

SEQ ID NO: 1777966 - RNA, 19 nt, Artificial Sequence
  Description of Artificial Sequence: Synthetic oligonucleotide
uccuaauaacccaccaauu

SEQ ID NO: 1777967 - RNA, 19 nt, Artificial Sequence
  Description of Artificial Sequence: Synthetic oligonucleotide
agccaguacuacaucacac

SEQ ID NO: 1777968 - RNA, 19 nt, Artificial Sequence
  Description of Artificial Sequence: Synthetic oligonucleotide
caugaaacguacagcccac

SEQ ID NO: 1777969 - RNA, 19 nt, Artificial Sequence
  Description of Artificial Sequence: Synthetic oligonucleotide
uagcaauauagagucuggc

SEQ ID NO: 1777970 - RNA, 19 nt, Artificial Sequence
  Description of Artificial Sequence: Synthetic oligonucleotide
cagaucuaggucagcuucc

SEQ ID NO: 1777971 - RNA, 19 nt, Artificial Sequence
  Description of Artificial Sequence: Synthetic oligonucleotide
uagcaagccgauucauuug

SEQ ID NO: 1777972 - RNA, 19 nt, Artificial Sequence
  Description of Artificial Sequence: Synthetic oligonucleotide
agccgaggguuccucagac

SEQ ID NO: 1777973 - RNA, 19 nt, Artificial Sequence
  Description of Artificial Sequence: Synthetic oligonucleotide
uccaaagagcguccuauuu

SEQ ID NO: 1777974 - RNA, 19 nt, Artificial Sequence
  Description of Artificial Sequence: Synthetic oligonucleotide
ggugccgcagcaugaaacg

SEQ ID NO: 1777975 - RNA, 19 nt, Artificial Sequence
  Description of Artificial Sequence: Synthetic oligonucleotide
uucaggagaggaucugggu

SEQ ID NO: 1777976 - RNA, 19 nt, Artificial Sequence
  Description of Artificial Sequence: Synthetic oligonucleotide
agaaucacacgcaguaucu

SEQ ID NO: 1777977 - RNA, 19 nt, Artificial Sequence
  Description of Artificial Sequence: Synthetic oligonucleotide
ccuaauaacccaccaauuc

SEQ ID NO: 1777978 - RNA, 19 nt, Artificial Sequence
  Description of Artificial Sequence: Synthetic oligonucleotide
ggaaggaccgcugaacuag

SEQ ID NO: 1777979 - RNA, 19 nt, Artificial Sequence
  Description of Artificial Sequence: Synthetic oligonucleotide
uucaggcucaacugucucu

SEQ ID NO: 1777980 - RNA, 19 nt, Artificial Sequence
  Description of Artificial Sequence: Synthetic oligonucleotide
agaccgaucuccacucagc

SEQ ID NO: 1777981 - RNA, 19 nt, Artificial Sequence
  Description of Artificial Sequence: Synthetic oligonucleotide
caaagccauagaaggacuc

SEQ ID NO: 1777982 - RNA, 19 nt, Artificial Sequence
  Description of Artificial Sequence: Synthetic oligonucleotide
uagccacucucuuuggccu

SEQ ID NO: 1777983 - RNA, 19 nt, Artificial Sequence
  Description of Artificial Sequence: Synthetic oligonucleotide
uugcguguaggugaguuaa

SEQ ID NO: 1777984 - RNA, 19 nt, Artificial Sequence
  Description of Artificial Sequence: Synthetic oligonucleotide
acuacuggcuuuccuaaua

SEQ ID NO: 1777985 - RNA, 19 nt, Artificial Sequence
  Description of Artificial Sequence: Synthetic oligonucleotide
cuagggaggaaaugagcuc

SEQ ID NO: 1777986 - RNA, 19 nt, Artificial Sequence
  Description of Artificial Sequence: Synthetic oligonucleotide
ucaaugucaggggaauagu

SEQ ID NO: 1777987 - RNA, 19 nt, Artificial Sequence
  Description of Artificial Sequence: Synthetic oligonucleotide
agaacacuagccacaagga

SEQ ID NO: 1777988 - RNA, 19 nt, Artificial Sequence
  Description of Artificial Sequence: Synthetic oligonucleotide
aaggacuccgucucacuuu

SEQ ID NO: 1777989 - RNA, 19 nt, Artificial Sequence
  Description of Artificial Sequence: Synthetic oligonucleotide
gaccuggcagaacacuagc

SEQ ID NO: 1777990 - RNA, 19 nt, Artificial Sequence
  Description of Artificial Sequence: Synthetic oligonucleotide
guaaugugugggcuacagc

SEQ ID NO: 1777991 - RNA, 19 nt, Artificial Sequence
  Description of Artificial Sequence: Synthetic oligonucleotide
ugagugcgaugacagucca

SEQ ID NO: 1777992 - RNA, 19 nt, Artificial Sequence
  Description of Artificial Sequence: Synthetic oligonucleotide
acaagugagugcgaugaca

SEQ ID NO: 1777993 - RNA, 19 nt, Artificial Sequence
  Description of Artificial Sequence: Synthetic oligonucleotide
ggaauaguggcauaaaauu

SEQ ID NO: 1777994 - RNA, 19 nt, Artificial Sequence
  Description of Artificial Sequence: Synthetic oligonucleotide
uggccucuagcaauauaga

SEQ ID NO: 1777995 - RNA, 19 nt, Artificial Sequence
  Description of Artificial Sequence: Synthetic oligonucleotide
ucugacaagugagugcgau

SEQ ID NO: 1777996 - RNA, 19 nt, Artificial Sequence
  Description of Artificial Sequence: Synthetic oligonucleotide
ggccucuagcaauauagag

SEQ ID NO: 1777997 - RNA, 19 nt, Artificial Sequence
  Description of Artificial Sequence: Synthetic oligonucleotide
gcaugaaacguacagccca

SEQ ID NO: 1777998 - RNA, 19 nt, Artificial Sequence
  Description of Artificial Sequence: Synthetic oligonucleotide
cucuaagcccucuacccuc

SEQ ID NO: 1777999 - RNA, 19 nt, Artificial Sequence
  Description of Artificial Sequence: Synthetic oligonucleotide
gaaucugccgcugaacaaa

SEQ ID NO: 1778000 - RNA, 19 nt, Artificial Sequence
  Description of Artificial Sequence: Synthetic oligonucleotide
ugccgcugaacaaacucaa

SEQ ID NO: 1778001 - RNA, 19 nt, Artificial Sequence
  Description of Artificial Sequence: Synthetic oligonucleotide
gauugugaaucugccgcug

SEQ ID NO: 1778002 - RNA, 19 nt, Artificial Sequence
  Description of Artificial Sequence: Synthetic oligonucleotide
cacucauaagauaucuuaa

SEQ ID NO: 1778003 - RNA, 19 nt, Artificial Sequence
  Description of Artificial Sequence: Synthetic oligonucleotide
ucacacgcaguaucugcca

SEQ ID NO: 1778004 - RNA, 19 nt, Artificial Sequence
  Description of Artificial Sequence: Synthetic oligonucleotide
uacagcccacucauaagau

SEQ ID NO: 1778005 - RNA, 19 nt, Artificial Sequence
  Description of Artificial Sequence: Synthetic oligonucleotide
agagucuggcacauuagca

SEQ ID NO: 1778006 - RNA, 19 nt, Artificial Sequence
  Description of Artificial Sequence: Synthetic oligonucleotide
cuccuuccggucaucacug

SEQ ID NO: 1778007 - RNA, 19 nt, Artificial Sequence
  Description of Artificial Sequence: Synthetic oligonucleotide
gccaguacuacaucacacc

SEQ ID NO: 1778008 - RNA, 19 nt, Artificial Sequence
  Description of Artificial Sequence: Synthetic oligonucleotide
gcaggcaaagugcuagagg

SEQ ID NO: 1778009 - RNA, 19 nt, Artificial Sequence
  Description of Artificial Sequence: Synthetic oligonucleotide
cuuuccuaauaacccacca

SEQ ID NO: 1778010 - RNA, 19 nt, Artificial Sequence
  Description of Artificial Sequence: Synthetic oligonucleotide
ugccauuucccgagccugc

SEQ ID NO: 1778011 - RNA, 19 nt, Artificial Sequence
  Description of Artificial Sequence: Synthetic oligonucleotide
caaggaaggaccgcugaac

SEQ ID NO: 1778012 - RNA, 19 nt, Artificial Sequence
  Description of Artificial Sequence: Synthetic oligonucleotide
caguacuucuguguccagg

SEQ ID NO: 1778013 - RNA, 19 nt, Artificial Sequence
  Description of Artificial Sequence: Synthetic oligonucleotide
auagaaggacuccgucuca

SEQ ID NO: 1778014 - RNA, 19 nt, Artificial Sequence
  Description of Artificial Sequence: Synthetic oligonucleotide
auagagucuggcacauuag

SEQ ID NO: 1778015 - RNA, 19 nt, Artificial Sequence
  Description of Artificial Sequence: Synthetic oligonucleotide
cacccaacuccauaugcuc

SEQ ID NO: 1778016 - RNA, 19 nt, Artificial Sequence
  Description of Artificial Sequence: Synthetic oligonucleotide
uaggugaguuaauguugcc

SEQ ID NO: 1778017 - RNA, 19 nt, Artificial Sequence
  Description of Artificial Sequence: Synthetic oligonucleotide
gugagugcgaugacagucc

SEQ ID NO: 1778018 - RNA, 19 nt, Artificial Sequence
  Description of Artificial Sequence: Synthetic oligonucleotide
guccugauugugaaucugc

SEQ ID NO: 1778019 - RNA, 19 nt, Artificial Sequence
  Description of Artificial Sequence: Synthetic oligonucleotide
uucgguaaugugugggcua

SEQ ID NO: 1778020 - RNA, 19 nt, Artificial Sequence
  Description of Artificial Sequence: Synthetic oligonucleotide
ccgaggguuccucagaccg

SEQ ID NO: 1778021 - RNA, 19 nt, Artificial Sequence
  Description of Artificial Sequence: Synthetic oligonucleotide
uacuggcuuuccuaauaac

SEQ ID NO: 1778022 - RNA, 19 nt, Artificial Sequence
  Description of Artificial Sequence: Synthetic oligonucleotide
ccugauugugaaucugccg

SEQ ID NO: 1778023 - RNA, 19 nt, Artificial Sequence
  Description of Artificial Sequence: Synthetic oligonucleotide
cacaaucauagacaaaggu

SEQ ID NO: 1778024 - RNA, 19 nt, Artificial Sequence
  Description of Artificial Sequence: Synthetic oligonucleotide
ucgguaaugugugggcuac

SEQ ID NO: 1778025 - RNA, 19 nt, Artificial Sequence
  Description of Artificial Sequence: Synthetic oligonucleotide
gguaaugugugggcuacag

SEQ ID NO: 1778026 - RNA, 19 nt, Artificial Sequence
  Description of Artificial Sequence: Synthetic oligonucleotide
aagccgaggguuccucaga

SEQ ID NO: 1778027 - RNA, 19 nt, Artificial Sequence
  Description of Artificial Sequence: Synthetic oligonucleotide
ucgccgggcaugaggagug

SEQ ID NO: 1778028 - RNA, 19 nt, Artificial Sequence
  Description of Artificial Sequence: Synthetic oligonucleotide
ugugugggcuacagcucgc

SEQ ID NO: 1778029 - RNA, 19 nt, Artificial Sequence
  Description of Artificial Sequence: Synthetic oligonucleotide
cucggcucagaagugauca

SEQ ID NO: 1778030 - RNA, 19 nt, Artificial Sequence
  Description of Artificial Sequence: Synthetic oligonucleotide
agaaggacuccgucucacu

SEQ ID NO: 1778031 - RNA, 19 nt, Artificial Sequence
  Description of Artificial Sequence: Synthetic oligonucleotide
cgcaguaucugccauuucc

SEQ ID NO: 1778032 - RNA, 19 nt, Artificial Sequence
  Description of Artificial Sequence: Synthetic oligonucleotide
gcugaacuagcucugggga

SEQ ID NO: 1778033 - RNA, 19 nt, Artificial Sequence
  Description of Artificial Sequence: Synthetic oligonucleotide
cagaccgaucuccacucag

SEQ ID NO: 1778034 - RNA, 19 nt, Artificial Sequence
  Description of Artificial Sequence: Synthetic oligonucleotide
accucaucaauugccacaa

SEQ ID NO: 1778035 - RNA, 19 nt, Artificial Sequence
  Description of Artificial Sequence: Synthetic oligonucleotide
aacuagcucuggggagccc

SEQ ID NO: 1778036 - RNA, 19 nt, Artificial Sequence
  Description of Artificial Sequence: Synthetic oligonucleotide
ucagaaucacacgcaguau

SEQ ID NO: 1778037 - RNA, 19 nt, Artificial Sequence
  Description of Artificial Sequence: Synthetic oligonucleotide
auccuucgguaaugugugg

SEQ ID NO: 1778038 - RNA, 19 nt, Artificial Sequence
  Description of Artificial Sequence: Synthetic oligonucleotide
agcaugccuuugcuuugac

SEQ ID NO: 1778039 - RNA, 19 nt, Artificial Sequence
  Description of Artificial Sequence: Synthetic oligonucleotide
guacuacaucacaccaagg

SEQ ID NO: 1778040 - RNA, 19 nt, Artificial Sequence
  Description of Artificial Sequence: Synthetic oligonucleotide
aguccugauugugaaucug

SEQ ID NO: 1778041 - RNA, 19 nt, Artificial Sequence
  Description of Artificial Sequence: Synthetic oligonucleotide
ucagaccgaucuccacuca

SEQ ID NO: 1778042 - RNA, 19 nt, Artificial Sequence
  Description of Artificial Sequence: Synthetic oligonucleotide
ccacaaucauagacaaagg

SEQ ID NO: 1778043 - RNA, 19 nt, Artificial Sequence
  Description of Artificial Sequence: Synthetic oligonucleotide
aguucguuugaugcauaca

SEQ ID NO: 1778044 - RNA, 19 nt, Artificial Sequence
  Description of Artificial Sequence: Synthetic oligonucleotide
agcauugcguguaggugag

SEQ ID NO: 1778045 - RNA, 19 nt, Artificial Sequence
  Description of Artificial Sequence: Synthetic oligonucleotide
gacaagugagugcgaugac

SEQ ID NO: 1778046 - RNA, 19 nt, Artificial Sequence
  Description of Artificial Sequence: Synthetic oligonucleotide
ucaguacuucuguguccag

SEQ ID NO: 1778047 - RNA, 19 nt, Artificial Sequence
  Description of Artificial Sequence: Synthetic oligonucleotide
cucagcuuucccacccaac

SEQ ID NO: 1778048 - RNA, 19 nt, Artificial Sequence
  Description of Artificial Sequence: Synthetic oligonucleotide
auaguggcauaaaauuaaa

SEQ ID NO: 1778049 - RNA, 19 nt, Artificial Sequence
  Description of Artificial Sequence: Synthetic oligonucleotide
gaacuagcucuggggagcc

SEQ ID NO: 1778050 - RNA, 19 nt, Artificial Sequence
  Description of Artificial Sequence: Synthetic oligonucleotide
agguaaguccugauuguga

SEQ ID NO: 1778051 - RNA, 19 nt, Artificial Sequence
  Description of Artificial Sequence: Synthetic oligonucleotide
cauacaucuaauggcugga

SEQ ID NO: 1778052 - RNA, 19 nt, Artificial Sequence
  Description of Artificial Sequence: Synthetic oligonucleotide
agccacaaggaaggaccgc

SEQ ID NO: 1778053 - RNA, 19 nt, Artificial Sequence
  Description of Artificial Sequence: Synthetic oligonucleotide
auugcguguaggugaguua

SEQ ID NO: 1778054 - RNA, 19 nt, Artificial Sequence
  Description of Artificial Sequence: Synthetic oligonucleotide
cugcaugucagcauugcgu

SEQ ID NO: 1778055 - RNA, 19 nt, Artificial Sequence
  Description of Artificial Sequence: Synthetic oligonucleotide
agaagccgaggguuccuca

SEQ ID NO: 1778056 - RNA, 19 nt, Artificial Sequence
  Description of Artificial Sequence: Synthetic oligonucleotide
cacugucugcaaagcauuc

SEQ ID NO: 1778057 - RNA, 19 nt, Artificial Sequence
  Description of Artificial Sequence: Synthetic oligonucleotide
gaaggaccgcugaacuagc

SEQ ID NO: 1778058 - RNA, 19 nt, Artificial Sequence
  Description of Artificial Sequence: Synthetic oligonucleotide
gcucucauagccucagcac

SEQ ID NO: 1778059 - RNA, 19 nt, Artificial Sequence
  Description of Artificial Sequence: Synthetic oligonucleotide
acagcccacucauaagaua

SEQ ID NO: 1778060 - RNA, 19 nt, Artificial Sequence
  Description of Artificial Sequence: Synthetic oligonucleotide
uccucggcucagaagugau

SEQ ID NO: 1778061 - RNA, 19 nt, Artificial Sequence
  Description of Artificial Sequence: Synthetic oligonucleotide
uucugacaagugagugcga

SEQ ID NO: 1778062 - RNA, 19 nt, Artificial Sequence
  Description of Artificial Sequence: Synthetic oligonucleotide
acaucacaccaagguuccc

SEQ ID NO: 1778063 - RNA, 19 nt, Artificial Sequence
  Description of Artificial Sequence: Synthetic oligonucleotide
ccuucgguaaugugugggc

SEQ ID NO: 1778064 - RNA, 19 nt, Artificial Sequence
  Description of Artificial Sequence: Synthetic oligonucleotide
auuagcaagccgauucauu

SEQ ID NO: 1778065 - RNA, 19 nt, Artificial Sequence
  Description of Artificial Sequence: Synthetic oligonucleotide
cugccauuucccgagccug

SEQ ID NO: 1778066 - RNA, 19 nt, Artificial Sequence
  Description of Artificial Sequence: Synthetic oligonucleotide
cuacuggcuuuccuaauaa

SEQ ID NO: 1778067 - RNA, 19 nt, Artificial Sequence
  Description of Artificial Sequence: Synthetic oligonucleotide
gaggcacuaagcagggcca

SEQ ID NO: 1778068 - RNA, 19 nt, Artificial Sequence
  Description of Artificial Sequence: Synthetic oligonucleotide
caagguuccccugugccca

SEQ ID NO: 1778069 - RNA, 19 nt, Artificial Sequence
  Description of Artificial Sequence: Synthetic oligonucleotide
ccucuagggaggaaaugag

SEQ ID NO: 1778070 - RNA, 19 nt, Artificial Sequence
  Description of Artificial Sequence: Synthetic oligonucleotide
gucagcauugcguguaggu

SEQ ID NO: 1778071 - RNA, 19 nt, Artificial Sequence
  Description of Artificial Sequence: Synthetic oligonucleotide
accagcugaagcaggacau

SEQ ID NO: 1778072 - RNA, 19 nt, Artificial Sequence
  Description of Artificial Sequence: Synthetic oligonucleotide
caguacuacaucacaccaa

SEQ ID NO: 1778073 - RNA, 19 nt, Artificial Sequence
  Description of Artificial Sequence: Synthetic oligonucleotide
ccaccaauucacagaagug

SEQ ID NO: 1778074 - RNA, 19 nt, Artificial Sequence
  Description of Artificial Sequence: Synthetic oligonucleotide
ugccacaaucauagacaaa

SEQ ID NO: 1778075 - RNA, 19 nt, Artificial Sequence
  Description of Artificial Sequence: Synthetic oligonucleotide
gcucaguacuucugugucc

SEQ ID NO: 1778076 - RNA, 19 nt, Artificial Sequence
  Description of Artificial Sequence: Synthetic oligonucleotide
ccacucauaagauaucuua

SEQ ID NO: 1778077 - RNA, 19 nt, Artificial Sequence
  Description of Artificial Sequence: Synthetic oligonucleotide
gcuacauccuucgguaaug

SEQ ID NO: 1778078 - RNA, 19 nt, Artificial Sequence
  Description of Artificial Sequence: Synthetic oligonucleotide
ucggcucagaagugaucac

SEQ ID NO: 1778079 - RNA, 19 nt, Artificial Sequence
  Description of Artificial Sequence: Synthetic oligonucleotide
ccaauggaccagcuccucg

SEQ ID NO: 1778080 - RNA, 19 nt, Artificial Sequence
  Description of Artificial Sequence: Synthetic oligonucleotide
aaagugcuagaggcacuaa

SEQ ID NO: 1778081 - RNA, 19 nt, Artificial Sequence
  Description of Artificial Sequence: Synthetic oligonucleotide
aguaaccaauggaccagcu

SEQ ID NO: 1778082 - RNA, 19 nt, Artificial Sequence
  Description of Artificial Sequence: Synthetic oligonucleotide
uacagcucgccgggcauga

SEQ ID NO: 1778083 - RNA, 19 nt, Artificial Sequence
  Description of Artificial Sequence: Synthetic oligonucleotide
ggggaauaguggcauaaaa

SEQ ID NO: 1778084 - RNA, 19 nt, Artificial Sequence
  Description of Artificial Sequence: Synthetic oligonucleotide
auacaucuaauggcuggau

SEQ ID NO: 1778085 - RNA, 19 nt, Artificial Sequence
  Description of Artificial Sequence: Synthetic oligonucleotide
cagcccacucauaagauau

SEQ ID NO: 1778086 - RNA, 19 nt, Artificial Sequence
  Description of Artificial Sequence: Synthetic oligonucleotide
ggcuggauuuuagagcuac

SEQ ID NO: 1778087 - RNA, 19 nt, Artificial Sequence
  Description of Artificial Sequence: Synthetic oligonucleotide
gcaagaaguucuuaacagu

SEQ ID NO: 1778088 - RNA, 19 nt, Artificial Sequence
  Description of Artificial Sequence: Synthetic oligonucleotide
acccaacuccauaugcucu

SEQ ID NO: 1778089 - RNA, 19 nt, Artificial Sequence
  Description of Artificial Sequence: Synthetic oligonucleotide
ccugcaugucagcauugcg

SEQ ID NO: 1778090 - RNA, 19 nt, Artificial Sequence
  Description of Artificial Sequence: Synthetic oligonucleotide
caccaagguuccccugugc

SEQ ID NO: 1778091 - RNA, 19 nt, Artificial Sequence
  Description of Artificial Sequence: Synthetic oligonucleotide
gaaguucuuaacaguucgu

SEQ ID NO: 1778092 - RNA, 19 nt, Artificial Sequence
  Description of Artificial Sequence: Synthetic oligonucleotide
ugcguguaggugaguuaau

SEQ ID NO: 1778093 - RNA, 19 nt, Artificial Sequence
  Description of Artificial Sequence: Synthetic oligonucleotide
caucaauugccacaaucau

SEQ ID NO: 1778094 - RNA, 19 nt, Artificial Sequence
  Description of Artificial Sequence: Synthetic oligonucleotide
gaccgcugaacuagcucug

SEQ ID NO: 1778095 - RNA, 19 nt, Artificial Sequence
  Description of Artificial Sequence: Synthetic oligonucleotide
cgcugaacaaacucaauga

SEQ ID NO: 1778096 - RNA, 19 nt, Artificial Sequence
  Description of Artificial Sequence: Synthetic oligonucleotide
cgcugaacuagcucugggg

SEQ ID NO: 1778097 - RNA, 19 nt, Artificial Sequence
  Description of Artificial Sequence: Synthetic oligonucleotide
guagaaaaccaggguggga

SEQ ID NO: 1778098 - RNA, 19 nt, Artificial Sequence
  Description of Artificial Sequence: Synthetic oligonucleotide
cacugguuacuccccuuuc

SEQ ID NO: 1778099 - RNA, 19 nt, Artificial Sequence
  Description of Artificial Sequence: Synthetic oligonucleotide
ccaguacuacaucacacca

SEQ ID NO: 1778100 - RNA, 19 nt, Artificial Sequence
  Description of Artificial Sequence: Synthetic oligonucleotide
acgcaguaucugccauuuc

SEQ ID NO: 1778101 - RNA, 19 nt, Artificial Sequence
  Description of Artificial Sequence: Synthetic oligonucleotide
ggcuuuccuaauaacccac

SEQ ID NO: 1778102 - RNA, 19 nt, Artificial Sequence
  Description of Artificial Sequence: Synthetic oligonucleotide
agcucgccgggcaugagga

SEQ ID NO: 1778103 - RNA, 19 nt, Artificial Sequence
  Description of Artificial Sequence: Synthetic oligonucleotide
caucagaucuaggucagcu

SEQ ID NO: 1778104 - RNA, 19 nt, Artificial Sequence
  Description of Artificial Sequence: Synthetic oligonucleotide
cucgguagaaaaccagggu

SEQ ID NO: 1778105 - RNA, 19 nt, Artificial Sequence
  Description of Artificial Sequence: Synthetic oligonucleotide
aucuaauggcuggauuuua

SEQ ID NO: 1778106 - RNA, 19 nt, Artificial Sequence
  Description of Artificial Sequence: Synthetic oligonucleotide
gcuacagccugcagggacc

SEQ ID NO: 1778107 - RNA, 19 nt, Artificial Sequence
  Description of Artificial Sequence: Synthetic oligonucleotide
auaugcucucauagccuca

SEQ ID NO: 1778108 - RNA, 19 nt, Artificial Sequence
  Description of Artificial Sequence: Synthetic oligonucleotide
acacgcaguaucugccauu

SEQ ID NO: 1778109 - RNA, 19 nt, Artificial Sequence
  Description of Artificial Sequence: Synthetic oligonucleotide
gcaugccuuugcuuugacc

SEQ ID NO: 1778110 - RNA, 19 nt, Artificial Sequence
  Description of Artificial Sequence: Synthetic oligonucleotide
augaaacguacagcccacu

SEQ ID NO: 1778111 - RNA, 19 nt, Artificial Sequence
  Description of Artificial Sequence: Synthetic oligonucleotide
agccauagaaggacuccgu

SEQ ID NO: 1778112 - RNA, 19 nt, Artificial Sequence
  Description of Artificial Sequence: Synthetic oligonucleotide
cagcaccuagaucuccauc

SEQ ID NO: 1778113 - RNA, 19 nt, Artificial Sequence
  Description of Artificial Sequence: Synthetic oligonucleotide
gccauagaaggacuccguc

SEQ ID NO: 1778114 - RNA, 19 nt, Artificial Sequence
  Description of Artificial Sequence: Synthetic oligonucleotide
cagcuccucggcucagaag

SEQ ID NO: 1778115 - RNA, 19 nt, Artificial Sequence
  Description of Artificial Sequence: Synthetic oligonucleotide
caaagugcuagaggcacua

SEQ ID NO: 1778116 - RNA, 19 nt, Artificial Sequence
  Description of Artificial Sequence: Synthetic oligonucleotide
gagugagguggugccgcag

SEQ ID NO: 1778117 - RNA, 19 nt, Artificial Sequence
  Description of Artificial Sequence: Synthetic oligonucleotide
gcguguaggugaguuaaug

SEQ ID NO: 1778118 - RNA, 19 nt, Artificial Sequence
  Description of Artificial Sequence: Synthetic oligonucleotide
aggcaaagugcuagaggca

SEQ ID NO: 1778119 - RNA, 19 nt, Artificial Sequence
  Description of Artificial Sequence: Synthetic oligonucleotide
ccuagaucuccaucagauc

SEQ ID NO: 1778120 - RNA, 19 nt, Artificial Sequence
  Description of Artificial Sequence: Synthetic oligonucleotide
cuccgucucacuuuccccu

SEQ ID NO: 1778121 - RNA, 19 nt, Artificial Sequence
  Description of Artificial Sequence: Synthetic oligonucleotide
ggccaguaccucuucugac

SEQ ID NO: 1778122 - RNA, 19 nt, Artificial Sequence
  Description of Artificial Sequence: Synthetic oligonucleotide
uccgucucacuuuccccuu

SEQ ID NO: 1778123 - RNA, 19 nt, Artificial Sequence
  Description of Artificial Sequence: Synthetic oligonucleotide
caugaggagugagguggug

SEQ ID NO: 1778124 - RNA, 19 nt, Artificial Sequence
  Description of Artificial Sequence: Synthetic oligonucleotide
caccuagaucuccaucaga

SEQ ID NO: 1778125 - RNA, 19 nt, Artificial Sequence
  Description of Artificial Sequence: Synthetic oligonucleotide
gccucuagcaauauagagu

SEQ ID NO: 1778126 - RNA, 19 nt, Artificial Sequence
  Description of Artificial Sequence: Synthetic oligonucleotide
caucagaaucacacgcagu

SEQ ID NO: 1778127 - RNA, 19 nt, Artificial Sequence
  Description of Artificial Sequence: Synthetic oligonucleotide
cccaacuccauaugcucuc

SEQ ID NO: 1778128 - RNA, 19 nt, Artificial Sequence
  Description of Artificial Sequence: Synthetic oligonucleotide
cguacagcccacucauaag

SEQ ID NO: 1778129 - RNA, 19 nt, Artificial Sequence
  Description of Artificial Sequence: Synthetic oligonucleotide
caggggaauaguggcauaa

SEQ ID NO: 1778130 - RNA, 19 nt, Artificial Sequence
  Description of Artificial Sequence: Synthetic oligonucleotide
gguuccucagaccgaucuc

SEQ ID NO: 1778131 - RNA, 19 nt, Artificial Sequence
  Description of Artificial Sequence: Synthetic oligonucleotide
ccuuugcuuugaccaaagc

SEQ ID NO: 1778132 - RNA, 19 nt, Artificial Sequence
  Description of Artificial Sequence: Synthetic oligonucleotide
gugugggcuacagcucgcc

SEQ ID NO: 1778133 - RNA, 19 nt, Artificial Sequence
  Description of Artificial Sequence: Synthetic oligonucleotide
gggccaguaccucuucuga

SEQ ID NO: 1778134 - RNA, 19 nt, Artificial Sequence
  Description of Artificial Sequence: Synthetic oligonucleotide
cacaccaagguuccccugu

SEQ ID NO: 1778135 - RNA, 19 nt, Artificial Sequence
  Description of Artificial Sequence: Synthetic oligonucleotide
gggcaugaggagugaggug

SEQ ID NO: 1778136 - RNA, 19 nt, Artificial Sequence
  Description of Artificial Sequence: Synthetic oligonucleotide
caggcucaacugucucuuc

SEQ ID NO: 1778137 - RNA, 19 nt, Artificial Sequence
  Description of Artificial Sequence: Synthetic oligonucleotide
cacugcucaguacuucugu

SEQ ID NO: 1778138 - RNA, 19 nt, Artificial Sequence
  Description of Artificial Sequence: Synthetic oligonucleotide
ggcuuucaggcucaacugu

SEQ ID NO: 1778139 - RNA, 19 nt, Artificial Sequence
  Description of Artificial Sequence: Synthetic oligonucleotide
gccuuugcuuugaccaaag

SEQ ID NO: 1778140 - RNA, 19 nt, Artificial Sequence
  Description of Artificial Sequence: Synthetic oligonucleotide
gucaggggaauaguggcau

SEQ ID NO: 1778141 - RNA, 19 nt, Artificial Sequence
  Description of Artificial Sequence: Synthetic oligonucleotide
cuucgguaaugugugggcu

SEQ ID NO: 1778142 - RNA, 19 nt, Artificial Sequence
  Description of Artificial Sequence: Synthetic oligonucleotide
aacguacagcccacucaua

SEQ ID NO: 1778143 - RNA, 19 nt, Artificial Sequence
  Description of Artificial Sequence: Synthetic oligonucleotide
ccacaaggaaggaccgcug

SEQ ID NO: 1778144 - RNA, 19 nt, Artificial Sequence
  Description of Artificial Sequence: Synthetic oligonucleotide
gguuccccugugcccacug

SEQ ID NO: 1778145 - RNA, 19 nt, Artificial Sequence
  Description of Artificial Sequence: Synthetic oligonucleotide
caucaggaccuggcagaac

SEQ ID NO: 1778146 - RNA, 19 nt, Artificial Sequence
  Description of Artificial Sequence: Synthetic oligonucleotide
ccgcugaacuagcucuggg

SEQ ID NO: 1778147 - RNA, 19 nt, Artificial Sequence
  Description of Artificial Sequence: Synthetic oligonucleotide
caucaccagcaugccuuug

SEQ ID NO: 1778148 - RNA, 19 nt, Artificial Sequence
  Description of Artificial Sequence: Synthetic oligonucleotide
auauagagucuggcacauu

SEQ ID NO: 1778149 - RNA, 19 nt, Artificial Sequence
  Description of Artificial Sequence: Synthetic oligonucleotide
cauugcguguaggugaguu

SEQ ID NO: 1778150 - RNA, 19 nt, Artificial Sequence
  Description of Artificial Sequence: Synthetic oligonucleotide
cuacagccugcagggacca

SEQ ID NO: 1778151 - RNA, 19 nt, Artificial Sequence
  Description of Artificial Sequence: Synthetic oligonucleotide
aucugccgcugaacaaacu

SEQ ID NO: 1778152 - RNA, 19 nt, Artificial Sequence
  Description of Artificial Sequence: Synthetic oligonucleotide
caucuaauggcuggauuuu

SEQ ID NO: 1778153 - RNA, 19 nt, Artificial Sequence
  Description of Artificial Sequence: Synthetic oligonucleotide
cucuagcaauauagagucu

SEQ ID NO: 1778154 - RNA, 19 nt, Artificial Sequence
  Description of Artificial Sequence: Synthetic oligonucleotide
cgaugacaguccaucacca

SEQ ID NO: 1778155 - RNA, 19 nt, Artificial Sequence
  Description of Artificial Sequence: Synthetic oligonucleotide
aggguuccucagaccgauc

SEQ ID NO: 1778156 - RNA, 19 nt, Artificial Sequence
  Description of Artificial Sequence: Synthetic oligonucleotide
ccgauucauuuguccucgg

SEQ ID NO: 1778157 - RNA, 19 nt, Artificial Sequence
  Description of Artificial Sequence: Synthetic oligonucleotide
cuacauccuucgguaaugu

SEQ ID NO: 1778158 - RNA, 19 nt, Artificial Sequence
  Description of Artificial Sequence: Synthetic oligonucleotide
ggugggaggacagugccau

SEQ ID NO: 1778159 - RNA, 19 nt, Artificial Sequence
  Description of Artificial Sequence: Synthetic oligonucleotide
gaccagcuccucggcucag

SEQ ID NO: 1778160 - RNA, 19 nt, Artificial Sequence
  Description of Artificial Sequence: Synthetic oligonucleotide
cauuagcaagccgauucau

SEQ ID NO: 1778161 - RNA, 19 nt, Artificial Sequence
  Description of Artificial Sequence: Synthetic oligonucleotide
ggagugagguggugccgca

SEQ ID NO: 1778162 - RNA, 19 nt, Artificial Sequence
  Description of Artificial Sequence: Synthetic oligonucleotide
guggugccgcagcaugaaa

SEQ ID NO: 1778163 - RNA, 19 nt, Artificial Sequence
  Description of Artificial Sequence: Synthetic oligonucleotide
cacuguagccacucucuuu

SEQ ID NO: 1778164 - RNA, 19 nt, Artificial Sequence
  Description of Artificial Sequence: Synthetic oligonucleotide
gcccacucauaagauaucu

SEQ ID NO: 1778165 - RNA, 19 nt, Artificial Sequence
  Description of Artificial Sequence: Synthetic oligonucleotide
cguguaggugaguuaaugu

SEQ ID NO: 1778166 - RNA, 19 nt, Artificial Sequence
  Description of Artificial Sequence: Synthetic oligonucleotide
ccaaagagcguccuauuuu

SEQ ID NO: 1778167 - RNA, 19 nt, Artificial Sequence
  Description of Artificial Sequence: Synthetic oligonucleotide
agccugcuccuuccacuuu

SEQ ID NO: 1778168 - RNA, 19 nt, Artificial Sequence
  Description of Artificial Sequence: Synthetic oligonucleotide
gagcuacagccugcaggga

SEQ ID NO: 1778169 - RNA, 19 nt, Artificial Sequence
  Description of Artificial Sequence: Synthetic oligonucleotide
cacgcaguaucugccauuu

SEQ ID NO: 1778170 - RNA, 19 nt, Artificial Sequence
  Description of Artificial Sequence: Synthetic oligonucleotide
gcacuaagcagggccagua

SEQ ID NO: 1778171 - RNA, 19 nt, Artificial Sequence
  Description of Artificial Sequence: Synthetic oligonucleotide
gcuggauuuuagagcuaca

SEQ ID NO: 1778172 - RNA, 19 nt, Artificial Sequence
  Description of Artificial Sequence: Synthetic oligonucleotide
ccucggcucagaagugauc

SEQ ID NO: 1778173 - RNA, 19 nt, Artificial Sequence
  Description of Artificial Sequence: Synthetic oligonucleotide
gcaagccgauucauuuguc

SEQ ID NO: 1778174 - RNA, 19 nt, Artificial Sequence
  Description of Artificial Sequence: Synthetic oligonucleotide
cuccaaagagcguccuauu

SEQ ID NO: 1778175 - RNA, 19 nt, Artificial Sequence
  Description of Artificial Sequence: Synthetic oligonucleotide
ccccugugcccacugucug

SEQ ID NO: 1778176 - RNA, 19 nt, Artificial Sequence
  Description of Artificial Sequence: Synthetic oligonucleotide
cacuacuggcuuuccuaau

SEQ ID NO: 1778177 - RNA, 19 nt, Artificial Sequence
  Description of Artificial Sequence: Synthetic oligonucleotide
cucgccgggcaugaggagu

SEQ ID NO: 1778178 - RNA, 19 nt, Artificial Sequence
  Description of Artificial Sequence: Synthetic oligonucleotide
caggaccuggcagaacacu

SEQ ID NO: 1778179 - RNA, 19 nt, Artificial Sequence
  Description of Artificial Sequence: Synthetic oligonucleotide
gcucgccgggcaugaggag

SEQ ID NO: 1778180 - RNA, 19 nt, Artificial Sequence
  Description of Artificial Sequence: Synthetic oligonucleotide
gggaggaaaugagcuccuc

SEQ ID NO: 1778181 - RNA, 19 nt, Artificial Sequence
  Description of Artificial Sequence: Synthetic oligonucleotide
gcaugucagcauugcgugu

SEQ ID NO: 1778182 - RNA, 19 nt, Artificial Sequence
  Description of Artificial Sequence: Synthetic oligonucleotide
gugccgcagcaugaaacgu

SEQ ID NO: 1778183 - RNA, 19 nt, Artificial Sequence
  Description of Artificial Sequence: Synthetic oligonucleotide
ccuccaaagagcguccuau

SEQ ID NO: 1778184 - RNA, 19 nt, Artificial Sequence
  Description of Artificial Sequence: Synthetic oligonucleotide
ccaacuccauaugcucuca

SEQ ID NO: 1778185 - RNA, 19 nt, Artificial Sequence
  Description of Artificial Sequence: Synthetic oligonucleotide
ggacuccgucucacuuucc

SEQ ID NO: 1778186 - RNA, 19 nt, Artificial Sequence
  Description of Artificial Sequence: Synthetic oligonucleotide
ccgucucacuuuccccuuc

SEQ ID NO: 1778187 - RNA, 19 nt, Artificial Sequence
  Description of Artificial Sequence: Synthetic oligonucleotide
gcaaagugcuagaggcacu

SEQ ID NO: 1778188 - RNA, 19 nt, Artificial Sequence
  Description of Artificial Sequence: Synthetic oligonucleotide
gcuacagcucgccgggcau

SEQ ID NO: 1778189 - RNA, 19 nt, Artificial Sequence
  Description of Artificial Sequence: Synthetic oligonucleotide
ccuuucucuaagcccucua

SEQ ID NO: 1778190 - RNA, 19 nt, Artificial Sequence
  Description of Artificial Sequence: Synthetic oligonucleotide
gccucagcaccuagaucuc

SEQ ID NO: 1778191 - RNA, 19 nt, Artificial Sequence
  Description of Artificial Sequence: Synthetic oligonucleotide
ccucagcuuucccacccaa

SEQ ID NO: 1778192 - RNA, 19 nt, Artificial Sequence
  Description of Artificial Sequence: Synthetic oligonucleotide
ccaucaggaccuggcagaa

SEQ ID NO: 1778193 - RNA, 19 nt, Artificial Sequence
  Description of Artificial Sequence: Synthetic oligonucleotide
cgaucuccacucagcuuca

SEQ ID NO: 1778194 - RNA, 19 nt, Artificial Sequence
  Description of Artificial Sequence: Synthetic oligonucleotide
cgaggguuccucagaccga

SEQ ID NO: 1778195 - RNA, 19 nt, Artificial Sequence
  Description of Artificial Sequence: Synthetic oligonucleotide
ccggucaucacugcucagu

SEQ ID NO: 1778196 - RNA, 19 nt, Artificial Sequence
  Description of Artificial Sequence: Synthetic oligonucleotide
gcuccucuagggaggaaau

SEQ ID NO: 1778197 - RNA, 19 nt, Artificial Sequence
  Description of Artificial Sequence: Synthetic oligonucleotide
ggcacuaagcagggccagu

SEQ ID NO: 1778198 - RNA, 19 nt, Artificial Sequence
  Description of Artificial Sequence: Synthetic oligonucleotide
ccgcagcaugaaacguaca

SEQ ID NO: 1778199 - RNA, 19 nt, Artificial Sequence
  Description of Artificial Sequence: Synthetic oligonucleotide
ggaccacugcaggcaaagu

SEQ ID NO: 1778200 - RNA, 19 nt, Artificial Sequence
  Description of Artificial Sequence: Synthetic oligonucleotide
cccuccaaagagcguccua

SEQ ID NO: 1778201 - RNA, 19 nt, Artificial Sequence
  Description of Artificial Sequence: Synthetic oligonucleotide
cagugccaucugccaggau

SEQ ID NO: 1778202 - RNA, 19 nt, Artificial Sequence
  Description of Artificial Sequence: Synthetic oligonucleotide
aauauuguguuugugaagg

SEQ ID NO: 1778203 - RNA, 19 nt, Artificial Sequence
  Description of Artificial Sequence: Synthetic oligonucleotide
auuagaguauguuuugagc

SEQ ID NO: 1778204 - RNA, 19 nt, Artificial Sequence
  Description of Artificial Sequence: Synthetic oligonucleotide
aauauaggcagcaauucac

SEQ ID NO: 1778205 - RNA, 19 nt, Artificial Sequence
  Description of Artificial Sequence: Synthetic oligonucleotide
aauuagaguauguuuugag

SEQ ID NO: 1778206 - RNA, 19 nt, Artificial Sequence
  Description of Artificial Sequence: Synthetic oligonucleotide
cacgaaugaaacaugaggg

SEQ ID NO: 1778207 - RNA, 19 nt, Artificial Sequence
  Description of Artificial Sequence: Synthetic oligonucleotide
acaaauuguaucuagcucu

SEQ ID NO: 1778208 - RNA, 19 nt, Artificial Sequence
  Description of Artificial Sequence: Synthetic oligonucleotide
acuguaauuaaauacuucu

SEQ ID NO: 1778209 - RNA, 19 nt, Artificial Sequence
  Description of Artificial Sequence: Synthetic oligonucleotide
aaaugaaccacgaggagcg

SEQ ID NO: 1778210 - RNA, 19 nt, Artificial Sequence
  Description of Artificial Sequence: Synthetic oligonucleotide
uuuuggucaacucuggggc

SEQ ID NO: 1778211 - RNA, 19 nt, Artificial Sequence
  Description of Artificial Sequence: Synthetic oligonucleotide
aaguuucauagucaacccc

SEQ ID NO: 1778212 - RNA, 19 nt, Artificial Sequence
  Description of Artificial Sequence: Synthetic oligonucleotide
uggaaaauguaacauacgu

SEQ ID NO: 1778213 - RNA, 19 nt, Artificial Sequence
  Description of Artificial Sequence: Synthetic oligonucleotide
uuaacaauauccaauccuc

SEQ ID NO: 1778214 - RNA, 19 nt, Artificial Sequence
  Description of Artificial Sequence: Synthetic oligonucleotide
accguugucuuucaguucc

SEQ ID NO: 1778215 - RNA, 19 nt, Artificial Sequence
  Description of Artificial Sequence: Synthetic oligonucleotide
uucagauacuucaggaacg

SEQ ID NO: 1778216 - RNA, 19 nt, Artificial Sequence
  Description of Artificial Sequence: Synthetic oligonucleotide
aauuguaucuagcucuucu

SEQ ID NO: 1778217 - RNA, 19 nt, Artificial Sequence
  Description of Artificial Sequence: Synthetic oligonucleotide
acaucguucaucuguacac

SEQ ID NO: 1778218 - RNA, 19 nt, Artificial Sequence
  Description of Artificial Sequence: Synthetic oligonucleotide
aauuaugucaaguccuccu

SEQ ID NO: 1778219 - RNA, 19 nt, Artificial Sequence
  Description of Artificial Sequence: Synthetic oligonucleotide
uaucuagcucuucugaugc

SEQ ID NO: 1778220 - RNA, 19 nt, Artificial Sequence
  Description of Artificial Sequence: Synthetic oligonucleotide
ugcaccaucuaaccggucg

SEQ ID NO: 1778221 - RNA, 19 nt, Artificial Sequence
  Description of Artificial Sequence: Synthetic oligonucleotide
ugaauauuguguuugugaa

SEQ ID NO: 1778222 - RNA, 19 nt, Artificial Sequence
  Description of Artificial Sequence: Synthetic oligonucleotide
aaacgcacagagcauaacu

SEQ ID NO: 1778223 - RNA, 19 nt, Artificial Sequence
  Description of Artificial Sequence: Synthetic oligonucleotide
aaauacuucuugcaauccu

SEQ ID NO: 1778224 - RNA, 19 nt, Artificial Sequence
  Description of Artificial Sequence: Synthetic oligonucleotide
uauaggcagcaauucaccg

SEQ ID NO: 1778225 - RNA, 19 nt, Artificial Sequence
  Description of Artificial Sequence: Synthetic oligonucleotide
aaacauaaagcugaggaua

SEQ ID NO: 1778226 - RNA, 19 nt, Artificial Sequence
  Description of Artificial Sequence: Synthetic oligonucleotide
ugaaacaugaggguguucu

SEQ ID NO: 1778227 - RNA, 19 nt, Artificial Sequence
  Description of Artificial Sequence: Synthetic oligonucleotide
gaaaugaaccacgaggagc

SEQ ID NO: 1778228 - RNA, 19 nt, Artificial Sequence
  Description of Artificial Sequence: Synthetic oligonucleotide
aguuucauagucaaccccg

SEQ ID NO: 1778229 - RNA, 19 nt, Artificial Sequence
  Description of Artificial Sequence: Synthetic oligonucleotide
uuauucaguauuuccagaa

SEQ ID NO: 1778230 - RNA, 19 nt, Artificial Sequence
  Description of Artificial Sequence: Synthetic oligonucleotide
caaauugccgggucgagcc

SEQ ID NO: 1778231 - RNA, 19 nt, Artificial Sequence
  Description of Artificial Sequence: Synthetic oligonucleotide
ucaucuguacacacugcgg

SEQ ID NO: 1778232 - RNA, 19 nt, Artificial Sequence
  Description of Artificial Sequence: Synthetic oligonucleotide
gguauuauucaguauuucc

SEQ ID NO: 1778233 - RNA, 19 nt, Artificial Sequence
  Description of Artificial Sequence: Synthetic oligonucleotide
aacguugagaucuucuuua

SEQ ID NO: 1778234 - RNA, 19 nt, Artificial Sequence
  Description of Artificial Sequence: Synthetic oligonucleotide
uuaauuaugucaaguccuc

SEQ ID NO: 1778235 - RNA, 19 nt, Artificial Sequence
  Description of Artificial Sequence: Synthetic oligonucleotide
caauccuccuacaagcucc

SEQ ID NO: 1778236 - RNA, 19 nt, Artificial Sequence
  Description of Artificial Sequence: Synthetic oligonucleotide
uaucaaaacugcugaacug

SEQ ID NO: 1778237 - RNA, 19 nt, Artificial Sequence
  Description of Artificial Sequence: Synthetic oligonucleotide
uccuuaacaauauccaauc

SEQ ID NO: 1778238 - RNA, 19 nt, Artificial Sequence
  Description of Artificial Sequence: Synthetic oligonucleotide
uccaguaugucaaaaguuu

SEQ ID NO: 1778239 - RNA, 19 nt, Artificial Sequence
  Description of Artificial Sequence: Synthetic oligonucleotide
uuccuuaacaauauccaau

SEQ ID NO: 1778240 - RNA, 19 nt, Artificial Sequence
  Description of Artificial Sequence: Synthetic oligonucleotide
uuucaauauaggcagcaau

SEQ ID NO: 1778241 - RNA, 19 nt, Artificial Sequence
  Description of Artificial Sequence: Synthetic oligonucleotide
gugugaaacgcacagagca

SEQ ID NO: 1778242 - RNA, 19 nt, Artificial Sequence
  Description of Artificial Sequence: Synthetic oligonucleotide
aguagcuccucaaauugcc

SEQ ID NO: 1778243 - RNA, 19 nt, Artificial Sequence
  Description of Artificial Sequence: Synthetic oligonucleotide
uguuuugagccccugucga

SEQ ID NO: 1778244 - RNA, 19 nt, Artificial Sequence
  Description of Artificial Sequence: Synthetic oligonucleotide
gaacugaauauuguguuug

SEQ ID NO: 1778245 - RNA, 19 nt, Artificial Sequence
  Description of Artificial Sequence: Synthetic oligonucleotide
ugagguguucccuucauaa

SEQ ID NO: 1778246 - RNA, 19 nt, Artificial Sequence
  Description of Artificial Sequence: Synthetic oligonucleotide
uccuaguccacuucucagg

SEQ ID NO: 1778247 - RNA, 19 nt, Artificial Sequence
  Description of Artificial Sequence: Synthetic oligonucleotide
uuuauugccgucuuauguu

SEQ ID NO: 1778248 - RNA, 19 nt, Artificial Sequence
  Description of Artificial Sequence: Synthetic oligonucleotide
gacaaauuguaucuagcuc

SEQ ID NO: 1778249 - RNA, 19 nt, Artificial Sequence
  Description of Artificial Sequence: Synthetic oligonucleotide
ucauagucaaccccgguau

SEQ ID NO: 1778250 - RNA, 19 nt, Artificial Sequence
  Description of Artificial Sequence: Synthetic oligonucleotide
acaacugugugaaacgcac

SEQ ID NO: 1778251 - RNA, 19 nt, Artificial Sequence
  Description of Artificial Sequence: Synthetic oligonucleotide
uaauaugcucaguagcacu

SEQ ID NO: 1778252 - RNA, 19 nt, Artificial Sequence
  Description of Artificial Sequence: Synthetic oligonucleotide
ucuaacuugggagcuuugg

SEQ ID NO: 1778253 - RNA, 19 nt, Artificial Sequence
  Description of Artificial Sequence: Synthetic oligonucleotide
uccucaaauugccgggucg

SEQ ID NO: 1778254 - RNA, 19 nt, Artificial Sequence
  Description of Artificial Sequence: Synthetic oligonucleotide
ugggacaaauuguaucuag

SEQ ID NO: 1778255 - RNA, 19 nt, Artificial Sequence
  Description of Artificial Sequence: Synthetic oligonucleotide
uucacgaaugaaacaugag

SEQ ID NO: 1778256 - RNA, 19 nt, Artificial Sequence
  Description of Artificial Sequence: Synthetic oligonucleotide
aaccggucgacucucugag

SEQ ID NO: 1778257 - RNA, 19 nt, Artificial Sequence
  Description of Artificial Sequence: Synthetic oligonucleotide
gcuugcugaaaccacagcg

SEQ ID NO: 1778258 - RNA, 19 nt, Artificial Sequence
  Description of Artificial Sequence: Synthetic oligonucleotide
ugagacgcauuucuacucc

SEQ ID NO: 1778259 - RNA, 19 nt, Artificial Sequence
  Description of Artificial Sequence: Synthetic oligonucleotide
ucuuuagcuaacucugcca

SEQ ID NO: 1778260 - RNA, 19 nt, Artificial Sequence
  Description of Artificial Sequence: Synthetic oligonucleotide
auuguaucuagcucuucug

SEQ ID NO: 1778261 - RNA, 19 nt, Artificial Sequence
  Description of Artificial Sequence: Synthetic oligonucleotide
cucaguagcacuaggagga

SEQ ID NO: 1778262 - RNA, 19 nt, Artificial Sequence
  Description of Artificial Sequence: Synthetic oligonucleotide
acagaagcuuuauugguca

SEQ ID NO: 1778263 - RNA, 19 nt, Artificial Sequence
  Description of Artificial Sequence: Synthetic oligonucleotide
ucauaaagagcaucacaga

SEQ ID NO: 1778264 - RNA, 19 nt, Artificial Sequence
  Description of Artificial Sequence: Synthetic oligonucleotide
cuaugagcucuccagaaac

SEQ ID NO: 1778265 - RNA, 19 nt, Artificial Sequence
  Description of Artificial Sequence: Synthetic oligonucleotide
cugaauauuguguuuguga

SEQ ID NO: 1778266 - RNA, 19 nt, Artificial Sequence
  Description of Artificial Sequence: Synthetic oligonucleotide
aaacugcugaacugaauau

SEQ ID NO: 1778267 - RNA, 19 nt, Artificial Sequence
  Description of Artificial Sequence: Synthetic oligonucleotide
augagacgcauuucuacuc

SEQ ID NO: 1778268 - RNA, 19 nt, Artificial Sequence
  Description of Artificial Sequence: Synthetic oligonucleotide
acgcacagagcauaacugg

SEQ ID NO: 1778269 - RNA, 19 nt, Artificial Sequence
  Description of Artificial Sequence: Synthetic oligonucleotide
cuuaauuaugucaaguccu

SEQ ID NO: 1778270 - RNA, 19 nt, Artificial Sequence
  Description of Artificial Sequence: Synthetic oligonucleotide
guauuauucaguauuucca

SEQ ID NO: 1778271 - RNA, 19 nt, Artificial Sequence
  Description of Artificial Sequence: Synthetic oligonucleotide
auguaacauacguuucuuc

SEQ ID NO: 1778272 - RNA, 19 nt, Artificial Sequence
  Description of Artificial Sequence: Synthetic oligonucleotide
uucauagucaaccccggua

SEQ ID NO: 1778273 - RNA, 19 nt, Artificial Sequence
  Description of Artificial Sequence: Synthetic oligonucleotide
auccacuagacacgugucg

SEQ ID NO: 1778274 - RNA, 19 nt, Artificial Sequence
  Description of Artificial Sequence: Synthetic oligonucleotide
ugugugaaacgcacagagc

SEQ ID NO: 1778275 - RNA, 19 nt, Artificial Sequence
  Description of Artificial Sequence: Synthetic oligonucleotide
caauauccaauccuccuac

SEQ ID NO: 1778276 - RNA, 19 nt, Artificial Sequence
  Description of Artificial Sequence: Synthetic oligonucleotide
guaucuagcucuucugaug

SEQ ID NO: 1778277 - RNA, 19 nt, Artificial Sequence
  Description of Artificial Sequence: Synthetic oligonucleotide
aacgcacagagcauaacug

SEQ ID NO: 1778278 - RNA, 19 nt, Artificial Sequence
  Description of Artificial Sequence: Synthetic oligonucleotide
acgaaugaaacaugagggu

SEQ ID NO: 1778279 - RNA, 19 nt, Artificial Sequence
  Description of Artificial Sequence: Synthetic oligonucleotide
ccuuaauuaugucaagucc

SEQ ID NO: 1778280 - RNA, 19 nt, Artificial Sequence
  Description of Artificial Sequence: Synthetic oligonucleotide
uuaauaugcucaguagcac

SEQ ID NO: 1778281 - RNA, 19 nt, Artificial Sequence
  Description of Artificial Sequence: Synthetic oligonucleotide
aagcuuuauuggucagcac

SEQ ID NO: 1778282 - RNA, 19 nt, Artificial Sequence
  Description of Artificial Sequence: Synthetic oligonucleotide
aguuccuuaacaauaucca

SEQ ID NO: 1778283 - RNA, 19 nt, Artificial Sequence
  Description of Artificial Sequence: Synthetic oligonucleotide
cauuucuacuccuagucca

SEQ ID NO: 1778284 - RNA, 19 nt, Artificial Sequence
  Description of Artificial Sequence: Synthetic oligonucleotide
uuuuaaucccugccgcacu

SEQ ID NO: 1778285 - RNA, 19 nt, Artificial Sequence
  Description of Artificial Sequence: Synthetic oligonucleotide
gauagguaggccaauuaga

SEQ ID NO: 1778286 - RNA, 19 nt, Artificial Sequence
  Description of Artificial Sequence: Synthetic oligonucleotide
cacagcgugguucuugagg

SEQ ID NO: 1778287 - RNA, 19 nt, Artificial Sequence
  Description of Artificial Sequence: Synthetic oligonucleotide
uguucccuucauaaacagc

SEQ ID NO: 1778288 - RNA, 19 nt, Artificial Sequence
  Description of Artificial Sequence: Synthetic oligonucleotide
acuagacacgugucgcugg

SEQ ID NO: 1778289 - RNA, 19 nt, Artificial Sequence
  Description of Artificial Sequence: Synthetic oligonucleotide
gaagcuuuauuggucagca

SEQ ID NO: 1778290 - RNA, 19 nt, Artificial Sequence
  Description of Artificial Sequence: Synthetic oligonucleotide
agauacuucaggaacggcu

SEQ ID NO: 1778291 - RNA, 19 nt, Artificial Sequence
  Description of Artificial Sequence: Synthetic oligonucleotide
uguaucuagcucuucugau

SEQ ID NO: 1778292 - RNA, 19 nt, Artificial Sequence
  Description of Artificial Sequence: Synthetic oligonucleotide
ugaaccacgaggagcgacu

SEQ ID NO: 1778293 - RNA, 19 nt, Artificial Sequence
  Description of Artificial Sequence: Synthetic oligonucleotide
accacgaggagcgacuugg

SEQ ID NO: 1778294 - RNA, 19 nt, Artificial Sequence
  Description of Artificial Sequence: Synthetic oligonucleotide
acugcugaacugaauauug

SEQ ID NO: 1778295 - RNA, 19 nt, Artificial Sequence
  Description of Artificial Sequence: Synthetic oligonucleotide
gccgucuuauguuucaugg

SEQ ID NO: 1778296 - RNA, 19 nt, Artificial Sequence
  Description of Artificial Sequence: Synthetic oligonucleotide
ggauagguaggccaauuag

SEQ ID NO: 1778297 - RNA, 19 nt, Artificial Sequence
  Description of Artificial Sequence: Synthetic oligonucleotide
auaggcagcaauucaccgu

SEQ ID NO: 1778298 - RNA, 19 nt, Artificial Sequence
  Description of Artificial Sequence: Synthetic oligonucleotide
uuuagcuaacucugccaug

SEQ ID NO: 1778299 - RNA, 19 nt, Artificial Sequence
  Description of Artificial Sequence: Synthetic oligonucleotide
aauguaacauacguuucuu

SEQ ID NO: 1778300 - RNA, 19 nt, Artificial Sequence
  Description of Artificial Sequence: Synthetic oligonucleotide
ucaaccccgguauuauuca

SEQ ID NO: 1778301 - RNA, 19 nt, Artificial Sequence
  Description of Artificial Sequence: Synthetic oligonucleotide
cuucacgaaugaaacauga

SEQ ID NO: 1778302 - RNA, 19 nt, Artificial Sequence
  Description of Artificial Sequence: Synthetic oligonucleotide
ucaccguugucuuucaguu

SEQ ID NO: 1778303 - RNA, 19 nt, Artificial Sequence
  Description of Artificial Sequence: Synthetic oligonucleotide
uuaugucaaguccuccuau

SEQ ID NO: 1778304 - RNA, 19 nt, Artificial Sequence
  Description of Artificial Sequence: Synthetic oligonucleotide
uucaggcgaacguugagau

SEQ ID NO: 1778305 - RNA, 19 nt, Artificial Sequence
  Description of Artificial Sequence: Synthetic oligonucleotide
caguacaacugugugaaac

SEQ ID NO: 1778306 - RNA, 19 nt, Artificial Sequence
  Description of Artificial Sequence: Synthetic oligonucleotide
ucuguacacacugcggagc

SEQ ID NO: 1778307 - RNA, 19 nt, Artificial Sequence
  Description of Artificial Sequence: Synthetic oligonucleotide
uuucaggcgaacguugaga

SEQ ID NO: 1778308 - RNA, 19 nt, Artificial Sequence
  Description of Artificial Sequence: Synthetic oligonucleotide
acaauauccaauccuccua

SEQ ID NO: 1778309 - RNA, 19 nt, Artificial Sequence
  Description of Artificial Sequence: Synthetic oligonucleotide
auuucuacuccuaguccac

SEQ ID NO: 1778310 - RNA, 19 nt, Artificial Sequence
  Description of Artificial Sequence: Synthetic oligonucleotide
aucugaaguuuauugccgu

SEQ ID NO: 1778311 - RNA, 19 nt, Artificial Sequence
  Description of Artificial Sequence: Synthetic oligonucleotide
ugugcaccaucuaaccggu

SEQ ID NO: 1778312 - RNA, 19 nt, Artificial Sequence
  Description of Artificial Sequence: Synthetic oligonucleotide
gaggguguucuuuagcuaa

SEQ ID NO: 1778313 - RNA, 19 nt, Artificial Sequence
  Description of Artificial Sequence: Synthetic oligonucleotide
aauaugcucaguagcacua

SEQ ID NO: 1778314 - RNA, 19 nt, Artificial Sequence
  Description of Artificial Sequence: Synthetic oligonucleotide
auauccaauccuccuacaa

SEQ ID NO: 1778315 - RNA, 19 nt, Artificial Sequence
  Description of Artificial Sequence: Synthetic oligonucleotide
ugaaacgcacagagcauaa

SEQ ID NO: 1778316 - RNA, 19 nt, Artificial Sequence
  Description of Artificial Sequence: Synthetic oligonucleotide
auuaugucaaguccuccua

SEQ ID NO: 1778317 - RNA, 19 nt, Artificial Sequence
  Description of Artificial Sequence: Synthetic oligonucleotide
ggguagguuggccaguucg

SEQ ID NO: 1778318 - RNA, 19 nt, Artificial Sequence
  Description of Artificial Sequence: Synthetic oligonucleotide
uauuguguuugugaaggau

SEQ ID NO: 1778319 - RNA, 19 nt, Artificial Sequence
  Description of Artificial Sequence: Synthetic oligonucleotide
uccaauccuccuacaagcu

SEQ ID NO: 1778320 - RNA, 19 nt, Artificial Sequence
  Description of Artificial Sequence: Synthetic oligonucleotide
aauucaccguugucuuuca

SEQ ID NO: 1778321 - RNA, 19 nt, Artificial Sequence
  Description of Artificial Sequence: Synthetic oligonucleotide
gaugagacgcauuucuacu

SEQ ID NO: 1778322 - RNA, 19 nt, Artificial Sequence
  Description of Artificial Sequence: Synthetic oligonucleotide
ucaaauugccgggucgagc

SEQ ID NO: 1778323 - RNA, 19 nt, Artificial Sequence
  Description of Artificial Sequence: Synthetic oligonucleotide
uucucaggaccaaaucauc

SEQ ID NO: 1778324 - RNA, 19 nt, Artificial Sequence
  Description of Artificial Sequence: Synthetic oligonucleotide
uccuaugagcucuccagaa

SEQ ID NO: 1778325 - RNA, 19 nt, Artificial Sequence
  Description of Artificial Sequence: Synthetic oligonucleotide
uuauugccgucuuauguuu

SEQ ID NO: 1778326 - RNA, 19 nt, Artificial Sequence
  Description of Artificial Sequence: Synthetic oligonucleotide
uuucauagucaaccccggu

SEQ ID NO: 1778327 - RNA, 19 nt, Artificial Sequence
  Description of Artificial Sequence: Synthetic oligonucleotide
guuucauagucaaccccgg

SEQ ID NO: 1778328 - RNA, 19 nt, Artificial Sequence
  Description of Artificial Sequence: Synthetic oligonucleotide
gcauaacuggaugagacgc

SEQ ID NO: 1778329 - RNA, 19 nt, Artificial Sequence
  Description of Artificial Sequence: Synthetic oligonucleotide
cuguacacacugcggagcc

SEQ ID NO: 1778330 - RNA, 19 nt, Artificial Sequence
  Description of Artificial Sequence: Synthetic oligonucleotide
agaagauaucaaaacugcu

SEQ ID NO: 1778331 - RNA, 19 nt, Artificial Sequence
  Description of Artificial Sequence: Synthetic oligonucleotide
agcaauucaccguugucuu

SEQ ID NO: 1778332 - RNA, 19 nt, Artificial Sequence
  Description of Artificial Sequence: Synthetic oligonucleotide
ucguucaucuguacacacu

SEQ ID NO: 1778333 - RNA, 19 nt, Artificial Sequence
  Description of Artificial Sequence: Synthetic oligonucleotide
acuccuaguccacuucuca

SEQ ID NO: 1778334 - RNA, 19 nt, Artificial Sequence
  Description of Artificial Sequence: Synthetic oligonucleotide
uuuugagccccugucgaac

SEQ ID NO: 1778335 - RNA, 19 nt, Artificial Sequence
  Description of Artificial Sequence: Synthetic oligonucleotide
uuugagccccugucgaacu

SEQ ID NO: 1778336 - RNA, 19 nt, Artificial Sequence
  Description of Artificial Sequence: Synthetic oligonucleotide
uaaucccugccgcacuucu

SEQ ID NO: 1778337 - RNA, 19 nt, Artificial Sequence
  Description of Artificial Sequence: Synthetic oligonucleotide
ugucgaacuuccucaucug

SEQ ID NO: 1778338 - RNA, 19 nt, Artificial Sequence
  Description of Artificial Sequence: Synthetic oligonucleotide
uagguaggccaauuagagu

SEQ ID NO: 1778339 - RNA, 19 nt, Artificial Sequence
  Description of Artificial Sequence: Synthetic oligonucleotide
uuuaaucccugccgcacuu

SEQ ID NO: 1778340 - RNA, 19 nt, Artificial Sequence
  Description of Artificial Sequence: Synthetic oligonucleotide
uaggccaauuagaguaugu

SEQ ID NO: 1778341 - RNA, 19 nt, Artificial Sequence
  Description of Artificial Sequence: Synthetic oligonucleotide
agcuccuuaauuaugucaa

SEQ ID NO: 1778342 - RNA, 19 nt, Artificial Sequence
  Description of Artificial Sequence: Synthetic oligonucleotide
auggugcccagaaaugaac

SEQ ID NO: 1778343 - RNA, 19 nt, Artificial Sequence
  Description of Artificial Sequence: Synthetic oligonucleotide
agacacgugucgcuggacu

SEQ ID NO: 1778344 - RNA, 19 nt, Artificial Sequence
  Description of Artificial Sequence: Synthetic oligonucleotide
augaaccacgaggagcgac

SEQ ID NO: 1778345 - RNA, 19 nt, Artificial Sequence
  Description of Artificial Sequence: Synthetic oligonucleotide
ugcuugcugaaaccacagc

SEQ ID NO: 1778346 - RNA, 19 nt, Artificial Sequence
  Description of Artificial Sequence: Synthetic oligonucleotide
auauuguguuugugaagga

SEQ ID NO: 1778347 - RNA, 19 nt, Artificial Sequence
  Description of Artificial Sequence: Synthetic oligonucleotide
auuguguuugugaaggauu

SEQ ID NO: 1778348 - RNA, 19 nt, Artificial Sequence
  Description of Artificial Sequence: Synthetic oligonucleotide
aaauugccgggucgagcca

SEQ ID NO: 1778349 - RNA, 19 nt, Artificial Sequence
  Description of Artificial Sequence: Synthetic oligonucleotide
uauugccgucuuauguuuc

SEQ ID NO: 1778350 - RNA, 19 nt, Artificial Sequence
  Description of Artificial Sequence: Synthetic oligonucleotide
acauaaagcugaggauagg

SEQ ID NO: 1778351 - RNA, 19 nt, Artificial Sequence
  Description of Artificial Sequence: Synthetic oligonucleotide
acgaggagcgacuuggcuu

SEQ ID NO: 1778352 - RNA, 19 nt, Artificial Sequence
  Description of Artificial Sequence: Synthetic oligonucleotide
ugaugcuuccagcuccuua

SEQ ID NO: 1778353 - RNA, 19 nt, Artificial Sequence
  Description of Artificial Sequence: Synthetic oligonucleotide
guagcuccucaaauugccg

SEQ ID NO: 1778354 - RNA, 19 nt, Artificial Sequence
  Description of Artificial Sequence: Synthetic oligonucleotide
uagucugaaucugaaguuu

SEQ ID NO: 1778355 - RNA, 19 nt, Artificial Sequence
  Description of Artificial Sequence: Synthetic oligonucleotide
ugccgucuuauguuucaug

SEQ ID NO: 1778356 - RNA, 19 nt, Artificial Sequence
  Description of Artificial Sequence: Synthetic oligonucleotide
gcauuucuacuccuagucc

SEQ ID NO: 1778357 - RNA, 19 nt, Artificial Sequence
  Description of Artificial Sequence: Synthetic oligonucleotide
auaugcucaguagcacuag

SEQ ID NO: 1778358 - RNA, 19 nt, Artificial Sequence
  Description of Artificial Sequence: Synthetic oligonucleotide
auaacuggaugagacgcau

SEQ ID NO: 1778359 - RNA, 19 nt, Artificial Sequence
  Description of Artificial Sequence: Synthetic oligonucleotide
uacaagcuccccucucaca

SEQ ID NO: 1778360 - RNA, 19 nt, Artificial Sequence
  Description of Artificial Sequence: Synthetic oligonucleotide
ucgacucucugagaauucu

SEQ ID NO: 1778361 - RNA, 19 nt, Artificial Sequence
  Description of Artificial Sequence: Synthetic oligonucleotide
gcaugugcaccaucuaacc

SEQ ID NO: 1778362 - RNA, 19 nt, Artificial Sequence
  Description of Artificial Sequence: Synthetic oligonucleotide
aucuaaccggucgacucuc

SEQ ID NO: 1778363 - RNA, 19 nt, Artificial Sequence
  Description of Artificial Sequence: Synthetic oligonucleotide
cauaacuggaugagacgca

SEQ ID NO: 1778364 - RNA, 19 nt, Artificial Sequence
  Description of Artificial Sequence: Synthetic oligonucleotide
ugaggguguucuuuagcua

SEQ ID NO: 1778365 - RNA, 19 nt, Artificial Sequence
  Description of Artificial Sequence: Synthetic oligonucleotide
ugccaugacaucguucauc

SEQ ID NO: 1778366 - RNA, 19 nt, Artificial Sequence
  Description of Artificial Sequence: Synthetic oligonucleotide
ggggacagaacuaauuuca

SEQ ID NO: 1778367 - RNA, 19 nt, Artificial Sequence
  Description of Artificial Sequence: Synthetic oligonucleotide
gucaaccccgguauuauuc

SEQ ID NO: 1778368 - RNA, 19 nt, Artificial Sequence
  Description of Artificial Sequence: Synthetic oligonucleotide
accacagcgugguucuuga

SEQ ID NO: 1778369 - RNA, 19 nt, Artificial Sequence
  Description of Artificial Sequence: Synthetic oligonucleotide
cuugcugaaaccacagcgu

SEQ ID NO: 1778370 - RNA, 19 nt, Artificial Sequence
  Description of Artificial Sequence: Synthetic oligonucleotide
gcugaauccacauuuugcu

SEQ ID NO: 1778371 - RNA, 19 nt, Artificial Sequence
  Description of Artificial Sequence: Synthetic oligonucleotide
ccuuaacaauauccaaucc

SEQ ID NO: 1778372 - RNA, 19 nt, Artificial Sequence
  Description of Artificial Sequence: Synthetic oligonucleotide
aggauagguaggccaauua

SEQ ID NO: 1778373 - RNA, 19 nt, Artificial Sequence
  Description of Artificial Sequence: Synthetic oligonucleotide
cuacaagcuccccucucac

SEQ ID NO: 1778374 - RNA, 19 nt, Artificial Sequence
  Description of Artificial Sequence: Synthetic oligonucleotide
agcgugguucuugaggugu

SEQ ID NO: 1778375 - RNA, 19 nt, Artificial Sequence
  Description of Artificial Sequence: Synthetic oligonucleotide
cucaggaccaaaucaucaa

SEQ ID NO: 1778376 - RNA, 19 nt, Artificial Sequence
  Description of Artificial Sequence: Synthetic oligonucleotide
uacuccuaguccacuucuc

SEQ ID NO: 1778377 - RNA, 19 nt, Artificial Sequence
  Description of Artificial Sequence: Synthetic oligonucleotide
agcugaggguagguuggcc

SEQ ID NO: 1778378 - RNA, 19 nt, Artificial Sequence
  Description of Artificial Sequence: Synthetic oligonucleotide
gucgaacuuccucaucuga

SEQ ID NO: 1778379 - RNA, 19 nt, Artificial Sequence
  Description of Artificial Sequence: Synthetic oligonucleotide
caauuagaguauguuuuga

SEQ ID NO: 1778380 - RNA, 19 nt, Artificial Sequence
  Description of Artificial Sequence: Synthetic oligonucleotide
gucgagccaaccuccacca

SEQ ID NO: 1778381 - RNA, 19 nt, Artificial Sequence
  Description of Artificial Sequence: Synthetic oligonucleotide
cuucaggaacggcuucggc

SEQ ID NO: 1778382 - RNA, 19 nt, Artificial Sequence
  Description of Artificial Sequence: Synthetic oligonucleotide
aauugccgggucgagccaa

SEQ ID NO: 1778383 - RNA, 19 nt, Artificial Sequence
  Description of Artificial Sequence: Synthetic oligonucleotide
auagucaaccccgguauua

SEQ ID NO: 1778384 - RNA, 19 nt, Artificial Sequence
  Description of Artificial Sequence: Synthetic oligonucleotide
cuuugaggcgcaguagcuc

SEQ ID NO: 1778385 - RNA, 19 nt, Artificial Sequence
  Description of Artificial Sequence: Synthetic oligonucleotide
ugacaucguucaucuguac

SEQ ID NO: 1778386 - RNA, 19 nt, Artificial Sequence
  Description of Artificial Sequence: Synthetic oligonucleotide
cguucaucuguacacacug

SEQ ID NO: 1778387 - RNA, 19 nt, Artificial Sequence
  Description of Artificial Sequence: Synthetic oligonucleotide
uccuacaagcuccccucuc

SEQ ID NO: 1778388 - RNA, 19 nt, Artificial Sequence
  Description of Artificial Sequence: Synthetic oligonucleotide
aggguguucuuuagcuaac

SEQ ID NO: 1778389 - RNA, 19 nt, Artificial Sequence
  Description of Artificial Sequence: Synthetic oligonucleotide
accccgguauuauucagua

SEQ ID NO: 1778390 - RNA, 19 nt, Artificial Sequence
  Description of Artificial Sequence: Synthetic oligonucleotide
caaccccgguauuauucag

SEQ ID NO: 1778391 - RNA, 19 nt, Artificial Sequence
  Description of Artificial Sequence: Synthetic oligonucleotide
agagcaucacagaagcuuu

SEQ ID NO: 1778392 - RNA, 19 nt, Artificial Sequence
  Description of Artificial Sequence: Synthetic oligonucleotide
acguugagaucuucuuuaa

SEQ ID NO: 1778393 - RNA, 19 nt, Artificial Sequence
  Description of Artificial Sequence: Synthetic oligonucleotide
ucuaaccggucgacucucu

SEQ ID NO: 1778394 - RNA, 19 nt, Artificial Sequence
  Description of Artificial Sequence: Synthetic oligonucleotide
gagguguucccuucauaaa

SEQ ID NO: 1778395 - RNA, 19 nt, Artificial Sequence
  Description of Artificial Sequence: Synthetic oligonucleotide
gauccacuagacacguguc

SEQ ID NO: 1778396 - RNA, 19 nt, Artificial Sequence
  Description of Artificial Sequence: Synthetic oligonucleotide
cuuuagcuaacucugccau

SEQ ID NO: 1778397 - RNA, 19 nt, Artificial Sequence
  Description of Artificial Sequence: Synthetic oligonucleotide
gaaacgcacagagcauaac

SEQ ID NO: 1778398 - RNA, 19 nt, Artificial Sequence
  Description of Artificial Sequence: Synthetic oligonucleotide
cugaacugaauauuguguu

SEQ ID NO: 1778399 - RNA, 19 nt, Artificial Sequence
  Description of Artificial Sequence: Synthetic oligonucleotide
aguauguuuugagccccug

SEQ ID NO: 1778400 - RNA, 19 nt, Artificial Sequence
  Description of Artificial Sequence: Synthetic oligonucleotide
gugcccagaaaugaaccac

SEQ ID NO: 1778401 - RNA, 19 nt, Artificial Sequence
  Description of Artificial Sequence: Synthetic oligonucleotide
agccaaccuccaccacugc

SEQ ID NO: 1778402 - RNA, 19 nt, Artificial Sequence
  Description of Artificial Sequence: Synthetic oligonucleotide
gcgacuuggcuuugaggcg

SEQ ID NO: 1778403 - RNA, 19 nt, Artificial Sequence
  Description of Artificial Sequence: Synthetic oligonucleotide
cacuagacacgugucgcug

SEQ ID NO: 1778404 - RNA, 19 nt, Artificial Sequence
  Description of Artificial Sequence: Synthetic oligonucleotide
caggaccaaaucaucaacu

SEQ ID NO: 1778405 - RNA, 19 nt, Artificial Sequence
  Description of Artificial Sequence: Synthetic oligonucleotide
cauggugcccagaaaugaa

SEQ ID NO: 1778406 - RNA, 19 nt, Artificial Sequence
  Description of Artificial Sequence: Synthetic oligonucleotide
guaggccaauuagaguaug

SEQ ID NO: 1778407 - RNA, 19 nt, Artificial Sequence
  Description of Artificial Sequence: Synthetic oligonucleotide
ggcaugugcaccaucuaac

SEQ ID NO: 1778408 - RNA, 19 nt, Artificial Sequence
  Description of Artificial Sequence: Synthetic oligonucleotide
ugccgggucgagccaaccu

SEQ ID NO: 1778409 - RNA, 19 nt, Artificial Sequence
  Description of Artificial Sequence: Synthetic oligonucleotide
gaacguugagaucuucuuu

SEQ ID NO: 1778410 - RNA, 19 nt, Artificial Sequence
  Description of Artificial Sequence: Synthetic oligonucleotide
aaugaaccacgaggagcga

SEQ ID NO: 1778411 - RNA, 19 nt, Artificial Sequence
  Description of Artificial Sequence: Synthetic oligonucleotide
uugggacaaauuguaucua

SEQ ID NO: 1778412 - RNA, 19 nt, Artificial Sequence
  Description of Artificial Sequence: Synthetic oligonucleotide
augaaacaugaggguguuc

SEQ ID NO: 1778413 - RNA, 19 nt, Artificial Sequence
  Description of Artificial Sequence: Synthetic oligonucleotide
gucuuauguuucauggaaa

SEQ ID NO: 1778414 - RNA, 19 nt, Artificial Sequence
  Description of Artificial Sequence: Synthetic oligonucleotide
agcaucacagaagcuuuau

SEQ ID NO: 1778415 - RNA, 19 nt, Artificial Sequence
  Description of Artificial Sequence: Synthetic oligonucleotide
gcaauccuuggacaccaug

SEQ ID NO: 1778416 - RNA, 19 nt, Artificial Sequence
  Description of Artificial Sequence: Synthetic oligonucleotide
cuccuaugagcucuccaga

SEQ ID NO: 1778417 - RNA, 19 nt, Artificial Sequence
  Description of Artificial Sequence: Synthetic oligonucleotide
aggccaauuagaguauguu

SEQ ID NO: 1778418 - RNA, 19 nt, Artificial Sequence
  Description of Artificial Sequence: Synthetic oligonucleotide
guuuugagccccugucgaa

SEQ ID NO: 1778419 - RNA, 19 nt, Artificial Sequence
  Description of Artificial Sequence: Synthetic oligonucleotide
augacaucguucaucugua

SEQ ID NO: 1778420 - RNA, 19 nt, Artificial Sequence
  Description of Artificial Sequence: Synthetic oligonucleotide
cagauacuucaggaacggc

SEQ ID NO: 1778421 - RNA, 19 nt, Artificial Sequence
  Description of Artificial Sequence: Synthetic oligonucleotide
cagcaauucaccguugucu

SEQ ID NO: 1778422 - RNA, 19 nt, Artificial Sequence
  Description of Artificial Sequence: Synthetic oligonucleotide
cucuaacuugggagcuuug

SEQ ID NO: 1778423 - RNA, 19 nt, Artificial Sequence
  Description of Artificial Sequence: Synthetic oligonucleotide
accaucuaaccggucgacu

SEQ ID NO: 1778424 - RNA, 19 nt, Artificial Sequence
  Description of Artificial Sequence: Synthetic oligonucleotide
cuagacacgugucgcugga

SEQ ID NO: 1778425 - RNA, 19 nt, Artificial Sequence
  Description of Artificial Sequence: Synthetic oligonucleotide
uuaaucccugccgcacuuc

SEQ ID NO: 1778426 - RNA, 19 nt, Artificial Sequence
  Description of Artificial Sequence: Synthetic oligonucleotide
gccaugacaucguucaucu

SEQ ID NO: 1778427 - RNA, 19 nt, Artificial Sequence
  Description of Artificial Sequence: Synthetic oligonucleotide
cuccucaaauugccggguc

SEQ ID NO: 1778428 - RNA, 19 nt, Artificial Sequence
  Description of Artificial Sequence: Synthetic oligonucleotide
ugaggauagguaggccaau

SEQ ID NO: 1778429 - RNA, 19 nt, Artificial Sequence
  Description of Artificial Sequence: Synthetic oligonucleotide
ucccugccgcacuucuuca

SEQ ID NO: 1778430 - RNA, 19 nt, Artificial Sequence
  Description of Artificial Sequence: Synthetic oligonucleotide
caccguugucuuucaguuc

SEQ ID NO: 1778431 - RNA, 19 nt, Artificial Sequence
  Description of Artificial Sequence: Synthetic oligonucleotide
ugagccccugucgaacuuc

SEQ ID NO: 1778432 - RNA, 19 nt, Artificial Sequence
  Description of Artificial Sequence: Synthetic oligonucleotide
cagcuucacgaaugaaaca

SEQ ID NO: 1778433 - RNA, 19 nt, Artificial Sequence
  Description of Artificial Sequence: Synthetic oligonucleotide
gagccccugucgaacuucc

SEQ ID NO: 1778434 - RNA, 19 nt, Artificial Sequence
  Description of Artificial Sequence: Synthetic oligonucleotide
agucaaccccgguauuauu

SEQ ID NO: 1778435 - RNA, 19 nt, Artificial Sequence
  Description of Artificial Sequence: Synthetic oligonucleotide
cuccaguaugucaaaaguu

SEQ ID NO: 1778436 - RNA, 19 nt, Artificial Sequence
  Description of Artificial Sequence: Synthetic oligonucleotide
gcuucacgaaugaaacaug

SEQ ID NO: 1778437 - RNA, 19 nt, Artificial Sequence
  Description of Artificial Sequence: Synthetic oligonucleotide
cccagaaaugaaccacgag

SEQ ID NO: 1778438 - RNA, 19 nt, Artificial Sequence
  Description of Artificial Sequence: Synthetic oligonucleotide
auugccgggucgagccaac

SEQ ID NO: 1778439 - RNA, 19 nt, Artificial Sequence
  Description of Artificial Sequence: Synthetic oligonucleotide
ucgagccaaccuccaccac

SEQ ID NO: 1778440 - RNA, 19 nt, Artificial Sequence
  Description of Artificial Sequence: Synthetic oligonucleotide
caccaucuaaccggucgac

SEQ ID NO: 1778441 - RNA, 19 nt, Artificial Sequence
  Description of Artificial Sequence: Synthetic oligonucleotide
ggaaaauguaacauacguu

SEQ ID NO: 1778442 - RNA, 19 nt, Artificial Sequence
  Description of Artificial Sequence: Synthetic oligonucleotide
cccucucacauacagcuga

SEQ ID NO: 1778443 - RNA, 19 nt, Artificial Sequence
  Description of Artificial Sequence: Synthetic oligonucleotide
gggcaugugcaccaucuaa

SEQ ID NO: 1778444 - RNA, 19 nt, Artificial Sequence
  Description of Artificial Sequence: Synthetic oligonucleotide
ugcaauccuuggacaccau

SEQ ID NO: 1778445 - RNA, 19 nt, Artificial Sequence
  Description of Artificial Sequence: Synthetic oligonucleotide
ccaauccuccuacaagcuc

SEQ ID NO: 1778446 - RNA, 19 nt, Artificial Sequence
  Description of Artificial Sequence: Synthetic oligonucleotide
cgucuuauguuucauggaa

SEQ ID NO: 1778447 - RNA, 19 nt, Artificial Sequence
  Description of Artificial Sequence: Synthetic oligonucleotide
gcagcaauucaccguuguc

SEQ ID NO: 1778448 - RNA, 19 nt, Artificial Sequence
  Description of Artificial Sequence: Synthetic oligonucleotide
gguagguuggccaguucga

SEQ ID NO: 1778449 - RNA, 19 nt, Artificial Sequence
  Description of Artificial Sequence: Synthetic oligonucleotide
aggcgcaguagcuccucaa

SEQ ID NO: 1778450 - RNA, 19 nt, Artificial Sequence
  Description of Artificial Sequence: Synthetic oligonucleotide
uacacacugcggagcccau

SEQ ID NO: 1778451 - RNA, 19 nt, Artificial Sequence
  Description of Artificial Sequence: Synthetic oligonucleotide
ggccaauuagaguauguuu

SEQ ID NO: 1778452 - RNA, 19 nt, Artificial Sequence
  Description of Artificial Sequence: Synthetic oligonucleotide
gucgacucucugagaauuc

SEQ ID NO: 1778453 - RNA, 19 nt, Artificial Sequence
  Description of Artificial Sequence: Synthetic oligonucleotide
gucaacucuggggcaugug

SEQ ID NO: 1778454 - RNA, 19 nt, Artificial Sequence
  Description of Artificial Sequence: Synthetic oligonucleotide
uugccgucuuauguuucau

SEQ ID NO: 1778455 - RNA, 19 nt, Artificial Sequence
  Description of Artificial Sequence: Synthetic oligonucleotide
ccgggucgagccaaccucc

SEQ ID NO: 1778456 - RNA, 19 nt, Artificial Sequence
  Description of Artificial Sequence: Synthetic oligonucleotide
accggucgacucucugaga

SEQ ID NO: 1778457 - RNA, 19 nt, Artificial Sequence
  Description of Artificial Sequence: Synthetic oligonucleotide
ggcagcgugagucaacuuu

SEQ ID NO: 1778458 - RNA, 19 nt, Artificial Sequence
  Description of Artificial Sequence: Synthetic oligonucleotide
gccgggucgagccaaccuc

SEQ ID NO: 1778459 - RNA, 19 nt, Artificial Sequence
  Description of Artificial Sequence: Synthetic oligonucleotide
uugccgggucgagccaacc

SEQ ID NO: 1778460 - RNA, 19 nt, Artificial Sequence
  Description of Artificial Sequence: Synthetic oligonucleotide
cccgguauuauucaguauu

SEQ ID NO: 1778461 - RNA, 19 nt, Artificial Sequence
  Description of Artificial Sequence: Synthetic oligonucleotide
ccccugucgaacuuccuca

SEQ ID NO: 1778462 - RNA, 19 nt, Artificial Sequence
  Description of Artificial Sequence: Synthetic oligonucleotide
agacgcauuucuacuccua

SEQ ID NO: 1778463 - RNA, 19 nt, Artificial Sequence
  Description of Artificial Sequence: Synthetic oligonucleotide
cuugagguguucccuucau

SEQ ID NO: 1778464 - RNA, 19 nt, Artificial Sequence
  Description of Artificial Sequence: Synthetic oligonucleotide
ccgucuuauguuucaugga

SEQ ID NO: 1778465 - RNA, 19 nt, Artificial Sequence
  Description of Artificial Sequence: Synthetic oligonucleotide
ccggucgacucucugagaa

SEQ ID NO: 1778466 - RNA, 19 nt, Artificial Sequence
  Description of Artificial Sequence: Synthetic oligonucleotide
gaggauagguaggccaauu

SEQ ID NO: 1778467 - RNA, 19 nt, Artificial Sequence
  Description of Artificial Sequence: Synthetic oligonucleotide
gaguauguuuugagccccu

SEQ ID NO: 1778468 - RNA, 19 nt, Artificial Sequence
  Description of Artificial Sequence: Synthetic oligonucleotide
aaaccacagcgugguucuu

SEQ ID NO: 1778469 - RNA, 19 nt, Artificial Sequence
  Description of Artificial Sequence: Synthetic oligonucleotide
ccuuuccucuaacuuggga

SEQ ID NO: 1778470 - RNA, 19 nt, Artificial Sequence
  Description of Artificial Sequence: Synthetic oligonucleotide
cacgaggagcgacuuggcu

SEQ ID NO: 1778471 - RNA, 19 nt, Artificial Sequence
  Description of Artificial Sequence: Synthetic oligonucleotide
ccacgaggagcgacuuggc

SEQ ID NO: 1778472 - RNA, 19 nt, Artificial Sequence
  Description of Artificial Sequence: Synthetic oligonucleotide
ccucaaauugccgggucga

SEQ ID NO: 1778473 - RNA, 19 nt, Artificial Sequence
  Description of Artificial Sequence: Synthetic oligonucleotide
gggucgagccaaccuccac

SEQ ID NO: 1778474 - RNA, 19 nt, Artificial Sequence
  Description of Artificial Sequence: Synthetic oligonucleotide
gcccagaaaugaaccacga

SEQ ID NO: 1778475 - RNA, 19 nt, Artificial Sequence
  Description of Artificial Sequence: Synthetic oligonucleotide
cuuggcuuugaggcgcagu

SEQ ID NO: 1778476 - RNA, 19 nt, Artificial Sequence
  Description of Artificial Sequence: Synthetic oligonucleotide
cauagucaaccccgguauu

SEQ ID NO: 1778477 - RNA, 19 nt, Artificial Sequence
  Description of Artificial Sequence: Synthetic oligonucleotide
ccccucucacauacagcug

SEQ ID NO: 1778478 - RNA, 19 nt, Artificial Sequence
  Description of Artificial Sequence: Synthetic oligonucleotide
gcgaacguugagaucuucu

SEQ ID NO: 1778479 - RNA, 19 nt, Artificial Sequence
  Description of Artificial Sequence: Synthetic oligonucleotide
gaaccacgaggagcgacuu

SEQ ID NO: 1778480 - RNA, 19 nt, Artificial Sequence
  Description of Artificial Sequence: Synthetic oligonucleotide
gccaguucgagaacguuuu

SEQ ID NO: 1778481 - RNA, 19 nt, Artificial Sequence
  Description of Artificial Sequence: Synthetic oligonucleotide
gguaggccaauuagaguau

SEQ ID NO: 1778482 - RNA, 19 nt, Artificial Sequence
  Description of Artificial Sequence: Synthetic oligonucleotide
cuccuacaagcuccccucu

SEQ ID NO: 1778483 - RNA, 19 nt, Artificial Sequence
  Description of Artificial Sequence: Synthetic oligonucleotide
gggacagaacuaauuucau

SEQ ID NO: 1778484 - RNA, 19 nt, Artificial Sequence
  Description of Artificial Sequence: Synthetic oligonucleotide
ccacagcgugguucuugag

SEQ ID NO: 1778485 - RNA, 19 nt, Artificial Sequence
  Description of Artificial Sequence: Synthetic oligonucleotide
ccgguauuauucaguauuu

SEQ ID NO: 1778486 - RNA, 19 nt, Artificial Sequence
  Description of Artificial Sequence: Synthetic oligonucleotide
ggcgaacguugagaucuuc

SEQ ID NO: 1778487 - RNA, 19 nt, Artificial Sequence
  Description of Artificial Sequence: Synthetic oligonucleotide
gcagcgugagucaacuuuu

SEQ ID NO: 1778488 - RNA, 19 nt, Artificial Sequence
  Description of Artificial Sequence: Synthetic oligonucleotide
ggggcagcgugagucaacu

SEQ ID NO: 1778489 - RNA, 19 nt, Artificial Sequence
  Description of Artificial Sequence: Synthetic oligonucleotide
gcgcaguagcuccucaaau

SEQ ID NO: 1778490 - RNA, 19 nt, Artificial Sequence
  Description of Artificial Sequence: Synthetic oligonucleotide
cgaacguugagaucuucuu

SEQ ID NO: 1778491 - RNA, 19 nt, Artificial Sequence
  Description of Artificial Sequence: Synthetic oligonucleotide
aggcgaacguugagaucuu

SEQ ID NO: 1778492 - RNA, 19 nt, Artificial Sequence
  Description of Artificial Sequence: Synthetic oligonucleotide
gcggagcccauggugccca

SEQ ID NO: 1778493 - RNA, 19 nt, Artificial Sequence
  Description of Artificial Sequence: Synthetic oligonucleotide
cgcaguagcuccucaaauu

SEQ ID NO: 1778494 - RNA, 19 nt, Artificial Sequence
  Description of Artificial Sequence: Synthetic oligonucleotide
ggucaacucuggggcaugu

SEQ ID NO: 1778495 - RNA, 19 nt, Artificial Sequence
  Description of Artificial Sequence: Synthetic oligonucleotide
cgaggagcgacuuggcuuu

SEQ ID NO: 1778496 - RNA, 19 nt, Artificial Sequence
  Description of Artificial Sequence: Synthetic oligonucleotide
cugccaugacaucguucau

SEQ ID NO: 1778497 - RNA, 19 nt, Artificial Sequence
  Description of Artificial Sequence: Synthetic oligonucleotide
ggucagcacuuugagccuu

SEQ ID NO: 1778498 - RNA, 19 nt, Artificial Sequence
  Description of Artificial Sequence: Synthetic oligonucleotide
ccucuaacuugggagcuuu

SEQ ID NO: 1778499 - RNA, 19 nt, Artificial Sequence
  Description of Artificial Sequence: Synthetic oligonucleotide
ccccgguauuauucaguau

SEQ ID NO: 1778500 - RNA, 19 nt, Artificial Sequence
  Description of Artificial Sequence: Synthetic oligonucleotide
gggcagcgugagucaacuu

SEQ ID NO: 1778501 - RNA, 19 nt, Artificial Sequence
  Description of Artificial Sequence: Synthetic oligonucleotide
cggucgacucucugagaau

SEQ ID NO: 1778502 - RNA, 19 nt, Artificial Sequence
  Description of Artificial Sequence: Synthetic oligonucleotide
acagcaacugcuuaguacc

SEQ ID NO: 1778503 - RNA, 19 nt, Artificial Sequence
  Description of Artificial Sequence: Synthetic oligonucleotide
aaugauaaguuuuccaugu

SEQ ID NO: 1778504 - RNA, 19 nt, Artificial Sequence
  Description of Artificial Sequence: Synthetic oligonucleotide
ugauaaguuuuccaugucg

SEQ ID NO: 1778505 - RNA, 19 nt, Artificial Sequence
  Description of Artificial Sequence: Synthetic oligonucleotide
ucaguuacuguacaggugc

SEQ ID NO: 1778506 - RNA, 19 nt, Artificial Sequence
  Description of Artificial Sequence: Synthetic oligonucleotide
gaaaugaagacgcaguuac

SEQ ID NO: 1778507 - RNA, 19 nt, Artificial Sequence
  Description of Artificial Sequence: Synthetic oligonucleotide
uuaagcacagcacaggaca

SEQ ID NO: 1778508 - RNA, 19 nt, Artificial Sequence
  Description of Artificial Sequence: Synthetic oligonucleotide
gacaacacggcacauuugg

SEQ ID NO: 1778509 - RNA, 19 nt, Artificial Sequence
  Description of Artificial Sequence: Synthetic oligonucleotide
acaaccucuaaccuccugc

SEQ ID NO: 1778510 - RNA, 19 nt, Artificial Sequence
  Description of Artificial Sequence: Synthetic oligonucleotide
agguaagaaaugaagacgc

SEQ ID NO: 1778511 - RNA, 19 nt, Artificial Sequence
  Description of Artificial Sequence: Synthetic oligonucleotide
gauaaguuuuccaugucgg

SEQ ID NO: 1778512 - RNA, 19 nt, Artificial Sequence
  Description of Artificial Sequence: Synthetic oligonucleotide
uucacuuggcucuaugacg

SEQ ID NO: 1778513 - RNA, 19 nt, Artificial Sequence
  Description of Artificial Sequence: Synthetic oligonucleotide
aguacaagaagcuggggag

SEQ ID NO: 1778514 - RNA, 19 nt, Artificial Sequence
  Description of Artificial Sequence: Synthetic oligonucleotide
ugcgauauuguaaaacucu

SEQ ID NO: 1778515 - RNA, 19 nt, Artificial Sequence
  Description of Artificial Sequence: Synthetic oligonucleotide
uuuaggauaggaccaaagu

SEQ ID NO: 1778516 - RNA, 19 nt, Artificial Sequence
  Description of Artificial Sequence: Synthetic oligonucleotide
gguaguuuaggauaggacc

SEQ ID NO: 1778517 - RNA, 19 nt, Artificial Sequence
  Description of Artificial Sequence: Synthetic oligonucleotide
uuaaccagccgcacgagag

SEQ ID NO: 1778518 - RNA, 19 nt, Artificial Sequence
  Description of Artificial Sequence: Synthetic oligonucleotide
uuaggauaggaccaaagua

SEQ ID NO: 1778519 - RNA, 19 nt, Artificial Sequence
  Description of Artificial Sequence: Synthetic oligonucleotide
agaauuauuuaguucucug

SEQ ID NO: 1778520 - RNA, 19 nt, Artificial Sequence
  Description of Artificial Sequence: Synthetic oligonucleotide
accucuaaccuccugcucg

SEQ ID NO: 1778521 - RNA, 19 nt, Artificial Sequence
  Description of Artificial Sequence: Synthetic oligonucleotide
ucuuaagcacagcacagga

SEQ ID NO: 1778522 - RNA, 19 nt, Artificial Sequence
  Description of Artificial Sequence: Synthetic oligonucleotide
uaucagugcauguucaaga

SEQ ID NO: 1778523 - RNA, 19 nt, Artificial Sequence
  Description of Artificial Sequence: Synthetic oligonucleotide
accacaaccucuaaccucc

SEQ ID NO: 1778524 - RNA, 19 nt, Artificial Sequence
  Description of Artificial Sequence: Synthetic oligonucleotide
aaaggaauucugccugguc

SEQ ID NO: 1778525 - RNA, 19 nt, Artificial Sequence
  Description of Artificial Sequence: Synthetic oligonucleotide
aguuacagcaacugcuuag

SEQ ID NO: 1778526 - RNA, 19 nt, Artificial Sequence
  Description of Artificial Sequence: Synthetic oligonucleotide
aagacgcaguuacagcaac

SEQ ID NO: 1778527 - RNA, 19 nt, Artificial Sequence
  Description of Artificial Sequence: Synthetic oligonucleotide
agagaugcgauauuguaaa

SEQ ID NO: 1778528 - RNA, 19 nt, Artificial Sequence
  Description of Artificial Sequence: Synthetic oligonucleotide
augaaggucugucauaacu

SEQ ID NO: 1778529 - RNA, 19 nt, Artificial Sequence
  Description of Artificial Sequence: Synthetic oligonucleotide
cuuggcucuaugacgaugc

SEQ ID NO: 1778530 - RNA, 19 nt, Artificial Sequence
  Description of Artificial Sequence: Synthetic oligonucleotide
aauuagccuuccucacccc

SEQ ID NO: 1778531 - RNA, 19 nt, Artificial Sequence
  Description of Artificial Sequence: Synthetic oligonucleotide
uguucgaauuuccagccgu

SEQ ID NO: 1778532 - RNA, 19 nt, Artificial Sequence
  Description of Artificial Sequence: Synthetic oligonucleotide
cuagucuguacccaucuag

SEQ ID NO: 1778533 - RNA, 19 nt, Artificial Sequence
  Description of Artificial Sequence: Synthetic oligonucleotide
agucuguacccaucuagac

SEQ ID NO: 1778534 - RNA, 19 nt, Artificial Sequence
  Description of Artificial Sequence: Synthetic oligonucleotide
gucuguacccaucuagacg

SEQ ID NO: 1778535 - RNA, 19 nt, Artificial Sequence
  Description of Artificial Sequence: Synthetic oligonucleotide
gaugcgauauuguaaaacu

SEQ ID NO: 1778536 - RNA, 19 nt, Artificial Sequence
  Description of Artificial Sequence: Synthetic oligonucleotide
uccuuaaccagccgcacga

SEQ ID NO: 1778537 - RNA, 19 nt, Artificial Sequence
  Description of Artificial Sequence: Synthetic oligonucleotide
caucuagacgguuuucagg

SEQ ID NO: 1778538 - RNA, 19 nt, Artificial Sequence
  Description of Artificial Sequence: Synthetic oligonucleotide
uuuaguucucuggagacaa

SEQ ID NO: 1778539 - RNA, 19 nt, Artificial Sequence
  Description of Artificial Sequence: Synthetic oligonucleotide
uuaugaaggucugucauaa

SEQ ID NO: 1778540 - RNA, 19 nt, Artificial Sequence
  Description of Artificial Sequence: Synthetic oligonucleotide
acggaauuagccuuccuca

SEQ ID NO: 1778541 - RNA, 19 nt, Artificial Sequence
  Description of Artificial Sequence: Synthetic oligonucleotide
caaucacagaaacacuacc

SEQ ID NO: 1778542 - RNA, 19 nt, Artificial Sequence
  Description of Artificial Sequence: Synthetic oligonucleotide
acagaaacacuaccaccac

SEQ ID NO: 1778543 - RNA, 19 nt, Artificial Sequence
  Description of Artificial Sequence: Synthetic oligonucleotide
cacgcaugggaacagggcg

SEQ ID NO: 1778544 - RNA, 19 nt, Artificial Sequence
  Description of Artificial Sequence: Synthetic oligonucleotide
cuuuuaguugugacaacac

SEQ ID NO: 1778545 - RNA, 19 nt, Artificial Sequence
  Description of Artificial Sequence: Synthetic oligonucleotide
guuacuguacaggugcagg

SEQ ID NO: 1778546 - RNA, 19 nt, Artificial Sequence
  Description of Artificial Sequence: Synthetic oligonucleotide
acgguuuucagggagcuag

SEQ ID NO: 1778547 - RNA, 19 nt, Artificial Sequence
  Description of Artificial Sequence: Synthetic oligonucleotide
acauccgagagccucucuc

SEQ ID NO: 1778548 - RNA, 19 nt, Artificial Sequence
  Description of Artificial Sequence: Synthetic oligonucleotide
cagccgaucacucucuugc

SEQ ID NO: 1778549 - RNA, 19 nt, Artificial Sequence
  Description of Artificial Sequence: Synthetic oligonucleotide
uguagcuucgcuucgcuuu

SEQ ID NO: 1778550 - RNA, 19 nt, Artificial Sequence
  Description of Artificial Sequence: Synthetic oligonucleotide
ucggagguaguuuaggaua

SEQ ID NO: 1778551 - RNA, 19 nt, Artificial Sequence
  Description of Artificial Sequence: Synthetic oligonucleotide
caggacucgguacacgucg

SEQ ID NO: 1778552 - RNA, 19 nt, Artificial Sequence
  Description of Artificial Sequence: Synthetic oligonucleotide
aaacacuaccaccacuuuu

SEQ ID NO: 1778553 - RNA, 19 nt, Artificial Sequence
  Description of Artificial Sequence: Synthetic oligonucleotide
ucguauccuuuccuuaacc

SEQ ID NO: 1778554 - RNA, 19 nt, Artificial Sequence
  Description of Artificial Sequence: Synthetic oligonucleotide
aacugcuuaguaccgucgu

SEQ ID NO: 1778555 - RNA, 19 nt, Artificial Sequence
  Description of Artificial Sequence: Synthetic oligonucleotide
ugcuuaguaccgucguccg

SEQ ID NO: 1778556 - RNA, 19 nt, Artificial Sequence
  Description of Artificial Sequence: Synthetic oligonucleotide
ugucauaacuggcuagaaa

SEQ ID NO: 1778557 - RNA, 19 nt, Artificial Sequence
  Description of Artificial Sequence: Synthetic oligonucleotide
acgcaguuacagcaacugc

SEQ ID NO: 1778558 - RNA, 19 nt, Artificial Sequence
  Description of Artificial Sequence: Synthetic oligonucleotide
uucccuguuuacauccgag

SEQ ID NO: 1778559 - RNA, 19 nt, Artificial Sequence
  Description of Artificial Sequence: Synthetic oligonucleotide
augauaaguuuuccauguc

SEQ ID NO: 1778560 - RNA, 19 nt, Artificial Sequence
  Description of Artificial Sequence: Synthetic oligonucleotide
guuuucagggagcuagacc

SEQ ID NO: 1778561 - RNA, 19 nt, Artificial Sequence
  Description of Artificial Sequence: Synthetic oligonucleotide
agcucaguuacuguacagg

SEQ ID NO: 1778562 - RNA, 19 nt, Artificial Sequence
  Description of Artificial Sequence: Synthetic oligonucleotide
cuagacgguuuucagggag

SEQ ID NO: 1778563 - RNA, 19 nt, Artificial Sequence
  Description of Artificial Sequence: Synthetic oligonucleotide
ucugucauaacuggcuaga

SEQ ID NO: 1778564 - RNA, 19 nt, Artificial Sequence
  Description of Artificial Sequence: Synthetic oligonucleotide
acucgguacacgucgcuuc

SEQ ID NO: 1778565 - RNA, 19 nt, Artificial Sequence
  Description of Artificial Sequence: Synthetic oligonucleotide
uugguagaauuauuuaguu

SEQ ID NO: 1778566 - RNA, 19 nt, Artificial Sequence
  Description of Artificial Sequence: Synthetic oligonucleotide
uucgcuucgcuuugcagca

SEQ ID NO: 1778567 - RNA, 19 nt, Artificial Sequence
  Description of Artificial Sequence: Synthetic oligonucleotide
guaguuuaggauaggacca

SEQ ID NO: 1778568 - RNA, 19 nt, Artificial Sequence
  Description of Artificial Sequence: Synthetic oligonucleotide
guacacgucgcuucacggg

SEQ ID NO: 1778569 - RNA, 19 nt, Artificial Sequence
  Description of Artificial Sequence: Synthetic oligonucleotide
aggauaggaccaaaguagg

SEQ ID NO: 1778570 - RNA, 19 nt, Artificial Sequence
  Description of Artificial Sequence: Synthetic oligonucleotide
agguaguuuaggauaggac

SEQ ID NO: 1778571 - RNA, 19 nt, Artificial Sequence
  Description of Artificial Sequence: Synthetic oligonucleotide
cuuaagcacagcacaggac

SEQ ID NO: 1778572 - RNA, 19 nt, Artificial Sequence
  Description of Artificial Sequence: Synthetic oligonucleotide
uaguugugacaacacggca

SEQ ID NO: 1778573 - RNA, 19 nt, Artificial Sequence
  Description of Artificial Sequence: Synthetic oligonucleotide
gguaaugauaaguuuucca

SEQ ID NO: 1778574 - RNA, 19 nt, Artificial Sequence
  Description of Artificial Sequence: Synthetic oligonucleotide
uagacgguuuucagggagc

SEQ ID NO: 1778575 - RNA, 19 nt, Artificial Sequence
  Description of Artificial Sequence: Synthetic oligonucleotide
acugcuuaguaccgucguc

SEQ ID NO: 1778576 - RNA, 19 nt, Artificial Sequence
  Description of Artificial Sequence: Synthetic oligonucleotide
cuuaguaccgucguccguc

SEQ ID NO: 1778577 - RNA, 19 nt, Artificial Sequence
  Description of Artificial Sequence: Synthetic oligonucleotide
agcuuccacggaauuagcc

SEQ ID NO: 1778578 - RNA, 19 nt, Artificial Sequence
  Description of Artificial Sequence: Synthetic oligonucleotide
gacgcaguuacagcaacug

SEQ ID NO: 1778579 - RNA, 19 nt, Artificial Sequence
  Description of Artificial Sequence: Synthetic oligonucleotide
aguaccgucguccguccag

SEQ ID NO: 1778580 - RNA, 19 nt, Artificial Sequence
  Description of Artificial Sequence: Synthetic oligonucleotide
acacucuuaagcacagcac

SEQ ID NO: 1778581 - RNA, 19 nt, Artificial Sequence
  Description of Artificial Sequence: Synthetic oligonucleotide
cugcuuaguaccgucgucc

SEQ ID NO: 1778582 - RNA, 19 nt, Artificial Sequence
  Description of Artificial Sequence: Synthetic oligonucleotide
cacucuuaagcacagcaca

SEQ ID NO: 1778583 - RNA, 19 nt, Artificial Sequence
  Description of Artificial Sequence: Synthetic oligonucleotide
auguucaagaagacaauca

SEQ ID NO: 1778584 - RNA, 19 nt, Artificial Sequence
  Description of Artificial Sequence: Synthetic oligonucleotide
aggcgcgcugucuucgucc

SEQ ID NO: 1778585 - RNA, 19 nt, Artificial Sequence
  Description of Artificial Sequence: Synthetic oligonucleotide
cauguucaagaagacaauc

SEQ ID NO: 1778586 - RNA, 19 nt, Artificial Sequence
  Description of Artificial Sequence: Synthetic oligonucleotide
cacacucuuaagcacagca

SEQ ID NO: 1778587 - RNA, 19 nt, Artificial Sequence
  Description of Artificial Sequence: Synthetic oligonucleotide
gacggggccaaccagguaa

SEQ ID NO: 1778588 - RNA, 19 nt, Artificial Sequence
  Description of Artificial Sequence: Synthetic oligonucleotide
augcgauauuguaaaacuc

SEQ ID NO: 1778589 - RNA, 19 nt, Artificial Sequence
  Description of Artificial Sequence: Synthetic oligonucleotide
ugguaaugauaaguuuucc

SEQ ID NO: 1778590 - RNA, 19 nt, Artificial Sequence
  Description of Artificial Sequence: Synthetic oligonucleotide
cucaguuacuguacaggug

SEQ ID NO: 1778591 - RNA, 19 nt, Artificial Sequence
  Description of Artificial Sequence: Synthetic oligonucleotide
cucuuaagcacagcacagg

SEQ ID NO: 1778592 - RNA, 19 nt, Artificial Sequence
  Description of Artificial Sequence: Synthetic oligonucleotide
cauccgagagccucucucc

SEQ ID NO: 1778593 - RNA, 19 nt, Artificial Sequence
  Description of Artificial Sequence: Synthetic oligonucleotide
cacggaauuagccuuccuc

SEQ ID NO: 1778594 - RNA, 19 nt, Artificial Sequence
  Description of Artificial Sequence: Synthetic oligonucleotide
agccgaucacucucuugcc

SEQ ID NO: 1778595 - RNA, 19 nt, Artificial Sequence
  Description of Artificial Sequence: Synthetic oligonucleotide
ucuucguccgaggcgggcg

SEQ ID NO: 1778596 - RNA, 19 nt, Artificial Sequence
  Description of Artificial Sequence: Synthetic oligonucleotide
ugaugagcuguucgaauuu

SEQ ID NO: 1778597 - RNA, 19 nt, Artificial Sequence
  Description of Artificial Sequence: Synthetic oligonucleotide
acucuuaagcacagcacag

SEQ ID NO: 1778598 - RNA, 19 nt, Artificial Sequence
  Description of Artificial Sequence: Synthetic oligonucleotide
aaaguccguucucuuuggu

SEQ ID NO: 1778599 - RNA, 19 nt, Artificial Sequence
  Description of Artificial Sequence: Synthetic oligonucleotide
ucccuguuuacauccgaga

SEQ ID NO: 1778600 - RNA, 19 nt, Artificial Sequence
  Description of Artificial Sequence: Synthetic oligonucleotide
cagcacaccuucuucugcc

SEQ ID NO: 1778601 - RNA, 19 nt, Artificial Sequence
  Description of Artificial Sequence: Synthetic oligonucleotide
cuccgguuugcgcagacac

SEQ ID NO: 1778602 - RNA, 19 nt, Artificial Sequence
  Description of Artificial Sequence: Synthetic oligonucleotide
cuugacacugcaggacucg

SEQ ID NO: 1778603 - RNA, 19 nt, Artificial Sequence
  Description of Artificial Sequence: Synthetic oligonucleotide
cagauaggcuccagucucg

SEQ ID NO: 1778604 - RNA, 19 nt, Artificial Sequence
  Description of Artificial Sequence: Synthetic oligonucleotide
gaggacggggccaaccagg

SEQ ID NO: 1778605 - RNA, 19 nt, Artificial Sequence
  Description of Artificial Sequence: Synthetic oligonucleotide
guucaagaagacaaucaca

SEQ ID NO: 1778606 - RNA, 19 nt, Artificial Sequence
  Description of Artificial Sequence: Synthetic oligonucleotide
gcuguucgaauuuccagcc

SEQ ID NO: 1778607 - RNA, 19 nt, Artificial Sequence
  Description of Artificial Sequence: Synthetic oligonucleotide
ucgcuuugcagcagcucag

SEQ ID NO: 1778608 - RNA, 19 nt, Artificial Sequence
  Description of Artificial Sequence: Synthetic oligonucleotide
uuaguaccgucguccgucc

SEQ ID NO: 1778609 - RNA, 19 nt, Artificial Sequence
  Description of Artificial Sequence: Synthetic oligonucleotide
gcaacucuagucuguaccc

SEQ ID NO: 1778610 - RNA, 19 nt, Artificial Sequence
  Description of Artificial Sequence: Synthetic oligonucleotide
uccccguaaggcuccagcc

SEQ ID NO: 1778611 - RNA, 19 nt, Artificial Sequence
  Description of Artificial Sequence: Synthetic oligonucleotide
gguacacgucgcuucacgg

SEQ ID NO: 1778612 - RNA, 19 nt, Artificial Sequence
  Description of Artificial Sequence: Synthetic oligonucleotide
gaugccauugguagaauua

SEQ ID NO: 1778613 - RNA, 19 nt, Artificial Sequence
  Description of Artificial Sequence: Synthetic oligonucleotide
ggaauuagccuuccucacc

SEQ ID NO: 1778614 - RNA, 19 nt, Artificial Sequence
  Description of Artificial Sequence: Synthetic oligonucleotide
accgucguccguccagccc

SEQ ID NO: 1778615 - RNA, 19 nt, Artificial Sequence
  Description of Artificial Sequence: Synthetic oligonucleotide
gagagaugcgauauuguaa

SEQ ID NO: 1778616 - RNA, 19 nt, Artificial Sequence
  Description of Artificial Sequence: Synthetic oligonucleotide
uuugcgcagacaccacuuc

SEQ ID NO: 1778617 - RNA, 19 nt, Artificial Sequence
  Description of Artificial Sequence: Synthetic oligonucleotide
uaaccagccgcacgagaga

SEQ ID NO: 1778618 - RNA, 19 nt, Artificial Sequence
  Description of Artificial Sequence: Synthetic oligonucleotide
aaaugaagacgcaguuaca

SEQ ID NO: 1778619 - RNA, 19 nt, Artificial Sequence
  Description of Artificial Sequence: Synthetic oligonucleotide
gggagcuagacccuccucc

SEQ ID NO: 1778620 - RNA, 19 nt, Artificial Sequence
  Description of Artificial Sequence: Synthetic oligonucleotide
caugucggagguaguuuag

SEQ ID NO: 1778621 - RNA, 19 nt, Artificial Sequence
  Description of Artificial Sequence: Synthetic oligonucleotide
uucacggggccuugugaag

SEQ ID NO: 1778622 - RNA, 19 nt, Artificial Sequence
  Description of Artificial Sequence: Synthetic oligonucleotide
auuuaguucucuggagaca

SEQ ID NO: 1778623 - RNA, 19 nt, Artificial Sequence
  Description of Artificial Sequence: Synthetic oligonucleotide
uucgaauuuccagccguca

SEQ ID NO: 1778624 - RNA, 19 nt, Artificial Sequence
  Description of Artificial Sequence: Synthetic oligonucleotide
uccgguuugcgcagacacc

SEQ ID NO: 1778625 - RNA, 19 nt, Artificial Sequence
  Description of Artificial Sequence: Synthetic oligonucleotide
guagcuucgcuucgcuuug

SEQ ID NO: 1778626 - RNA, 19 nt, Artificial Sequence
  Description of Artificial Sequence: Synthetic oligonucleotide
cagcaacugcuuaguaccg

SEQ ID NO: 1778627 - RNA, 19 nt, Artificial Sequence
  Description of Artificial Sequence: Synthetic oligonucleotide
cuguucgaauuuccagccg

SEQ ID NO: 1778628 - RNA, 19 nt, Artificial Sequence
  Description of Artificial Sequence: Synthetic oligonucleotide
gagguaguuuaggauagga

SEQ ID NO: 1778629 - RNA, 19 nt, Artificial Sequence
  Description of Artificial Sequence: Synthetic oligonucleotide
ucggggugaagccacgcau

SEQ ID NO: 1778630 - RNA, 19 nt, Artificial Sequence
  Description of Artificial Sequence: Synthetic oligonucleotide
augucggagguaguuuagg

SEQ ID NO: 1778631 - RNA, 19 nt, Artificial Sequence
  Description of Artificial Sequence: Synthetic oligonucleotide
ccuguuuacauccgagagc

SEQ ID NO: 1778632 - RNA, 19 nt, Artificial Sequence
  Description of Artificial Sequence: Synthetic oligonucleotide
aaggguaccacaaccucua

SEQ ID NO: 1778633 - RNA, 19 nt, Artificial Sequence
  Description of Artificial Sequence: Synthetic oligonucleotide
gacgaugccauugguagaa

SEQ ID NO: 1778634 - RNA, 19 nt, Artificial Sequence
  Description of Artificial Sequence: Synthetic oligonucleotide
aggucugucauaacuggcu

SEQ ID NO: 1778635 - RNA, 19 nt, Artificial Sequence
  Description of Artificial Sequence: Synthetic oligonucleotide
auucccuguuuacauccga

SEQ ID NO: 1778636 - RNA, 19 nt, Artificial Sequence
  Description of Artificial Sequence: Synthetic oligonucleotide
ucaaucagauaggcuccag

SEQ ID NO: 1778637 - RNA, 19 nt, Artificial Sequence
  Description of Artificial Sequence: Synthetic oligonucleotide
cuguuaugaaggucuguca

SEQ ID NO: 1778638 - RNA, 19 nt, Artificial Sequence
  Description of Artificial Sequence: Synthetic oligonucleotide
ccuuuccuuaaccagccgc

SEQ ID NO: 1778639 - RNA, 19 nt, Artificial Sequence
  Description of Artificial Sequence: Synthetic oligonucleotide
ucuagucuguacccaucua

SEQ ID NO: 1778640 - RNA, 19 nt, Artificial Sequence
  Description of Artificial Sequence: Synthetic oligonucleotide
uuccacggaauuagccuuc

SEQ ID NO: 1778641 - RNA, 19 nt, Artificial Sequence
  Description of Artificial Sequence: Synthetic oligonucleotide
cuuugcagcagcucaguua

SEQ ID NO: 1778642 - RNA, 19 nt, Artificial Sequence
  Description of Artificial Sequence: Synthetic oligonucleotide
aggaggacggggccaacca

SEQ ID NO: 1778643 - RNA, 19 nt, Artificial Sequence
  Description of Artificial Sequence: Synthetic oligonucleotide
augggaacagggcggggcu

SEQ ID NO: 1778644 - RNA, 19 nt, Artificial Sequence
  Description of Artificial Sequence: Synthetic oligonucleotide
uacccaucuagacgguuuu

SEQ ID NO: 1778645 - RNA, 19 nt, Artificial Sequence
  Description of Artificial Sequence: Synthetic oligonucleotide
uccgagagccucucuccug

SEQ ID NO: 1778646 - RNA, 19 nt, Artificial Sequence
  Description of Artificial Sequence: Synthetic oligonucleotide
gcuguuaugaaggucuguc

SEQ ID NO: 1778647 - RNA, 19 nt, Artificial Sequence
  Description of Artificial Sequence: Synthetic oligonucleotide
acgcaugggaacagggcgg

SEQ ID NO: 1778648 - RNA, 19 nt, Artificial Sequence
  Description of Artificial Sequence: Synthetic oligonucleotide
cacuuuuaguugugacaac

SEQ ID NO: 1778649 - RNA, 19 nt, Artificial Sequence
  Description of Artificial Sequence: Synthetic oligonucleotide
agcuagacccuccuccuuu

SEQ ID NO: 1778650 - RNA, 19 nt, Artificial Sequence
  Description of Artificial Sequence: Synthetic oligonucleotide
ucacggggccuugugaagu

SEQ ID NO: 1778651 - RNA, 19 nt, Artificial Sequence
  Description of Artificial Sequence: Synthetic oligonucleotide
acucuagucuguacccauc

SEQ ID NO: 1778652 - RNA, 19 nt, Artificial Sequence
  Description of Artificial Sequence: Synthetic oligonucleotide
acuuggcucuaugacgaug

SEQ ID NO: 1778653 - RNA, 19 nt, Artificial Sequence
  Description of Artificial Sequence: Synthetic oligonucleotide
uggcucuaugacgaugcca

SEQ ID NO: 1778654 - RNA, 19 nt, Artificial Sequence
  Description of Artificial Sequence: Synthetic oligonucleotide
ugucuucguccgaggcggg

SEQ ID NO: 1778655 - RNA, 19 nt, Artificial Sequence
  Description of Artificial Sequence: Synthetic oligonucleotide
aaccagccgcacgagagau

SEQ ID NO: 1778656 - RNA, 19 nt, Artificial Sequence
  Description of Artificial Sequence: Synthetic oligonucleotide
cuucacggggccuugugaa

SEQ ID NO: 1778657 - RNA, 19 nt, Artificial Sequence
  Description of Artificial Sequence: Synthetic oligonucleotide
ugcugaugagcuguucgaa

SEQ ID NO: 1778658 - RNA, 19 nt, Artificial Sequence
  Description of Artificial Sequence: Synthetic oligonucleotide
cuucguccgaggcgggcgg

SEQ ID NO: 1778659 - RNA, 19 nt, Artificial Sequence
  Description of Artificial Sequence: Synthetic oligonucleotide
uccacggaauuagccuucc

SEQ ID NO: 1778660 - RNA, 19 nt, Artificial Sequence
  Description of Artificial Sequence: Synthetic oligonucleotide
caaccagguaagaaaugaa

SEQ ID NO: 1778661 - RNA, 19 nt, Artificial Sequence
  Description of Artificial Sequence: Synthetic oligonucleotide
accuaucagugcauguuca

SEQ ID NO: 1778662 - RNA, 19 nt, Artificial Sequence
  Description of Artificial Sequence: Synthetic oligonucleotide
cucuaggaccagguguagc

SEQ ID NO: 1778663 - RNA, 19 nt, Artificial Sequence
  Description of Artificial Sequence: Synthetic oligonucleotide
caucccagaugcuguuaug

SEQ ID NO: 1778664 - RNA, 19 nt, Artificial Sequence
  Description of Artificial Sequence: Synthetic oligonucleotide
cuuaaccagccgcacgaga

SEQ ID NO: 1778665 - RNA, 19 nt, Artificial Sequence
  Description of Artificial Sequence: Synthetic oligonucleotide
aagccacgcaugggaacag

SEQ ID NO: 1778666 - RNA, 19 nt, Artificial Sequence
  Description of Artificial Sequence: Synthetic oligonucleotide
agacgguuuucagggagcu

SEQ ID NO: 1778667 - RNA, 19 nt, Artificial Sequence
  Description of Artificial Sequence: Synthetic oligonucleotide
agcugcucagccgaucacu

SEQ ID NO: 1778668 - RNA, 19 nt, Artificial Sequence
  Description of Artificial Sequence: Synthetic oligonucleotide
guuacagcaacugcuuagu

SEQ ID NO: 1778669 - RNA, 19 nt, Artificial Sequence
  Description of Artificial Sequence: Synthetic oligonucleotide
agccgcacgagagaugcga

SEQ ID NO: 1778670 - RNA, 19 nt, Artificial Sequence
  Description of Artificial Sequence: Synthetic oligonucleotide
gagaugcgauauuguaaaa

SEQ ID NO: 1778671 - RNA, 19 nt, Artificial Sequence
  Description of Artificial Sequence: Synthetic oligonucleotide
ucauaggauuguggguccu

SEQ ID NO: 1778672 - RNA, 19 nt, Artificial Sequence
  Description of Artificial Sequence: Synthetic oligonucleotide
uccaugucggagguaguuu

SEQ ID NO: 1778673 - RNA, 19 nt, Artificial Sequence
  Description of Artificial Sequence: Synthetic oligonucleotide
acgagagaugcgauauugu

SEQ ID NO: 1778674 - RNA, 19 nt, Artificial Sequence
  Description of Artificial Sequence: Synthetic oligonucleotide
gcaacugcuuaguaccguc

SEQ ID NO: 1778675 - RNA, 19 nt, Artificial Sequence
  Description of Artificial Sequence: Synthetic oligonucleotide
aguuuaggauaggaccaaa

SEQ ID NO: 1778676 - RNA, 19 nt, Artificial Sequence
  Description of Artificial Sequence: Synthetic oligonucleotide
agcaacugcuuaguaccgu

SEQ ID NO: 1778677 - RNA, 19 nt, Artificial Sequence
  Description of Artificial Sequence: Synthetic oligonucleotide
gagccucucuccugaagaa

SEQ ID NO: 1778678 - RNA, 19 nt, Artificial Sequence
  Description of Artificial Sequence: Synthetic oligonucleotide
guaccacaaccucuaaccu

SEQ ID NO: 1778679 - RNA, 19 nt, Artificial Sequence
  Description of Artificial Sequence: Synthetic oligonucleotide
ccagccgcacgagagaugc

SEQ ID NO: 1778680 - RNA, 19 nt, Artificial Sequence
  Description of Artificial Sequence: Synthetic oligonucleotide
cagaggcgcgcugucuucg

SEQ ID NO: 1778681 - RNA, 19 nt, Artificial Sequence
  Description of Artificial Sequence: Synthetic oligonucleotide
cucaccccaagccauuaaa

SEQ ID NO: 1778682 - RNA, 19 nt, Artificial Sequence
  Description of Artificial Sequence: Synthetic oligonucleotide
cccguaaggcuccagccag

SEQ ID NO: 1778683 - RNA, 19 nt, Artificial Sequence
  Description of Artificial Sequence: Synthetic oligonucleotide
uccguucucuuugguccag

SEQ ID NO: 1778684 - RNA, 19 nt, Artificial Sequence
  Description of Artificial Sequence: Synthetic oligonucleotide
cggagguaguuuaggauag

SEQ ID NO: 1778685 - RNA, 19 nt, Artificial Sequence
  Description of Artificial Sequence: Synthetic oligonucleotide
cauaggauuguggguccuc

SEQ ID NO: 1778686 - RNA, 19 nt, Artificial Sequence
  Description of Artificial Sequence: Synthetic oligonucleotide
cacaaccucuaaccuccug

SEQ ID NO: 1778687 - RNA, 19 nt, Artificial Sequence
  Description of Artificial Sequence: Synthetic oligonucleotide
guaccgucguccguccagc

SEQ ID NO: 1778688 - RNA, 19 nt, Artificial Sequence
  Description of Artificial Sequence: Synthetic oligonucleotide
gguaagaaaugaagacgca

SEQ ID NO: 1778689 - RNA, 19 nt, Artificial Sequence
  Description of Artificial Sequence: Synthetic oligonucleotide
gcucaguuacuguacaggu

SEQ ID NO: 1778690 - RNA, 19 nt, Artificial Sequence
  Description of Artificial Sequence: Synthetic oligonucleotide
uguacccaucuagacgguu

SEQ ID NO: 1778691 - RNA, 19 nt, Artificial Sequence
  Description of Artificial Sequence: Synthetic oligonucleotide
cucgguacacgucgcuuca

SEQ ID NO: 1778692 - RNA, 19 nt, Artificial Sequence
  Description of Artificial Sequence: Synthetic oligonucleotide
ggcgcgcugucuucguccg

SEQ ID NO: 1778693 - RNA, 19 nt, Artificial Sequence
  Description of Artificial Sequence: Synthetic oligonucleotide
uccguccagcccugcuaag

SEQ ID NO: 1778694 - RNA, 19 nt, Artificial Sequence
  Description of Artificial Sequence: Synthetic oligonucleotide
cucuagucuguacccaucu

SEQ ID NO: 1778695 - RNA, 19 nt, Artificial Sequence
  Description of Artificial Sequence: Synthetic oligonucleotide
uaccgucguccguccagcc

SEQ ID NO: 1778696 - RNA, 19 nt, Artificial Sequence
  Description of Artificial Sequence: Synthetic oligonucleotide
ccacgcaugggaacagggc

SEQ ID NO: 1778697 - RNA, 19 nt, Artificial Sequence
  Description of Artificial Sequence: Synthetic oligonucleotide
ggaggacggggccaaccag

SEQ ID NO: 1778698 - RNA, 19 nt, Artificial Sequence
  Description of Artificial Sequence: Synthetic oligonucleotide
caguuacuguacaggugca

SEQ ID NO: 1778699 - RNA, 19 nt, Artificial Sequence
  Description of Artificial Sequence: Synthetic oligonucleotide
ucguccguccagcccugcu

SEQ ID NO: 1778700 - RNA, 19 nt, Artificial Sequence
  Description of Artificial Sequence: Synthetic oligonucleotide
caaucagauaggcuccagu

SEQ ID NO: 1778701 - RNA, 19 nt, Artificial Sequence
  Description of Artificial Sequence: Synthetic oligonucleotide
caaccucuaaccuccugcu

SEQ ID NO: 1778702 - RNA, 19 nt, Artificial Sequence
  Description of Artificial Sequence: Synthetic oligonucleotide
agccacgcaugggaacagg

SEQ ID NO: 1778703 - RNA, 19 nt, Artificial Sequence
  Description of Artificial Sequence: Synthetic oligonucleotide
uccuccgguuugcgcagac

SEQ ID NO: 1778704 - RNA, 19 nt, Artificial Sequence
  Description of Artificial Sequence: Synthetic oligonucleotide
agacgcaguuacagcaacu

SEQ ID NO: 1778705 - RNA, 19 nt, Artificial Sequence
  Description of Artificial Sequence: Synthetic oligonucleotide
guccguucucuuuggucca

SEQ ID NO: 1778706 - RNA, 19 nt, Artificial Sequence
  Description of Artificial Sequence: Synthetic oligonucleotide
gaaacacuaccaccacuuu

SEQ ID NO: 1778707 - RNA, 19 nt, Artificial Sequence
  Description of Artificial Sequence: Synthetic oligonucleotide
gaacuucaaauucccuguu

SEQ ID NO: 1778708 - RNA, 19 nt, Artificial Sequence
  Description of Artificial Sequence: Synthetic oligonucleotide
caacucuagucuguaccca

SEQ ID NO: 1778709 - RNA, 19 nt, Artificial Sequence
  Description of Artificial Sequence: Synthetic oligonucleotide
ggcucuaugacgaugccau

SEQ ID NO: 1778710 - RNA, 19 nt, Artificial Sequence
  Description of Artificial Sequence: Synthetic oligonucleotide
gccacgcaugggaacaggg

SEQ ID NO: 1778711 - RNA, 19 nt, Artificial Sequence
  Description of Artificial Sequence: Synthetic oligonucleotide
uucguccgaggcgggcggg

SEQ ID NO: 1778712 - RNA, 19 nt, Artificial Sequence
  Description of Artificial Sequence: Synthetic oligonucleotide
agcccugcuaaggguacca

SEQ ID NO: 1778713 - RNA, 19 nt, Artificial Sequence
  Description of Artificial Sequence: Synthetic oligonucleotide
agaggcgcgcugucuucgu

SEQ ID NO: 1778714 - RNA, 19 nt, Artificial Sequence
  Description of Artificial Sequence: Synthetic oligonucleotide
ucguccgaggcgggcgggg

SEQ ID NO: 1778715 - RNA, 19 nt, Artificial Sequence
  Description of Artificial Sequence: Synthetic oligonucleotide
guccguccagcccugcuaa

SEQ ID NO: 1778716 - RNA, 19 nt, Artificial Sequence
  Description of Artificial Sequence: Synthetic oligonucleotide
cguauccuuuccuuaacca

SEQ ID NO: 1778717 - RNA, 19 nt, Artificial Sequence
  Description of Artificial Sequence: Synthetic oligonucleotide
cacuucucuaggaccaggu

SEQ ID NO: 1778718 - RNA, 19 nt, Artificial Sequence
  Description of Artificial Sequence: Synthetic oligonucleotide
cagaaacacuaccaccacu

SEQ ID NO: 1778719 - RNA, 19 nt, Artificial Sequence
  Description of Artificial Sequence: Synthetic oligonucleotide
acggggccuugugaaguuc

SEQ ID NO: 1778720 - RNA, 19 nt, Artificial Sequence
  Description of Artificial Sequence: Synthetic oligonucleotide
ccugcucgaggcuggggcc

SEQ ID NO: 1778721 - RNA, 19 nt, Artificial Sequence
  Description of Artificial Sequence: Synthetic oligonucleotide
guacaggugcagggguccc

SEQ ID NO: 1778722 - RNA, 19 nt, Artificial Sequence
  Description of Artificial Sequence: Synthetic oligonucleotide
cggaauuagccuuccucac

SEQ ID NO: 1778723 - RNA, 19 nt, Artificial Sequence
  Description of Artificial Sequence: Synthetic oligonucleotide
cucggggugaagccacgca

SEQ ID NO: 1778724 - RNA, 19 nt, Artificial Sequence
  Description of Artificial Sequence: Synthetic oligonucleotide
aggacggggccaaccaggu

SEQ ID NO: 1778725 - RNA, 19 nt, Artificial Sequence
  Description of Artificial Sequence: Synthetic oligonucleotide
acggggccaaccagguaag

SEQ ID NO: 1778726 - RNA, 19 nt, Artificial Sequence
  Description of Artificial Sequence: Synthetic oligonucleotide
agccucucuccugaagaau

SEQ ID NO: 1778727 - RNA, 19 nt, Artificial Sequence
  Description of Artificial Sequence: Synthetic oligonucleotide
gugaagccacgcaugggaa

SEQ ID NO: 1778728 - RNA, 19 nt, Artificial Sequence
  Description of Artificial Sequence: Synthetic oligonucleotide
uugugacaacacggcacau

SEQ ID NO: 1778729 - RNA, 19 nt, Artificial Sequence
  Description of Artificial Sequence: Synthetic oligonucleotide
ucgguacacgucgcuucac

SEQ ID NO: 1778730 - RNA, 19 nt, Artificial Sequence
  Description of Artificial Sequence: Synthetic oligonucleotide
gcuucacggggccuuguga

SEQ ID NO: 1778731 - RNA, 19 nt, Artificial Sequence
  Description of Artificial Sequence: Synthetic oligonucleotide
gaggcgcgcugucuucguc

SEQ ID NO: 1778732 - RNA, 19 nt, Artificial Sequence
  Description of Artificial Sequence: Synthetic oligonucleotide
ucgcuucgcuuugcagcag

SEQ ID NO: 1778733 - RNA, 19 nt, Artificial Sequence
  Description of Artificial Sequence: Synthetic oligonucleotide
cagcugcucagccgaucac

SEQ ID NO: 1778734 - RNA, 19 nt, Artificial Sequence
  Description of Artificial Sequence: Synthetic oligonucleotide
gucuucguccgaggcgggc

SEQ ID NO: 1778735 - RNA, 19 nt, Artificial Sequence
  Description of Artificial Sequence: Synthetic oligonucleotide
cagccgcacgagagaugcg

SEQ ID NO: 1778736 - RNA, 19 nt, Artificial Sequence
  Description of Artificial Sequence: Synthetic oligonucleotide
cgguacacgucgcuucacg

SEQ ID NO: 1778737 - RNA, 19 nt, Artificial Sequence
  Description of Artificial Sequence: Synthetic oligonucleotide
cugucauaacuggcuagaa

SEQ ID NO: 1778738 - RNA, 19 nt, Artificial Sequence
  Description of Artificial Sequence: Synthetic oligonucleotide
ggaauucugccuggucuuc

SEQ ID NO: 1778739 - RNA, 19 nt, Artificial Sequence
  Description of Artificial Sequence: Synthetic oligonucleotide
gguuugcgcagacaccacu

SEQ ID NO: 1778740 - RNA, 19 nt, Artificial Sequence
  Description of Artificial Sequence: Synthetic oligonucleotide
ccgguuugcgcagacacca

SEQ ID NO: 1778741 - RNA, 19 nt, Artificial Sequence
  Description of Artificial Sequence: Synthetic oligonucleotide
cgcaguuacagcaacugcu

SEQ ID NO: 1778742 - RNA, 19 nt, Artificial Sequence
  Description of Artificial Sequence: Synthetic oligonucleotide
ccguaaggcuccagccagg
